United States Patent Application Publication US 2013/0267429 A1 - sequence listing, part 19

SEQ ID NO: 431069 - DNA, 55 bp, Artificial
  Synthetic oligonucleotide
ggtccccagtggctagatatgcaatatctaggaagctgcatctgtggtccccagc

SEQ ID NO: 431070 - DNA, 51 bp, Artificial
  Synthetic oligonucleotide
ggtcccccctcgtgtccagcccctccccgcgtctagagaagggggactccg

SEQ ID NO: 431071 - DNA, 56 bp, Artificial
  Synthetic oligonucleotide
ggtccccgaaacttcctaccgtcactctactaacgcgatctgacacgagatggtag

SEQ ID NO: 431072 - DNA, 55 bp, Artificial
  Synthetic oligonucleotide
ggtccccgtgaaactgcgtgtgtggtccagtctcatcgactgggatctgtacgtg

SEQ ID NO: 431073 - DNA, 50 bp, Artificial
  Synthetic oligonucleotide
ggtccccgttggtcctaccccggtgtgattccttcggctgcgggaccttt

SEQ ID NO: 431074 - DNA, 52 bp, Artificial
  Synthetic oligonucleotide
ggtcccctataaaacttagcccccaagtattgacgttaaacatgtgggatcc

SEQ ID NO: 431075 - DNA, 54 bp, Artificial
  Synthetic oligonucleotide
ggtcccctcaacctaatctttaaaacttacgggactatgctggtgaactcagat

SEQ ID NO: 431076 - DNA, 50 bp, Artificial
  Synthetic oligonucleotide
ggtcccctcactacgccaatttgcccttaccaaaacacgcaagtagttca

SEQ ID NO: 431077 - DNA, 57 bp, Artificial
  Synthetic oligonucleotide
ggtcccctcaggaagtagtaaatgcgctttcgcatagggagggggagatgttgccag

SEQ ID NO: 431078 - DNA, 55 bp, Artificial
  Synthetic oligonucleotide
ggtcccgaagtatagattccctccagctgacacttggtagccatagacacgttgg

SEQ ID NO: 431079 - DNA, 55 bp, Artificial
  Synthetic oligonucleotide
ggtcccgaggacatagcggttcttgagctgcaacccctggaccgtccaacttggc

SEQ ID NO: 431080 - DNA, 55 bp, Artificial
  Synthetic oligonucleotide
ggtcccgagggttgtggcacacctcgcaaagtctggggaatccaacgcgacgtca

SEQ ID NO: 431081 - DNA, 56 bp, Artificial
  Synthetic oligonucleotide
ggtcccgccgctagactatctgaacccgagcaattttgtgaaaacacaattactgg

SEQ ID NO: 431082 - DNA, 55 bp, Artificial
  Synthetic oligonucleotide
ggtcccgctgtggaaaagccttactgctggcactacccgcctagaccatgtgagg

SEQ ID NO: 431083 - DNA, 55 bp, Artificial
  Synthetic oligonucleotide
ggtcccggagtggccaccgatggtggatctcaacgacggttggtccgtgttcaac

SEQ ID NO: 431084 - DNA, 55 bp, Artificial
  Synthetic oligonucleotide
ggtcccggctaccgagtttggagagcactccgggccgaagggttgagtagcacac

SEQ ID NO: 431085 - DNA, 54 bp, Artificial
  Synthetic oligonucleotide
ggtcccggtactgtaggggtaattccccacctcactcgggagagtgccagtgta

SEQ ID NO: 431086 - DNA, 56 bp, Artificial
  Synthetic oligonucleotide
ggtcccgtataccaacatagcaccggcctcgttttacacgtgtcacaacacgtgga

SEQ ID NO: 431087 - DNA, 50 bp, Artificial
  Synthetic oligonucleotide
ggtcccgtatccagacgaaaatcgtatagttggtgcttgaaacacgtgcc

SEQ ID NO: 431088 - DNA, 55 bp, Artificial
  Synthetic oligonucleotide
ggtcccgtgttgaggacggtgtagagcagtccgtgcgtcggtacgtgtaggagga

SEQ ID NO: 431089 - DNA, 55 bp, Artificial
  Synthetic oligonucleotide
ggtcccgttcctggaaatcccctccagcatcactgtgcactaaccaacctctcgc

SEQ ID NO: 431090 - DNA, 50 bp, Artificial
  Synthetic oligonucleotide
ggtcccgtttctgacgcagatgatgagacccccactacagagtccacttt

SEQ ID NO: 431091 - DNA, 55 bp, Artificial
  Synthetic oligonucleotide
ggtccctaaaatagaacagcttaccaattaccaacaggctgctctcaagtggagg

SEQ ID NO: 431092 - DNA, 56 bp, Artificial
  Synthetic oligonucleotide
ggtccctaacatcggtagcaggccctgggtgagaggacaaagcggcagaataagtt

SEQ ID NO: 431093 - DNA, 55 bp, Artificial
  Synthetic oligonucleotide
ggtccctaacccttgactcaggctacttctctgctaaatgttatccaagagcatc

SEQ ID NO: 431094 - DNA, 59 bp, Artificial
  Synthetic oligonucleotide
ggtccctacttctatcaggatctaaactctgtgaagatctatggagtaggggctacgaa

SEQ ID NO: 431095 - DNA, 55 bp, Artificial
  Synthetic oligonucleotide
ggtccctatgactctttactatctaaatgggacaatgaccactggtacccaacct

SEQ ID NO: 431096 - DNA, 60 bp, Artificial
  Synthetic oligonucleotide
ggtccctcaatgtcaatccatgtagtgtcatgaactgagagggactcaattgaccttttg

SEQ ID NO: 431097 - DNA, 58 bp, Artificial
  Synthetic oligonucleotide
ggtccctcagtatggatacctcaccctgaacaacggaagtcaagcggtgggacgctca

SEQ ID NO: 431098 - DNA, 60 bp, Artificial
  Synthetic oligonucleotide
ggtccctcgctgatttggacaggaggctagacaacgcccctaaggacaccagagcagctc

SEQ ID NO: 431099 - DNA, 50 bp, Artificial
  Synthetic oligonucleotide
ggtccctgcactccgggaattcatgtgggacgtaagtcgctccgaagggg

SEQ ID NO: 431100 - DNA, 60 bp, Artificial
  Synthetic oligonucleotide
ggtccctgtgcgtgaatccataatttgcacagtccaagctcacgtagacagaacacccgc

SEQ ID NO: 431101 - DNA, 56 bp, Artificial
  Synthetic oligonucleotide
ggtccctgttgtcaccagttacactatactccaccggaccattatcctttgaaata

SEQ ID NO: 431102 - DNA, 55 bp, Artificial
  Synthetic oligonucleotide
ggtcccttgcagagtctattaataatgatctggggttgtctaggaccagtggcaa

SEQ ID NO: 431103 - DNA, 54 bp, Artificial
  Synthetic oligonucleotide
ggtccgaccgagctctacccgtttgcctccctcaaatccctctttgggacagac

SEQ ID NO: 431104 - DNA, 56 bp, Artificial
  Synthetic oligonucleotide
ggtccgagcgggaggatagtcctccgcaagccgagtaagcagcgggttttcgctcg

SEQ ID NO: 431105 - DNA, 55 bp, Artificial
  Synthetic oligonucleotide
ggtccgagctcagcccattgctgctgtccaccacacaatggcaggtccttccgtg

SEQ ID NO: 431106 - DNA, 55 bp, Artificial
  Synthetic oligonucleotide
ggtccgatgtacgtaccacggtacggacgttaatcgcacttccaacaccacgagc

SEQ ID NO: 431107 - DNA, 55 bp, Artificial
  Synthetic oligonucleotide
ggtccgattatgaccgtgattgaattcgaggatatagcttggcacttaggtgacc

SEQ ID NO: 431108 - DNA, 52 bp, Artificial
  Synthetic oligonucleotide
ggtccgattgtggcagcccgatttcattgggcgacgatgtccctaacagttg

SEQ ID NO: 431109 - DNA, 59 bp, Artificial
  Synthetic oligonucleotide
ggtccgcaaaacaagattcctcccagtggctggtgggacaagcagtgtatatattgagg

SEQ ID NO: 431110 - DNA, 60 bp, Artificial
  Synthetic oligonucleotide
ggtccgcaaatgtagagtgatcttcttcgttcatcaggacgtctgtcctgctaatatcag

SEQ ID NO: 431111 - DNA, 55 bp, Artificial
  Synthetic oligonucleotide
ggtccgcataggttcccagcagaggaacttgttatttgataccggggcggaccga

SEQ ID NO: 431112 - DNA, 54 bp, Artificial
  Synthetic oligonucleotide
ggtccgccatgaccccgagaacattgagctcggcacaaagagagtggttcagct

SEQ ID NO: 431113 - DNA, 53 bp, Artificial
  Synthetic oligonucleotide
ggtccgcgggtctcaagttaaacatcgacgaaaccctactcgtggacgcgacg

SEQ ID NO: 431114 - DNA, 60 bp, Artificial
  Synthetic oligonucleotide
ggtccgcggtatacagccgtcggatggagatgtttgtgccagtcctcgagaacgagcgac

SEQ ID NO: 431115 - DNA, 55 bp, Artificial
  Synthetic oligonucleotide
ggtccgcgtgagtacgtctgctcctaagcatcggagtgtgtgccaactgtcgggt

SEQ ID NO: 431116 - DNA, 55 bp, Artificial
  Synthetic oligonucleotide
ggtccgcgtggtagagatgatgaagcggagatgccaatatacgagattgtgagac

SEQ ID NO: 431117 - DNA, 55 bp, Artificial
  Synthetic oligonucleotide
ggtccgctatcgggctggacggtaccatttgctagccattcaaacggcaccccgg

SEQ ID NO: 431118 - DNA, 55 bp, Artificial
  Synthetic oligonucleotide
ggtccggaaccactagattccggtgccggtaacgatctcagttttatactatctg

SEQ ID NO: 431119 - DNA, 53 bp, Artificial
  Synthetic oligonucleotide
ggtccggaagaagagtttggacgctctctgatcaaacataacacatgtgttgt

SEQ ID NO: 431120 - DNA, 51 bp, Artificial
  Synthetic oligonucleotide
ggtccggatctggtactgggggtcgcactggatatgtccctcttagtacac

SEQ ID NO: 431121 - DNA, 55 bp, Artificial
  Synthetic oligonucleotide
ggtccggcctccagccttcgtttatcgacaaggagggacactctatggtagaggc

SEQ ID NO: 431122 - DNA, 55 bp, Artificial
  Synthetic oligonucleotide
ggtccgggtctttgagtggtgcaaccccatatgctcacctatcactgccgcagca

SEQ ID NO: 431123 - DNA, 55 bp, Artificial
  Synthetic oligonucleotide
ggtccgtaatcaccaagacttggtaacggtaggagctactctcgcccttctaggc

SEQ ID NO: 431124 - DNA, 56 bp, Artificial
  Synthetic oligonucleotide
ggtccgtagcgatggggagggatgctaggagttgggggagaccgaagcgaggagga

SEQ ID NO: 431125 - DNA, 53 bp, Artificial
  Synthetic oligonucleotide
ggtccgtattgtccggttgactttgaggatattccgttagggaaccgagacac

SEQ ID NO: 431126 - DNA, 54 bp, Artificial
  Synthetic oligonucleotide
ggtccgtgtatattcctaggaattcgttcgaagaattaatcctattaggtggaa

SEQ ID NO: 431127 - DNA, 54 bp, Artificial
  Synthetic oligonucleotide
ggtccgttacaagtccaaacgagaccccgagcgattcttagaattcttggagta

SEQ ID NO: 431128 - DNA, 55 bp, Artificial
  Synthetic oligonucleotide
ggtccgttcaaaatgtcgtcgtagctgacaatagactgcccgttttcgtcgtcgc

SEQ ID NO: 431129 - DNA, 57 bp, Artificial
  Synthetic oligonucleotide
ggtcctaaacccatacagggctacaacgattggctagaggagtacacttgttgcaag

SEQ ID NO: 431130 - DNA, 56 bp, Artificial
  Synthetic oligonucleotide
ggtcctaaatacccttaagaaatgaccagtctgaggctgtaaggtcgtccagattc

SEQ ID NO: 431131 - DNA, 54 bp, Artificial
  Synthetic oligonucleotide
ggtcctaagctcggcgatgagtatgcccacctactgggtccagcccttacacag

SEQ ID NO: 431132 - DNA, 57 bp, Artificial
  Synthetic oligonucleotide
ggtcctacagacctataagggaattgaattagaccatctgaaaatcattgcgtacgg

SEQ ID NO: 431133 - DNA, 52 bp, Artificial
  Synthetic oligonucleotide
ggtcctacatagtggagaaaccaaatcccgctaacggaatctgttacccggg

SEQ ID NO: 431134 - DNA, 57 bp, Artificial
  Synthetic oligonucleotide
ggtcctacatagtggagagacctggagcccaacatgggatatgttacccagggacat

SEQ ID NO: 431135 - DNA, 60 bp, Artificial
  Synthetic oligonucleotide
ggtcctacattgtcgaaagatcatcggctgtcaatggaatgtgttaccctgggagtgtag

SEQ ID NO: 431136 - DNA, 58 bp, Artificial
  Synthetic oligonucleotide
ggtcctaccgctccatttactattgctatgatagaaagtttgggtactcaagctttgc

SEQ ID NO: 431137 - DNA, 55 bp, Artificial
  Synthetic oligonucleotide
ggtcctaggaagcagttctggctatttctgtgagaaccttactatatcattcgtt

SEQ ID NO: 431138 - DNA, 60 bp, Artificial
  Synthetic oligonucleotide
ggtcctaggccatttgtggcctagagctctcagcatgtccggagcgttgaagcgcaagcg

SEQ ID NO: 431139 - DNA, 60 bp, Artificial
  Synthetic oligonucleotide
ggtcctagtgacatgtatgtacatgttggtaatctcatatacagaaacctacatctcttc

SEQ ID NO: 431140 - DNA, 55 bp, Artificial
  Synthetic oligonucleotide
ggtcctataattaatgctgcctcatttgtctgggatttaatcattaaggccaaag

SEQ ID NO: 431141 - DNA, 60 bp, Artificial
  Synthetic oligonucleotide
ggtcctatagacatcactatgaaagcactaatcccagaataagctcagaagtacacatcc

SEQ ID NO: 431142 - DNA, 55 bp, Artificial
  Synthetic oligonucleotide
ggtcctatcagcatttgatgagagaaggaacaagtacctggaagagcaccccagt

SEQ ID NO: 431143 - DNA, 54 bp, Artificial
  Synthetic oligonucleotide
ggtcctatctaagaccaaatctataatcactacccttcgacataaaatcgaaac

SEQ ID NO: 431144 - DNA, 50 bp, Artificial
  Synthetic oligonucleotide
ggtcctatgaaggcttgttgcccaactgcagaccggacgtcccacaattt

SEQ ID NO: 431145 - DNA, 51 bp, Artificial
  Synthetic oligonucleotide
ggtcctcaactggatacagtctatgtcagggataatcacatgcttttcgaa

SEQ ID NO: 431146 - DNA, 60 bp, Artificial
  Synthetic oligonucleotide
ggtcctcatattggcttaactccaaattctcagttgagcataagttttcaggtgccatta

SEQ ID NO: 431147 - DNA, 60 bp, Artificial
  Synthetic oligonucleotide
ggtcctcattcaaggaccttgatgtggatagttgtactgggagctattctaatctagcta

SEQ ID NO: 431148 - DNA, 57 bp, Artificial
  Synthetic oligonucleotide
ggtcctcatttacacattttattggagagtgtgaatgaaaactggagtaaaagtagc

SEQ ID NO: 431149 - DNA, 59 bp, Artificial
  Synthetic oligonucleotide
ggtcctccccggcccaactgccaccgggcacctatgagccagcatatctcggtggcaag

SEQ ID NO: 431150 - DNA, 51 bp, Artificial
  Synthetic oligonucleotide
ggtcctccggagacgtctacctgccccccctgcgtatccggatgacgttca

SEQ ID NO: 431151 - DNA, 55 bp, Artificial
  Synthetic oligonucleotide
ggtcctccttagagtggatctgtgatttgcattgtgtccccgacaaaatcgagcg

SEQ ID NO: 431152 - DNA, 55 bp, Artificial
  Synthetic oligonucleotide
ggtcctctgaattgtaaatcatgctggcagaagttcgacagcctggtcaggtgtc

SEQ ID NO: 431153 - DNA, 56 bp, Artificial
  Synthetic oligonucleotide
ggtcctctgcccactcctgcgcccgatctccgcaggttttactccgcaccttttcg

SEQ ID NO: 431154 - DNA, 55 bp, Artificial
  Synthetic oligonucleotide
ggtcctcttggttctcgtggctcaaatatataccctggattatcatgggaattgt

SEQ ID NO: 431155 - DNA, 60 bp, Artificial
  Synthetic oligonucleotide
ggtcctcttttcagtgagcttacaaggcaattacttgacagtattgactcaagcagattc

SEQ ID NO: 431156 - DNA, 56 bp, Artificial
  Synthetic oligonucleotide
ggtcctgaacctgccaacagggttcgacaaaccatacgtccgactagaggacgaga

SEQ ID NO: 431157 - DNA, 52 bp, Artificial
  Synthetic oligonucleotide
ggtcctgagacggtttcaggtaacggttacaggaggaccttccggatgtaag

SEQ ID NO: 431158 - DNA, 60 bp, Artificial
  Synthetic oligonucleotide
ggtcctgagggagatagggtatagtgagggagcaatctcactgattgagggaatcaatca

SEQ ID NO: 431159 - DNA, 55 bp, Artificial
  Synthetic oligonucleotide
ggtcctgcattgagtatcgaccaaatccaaacgccatgttataccaattcggcca

SEQ ID NO: 431160 - DNA, 59 bp, Artificial
  Synthetic oligonucleotide
ggtcctgcctcgttaaagtctctgatcttgtctggaagactgagtctcccgggtctagc

SEQ ID NO: 431161 - DNA, 55 bp, Artificial
  Synthetic oligonucleotide
ggtcctgcggtatgtacggtctcaatggacccgacatttacaaagggatttacca

SEQ ID NO: 431162 - DNA, 57 bp, Artificial
  Synthetic oligonucleotide
ggtcctgcgtacaaaggaaaagctggatatgccatcattcatgaggcatctaccaca

SEQ ID NO: 431163 - DNA, 55 bp, Artificial
  Synthetic oligonucleotide
ggtcctggacaaatgttctacgcaacaggtgagataataggagatataagagaag

SEQ ID NO: 431164 - DNA, 53 bp, Artificial
  Synthetic oligonucleotide
ggtcctggatctccatccaggagcggggaaaacaaggaaaattttgccacaga

SEQ ID NO: 431165 - DNA, 55 bp, Artificial
  Synthetic oligonucleotide
ggtcctggccgttcaacaacttgacaccgtagggacacgtggagcacgcgcactc

SEQ ID NO: 431166 - DNA, 53 bp, Artificial
  Synthetic oligonucleotide
ggtcctgggaaaggtgaaggccactttaataaaggaggccacaaaaattgcca

SEQ ID NO: 431167 - DNA, 55 bp, Artificial
  Synthetic oligonucleotide
ggtcctggggaatggtgggagcaatggagtctgtaatgagacgatagtgagggaa

SEQ ID NO: 431168 - DNA, 60 bp, Artificial
  Synthetic oligonucleotide
ggtcctggttctatacacgtggaggatctgcagacaacgtcagctatcagtatataggat

SEQ ID NO: 431169 - DNA, 55 bp, Artificial
  Synthetic oligonucleotide
ggtcctgtatacccgtggggacagatatgggacaagaaacctcatatggatcaca

SEQ ID NO: 431170 - DNA, 55 bp, Artificial
  Synthetic oligonucleotide
ggtcctgtggcaaccggtaggtgcagagaatataacgcaatggaacttgaaagat

SEQ ID NO: 431171 - DNA, 58 bp, Artificial
  Synthetic oligonucleotide
ggtccttaaataagctttcccatcacactctgcatattctctaggcattctggcacta

SEQ ID NO: 431172 - DNA, 55 bp, Artificial
  Synthetic oligonucleotide
ggtccttaccgagtcaaccctatctactgccttggcagaacttgccaccaaaagt

SEQ ID NO: 431173 - DNA, 55 bp, Artificial
  Synthetic oligonucleotide
ggtccttaggtggatcgggaagctgtataaactcagctttttgggggtgagagcc

SEQ ID NO: 431174 - DNA, 60 bp, Artificial
  Synthetic oligonucleotide
ggtccttgagaatttacttagctgatctaggtgacaaggagttatctcccatagatgggc

SEQ ID NO: 431175 - DNA, 58 bp, Artificial
  Synthetic oligonucleotide
ggtccttgtaaggttcagtcttacgatcagcggttcgactgtaagcacacgggcagtg

SEQ ID NO: 431176 - DNA, 50 bp, Artificial
  Synthetic oligonucleotide
ggtccttgttgttgaccgaaaacctcacttgggatcatctggatgtctcc

SEQ ID NO: 431177 - DNA, 55 bp, Artificial
  Synthetic oligonucleotide
ggtcctttcgggatactgagtcggatggggtctgtgataccgagtcccctgggtc

SEQ ID NO: 431178 - DNA, 55 bp, Artificial
  Synthetic oligonucleotide
ggtcctttgtatatccgatattacacgtggtagtggtattacccatcgcgttggt

SEQ ID NO: 431179 - DNA, 55 bp, Artificial
  Synthetic oligonucleotide
ggtcctttgtgtttctgatgtcactcgaggtactggaataactcatcgcactggg

SEQ ID NO: 431180 - DNA, 55 bp, Artificial
  Synthetic oligonucleotide
ggtccttttctccccggtgaagtcctcctgaggttccggacctacatgcgtcagc

SEQ ID NO: 431181 - DNA, 55 bp, Artificial
  Synthetic oligonucleotide
ggtccttttgaggctgagtggggaatcctactaagaatcactggtatcacagtcc

SEQ ID NO: 431182 - DNA, 55 bp, Artificial
  Synthetic oligonucleotide
ggtccttttggaccctggatggccaacgggagcctgctacagtataccatcaacc

SEQ ID NO: 431183 - DNA, 59 bp, Artificial
  Synthetic oligonucleotide
ggtcgaaaccactacgctacgcagcagccttagctacgccggagcttagctcgccaccg

SEQ ID NO: 431184 - DNA, 51 bp, Artificial
  Synthetic oligonucleotide
ggtcgaaaggttaaaatatggaaccttcggccccgttcacttccgaaatca

SEQ ID NO: 431185 - DNA, 59 bp, Artificial
  Synthetic oligonucleotide
ggtcgaagaatcggttatttgtgcactggtacttcccctcgaactggatgagcacgtga

SEQ ID NO: 431186 - DNA, 55 bp, Artificial
  Synthetic oligonucleotide
ggtcgaagaatctctgattcgtgcactggtacttaccttcgaattggataagcac

SEQ ID NO: 431187 - DNA, 60 bp, Artificial
  Synthetic oligonucleotide
ggtcgaagaatctgttgtttgtgcattggtattttccctcgaattggatgagcacgtgta

SEQ ID NO: 431188 - DNA, 55 bp, Artificial
  Synthetic oligonucleotide
ggtcgaagaatctttgattcgtgcacctgtattttccttcgaactggatgaggat

SEQ ID NO: 431189 - DNA, 53 bp, Artificial
  Synthetic oligonucleotide
ggtcgaagaggacgggaagatctcggtcgggccacgaacccgtgagggggcgc

SEQ ID NO: 431190 - DNA, 55 bp, Artificial
  Synthetic oligonucleotide
ggtcgaagtgatcaatagatatgttacgagcgccgacagggtgagatacgattcc

SEQ ID NO: 431191 - DNA, 50 bp, Artificial
  Synthetic oligonucleotide
ggtcgaatataagaaaacgcgcgcgagtttccactcccggcgcgaaaatt

SEQ ID NO: 431192 - DNA, 60 bp, Artificial
  Synthetic oligonucleotide
ggtcgaatcaaggtctctggacatatttaatatgtactctgctaagttcagacgtgttca

SEQ ID NO: 431193 - DNA, 55 bp, Artificial
  Synthetic oligonucleotide
ggtcgaatccgtaccttagagttcgaacaacgatatgacatgtcgaaccaacgag

SEQ ID NO: 431194 - DNA, 53 bp, Artificial
  Synthetic oligonucleotide
ggtcgaattacacagaattaagaccttcgagaaggcgctagcagattccacag

SEQ ID NO: 431195 - DNA, 55 bp, Artificial
  Synthetic oligonucleotide
ggtcgaatttagtccctggtgcagatacacagaaaaggtccttacagcgaatctg

SEQ ID NO: 431196 - DNA, 55 bp, Artificial
  Synthetic oligonucleotide
ggtcgaccctacaatcagaccttggagcaggtagtagatcctgaggtagctttac

SEQ ID NO: 431197 - DNA, 54 bp, Artificial
  Synthetic oligonucleotide
ggtcgaccgggaagggtacatataaaagcaaaccgtgtggtcagcacagtagca

SEQ ID NO: 431198 - DNA, 55 bp, Artificial
  Synthetic oligonucleotide
ggtcgacctcttaccactgttcagcagtactctaagacattctatgtgctcccac

SEQ ID NO: 431199 - DNA, 60 bp, Artificial
  Synthetic oligonucleotide
ggtcgacgcttagcaatcgatatgccgcgtaacgcgctgacttcgtttgctgtcaatcca

SEQ ID NO: 431200 - DNA, 55 bp, Artificial
  Synthetic oligonucleotide
ggtcgacggatacggacaagtagttataggtaatacgctcattaagtacgccgcc

SEQ ID NO: 431201 - DNA, 55 bp, Artificial
  Synthetic oligonucleotide
ggtcgacgggttcacttgcacaggggtagtcaccgaggcagagacctacacgaat

SEQ ID NO: 431202 - DNA, 60 bp, Artificial
  Synthetic oligonucleotide
ggtcgacgtcatcaatgacgttgtaccatgcatcgttgctgtacacctttggactcagat

SEQ ID NO: 431203 - DNA, 58 bp, Artificial
  Synthetic oligonucleotide
ggtcgactataactcctccgtgagctcgtcagttttgcagaagcgactccactgtggc

SEQ ID NO: 431204 - DNA, 55 bp, Artificial
  Synthetic oligonucleotide
ggtcgagaaacggtacaccagcaaacggtgtcctcgcgatgtgacgcactacctc

SEQ ID NO: 431205 - DNA, 57 bp, Artificial
  Synthetic oligonucleotide
ggtcgagaatcggccaattactagggtcatgggaagggcctcgcactgtaagggtgc

SEQ ID NO: 431206 - DNA, 60 bp, Artificial
  Synthetic oligonucleotide
ggtcgagacactaaagctggagagttcttgtaattttgatctacataccagtacagcagg

SEQ ID NO: 431207 - DNA, 57 bp, Artificial
  Synthetic oligonucleotide
ggtcgagagcttcttctttggataaagaacaattgggatatgtgaggaaatagttct

SEQ ID NO: 431208 - DNA, 60 bp, Artificial
  Synthetic oligonucleotide
ggtcgagagttgcatcttgtagctgatgcaaatgtctatatgggtattcctctatcacgt

SEQ ID NO: 431209 - DNA, 55 bp, Artificial
  Synthetic oligonucleotide
ggtcgagcaaagcccagacatcactaagctcacagaacaattggacaaagtccat

SEQ ID NO: 431210 - DNA, 55 bp, Artificial
  Synthetic oligonucleotide
ggtcgagcaagtgatcattactttaagtataatgctaccacaggaatggaagcgc

SEQ ID NO: 431211 - DNA, 56 bp, Artificial
  Synthetic oligonucleotide
ggtcgagcacggatccagaaaggggggatcgtggacatgtcagcagccgggtgcct

SEQ ID NO: 431212 - DNA, 55 bp, Artificial
  Synthetic oligonucleotide
ggtcgagccacattcatagtgagaaacaagaccactaacaaagagtgcaggcagg

SEQ ID NO: 431213 - DNA, 54 bp, Artificial
  Synthetic oligonucleotide
ggtcgagcccggcaggtccttagcgaaaaaacggggtgtgctcgcgaactctac

SEQ ID NO: 431214 - DNA, 55 bp, Artificial
  Synthetic oligonucleotide
ggtcgagggtatggaagtccaaggctccgatgggacttatcctaaagaggcttgc

SEQ ID NO: 431215 - DNA, 54 bp, Artificial
  Synthetic oligonucleotide
ggtcgagtgtggtggtctaacccttacccgtgtttacgaggcgcgctaattgcg

SEQ ID NO: 431216 - DNA, 60 bp, Artificial
  Synthetic oligonucleotide
ggtcgatacgttattcaccatgacagaggagcaattgtatattatgatccgcttaagttg

SEQ ID NO: 431217 - DNA, 60 bp, Artificial
  Synthetic oligonucleotide
ggtcgatagcgcttgcgttgagcgggcttcggccatattagcctgactttggctatgtcc

SEQ ID NO: 431218 - DNA, 60 bp, Artificial
  Synthetic oligonucleotide
ggtcgatatcgaaggatgcacatcactttctaacaagcgcttcaactgttgggctacatt

SEQ ID NO: 431219 - DNA, 55 bp, Artificial
  Synthetic oligonucleotide
ggtcgatgaagtacttcaaaggatatgtggacggatacaagtctggtgtacgcga

SEQ ID NO: 431220 - DNA, 53 bp, Artificial
  Synthetic oligonucleotide
ggtcgatgcaaaccgcgattggcgggccgtggatgacggtcaacgagggccgc

SEQ ID NO: 431221 - DNA, 55 bp, Artificial
  Synthetic oligonucleotide
ggtcgatgcagtcaggagagagaggggctctgcaaattacgcacactggggtgct

SEQ ID NO: 431222 - DNA, 55 bp, Artificial
  Synthetic oligonucleotide
ggtcgatgccatggaggcccatcagtttatcaaggctcctggcatcactactgct

SEQ ID NO: 431223 - DNA, 55 bp, Artificial
  Synthetic oligonucleotide
ggtcgatgctttaaaggtcccattggtgagttttagggagtgatggtggctcgcc

SEQ ID NO: 431224 - DNA, 55 bp, Artificial
  Synthetic oligonucleotide
ggtcgatggagataccttcttgtcgtcgctcaaggcctacttcccgaagcttacg

SEQ ID NO: 431225 - DNA, 56 bp, Artificial
  Synthetic oligonucleotide
ggtcgatggagccagtctctcgacctttgaaccctccagcggcggttggttccacc

SEQ ID NO: 431226 - DNA, 60 bp, Artificial
  Synthetic oligonucleotide
ggtcgcaaccaccttagaacacagatttagagatatacctgataaagagctagcagtcag

SEQ ID NO: 431227 - DNA, 55 bp, Artificial
  Synthetic oligonucleotide
ggtcgcaatcgggaagcgtaggcttatctggggatgcgatgttggcgttagcacg

SEQ ID NO: 431228 - DNA, 57 bp, Artificial
  Synthetic oligonucleotide
ggtcgcacacgatgcatctggtaaaagggtgtactacctcacccgtgaccctaccac

SEQ ID NO: 431229 - DNA, 55 bp, Artificial
  Synthetic oligonucleotide
ggtcgcacctctggtgtgtatctggctccgggtgagcgactgtcagataagcgta

SEQ ID NO: 431230 - DNA, 55 bp, Artificial
  Synthetic oligonucleotide
ggtcgcacgctcagtgacagcaagtcgtctagtcggatggaggttcccaggacgg

SEQ ID NO: 431231 - DNA, 55 bp, Artificial
  Synthetic oligonucleotide
ggtcgcactattcagtaagcacgacccgattatcgaggggttgattaactttaaa

SEQ ID NO: 431232 - DNA, 57 bp, Artificial
  Synthetic oligonucleotide
ggtcgcacttctcacaaaacggtgcgtatggttacacggcactaaacaagatgggta

SEQ ID NO: 431233 - DNA, 55 bp, Artificial
  Synthetic oligonucleotide
ggtcgcagctattgagttggtggcggatggtttcgcttcagtcaattcagacgtc

SEQ ID NO: 431234 - DNA, 60 bp, Artificial
  Synthetic oligonucleotide
ggtcgcagttccactgtcacaagtattgccaagctcggaaagtgcaaggtgtatcgaaag

SEQ ID NO: 431235 - DNA, 55 bp, Artificial
  Synthetic oligonucleotide
ggtcgcatcggttcgtggtgaagaggaagtggtgcgtgaacctggtctccgatgg

SEQ ID NO: 431236 - DNA, 55 bp, Artificial
  Synthetic oligonucleotide
ggtcgcatgatacgtgccttcgaaggtcggcccgagctactcgccttagcgtacc

SEQ ID NO: 431237 - DNA, 59 bp, Artificial
  Synthetic oligonucleotide
ggtcgcattgaggtggtccggtaatggtccctaacagtccgcattggccaagatcagtg

SEQ ID NO: 431238 - DNA, 55 bp, Artificial
  Synthetic oligonucleotide
ggtcgccacaaatgtaatcgtgtccgacagacttataacatcgggtgcaaacctc

SEQ ID NO: 431239 - DNA, 58 bp, Artificial
  Synthetic oligonucleotide
ggtcgccagttgacgtggcacattatcttaccaagaagtcttggtacagtggcggtag

SEQ ID NO: 431240 - DNA, 55 bp, Artificial
  Synthetic oligonucleotide
ggtcgccctgtggtgattaacgaaccggatactaatcaggttcccatttcactgc

SEQ ID NO: 431241 - DNA, 56 bp, Artificial
  Synthetic oligonucleotide
ggtcgcccttagaaatggcaatggtccgcgtagacgacgagtctctcggaggcggg

SEQ ID NO: 431242 - DNA, 54 bp, Artificial
  Synthetic oligonucleotide
ggtcgccgtatcctatcacgttacaaaagaaagtggggacgaagatcccgaaga

SEQ ID NO: 431243 - DNA, 54 bp, Artificial
  Synthetic oligonucleotide
ggtcgccgttatcctcaacggcgtcgtatgtactaccgtcctcgtaagcctttc

SEQ ID NO: 431244 - DNA, 54 bp, Artificial
  Synthetic oligonucleotide
ggtcgcctacctaggttatcgtttcgctgccgacgtaattctaatatttaccgc

SEQ ID NO: 431245 - DNA, 52 bp, Artificial
  Synthetic oligonucleotide
ggtcgcctagtacgcttaacgtatagccggaacagcactgcagaaatgtact

SEQ ID NO: 431246 - DNA, 55 bp, Artificial
  Synthetic oligonucleotide
ggtcgcctagtaggaatgcatcttggttcacaaggagttatttcccaaggggtag

SEQ ID NO: 431247 - DNA, 60 bp, Artificial
  Synthetic oligonucleotide
ggtcgcggctgtgataccaccaggcatcgagattggaccagggctggaggtcaggcaatt

SEQ ID NO: 431248 - DNA, 55 bp, Artificial
  Synthetic oligonucleotide
ggtcgcgggactctactcacgaatgttcaccaggacgtgatatttggccgcgtgg

SEQ ID NO: 431249 - DNA, 60 bp, Artificial
  Synthetic oligonucleotide
ggtcgcgtccacaaaggagaggcgtgatctagcgcgatccgtatgaccgagcgtgtctgt

SEQ ID NO: 431250 - DNA, 59 bp, Artificial
  Synthetic oligonucleotide
ggtcgcgttctggcctttgcccactccgattatgagctcctgtccgccaatattcctat

SEQ ID NO: 431251 - DNA, 53 bp, Artificial
  Synthetic oligonucleotide
ggtcgctaaccttcaggagaacggtatgggtgtggatgcggcagcttttctct

SEQ ID NO: 431252 - DNA, 57 bp, Artificial
  Synthetic oligonucleotide
ggtcgctaagcaagcgctcacttacacacgccgctaacttgaaacgtaacgaggagt

SEQ ID NO: 431253 - DNA, 57 bp, Artificial
  Synthetic oligonucleotide
ggtcgctacacgaactcagagggccgctaaggaggttgtggaatggtttagcagtaa

SEQ ID NO: 431254 - DNA, 60 bp, Artificial
  Synthetic oligonucleotide
ggtcgctattttacctggtatcagcttgctagctatgcctcgtacatccgtgttcctgtc

SEQ ID NO: 431255 - DNA, 60 bp, Artificial
  Synthetic oligonucleotide
ggtcgctcaggtgtttccccagcactagacctggcagatgaggctagaaactccccactg

SEQ ID NO: 431256 - DNA, 60 bp, Artificial
  Synthetic oligonucleotide
ggtcgctccctgcaaacccagcagtagacctggcagatgaggctggacactccccactgg

SEQ ID NO: 431257 - DNA, 55 bp, Artificial
  Synthetic oligonucleotide
ggtcgctccgaccctattgcccctcttattacttatccccagtaattgccttatc

SEQ ID NO: 431258 - DNA, 55 bp, Artificial
  Synthetic oligonucleotide
ggtcgctcgcgaagaatgataactgatacaaatgcaacgcttgaaaagttagttg

SEQ ID NO: 431259 - DNA, 60 bp, Artificial
  Synthetic oligonucleotide
ggtcgctgagtgcggaactaaatcaagtgcggtgcgtaggaggtcattattcgttcgcac

SEQ ID NO: 431260 - DNA, 58 bp, Artificial
  Synthetic oligonucleotide
ggtcgctgtgtgcgagttggacccgctacgcatgtattgggctccaccgggcaacgag

SEQ ID NO: 431261 - DNA, 60 bp, Artificial
  Synthetic oligonucleotide
ggtcgcttagcgggtggattcttagtgcttatctgggacgacctgtggagcctgtgccac

SEQ ID NO: 431262 - DNA, 55 bp, Artificial
  Synthetic oligonucleotide
ggtcgcttcaaccacccaactcaggactggtccaaggacactccagacttccagc

SEQ ID NO: 431263 - DNA, 55 bp, Artificial
  Synthetic oligonucleotide
ggtcggaactgttagggtacttagctgtgtatatcagtcccaagtccgtcagtgc

SEQ ID NO: 431264 - DNA, 58 bp, Artificial
  Synthetic oligonucleotide
ggtcggaagtttccttccttctcggtgacagatcggccggcaagagctcgccttgcaa

SEQ ID NO: 431265 - DNA, 60 bp, Artificial
  Synthetic oligonucleotide
ggtcggaatagatcccttccgtctactccagaacagccaggtgttcagtctcatcagacc

SEQ ID NO: 431266 - DNA, 56 bp, Artificial
  Synthetic oligonucleotide
ggtcggaccgcggggaggtggagatgccatgccgacccgaagaggaaagaaggaga

SEQ ID NO: 431267 - DNA, 55 bp, Artificial
  Synthetic oligonucleotide
ggtcggagaagcgcgtccaggacagtaatgtggggaagtactgctcgcgttcctg

SEQ ID NO: 431268 - DNA, 55 bp, Artificial
  Synthetic oligonucleotide
ggtcggagaccgggaactatagcgattttcgggcgagaaataagctggattctag

SEQ ID NO: 431269 - DNA, 55 bp, Artificial
  Synthetic oligonucleotide
ggtcggagatgttgtctcttatggcaatatactcttgagtggtaataacaccgcc

SEQ ID NO: 431270 - DNA, 60 bp, Artificial
  Synthetic oligonucleotide
ggtcggagcaactccaccatgccacaacaacaagttgcccatacatgcgtgatgttgtgg

SEQ ID NO: 431271 - DNA, 55 bp, Artificial
  Synthetic oligonucleotide
ggtcggaggatttccccgtgaagaacgtggtcgagtgcaacaagttcttcgagaa

SEQ ID NO: 431272 - DNA, 55 bp, Artificial
  Synthetic oligonucleotide
ggtcggaggtccgtccgcacagacccaacgggatcaggacctcttcgcaacacag

SEQ ID NO: 431273 - DNA, 52 bp, Artificial
  Synthetic oligonucleotide
ggtcggatcgatccgcatcgactgtgatctcgtacatcctatgtcccgttgg

SEQ ID NO: 431274 - DNA, 55 bp, Artificial
  Synthetic oligonucleotide
ggtcggccataagttgaaaagaactaagaccactggaaggaaaattatgacagaa

SEQ ID NO: 431275 - DNA, 57 bp, Artificial
  Synthetic oligonucleotide
ggtcggccttaaataactcagacagatgtattacagtagaaagaaatactcaaagtg

SEQ ID NO: 431276 - DNA, 55 bp, Artificial
  Synthetic oligonucleotide
ggtcggcgctgcccgactatgccaggtttattcagctgcccaaggatgccgttgt

SEQ ID NO: 431277 - DNA, 51 bp, Artificial
  Synthetic oligonucleotide
ggtcggcggtacgatccaagccgaccaataccgtcgctatcgcgccggtgt

SEQ ID NO: 431278 - DNA, 55 bp, Artificial
  Synthetic oligonucleotide
ggtcggctcactctacgccatcgacggaacagttcgcgtattcaaacggttcgaa

SEQ ID NO: 431279 - DNA, 60 bp, Artificial
  Synthetic oligonucleotide
ggtcggctgctttggcattacttgattgtatgcctttggagaagctgaggcctatgattt

SEQ ID NO: 431280 - DNA, 58 bp, Artificial
  Synthetic oligonucleotide
ggtcgggactttatgcacctcccaggccaggttacctaacatgcaactcatccataac

SEQ ID NO: 431281 - DNA, 55 bp, Artificial
  Synthetic oligonucleotide
ggtcgggattaccgcgaatgaactgcgtgcagcacgggttaaagcggaagccctt

SEQ ID NO: 431282 - DNA, 51 bp, Artificial
  Synthetic oligonucleotide
ggtcgggccaaccggtccgttctccggctcagtacccggaggaacttggtc

SEQ ID NO: 431283 - DNA, 55 bp, Artificial
  Synthetic oligonucleotide
ggtcgggctccccgctctaccacaaaggttgcgtggttggcttacatataggtgc

SEQ ID NO: 431284 - DNA, 55 bp, Artificial
  Synthetic oligonucleotide
ggtcggggcgggactagggagtggtcaacccctgatgctgcatataagcagctgc

SEQ ID NO: 431285 - DNA, 53 bp, Artificial
  Synthetic oligonucleotide
ggtcgggggcttcgggttataacgatccgcagttcacgaactgggcgtacttc

SEQ ID NO: 431286 - DNA, 58 bp, Artificial
  Synthetic oligonucleotide
ggtcgggggtatatcaatgcctcgaaaaccactgcgacacacctcctccctgttggca

SEQ ID NO: 431287 - DNA, 57 bp, Artificial
  Synthetic oligonucleotide
ggtcgggtcaaacaccagtggcactaccgagattgaggcgtgtattctcctcaaccc

SEQ ID NO: 431288 - DNA, 55 bp, Artificial
  Synthetic oligonucleotide
ggtcgggtcacttgataagagttataattattctggtacatggagaccttaggtg

SEQ ID NO: 431289 - DNA, 55 bp, Artificial
  Synthetic oligonucleotide
ggtcgggtctaagaccgttgaccaacgctacaactgggtagtcggcaagaatatc

SEQ ID NO: 431290 - DNA, 55 bp, Artificial
  Synthetic oligonucleotide
ggtcgggtttattcttatgatcccgagcagaaagcccatgatgaaggaccggttg

SEQ ID NO: 431291 - DNA, 58 bp, Artificial
  Synthetic oligonucleotide
ggtcggtactaaaaccaggccagacattgcgaataagatccaatggaaatctaattgc

SEQ ID NO: 431292 - DNA, 60 bp, Artificial
  Synthetic oligonucleotide
ggtcggtcaagacgttgaaagtacagccgatagaagctcgagccgcacgatcagttggca

SEQ ID NO: 431293 - DNA, 55 bp, Artificial
  Synthetic oligonucleotide
ggtcggtgacaggcaatacaagtcagtcgagcgtctgaatacgacgttcgagcgt

SEQ ID NO: 431294 - DNA, 55 bp, Artificial
  Synthetic oligonucleotide
ggtcggtgattacagatttctcgatcacgaggacaccattcgccccaggtgtgat

SEQ ID NO: 431295 - DNA, 56 bp, Artificial
  Synthetic oligonucleotide
ggtcggtttcgcacaatagtatgtggcttattccctacacaaattcaagttcgaaa

SEQ ID NO: 431296 - DNA, 52 bp, Artificial
  Synthetic oligonucleotide
ggtcgtaacgagcaactctgggacggaaccgactactttgggtgtccgtgtt

SEQ ID NO: 431297 - DNA, 55 bp, Artificial
  Synthetic oligonucleotide
ggtcgtaaggaactatctagttgaattgctaggttttgtaatgggtacgattgcg

SEQ ID NO: 431298 - DNA, 60 bp, Artificial
  Synthetic oligonucleotide
ggtcgtaatgaccccatgatgatatatctagtatggagaagaattgagaacttcgcaatg

SEQ ID NO: 431299 - DNA, 55 bp, Artificial
  Synthetic oligonucleotide
ggtcgtacaatgctaaacttcttgtactgcttgaaaatgggagaacattggactt

SEQ ID NO: 431300 - DNA, 55 bp, Artificial
  Synthetic oligonucleotide
ggtcgtacatcataacaaactcacatttgttccaagaaaacaatgggtctttgac

SEQ ID NO: 431301 - DNA, 57 bp, Artificial
  Synthetic oligonucleotide
ggtcgtactacgaggtcatcgttcaactgccgaacgacgtcgagagtcaggtacctg

SEQ ID NO: 431302 - DNA, 55 bp, Artificial
  Synthetic oligonucleotide
ggtcgtatgacaagtgcgcaagcaagcaaagtagcgtacactcttgagactgata

SEQ ID NO: 431303 - DNA, 55 bp, Artificial
  Synthetic oligonucleotide
ggtcgtatgggtcaaattgtgacacttgttgaggctctgcctcatgtgatagacg

SEQ ID NO: 431304 - DNA, 56 bp, Artificial
  Synthetic oligonucleotide
ggtcgtcaaaatacaaccggaggttcactccagaactagcagccagacctaaagta

SEQ ID NO: 431305 - DNA, 59 bp, Artificial
  Synthetic oligonucleotide
ggtcgtcagaatccggccgaccgactgcgacaggtggtcgacgcctgaaatcgcgcgac

SEQ ID NO: 431306 - DNA, 56 bp, Artificial
  Synthetic oligonucleotide
ggtcgtcagacgatggactacaaggctaccgaaatggcgaactactggtgtcaggg

SEQ ID NO: 431307 - DNA, 55 bp, Artificial
  Synthetic oligonucleotide
ggtcgtcatgacaaggctatggttccgtttcaacgatcgctaaggtgtcggtggt

SEQ ID NO: 431308 - DNA, 55 bp, Artificial
  Synthetic oligonucleotide
ggtcgtcgggtacgcaatcgccgccagttaaatagcttgcaaaatacgtggcctt

SEQ ID NO: 431309 - DNA, 53 bp, Artificial
  Synthetic oligonucleotide
ggtcgtcgtagagcctcttctaattcatacatcagtgagatggcatcttcagt

SEQ ID NO: 431310 - DNA, 57 bp, Artificial
  Synthetic oligonucleotide
ggtcgtcttccattgcgtgcacaactatgctgcgacccagtatgttgtgtgggccgt

SEQ ID NO: 431311 - DNA, 55 bp, Artificial
  Synthetic oligonucleotide
ggtcgtgcactgttgacttataatccttacattcagaacgatgaagttactgtca

SEQ ID NO: 431312 - DNA, 60 bp, Artificial
  Synthetic oligonucleotide
ggtcgtgcagagagtagctatcaattggttgcaagaggagcaacttggcacgaatgaaat

SEQ ID NO: 431313 - DNA, 59 bp, Artificial
  Synthetic oligonucleotide
ggtcgtgcatacgtcataagtcacatgacaggagtccacttaaacacggaagtaggccc

SEQ ID NO: 431314 - DNA, 55 bp, Artificial
  Synthetic oligonucleotide
ggtcgtgccgcgaaggactggcggattgaggcgttcaacaaccacatggtcggca

SEQ ID NO: 431315 - DNA, 55 bp, Artificial
  Synthetic oligonucleotide
ggtcgtgcttatgtatgtacacaatgtggtggtatgctttattatgataggccgg

SEQ ID NO: 431316 - DNA, 55 bp, Artificial
  Synthetic oligonucleotide
ggtcgtggaaagcgaagttggtagcgcggctatcgatggagtgatgcaaggtacg

SEQ ID NO: 431317 - DNA, 55 bp, Artificial
  Synthetic oligonucleotide
ggtcgtggtatagcgctgaccctgtttaaccttgctgatacgcttctcggtgggc

SEQ ID NO: 431318 - DNA, 55 bp, Artificial
  Synthetic oligonucleotide
ggtcgtgtaaatcgtcgtgacgaacgcatgacctacatccgtcgcaataagtcgg

SEQ ID NO: 431319 - DNA, 55 bp, Artificial
  Synthetic oligonucleotide
ggtcgtgtcgtcgaacatgcccatgtgaatgtcggcgctgaacccgaggagtgac

SEQ ID NO: 431320 - DNA, 55 bp, Artificial
  Synthetic oligonucleotide
ggtcgtgtgttcacatcggactatgtcatctgcacatccaactaccccacttcag

SEQ ID NO: 431321 - DNA, 55 bp, Artificial
  Synthetic oligonucleotide
ggtcgtgtgttgaacgctcatattgatgaccgtttacccaatgtaagcggtcgcc

SEQ ID NO: 431322 - DNA, 55 bp, Artificial
  Synthetic oligonucleotide
ggtcgttaccgcctcatcatgtcggttagccttgtagaccaattggtagcccggg

SEQ ID NO: 431323 - DNA, 55 bp, Artificial
  Synthetic oligonucleotide
ggtcgttactagcacctgggtgttggtaggcggagtccttgcagctctggccgca

SEQ ID NO: 431324 - DNA, 52 bp, Artificial
  Synthetic oligonucleotide
ggtcgttagatatagcgtctggaaatacgatccacatatgcgaccgtgaaca

SEQ ID NO: 431325 - DNA, 56 bp, Artificial
  Synthetic oligonucleotide
ggtcgttagcgctgccttgggcactcctgttgggggccgtccgacgcttcacggtc

SEQ ID NO: 431326 - DNA, 59 bp, Artificial
  Synthetic oligonucleotide
ggtcgttagctgcaaatttgaataatgtagtatgcagtggaggttcttatagttttgcg

SEQ ID NO: 431327 - DNA, 58 bp, Artificial
  Synthetic oligonucleotide
ggtcgttatctacgtcactatgaacaccacgcgttcaaaaccattgctaaatgctttg

SEQ ID NO: 431328 - DNA, 60 bp, Artificial
  Synthetic oligonucleotide
ggtcgttcagctgcatacccagcagtagaccttgcagatgaggctggacattccccactg

SEQ ID NO: 431329 - DNA, 56 bp, Artificial
  Synthetic oligonucleotide
ggtcgttcccaattatgctataaccacccaggacgcgatgaaaaacgtctggcaag

SEQ ID NO: 431330 - DNA, 53 bp, Artificial
  Synthetic oligonucleotide
ggtcgttcgtagaattgactgggtttccccagaacaaactacaggtggactag

SEQ ID NO: 431331 - DNA, 55 bp, Artificial
  Synthetic oligonucleotide
ggtcgttcgtaggaagtttctgaattttgtgcgctttatcatggccaatcgtcac

SEQ ID NO: 431332 - DNA, 55 bp, Artificial
  Synthetic oligonucleotide
ggtcgttctaggggagaggtacgttagagactctcacgcttggaaacagatggga

SEQ ID NO: 431333 - DNA, 53 bp, Artificial
  Synthetic oligonucleotide
ggtcgttctccgagtgggcgtacgcgttcgggatggttccgacaccggactac

SEQ ID NO: 431334 - DNA, 60 bp, Artificial
  Synthetic oligonucleotide
ggtcgttctcttctcgccacctgcactctagatcgacgtgactaggctctagaacgtaaa

SEQ ID NO: 431335 - DNA, 55 bp, Artificial
  Synthetic oligonucleotide
ggtcgttgaatatttcaaaccagggaagttaaactctttcgagtcacgcaactca

SEQ ID NO: 431336 - DNA, 55 bp, Artificial
  Synthetic oligonucleotide
ggtcgttgcaaagtgtccaggccaacttgtaacaaagcatgtcgttaaaggccca

SEQ ID NO: 431337 - DNA, 56 bp, Artificial
  Synthetic oligonucleotide
ggtcgtttacaattttgcgtgaatgagtatggaagaacagttaaaccaggatctta

SEQ ID NO: 431338 - DNA, 53 bp, Artificial
  Synthetic oligonucleotide
ggtcgtttgcctccgtggcaaatccggccagggtaagagtttccttgcgaacg

SEQ ID NO: 431339 - DNA, 55 bp, Artificial
  Synthetic oligonucleotide
ggtctaacaaattatatcatactgagctaggaactcgctaaactcaactggaggg

SEQ ID NO: 431340 - DNA, 54 bp, Artificial
  Synthetic oligonucleotide
ggtctaacaactaatgaatcagggaggttaatagatttcctaaaggacgtgacg

SEQ ID NO: 431341 - DNA, 55 bp, Artificial
  Synthetic oligonucleotide
ggtctaacagctaatgaatcggggagattaatagatttcctcagggatgtgatgg

SEQ ID NO: 431342 - DNA, 50 bp, Artificial
  Synthetic oligonucleotide
ggtctaagacccctactcaggtttatagagtctgtcatcaaccgttatgt

SEQ ID NO: 431343 - DNA, 55 bp, Artificial
  Synthetic oligonucleotide
ggtctaagctggcgtgaagcgaatcatatcctggtggcgtgagtctcgaaagtgg

SEQ ID NO: 431344 - DNA, 55 bp, Artificial
  Synthetic oligonucleotide
ggtctaagtgcttactggttcggtttgactcagtctgcggatacaaaagatcgcg

SEQ ID NO: 431345 - DNA, 55 bp, Artificial
  Synthetic oligonucleotide
ggtctaatatacaacaggatggggacagtgactacagaggtagctttcggcctgg

SEQ ID NO: 431346 - DNA, 60 bp, Artificial
  Synthetic oligonucleotide
ggtctaatattcaagcactggtgcacatctacatgccagtttggtgaccctggtgatata

SEQ ID NO: 431347 - DNA, 55 bp, Artificial
  Synthetic oligonucleotide
ggtctaatcaatagtggccagaattcgattggtgagctatccacaagactatcca

SEQ ID NO: 431348 - DNA, 55 bp, Artificial
  Synthetic oligonucleotide
ggtctaattgtggaacgcaaagcgacgggttcatgggtgttagactccatcagtc

SEQ ID NO: 431349 - DNA, 55 bp, Artificial
  Synthetic oligonucleotide
ggtctacaaatcctatggagatgcaattcgcaaccgcccactaccctcacgctca

SEQ ID NO: 431350 - DNA, 50 bp, Artificial
  Synthetic oligonucleotide
ggtctacaacacacaaggctatttccctgactggcaatgctacacaccgg

SEQ ID NO: 431351 - DNA, 56 bp, Artificial
  Synthetic oligonucleotide
ggtctacaatcgagctgcgtattgtgtataccatggattagtcaaacgcactacag

SEQ ID NO: 431352 - DNA, 55 bp, Artificial
  Synthetic oligonucleotide
ggtctacacccattgaactacctgaggctcctgaaagagaattcagaaacccact

SEQ ID NO: 431353 - DNA, 53 bp, Artificial
  Synthetic oligonucleotide
ggtctacatacattgtttgattaactacattgtacaatacatgttcaacggct

SEQ ID NO: 431354 - DNA, 55 bp, Artificial
  Synthetic oligonucleotide
ggtctaccaacactacgaggagcggagcgcgcacgtagtggacagacagatggac

SEQ ID NO: 431355 - DNA, 55 bp, Artificial
  Synthetic oligonucleotide
ggtctaccaagcacagcacgaactaccgtgacagctgcggtaaacaattgactgg

SEQ ID NO: 431356 - DNA, 55 bp, Artificial
  Synthetic oligonucleotide
ggtctacccgtgttagttccgtctgttgaatgtcacgcggttcaagtcacgcgcg

SEQ ID NO: 431357 - DNA, 55 bp, Artificial
  Synthetic oligonucleotide
ggtctaccgcgcagttatagaacgtatcccgcagtggtgtggtgcacaataacac

SEQ ID NO: 431358 - DNA, 60 bp, Artificial
  Synthetic oligonucleotide
ggtctaccggcaacattagcgccatctatagcaggagcaagctgtatgtatcgtcgtata

SEQ ID NO: 431359 - DNA, 55 bp, Artificial
  Synthetic oligonucleotide
ggtctaccgttccaaccgcatgaaggatgagccggtgatttgtgcaacgagggct

SEQ ID NO: 431360 - DNA, 52 bp, Artificial
  Synthetic oligonucleotide
ggtctacctgttgcatctgcgtccgccaatttccgcactaatgatgggtcgg

SEQ ID NO: 431361 - DNA, 54 bp, Artificial
  Synthetic oligonucleotide
ggtctacgcactttagagactgaatatctcatgatgtcagtcccgtacggtctt

SEQ ID NO: 431362 - DNA, 59 bp, Artificial
  Synthetic oligonucleotide
ggtctacgtcatcaatgacgttgtaccacgcatcattactgtacacctttggacttagg

SEQ ID NO: 431363 - DNA, 57 bp, Artificial
  Synthetic oligonucleotide
ggtctacgtgattacgccaacgtgatgcagtaccggaagccacgtgatttcaaaacg

SEQ ID NO: 431364 - DNA, 60 bp, Artificial
  Synthetic oligonucleotide
ggtctacgtttaaggatctagatcgtgactcgtgtaatggtgtctatggcaatattagca

SEQ ID NO: 431365 - DNA, 55 bp, Artificial
  Synthetic oligonucleotide
ggtctactccaccttcttctgctcacactacctgaggaagactgttccagtgggg

SEQ ID NO: 431366 - DNA, 55 bp, Artificial
  Synthetic oligonucleotide
ggtctactcttaacaagagatggtggtcatggtaatggcacaatcaataagacag

SEQ ID NO: 431367 - DNA, 60 bp, Artificial
  Synthetic oligonucleotide
ggtctacttgctccgaggaggatgactccgtcgtgtgctgctccatgtcatactcctgga

SEQ ID NO: 431368 - DNA, 56 bp, Artificial
  Synthetic oligonucleotide
ggtctagaaggtatcagacagttgagtgcaaagaagtgttctgccaggtaataaaa

SEQ ID NO: 431369 - DNA, 60 bp, Artificial
  Synthetic oligonucleotide
ggtctagctcgttgtcctgatggtactgctaggtataaggtggatggatgtcgcatgtcc

SEQ ID NO: 431370 - DNA, 60 bp, Artificial
  Synthetic oligonucleotide
ggtctaggcaggactaaggagtggtcaaccctcagatgctgcatataagcagctgctttt

SEQ ID NO: 431371 - DNA, 59 bp, Artificial
  Synthetic oligonucleotide
ggtctagggtgcccagctccgataactaagtggtggtgtgatttccacagattctctta

SEQ ID NO: 431372 - DNA, 53 bp, Artificial
  Synthetic oligonucleotide
ggtctaggtactaaagtgggtcatcacgatcccacttttaatttaacatgggg

SEQ ID NO: 431373 - DNA, 50 bp, Artificial
  Synthetic oligonucleotide
ggtctaggttcttctttatgaatactccacatgagtcatcagaatacgtt

SEQ ID NO: 431374 - DNA, 55 bp, Artificial
  Synthetic oligonucleotide
ggtctataatggtcacgtgctccgcgtgttccgacatgtcagtccgcatgttgcg

SEQ ID NO: 431375 - DNA, 58 bp, Artificial
  Synthetic oligonucleotide
ggtctatagcttttgcaaattaccccggacagattactcatcattacccttctgataa

SEQ ID NO: 431376 - DNA, 57 bp, Artificial
  Synthetic oligonucleotide
ggtctatcccaaaagcaaacaacacgcctgaaaactgctgtcaactgcatctaatgt

SEQ ID NO: 431377 - DNA, 60 bp, Artificial
  Synthetic oligonucleotide
ggtctatcgaccatcccgtggttgctgtcttcactatctgcccgtctttgtctatcactg

SEQ ID NO: 431378 - DNA, 55 bp, Artificial
  Synthetic oligonucleotide
ggtctatcttcatacagctgcgactgagcctggcgcttatctgagccgccgcaga

SEQ ID NO: 431379 - DNA, 52 bp, Artificial
  Synthetic oligonucleotide
ggtctatgagtttgacaaagaccattggtatacgaccgattgtcacattaac

SEQ ID NO: 431380 - DNA, 55 bp, Artificial
  Synthetic oligonucleotide
ggtctatgcccatttatatgtactctgcatgggaaaacatcttgccgcagctgta

SEQ ID NO: 431381 - DNA, 56 bp, Artificial
  Synthetic oligonucleotide
ggtctatgtccttgtgattccaagcccgtggtcaaggggaagttcaacacaactct

SEQ ID NO: 431382 - DNA, 55 bp, Artificial
  Synthetic oligonucleotide
ggtctattcaactggtttagcaagcgttactacacacaggttccagtggaagacc

SEQ ID NO: 431383 - DNA, 55 bp, Artificial
  Synthetic oligonucleotide
ggtctattgatgttttcaattcccagattctacacacatctagacagctggctct

SEQ ID NO: 431384 - DNA, 60 bp, Artificial
  Synthetic oligonucleotide
ggtctattgctcccatagagcccactacttatcccgatggaagactgatccctcaagtta

SEQ ID NO: 431385 - DNA, 57 bp, Artificial
  Synthetic oligonucleotide
ggtctatttatgaccgagttggatttctacgaaggcacaaccgatcgtaaatggcaa

SEQ ID NO: 431386 - DNA, 53 bp, Artificial
  Synthetic oligonucleotide
ggtctatttcgaccacgaagattcttgagagtgacccggatagggcgaatgac

SEQ ID NO: 431387 - DNA, 57 bp, Artificial
  Synthetic oligonucleotide
ggtctcaaaaaagggctacaatacacctttgatatacgtgatgcaaacggaagaggc

SEQ ID NO: 431388 - DNA, 55 bp, Artificial
  Synthetic oligonucleotide
ggtctcaaaccaaacgttaacatcattattgctggcgatccttgtcaaagtgatt

SEQ ID NO: 431389 - DNA, 50 bp, Artificial
  Synthetic oligonucleotide
ggtctcaaataaagacctagcacataacttgcacgttaatacttatagaa

SEQ ID NO: 431390 - DNA, 55 bp, Artificial
  Synthetic oligonucleotide
ggtctcaaccacagcatgataatctgatgggaacgatgtggctcaacgcaggttc

SEQ ID NO: 431391 - DNA, 58 bp, Artificial
  Synthetic oligonucleotide
ggtctcaatctacggacgctaaatggaaggaggtagtacagcatgaatacgttaagaa

SEQ ID NO: 431392 - DNA, 55 bp, Artificial
  Synthetic oligonucleotide
ggtctcaattacaactttgaggaacggacaaagagaagggaggaattgtggttca

SEQ ID NO: 431393 - DNA, 55 bp, Artificial
  Synthetic oligonucleotide
ggtctcacaatgtcgacgttggaaggtcttgtacgttttcagtagctggacgtaa

SEQ ID NO: 431394 - DNA, 54 bp, Artificial
  Synthetic oligonucleotide
ggtctcaccacagtctgcttggggttatccccaaaccccttaattcaacgccta

SEQ ID NO: 431395 - DNA, 55 bp, Artificial
  Synthetic oligonucleotide
ggtctcaccgcagaggtcggtccttccggtctcaccgcacgtactattagagccc

SEQ ID NO: 431396 - DNA, 52 bp, Artificial
  Synthetic oligonucleotide
ggtctcacctacaaaaagataattagtaaggttgctttgtttactcccctta

SEQ ID NO: 431397 - DNA, 55 bp, Artificial
  Synthetic oligonucleotide
ggtctcacggacatacttgtaccttagcaccctgcgcaaacccgatatccagtct

SEQ ID NO: 431398 - DNA, 55 bp, Artificial
  Synthetic oligonucleotide
ggtctcagcggccgcgcagcggcatcacacacattttcagacacccattgtgtca

SEQ ID NO: 431399 - DNA, 57 bp, Artificial
  Synthetic oligonucleotide
ggtctcagtgaagcaaaaaaatccaacgctatgcgaagtctagtaaacatcgctagg

SEQ ID NO: 431400 - DNA, 59 bp, Artificial
  Synthetic oligonucleotide
ggtctcatatccactccattgggcaccccaccaaccgtaagtaacagtgatttcatatg

SEQ ID NO: 431401 - DNA, 60 bp, Artificial
  Synthetic oligonucleotide
ggtctcatcatatgcagatactcaagtctacgaacatgacgttgacaaagattattacga

SEQ ID NO: 431402 - DNA, 60 bp, Artificial
  Synthetic oligonucleotide
ggtctcatctgtagcatgttcggccatgctgataagtctagtcctgatgaaggcttcagt

SEQ ID NO: 431403 - DNA, 55 bp, Artificial
  Synthetic oligonucleotide
ggtctcatgcgtgtgaagaagcacgcaaaacagcaggggaaatcaacccctgcac

SEQ ID NO: 431404 - DNA, 55 bp, Artificial
  Synthetic oligonucleotide
ggtctcattttatgcgcccgagcaacacatagcaatagccagatacgcatcttgg

SEQ ID NO: 431405 - DNA, 60 bp, Artificial
  Synthetic oligonucleotide
ggtctccacaacgagggggtagcgatctgcgagtctctggaggagatctcgggcgagcca

SEQ ID NO: 431406 - DNA, 55 bp, Artificial
  Synthetic oligonucleotide
ggtctccatagttggtgcagagttgtctgcttcagtaaagcagcacgtcaagcct

SEQ ID NO: 431407 - DNA, 55 bp, Artificial
  Synthetic oligonucleotide
ggtctccatcatccacatgtatcgacggtaaatggaatcccgtactcccaacatg

SEQ ID NO: 431408 - DNA, 56 bp, Artificial
  Synthetic oligonucleotide
ggtctccattacccgacgaacggattttggatgggctttcgtctggattgccagcc

SEQ ID NO: 431409 - DNA, 60 bp, Artificial
  Synthetic oligonucleotide
ggtctcccatgtccgttcagatcgatggggtttatatccgaacagatgtgccgtatggaa

SEQ ID NO: 431410 - DNA, 52 bp, Artificial
  Synthetic oligonucleotide
ggtctcccctagagactatttaagggggctcgcgagaggagttctaataggg

SEQ ID NO: 431411 - DNA, 52 bp, Artificial
  Synthetic oligonucleotide
ggtctcccctagggattatctgagggggctcgcaagaggagtcttgataggg

SEQ ID NO: 431412 - DNA, 55 bp, Artificial
  Synthetic oligonucleotide
ggtctccctatactagtgcgaatttctttcaagattagagtgcttagatgtgacc

SEQ ID NO: 431413 - DNA, 53 bp, Artificial
  Synthetic oligonucleotide
ggtctccctcgaacacaccctatcgaagtatgtctaggcgatataaatccgta

SEQ ID NO: 431414 - DNA, 53 bp, Artificial
  Synthetic oligonucleotide
ggtctccctgattttcaggggtactcgcccgtgaaataggggtgccttaggga

SEQ ID NO: 431415 - DNA, 56 bp, Artificial
  Synthetic oligonucleotide
ggtctccgaatagaaggaccaacagttaccttctatcgaaacgtgtctactataga

SEQ ID NO: 431416 - DNA, 55 bp, Artificial
  Synthetic oligonucleotide
ggtctccgagcagtaactgacctaaacggacctatcgtcgtacagtacttctccg

SEQ ID NO: 431417 - DNA, 55 bp, Artificial
  Synthetic oligonucleotide
ggtctccgaggatattgagcaaactggtcggaatggtttgtggttgatggtcggg

SEQ ID NO: 431418 - DNA, 55 bp, Artificial
  Synthetic oligonucleotide
ggtctccttagacagatactcgtgcatggaatccactattgagtcatataacaag

SEQ ID NO: 431419 - DNA, 55 bp, Artificial
  Synthetic oligonucleotide
ggtctccttcgctcccaacttatgtggtacctccgggtgattatactctgacacc

SEQ ID NO: 431420 - DNA, 54 bp, Artificial
  Synthetic oligonucleotide
ggtctccttttccatcccctacacttctcccctctccgccatccctacctcgta

SEQ ID NO: 431421 - DNA, 54 bp, Artificial
  Synthetic oligonucleotide
ggtctcgacccacgttcgtgaaatagttaatgagtacggtcgcccttagaaatg

SEQ ID NO: 431422 - DNA, 55 bp, Artificial
  Synthetic oligonucleotide
ggtctcgatgtgtccgtcttaccaacaacaggagacgtcgtagtttgcgctactg

SEQ ID NO: 431423 - DNA, 59 bp, Artificial
  Synthetic oligonucleotide
ggtctcgccagtgtgtgaaccctttgcaacaggatacaacatcaaagacaagttaaaga

SEQ ID NO: 431424 - DNA, 59 bp, Artificial
  Synthetic oligonucleotide
ggtctcgctgcatacaccttgaccccgcggcctattattcacgctgtggcccccgacta

SEQ ID NO: 431425 - DNA, 53 bp, Artificial
  Synthetic oligonucleotide
ggtctcggacctgaatgccattcgtcgctttagtgctgccatcgccccttcgt

SEQ ID NO: 431426 - DNA, 55 bp, Artificial
  Synthetic oligonucleotide
ggtctcggagtatgacctcgagtactatatgggccagtactatatattcgcgggg

SEQ ID NO: 431427 - DNA, 55 bp, Artificial
  Synthetic oligonucleotide
ggtctcggatgtgctattcgggtctcacaacggttattatattaacaactgtttg

SEQ ID NO: 431428 - DNA, 55 bp, Artificial
  Synthetic oligonucleotide
ggtctcggtatcgggctgagctcgttcgagggaatcaacgcgtcggtctccgaca

SEQ ID NO: 431429 - DNA, 55 bp, Artificial
  Synthetic oligonucleotide
ggtctcgtcatccactatgatcgtgctcataatgatcccatacacactgatggtt

SEQ ID NO: 431430 - DNA, 60 bp, Artificial
  Synthetic oligonucleotide
ggtctcgttaaatcacatataatacgtggttaagtgatgtttgatagtgacaacactatc

SEQ ID NO: 431431 - DNA, 55 bp, Artificial
  Synthetic oligonucleotide
ggtctcgttaaccgtatccgtacgacctatagccgcgtcaaaactgcataatacg

SEQ ID NO: 431432 - DNA, 55 bp, Artificial
  Synthetic oligonucleotide
ggtctcgttagtcccactcttctacttgatagtgctaattgtagtgcccgcggtc

SEQ ID NO: 431433 - DNA, 60 bp, Artificial
  Synthetic oligonucleotide
ggtctctagagagctagtcctagagtacggaagtgctgcagtcacacggggcatgagtgt

SEQ ID NO: 431434 - DNA, 55 bp, Artificial
  Synthetic oligonucleotide
ggtctctatagatctggataacacctgtgaagacctacatattacttgcggccac

SEQ ID NO: 431435 - DNA, 60 bp, Artificial
  Synthetic oligonucleotide
ggtctctattctggaatgagcccgctattggtcagaagctagttttcacgcaggcagcta

SEQ ID NO: 431436 - DNA, 59 bp, Artificial
  Synthetic oligonucleotide
ggtctctcacttctaataacctttgctttgagtctgtccaggtcggcagcaagaactaa

SEQ ID NO: 431437 - DNA, 59 bp, Artificial
  Synthetic oligonucleotide
ggtctctcatatacaacaggatgggaacggtgactacagaagtggcttttggcctagta

SEQ ID NO: 431438 - DNA, 60 bp, Artificial
  Synthetic oligonucleotide
ggtctctcgaaagccaatgctcgccagtcctccaagtggcagcgttcgagcaagagccgc

SEQ ID NO: 431439 - DNA, 60 bp, Artificial
  Synthetic oligonucleotide
ggtctctgaaagcatttttctcgtggtccctgacagactcctcagggaaagacatgccag

SEQ ID NO: 431440 - DNA, 58 bp, Artificial
  Synthetic oligonucleotide
ggtctctgaggggttttttcgttaggagcttacattatgaacatgcaagatgcttact

SEQ ID NO: 431441 - DNA, 55 bp, Artificial
  Synthetic oligonucleotide
ggtctctgctgatccccgttgctgggttgtggcccaatgtggtaaattctctgcc

SEQ ID NO: 431442 - DNA, 54 bp, Artificial
  Synthetic oligonucleotide
ggtctcttattgacattggtacgacaaattttgaattaaagccgactaagaaac

SEQ ID NO: 431443 - DNA, 54 bp, Artificial
  Synthetic oligonucleotide
ggtctcttccaggtgttttccgccccctatccgtgaagcagattggttgggagg

SEQ ID NO: 431444 - DNA, 60 bp, Artificial
  Synthetic oligonucleotide
ggtctcttggaggagctggggccactcaatgatctggagtatccctgaggctcctcggcg

SEQ ID NO: 431445 - DNA, 60 bp, Artificial
  Synthetic oligonucleotide
ggtctcttggaggccgcagttgagactgtgacttcatcattagagcaggttatggacact

SEQ ID NO: 431446 - DNA, 55 bp, Artificial
  Synthetic oligonucleotide
ggtctgaaacccactcgtgttgataagtctgttggagcaatcgaacctattgacc

SEQ ID NO: 431447 - DNA, 55 bp, Artificial
  Synthetic oligonucleotide
ggtctgaaggtccaacgtggtattctggtcctacctttttaagcgcgctggataa

SEQ ID NO: 431448 - DNA, 60 bp, Artificial
  Synthetic oligonucleotide
ggtctgacaatttctcggacaatgctaagaccataatagtgcagctgaacgcatctgtag

SEQ ID NO: 431449 - DNA, 58 bp, Artificial
  Synthetic oligonucleotide
ggtctgactatcttcttcgtagcaacacttcgaaggtgtcttacattagttatcctcc

SEQ ID NO: 431450 - DNA, 57 bp, Artificial
  Synthetic oligonucleotide
ggtctgaggaggcgtttgaatcctctggcaacataccacttttttgcaccgtcgaaa

SEQ ID NO: 431451 - DNA, 55 bp, Artificial
  Synthetic oligonucleotide
ggtctgaggtgaaaccttaatagtctctaacatgttaccaccatcaagcatgcag

SEQ ID NO: 431452 - DNA, 57 bp, Artificial
  Synthetic oligonucleotide
ggtctgatcaaggaccagtacaagaacaccgacaagtacggcggcgaggtcgaatcc

SEQ ID NO: 431453 - DNA, 55 bp, Artificial
  Synthetic oligonucleotide
ggtctgatgcgtgtactagaccctctgtccattatgggtcaggaagctgcaagtc

SEQ ID NO: 431454 - DNA, 55 bp, Artificial
  Synthetic oligonucleotide
ggtctgatgggcaaacgcacggtcaaatctttcgaattcacatccaaagcgggga

SEQ ID NO: 431455 - DNA, 55 bp, Artificial
  Synthetic oligonucleotide
ggtctgattgcatgcagtgatcattatctgtgtctgaattgcctaacaaggatgc

SEQ ID NO: 431456 - DNA, 60 bp, Artificial
  Synthetic oligonucleotide
ggtctgcaattgtatctattgtttcacagagttggtgaggttctttacacttcacattat

SEQ ID NO: 431457 - DNA, 55 bp, Artificial
  Synthetic oligonucleotide
ggtctgccacaccactgtaccatggccaaatgattctttggtaccggattggaac

SEQ ID NO: 431458 - DNA, 51 bp, Artificial
  Synthetic oligonucleotide
ggtctgcgaaaagggaactgacccagcggaattggtgctgaaggcacgggc

SEQ ID NO: 431459 - DNA, 55 bp, Artificial
  Synthetic oligonucleotide
ggtctgcgcacggtcacgcttgagtgctcgcacaatcgggagcattggaagcaca

SEQ ID NO: 431460 - DNA, 52 bp, Artificial
  Synthetic oligonucleotide
ggtctggaaactttggttcccggtacggttcttagtggtagccagttcgcta

SEQ ID NO: 431461 - DNA, 55 bp, Artificial
  Synthetic oligonucleotide
ggtctggaatgaccacggctaccttgcccgcccatacgcatgtcacatcgtcgac

SEQ ID NO: 431462 - DNA, 52 bp, Artificial
  Synthetic oligonucleotide
ggtctggacacactggcttttaaatcagactgtatgaatgttatgtgattct

SEQ ID NO: 431463 - DNA, 55 bp, Artificial
  Synthetic oligonucleotide
ggtctggacgcactgtccgacgagatcgacaccatcacggctgccattgaagtgg

SEQ ID NO: 431464 - DNA, 56 bp, Artificial
  Synthetic oligonucleotide
ggtctggagaactcggaggtgggatcattcttagcttacggaagaaagggactaca

SEQ ID NO: 431465 - DNA, 55 bp, Artificial
  Synthetic oligonucleotide
ggtctggatacagtgggagtttcagtattagaggagaaacaactggtaggaattg

SEQ ID NO: 431466 - DNA, 60 bp, Artificial
  Synthetic oligonucleotide
ggtctggcaagtcactatctaaacccatactgtgtcttagcttgagtccagctagtgaac

SEQ ID NO: 431467 - DNA, 55 bp, Artificial
  Synthetic oligonucleotide
ggtctggcagttaaaggacaatctcatctgaggggagatactgatgttgtaacag

SEQ ID NO: 431468 - DNA, 55 bp, Artificial
  Synthetic oligonucleotide
ggtctggccaaagtccatccgtggctccacgccaaaagtgagaggcacctgtcag

SEQ ID NO: 431469 - DNA, 55 bp, Artificial
  Synthetic oligonucleotide
ggtctggcgagtctaggtattcgtgttcaaacttagtgaccaagtattaccgcat

SEQ ID NO: 431470 - DNA, 55 bp, Artificial
  Synthetic oligonucleotide
ggtctgggaatttctaagaggttctacgtcaccgcctagaaacgtgtgtgtagtg

SEQ ID NO: 431471 - DNA, 55 bp, Artificial
  Synthetic oligonucleotide
ggtctgggaccactgtgagtctagagtcgttcatcaagttcgttaattgcgagtc

SEQ ID NO: 431472 - DNA, 60 bp, Artificial
  Synthetic oligonucleotide
ggtctgggactggtgtgaagctggcgagttcatcgctagccgtgtgagaagtagttggtt

SEQ ID NO: 431473 - DNA, 60 bp, Artificial
  Synthetic oligonucleotide
ggtctgggctctactacgctagcgaatcagcctttactattagatcctgataatgttgat

SEQ ID NO: 431474 - DNA, 60 bp, Artificial
  Synthetic oligonucleotide
ggtctggggcattaagcagctccagacaagagtcttggctatagaaagatacctaaagga

SEQ ID NO: 431475 - DNA, 55 bp, Artificial
  Synthetic oligonucleotide
ggtctggggtctcatttatactaggagcctctatagaactctcaatctggttcgc

SEQ ID NO: 431476 - DNA, 59 bp, Artificial
  Synthetic oligonucleotide
ggtctgggtggtcagccggagtgggtctggggtggcgatgccgcaagtaccggcacgca

SEQ ID NO: 431477 - DNA, 55 bp, Artificial
  Synthetic oligonucleotide
ggtctggtcttaagtccaaccaagatgaaaattggaaccagacaggtggacttct

SEQ ID NO: 431478 - DNA, 58 bp, Artificial
  Synthetic oligonucleotide
ggtctggtgagtgtcttccatttaagaacaccatgaacacctatgaaggctgtgtccc

SEQ ID NO: 431479 - DNA, 58 bp, Artificial
  Synthetic oligonucleotide
ggtctggttatgcagcagataaagaaagtacccagaaagcaatagacgggatcaccaa

SEQ ID NO: 431480 - DNA, 54 bp, Artificial
  Synthetic oligonucleotide
ggtctgtaccgttattcctatacgcgcacgaacttaaggttattccattagagg

SEQ ID NO: 431481 - DNA, 60 bp, Artificial
  Synthetic oligonucleotide
ggtctgtactccaactgctctaccacatggtcctgggttggtcatagtggttcaactcca

SEQ ID NO: 431482 - DNA, 55 bp, Artificial
  Synthetic oligonucleotide
ggtctgtcattctggcgaccctcctgtgagtttggcctgtgcatggtacgtgccg

SEQ ID NO: 431483 - DNA, 55 bp, Artificial
  Synthetic oligonucleotide
ggtctgtgaccacaaacacgtagttactgaccgtggaacctacggagccgaggcg

SEQ ID NO: 431484 - DNA, 55 bp, Artificial
  Synthetic oligonucleotide
ggtctgttacgtgcacttgggtggaaataccaccatctgtccggcttaaggcctc

SEQ ID NO: 431485 - DNA, 55 bp, Artificial
  Synthetic oligonucleotide
ggtctgttaggctccatggcgtctctgctgacgcagtgggaacatcagttcacac

SEQ ID NO: 431486 - DNA, 55 bp, Artificial
  Synthetic oligonucleotide
ggtctgttcgactgtcaggctgataagtggattttgcaacccacggagcgaaccc

SEQ ID NO: 431487 - DNA, 57 bp, Artificial
  Synthetic oligonucleotide
ggtcttaaagacccttaagaattgaccagtcggaggctgtgaagtcatccagattcg

SEQ ID NO: 431488 - DNA, 54 bp, Artificial
  Synthetic oligonucleotide
ggtcttaaataccctcaagaaacgccaagtcgctggttgtaagcgagtgaaaac

SEQ ID NO: 431489 - DNA, 60 bp, Artificial
  Synthetic oligonucleotide
ggtcttacaagacatgcggaacacgattatggcatcaaagacagtagggacatctgaaga

SEQ ID NO: 431490 - DNA, 51 bp, Artificial
  Synthetic oligonucleotide
ggtcttactcgtctatgcctccgcttgaaggggagcccggtgatccagacc

SEQ ID NO: 431491 - DNA, 55 bp, Artificial
  Synthetic oligonucleotide
ggtcttacttgaatgagactaaattcagaactcagtggctgtcagagagcaatgc

SEQ ID NO: 431492 - DNA, 60 bp, Artificial
  Synthetic oligonucleotide
ggtcttagagtgttacaacattaggccctctgaagatcaggtcatgtggtaggatgttgt

SEQ ID NO: 431493 - DNA, 55 bp, Artificial
  Synthetic oligonucleotide
ggtcttagcaataccagaatgggagattggggtgtctaatgctgatagggcatcc

SEQ ID NO: 431494 - DNA, 60 bp, Artificial
  Synthetic oligonucleotide
ggtcttagctcacagcctcgatccatattatttaaggtgataactcgtacgtgctcattt

SEQ ID NO: 431495 - DNA, 55 bp, Artificial
  Synthetic oligonucleotide
ggtcttaggaggtcatggggaggactccctggagtctgatgaggacattcagggg

SEQ ID NO: 431496 - DNA, 55 bp, Artificial
  Synthetic oligonucleotide
ggtcttagtgggcctgacatctacaagggagtttaccaatttaagtcagtggagt

SEQ ID NO: 431497 - DNA, 60 bp, Artificial
  Synthetic oligonucleotide
ggtcttataatgcggaactccttgttgccctagaaaatcagcatacaattgatttgactg

SEQ ID NO: 431498 - DNA, 58 bp, Artificial
  Synthetic oligonucleotide
ggtcttatggctcaaatatcacgggctaccgtgctgagatagtcggtaagaaccagac

SEQ ID NO: 431499 - DNA, 51 bp, Artificial
  Synthetic oligonucleotide
ggtcttcaaagattcgtgactcctcagcactcagtttgacatcgacaattt

SEQ ID NO: 431500 - DNA, 53 bp, Artificial
  Synthetic oligonucleotide
ggtcttcaactccataggaaaagccgttcaccaagtgtttggtggtgccttca

SEQ ID NO: 431501 - DNA, 55 bp, Artificial
  Synthetic oligonucleotide
ggtcttcacaattatgacaacacatgctggctaaatgccctgactcagctgacac

SEQ ID NO: 431502 - DNA, 58 bp, Artificial
  Synthetic oligonucleotide
ggtcttcccggttcggctatcaccttctagaacaatactgatcggtctccatggccgc

SEQ ID NO: 431503 - DNA, 55 bp, Artificial
  Synthetic oligonucleotide
ggtcttcctccaattatggagacgttgtggccggactaaaaagggctgcacgagt

SEQ ID NO: 431504 - DNA, 55 bp, Artificial
  Synthetic oligonucleotide
ggtcttcctccaattatggagatgttgtgacggggctaaaaagggccgcacgggc

SEQ ID NO: 431505 - DNA, 57 bp, Artificial
  Synthetic oligonucleotide
ggtcttcctcctggttttggagtccatactttgggctgctagtgcatcggaaatacc

SEQ ID NO: 431506 - DNA, 55 bp, Artificial
  Synthetic oligonucleotide
ggtcttcgatattctggactgcttcgttaggagtaccctcatagtgagccagtac

SEQ ID NO: 431507 - DNA, 55 bp, Artificial
  Synthetic oligonucleotide
ggtcttcgcgaccagctgccaattgtccgagtggtgtatcgccccgtactcggtc

SEQ ID NO: 431508 - DNA, 55 bp, Artificial
  Synthetic oligonucleotide
ggtcttctccaagagccaactttgcacaaagtttgacaatcggtttagggatgcc

SEQ ID NO: 431509 - DNA, 57 bp, Artificial
  Synthetic oligonucleotide
ggtcttctgggttttgctgcccctttcacacaatgtggttatcctgcgttaatgccc

SEQ ID NO: 431510 - DNA, 55 bp, Artificial
  Synthetic oligonucleotide
ggtcttgaaaaggaaagtgttaaacgtacactatataaagcgatctctatgggct

SEQ ID NO: 431511 - DNA, 58 bp, Artificial
  Synthetic oligonucleotide
ggtcttgaagcacttgacttaaacacaagtgcagggttcccttacataagcatgggaa

SEQ ID NO: 431512 - DNA, 60 bp, Artificial
  Synthetic oligonucleotide
ggtcttgacattaggtttcgcagcatagagtgcctgtactaacttagtgacgtctctagt

SEQ ID NO: 431513 - DNA, 60 bp, Artificial
  Synthetic oligonucleotide
ggtcttgacctggacaataatctactaattgcgcgttagatagagaaggttgacagcttg

SEQ ID NO: 431514 - DNA, 55 bp, Artificial
  Synthetic oligonucleotide
ggtcttgacggcaatgtatcagcccaatcggagaacacagagaggcatacagttg

SEQ ID NO: 431515 - DNA, 55 bp, Artificial
  Synthetic oligonucleotide
ggtcttgattgtgacgacatccacgagattgcccctgctcctaccgctatggcac

SEQ ID NO: 431516 - DNA, 56 bp, Artificial
  Synthetic oligonucleotide
ggtcttgcagcatataccctgaccccgcgccctataattcacgcggtggcccccga

SEQ ID NO: 431517 - DNA, 51 bp, Artificial
  Synthetic oligonucleotide
ggtcttgcgaatgaacacttatcaacagtcgaaagacgcactagcgtctca

SEQ ID NO: 431518 - DNA, 50 bp, Artificial
  Synthetic oligonucleotide
ggtcttgcggaacctgatagagtaatcatccatgatgaagtgcactattg

SEQ ID NO: 431519 - DNA, 55 bp, Artificial
  Synthetic oligonucleotide
ggtcttgcgttagccatacgactcataaacagaccggtatcgctacgcgagccag

SEQ ID NO: 431520 - DNA, 59 bp, Artificial
  Synthetic oligonucleotide
ggtcttgctcgcaaagacggttacggccccagacacggcagctgattcggagctaagaa

SEQ ID NO: 431521 - DNA, 54 bp, Artificial
  Synthetic oligonucleotide
ggtcttggacatccctggacgagctccaaccgctcaacgcacttaacggtgcaa

SEQ ID NO: 431522 - DNA, 55 bp, Artificial
  Synthetic oligonucleotide
ggtcttggctagatatctctagctggttctggtacataaagtatgcagtcctagc

SEQ ID NO: 431523 - DNA, 60 bp, Artificial
  Synthetic oligonucleotide
ggtcttggctggtaaaagacatctgaccaactccggttatgcatccatcaccaagtagta

SEQ ID NO: 431524 - DNA, 54 bp, Artificial
  Synthetic oligonucleotide
ggtcttgggagacctccaatgggtctctaggggcacacccactacccgccggcc

SEQ ID NO: 431525 - DNA, 55 bp, Artificial
  Synthetic oligonucleotide
ggtcttgtacagtagtaatgactgatggaagtgcatcagggaaggccgacactag

SEQ ID NO: 431526 - DNA, 55 bp, Artificial
  Synthetic oligonucleotide
ggtcttgtggtgacagacataccaactctggaagaggttgacccactcgttgaga

SEQ ID NO: 431527 - DNA, 55 bp, Artificial
  Synthetic oligonucleotide
ggtctttaagcatcggaatcctccttagatagcgtagcttccgccaccagggtcg

SEQ ID NO: 431528 - DNA, 55 bp, Artificial
  Synthetic oligonucleotide
ggtctttacatgaatgttacgatgtttgttactcttatccgttaacaatcaaggt

SEQ ID NO: 431529 - DNA, 55 bp, Artificial
  Synthetic oligonucleotide
ggtctttacgatccgaaacgtagtttcaagccatgtgacaaccttccgagccacc

SEQ ID NO: 431530 - DNA, 55 bp, Artificial
  Synthetic oligonucleotide
ggtctttagatgcctcattttggttgcaaacacacttgtctgtacaagagtgggt

SEQ ID NO: 431531 - DNA, 53 bp, Artificial
  Synthetic oligonucleotide
ggtctttctgaacctcccttcctaatctccctccggttttctgaggcgggagc

SEQ ID NO: 431532 - DNA, 53 bp, Artificial
  Synthetic oligonucleotide
ggtctttgccgtggcctacatgagcacgttgcagcatgcgatagcaggcgagc

SEQ ID NO: 431533 - DNA, 57 bp, Artificial
  Synthetic oligonucleotide
ggtctttgcgaccctgtgcgtttgttcgtcaagaacgagccacacccacagaagaaa

SEQ ID NO: 431534 - DNA, 55 bp, Artificial
  Synthetic oligonucleotide
ggtctttgtattgggaggctgtaggcataaattggtctgcgcaccagcaccatgc

SEQ ID NO: 431535 - DNA, 58 bp, Artificial
  Synthetic oligonucleotide
ggtctttgtattttgcatcctgatatatagctaagacaacactaatcatctcaaagct

SEQ ID NO: 431536 - DNA, 55 bp, Artificial
  Synthetic oligonucleotide
ggtcttttctggacaaggaggacgtgaacgtggtgacaggccctttgaggtcaag

SEQ ID NO: 431537 - DNA, 52 bp, Artificial
  Synthetic oligonucleotide
ggtcttttgggttttgccgctccctttacgcaatgtggatatcctgctttga

SEQ ID NO: 431538 - DNA, 58 bp, Artificial
  Synthetic oligonucleotide
ggtgaaaacacccccagagtgcaccacggcaacacgccagtgagagtggcgacgggga

SEQ ID NO: 431539 - DNA, 59 bp, Artificial
  Synthetic oligonucleotide
ggtgaaaatggacggagaacaaggattgcatacgagagaatgtgtaacattctcaaagg

SEQ ID NO: 431540 - DNA, 55 bp, Artificial
  Synthetic oligonucleotide
ggtgaaaattcgactttaattgcgaactcgatgcataataaagcgattggaggtc

SEQ ID NO: 431541 - DNA, 55 bp, Artificial
  Synthetic oligonucleotide
ggtgaaacatcaggccgcaaagaaagctaaacgcttagctgagatccaggagtcc

SEQ ID NO: 431542 - DNA, 60 bp, Artificial
  Synthetic oligonucleotide
ggtgaaacatgagtgcctctcattatataggagtcgtatatcttgatatatgaacctaat

SEQ ID NO: 431543 - DNA, 56 bp, Artificial
  Synthetic oligonucleotide
ggtgaaactagtgtacccaagtgttggcttgtcaccaatggttcttacttaaatga

SEQ ID NO: 431544 - DNA, 55 bp, Artificial
  Synthetic oligonucleotide
ggtgaaactctcttctgggtacaaagatgttatactatggtttagcttcggggcg

SEQ ID NO: 431545 - DNA, 57 bp, Artificial
  Synthetic oligonucleotide
ggtgaaactggagtctgaaggaacttacaagattcttaccatttattcgactgtcgc

SEQ ID NO: 431546 - DNA, 55 bp, Artificial
  Synthetic oligonucleotide
ggtgaaagaacctctcttgttttgacgtggttggaattaacatcaattccgacga

SEQ ID NO: 431547 - DNA, 59 bp, Artificial
  Synthetic oligonucleotide
ggtgaaagacgctcagttacagtgtcagtagagtcgttatggtaaacagtgtactgagg

SEQ ID NO: 431548 - DNA, 55 bp, Artificial
  Synthetic oligonucleotide
ggtgaaagaggtaacgagacagaggttgatggggaggcactggatgcagggtggt

SEQ ID NO: 431549 - DNA, 60 bp, Artificial
  Synthetic oligonucleotide
ggtgaaagagtgacaatatatactagaaccctcaatagaactttcaatcgtgttcgcaca

SEQ ID NO: 431550 - DNA, 51 bp, Artificial
  Synthetic oligonucleotide
ggtgaaaggaaagtacgaagggttttcggcgtctggtgctaaggatttagt

SEQ ID NO: 431551 - DNA, 60 bp, Artificial
  Synthetic oligonucleotide
ggtgaaataatcaacaagtgtaaagtgcaggatgttggtctcaaacccatcaacacacca

SEQ ID NO: 431552 - DNA, 55 bp, Artificial
  Synthetic oligonucleotide
ggtgaaatcacaccacgtgatgggagtacgacctgatagggtgctgcagaggccc

SEQ ID NO: 431553 - DNA, 60 bp, Artificial
  Synthetic oligonucleotide
ggtgaaatcacgcttgtgaaccagatcagtggtctacctgccagagtatctacgttggaa

SEQ ID NO: 431554 - DNA, 55 bp, Artificial
  Synthetic oligonucleotide
ggtgaaatcattatttggggatctaaaaccccatttggagaaacagcgagctcgt

SEQ ID NO: 431555 - DNA, 54 bp, Artificial
  Synthetic oligonucleotide
ggtgaacaaggatttcgtttacacggtccttaatcatataaagacgtaccaagc

SEQ ID NO: 431556 - DNA, 55 bp, Artificial
  Synthetic oligonucleotide
ggtgaacaagtcactggggcatgctatggcgactttggggcaacccgttgcgaac

SEQ ID NO: 431557 - DNA, 59 bp, Artificial
  Synthetic oligonucleotide
ggtgaacaagttaagaagccaattggtttggctaaggggcaggctcacatgaatcttgc

SEQ ID NO: 431558 - DNA, 60 bp, Artificial
  Synthetic oligonucleotide
ggtgaacacaagtctcggttgttatgcaacatagaggcgaaattgcgagtacttctcgac

SEQ ID NO: 431559 - DNA, 60 bp, Artificial
  Synthetic oligonucleotide
ggtgaacagggcattgatctaggtactagtggtgaaagaactggacctgctaaggacgca

SEQ ID NO: 431560 - DNA, 55 bp, Artificial
  Synthetic oligonucleotide
ggtgaacagtatccacaaggttacctgcttacttgcatcaagaacttaccggagg

SEQ ID NO: 431561 - DNA, 59 bp, Artificial
  Synthetic oligonucleotide
ggtgaaccaataataaatttctatgacccattagtattcccctctgatgaatttgatgc

SEQ ID NO: 431562 - DNA, 55 bp, Artificial
  Synthetic oligonucleotide
ggtgaacccactgacgttgatagcggcggtgttgatgctagtggctcattatgcc

SEQ ID NO: 431563 - DNA, 51 bp, Artificial
  Synthetic oligonucleotide
ggtgaacctaaacccaaaactaaaatacctgaaagaagggtggtggcacaa

SEQ ID NO: 431564 - DNA, 55 bp, Artificial
  Synthetic oligonucleotide
ggtgaacggattcaaagacttggaagggtaggaagatgcaaacctgggttcgctc

SEQ ID NO: 431565 - DNA, 55 bp, Artificial
  Synthetic oligonucleotide
ggtgaactaaatgcagacacttctgtatacttactagaaggtgaatcacaaccag

SEQ ID NO: 431566 - DNA, 53 bp, Artificial
  Synthetic oligonucleotide
ggtgaactcgtttctcgttccgaggttaccaaggcgatcaacaagtacatcac

SEQ ID NO: 431567 - DNA, 55 bp, Artificial
  Synthetic oligonucleotide
ggtgaacttagcagcggacgttaagattgtgaatatgttatattaaaacgttacc

SEQ ID NO: 431568 - DNA, 57 bp, Artificial
  Synthetic oligonucleotide
ggtgaacttgactgaactacccgctaatcaacacgtagtgaccgttcacaccgtgta

SEQ ID NO: 431569 - DNA, 59 bp, Artificial
  Synthetic oligonucleotide
ggtgaacttgcaagttattatacacactggactggtagcctacgcttcagctttatgtt

SEQ ID NO: 431570 - DNA, 58 bp, Artificial
  Synthetic oligonucleotide
ggtgaactttgtgagtatggaattctcccttactgacccaaggctggagccacacaaa

SEQ ID NO: 431571 - DNA, 54 bp, Artificial
  Synthetic oligonucleotide
ggtgaagaagatatctgctaagcttaagagtaagaatgctaatatcgtaactca

SEQ ID NO: 431572 - DNA, 60 bp, Artificial
  Synthetic oligonucleotide
ggtgaagaatcgtccactcatggcggccatattgggcttttcaaatgtggcagccacttc

SEQ ID NO: 431573 - DNA, 55 bp, Artificial
  Synthetic oligonucleotide
ggtgaagaatgatgaacgtcgaaaccaaacaaataaaatcgaacgctgacccgac

SEQ ID NO: 431574 - DNA, 55 bp, Artificial
  Synthetic oligonucleotide
ggtgaagactgtctgagagcttctatggatgtcatgactaaatgtcttgagtacc

SEQ ID NO: 431575 - DNA, 55 bp, Artificial
  Synthetic oligonucleotide
ggtgaagagtctactgacagtaagacggcgtacctgagacgtgcttttgtacgtg

SEQ ID NO: 431576 - DNA, 55 bp, Artificial
  Synthetic oligonucleotide
ggtgaagatatagtaaacgcatgggatgcttatgtaagggcagttgaggacgcat

SEQ ID NO: 431577 - DNA, 60 bp, Artificial
  Synthetic oligonucleotide
ggtgaagcaattgggcgtctcgtatcatctgagaggactgaaggtatgaggagcgtgaac

SEQ ID NO: 431578 - DNA, 60 bp, Artificial
  Synthetic oligonucleotide
ggtgaagcagattactgtatggacacgtttcacaaatgctcaaggcgagctgactatgct

SEQ ID NO: 431579 - DNA, 59 bp, Artificial
  Synthetic oligonucleotide
ggtgaagcatatttggaatcacaagtcccaacgtcaatcaaattgcgcgtaccggcagt

SEQ ID NO: 431580 - DNA, 57 bp, Artificial
  Synthetic oligonucleotide
ggtgaagcatcgactggggccccctagcgtgagctcagcacgttggaaaaacgaaaa

SEQ ID NO: 431581 - DNA, 56 bp, Artificial
  Synthetic oligonucleotide
ggtgaagcccggaagaatacttcactgggctatgattaaaagttcttgggaaatca

SEQ ID NO: 431582 - DNA, 53 bp, Artificial
  Synthetic oligonucleotide
ggtgaaggacctggggtacgagtaggcggcactctaacagtagttcgcccggg

SEQ ID NO: 431583 - DNA, 58 bp, Artificial
  Synthetic oligonucleotide
ggtgaaggaccttgtgaacctggtgattgtggtggaaaattattatgcaaacatggtg

SEQ ID NO: 431584 - DNA, 51 bp, Artificial
  Synthetic oligonucleotide
ggtgaaggacgaaacgccttacgccaacatcgaattggtgctgatggaatt

SEQ ID NO: 431585 - DNA, 55 bp, Artificial
  Synthetic oligonucleotide
ggtgaaggagcagggaatttattgttgcgcacagtagtggaacttcatcctgata

SEQ ID NO: 431586 - DNA, 53 bp, Artificial
  Synthetic oligonucleotide
ggtgaagggcatctttagtggtaattggatcgtcttgattgtcttatgtgtgt

SEQ ID NO: 431587 - DNA, 60 bp, Artificial
  Synthetic oligonucleotide
ggtgaagggcatgtagcattcatagatcttagacactttcattgtgcagaagaacaaggc

SEQ ID NO: 431588 - DNA, 54 bp, Artificial
  Synthetic oligonucleotide
ggtgaagggtgggtcatggttagaaacccccgtgtgagcctttccaaggatagc

SEQ ID NO: 431589 - DNA, 56 bp, Artificial
  Synthetic oligonucleotide
ggtgaaggtcctcttcggtgacctcaacccccatctggagaaacaacgtgctcgta

SEQ ID NO: 431590 - DNA, 55 bp, Artificial
  Synthetic oligonucleotide
ggtgaaggtcttcctggaatgtgtggtggggctctggtctcatcaaatcagtcca

SEQ ID NO: 431591 - DNA, 55 bp, Artificial
  Synthetic oligonucleotide
ggtgaagtaccttgaatcatctgtcaattcagagcatatcttctcagtagaccac

SEQ ID NO: 431592 - DNA, 55 bp, Artificial
  Synthetic oligonucleotide
ggtgaagtatttaatatgtttgataatgagccaattacggccaccgttaaaaaca

SEQ ID NO: 431593 - DNA, 55 bp, Artificial
  Synthetic oligonucleotide
ggtgaagtcacaatcaagcaggagaaatggaatggcaattggaaaccagcaggtg

SEQ ID NO: 431594 - DNA, 60 bp, Artificial
  Synthetic oligonucleotide
ggtgaagtcccctctccgtacaactcaagatttgagtcagttgcttggtcagcaagcgct

SEQ ID NO: 431595 - DNA, 59 bp, Artificial
  Synthetic oligonucleotide
ggtgaagtccttgttcggggatctgaatccccatcttgagaaacagcgagctcgtcgga

SEQ ID NO: 431596 - DNA, 58 bp, Artificial
  Synthetic oligonucleotide
ggtgaagtcgatggtcccattccagtagttgtgtcgtccgagacttctagcccaggtg

SEQ ID NO: 431597 - DNA, 54 bp, Artificial
  Synthetic oligonucleotide
ggtgaagtgtaacgacgggaaatggtacggccactacctcctgagagttggcgg

SEQ ID NO: 431598 - DNA, 51 bp, Artificial
  Synthetic oligonucleotide
ggtgaagttgaaagttgaagaccatttgtctttccagaactttgtgcaagc

SEQ ID NO: 431599 - DNA, 55 bp, Artificial
  Synthetic oligonucleotide
ggtgaataagctcgagaatttggtatcgtttgctcctttgtacaacgtgcccaaa

SEQ ID NO: 431600 - DNA, 54 bp, Artificial
  Synthetic oligonucleotide
ggtgaatcaagacaactaaaatttggtcgtaaaacgatattctcgactaggaaa

SEQ ID NO: 431601 - DNA, 55 bp, Artificial
  Synthetic oligonucleotide
ggtgaatcagatgcatgagggtgtaatcagtctatgggatcaaagcctaaagcca

SEQ ID NO: 431602 - DNA, 54 bp, Artificial
  Synthetic oligonucleotide
ggtgaatcccccagacccaccagtgtaccctaaccagggaggatgctcccaaaa

SEQ ID NO: 431603 - DNA, 60 bp, Artificial
  Synthetic oligonucleotide
ggtgaatcgtacatgtcattcggcgtggacgtcaaatggacgtatatttaggttgcacat

SEQ ID NO: 431604 - DNA, 60 bp, Artificial
  Synthetic oligonucleotide
ggtgaatgaactatgaaacgactgctagactagggtttgcaagagagtacacgaacatgt

SEQ ID NO: 431605 - DNA, 58 bp, Artificial
  Synthetic oligonucleotide
ggtgaatgcagtcaagtacgtgaaaccgccagagaagatccctgggatcggaacccta

SEQ ID NO: 431606 - DNA, 55 bp, Artificial
  Synthetic oligonucleotide
ggtgaatggaataataacgtcaattgtctcaataacagtgttcttttgcgggagc

SEQ ID NO: 431607 - DNA, 60 bp, Artificial
  Synthetic oligonucleotide
ggtgaatggcccgaatattctaaggacactgaggctactgcagtggataagcctactaga

SEQ ID NO: 431608 - DNA, 60 bp, Artificial
  Synthetic oligonucleotide
ggtgaatggcctagtatgcgcgacttagcagtgttgtgtagatatattagtgcattctac

SEQ ID NO: 431609 - DNA, 55 bp, Artificial
  Synthetic oligonucleotide
ggtgaatggtgacgcatatatactagagctactaatagcccataggggcactcag

SEQ ID NO: 431610 - DNA, 55 bp, Artificial
  Synthetic oligonucleotide
ggtgaatgttgattgggccaacgcagtggcaacgtacaatgcgtggtacggtggc

SEQ ID NO: 431611 - DNA, 51 bp, Artificial
  Synthetic oligonucleotide
ggtgaattacagtgattcgcctttattctgcggttggagaatgagtcctta

SEQ ID NO: 431612 - DNA, 60 bp, Artificial
  Synthetic oligonucleotide
ggtgaattggcagcggcaataagccaatcaatctttccagttaagaaactgtcatgtaag

SEQ ID NO: 431613 - DNA, 55 bp, Artificial
  Synthetic oligonucleotide
ggtgaatttactatgctgggcatatacgacaggtgggccgttttgccacgccatg

SEQ ID NO: 431614 - DNA, 55 bp, Artificial
  Synthetic oligonucleotide
ggtgaattttgcagattcaggttcccaaagccagtgaggcccgatgtctctgggt

SEQ ID NO: 431615 - DNA, 59 bp, Artificial
  Synthetic oligonucleotide
ggtgaatttttcacgtcgatgattacttggatgggtcagctcattgatttctatgagtc

SEQ ID NO: 431616 - DNA, 55 bp, Artificial
  Synthetic oligonucleotide
ggtgacaacaaccaacccattgatcagacatgagaacaggatggtactggctagt

SEQ ID NO: 431617 - DNA, 60 bp, Artificial
  Synthetic oligonucleotide
ggtgacaacccgcgtcccgaagatggaacaggcagctgtggtccagtgtatgttgatgga

SEQ ID NO: 431618 - DNA, 55 bp, Artificial
  Synthetic oligonucleotide
ggtgacaagactaacatggagggttagtggagagcatatagacaaatggaagggc

SEQ ID NO: 431619 - DNA, 55 bp, Artificial
  Synthetic oligonucleotide
ggtgacaatccaaacgatactcttgaattatcagcagttagtagagattctgact

SEQ ID NO: 431620 - DNA, 60 bp, Artificial
  Synthetic oligonucleotide
ggtgacaatccgcgtcccaaagatggaaaaggcagctgtgatccagtaaatgttgatgga

SEQ ID NO: 431621 - DNA, 55 bp, Artificial
  Synthetic oligonucleotide
ggtgacaattgcagcactcgtcctgtgcctgccgttgctgctgacaggttgcggg

SEQ ID NO: 431622 - DNA, 51 bp, Artificial
  Synthetic oligonucleotide
ggtgacacaggtggcaatgacagacacgactccatttggacaacaacgcgt

SEQ ID NO: 431623 - DNA, 60 bp, Artificial
  Synthetic oligonucleotide
ggtgacacgctatggcaagtatgaccccgaagggctcaactatgccaagatgatcctgtc

SEQ ID NO: 431624 - DNA, 59 bp, Artificial
  Synthetic oligonucleotide
ggtgacagacagttacgagaactacacctacctcaatgcaagaaaactaggagaggatg

SEQ ID NO: 431625 - DNA, 54 bp, Artificial
  Synthetic oligonucleotide
ggtgacagcatataagccaatagtgtggcctatagtagactcaggtagatgctc

SEQ ID NO: 431626 - DNA, 60 bp, Artificial
  Synthetic oligonucleotide
ggtgacagctctcacaaagccagtgcctctcacatacctcatggtgatgcacatagtcat

SEQ ID NO: 431627 - DNA, 60 bp, Artificial
  Synthetic oligonucleotide
ggtgacaggtggacagtatgccagcaacgagcaggctatagtcaagcgattctggagggt

SEQ ID NO: 431628 - DNA, 55 bp, Artificial
  Synthetic oligonucleotide
ggtgacagtagtacggtcagtgagaagcagtttgttaatctcgatacgaatggag

SEQ ID NO: 431629 - DNA, 51 bp, Artificial
  Synthetic oligonucleotide
ggtgacagtgcctctctgtcgttcgaagttgtatgtgcctatacgcacgcg

SEQ ID NO: 431630 - DNA, 55 bp, Artificial
  Synthetic oligonucleotide
ggtgacagtgttgcactgaacttttcggacttagttctttcgttgggtgccacag

SEQ ID NO: 431631 - DNA, 55 bp, Artificial
  Synthetic oligonucleotide
ggtgacatctggcactattggcactcggcaggaacttgatcccgacaccactttc

SEQ ID NO: 431632 - DNA, 55 bp, Artificial
  Synthetic oligonucleotide
ggtgacatgccccggaatagggacgaggcgatgcttggaactcacgtaatatggg

SEQ ID NO: 431633 - DNA, 55 bp, Artificial
  Synthetic oligonucleotide
ggtgacattggtgcataataaattggttggacgtaaatgccctcaattctgtgtc

SEQ ID NO: 431634 - DNA, 60 bp, Artificial
  Synthetic oligonucleotide
ggtgacattgtctgacatttgtgaattcgctcgcctgccacttaatatcgctttatatca

SEQ ID NO: 431635 - DNA, 55 bp, Artificial
  Synthetic oligonucleotide
ggtgacatttgttataaaatagcggaatggttatggaaagttcgcatgtggttgc

SEQ ID NO: 431636 - DNA, 55 bp, Artificial
  Synthetic oligonucleotide
ggtgaccacaaccaatccactaatcaggcatgagaacaggatggtactagccagc

SEQ ID NO: 431637 - DNA, 54 bp, Artificial
  Synthetic oligonucleotide
ggtgaccacttaaataattgtggacccctaaagcaccggcccacatcgtcttcc

SEQ ID NO: 431638 - DNA, 59 bp, Artificial
  Synthetic oligonucleotide
ggtgaccatgtttttcttgagctcatagctgcgtaggggtctacgttccattctgaccc

SEQ ID NO: 431639 - DNA, 56 bp, Artificial
  Synthetic oligonucleotide
ggtgaccattccgaagaaatactgaaatccccgtaacagattctccatcctggtta

SEQ ID NO: 431640 - DNA, 55 bp, Artificial
  Synthetic oligonucleotide
ggtgaccccggggatgctggttccggtggaggaaggtgcggccaacagcgattca

SEQ ID NO: 431641 - DNA, 60 bp, Artificial
  Synthetic oligonucleotide
ggtgacccgacgactgcaactctcattgcgcctcgaacaacgatcatatgcatatgtcgg

SEQ ID NO: 431642 - DNA, 50 bp, Artificial
  Synthetic oligonucleotide
ggtgaccctggtgatattatgtcaactactacaggtatgaaatgtcctga

SEQ ID NO: 431643 - DNA, 53 bp, Artificial
  Synthetic oligonucleotide
ggtgaccgagattgaggttgtacacgttaaacccgaccataggtgtcccaccc

SEQ ID NO: 431644 - DNA, 55 bp, Artificial
  Synthetic oligonucleotide
ggtgaccgctgttttgctggtggtaacctcttcaaggagatgaacttgagtgtag

SEQ ID NO: 431645 - DNA, 60 bp, Artificial
  Synthetic oligonucleotide
ggtgacctgtgtgtgcagagataactggcagggggcaaacaggcctattatagaaattga

SEQ ID NO: 431646 - DNA, 55 bp, Artificial
  Synthetic oligonucleotide
ggtgaccttaggacaaagatgttcactagactgatagaggactactttgaggcac

SEQ ID NO: 431647 - DNA, 51 bp, Artificial
  Synthetic oligonucleotide
ggtgacgaagatcgcattatgaatggtccagttgtgtaaagctcggttttc

SEQ ID NO: 431648 - DNA, 56 bp, Artificial
  Synthetic oligonucleotide
ggtgacgaatggctgagtttactccgccgggtgtaggagacgcgaccggagggaga

SEQ ID NO: 431649 - DNA, 50 bp, Artificial
  Synthetic oligonucleotide
ggtgacgaattggatgtatactcctgcttacctcggaggtgttggtatcc

SEQ ID NO: 431650 - DNA, 55 bp, Artificial
  Synthetic oligonucleotide
ggtgacgacaccttattttacactgaattgagaacgcggtcagttgagcggttcg

SEQ ID NO: 431651 - DNA, 60 bp, Artificial
  Synthetic oligonucleotide
ggtgacgactaccagtctatctaatcggtgcataaagggactggtatctctcgccaagat

SEQ ID NO: 431652 - DNA, 55 bp, Artificial
  Synthetic oligonucleotide
ggtgacgattcactattcgataagcaatatcagcttagatggaattacgtcgtcg

SEQ ID NO: 431653 - DNA, 56 bp, Artificial
  Synthetic oligonucleotide
ggtgacgccctcccggatgagctatatgtcaagagttctaccgtccagacccccgg

SEQ ID NO: 431654 - DNA, 59 bp, Artificial
  Synthetic oligonucleotide
ggtgacgcctaggtgtctagtggattacccttacaggctgtggcattacccctgcactg

SEQ ID NO: 431655 - DNA, 55 bp, Artificial
  Synthetic oligonucleotide
ggtgacgctgaatgcacgggggggtgacgccctctggactagcacgttattcatc

SEQ ID NO: 431656 - DNA, 59 bp, Artificial
  Synthetic oligonucleotide
ggtgacgcttttacgtatttcgggaacactctggtgacaatgtctatgatggcttactg

SEQ ID NO: 431657 - DNA, 57 bp, Artificial
  Synthetic oligonucleotide
ggtgacggatgtcggtcaagggttggagaaaactggtaacacaattcgcgtcattgc

SEQ ID NO: 431658 - DNA, 58 bp, Artificial
  Synthetic oligonucleotide
ggtgacggcaagataggcgatattaagaagggtgccctgtatctagtaacctgtactc

SEQ ID NO: 431659 - DNA, 55 bp, Artificial
  Synthetic oligonucleotide
ggtgacgggcatacgggcccagcctgtagcgaaaccgtctttcgcgttgcatcgt

SEQ ID NO: 431660 - DNA, 54 bp, Artificial
  Synthetic oligonucleotide
ggtgacgtaacgcgatttttgtcagatgatgcacttgtattatatactgatgtg

SEQ ID NO: 431661 - DNA, 54 bp, Artificial
  Synthetic oligonucleotide
ggtgacgtggcataatttcaatatgaaaggttaaccggtaaccgtggcgaacta

SEQ ID NO: 431662 - DNA, 55 bp, Artificial
  Synthetic oligonucleotide
ggtgacgtgtgggaacttattggaaacaacattttgctgcaaagcatcctactgc

SEQ ID NO: 431663 - DNA, 55 bp, Artificial
  Synthetic oligonucleotide
ggtgacgttatgagtcagagaggcatatcaaaagggttgctagtttgtcattctg

SEQ ID NO: 431664 - DNA, 55 bp, Artificial
  Synthetic oligonucleotide
ggtgacgttcagaggcccacttttaggtgggtcaatgcagcagtgctaataggag

SEQ ID NO: 431665 - DNA, 55 bp, Artificial
  Synthetic oligonucleotide
ggtgacgtttattataaattgcggtcatggtatgaatggagcgtacgtgagggat

SEQ ID NO: 431666 - DNA, 55 bp, Artificial
  Synthetic oligonucleotide
ggtgactacagcgaggagagttgctagtttcaagtactttatggacgacaagctg

SEQ ID NO: 431667 - DNA, 60 bp, Artificial
  Synthetic oligonucleotide
ggtgactaccaccaacccactaatcaggcatgaaaacagaatggtgctggctagcactac

SEQ ID NO: 431668 - DNA, 55 bp, Artificial
  Synthetic oligonucleotide
ggtgactacgagctacaaggccccgaagacatcgctgtggagctcgtgcccgttg

SEQ ID NO: 431669 - DNA, 60 bp, Artificial
  Synthetic oligonucleotide
ggtgactcaatggcacaatactagtgtggtcgaatacatgccatattggaatgaaggcac

SEQ ID NO: 431670 - DNA, 60 bp, Artificial
  Synthetic oligonucleotide
ggtgactccatctttgtcgatgtatgctttaacatctgaacttgatttaactccctgtat

SEQ ID NO: 431671 - DNA, 55 bp, Artificial
  Synthetic oligonucleotide
ggtgactcctctgaataaaagcataggttctttaaggcagcactcatacactttg

SEQ ID NO: 431672 - DNA, 55 bp, Artificial
  Synthetic oligonucleotide
ggtgactcgaacaccggggaccagtggagccatgggatgctcttcccgatgctcg

SEQ ID NO: 431673 - DNA, 58 bp, Artificial
  Synthetic oligonucleotide
ggtgactctatcggtggtaaacatcgtgttcaggtctcagggactgaacaggtttcca

SEQ ID NO: 431674 - DNA, 60 bp, Artificial
  Synthetic oligonucleotide
ggtgactctgattgtttccaacatatttccaccatcaagaatggatgctccagcctttac

SEQ ID NO: 431675 - DNA, 55 bp, Artificial
  Synthetic oligonucleotide
ggtgactcttgataccgtttactggaaatttggttacgcatcagaagcagcgcaa

SEQ ID NO: 431676 - DNA, 59 bp, Artificial
  Synthetic oligonucleotide
ggtgactgaccccctgaaaacactggcttcaatcttgctagttggcctccacaacgtca

SEQ ID NO: 431677 - DNA, 58 bp, Artificial
  Synthetic oligonucleotide
ggtgactgcaggtcaggtaacagcaaagggcccgtgagtgggatctatctgaaaccgg

SEQ ID NO: 431678 - DNA, 57 bp, Artificial
  Synthetic oligonucleotide
ggtgactgctgaaagtaccgaaccgttacaatctagagtggttgtgcagttacctcc

SEQ ID NO: 431679 - DNA, 55 bp, Artificial
  Synthetic oligonucleotide
ggtgactgtagcttcgagggatggattgtaggaaacccctcctgtgccacaaaca

SEQ ID NO: 431680 - DNA, 55 bp, Artificial
  Synthetic oligonucleotide
ggtgacttcaaacaagcgtttgctctgatgaacattcgtaagtccattgagtcgt

SEQ ID NO: 431681 - DNA, 60 bp, Artificial
  Synthetic oligonucleotide
ggtgacttggacgggtctgggaagggtggcagacttcctcagatcgagcaggcatagaga

SEQ ID NO: 431682 - DNA, 58 bp, Artificial
  Synthetic oligonucleotide
ggtgacttggatatgcaccgctaccgagtgcgtaacatggcacaaggtacggggaacc

SEQ ID NO: 431683 - DNA, 54 bp, Artificial
  Synthetic oligonucleotide
ggtgagaaacctaaccacaaacatctaatagagagagactgtgcaacgatcaca

SEQ ID NO: 431684 - DNA, 57 bp, Artificial
  Synthetic oligonucleotide
ggtgagaacaaggaagagagtactttggatggaaagaacgacaccacgttgcttgaa

SEQ ID NO: 431685 - DNA, 55 bp, Artificial
  Synthetic oligonucleotide
ggtgagaacgtacgacagtttgctaatgaacactcccaatgtgatagaactagac

SEQ ID NO: 431686 - DNA, 60 bp, Artificial
  Synthetic oligonucleotide
ggtgagaacgttcaatgtgtacaactcggtggtgagagtgcgagaggacagtacacttct

SEQ ID NO: 431687 - DNA, 55 bp, Artificial
  Synthetic oligonucleotide
ggtgagaaggcaccgggaagttaggtaagtggctgtgagaggacgcttaccaggc

SEQ ID NO: 431688 - DNA, 52 bp, Artificial
  Synthetic oligonucleotide
ggtgagaaggtatctcaacacgcgttgtctttctacctcccttccgctgggt

SEQ ID NO: 431689 - DNA, 59 bp, Artificial
  Synthetic oligonucleotide
ggtgagaagtgtggtacaccacatttacaaggtcaaatatgtcttaagactcgtatgag

SEQ ID NO: 431690 - DNA, 56 bp, Artificial
  Synthetic oligonucleotide
ggtgagacaggatttagacaggcagttaggagaacttagggaagaatttaacacat

SEQ ID NO: 431691 - DNA, 59 bp, Artificial
  Synthetic oligonucleotide
ggtgagacatgtggtatgggcttccaaagagatggaaaggtttggcctgagtgacgccc

SEQ ID NO: 431692 - DNA, 60 bp, Artificial
  Synthetic oligonucleotide
ggtgagagaattgatcctgtatgataaagaagagatcagaaggatttggcgtcaagcaaa

SEQ ID NO: 431693 - DNA, 55 bp, Artificial
  Synthetic oligonucleotide
ggtgagagcaagcctcgcaaagacaggatataagataactcccgctaacaaaact

SEQ ID NO: 431694 - DNA, 55 bp, Artificial
  Synthetic oligonucleotide
ggtgagaggcattgtggggacacaagagaggtaccgtgattaccttgaaactcaa

SEQ ID NO: 431695 - DNA, 50 bp, Artificial
  Synthetic oligonucleotide
ggtgagagtccttgggcaacctggctacatgcctacccgcccacatacct

SEQ ID NO: 431696 - DNA, 60 bp, Artificial
  Synthetic oligonucleotide
ggtgagatacagtgtgcacacggtagtgagtgaccttatcagggagtatatcaacagatc

SEQ ID NO: 431697 - DNA, 55 bp, Artificial
  Synthetic oligonucleotide
ggtgagatcatatacgctctagcgttgttagggaaatacggtaattcgcaagcgt

SEQ ID NO: 431698 - DNA, 51 bp, Artificial
  Synthetic oligonucleotide
ggtgagattgcataagctgtccccacggctaaaagcgattgatccgttatc

SEQ ID NO: 431699 - DNA, 60 bp, Artificial
  Synthetic oligonucleotide
ggtgagattgggtacacataagctccgaagatgtccatggggttattggtcatcattgga

SEQ ID NO: 431700 - DNA, 60 bp, Artificial
  Synthetic oligonucleotide
ggtgagcaggctgtcgagatatagatggatgacccatcgtttctctcgggtaggtccacg

SEQ ID NO: 431701 - DNA, 50 bp, Artificial
  Synthetic oligonucleotide
ggtgagcattgaccgttttttaagggttcgggatcaacggggaaacgtac

SEQ ID NO: 431702 - DNA, 55 bp, Artificial
  Synthetic oligonucleotide
ggtgagccaggataagttaccaaatactcgacgcggcaattgtgccgtctcaacc

SEQ ID NO: 431703 - DNA, 60 bp, Artificial
  Synthetic oligonucleotide
ggtgagcccagacgtaagtgactactgcactgttctccacttctcaagacctgttatctc

SEQ ID NO: 431704 - DNA, 55 bp, Artificial
  Synthetic oligonucleotide
ggtgagcctgggtgttctctactaaactctcaaccagcaacaggccattgctggg

SEQ ID NO: 431705 - DNA, 60 bp, Artificial
  Synthetic oligonucleotide
ggtgagcgagtgtacgacgcccgtataaattactgctcaacggcagatgcgaccgttcaa

SEQ ID NO: 431706 - DNA, 55 bp, Artificial
  Synthetic oligonucleotide
ggtgagcggatttacatgtacaggagtggtcacggaagccgagacttacaccaac

SEQ ID NO: 431707 - DNA, 60 bp, Artificial
  Synthetic oligonucleotide
ggtgagcggctatcgatagctaacactctcgatggtcagttgtcctttacgattgagaat

SEQ ID NO: 431708 - DNA, 57 bp, Artificial
  Synthetic oligonucleotide
ggtgagctattccggggccaccaaaccctgcaggattcctgtgatggcgacggctca

SEQ ID NO: 431709 - DNA, 58 bp, Artificial
  Synthetic oligonucleotide
ggtgagctggttcaattacgcggtcacagttggaggaccgccaccattgataacctgg

SEQ ID NO: 431710 - DNA, 60 bp, Artificial
  Synthetic oligonucleotide
ggtgagcttccactgggggctcccctggatgcattggaggaaggctttctggatcttgag

SEQ ID NO: 431711 - DNA, 49 bp, Artificial
  Synthetic oligonucleotide
ggtgaggaaagtttccgttacttcccaaagtggaaaggtggtcccgtct

SEQ ID NO: 431712 - DNA, 57 bp, Artificial
  Synthetic oligonucleotide
ggtgaggaagtttacaatgaattcctaaccaagatcaggagtgttccagttggaaga

SEQ ID NO: 431713 - DNA, 53 bp, Artificial
  Synthetic oligonucleotide
ggtgaggatagtaaaagccattttccgaccgaccggcgccagccgggagggag

SEQ ID NO: 431714 - DNA, 55 bp, Artificial
  Synthetic oligonucleotide
ggtgaggcatatacgaagaagggtaagacaagcggtcgcacacatggtatgggtc

SEQ ID NO: 431715 - DNA, 55 bp, Artificial
  Synthetic oligonucleotide
ggtgaggccacaactcagatcaaaactagacccgatgtttttaccattacaaacg

SEQ ID NO: 431716 - DNA, 52 bp, Artificial
  Synthetic oligonucleotide
ggtgaggcctgatggacgcctagaggggagtgctaacccctgtgcaacacct

SEQ ID NO: 431717 - DNA, 52 bp, Artificial
  Synthetic oligonucleotide
ggtgaggcttcactgcatggtccccaattttacaagaaagtcagcaaaatgg

SEQ ID NO: 431718 - DNA, 56 bp, Artificial
  Synthetic oligonucleotide
ggtgagggacgcgatggcaagagtggaggaaagttcggagggaaatcccaagaaga

SEQ ID NO: 431719 - DNA, 60 bp, Artificial
  Synthetic oligonucleotide
ggtgaggggcatgttgctttcatagatttaagacacttcttatgtgctgaggaacaggga

SEQ ID NO: 431720 - DNA, 60 bp, Artificial
  Synthetic oligonucleotide
ggtgaggggctgaaataattgagcgacgctgttattaccgcattaatcacaacggctgga

SEQ ID NO: 431721 - DNA, 58 bp, Artificial
  Synthetic oligonucleotide
ggtgagggtaaattagaggaatggatggctaatactgctcttaaagtgcaagacggta

SEQ ID NO: 431722 - DNA, 53 bp, Artificial
  Synthetic oligonucleotide
ggtgagggtaggacgccggttacggtggtattacccatggccgtgaaatctgg

SEQ ID NO: 431723 - DNA, 60 bp, Artificial
  Synthetic oligonucleotide
ggtgaggtaatgagtctggcttcctgggtgggcaataatttggaggacccagcatctaga

SEQ ID NO: 431724 - DNA, 59 bp, Artificial
  Synthetic oligonucleotide
ggtgaggtcacggttgattgtgagccacggtcaggaatagacactagcgcctattacgt

SEQ ID NO: 431725 - DNA, 59 bp, Artificial
  Synthetic oligonucleotide
ggtgaggtccagattgtgtcaactgctacccaaactttcctggcgacgtgcatcaacgg

SEQ ID NO: 431726 - DNA, 55 bp, Artificial
  Synthetic oligonucleotide
ggtgaggttgaaaagatcgctgtaacgaagaaagaaatgttcgatgagttagctc

SEQ ID NO: 431727 - DNA, 54 bp, Artificial
  Synthetic oligonucleotide
ggtgagtaaatttgctggcggtggccagacctaggggaagggcgaagtccctag

SEQ ID NO: 431728 - DNA, 55 bp, Artificial
  Synthetic oligonucleotide
ggtgagtacctgactgggaaaattgaaagcttgcctgaaaggaaagtggccgctt

SEQ ID NO: 431729 - DNA, 55 bp, Artificial
  Synthetic oligonucleotide
ggtgagtacgtaggcgcggctctgaacagggcgaaaatgattggtctcgcgcccc

SEQ ID NO: 431730 - DNA, 55 bp, Artificial
  Synthetic oligonucleotide
ggtgagtagatgttcgagaatacatctgatgcacaggttaagcgagtgtacacgg

SEQ ID NO: 431731 - DNA, 55 bp, Artificial
  Synthetic oligonucleotide
ggtgagtagtgacagcttcatcataaaccacgcctccttgaatcttctctcctcc

SEQ ID NO: 431732 - DNA, 60 bp, Artificial
  Synthetic oligonucleotide
ggtgagtattggacaactgctaggccctgcgttacagataggccagagactggctcctgc

SEQ ID NO: 431733 - DNA, 55 bp, Artificial
  Synthetic oligonucleotide
ggtgagtcaaatcaatgaattgccatcgcgcgtatcaacactggaatcagcgaaa

SEQ ID NO: 431734 - DNA, 55 bp, Artificial
  Synthetic oligonucleotide
ggtgagtcacatgcgcctttgaaggctccaaccccgcgtagggttgtagtagcgc

SEQ ID NO: 431735 - DNA, 60 bp, Artificial
  Synthetic oligonucleotide
ggtgagtcatggtcctatgacgtcatcgcgtgaacactatacattctgagtacttgacct

SEQ ID NO: 431736 - DNA, 56 bp, Artificial
  Synthetic oligonucleotide
ggtgagtcggtcctctaaccagtctccgcggactggtactgggcctaaatttgata

SEQ ID NO: 431737 - DNA, 56 bp, Artificial
  Synthetic oligonucleotide
ggtgagtgactttcactacgccattgtggggaaggagatcggggagcaggggaccc

SEQ ID NO: 431738 - DNA, 54 bp, Artificial
  Synthetic oligonucleotide
ggtgagtggaccaaacgaattttagagttcggcttgataaccgttgtcttagac

SEQ ID NO: 431739 - DNA, 58 bp, Artificial
  Synthetic oligonucleotide
ggtgagtggggtaatggtagcctacgctcttgtggcagtaagtaaaggagggatcaca

SEQ ID NO: 431740 - DNA, 55 bp, Artificial
  Synthetic oligonucleotide
ggtgagtgtgcgtatgtcactgatcctgactcaatattcgattccctcaacatga

SEQ ID NO: 431741 - DNA, 55 bp, Artificial
  Synthetic oligonucleotide
ggtgagttaagggaagagttcaactcactatcgcaagaaattgcattgtcgcaac

SEQ ID NO: 431742 - DNA, 55 bp, Artificial
  Synthetic oligonucleotide
ggtgagttagacggcgcaccctatatgtttccagaccagaacttatctccgcagt

SEQ ID NO: 431743 - DNA, 57 bp, Artificial
  Synthetic oligonucleotide
ggtgagttgaattcggactatcgaccgcaaaccaaccattatggtaagaactaatga

SEQ ID NO: 431744 - DNA, 60 bp, Artificial
  Synthetic oligonucleotide
ggtgagttgatgaatctagccacctgggtgggtggtaatttggacgatccagcatcaaga

SEQ ID NO: 431745 - DNA, 55 bp, Artificial
  Synthetic oligonucleotide
ggtgagttgcatcgtcctaagctccagaggagtgtgccgttttaaaggcggatcg

SEQ ID NO: 431746 - DNA, 55 bp, Artificial
  Synthetic oligonucleotide
ggtgagttgtgagccaaatgaggtgagttgtaagccaaaagaggtcagagccaag

SEQ ID NO: 431747 - DNA, 60 bp, Artificial
  Synthetic oligonucleotide
ggtgagttttgccgcttgaggttcccaaagccaatcaggactgacgtgacaggtatgatc

SEQ ID NO: 431748 - DNA, 58 bp, Artificial
  Synthetic oligonucleotide
ggtgataaaactaaacctatgatacttaccattacacttaatggcactagtgaatcca

SEQ ID NO: 431749 - DNA, 55 bp, Artificial
  Synthetic oligonucleotide
ggtgataaaatcccagatgacctaatgattaaaggcacaggcaatactgcaacac

SEQ ID NO: 431750 - DNA, 55 bp, Artificial
  Synthetic oligonucleotide
ggtgataacatcttggtttatgtcgcaagtcacaacgaagttgacataatatcga

SEQ ID NO: 431751 - DNA, 56 bp, Artificial
  Synthetic oligonucleotide
ggtgataatttgcattcgttaccacacgggggttgttatcgtgacggcactaaaca

SEQ ID NO: 431752 - DNA, 60 bp, Artificial
  Synthetic oligonucleotide
ggtgatacacaacagataccttttgtttcgagaattccatatatgaaattgaggaatcat

SEQ ID NO: 431753 - DNA, 60 bp, Artificial
  Synthetic oligonucleotide
ggtgatacacaatgatatacgtttcagaaaattacgcattggacatacttattttcgata

SEQ ID NO: 431754 - DNA, 60 bp, Artificial
  Synthetic oligonucleotide
ggtgatacaggcagctgatccacttgcaaccgcctacctatgtggtatacatcgagagct

SEQ ID NO: 431755 - DNA, 53 bp, Artificial
  Synthetic oligonucleotide
ggtgataccgacgaccgtcgggaaagatttgacttcctgtttaaagtctatcc

SEQ ID NO: 431756 - DNA, 55 bp, Artificial
  Synthetic oligonucleotide
ggtgatacggtggttcctgtcgctccgacaatgtcagcggaacagcttttggacg

SEQ ID NO: 431757 - DNA, 60 bp, Artificial
  Synthetic oligonucleotide
ggtgatactatctactgtccgcgacatgttctaggcaagttctcaggtgaccaatggaat

SEQ ID NO: 431758 - DNA, 56 bp, Artificial
  Synthetic oligonucleotide
ggtgatagacagtaaaggtaacacgttaagcgaaagtacgtatatgagtgcgttat

SEQ ID NO: 431759 - DNA, 55 bp, Artificial
  Synthetic oligonucleotide
ggtgatagatcaccggttataacactttccttaaagtgtaatcgtcgttgagacg

SEQ ID NO: 431760 - DNA, 56 bp, Artificial
  Synthetic oligonucleotide
ggtgatagtactgtcatgataatagacggcatacgttatagtggaatggtctttaa

SEQ ID NO: 431761 - DNA, 54 bp, Artificial
  Synthetic oligonucleotide
ggtgatatcagaacaacactgaggtacctacccaggaaaggcgactgtaggagt

SEQ ID NO: 431762 - DNA, 60 bp, Artificial
  Synthetic oligonucleotide
ggtgatatcaggagacccgctatgctgggagcgaatacagtagggatagatgtgacagtt

SEQ ID NO: 431763 - DNA, 59 bp, Artificial
  Synthetic oligonucleotide
ggtgatatcttgtggggtgtctcaaaagttatgagtctagatctaaacaggctacttgc

SEQ ID NO: 431764 - DNA, 54 bp, Artificial
  Synthetic oligonucleotide
ggtgatatggctaatttggcaaatcggagtccgtatgaccagcaaccccgaagt

SEQ ID NO: 431765 - DNA, 60 bp, Artificial
  Synthetic oligonucleotide
ggtgatatgttacgtcgatggcatggagtcagacgaagacgagactcttctatggttgga

SEQ ID NO: 431766 - DNA, 58 bp, Artificial
  Synthetic oligonucleotide
ggtgatattacacagattaccgttaacggctcgcttacattagtaggacttgatgtat

SEQ ID NO: 431767 - DNA, 55 bp, Artificial
  Synthetic oligonucleotide
ggtgatatttctgtggacattacgtcaagcgatggaaaagtaaagaaaacgttcg

SEQ ID NO: 431768 - DNA, 55 bp, Artificial
  Synthetic oligonucleotide
ggtgatcaaagtgctctactttctcatcgtattgttaagtaggtattcgaaagca

SEQ ID NO: 431769 - DNA, 55 bp, Artificial
  Synthetic oligonucleotide
ggtgatcaagaagagtatgacatgctacatcattttccgggtgtagcaactagcg

SEQ ID NO: 431770 - DNA, 55 bp, Artificial
  Synthetic oligonucleotide
ggtgatcaagaggtggacgtcgacagttctgatggaccggttttggttggtttca

SEQ ID NO: 431771 - DNA, 60 bp, Artificial
  Synthetic oligonucleotide
ggtgatcaagttgagactacaagctctgaagaactagctggtctcgagtttagagaagtt

SEQ ID NO: 431772 - DNA, 55 bp, Artificial
  Synthetic oligonucleotide
ggtgatcacgttgtccccataattgaagagataggagccggaacagtgggtggat

SEQ ID NO: 431773 - DNA, 55 bp, Artificial
  Synthetic oligonucleotide
ggtgatcactgatgtagttgacggcgtgaatcacaaactagatgttaccactgcg

SEQ ID NO: 431774 - DNA, 55 bp, Artificial
  Synthetic oligonucleotide
ggtgatcagtatatttacatgggacagcctttaaataacgatgaggaccacgccc

SEQ ID NO: 431775 - DNA, 55 bp, Artificial
  Synthetic oligonucleotide
ggtgatcatagcgtttaactatacgatgttgtcatgtgggatcgaagcgggaatg

SEQ ID NO: 431776 - DNA, 55 bp, Artificial
  Synthetic oligonucleotide
ggtgatccaccaggagaagtagcggaaaacccacctccagaggaccccttcagcg

SEQ ID NO: 431777 - DNA, 60 bp, Artificial
  Synthetic oligonucleotide
ggtgatccacccggagatgagcggacaagccacatccagaggaccccttcagcgaacaga

SEQ ID NO: 431778 - DNA, 55 bp, Artificial
  Synthetic oligonucleotide
ggtgatccactgagggtttgcggagaaaccacctccagaagaaccccttcagcga

SEQ ID NO: 431779 - DNA, 55 bp, Artificial
  Synthetic oligonucleotide
ggtgatcccacccacgtagcccccgcggccaatcccatgcccacccccgagcctc

SEQ ID NO: 431780 - DNA, 60 bp, Artificial
  Synthetic oligonucleotide
ggtgatccggacagtggcaagtcactcatgaacatcgcagtgaagaacttgcaggtctac

SEQ ID NO: 431781 - DNA, 58 bp, Artificial
  Synthetic oligonucleotide
ggtgatcctccagatcactaacggtcaagcacttctgtttccccggtttgaattgata

SEQ ID NO: 431782 - DNA, 55 bp, Artificial
  Synthetic oligonucleotide
ggtgatcctctaaggcatctccaaggatggcgtactactggagacgaaggtatcc

SEQ ID NO: 431783 - DNA, 55 bp, Artificial
  Synthetic oligonucleotide
ggtgatcgcaaacatatgaaccagaaacctgatttgacgtacacatcggatgtcg

SEQ ID NO: 431784 - DNA, 58 bp, Artificial
  Synthetic oligonucleotide
ggtgatcgcaaagttaagttcacagccgtattgtcaaattaagattggaagagtaata

SEQ ID NO: 431785 - DNA, 58 bp, Artificial
  Synthetic oligonucleotide
ggtgatcgcattccgaagggatgcgtgggtccttgtaaggtacaggattacgaattca

SEQ ID NO: 431786 - DNA, 57 bp, Artificial
  Synthetic oligonucleotide
ggtgatctctgtagcatcatttgtgagcgcatactcaaggcgctcagattgtatata

SEQ ID NO: 431787 - DNA, 60 bp, Artificial
  Synthetic oligonucleotide
ggtgatcttactccgcttcgcgcgttgtatgagaacgtgctttctgtcaaagctgcccgt

SEQ ID NO: 431788 - DNA, 60 bp, Artificial
  Synthetic oligonucleotide
ggtgatcttgctagatcccttttgatggatatgtgtagcactcgatatgggctaactaat

SEQ ID NO: 431789 - DNA, 58 bp, Artificial
  Synthetic oligonucleotide
ggtgatgaaaaggttgtcaagtactgtcaggaacaagggtggatccttcctcctgatc

SEQ ID NO: 431790 - DNA, 59 bp, Artificial
  Synthetic oligonucleotide
ggtgatgaaggataaaccgtattacttagtaacatgggctaactcatctatagaaatgc

SEQ ID NO: 431791 - DNA, 58 bp, Artificial
  Synthetic oligonucleotide
ggtgatgacaggctcttggcagtttcaaaggattttgtggtctatgagcctgacactg

SEQ ID NO: 431792 - DNA, 60 bp, Artificial
  Synthetic oligonucleotide
ggtgatgactcactgggattctcaataaaggcaccggttggtgatccaagcttgttcacc

SEQ ID NO: 431793 - DNA, 55 bp, Artificial
  Synthetic oligonucleotide
ggtgatgagacacaggtggtgctgctacgaaagtagaaccgattcaaccgatcgg

SEQ ID NO: 431794 - DNA, 59 bp, Artificial
  Synthetic oligonucleotide
ggtgatgatcacgcaaccgtactggctcgtgcacagcgtaaggctgtatatgtcaaaac

SEQ ID NO: 431795 - DNA, 55 bp, Artificial
  Synthetic oligonucleotide
ggtgatgatgtaattgctagttacccacatgagatagaccctggcctattggcaa

SEQ ID NO: 431796 - DNA, 55 bp, Artificial
  Synthetic oligonucleotide
ggtgatgcattcttgcaagcgagcgcaaaagctgctggtgtactaatcactagct

SEQ ID NO: 431797 - DNA, 55 bp, Artificial
  Synthetic oligonucleotide
ggtgatgcgtccagttctaaggttgctcggccgaagctcgggcgttcatctgccg

SEQ ID NO: 431798 - DNA, 60 bp, Artificial
  Synthetic oligonucleotide
ggtgatgcgtccgggtcagaattacatgtgtagcaaatacctttgcactgtagacggtcg

SEQ ID NO: 431799 - DNA, 50 bp, Artificial
  Synthetic oligonucleotide
ggtgatgcgttaatagtaccagttggggataattttcagtatgcagttgc

SEQ ID NO: 431800 - DNA, 55 bp, Artificial
  Synthetic oligonucleotide
ggtgatgctcgccaagattgcttagtactgtgctcaccaccgcgtgaaactgtag

SEQ ID NO: 431801 - DNA, 55 bp, Artificial
  Synthetic oligonucleotide
ggtgatggaactgctgccgggactattttggctcagataccatatgatcctgttg

SEQ ID NO: 431802 - DNA, 55 bp, Artificial
  Synthetic oligonucleotide
ggtgatggaattgatccggatgatcaaacgaggaattaatgaccgaaacttctgg

SEQ ID NO: 431803 - DNA, 55 bp, Artificial
  Synthetic oligonucleotide
ggtgatggctccatgtcaatcatggagttggccactgcaagcattggtttggctg

SEQ ID NO: 431804 - DNA, 60 bp, Artificial
  Synthetic oligonucleotide
ggtgatggctgtccgaagccacataggattactaggaactctctttgcagctgtgggtat

SEQ ID NO: 431805 - DNA, 59 bp, Artificial
  Synthetic oligonucleotide
ggtgatgtctagataacgggcgtgtgagccaagacgtgttatggtgtcttccccaccaa

SEQ ID NO: 431806 - DNA, 55 bp, Artificial
  Synthetic oligonucleotide
ggtgatgtctctacgaagtctagacagttcccgttcggcgtcacgacgtttgtcg

SEQ ID NO: 431807 - DNA, 55 bp, Artificial
  Synthetic oligonucleotide
ggtgatgtgcaaagcccgtagtaaggcaatcatctacatctcacctaggaagttc

SEQ ID NO: 431808 - DNA, 56 bp, Artificial
  Synthetic oligonucleotide
ggtgatgtgcctgcgtggcctgtgattcgtgttgaggggcctttggagtcgtggtc

SEQ ID NO: 431809 - DNA, 55 bp, Artificial
  Synthetic oligonucleotide
ggtgatgtgtcaacggccggcgggtttgaagttgtgagagcgcgtacgctccgtg

SEQ ID NO: 431810 - DNA, 53 bp, Artificial
  Synthetic oligonucleotide
ggtgatgtgttccaactggatctcttgaagagcagcttttcccaccatctgat

SEQ ID NO: 431811 - DNA, 55 bp, Artificial
  Synthetic oligonucleotide
ggtgatgttcggaccaacagctgggaggacgcccagacgtccatcaatcgggacg

SEQ ID NO: 431812 - DNA, 55 bp, Artificial
  Synthetic oligonucleotide
ggtgattactcagtcttgcagttacaagcgaataggcgagcatattcaggtaagc

SEQ ID NO: 431813 - DNA, 55 bp, Artificial
  Synthetic oligonucleotide
ggtgattactttgtgttgacatctcacactgtaatgccacttagtgcacctactc

SEQ ID NO: 431814 - DNA, 51 bp, Artificial
  Synthetic oligonucleotide
ggtgattcagaaacaccaggctttatagttgatctactatcctcatctaag

SEQ ID NO: 431815 - DNA, 55 bp, Artificial
  Synthetic oligonucleotide
ggtgattcctccgaatctaggaacaatcatggtatgccaattcaggaagatgttc

SEQ ID NO: 431816 - DNA, 52 bp, Artificial
  Synthetic oligonucleotide
ggtgattctaactcttcaggttgtataatcactgttgaaaccaaacctggtg

SEQ ID NO: 431817 - DNA, 60 bp, Artificial
  Synthetic oligonucleotide
ggtgattctaggcaaagcgtgtatcatgagtccaacaatggagacaacattgcctcatta

SEQ ID NO: 431818 - DNA, 57 bp, Artificial
  Synthetic oligonucleotide
ggtgattctcaattaagccctactgttgagcgttggctttatactggtaagaattta

SEQ ID NO: 431819 - DNA, 55 bp, Artificial
  Synthetic oligonucleotide
ggtgattctcgagtcgcgtggaggtgcgcgcatctgggctatgggccacaatgtg

SEQ ID NO: 431820 - DNA, 58 bp, Artificial
  Synthetic oligonucleotide
ggtgattgaaataaagccgtcctctgaaaagtcatccaagcgggcctcacagtccaag

SEQ ID NO: 431821 - DNA, 55 bp, Artificial
  Synthetic oligonucleotide
ggtgattgacgcgatgatttattcggggctatattcctcacgcgccagcaaaatc

SEQ ID NO: 431822 - DNA, 52 bp, Artificial
  Synthetic oligonucleotide
ggtgattggtgggacgggtattcaaacgaagacatggtcatcatagatgact

SEQ ID NO: 431823 - DNA, 56 bp, Artificial
  Synthetic oligonucleotide
ggtgattgtggcttacctatggtcgccttaaaagacggtagtttgatagggattca

SEQ ID NO: 431824 - DNA, 55 bp, Artificial
  Synthetic oligonucleotide
ggtgatttgacaacggaaagacttccttcatcaaccagggcactaataggtagtg

SEQ ID NO: 431825 - DNA, 55 bp, Artificial
  Synthetic oligonucleotide
ggtgatttgactgttgtgatagccaaagcattggacgagtctaaagagttctgcc

SEQ ID NO: 431826 - DNA, 51 bp, Artificial
  Synthetic oligonucleotide
ggtgatttgggcaaccgagtcactactaatgagcggtctatcgattcaatt

SEQ ID NO: 431827 - DNA, 54 bp, Artificial
  Synthetic oligonucleotide
ggtgatttgtcgtactcgttctctgctacggcaggggctcgggtatttgtcgcg

SEQ ID NO: 431828 - DNA, 57 bp, Artificial
  Synthetic oligonucleotide
ggtgcaaaatcagctacaggcctaaaccaaattagcagtagcaacaaggtcattcca

SEQ ID NO: 431829 - DNA, 55 bp, Artificial
  Synthetic oligonucleotide
ggtgcaaaatgctaacccagattgcaagcaaattctaaaggccctgggtccgggg

SEQ ID NO: 431830 - DNA, 55 bp, Artificial
  Synthetic oligonucleotide
ggtgcaaacttcaaggctgagagggttatagaccccagacgctgtatgaaaccag

SEQ ID NO: 431831 - DNA, 52 bp, Artificial
  Synthetic oligonucleotide
ggtgcaaacttccccggcttaaccattcctagcttaacgatacccggtgtaa

SEQ ID NO: 431832 - DNA, 55 bp, Artificial
  Synthetic oligonucleotide
ggtgcaaccttctatcgccatgacccctcaacggtttcgagggagagcgtagact

SEQ ID NO: 431833 - DNA, 60 bp, Artificial
  Synthetic oligonucleotide
ggtgcaaccttgtttgatgacatcgcaagtccccattcggcttgggtattttcatgtgca

SEQ ID NO: 431834 - DNA, 55 bp, Artificial
  Synthetic oligonucleotide
ggtgcaacgtgagtgaattggatgatttacctctatgtactgaacagaccgacac

SEQ ID NO: 431835 - DNA, 55 bp, Artificial
  Synthetic oligonucleotide
ggtgcaactatacaagacagctggttagagtaacatggtgtggggttcgattcct

SEQ ID NO: 431836 - DNA, 52 bp, Artificial
  Synthetic oligonucleotide
ggtgcaagactaagtaatagcacagagtcaactggtagtatcacactcccat

SEQ ID NO: 431837 - DNA, 57 bp, Artificial
  Synthetic oligonucleotide
ggtgcaaggatccacagccacggtaatttagctattacaccgtcattgaaagaccgg

SEQ ID NO: 431838 - DNA, 55 bp, Artificial
  Synthetic oligonucleotide
ggtgcaatagcagggttcatagagaacggatgggaaggaatggtagacggctggt

SEQ ID NO: 431839 - DNA, 57 bp, Artificial
  Synthetic oligonucleotide
ggtgcaatctttcgggctaagtgggacaggtttgataaacctgtggccatagggctc

SEQ ID NO: 431840 - DNA, 60 bp, Artificial
  Synthetic oligonucleotide
ggtgcaatggaggagaacatgagtgtcgtacttggggcacgtgagtacaattacaaagtg

SEQ ID NO: 431841 - DNA, 60 bp, Artificial
  Synthetic oligonucleotide
ggtgcaattacagtccacgaggcccagggtgctacatttactgagactactattattgca

SEQ ID NO: 431842 - DNA, 55 bp, Artificial
  Synthetic oligonucleotide
ggtgcacactgcctccctactggcgggcaccacgtacgagcttgccgagaattca

SEQ ID NO: 431843 - DNA, 58 bp, Artificial
  Synthetic oligonucleotide
ggtgcacagactgtcgccaagtccatttatgccgtggtaactggcacaacccaaaacc

SEQ ID NO: 431844 - DNA, 55 bp, Artificial
  Synthetic oligonucleotide
ggtgcacagattgatactgtcttcagctcatactactggctttacaaggctggtg

SEQ ID NO: 431845 - DNA, 55 bp, Artificial
  Synthetic oligonucleotide
ggtgcacatacctgttttccaactatgcccctaaaccaaacttggctatcatggt

SEQ ID NO: 431846 - DNA, 50 bp, Artificial
  Synthetic oligonucleotide
ggtgcacatgaagtctgatgcctcgaagtttacccacgagaaacccgagg

SEQ ID NO: 431847 - DNA, 60 bp, Artificial
  Synthetic oligonucleotide
ggtgcaccaatgtggtgacaggcagtggggggaagagtcccaaatatgccataggcaata

SEQ ID NO: 431848 - DNA, 55 bp, Artificial
  Synthetic oligonucleotide
ggtgcaccgaacgttttcggatcagcaaatttgttcactccacctgaggtgctgt

SEQ ID NO: 431849 - DNA, 55 bp, Artificial
  Synthetic oligonucleotide
ggtgcaccgccctgtacaattaaatgttggttcacaaggtcaggtgagtggttgc

SEQ ID NO: 431850 - DNA, 60 bp, Artificial
  Synthetic oligonucleotide
ggtgcaccgtttgatgttcagctggtgcacattctgatgggccgctgggttgatgcggtc

SEQ ID NO: 431851 - DNA, 55 bp, Artificial
  Synthetic oligonucleotide
ggtgcacctcctgaagattacctatatttgttccatacggagcatgattgctcac

SEQ ID NO: 431852 - DNA, 60 bp, Artificial
  Synthetic oligonucleotide
ggtgcacgaattgaagagcgctaacactttagccctcgtgaagactcggtatcgtgcatg

SEQ ID NO: 431853 - DNA, 57 bp, Artificial
  Synthetic oligonucleotide
ggtgcacgaccgtagcggtcaaaagcacaggttccgcgccgagggcgtgtactggtc

SEQ ID NO: 431854 - DNA, 50 bp, Artificial
  Synthetic oligonucleotide
ggtgcacgtttagagcctcgggaacaacgatggagtaaatgcaagcggtg

SEQ ID NO: 431855 - DNA, 58 bp, Artificial
  Synthetic oligonucleotide
ggtgcactactcggaaaactgaacactggcctagtaacaagaacaggagactcaaaca

SEQ ID NO: 431856 - DNA, 60 bp, Artificial
  Synthetic oligonucleotide
ggtgcactcagtgcctagtccacgctaagtctatatgcccacctttgctactccgggtgg

SEQ ID NO: 431857 - DNA, 55 bp, Artificial
  Synthetic oligonucleotide
ggtgcagaaagtgtggcgttaacaagaggccagaacacagttaaggtgtcaggca

SEQ ID NO: 431858 - DNA, 58 bp, Artificial
  Synthetic oligonucleotide
ggtgcagaacgcttttaagtgagacctaagactgcgtcggaaccttagattcacgagc

SEQ ID NO: 431859 - DNA, 57 bp, Artificial
  Synthetic oligonucleotide
ggtgcagacaggttttcggtccactatcggtacaaaaagatgagagtgttttgtcca

SEQ ID NO: 431860 - DNA, 51 bp, Artificial
  Synthetic oligonucleotide
ggtgcagacggaaacgaacaggaagcaatgcgtagagcattcgcatacttt

SEQ ID NO: 431861 - DNA, 60 bp, Artificial
  Synthetic oligonucleotide
ggtgcagactttgtagtcacacctgagggtcttgtcgatacatcaataggcaataatttt

SEQ ID NO: 431862 - DNA, 60 bp, Artificial
  Synthetic oligonucleotide
ggtgcagactttgtcgccaagaatggatatgtgggacccacttcagaacccactcccaga

SEQ ID NO: 431863 - DNA, 59 bp, Artificial
  Synthetic oligonucleotide
ggtgcagagagagaacccgctgtaagtatattgcgaagatttaatcgtagcgtttctaa

SEQ ID NO: 431864 - DNA, 55 bp, Artificial
  Synthetic oligonucleotide
ggtgcagatgcaacgattcaagtgaccctctcgttgctgccgcaagcatcattgg

SEQ ID NO: 431865 - DNA, 55 bp, Artificial
  Synthetic oligonucleotide
ggtgcagattcagcgattcaagtgatcctctcgttattgcagcaagtatcattgg

SEQ ID NO: 431866 - DNA, 55 bp, Artificial
  Synthetic oligonucleotide
ggtgcagcaagtgttggtaaagccgggatcgatgctggtagcaagcgattgctcc

SEQ ID NO: 431867 - DNA, 55 bp, Artificial
  Synthetic oligonucleotide
ggtgcaggatagggtatgaccgatgtggggaggacgatcatgacgagctagggtt

SEQ ID NO: 431868 - DNA, 55 bp, Artificial
  Synthetic oligonucleotide
ggtgcagggaatttgtcaaaggcaagtacatcatggccttcaatccaccttgggg

SEQ ID NO: 431869 - DNA, 55 bp, Artificial
  Synthetic oligonucleotide
ggtgcaggtaataaacaggctgttcctaaggtatccgcatatcagtatagggtgt

SEQ ID NO: 431870 - DNA, 55 bp, Artificial
  Synthetic oligonucleotide
ggtgcaggttgtaagtcggccacagccgaggaggtaaatgtactgtaaataatcc

SEQ ID NO: 431871 - DNA, 55 bp, Artificial
  Synthetic oligonucleotide
ggtgcagtacgcatatgaccatgacataacggacgagagcgcactggcatttgag

SEQ ID NO: 431872 - DNA, 60 bp, Artificial
  Synthetic oligonucleotide
ggtgcagtccgacccacagacatggggttggtgccgaattctagtgctctcgtagtctga

SEQ ID NO: 431873 - DNA, 55 bp, Artificial
  Synthetic oligonucleotide
ggtgcagtgcggagacgcagacctgaaggtgctacatgaactactgctgggcgac

SEQ ID NO: 431874 - DNA, 55 bp, Artificial
  Synthetic oligonucleotide
ggtgcagtggaagttaagatgggtccagcagtcctgagcaaatcagaccccagac

SEQ ID NO: 431875 - DNA, 55 bp, Artificial
  Synthetic oligonucleotide
ggtgcagtgggcatatgaccatgatattacagacgagagcacgctggcatacgag

SEQ ID NO: 431876 - DNA, 54 bp, Artificial
  Synthetic oligonucleotide
ggtgcagttacaagagttaaggaattcaattggttggttagaaaggttgggaca

SEQ ID NO: 431877 - DNA, 57 bp, Artificial
  Synthetic oligonucleotide
ggtgcataccctaagatccagactgcaagccgtgtcctccgctctttgttttggggg

SEQ ID NO: 431878 - DNA, 60 bp, Artificial
  Synthetic oligonucleotide
ggtgcatagtgtccaggggcgagaggatcagtggttcgcgagcttttttcacggccacgc

SEQ ID NO: 431879 - DNA, 55 bp, Artificial
  Synthetic oligonucleotide
ggtgcatatcatactgcagagagtacacctataataaaatgattcagggtctcaa

SEQ ID NO: 431880 - DNA, 55 bp, Artificial
  Synthetic oligonucleotide
ggtgcatatgaatttgggtggttgggacacatggccagttatatgatgggactcc

SEQ ID NO: 431881 - DNA, 58 bp, Artificial
  Synthetic oligonucleotide
ggtgcatatgctaatattgctaagaacgctttattagtgtattattgttggatgtcgg

SEQ ID NO: 431882 - DNA, 60 bp, Artificial
  Synthetic oligonucleotide
ggtgcatcatatactgtactgtaaggatataacatgtgaagtgtgcaagagagttgcgcg

SEQ ID NO: 431883 - DNA, 55 bp, Artificial
  Synthetic oligonucleotide
ggtgcatcctacttgtattagaacttgtcatatgggctgcaagtgcggatactgt

SEQ ID NO: 431884 - DNA, 55 bp, Artificial
  Synthetic oligonucleotide
ggtgcatcgctgaagtcccatgcgctgcaactcattctggactgtgtacagaacg

SEQ ID NO: 431885 - DNA, 55 bp, Artificial
  Synthetic oligonucleotide
ggtgcatcggctgcagggttgtactgaacggcggtgtattgcgtaatgcgcgcgt

SEQ ID NO: 431886 - DNA, 58 bp, Artificial
  Synthetic oligonucleotide
ggtgcatctgcccctaggccagttgcccgtgtttcacgtgcaaccgacctagaccgac

SEQ ID NO: 431887 - DNA, 60 bp, Artificial
  Synthetic oligonucleotide
ggtgcatgaggggtatgaagaattcacaatggttgggagaagagcaacagccattctcag

SEQ ID NO: 431888 - DNA, 60 bp, Artificial
  Synthetic oligonucleotide
ggtgcatgctgctgctgattcccggagcggggtcgttccgtctaatcgatagggatcagt

SEQ ID NO: 431889 - DNA, 55 bp, Artificial
  Synthetic oligonucleotide
ggtgcatgtcagaagtactcttatccatggcaaacatctaagtgcttctttgaaa

SEQ ID NO: 431890 - DNA, 60 bp, Artificial
  Synthetic oligonucleotide
ggtgcatgtttcaatcactgcatacactacagagctacaacacatcgtggctggtgtggt

SEQ ID NO: 431891 - DNA, 55 bp, Artificial
  Synthetic oligonucleotide
ggtgcattgaccgaagatcctgatgaaggcacagctggagtggaatctgctgtcc

SEQ ID NO: 431892 - DNA, 52 bp, Artificial
  Synthetic oligonucleotide
ggtgcattgctccagtccggttgcaacttggcaggcgctgttacctcctggg

SEQ ID NO: 431893 - DNA, 60 bp, Artificial
  Synthetic oligonucleotide
ggtgccaaaaaaggatgtctacaggatcccagcggcagctttgaaagtatctggctcgag

SEQ ID NO: 431894 - DNA, 55 bp, Artificial
  Synthetic oligonucleotide
ggtgccaacatagcagaataggcattatcctacgtagaagaataagggatggatc

SEQ ID NO: 431895 - DNA, 53 bp, Artificial
  Synthetic oligonucleotide
ggtgccaacttttggattagctccactttgttggtcgattgcaaggtattgcg

SEQ ID NO: 431896 - DNA, 57 bp, Artificial
  Synthetic oligonucleotide
ggtgccaagtggtcaaaaagtagtatagtgggatggcctgctataagggatagaatg

SEQ ID NO: 431897 - DNA, 55 bp, Artificial
  Synthetic oligonucleotide
ggtgccaccatagcagaataggtgtgcaaagaagaggtagaaatggatccagtag

SEQ ID NO: 431898 - DNA, 55 bp, Artificial
  Synthetic oligonucleotide
ggtgccactacttgcatacttctcaaaaccgcctggttagatgggcaactgtcaa

SEQ ID NO: 431899 - DNA, 52 bp, Artificial
  Synthetic oligonucleotide
ggtgccactgttcgaaatcctgagtgctcctgccctcgttgtggttacacct

SEQ ID NO: 431900 - DNA, 55 bp, Artificial
  Synthetic oligonucleotide
ggtgccagacaagaactcacactcccaaccactaagcctgttcctgcaaggtggg

SEQ ID NO: 431901 - DNA, 60 bp, Artificial
  Synthetic oligonucleotide
ggtgccagccgcagaacgtttacttgcaacgcaagaggcccaaatggagctgattgaaca

SEQ ID NO: 431902 - DNA, 55 bp, Artificial
  Synthetic oligonucleotide
ggtgccagtaatcttagtggatcacacgaggaagactatgcacgtgccaacgcca

SEQ ID NO: 431903 - DNA, 55 bp, Artificial
  Synthetic oligonucleotide
ggtgccagttttgctagttttgtgcaacagaatgggactgaactggaacgccatg

SEQ ID NO: 431904 - DNA, 60 bp, Artificial
  Synthetic oligonucleotide
ggtgccataccactcatgtggactgggatgattgatttacctggatactatgaggctatc

SEQ ID NO: 431905 - DNA, 60 bp, Artificial
  Synthetic oligonucleotide
ggtgccatacgtacgtcttgatcgtgatagagtacccacaatggttggagtcacccggca

SEQ ID NO: 431906 - DNA, 54 bp, Artificial
  Synthetic oligonucleotide
ggtgccattaggtttaatactggacaaactacaaatgtccagtttaggatccct

SEQ ID NO: 431907 - DNA, 55 bp, Artificial
  Synthetic oligonucleotide
ggtgcccaaggaagatcttgctaagttctacgtttgcgccactcgaagtcgtggg

SEQ ID NO: 431908 - DNA, 50 bp, Artificial
  Synthetic oligonucleotide
ggtgcccagtgatgtaattgagaccagacacgttgtgaactacaagacta

SEQ ID NO: 431909 - DNA, 60 bp, Artificial
  Synthetic oligonucleotide
ggtgccccgccatgtcagatagtcccaggtaactacaacagctctgctaacgagcttttg

SEQ ID NO: 431910 - DNA, 51 bp, Artificial
  Synthetic oligonucleotide
ggtgccccgtcgactacccctgatgggcaaggtcaagaaccctcgccgagc

SEQ ID NO: 431911 - DNA, 52 bp, Artificial
  Synthetic oligonucleotide
ggtgcccgacctacgggttaggggtggtagggactccatcatcctacttacc

SEQ ID NO: 431912 - DNA, 59 bp, Artificial
  Synthetic oligonucleotide
ggtgcccgtacaataccaattgagcgcatttttgaagtccgcgaatttagttgagcgca

SEQ ID NO: 431913 - DNA, 55 bp, Artificial
  Synthetic oligonucleotide
ggtgcccttaaaagattctacccaggattcaggtgctgcttattacggagcaaca

SEQ ID NO: 431914 - DNA, 55 bp, Artificial
  Synthetic oligonucleotide
ggtgcccttgcctaagcgtgttgtctaccatgacagggaccgattacttggcaag

SEQ ID NO: 431915 - DNA, 57 bp, Artificial
  Synthetic oligonucleotide
ggtgccgacagtaaacgaagcgtcaaccttggtgatgtgttcattaaatcgttccca

SEQ ID NO: 431916 - DNA, 59 bp, Artificial
  Synthetic oligonucleotide
ggtgccgcctgaagtttcatatcgtaactgatgccgtttataggtctagccacagaaac

SEQ ID NO: 431917 - DNA, 58 bp, Artificial
  Synthetic oligonucleotide
ggtgccgcgtaaagttgggcgacgagagatcctcgtctgcccaattactaacgatgag

SEQ ID NO: 431918 - DNA, 55 bp, Artificial
  Synthetic oligonucleotide
ggtgccggaatggtgatgactgcgactggagttgctgtcgacatatatctggagg

SEQ ID NO: 431919 - DNA, 55 bp, Artificial
  Synthetic oligonucleotide
ggtgccggagctcctgagggcggagtcaaggggcctatcgggcaggcggtaatcc

SEQ ID NO: 431920 - DNA, 60 bp, Artificial
  Synthetic oligonucleotide
ggtgccggctgcatatgcagcccagggttacaaggtactcgtcttgaacccatccgttgc

SEQ ID NO: 431921 - DNA, 52 bp, Artificial
  Synthetic oligonucleotide
ggtgccggtgactcacgagtttaaagttcccagggaattggcgggaactaaa

SEQ ID NO: 431922 - DNA, 55 bp, Artificial
  Synthetic oligonucleotide
ggtgccggtgactcacgagtttatggttcccaagaaagtggcgggaactgagagg

SEQ ID NO: 431923 - DNA, 55 bp, Artificial
  Synthetic oligonucleotide
ggtgccgtcacttctgtgtgcttgcggactcagaatccagtggacatatcactca

SEQ ID NO: 431924 - DNA, 51 bp, Artificial
  Synthetic oligonucleotide
ggtgccgtcgtttgcatgcattgtctaggtgttgttggatctctgcaacgc

SEQ ID NO: 431925 - DNA, 60 bp, Artificial
  Synthetic oligonucleotide
ggtgcctcatataattgaggaagtgatgaacatagtgttaatcacactgtcgctcttggc

SEQ ID NO: 431926 - DNA, 55 bp, Artificial
  Synthetic oligonucleotide
ggtgcctccaacgcttcggtgtctaagcgcatgtttctagagagagaagcatagc

SEQ ID NO: 431927 - DNA, 50 bp, Artificial
  Synthetic oligonucleotide
ggtgcctcttgccgaccccaagcgatgttatggacgctgctgttatggcc

SEQ ID NO: 431928 - DNA, 55 bp, Artificial
  Synthetic oligonucleotide
ggtgcctgagttaggaaacaaggcccgtatcgtgacactttcagccttttggctg

SEQ ID NO: 431929 - DNA, 57 bp, Artificial
  Synthetic oligonucleotide
ggtgcctgcaaggtgactgaccccctgaaaacgttggcctcaatattactagttggc

SEQ ID NO: 431930 - DNA, 56 bp, Artificial
  Synthetic oligonucleotide
ggtgccttaatatttaccaaactagcatcaactatagaagtaggattagagaccac

SEQ ID NO: 431931 - DNA, 55 bp, Artificial
  Synthetic oligonucleotide
ggtgccttgaaaggaggctagggttctctaccacagtttctcgtggtagtcaccc

SEQ ID NO: 431932 - DNA, 55 bp, Artificial
  Synthetic oligonucleotide
ggtgccttgaagcaatgccagtacttaggcttattcaagatcagatcaagcgtcc

SEQ ID NO: 431933 - DNA, 55 bp, Artificial
  Synthetic oligonucleotide
ggtgccttgggaatcacacatttgacacatcaactggccaaggttccattgtcca

SEQ ID NO: 431934 - DNA, 55 bp, Artificial
  Synthetic oligonucleotide
ggtgccttggggagtcctggttgtgatcacttgaatggtgcagaatgggacgtct

SEQ ID NO: 431935 - DNA, 53 bp, Artificial
  Synthetic oligonucleotide
ggtgcgaaaatgtccggagagtttaaacgtgccagagtacgcgcccaaaaaag

SEQ ID NO: 431936 - DNA, 55 bp, Artificial
  Synthetic oligonucleotide
ggtgcgaacatggtgtcattggccttgtaaccatgggtggggaaggcgtggtagg

SEQ ID NO: 431937 - DNA, 53 bp, Artificial
  Synthetic oligonucleotide
ggtgcgaagacccacgtgtgcttaattgtgagtcctccggcccccgaatgcgg

SEQ ID NO: 431938 - DNA, 59 bp, Artificial
  Synthetic oligonucleotide
ggtgcgaagagtctattgagctaattggtaatcctccggcccctgaatgcggctaatcc

SEQ ID NO: 431939 - DNA, 58 bp, Artificial
  Synthetic oligonucleotide
ggtgcgaagagtttattgagctggttagtatccctccggcccctgaatgcggctaatc

SEQ ID NO: 431940 - DNA, 55 bp, Artificial
  Synthetic oligonucleotide
ggtgcgaagctgagtcacgcacaataactttatgtctgtaaagcaaaagtttagg

SEQ ID NO: 431941 - DNA, 52 bp, Artificial
  Synthetic oligonucleotide
ggtgcgaattctactctaacatcccttttccatgcctcaggttcatcgatct

SEQ ID NO: 431942 - DNA, 55 bp, Artificial
  Synthetic oligonucleotide
ggtgcgagagcgtcagtattaagcgggggaaaactagacgcatgggaaaaaattc

SEQ ID NO: 431943 - DNA, 55 bp, Artificial
  Synthetic oligonucleotide
ggtgcgagagcgtcggtattaagcgggggaaaattggatgcttgggaaagaattc

SEQ ID NO: 431944 - DNA, 58 bp, Artificial
  Synthetic oligonucleotide
ggtgcgagatagcggggacttttcagcgcgacgacgctaaggtatggttgccttgtcc

SEQ ID NO: 431945 - DNA, 59 bp, Artificial
  Synthetic oligonucleotide
ggtgcgagctgcgtgcgcgcgcgcaagtcggtgtcgtcttccgttacggcgtcgatatc

SEQ ID NO: 431946 - DNA, 55 bp, Artificial
  Synthetic oligonucleotide
ggtgcgaggagcttgtgcagatcatggatgagtatagcaagatattcctcgtctc

SEQ ID NO: 431947 - DNA, 60 bp, Artificial
  Synthetic oligonucleotide
ggtgcgatatgtcgtggcagttgggatcacatttcaccttgagctagggccagagattgt

SEQ ID NO: 431948 - DNA, 60 bp, Artificial
  Synthetic oligonucleotide
ggtgcgatctattttttaaggctggcaggttcagaatgccgcccttgcatcgcactataa

SEQ ID NO: 431949 - DNA, 60 bp, Artificial
  Synthetic oligonucleotide
ggtgcgatctgtgggcttgattacgcataatcgtgcgcgaattgccctgttcggccaatc

SEQ ID NO: 431950 - DNA, 55 bp, Artificial
  Synthetic oligonucleotide
ggtgcgatgcatcattactctgtgttatgccgagaaggttcactttgctggattc

SEQ ID NO: 431951 - DNA, 55 bp, Artificial
  Synthetic oligonucleotide
ggtgcgatggaaggggaacttttctcccgatctggctgcactgtcccgaactttc

SEQ ID NO: 431952 - DNA, 54 bp, Artificial
  Synthetic oligonucleotide
ggtgcgatggtttatcacgcacccacttacttaaaggggtaaaagtcgcggagc

SEQ ID NO: 431953 - DNA, 52 bp, Artificial
  Synthetic oligonucleotide
ggtgcgattaacccgcactataggggggtcctctaagtttccctgaaaggta

SEQ ID NO: 431954 - DNA, 55 bp, Artificial
  Synthetic oligonucleotide
ggtgcgatttgggtgatatcccatacaaattgttcgagtctctcgactaggaggg

SEQ ID NO: 431955 - DNA, 59 bp, Artificial
  Synthetic oligonucleotide
ggtgcgcaacgcgtccgggatgtaccatgtcacgaacgactgccccaactcaagtatag

SEQ ID NO: 431956 - DNA, 55 bp, Artificial
  Synthetic oligonucleotide
ggtgcgcgctcgtgggctggacgcgcaccctgcgagcccaaccatctacgccagc

SEQ ID NO: 431957 - DNA, 55 bp, Artificial
  Synthetic oligonucleotide
ggtgcgctatcgctgggcggtgtggttgcctctctctcgctcgtgatgggaatag

SEQ ID NO: 431958 - DNA, 60 bp, Artificial
  Synthetic oligonucleotide
ggtgcgctgtttcttgggtttcttggagcagcagggagcactatgggcgcagcgtcaata

SEQ ID NO: 431959 - DNA, 55 bp, Artificial
  Synthetic oligonucleotide
ggtgcgcttgggaatttccggaatcagatcgggcttagtgcgggaacgacgctga

SEQ ID NO: 431960 - DNA, 55 bp, Artificial
  Synthetic oligonucleotide
ggtgcggaaccttttccgcgccatgataatgatgacttagtccagttttctgact

SEQ ID NO: 431961 - DNA, 60 bp, Artificial
  Synthetic oligonucleotide
ggtgcggaaggttgctgggggtcattatgtccaaatggccttcatgaagctagccgcact

SEQ ID NO: 431962 - DNA, 57 bp, Artificial
  Synthetic oligonucleotide
ggtgcggaggaggctgaactacgacagcccatacacgaaccgtgtggttgcccccac

SEQ ID NO: 431963 - DNA, 54 bp, Artificial
  Synthetic oligonucleotide
ggtgcggatacacaaggcgatttgagggttggaacatattctaatcccgtgccg

SEQ ID NO: 431964 - DNA, 56 bp, Artificial
  Synthetic oligonucleotide
ggtgcggattcatacgaaaagtccttgttgttcgttaatgaaagtgacaccgcgtc

SEQ ID NO: 431965 - DNA, 57 bp, Artificial
  Synthetic oligonucleotide
ggtgcgggacgcgtatgaatttgtagttgaccacacaaaaacgcgcccgccactgcc

SEQ ID NO: 431966 - DNA, 55 bp, Artificial
  Synthetic oligonucleotide
ggtgcgggagctcacaaaatggaggctcgcaaaacagtaattgtagtgagcactc

SEQ ID NO: 431967 - DNA, 54 bp, Artificial
  Synthetic oligonucleotide
ggtgcgggcattcctttagacacccttgaaactcttggggccttgcgtccaggg

SEQ ID NO: 431968 - DNA, 55 bp, Artificial
  Synthetic oligonucleotide
ggtgcgggcgaaatggcgaattgtgtgccacaatagcggtggcaccacaagtgtc

SEQ ID NO: 431969 - DNA, 58 bp, Artificial
  Synthetic oligonucleotide
ggtgcggggggtataaactgcgaactatggactcagcttctgaaaccacaacgtatga

SEQ ID NO: 431970 - DNA, 58 bp, Artificial
  Synthetic oligonucleotide
ggtgcggtagttaacggtaagatgccagcggagactccagcaatggataacctacggc

SEQ ID NO: 431971 - DNA, 57 bp, Artificial
  Synthetic oligonucleotide
ggtgcgtagcaccattttcataacattaatctgtaacctaatagtggcaaaaacacc

SEQ ID NO: 431972 - DNA, 60 bp, Artificial
  Synthetic oligonucleotide
ggtgcgtcgccggttgaacttcgacagcccttatgtcagccgtgctgctgtccccactgt

SEQ ID NO: 431973 - DNA, 60 bp, Artificial
  Synthetic oligonucleotide
ggtgcgtgaatccattattgtgacaatatgtgacagctatgcacaagtacgaacatccac

SEQ ID NO: 431974 - DNA, 55 bp, Artificial
  Synthetic oligonucleotide
ggtgcgtgagagagagaggtaccacgctgaggaacgtcgtaagtccggccagcct

SEQ ID NO: 431975 - DNA, 60 bp, Artificial
  Synthetic oligonucleotide
ggtgcgtgatttgggcttcccacatcagttaaatcaatagtggtgttatcccaagctctc

SEQ ID NO: 431976 - DNA, 50 bp, Artificial
  Synthetic oligonucleotide
ggtgcgtgcccctcgtgtgtcggcccggagcgttaccaagtcgcgctctt

SEQ ID NO: 431977 - DNA, 60 bp, Artificial
  Synthetic oligonucleotide
ggtgcgtggaagatgaagcggactattaaggaagatgcaatgtatcgcgacagaaagttt

SEQ ID NO: 431978 - DNA, 55 bp, Artificial
  Synthetic oligonucleotide
ggtgcgtggggctttaaaaggagtgttatacgatgcacggatgaagcttggtagg

SEQ ID NO: 431979 - DNA, 60 bp, Artificial
  Synthetic oligonucleotide
ggtgcgtgtccgcgtgctgagtaatgggataggagatgcctacaacaggctcgcccatgg

SEQ ID NO: 431980 - DNA, 55 bp, Artificial
  Synthetic oligonucleotide
ggtgcgttgacggttctggcttcgcctccttggatgacaacctccacgaggttcc

SEQ ID NO: 431981 - DNA, 60 bp, Artificial
  Synthetic oligonucleotide
ggtgctaaacacatcaaggattgggatcacttagaggaattcaggagatccctttgtgat

SEQ ID NO: 431982 - DNA, 55 bp, Artificial
  Synthetic oligonucleotide
ggtgctaaatgatttctgggtggtgaatgtcagttgcatcccgcgggcctcctcg

SEQ ID NO: 431983 - DNA, 55 bp, Artificial
  Synthetic oligonucleotide
ggtgctaacgtgatcctttccggagcgcacatactggtcatcacccagtttaagg

SEQ ID NO: 431984 - DNA, 60 bp, Artificial
  Synthetic oligonucleotide
ggtgctaactccttaatgactctaagagcctctggcttactgcctgtgttaagtgctgcg

SEQ ID NO: 431985 - DNA, 55 bp, Artificial
  Synthetic oligonucleotide
ggtgctaagaaagggcctaacagtgttgaacatggtgaacgatggcttgacgact

SEQ ID NO: 431986 - DNA, 55 bp, Artificial
  Synthetic oligonucleotide
ggtgctaagggtgggtcgattatgatgatgaacccctctgatttaggtaaaggag

SEQ ID NO: 431987 - DNA, 55 bp, Artificial
  Synthetic oligonucleotide
ggtgctacaagctagtgccagttgacccaggggaggtggaagaggccaacggagg

SEQ ID NO: 431988 - DNA, 58 bp, Artificial
  Synthetic oligonucleotide
ggtgctacgctgggaaatattgccaccgaacaccctgaaatatacatacgctatttcc

SEQ ID NO: 431989 - DNA, 60 bp, Artificial
  Synthetic oligonucleotide
ggtgctacgtcatcaatgacgttataggcaacattattcgagtacactcgattattgaag

SEQ ID NO: 431990 - DNA, 58 bp, Artificial
  Synthetic oligonucleotide
ggtgctacgtgtgcgtaatttgattaccaccaagatccagaagtacattaatttgtac

SEQ ID NO: 431991 - DNA, 55 bp, Artificial
  Synthetic oligonucleotide
ggtgctactttaaagggtatgattgaaggtgtgcctgaggaacttgaacgtaagg

SEQ ID NO: 431992 - DNA, 55 bp, Artificial
  Synthetic oligonucleotide
ggtgctagtggttcaatccttccagttgagactacggagcagactcaggctaggg

SEQ ID NO: 431993 - DNA, 55 bp, Artificial
  Synthetic oligonucleotide
ggtgctataccaaagatcggtaactggttagtcgtttattgtcattggtggcctg

SEQ ID NO: 431994 - DNA, 55 bp, Artificial
  Synthetic oligonucleotide
ggtgctatatatcaatgccacagggactgcggaacttgggcgtaatctcgggacc

SEQ ID NO: 431995 - DNA, 60 bp, Artificial
  Synthetic oligonucleotide
ggtgctatatcagaagacgcccgttttagcttttatctcgcatttggcattactccagat

SEQ ID NO: 431996 - DNA, 55 bp, Artificial
  Synthetic oligonucleotide
ggtgctatcacaaagacacaagcaacaagttggggcgagtacctcacagggaaaa

SEQ ID NO: 431997 - DNA, 55 bp, Artificial
  Synthetic oligonucleotide
ggtgctatcttctcttggcattggagtgtaaaagctccaagatcaatgatgaatc

SEQ ID NO: 431998 - DNA, 55 bp, Artificial
  Synthetic oligonucleotide
ggtgctattgatttcgaaaagttacaggaaaacaagtccgaggtgcctttagaca

SEQ ID NO: 431999 - DNA, 55 bp, Artificial
  Synthetic oligonucleotide
ggtgctcaaagattgtatcttacttctgaaggctcagcgaggtagatccacggag

SEQ ID NO: 432000 - DNA, 60 bp, Artificial
  Synthetic oligonucleotide
ggtgctcactacacactgcagagcagtgggagctaccagttcgaccagatgctcctgaca

SEQ ID NO: 432001 - DNA, 60 bp, Artificial
  Synthetic oligonucleotide
ggtgctcagggggtgcttacgacataataatttgtgacgagtgccattccacggatgcca

SEQ ID NO: 432002 - DNA, 60 bp, Artificial
  Synthetic oligonucleotide
ggtgctcaggtatcatcacaaaaagtcggtgctcatgagaatactaatgtggccactggc

SEQ ID NO: 432003 - DNA, 60 bp, Artificial
  Synthetic oligonucleotide
ggtgctcatatcgtcgctggtaacgcaaagttgcgctatcaggattcggctggtaacctg

SEQ ID NO: 432004 - DNA, 55 bp, Artificial
  Synthetic oligonucleotide
ggtgctcatcggagtagagccttccgaaccatggtcacatcttcacgtgagccgc

SEQ ID NO: 432005 - DNA, 60 bp, Artificial
  Synthetic oligonucleotide
ggtgctccacagtaaccgcaccttgccatccctgacagcatatatttagcttggaaaggt

SEQ ID NO: 432006 - DNA, 60 bp, Artificial
  Synthetic oligonucleotide
ggtgctcccaagttattcaggtagaggtgtccataatgtacacctggcccctgctgtagc

SEQ ID NO: 432007 - DNA, 55 bp, Artificial
  Synthetic oligonucleotide
ggtgctcctccgacgtccccaggcagaatggcggttccctaaacgtgcattgctt

SEQ ID NO: 432008 - DNA, 55 bp, Artificial
  Synthetic oligonucleotide
ggtgctcgcctctggtatgtaggcggttctcagttttaattatgggcccttcggg

SEQ ID NO: 432009 - DNA, 51 bp, Artificial
  Synthetic oligonucleotide
ggtgctcgggtacacttttatcatgatattagtcctatacccacggaggct

SEQ ID NO: 432010 - DNA, 55 bp, Artificial
  Synthetic oligonucleotide
ggtgctcgggtgcgtctcttcgggcctgctaaattgtacattctgtcgccggacg

SEQ ID NO: 432011 - DNA, 55 bp, Artificial
  Synthetic oligonucleotide
ggtgctctacaattgtgaaggtgaagtgaaggcgtttcgggcttgagccaatcag

SEQ ID NO: 432012 - DNA, 60 bp, Artificial
  Synthetic oligonucleotide
ggtgctctaggggtgtttgcagttccagaaatgtgtttggctggtgatagcatgactcac

SEQ ID NO: 432013 - DNA, 52 bp, Artificial
  Synthetic oligonucleotide
ggtgctctggcgggtactcggatcgaagttttccctcagtcagtcggtggct

SEQ ID NO: 432014 - DNA, 60 bp, Artificial
  Synthetic oligonucleotide
ggtgctcttaagcagtctggtggccaactaatggaacattaccgatgcgatgcggcgaac

SEQ ID NO: 432015 - DNA, 55 bp, Artificial
  Synthetic oligonucleotide
ggtgctcttagtcttctcatttcttgtgctctaacagcattggtgttggcaagaa

SEQ ID NO: 432016 - DNA, 59 bp, Artificial
  Synthetic oligonucleotide
ggtgctgaacgataacattaggaatggacatgttattaatcaactaatggaagccttaa

SEQ ID NO: 432017 - DNA, 60 bp, Artificial
  Synthetic oligonucleotide
ggtgctgaacgctgattggttgtctatataaggtaacacacaacctgattggctagcgtc

SEQ ID NO: 432018 - DNA, 55 bp, Artificial
  Synthetic oligonucleotide
ggtgctgaaggaagctgcatgtttggcaaagtcgtacgcacagatgtggagcctg

SEQ ID NO: 432019 - DNA, 60 bp, Artificial
  Synthetic oligonucleotide
ggtgctgagcgactttaagacctggctaaaagccaagctcgtgccacaactgcctgggat

SEQ ID NO: 432020 - DNA, 55 bp, Artificial
  Synthetic oligonucleotide
ggtgctgcaggcagctatggaggtggcacaggcaaaacatgctaccccaggtccc

SEQ ID NO: 432021 - DNA, 57 bp, Artificial
  Synthetic oligonucleotide
ggtgctgcatatccactgtgcaagcgtgggcccctgaacatcctcacacaacactcg

SEQ ID NO: 432022 - DNA, 55 bp, Artificial
  Synthetic oligonucleotide
ggtgctgcccggaacacggaactcagttagcactcaaactacaaagtaaacagcg

SEQ ID NO: 432023 - DNA, 55 bp, Artificial
  Synthetic oligonucleotide
ggtgctgccctctggtgtgtgggaaggcgattcaactgatggataagtcctccag

SEQ ID NO: 432024 - DNA, 51 bp, Artificial
  Synthetic oligonucleotide
ggtgctggaagcgcgtaatataggcctatgtagcacgaagctgagagaggg

SEQ ID NO: 432025 - DNA, 57 bp, Artificial
  Synthetic oligonucleotide
ggtgctggactttgattggtatctgagtacaatgggcttgtaagggtgacgaaaggt

SEQ ID NO: 432026 - DNA, 55 bp, Artificial
  Synthetic oligonucleotide
ggtgctggagcgtatgtgcattgctaaggagaagaacaatctagccaattgcctg

SEQ ID NO: 432027 - DNA, 50 bp, Artificial
  Synthetic oligonucleotide
ggtgctggattttaaccatgctgatgattgttgtgaatcagtgtccttac

SEQ ID NO: 432028 - DNA, 60 bp, Artificial
  Synthetic oligonucleotide
ggtgctggctgtgccataaacctttgtgcaacgtggaaaagcaacggcacgtagattaca

SEQ ID NO: 432029 - DNA, 50 bp, Artificial
  Synthetic oligonucleotide
ggtgctgggagcgcatcggaaggtgcacgtttctgtccctgtcgcagata

SEQ ID NO: 432030 - DNA, 55 bp, Artificial
  Synthetic oligonucleotide
ggtgctggtatagttaatatacccattacatcggtgtatgtagaaacaagtacag

SEQ ID NO: 432031 - DNA, 52 bp, Artificial
  Synthetic oligonucleotide
ggtgctggttgtacataccgaagtcctctaaaacctagtttcttaagtaacc

SEQ ID NO: 432032 - DNA, 55 bp, Artificial
  Synthetic oligonucleotide
ggtgctgtcacatccagtgacggctagtacaagcacttctgtttccccggagcgg

SEQ ID NO: 432033 - DNA, 60 bp, Artificial
  Synthetic oligonucleotide
ggtgctgtccattggtatgtgggaaggctattcaattaatggacaagtcctctagggtca

SEQ ID NO: 432034 - DNA, 51 bp, Artificial
  Synthetic oligonucleotide
ggtgctgtgaattgtattgcttcagtagttagtgtgatggacatagctttt

SEQ ID NO: 432035 - DNA, 55 bp, Artificial
  Synthetic oligonucleotide
ggtgctgtgtgtaagtccacacaagttaccacaggggactgcccgcctcttgcat

SEQ ID NO: 432036 - DNA, 60 bp, Artificial
  Synthetic oligonucleotide
ggtgcttaaagaagcagtgacggcactgaagaattatgaatcacagaacttgagtgttag

SEQ ID NO: 432037 - DNA, 55 bp, Artificial
  Synthetic oligonucleotide
ggtgcttaaccaaaatgcactccagaggcaatctctgcgagatatgcggccactc

SEQ ID NO: 432038 - DNA, 55 bp, Artificial
  Synthetic oligonucleotide
ggtgcttacggaatcaaagcctcaattggatcacgccgagtaagctattcgttgc

SEQ ID NO: 432039 - DNA, 53 bp, Artificial
  Synthetic oligonucleotide
ggtgcttagcaccagacaagggatacacatcagactgggatacaatatccatt

SEQ ID NO: 432040 - DNA, 60 bp, Artificial
  Synthetic oligonucleotide
ggtgcttatagaatacaggatggacaagatatcataagcataatgttaacaccgagtggg

SEQ ID NO: 432041 - DNA, 55 bp, Artificial
  Synthetic oligonucleotide
ggtgcttatcatttcaaagatccacagtatccagtctgggagttaactattcgtg

SEQ ID NO: 432042 - DNA, 55 bp, Artificial
  Synthetic oligonucleotide
ggtgcttcaacaagccttgacatcaccgcctcaattcaacctgttcgtcccgtgt

SEQ ID NO: 432043 - DNA, 55 bp, Artificial
  Synthetic oligonucleotide
ggtgcttcaagctagtaccagttgatccagacacagtagagaaggctactgaggg

SEQ ID NO: 432044 - DNA, 55 bp, Artificial
  Synthetic oligonucleotide
ggtgcttcagctagttccgtctagctgttgcgtggatcctagttccgtctaggtg

SEQ ID NO: 432045 - DNA, 55 bp, Artificial
  Synthetic oligonucleotide
ggtgcttccccagcactagacctggcagatgaggctagaaactccccactggcga

SEQ ID NO: 432046 - DNA, 55 bp, Artificial
  Synthetic oligonucleotide
ggtgcttctgaaggtgacaagctggtagttgagagtgctgataagagtgcctgcc

SEQ ID NO: 432047 - DNA, 58 bp, Artificial
  Synthetic oligonucleotide
ggtgcttctggccccttaacattgcagtaggtgtaacttcatgtatatacccaccaaa

SEQ ID NO: 432048 - DNA, 60 bp, Artificial
  Synthetic oligonucleotide
ggtgcttgaagcgacgcgtaggagctgaaggcacagttgatgctatgctcgacatctcta

SEQ ID NO: 432049 - DNA, 55 bp, Artificial
  Synthetic oligonucleotide
ggtgcttgcttttaggcagcttgccgctgagaacaaatatgggctgatggacaca

SEQ ID NO: 432050 - DNA, 55 bp, Artificial
  Synthetic oligonucleotide
ggtgcttggcaagcgatgccccgcttgcagcgctgggttgatgcgatgggttcgg

SEQ ID NO: 432051 - DNA, 55 bp, Artificial
  Synthetic oligonucleotide
ggtgctttccaattagagcacacaagcgcacagtgcgacacaatgcccagcgctg

SEQ ID NO: 432052 - DNA, 60 bp, Artificial
  Synthetic oligonucleotide
ggtgctttcttaatgccccgtgttatagtggtgttgatgttctgtccgatgagttatgtg

SEQ ID NO: 432053 - DNA, 56 bp, Artificial
  Synthetic oligonucleotide
ggtgctttgactaatatatcagacgatgatttagcagctaattatttgcagagagg

SEQ ID NO: 432054 - DNA, 60 bp, Artificial
  Synthetic oligonucleotide
ggtgctttgctgaatgacaggcattctaatggaaccgtcaaggacaggagtccttataga

SEQ ID NO: 432055 - DNA, 59 bp, Artificial
  Synthetic oligonucleotide
ggtggaaagacagccgacattgcttttgcgtgggaccaccaagagttagtgctgttcga

SEQ ID NO: 432056 - DNA, 55 bp, Artificial
  Synthetic oligonucleotide
ggtggaaagcagtcccagctctgcattgggaaccggctcacacccagcttagggc

SEQ ID NO: 432057 - DNA, 55 bp, Artificial
  Synthetic oligonucleotide
ggtggaaagttactgtgtaaacatggggttataggcattgtaacagctggtggtg

SEQ ID NO: 432058 - DNA, 58 bp, Artificial
  Synthetic oligonucleotide
ggtggaacaacactcttgtctcaagagaatttcaggggataaccaacaattcagtcat

SEQ ID NO: 432059 - DNA, 55 bp, Artificial
  Synthetic oligonucleotide
ggtggaacaacgcatacatgaaaaccagtttgggcccgaatttgttatgggccaa

SEQ ID NO: 432060 - DNA, 60 bp, Artificial
  Synthetic oligonucleotide
ggtggaacaagcagtgtatatattgaagtgttgcatttaacccaggggacatgctgggag

SEQ ID NO: 432061 - DNA, 55 bp, Artificial
  Synthetic oligonucleotide
ggtggaacacatcagagaagtctgaagtgagaatgtgcgaggaatcgtgatacga

SEQ ID NO: 432062 - DNA, 55 bp, Artificial
  Synthetic oligonucleotide
ggtggaacagcattgtggaagcacgttataaggaggaacccgggttacgttgcaa

SEQ ID NO: 432063 - DNA, 55 bp, Artificial
  Synthetic oligonucleotide
ggtggaacccgttgatatcaaagaaccttgagtcagtgattcttaccggtttctc

SEQ ID NO: 432064 - DNA, 54 bp, Artificial
  Synthetic oligonucleotide
ggtggaacctgttctcttgcggtagtcttggcattctagctttactggacacat

SEQ ID NO: 432065 - DNA, 55 bp, Artificial
  Synthetic oligonucleotide
ggtggaacgctaatgtaatgtatgaaacggcagtagctcattcttttgggaaacc

SEQ ID NO: 432066 - DNA, 55 bp, Artificial
  Synthetic oligonucleotide
ggtggaacggattcatacaggaagacacaaagagagtcgtgattgatgactggcc

SEQ ID NO: 432067 - DNA, 55 bp, Artificial
  Synthetic oligonucleotide
ggtggaacgtcaggagacctcgtgagatcatcccaagaaggcccacagagatgat

SEQ ID NO: 432068 - DNA, 60 bp, Artificial
  Synthetic oligonucleotide
ggtggaagaattgcaatgagcccaattttcactgtatttcttactatgcatttaagcaaa

SEQ ID NO: 432069 - DNA, 60 bp, Artificial
  Synthetic oligonucleotide
ggtggaagatagcgcaaagatcggggaatctggatctatgcattgtgaattacgctatcg

SEQ ID NO: 432070 - DNA, 50 bp, Artificial
  Synthetic oligonucleotide
ggtggaagggctaggaagtaggatcaaccactgtttattaattaggggta

SEQ ID NO: 432071 - DNA, 60 bp, Artificial
  Synthetic oligonucleotide
ggtggaaggtggagctacaggatggatgagtgatgtcgaagtgtctagggtttctgaatt

SEQ ID NO: 432072 - DNA, 60 bp, Artificial
  Synthetic oligonucleotide
ggtggaataaacagctacagcaaaacagggtcgtgccacattatagatcatctggtgagt

SEQ ID NO: 432073 - DNA, 56 bp, Artificial
  Synthetic oligonucleotide
ggtggaatactccgttgccaacatggagtggtagggatagtttccacaggagggga

SEQ ID NO: 432074 - DNA, 55 bp, Artificial
  Synthetic oligonucleotide
ggtggaatacttagatgtcaacacggagtgatagggataatcaccgctggtgggg

SEQ ID NO: 432075 - DNA, 55 bp, Artificial
  Synthetic oligonucleotide
ggtggaatagtagccgcctgtctgacaatatgaccgctgtagcttgtcagctgcc

SEQ ID NO: 432076 - DNA, 57 bp, Artificial
  Synthetic oligonucleotide
ggtggaatcctattagtcagtatattactattgagataggagtgaaacctaaacctc

SEQ ID NO: 432077 - DNA, 57 bp, Artificial
  Synthetic oligonucleotide
ggtggaatgagaagtttagggatattcgaaagttcatccctgagacaattgaagagg

SEQ ID NO: 432078 - DNA, 55 bp, Artificial
  Synthetic oligonucleotide
ggtggaatgatgggtgggctttggcagtacttgaacgccgtttcactgtgtgtgc

SEQ ID NO: 432079 - DNA, 60 bp, Artificial
  Synthetic oligonucleotide
ggtggaatgcagaagacatggatggaaagaggggaatgatacctgttccttacgtcgaga

SEQ ID NO: 432080 - DNA, 55 bp, Artificial
  Synthetic oligonucleotide
ggtggaattagaatggaaacagataatatggcttctacgcctgatatttcgcgag

SEQ ID NO: 432081 - DNA, 50 bp, Artificial
  Synthetic oligonucleotide
ggtggacaacagtccgtccgcacgagctgtggaaaaacgcagggggtgtg

SEQ ID NO: 432082 - DNA, 55 bp, Artificial
  Synthetic oligonucleotide
ggtggacaacatgaccacaacacaaatcgaggtgggtcccggagcaaccaatgcc

SEQ ID NO: 432083 - DNA, 60 bp, Artificial
  Synthetic oligonucleotide
ggtggacacaataattgagagtaatatcacagttactagctcggttgaactggttgagaa

SEQ ID NO: 432084 - DNA, 59 bp, Artificial
  Synthetic oligonucleotide
ggtggacacagcatacaacaactggaggttcacgggcctgcgcagtatctggtaacccg

SEQ ID NO: 432085 - DNA, 55 bp, Artificial
  Synthetic oligonucleotide
ggtggacactgtgtctgtaggtaacacattatattatgtaaataagcaagaaggc

SEQ ID NO: 432086 - DNA, 59 bp, Artificial
  Synthetic oligonucleotide
ggtggacacttgtcataagagcgttgctaatgctgtaaggagtgtctttgttacagggt

SEQ ID NO: 432087 - DNA, 58 bp, Artificial
  Synthetic oligonucleotide
ggtggacagagactgatagtaatttctttacgaaacaagatgtagtggcagtaaccga

SEQ ID NO: 432088 - DNA, 60 bp, Artificial
  Synthetic oligonucleotide
ggtggacagataccgatggtaatttcttagtgaaacaggatgtagtggcaatgactgatt

SEQ ID NO: 432089 - DNA, 58 bp, Artificial
  Synthetic oligonucleotide
ggtggacagattattggcaagccacttggatccctgaatgggaatatgttaatacccc

SEQ ID NO: 432090 - DNA, 59 bp, Artificial
  Synthetic oligonucleotide
ggtggacagttcaagccgtagaagtggtagagaacttcttgccagtcccagggagcaca

SEQ ID NO: 432091 - DNA, 52 bp, Artificial
  Synthetic oligonucleotide
ggtggacatacttcctccccctactagccgggttaagttacccagtgttcga

SEQ ID NO: 432092 - DNA, 60 bp, Artificial
  Synthetic oligonucleotide
ggtggacatcctcagacagaatccaacagaggaacaagctgtggatatatgcaaggcagc

SEQ ID NO: 432093 - DNA, 54 bp, Artificial
  Synthetic oligonucleotide
ggtggaccacaagttccaggacaagacattaaaaatccacaagaccttaacacc

SEQ ID NO: 432094 - DNA, 55 bp, Artificial
  Synthetic oligonucleotide
ggtggaccagatctgagcccgggagctctctggctacttagggaacccgctgctt

SEQ ID NO: 432095 - DNA, 57 bp, Artificial
  Synthetic oligonucleotide
ggtggacccatccctcccgtccaacccccaatggcagaatggaagagtacatgttga

SEQ ID NO: 432096 - DNA, 55 bp, Artificial
  Synthetic oligonucleotide
ggtggaccccgatgatgttaacaaaagcacactacagagtagacgggcagctgtg

SEQ ID NO: 432097 - DNA, 59 bp, Artificial
  Synthetic oligonucleotide
ggtggaccgatccatgcggtgttggttaccataccacacgcattcctttcattagtcca

SEQ ID NO: 432098 - DNA, 55 bp, Artificial
  Synthetic oligonucleotide
ggtggacctgttcctaagtggatttctgaaaaggcccaaatccagtcatacctcg

SEQ ID NO: 432099 - DNA, 55 bp, Artificial
  Synthetic oligonucleotide
ggtggacgaagaaagggagaaccatctgaaaggagagtgccacacatgcatttac

SEQ ID NO: 432100 - DNA, 53 bp, Artificial
  Synthetic oligonucleotide
ggtggacgacggaaagtcaccctccgcacggagccgggactcaccgtgcggag

SEQ ID NO: 432101 - DNA, 55 bp, Artificial
  Synthetic oligonucleotide
ggtggacgcagtggcccttgtgtgtccaggctgtgcataacatggcagagtctcc

SEQ ID NO: 432102 - DNA, 53 bp, Artificial
  Synthetic oligonucleotide
ggtggacggggtgcaaatacaccgattcgcccccattccaggtcccttctttc

SEQ ID NO: 432103 - DNA, 55 bp, Artificial
  Synthetic oligonucleotide
ggtggacggtatcctataacgctaactgtcaacggacgtgtccacacatgcttga

SEQ ID NO: 432104 - DNA, 55 bp, Artificial
  Synthetic oligonucleotide
ggtggacgtcgaaccaatgatcacggttcaaccaaagaagtgtgcacagacgtgg

SEQ ID NO: 432105 - DNA, 55 bp, Artificial
  Synthetic oligonucleotide
ggtggactaatagcacctagtagagtaagcaaattaaaaggacgaggcctaggta

SEQ ID NO: 432106 - DNA, 49 bp, Artificial
  Synthetic oligonucleotide
ggtggactccaggacccccgaaaggaggggggtgggccctggacctccg

SEQ ID NO: 432107 - DNA, 55 bp, Artificial
  Synthetic oligonucleotide
ggtggactggaacggacagtaacttctcgctgaagcaagatatcgtagcgataac

SEQ ID NO: 432108 - DNA, 60 bp, Artificial
  Synthetic oligonucleotide
ggtggactgtaggagatgagggatcagagcggcagggaaatgcaactgtgctaatcactt

SEQ ID NO: 432109 - DNA, 55 bp, Artificial
  Synthetic oligonucleotide
ggtggacttggaaattaccgtcatatacgttccgagatttcataatgttaggtcc

SEQ ID NO: 432110 - DNA, 55 bp, Artificial
  Synthetic oligonucleotide
ggtggacttgtggaccaccaacatcgtggttcctgtggaacccttgctgtcctcc

SEQ ID NO: 432111 - DNA, 51 bp, Artificial
  Synthetic oligonucleotide
ggtggagaaggaactgagaaacaggtgaaggcatcactgaacagggatgat

SEQ ID NO: 432112 - DNA, 55 bp, Artificial
  Synthetic oligonucleotide
ggtggagaccagtttgggagcctcgtcaacccctcgacccggctgagttgaggaa

SEQ ID NO: 432113 - DNA, 55 bp, Artificial
  Synthetic oligonucleotide
ggtggagagggtgttatggaataaggagaataaagtaccttattatgacccaggc

SEQ ID NO: 432114 - DNA, 54 bp, Artificial
  Synthetic oligonucleotide
ggtggagatactaaaacggagttccttcatttaattgatcacctctaaagggtc

SEQ ID NO: 432115 - DNA, 55 bp, Artificial
  Synthetic oligonucleotide
ggtggagatgactttactctcagaatgccagtgactcccagcaagtacacacctc

SEQ ID NO: 432116 - DNA, 60 bp, Artificial
  Synthetic oligonucleotide
ggtggagcaaaaaaggcactgagacccagatggtgtgatgaaagagtgtcctcagaccaa

SEQ ID NO: 432117 - DNA, 55 bp, Artificial
  Synthetic oligonucleotide
ggtggagcaatttggtattcacttcaatctttatggtgcatgtcaggagacgcct

SEQ ID NO: 432118 - DNA, 53 bp, Artificial
  Synthetic oligonucleotide
ggtggagcacccgggaacaaggaaacaggagaaggatcggtagaaaagagcga

SEQ ID NO: 432119 - DNA, 56 bp, Artificial
  Synthetic oligonucleotide
ggtggagccattaacgtaactaccgcagttaacttaactgggtatgcgatcgcaat

SEQ ID NO: 432120 - DNA, 60 bp, Artificial
  Synthetic oligonucleotide
ggtggagcctggagaccatctgaaagagaggtcaatgctcagttatggtaatgtgctgga

SEQ ID NO: 432121 - DNA, 55 bp, Artificial
  Synthetic oligonucleotide
ggtggagcgcaaaccagcgctcttatgagcaagcacttctgtctccccggtgtgg

SEQ ID NO: 432122 - DNA, 58 bp, Artificial
  Synthetic oligonucleotide
ggtggagcgcgagccatgccgatgcctctcctgacggcaccggggaccccctcgaccc

SEQ ID NO: 432123 - DNA, 55 bp, Artificial
  Synthetic oligonucleotide
ggtggagctgttttccgcccgaattatccatatcgccgatacttcggcagaaggg

SEQ ID NO: 432124 - DNA, 50 bp, Artificial
  Synthetic oligonucleotide
ggtggagcttacgaaggctctaatggagcaatcttagcatctgttttatc

SEQ ID NO: 432125 - DNA, 56 bp, Artificial
  Synthetic oligonucleotide
ggtggaggaaaacctattcaaggcagtaatttccacttctttgctgttggtggaga

SEQ ID NO: 432126 - DNA, 57 bp, Artificial
  Synthetic oligonucleotide
ggtggaggatcctattttgcttcaagtgctgtagaagaaccaggggcctgttcagat

SEQ ID NO: 432127 - DNA, 57 bp, Artificial
  Synthetic oligonucleotide
ggtggaggatgggcctcaggaacaatttccctgaagggtttattcaatgagcacgaa

SEQ ID NO: 432128 - DNA, 60 bp, Artificial
  Synthetic oligonucleotide
ggtggaggcatgttgacttggtcaattggtgtctctcaaacttggatatgtaattggtgt

SEQ ID NO: 432129 - DNA, 55 bp, Artificial
  Synthetic oligonucleotide
ggtggagggaaccaccaacattacaatgtcgagcactgttctcccaggccgtcac

SEQ ID NO: 432130 - DNA, 55 bp, Artificial
  Synthetic oligonucleotide
ggtggagggtgacacccttgctgataggttcctgaagtgggccagtttaggggtg

SEQ ID NO: 432131 - DNA, 59 bp, Artificial
  Synthetic oligonucleotide
ggtggaggtacctgtcattacagcagacggtgaagtctacataaggaatggtcagaggg

SEQ ID NO: 432132 - DNA, 59 bp, Artificial
  Synthetic oligonucleotide
ggtggaggtagcgttaagcggtggcactccacctgaaacaaacaagatgtttgcagatc

SEQ ID NO: 432133 - DNA, 60 bp, Artificial
  Synthetic oligonucleotide
ggtggaggtccaggctaggccggccgctgtggagaaggcggagcggacggccaacatgca

SEQ ID NO: 432134 - DNA, 60 bp, Artificial
  Synthetic oligonucleotide
ggtggagtatactcactcggaaaagcgcttgagaactacgactattggcatacttatagc

SEQ ID NO: 432135 - DNA, 60 bp, Artificial
  Synthetic oligonucleotide
ggtggagtcaacagagggacattcaggagtcgttagcatatgtcttgaatagggaagctt

SEQ ID NO: 432136 - DNA, 55 bp, Artificial
  Synthetic oligonucleotide
ggtggagtcgacatgagggcgggacgcattatagcatgggatggacaggccgcgt

SEQ ID NO: 432137 - DNA, 55 bp, Artificial
  Synthetic oligonucleotide
ggtggagtctacaaagtcaatcccgctcaggggttgtttgcgtggctctctacgt

SEQ ID NO: 432138 - DNA, 58 bp, Artificial
  Synthetic oligonucleotide
ggtggagtgcttgaacgaatattgggcttgtgagtcagtcccaagcgaaacgtttgcc

SEQ ID NO: 432139 - DNA, 58 bp, Artificial
  Synthetic oligonucleotide
ggtggataaaaagtgatcgctgggaccagctcctagcggatttgagagccgtgaactt

SEQ ID NO: 432140 - DNA, 60 bp, Artificial
  Synthetic oligonucleotide
ggtggatacacgacggaaattggccatcaaggtatcaccgctgcctctctccgagccatc

SEQ ID NO: 432141 - DNA, 55 bp, Artificial
  Synthetic oligonucleotide
ggtggatactctagtaaagtcaggactgacagaggtgtcaactggagattatagc

SEQ ID NO: 432142 - DNA, 55 bp, Artificial
  Synthetic oligonucleotide
ggtggatatagaagggtcgacgtgtttatctactaggcgttcttcttgctgggct

SEQ ID NO: 432143 - DNA, 60 bp, Artificial
  Synthetic oligonucleotide
ggtggatatcaggatctcgtgcaaatctctaaggagatctactattgccagcacgaatgg

SEQ ID NO: 432144 - DNA, 57 bp, Artificial
  Synthetic oligonucleotide
ggtggatatggggcaccttaggcttttggatgttaatgatttgtagtgtaatgggga

SEQ ID NO: 432145 - DNA, 55 bp, Artificial
  Synthetic oligonucleotide
ggtggatatggggcgtcttaggcttttggatgctaatgatgtatagtgtggtggg

SEQ ID NO: 432146 - DNA, 55 bp, Artificial
  Synthetic oligonucleotide
ggtggatcagatgcatgatgatataatcagtttatgggatcaattcctaaagcca

SEQ ID NO: 432147 - DNA, 55 bp, Artificial
  Synthetic oligonucleotide
ggtggatcagtgtaataggcacacgcagccgtgaaccgaaaatctgggctgcgac

SEQ ID NO: 432148 - DNA, 55 bp, Artificial
  Synthetic oligonucleotide
ggtggatcctcccttccatgaattcgcctacgagagcctgagaacacgaccggcc

SEQ ID NO: 432149 - DNA, 60 bp, Artificial
  Synthetic oligonucleotide
ggtggatccttgggaacccaatgtgtgatgatttgattgggaaaacatcatggtcttaca

SEQ ID NO: 432150 - DNA, 56 bp, Artificial
  Synthetic oligonucleotide
ggtggatcggggggaatatcccttgatcccctattgacatcccacgataccctatg

SEQ ID NO: 432151 - DNA, 60 bp, Artificial
  Synthetic oligonucleotide
ggtggatcgtaaacctcatttgagtccttcaggatctctgctcacatttgatgagttatt

SEQ ID NO: 432152 - DNA, 55 bp, Artificial
  Synthetic oligonucleotide
ggtggatctgagggttacgggagcttaggttctcaaaacgtatctgggcgggtgc

SEQ ID NO: 432153 - DNA, 54 bp, Artificial
  Synthetic oligonucleotide
ggtggatgagctgcgaaaagttaaacgatcagctcttgacctgctttctttgaa

SEQ ID NO: 432154 - DNA, 55 bp, Artificial
  Synthetic oligonucleotide
ggtggatgccacctaacgatgccagaaagctccacaactctctatataaggagcc

SEQ ID NO: 432155 - DNA, 57 bp, Artificial
  Synthetic oligonucleotide
ggtggatgcttcgtgcaaatgctatgaatgcctacgtatatgtgcgtagatgcctat

SEQ ID NO: 432156 - DNA, 60 bp, Artificial
  Synthetic oligonucleotide
ggtggatggagtattggcaggccacctggattcctgagtgggagtttgtcaatactcctc

SEQ ID NO: 432157 - DNA, 58 bp, Artificial
  Synthetic oligonucleotide
ggtggatgggaccaagagagatttaagcttcatagcattttaactgacccgaatctat

SEQ ID NO: 432158 - DNA, 59 bp, Artificial
  Synthetic oligonucleotide
ggtggatgggataatgacaatagacctagatcctgtaatatacgattcaaaattcgaaa

SEQ ID NO: 432159 - DNA, 60 bp, Artificial
  Synthetic oligonucleotide
ggtggattagcgtatgcaacaattaagtatgctaccgagacgactattttctacttgata

SEQ ID NO: 432160 - DNA, 55 bp, Artificial
  Synthetic oligonucleotide
ggtggattggtgtgtacgtataaaggcgaaacgccgaacgctacaactgatcaat

SEQ ID NO: 432161 - DNA, 55 bp, Artificial
  Synthetic oligonucleotide
ggtggatttcaacgattggtatccatatgtgattgaaagttccgatgtagcagtc

SEQ ID NO: 432162 - DNA, 60 bp, Artificial
  Synthetic oligonucleotide
ggtggatttgatcgtatgattgttacgaagaagcttaagtggcggaatgtgccactgtat

SEQ ID NO: 432163 - DNA, 55 bp, Artificial
  Synthetic oligonucleotide
ggtggatttggccgcgtctgcacagaatctgactatgaagcctttgatgcgagcc

SEQ ID NO: 432164 - DNA, 55 bp, Artificial
  Synthetic oligonucleotide
ggtggcaacagtggttctcccactataaattcaacgttgagcaccttgcaggtac

SEQ ID NO: 432165 - DNA, 55 bp, Artificial
  Synthetic oligonucleotide
ggtggcaactagccaagttgttaaaggtcaagcacttctgtctccccggctgacg

SEQ ID NO: 432166 - DNA, 60 bp, Artificial
  Synthetic oligonucleotide
ggtggcaaggtgaagctaacttgcaccttgaaaggttgatcactggcagactctctaaca

SEQ ID NO: 432167 - DNA, 55 bp, Artificial
  Synthetic oligonucleotide
ggtggcaagtggtcaaagcgtgtgaaagaatgggctactgtcagggaaagaatgc

SEQ ID NO: 432168 - DNA, 55 bp, Artificial
  Synthetic oligonucleotide
ggtggcaagtttgtatcaacatttacaccagataccagtgccgcaccaaagcgcg

SEQ ID NO: 432169 - DNA, 55 bp, Artificial
  Synthetic oligonucleotide
ggtggcaattaaccaaattgtcaacggtcaagcacttctgtttccccggtcaaga

SEQ ID NO: 432170 - DNA, 55 bp, Artificial
  Synthetic oligonucleotide
ggtggcaattatgcccacctacctctaagtcctagaacactcaatgcctgggtaa

SEQ ID NO: 432171 - DNA, 55 bp, Artificial
  Synthetic oligonucleotide
ggtggcacaatacctggttaaaaatcatggccgtttcgtccgctccctagtaaca

SEQ ID NO: 432172 - DNA, 55 bp, Artificial
  Synthetic oligonucleotide
ggtggcaccaacaaaagcaaagaggtacacagtggcaaaagcacttgatagatcc

SEQ ID NO: 432173 - DNA, 60 bp, Artificial
  Synthetic oligonucleotide
ggtggcaccaagcatactctccaagccattgagactagagtccttgccgggtccaaaatg

SEQ ID NO: 432174 - DNA, 55 bp, Artificial
  Synthetic oligonucleotide
ggtggcacgacgcgctgccaagttggggtataagatgactcctgccaacaagggt

SEQ ID NO: 432175 - DNA, 55 bp, Artificial
  Synthetic oligonucleotide
ggtggcagaacgccaccgagataggtttgtggtgctgaatcaatctcccatttgg

SEQ ID NO: 432176 - DNA, 55 bp, Artificial
  Synthetic oligonucleotide
ggtggcagacgtgagagccgacataaacgctgtgccatcactggaacacgagccc

SEQ ID NO: 432177 - DNA, 60 bp, Artificial
  Synthetic oligonucleotide
ggtggcagagtgtaattatgaaggcctcaataggatctgcgcctatgaactaggtttgaa

SEQ ID NO: 432178 - DNA, 60 bp, Artificial
  Synthetic oligonucleotide
ggtggcagggctaaaagtgctgaattcgccaaggcgtctgaggccttacttgaacttgca

SEQ ID NO: 432179 - DNA, 60 bp, Artificial
  Synthetic oligonucleotide
ggtggcatacatgttggaaagggagctggttcgcaagacaagattcctaccagtagctgg

SEQ ID NO: 432180 - DNA, 55 bp, Artificial
  Synthetic oligonucleotide
ggtggcattataaccttagtacaccagaggtaaagatatggtggaagattgttgg

SEQ ID NO: 432181 - DNA, 55 bp, Artificial
  Synthetic oligonucleotide
ggtggccaagtatcgcaagagactgcacttagtctttcaggattggtagagagtc

SEQ ID NO: 432182 - DNA, 53 bp, Artificial
  Synthetic oligonucleotide
ggtggccacagaaagtatagtaatatggggaaagcttcctaaatttaaactcc

SEQ ID NO: 432183 - DNA, 55 bp, Artificial
  Synthetic oligonucleotide
ggtggccactagggacggcaagctccccacaacgcagcttcgacgtcacatcgat

SEQ ID NO: 432184 - DNA, 55 bp, Artificial
  Synthetic oligonucleotide
ggtggccactatatactgcaggcgaagtcgtgctagtgcgcaatgtgggatccac

SEQ ID NO: 432185 - DNA, 55 bp, Artificial
  Synthetic oligonucleotide
ggtggccatacctaactagcagactaacagtgtttacatttcctaatgcattccc

SEQ ID NO: 432186 - DNA, 55 bp, Artificial
  Synthetic oligonucleotide
ggtggcccaagttcggcgcccaagccgaattaacttccctgcgactgcagcctga

SEQ ID NO: 432187 - DNA, 57 bp, Artificial
  Synthetic oligonucleotide
ggtggcccagtcataaggtaattccttacgaacgagagagaggtactcttgcttgga

SEQ ID NO: 432188 - DNA, 55 bp, Artificial
  Synthetic oligonucleotide
ggtggcccattcgactcgctaaccactgaccagatcaattctctctccctcactg

SEQ ID NO: 432189 - DNA, 55 bp, Artificial
  Synthetic oligonucleotide
ggtggccccagttcggggcccaagcagagttaaaatctctgcggctgcaagcgtc

SEQ ID NO: 432190 - DNA, 58 bp, Artificial
  Synthetic oligonucleotide
ggtggccctgataacagcacaaccctcacctatcagaaggtttcgtgcttgttgttaa

SEQ ID NO: 432191 - DNA, 55 bp, Artificial
  Synthetic oligonucleotide
ggtggccctgtcatgtgtccttcggggcatgttgcggggatctttagggctgctg

SEQ ID NO: 432192 - DNA, 55 bp, Artificial
  Synthetic oligonucleotide
ggtggcccttgggagtgagccattagctcccaagtcctactatgtgagatcaagg

SEQ ID NO: 432193 - DNA, 55 bp, Artificial
  Synthetic oligonucleotide
ggtggccgtatacatcatgaactgtcatattgcgatattcacacagatgcaacga

SEQ ID NO: 432194 - DNA, 55 bp, Artificial
  Synthetic oligonucleotide
ggtggcctacgagaagatgacaccgctgtccatcctgaccgtagctggagtgtcc

SEQ ID NO: 432195 - DNA, 54 bp, Artificial
  Synthetic oligonucleotide
ggtggcctcgttcattgagggtgaaggatattttagcccataaaggcttgtttt

SEQ ID NO: 432196 - DNA, 55 bp, Artificial
  Synthetic oligonucleotide
ggtggcgaacagggcgcacgcgaagcccatcgcaaactgctggagttgttctcgt

SEQ ID NO: 432197 - DNA, 55 bp, Artificial
  Synthetic oligonucleotide
ggtggcgaccctgagaacggctaaggtgactaatggacttggtacggatatagcc

SEQ ID NO: 432198 - DNA, 59 bp, Artificial
  Synthetic oligonucleotide
ggtggcgactccttgcgcccatcactgcctacgctcaacagacgcggggtctgtttggt

SEQ ID NO: 432199 - DNA, 58 bp, Artificial
  Synthetic oligonucleotide
ggtggcgactgggctaactctgagctatggaaactcgccctttactgggccactggcc

SEQ ID NO: 432200 - DNA, 55 bp, Artificial
  Synthetic oligonucleotide
ggtggcgagaaaattttaaaggtggctaatggcggcgtgtatgattttgtaaatg

SEQ ID NO: 432201 - DNA, 55 bp, Artificial
  Synthetic oligonucleotide
ggtggcgagggtgactacacagtatctcgtgtctcgcaggggacgccctttgggg

SEQ ID NO: 432202 - DNA, 55 bp, Artificial
  Synthetic oligonucleotide
ggtggcgcatgagttctacgtcagaaagggtggagccaacaaaagacccgccccc

SEQ ID NO: 432203 - DNA, 55 bp, Artificial
  Synthetic oligonucleotide
ggtggcgccaaataagcttgttagtattacttttctaacttgcttaggaatgtgc

SEQ ID NO: 432204 - DNA, 55 bp, Artificial
  Synthetic oligonucleotide
ggtggcgtgttacgaacggttcgcgttaaattctatgacgcgcgacctccggatg

SEQ ID NO: 432205 - DNA, 55 bp, Artificial
  Synthetic oligonucleotide
ggtggctaccctgctaagccaaccaaaggagattgaaagacaaacggaggctctt

SEQ ID NO: 432206 - DNA, 56 bp, Artificial
  Synthetic oligonucleotide
ggtggctaggaacacgggggggccagtggagccatgggatgctcttcccgattccg

SEQ ID NO: 432207 - DNA, 60 bp, Artificial
  Synthetic oligonucleotide
ggtggctcagatatacttgacataacagctgatccaacgacagcgccacaaacagaaaga

SEQ ID NO: 432208 - DNA, 55 bp, Artificial
  Synthetic oligonucleotide
ggtggctcatgaggtgctacagcgagtgctgacatacaacatctacctccgagtg

SEQ ID NO: 432209 - DNA, 55 bp, Artificial
  Synthetic oligonucleotide
ggtggctcctttaacatattcgaccggagcatccactagcttagacattacagct

SEQ ID NO: 432210 - DNA, 55 bp, Artificial
  Synthetic oligonucleotide
ggtggctcgtcatccactgacttctcaagttgtgtcgggatagcccagattgggg

SEQ ID NO: 432211 - DNA, 55 bp, Artificial
  Synthetic oligonucleotide
ggtggctctaatgtgttagacataacagcagatccaacgactaatccacaaactg

SEQ ID NO: 432212 - DNA, 55 bp, Artificial
  Synthetic oligonucleotide
ggtggctctcaaggggtctatgttgactttaatggactagatgacactgaacccg

SEQ ID NO: 432213 - DNA, 55 bp, Artificial
  Synthetic oligonucleotide
ggtggctctcgactaccattttgttgcgagttcagcagcctgcaagtactcgagt

SEQ ID NO: 432214 - DNA, 55 bp, Artificial
  Synthetic oligonucleotide
ggtggctctttcgacagtgattggtcggccgatcaagaacctgctggcatctgtc

SEQ ID NO: 432215 - DNA, 52 bp, Artificial
  Synthetic oligonucleotide
ggtggcttacatgttggaaagggaactagttcggaaaactaggttcctacca

SEQ ID NO: 432216 - DNA, 55 bp, Artificial
  Synthetic oligonucleotide
ggtggcttagtattacccacctcggaacactacctctgaacgcctggagatgtcc

SEQ ID NO: 432217 - DNA, 60 bp, Artificial
  Synthetic oligonucleotide
ggtggcttcatgcctcaggaagcttggggtaccacccttgcgagtctggagacatcgggc

SEQ ID NO: 432218 - DNA, 58 bp, Artificial
  Synthetic oligonucleotide
ggtggcttgggatttgcagaccctccttaaccatgttctgtgagtgccctcgttcaaa

SEQ ID NO: 432219 - DNA, 55 bp, Artificial
  Synthetic oligonucleotide
ggtggctttaccccaagttacactccaggtaggcaaatgacatctcgccctgtgg

SEQ ID NO: 432220 - DNA, 55 bp, Artificial
  Synthetic oligonucleotide
ggtggctttcgtgcagacgttttagaaagtatcagaagttcttaccctgcggtct

SEQ ID NO: 432221 - DNA, 55 bp, Artificial
  Synthetic oligonucleotide
ggtgggaaactttacggggctctactcttctactgtacctgctttcaatcctcac

SEQ ID NO: 432222 - DNA, 57 bp, Artificial
  Synthetic oligonucleotide
ggtgggaaagcagaacaatccgaccccagtatgcccgcgcactcctctggacctcgg

SEQ ID NO: 432223 - DNA, 60 bp, Artificial
  Synthetic oligonucleotide
ggtgggaacaatgagtggaaccacgactgagcgtgaattgtggaatgattggtatccata

SEQ ID NO: 432224 - DNA, 56 bp, Artificial
  Synthetic oligonucleotide
ggtgggaacctattaaccaaagttgcagatgatgcctctaacgtcttgggaccaaa

SEQ ID NO: 432225 - DNA, 60 bp, Artificial
  Synthetic oligonucleotide
ggtgggaactgagaggcttgagtcaattggcgtgtgcgtaggtgctttacacagggcgac

SEQ ID NO: 432226 - DNA, 60 bp, Artificial
  Synthetic oligonucleotide
ggtgggaactgatcaggtcaacatcacaaatgtggatggttgggttacggtgtggcagct

SEQ ID NO: 432227 - DNA, 53 bp, Artificial
  Synthetic oligonucleotide
ggtgggaagctcttaaatatctgggaaatcttgtgcagtactggggtctggaa

SEQ ID NO: 432228 - DNA, 59 bp, Artificial
  Synthetic oligonucleotide
ggtgggaagtaatttggaacatccagcatccagggaattagtagtcagctatgtcaacg

SEQ ID NO: 432229 - DNA, 57 bp, Artificial
  Synthetic oligonucleotide
ggtgggaagtaatttggaagacccagcatcatggaaattattagccacctgtcggaa

SEQ ID NO: 432230 - DNA, 51 bp, Artificial
  Synthetic oligonucleotide
ggtgggacaagtcacggattacggtttcctaaacctgggtggtacgcccac

SEQ ID NO: 432231 - DNA, 53 bp, Artificial
  Synthetic oligonucleotide
ggtgggaccaacttcgtttcaaggctcgtggcggctttaattgaagttaattg

SEQ ID NO: 432232 - DNA, 54 bp, Artificial
  Synthetic oligonucleotide
ggtgggacctcccccatggtaacatggacccaccgggccaaaagccacgcctca

SEQ ID NO: 432233 - DNA, 56 bp, Artificial
  Synthetic oligonucleotide
ggtgggacctctccagttgggcatctggtttagtggactggcttggggggccacta

SEQ ID NO: 432234 - DNA, 52 bp, Artificial
  Synthetic oligonucleotide
ggtgggacggttttgacccgtctaaacacaacagaatcgtcatggacgacta

SEQ ID NO: 432235 - DNA, 55 bp, Artificial
  Synthetic oligonucleotide
ggtgggacgtacaccgctcacactggggttgattgggcaccgatgactttgatgt

SEQ ID NO: 432236 - DNA, 55 bp, Artificial
  Synthetic oligonucleotide
ggtgggagaaactggagaaagcagggaacagacgaagaatctcatgttggcttgc

SEQ ID NO: 432237 - DNA, 60 bp, Artificial
  Synthetic oligonucleotide
ggtgggagaagatcaacgctgaacataggaagcgttaccagcacgtacatgattggtacg

SEQ ID NO: 432238 - DNA, 55 bp, Artificial
  Synthetic oligonucleotide
ggtgggagggcaccagtcccaactaaactgttgttgaatggcagtctagcagaag

SEQ ID NO: 432239 - DNA, 55 bp, Artificial
  Synthetic oligonucleotide
ggtgggaggtcgcctcacattaccttgtatacgagcggagggttaacagcagatg

SEQ ID NO: 432240 - DNA, 59 bp, Artificial
  Synthetic oligonucleotide
ggtgggagtacgcttgccgctagaaattcagagacgcatcgcttcttatctggggcccg

SEQ ID NO: 432241 - DNA, 59 bp, Artificial
  Synthetic oligonucleotide
ggtgggagtcgtgacactgtacttgggagtcgtggtgcaggccgatagtggttgcgttg

SEQ ID NO: 432242 - DNA, 55 bp, Artificial
  Synthetic oligonucleotide
ggtgggagtgctcaagtgattgttgtgtggcaacgttgtcgtgagtccaaactcc

SEQ ID NO: 432243 - DNA, 55 bp, Artificial
  Synthetic oligonucleotide
ggtgggagtgggtagtactcttattcctgctcttggcggatgccagggtctgcgc

SEQ ID NO: 432244 - DNA, 55 bp, Artificial
  Synthetic oligonucleotide
ggtgggatgacgcagttcgttgccaagacccttatcataacgtctaaccgtgaac

SEQ ID NO: 432245 - DNA, 60 bp, Artificial
  Synthetic oligonucleotide
ggtgggatggatactgcaatgaggatatagtaatcattgatgatttctatgggtggatac

SEQ ID NO: 432246 - DNA, 60 bp, Artificial
  Synthetic oligonucleotide
ggtgggatgggtattccaatgaggatatagtcatcatggatgacttctatgggtggctgc

SEQ ID NO: 432247 - DNA, 60 bp, Artificial
  Synthetic oligonucleotide
ggtgggattattctaaaacaatggtgcacaacatcatgtgtgtttggagaccctggtgat

SEQ ID NO: 432248 - DNA, 60 bp, Artificial
  Synthetic oligonucleotide
ggtgggccagcaaacaactgatgacaggaaacagacaggtatggacgcgaaacagcagca

SEQ ID NO: 432249 - DNA, 55 bp, Artificial
  Synthetic oligonucleotide
ggtgggcctgagatgttggttggagctccagaaataagaggcatggccaggttta

SEQ ID NO: 432250 - DNA, 55 bp, Artificial
  Synthetic oligonucleotide
ggtgggcgaaagaaggatcacatggtcaatggtgagccagacaagccgctattgg

SEQ ID NO: 432251 - DNA, 55 bp, Artificial
  Synthetic oligonucleotide
ggtgggcggattactggcaggtaagctggattcccgaatgggattttgtcagcac

SEQ ID NO: 432252 - DNA, 56 bp, Artificial
  Synthetic oligonucleotide
ggtgggcgtttacgccaactccctgcatgtgagtgacaaacctttcccgggagcaa

SEQ ID NO: 432253 - DNA, 50 bp, Artificial
  Synthetic oligonucleotide
ggtggggaaccagttagtggtgtctttgagacaactgatgggaccatgca

SEQ ID NO: 432254 - DNA, 55 bp, Artificial
  Synthetic oligonucleotide
ggtggggaactcttagcatttgattacactaattatgatggtagtctgcaccctg

SEQ ID NO: 432255 - DNA, 55 bp, Artificial
  Synthetic oligonucleotide
ggtggggacagcgttcgctgaagtgaactctggtagagacgtggcccatctggcg

SEQ ID NO: 432256 - DNA, 55 bp, Artificial
  Synthetic oligonucleotide
ggtggggcaccgagtgctacaccaggtgaagtggcggctttctgtagcgccctat

SEQ ID NO: 432257 - DNA, 59 bp, Artificial
  Synthetic oligonucleotide
ggtggggcagacaacaatgacacttgtgacttgttaacaagtgtagacttgctaggtcc

SEQ ID NO: 432258 - DNA, 52 bp, Artificial
  Synthetic oligonucleotide
ggtggggccagataacccacaaaaacgtctcgggcccctctgacgaccgtcc

SEQ ID NO: 432259 - DNA, 55 bp, Artificial
  Synthetic oligonucleotide
ggtggggcgataagtttgttgaagtagttgcagaaggagcttttgataatagctt

SEQ ID NO: 432260 - DNA, 52 bp, Artificial
  Synthetic oligonucleotide
ggtggggcgtcgatctcgggacaccgatgcgtgtacactatgtgcggctaca

SEQ ID NO: 432261 - DNA, 60 bp, Artificial
  Synthetic oligonucleotide
ggtggggctgatcatagcaatgggtctttggatgtgttcgaatggttcaatgcaatgcag

SEQ ID NO: 432262 - DNA, 55 bp, Artificial
  Synthetic oligonucleotide
ggtggggctgtattgacgatacaaacatttagtcatcgttggaaatagaagttcc

SEQ ID NO: 432263 - DNA, 55 bp, Artificial
  Synthetic oligonucleotide
ggtgggggggtgggagatacatatgttcactatggaccaactggtactggttggt

SEQ ID NO: 432264 - DNA, 51 bp, Artificial
  Synthetic oligonucleotide
ggtggggtatgataggctggacaggtagccagctggacgcaaggccggaaa

SEQ ID NO: 432265 - DNA, 55 bp, Artificial
  Synthetic oligonucleotide
ggtggggtatggcccaattgacgaccccagatatgctgactggggttacgttttg

SEQ ID NO: 432266 - DNA, 55 bp, Artificial
  Synthetic oligonucleotide
ggtggggtcaccaacaagagtgttacgcgaagttctgagcgtggtacgtaacaac

SEQ ID NO: 432267 - DNA, 55 bp, Artificial
  Synthetic oligonucleotide
ggtggggtcccatcacttacgctaagccggccagcttggaccagaggccctattg

SEQ ID NO: 432268 - DNA, 55 bp, Artificial
  Synthetic oligonucleotide
ggtggggtcgagcattgcgtcctgggccatcaagtgggactacgtcgttctcctg

SEQ ID NO: 432269 - DNA, 54 bp, Artificial
  Synthetic oligonucleotide
ggtggggtcgcaattaccttgcgagcctgaaccggacgtggccgtgttaacgtc

SEQ ID NO: 432270 - DNA, 53 bp, Artificial
  Synthetic oligonucleotide
ggtggggtcgtcccaccaggtacgtcccaatttacgagcctaacgcggctgta

SEQ ID NO: 432271 - DNA, 55 bp, Artificial
  Synthetic oligonucleotide
ggtggggtgttatatagaacgtaaagtgtttagtgttacgtgtgcacggtagcga

SEQ ID NO: 432272 - DNA, 55 bp, Artificial
  Synthetic oligonucleotide
ggtggggtttcaaatcgtgcccgtgagcctagagctcttgagatacggttggatc

SEQ ID NO: 432273 - DNA, 55 bp, Artificial
  Synthetic oligonucleotide
ggtgggtagatcaggaagtaagacatgcagccaaaagtttatgcaaagaacccaa

SEQ ID NO: 432274 - DNA, 53 bp, Artificial
  Synthetic oligonucleotide
ggtgggtcagttaatccgttgtgggtgggtttagtttcaagctgccttaagta

SEQ ID NO: 432275 - DNA, 55 bp, Artificial
  Synthetic oligonucleotide
ggtgggtccaccatcaattacactacaatcaattactatagggactctgcgagca

SEQ ID NO: 432276 - DNA, 56 bp, Artificial
  Synthetic oligonucleotide
ggtgggtcccacgttcaaggagaaagataaatgggctggttccatgcaattgggcc

SEQ ID NO: 432277 - DNA, 55 bp, Artificial
  Synthetic oligonucleotide
ggtgggtggccaggtctaatcaatggttggtatggattccaacacaggaatgagg

SEQ ID NO: 432278 - DNA, 53 bp, Artificial
  Synthetic oligonucleotide
ggtgggtggtttgtcccatacggtaccgactcagcgggagacgttgttggcgg

SEQ ID NO: 432279 - DNA, 53 bp, Artificial
  Synthetic oligonucleotide
ggtgggtgtcaaggtgtcaccttcctacattgtgaggggctgaaggccccgaa

SEQ ID NO: 432280 - DNA, 57 bp, Artificial
  Synthetic oligonucleotide
ggtgggttatttatgtgctggaattccgacagacactccacgggttcaggacagtag

SEQ ID NO: 432281 - DNA, 53 bp, Artificial
  Synthetic oligonucleotide
ggtgggttcacttttaaaagaacaagcgggtcatcaattaagaaagaagagga

SEQ ID NO: 432282 - DNA, 55 bp, Artificial
  Synthetic oligonucleotide
ggtgggttctgtatggaacagaagagcccttcactatgaaagccagctgtggagt

SEQ ID NO: 432283 - DNA, 52 bp, Artificial
  Synthetic oligonucleotide
ggtgggtttcatactgagaaagtagcaagccgtattcgtctggtaaaaggca

SEQ ID NO: 432284 - DNA, 60 bp, Artificial
  Synthetic oligonucleotide
ggtgggtttcttgtcatcaacgaacccaccaattgtggagcaaaacatgatgcagtccag

SEQ ID NO: 432285 - DNA, 55 bp, Artificial
  Synthetic oligonucleotide
ggtgggtttgaagtgtgtaaagtggggaggaactttgagtggtgactcgctgttc

SEQ ID NO: 432286 - DNA, 55 bp, Artificial
  Synthetic oligonucleotide
ggtgggtttgtcgtcaagactagagagatggtttatgaaaagacaactgactgga

SEQ ID NO: 432287 - DNA, 56 bp, Artificial
  Synthetic oligonucleotide
ggtggtaaacctaatactgttgtagatgtttcgcctgcacgtccacctgtggttat

SEQ ID NO: 432288 - DNA, 55 bp, Artificial
  Synthetic oligonucleotide
ggtggtaacgtcggagtacttgaaattgtgttccacaaacgagcgcaacgactcg

SEQ ID NO: 432289 - DNA, 59 bp, Artificial
  Synthetic oligonucleotide
ggtggtaagcctatacagggttgcatccaaatgatagctagtttaggccctggatttgc

SEQ ID NO: 432290 - DNA, 55 bp, Artificial
  Synthetic oligonucleotide
ggtggtaaggacgagaacaagactgggactgagatcttcagacctggaggaggag

SEQ ID NO: 432291 - DNA, 55 bp, Artificial
  Synthetic oligonucleotide
ggtggtaataacaataacacgaacaggaccgagaccttcagacctggaggaggag

SEQ ID NO: 432292 - DNA, 54 bp, Artificial
  Synthetic oligonucleotide
ggtggtaataacgagaacgatcccgaaaattcacccggaggaggagatatgagg

SEQ ID NO: 432293 - DNA, 55 bp, Artificial
  Synthetic oligonucleotide
ggtggtaataatgctaataagactgaaaatcggactgaaaccttcagacctgggg

SEQ ID NO: 432294 - DNA, 59 bp, Artificial
  Synthetic oligonucleotide
ggtggtaatgctgacgaagtcataccagttagacaggaggttatcttggctgtgtttaa

SEQ ID NO: 432295 - DNA, 53 bp, Artificial
  Synthetic oligonucleotide
ggtggtacactacttaggccctcggttccaaccattgaccctgtaggccctgg

SEQ ID NO: 432296 - DNA, 56 bp, Artificial
  Synthetic oligonucleotide
ggtggtacccaaggataacctgccgacgtggtggagacaccaggcgtgttgtggcg

SEQ ID NO: 432297 - DNA, 59 bp, Artificial
  Synthetic oligonucleotide
ggtggtaccggagccgattatgatgttacgctcaacctcatcaaccctgtcgaaagcag

SEQ ID NO: 432298 - DNA, 55 bp, Artificial
  Synthetic oligonucleotide
ggtggtacgcgattgatgacgaggacttttacccgtggacgccggacccatcgga

SEQ ID NO: 432299 - DNA, 57 bp, Artificial
  Synthetic oligonucleotide
ggtggtagtaaatagtcattcattgttataagagcaggtgggaatatctgagatacc

SEQ ID NO: 432300 - DNA, 55 bp, Artificial
  Synthetic oligonucleotide
ggtggtagtggcattttcgcaaatatggtgtaggactccagcagagtacctcata

SEQ ID NO: 432301 - DNA, 52 bp, Artificial
  Synthetic oligonucleotide
ggtggtatactaattaaaccgataaactcaagtagaatgagaatttgcatgt

SEQ ID NO: 432302 - DNA, 55 bp, Artificial
  Synthetic oligonucleotide
ggtggtatatatttactgcagggtgaaaggtataggaaggtaggtaatttgatcc

SEQ ID NO: 432303 - DNA, 60 bp, Artificial
  Synthetic oligonucleotide
ggtggtatctaacaatactcagctagcacttattgacgtagtcgataatgttaaacatag

SEQ ID NO: 432304 - DNA, 53 bp, Artificial
  Synthetic oligonucleotide
ggtggtatgacccagttcgtgtttaagacccttataattacttctaataggga

SEQ ID NO: 432305 - DNA, 55 bp, Artificial
  Synthetic oligonucleotide
ggtggtatgacccagtttgtggctaagacccttataattacctctaatagggagc

SEQ ID NO: 432306 - DNA, 50 bp, Artificial
  Synthetic oligonucleotide
ggtggtatggcacctgttactactaaatttagggatgttcctaatttgag

SEQ ID NO: 432307 - DNA, 55 bp, Artificial
  Synthetic oligonucleotide
ggtggtatggtttcagacatcaaaattcacaaggagagggaacagcggctgatta

SEQ ID NO: 432308 - DNA, 53 bp, Artificial
  Synthetic oligonucleotide
ggtggtatgtaatagtcgttattggaagcataacgcacattataatctacgag

SEQ ID NO: 432309 - DNA, 57 bp, Artificial
  Synthetic oligonucleotide
ggtggtattcaaaaatatgcaactcccatgatgcctcttgatgaggagattctttcc

SEQ ID NO: 432310 - DNA, 54 bp, Artificial
  Synthetic oligonucleotide
ggtggtattttacgtttccatggataagacacttaaccagtaccctgcactaac

SEQ ID NO: 432311 - DNA, 55 bp, Artificial
  Synthetic oligonucleotide
ggtggtcaaatccgtatccatgcttgcgcggcacgttgattgcggcggagacaaa

SEQ ID NO: 432312 - DNA, 60 bp, Artificial
  Synthetic oligonucleotide
ggtggtcaagcacatcatgccacgatgggatatcaagaatgtcaatatgcatgtctggac

SEQ ID NO: 432313 - DNA, 55 bp, Artificial
  Synthetic oligonucleotide
ggtggtcaatttgtggcggagagtgcatgatctatggaggtataaaggaacacac

SEQ ID NO: 432314 - DNA, 60 bp, Artificial
  Synthetic oligonucleotide
ggtggtcagaactccaagaagcgggaagaggcatatgcacgcttctacaagaggttgcgc

SEQ ID NO: 432315 - DNA, 55 bp, Artificial
  Synthetic oligonucleotide
ggtggtcatcgccttggtggttattctggttagtgttggtgtgttctatctggcc

SEQ ID NO: 432316 - DNA, 55 bp, Artificial
  Synthetic oligonucleotide
ggtggtcatgtcagccgttggaggtctgttatggtacggaaatgtgccagcccca

SEQ ID NO: 432317 - DNA, 60 bp, Artificial
  Synthetic oligonucleotide
ggtggtcattgctgagagtgctggagtccaggaggacgcctctaacctgcgagctttcac

SEQ ID NO: 432318 - DNA, 51 bp, Artificial
  Synthetic oligonucleotide
ggtggtcccgcctctcctgttcggtgaaccctcccgggtgtttcctcttcc

SEQ ID NO: 432319 - DNA, 55 bp, Artificial
  Synthetic oligonucleotide
ggtggtcccgcgtgtggtttgtggctcggggacccgccacgcaggaatctaatat

SEQ ID NO: 432320 - DNA, 59 bp, Artificial
  Synthetic oligonucleotide
ggtggtcctctgcagtgactaccgacagagccgtaatgcggcagccttaatagcgggct

SEQ ID NO: 432321 - DNA, 58 bp, Artificial
  Synthetic oligonucleotide
ggtggtcctttgtaatgactaccgacagagccgtaatgcggcggccctaattgcagga

SEQ ID NO: 432322 - DNA, 57 bp, Artificial
  Synthetic oligonucleotide
ggtggtcgcggccatgtatacggacgcctttcgaggggcgactctgggggatctgct

SEQ ID NO: 432323 - DNA, 55 bp, Artificial
  Synthetic oligonucleotide
ggtggtcgctagtgatggaggtcccgtggcagctacgcctgctggggatgttttc

SEQ ID NO: 432324 - DNA, 55 bp, Artificial
  Synthetic oligonucleotide
ggtggtcgtatagctctccattgcatccttcagaacaagtataaacttgcgcttc

SEQ ID NO: 432325 - DNA, 55 bp, Artificial
  Synthetic oligonucleotide
ggtggtcgtgaacgttttgatgcactctatagtcaccttgagacgcacaaccctg

SEQ ID NO: 432326 - DNA, 60 bp, Artificial
  Synthetic oligonucleotide
ggtggtctaagtcctgagtacaggacagtcgtcagtagttcgacgtgagcagtagcccac

SEQ ID NO: 432327 - DNA, 50 bp, Artificial
  Synthetic oligonucleotide
ggtggtctcgcaactatcgcccattccgcttctgtttgagacttaaaaca

SEQ ID NO: 432328 - DNA, 55 bp, Artificial
  Synthetic oligonucleotide
ggtggtctgattttcatcggtcgtcgtatttatcggacccgcatgctaaagtttc

SEQ ID NO: 432329 - DNA, 55 bp, Artificial
  Synthetic oligonucleotide
ggtggtcttaaagttttttgcagcaatcttacataatagctctcaagaaaaccgt

SEQ ID NO: 432330 - DNA, 60 bp, Artificial
  Synthetic oligonucleotide
ggtggtgaaatcatctttagcgtacacagtactgcaagcacctttgtttcttgcagtttg

SEQ ID NO: 432331 - DNA, 59 bp, Artificial
  Synthetic oligonucleotide
ggtggtgactattcggtatatcaagagttgttctgtgatgaggagcttccttcttcctt

SEQ ID NO: 432332 - DNA, 52 bp, Artificial
  Synthetic oligonucleotide
ggtggtgactcttacagttacgttgcggtcgcagtcgtgcgagcgcagatac

SEQ ID NO: 432333 - DNA, 53 bp, Artificial
  Synthetic oligonucleotide
ggtggtgagaactcaaagccttatgtagttgtggggactacacggcaccgaag

SEQ ID NO: 432334 - DNA, 60 bp, Artificial
  Synthetic oligonucleotide
ggtggtgagtgaagtagtccctgcagacttgataggaagctatactccagaatccctgaa

SEQ ID NO: 432335 - DNA, 55 bp, Artificial
  Synthetic oligonucleotide
ggtggtgattactcagtatatcaagatctctattgtgatgcggttctctcttctt

SEQ ID NO: 432336 - DNA, 57 bp, Artificial
  Synthetic oligonucleotide
ggtggtgattatagtttcgcactaccagtcggtgcatacccagtaatgagcggtggc

SEQ ID NO: 432337 - DNA, 55 bp, Artificial
  Synthetic oligonucleotide
ggtggtgcatggcactatgtagctgttcgtgagaatggggttgcgttaggaacgt

SEQ ID NO: 432338 - DNA, 55 bp, Artificial
  Synthetic oligonucleotide
ggtggtgccatatgtgcatattgacatgaagactaaatccgtcactgctcaaaag

SEQ ID NO: 432339 - DNA, 60 bp, Artificial
  Synthetic oligonucleotide
ggtggtgcccctaccgacgcatcactccagataccacacgtactcggctatggcagggtc

SEQ ID NO: 432340 - DNA, 55 bp, Artificial
  Synthetic oligonucleotide
ggtggtgcgaggcattccgggaaggcttacgtattgcttacgagaatacaaccgt

SEQ ID NO: 432341 - DNA, 59 bp, Artificial
  Synthetic oligonucleotide
ggtggtgcgtactgactgtcaggcgatagtgacattttacaacaagacaagcactcaca

SEQ ID NO: 432342 - DNA, 55 bp, Artificial
  Synthetic oligonucleotide
ggtggtgctctatgctggatttagatacttctgactgggaaccactaactcactc

SEQ ID NO: 432343 - DNA, 55 bp, Artificial
  Synthetic oligonucleotide
ggtggtggaggccagaaccagactgaaaaccagactgagatcttcagacctggag

SEQ ID NO: 432344 - DNA, 60 bp, Artificial
  Synthetic oligonucleotide
ggtggtggattcacgttcaagtgaggctattggactgctagaatcatttggagtagacgc

SEQ ID NO: 432345 - DNA, 57 bp, Artificial
  Synthetic oligonucleotide
ggtggtggcaagtattttatacgatagttgattatgttaatcaaattgtacaagtta

SEQ ID NO: 432346 - DNA, 54 bp, Artificial
  Synthetic oligonucleotide
ggtggtggccatccaggttactgacggtcgagcacttctgtttccccggtaccc

SEQ ID NO: 432347 - DNA, 55 bp, Artificial
  Synthetic oligonucleotide
ggtggtggcgtgatcgaatgacgcaaatcattgacctcgaatgcttttagtgccg

SEQ ID NO: 432348 - DNA, 55 bp, Artificial
  Synthetic oligonucleotide
ggtggtggcgtttggacccattgccacactagtgttgacagcccacaacttggcc

SEQ ID NO: 432349 - DNA, 55 bp, Artificial
  Synthetic oligonucleotide
ggtggtgggtgccttacgtgcgtgtccctgtggaattagtatgggtggtgggtag

SEQ ID NO: 432350 - DNA, 59 bp, Artificial
  Synthetic oligonucleotide
ggtggtggtgtaatttataggtgaccggttggagctcgtgtgaatgtgaggatatctgt

SEQ ID NO: 432351 - DNA, 55 bp, Artificial
  Synthetic oligonucleotide
ggtggtggtttcgacaaattggatgtggacattgctgatttccatctcaagagtg

SEQ ID NO: 432352 - DNA, 55 bp, Artificial
  Synthetic oligonucleotide
ggtggtgtgcttggtgcattcagccgattggcagtgagacgtcggaaacactgtc

SEQ ID NO: 432353 - DNA, 55 bp, Artificial
  Synthetic oligonucleotide
ggtggtgttaacgatgcttcaagtcatgtaactattggagaaataacaaaaggct

SEQ ID NO: 432354 - DNA, 55 bp, Artificial
  Synthetic oligonucleotide
ggtggtgttaatagcacgaccgagaccttcagacctggaggaggagatatgaggg

SEQ ID NO: 432355 - DNA, 59 bp, Artificial
  Synthetic oligonucleotide
ggtggtgtttacgcaccactttcctgcgagcctaccaggcaggagctagaagtcaagag

SEQ ID NO: 432356 - DNA, 51 bp, Artificial
  Synthetic oligonucleotide
ggtggttaaacaaggaaaaatctggataggggaacaatatttcagaacccc

SEQ ID NO: 432357 - DNA, 60 bp, Artificial
  Synthetic oligonucleotide
ggtggttaagctggaagcgaggaggggttacgagtggttcgctgatgagatgcacaagcc

SEQ ID NO: 432358 - DNA, 55 bp, Artificial
  Synthetic oligonucleotide
ggtggttacgtaagtgactcttcctgttactggagttgacgcgtgggtattcaag

SEQ ID NO: 432359 - DNA, 55 bp, Artificial
  Synthetic oligonucleotide
ggtggttagcaacaatattagtagagcctaacgtacagtcagtagaacgcactta

SEQ ID NO: 432360 - DNA, 55 bp, Artificial
  Synthetic oligonucleotide
ggtggttaggtcaccggctcaaacaaaatggcaaagctcgtttcgacccgaggca

SEQ ID NO: 432361 - DNA, 54 bp, Artificial
  Synthetic oligonucleotide
ggtggttatacactagttacttctacagcagtttaagacacattataattcgca

SEQ ID NO: 432362 - DNA, 53 bp, Artificial
  Synthetic oligonucleotide
ggtggttatgtcaaagggggtattcgtttcagcaagggcggcaaacgtaaggc

SEQ ID NO: 432363 - DNA, 55 bp, Artificial
  Synthetic oligonucleotide
ggtggttccatggattagcaacacagcataccggcgaactgtgaaggacgacttt

SEQ ID NO: 432364 - DNA, 54 bp, Artificial
  Synthetic oligonucleotide
ggtggttcgccttggtttggtttaggattggccggtgtcggtattctagctggc

SEQ ID NO: 432365 - DNA, 55 bp, Artificial
  Synthetic oligonucleotide
ggtggttctagcttgaactctgtccatttaagctttccttctaaagctgcatagc

SEQ ID NO: 432366 - DNA, 55 bp, Artificial
  Synthetic oligonucleotide
ggtggttgcgaacatagaggatattcaacattactcccaaaatcctgaagcgcag

SEQ ID NO: 432367 - DNA, 55 bp, Artificial
  Synthetic oligonucleotide
ggtggttggaccactgctaactccaagtcacagactaataggcaagtcatagttg

SEQ ID NO: 432368 - DNA, 54 bp, Artificial
  Synthetic oligonucleotide
ggtggttggcggataactgtcccctcgacctgtcgaaagaaaccaccaagccta

SEQ ID NO: 432369 - DNA, 60 bp, Artificial
  Synthetic oligonucleotide
ggtggttggtccacacctaattccaaatcgcagatcaatagacaaacattcaagtgacaa

SEQ ID NO: 432370 - DNA, 53 bp, Artificial
  Synthetic oligonucleotide
ggtggttgtgcactcgtctttgctctaagtcgactaatgtaggggggagaacg

SEQ ID NO: 432371 - DNA, 54 bp, Artificial
  Synthetic oligonucleotide
ggtggttgtttcaagaacatccttttcgacagatgaaaaaaggtggttagtcgc

SEQ ID NO: 432372 - DNA, 52 bp, Artificial
  Synthetic oligonucleotide
ggtggtttaacccaccgtactgggaagagattttgcgttaagtccctctata

SEQ ID NO: 432373 - DNA, 59 bp, Artificial
  Synthetic oligonucleotide
ggtggtttacttgactactgtgcttccattttgtatagtcgccattttacatgcattaa

SEQ ID NO: 432374 - DNA, 58 bp, Artificial
  Synthetic oligonucleotide
ggtggtttacttttgattggctaattagctgccttggtgttcagaaagtcacctatca

SEQ ID NO: 432375 - DNA, 60 bp, Artificial
  Synthetic oligonucleotide
ggtggtttggagctgtgtatatgaaagctttggataggtatgcgcgattcagagaggagt

SEQ ID NO: 432376 - DNA, 56 bp, Artificial
  Synthetic oligonucleotide
ggtggtttgtgggttgtgtgtcccaatttagtccatgtatttgtggttagatgttc

SEQ ID NO: 432377 - DNA, 57 bp, Artificial
  Synthetic oligonucleotide
ggtggttttcgggcaatggcacaacttgacgaggagaatcccaggttcttattggca

SEQ ID NO: 432378 - DNA, 55 bp, Artificial
  Synthetic oligonucleotide
ggtgtaaaaggcttcggatttcgacagggaaccgatgtatggatggggcggacaa

SEQ ID NO: 432379 - DNA, 55 bp, Artificial
  Synthetic oligonucleotide
ggtgtaaaatgcgggctgcagttccatttacaagtataggaatagtggaaaggct

SEQ ID NO: 432380 - DNA, 50 bp, Artificial
  Synthetic oligonucleotide
ggtgtaaagggtttcgggtttcgacaaggaactgacgtatgggccggaag

SEQ ID NO: 432381 - DNA, 57 bp, Artificial
  Synthetic oligonucleotide
ggtgtaaagtccatgaagaagaacgcggttagcttgtctgccgcgggtcttatcaag

SEQ ID NO: 432382 - DNA, 51 bp, Artificial
  Synthetic oligonucleotide
ggtgtaaatgccttgtcacgggcactactccgtgcaagttacagtgtgttc

SEQ ID NO: 432383 - DNA, 53 bp, Artificial
  Synthetic oligonucleotide
ggtgtaacaatgtgaaaccctactacaaaaccttggctagttgcccataaaac

SEQ ID NO: 432384 - DNA, 58 bp, Artificial
  Synthetic oligonucleotide
ggtgtaactatccagcaggacataacgaggtgagctctttacaatacttggcattaac

SEQ ID NO: 432385 - DNA, 52 bp, Artificial
  Synthetic oligonucleotide
ggtgtaacttggaaaacctacgctttcggcttcactatgataccgaacatgt

SEQ ID NO: 432386 - DNA, 55 bp, Artificial
  Synthetic oligonucleotide
ggtgtaagccctgctgcaatatctcaagttgacgatttcacatttgtcgggaatg

SEQ ID NO: 432387 - DNA, 54 bp, Artificial
  Synthetic oligonucleotide
ggtgtaaggcgtctggttgtgtctatggagggaaaccataggggcgccgggttc

SEQ ID NO: 432388 - DNA, 54 bp, Artificial
  Synthetic oligonucleotide
ggtgtaagtgcagcccgtcttacaccgtgcggcacaggcactagtactgatgtc

SEQ ID NO: 432389 - DNA, 55 bp, Artificial
  Synthetic oligonucleotide
ggtgtaagttatttgatgggtcagcccttgtttcagattgcatatggtcgagtgg

SEQ ID NO: 432390 - DNA, 60 bp, Artificial
  Synthetic oligonucleotide
ggtgtaatccttggattagcttctgtacgcgccgatctcaactatcagcaaggtttggat

SEQ ID NO: 432391 - DNA, 60 bp, Artificial
  Synthetic oligonucleotide
ggtgtaatggttgatgctgagattaagtattgcaaaggaatgggaattgtgcaaccatat

SEQ ID NO: 432392 - DNA, 51 bp, Artificial
  Synthetic oligonucleotide
ggtgtaattggaatcgcgctattaatcggtacagctctaaacgctatgggg

SEQ ID NO: 432393 - DNA, 57 bp, Artificial
  Synthetic oligonucleotide
ggtgtacaaagcaacagtgatggatattttaaccggttaggcgtggatgagtggggc

SEQ ID NO: 432394 - DNA, 55 bp, Artificial
  Synthetic oligonucleotide
ggtgtacaactgcgagtttagcttgctcacctccttgtcactagtttctttagag

SEQ ID NO: 432395 - DNA, 58 bp, Artificial
  Synthetic oligonucleotide
ggtgtacaccctgggactagcccagatggtgtcccgtcatcgtcgagcgccgttggga

SEQ ID NO: 432396 - DNA, 55 bp, Artificial
  Synthetic oligonucleotide
ggtgtacaccgattgagctcctctcaaacttgctgattgtattggtgtattgggg

SEQ ID NO: 432397 - DNA, 54 bp, Artificial
  Synthetic oligonucleotide
ggtgtacataagtggcctgccctacgagactctgatacctatttctcaacttag

SEQ ID NO: 432398 - DNA, 55 bp, Artificial
  Synthetic oligonucleotide
ggtgtacatctacatgccagtttggagacccaggagatattatgagtccacggga

SEQ ID NO: 432399 - DNA, 60 bp, Artificial
  Synthetic oligonucleotide
ggtgtacccatttggaaagatgctaagccatccttgttttgtgcctctgatgctgatgtc

SEQ ID NO: 432400 - DNA, 55 bp, Artificial
  Synthetic oligonucleotide
ggtgtaccctacgttggatatggtctccctactcatcgtgggtgggttgaagacc

SEQ ID NO: 432401 - DNA, 59 bp, Artificial
  Synthetic oligonucleotide
ggtgtacctggacccctgcatgggccctgccctatgcaatagaagagtcgtcgggtcca

SEQ ID NO: 432402 - DNA, 60 bp, Artificial
  Synthetic oligonucleotide
ggtgtaccttgtaattattcatcagcgaatgtagatcactttctcggttcaagtgcatat

SEQ ID NO: 432403 - DNA, 52 bp, Artificial
  Synthetic oligonucleotide
ggtgtacgccggaaccttgtaccaagggacttcggtaagatggaaatcgttg

SEQ ID NO: 432404 - DNA, 55 bp, Artificial
  Synthetic oligonucleotide
ggtgtacggccaatggttttcaaggatattacatctgtcttattgggagtagctc

SEQ ID NO: 432405 - DNA, 55 bp, Artificial
  Synthetic oligonucleotide
ggtgtacggtaacgttgacgggaccgcttctgagaatggtcgtatgcggaaactg

SEQ ID NO: 432406 - DNA, 59 bp, Artificial
  Synthetic oligonucleotide
ggtgtactaacatatattggacttatatttgtaatagctaacgcaatcctaccagctaa

SEQ ID NO: 432407 - DNA, 60 bp, Artificial
  Synthetic oligonucleotide
ggtgtactacatcttgtgcatttggggaccctggtgacatcatgtcgacaacaagtggga

SEQ ID NO: 432408 - DNA, 55 bp, Artificial
  Synthetic oligonucleotide
ggtgtactagatatggaaactttgaagactatggtgacatcaaacattgctcgtg

SEQ ID NO: 432409 - DNA, 55 bp, Artificial
  Synthetic oligonucleotide
ggtgtactattgtgaatcaagaaggaagtactacccagtatcttttgttgggccc

SEQ ID NO: 432410 - DNA, 58 bp, Artificial
  Synthetic oligonucleotide
ggtgtactgtattcgtttattaataatatcacaactgagaacgttttcatacaacatc

SEQ ID NO: 432411 - DNA, 59 bp, Artificial
  Synthetic oligonucleotide
ggtgtacttcaaccgcaggattacaatgttgtaactcaaagaatgtgcacactaggacc

SEQ ID NO: 432412 - DNA, 55 bp, Artificial
  Synthetic oligonucleotide
ggtgtacttcaatggcgaacctgttagcgaggacgatcaattgacccaacttggg

SEQ ID NO: 432413 - DNA, 55 bp, Artificial
  Synthetic oligonucleotide
ggtgtacttgatccctctgctctcatcactttctttctcaacttctcaaggtctg

SEQ ID NO: 432414 - DNA, 55 bp, Artificial
  Synthetic oligonucleotide
ggtgtagaaccattaagcgcgaaagatgttatttcgcaccgtattttaacttcgc

SEQ ID NO: 432415 - DNA, 60 bp, Artificial
  Synthetic oligonucleotide
ggtgtagaagcgacgaacgttccccagtcaacgcttgcacgtattcgagatcagcatgtc

SEQ ID NO: 432416 - DNA, 55 bp, Artificial
  Synthetic oligonucleotide
ggtgtagacatgaaagtgatagctttaagacgcgacctggtctcatcatatgcag

SEQ ID NO: 432417 - DNA, 55 bp, Artificial
  Synthetic oligonucleotide
ggtgtagactataggctaacaaacgggcagtcagtagactggtcgctaggagggg

SEQ ID NO: 432418 - DNA, 55 bp, Artificial
  Synthetic oligonucleotide
ggtgtagattccaacacaccgtttgcaaattctgatacacttgacttatccagag

SEQ ID NO: 432419 - DNA, 60 bp, Artificial
  Synthetic oligonucleotide
ggtgtagcagcaaaagctttgatggtgcaagacaaagtgtcgatcaacaaaaagcgaaag

SEQ ID NO: 432420 - DNA, 55 bp, Artificial
  Synthetic oligonucleotide
ggtgtagcgatgttaaacggattaatatatgtcataggcggagttgttaaaggtg

SEQ ID NO: 432421 - DNA, 56 bp, Artificial
  Synthetic oligonucleotide
ggtgtagggtctcatattgtatattagcttaagattttactgtaattccggtgtag

SEQ ID NO: 432422 - DNA, 55 bp, Artificial
  Synthetic oligonucleotide
ggtgtagtgaagtctctgacgcttgggtcattgatcgccagggcttccggtttgc

SEQ ID NO: 432423 - DNA, 56 bp, Artificial
  Synthetic oligonucleotide
ggtgtagtggctggattgttaactatgtggggaatcatgaggagtggcaattctgg

SEQ ID NO: 432424 - DNA, 51 bp, Artificial
  Synthetic oligonucleotide
ggtgtagtgtgccccctcactggcacaccggggcgctccaattatgctctc

SEQ ID NO: 432425 - DNA, 53 bp, Artificial
  Synthetic oligonucleotide
ggtgtagtttccctcacaaatctgggtttcccaggcggtcatttcttgtgggg

SEQ ID NO: 432426 - DNA, 55 bp, Artificial
  Synthetic oligonucleotide
ggtgtatatctactgctttggctccgcatacttcacaagggtagtgtcctgtgtg

SEQ ID NO: 432427 - DNA, 54 bp, Artificial
  Synthetic oligonucleotide
ggtgtatccctggtattgcaaacctccctacaggttcttcgacgcaagagtcac

SEQ ID NO: 432428 - DNA, 60 bp, Artificial
  Synthetic oligonucleotide
ggtgtatgaatcgcccaaaggtctatatacgcgacgctcattggaggatatccataatgg

SEQ ID NO: 432429 - DNA, 55 bp, Artificial
  Synthetic oligonucleotide
ggtgtatgctagctgtcaaatacctgaaatacgttgaaagtacgtattcccctga

SEQ ID NO: 432430 - DNA, 55 bp, Artificial
  Synthetic oligonucleotide
ggtgtatgcttgcggttaagtacttgttatcggtagaagctacatactctccgga

SEQ ID NO: 432431 - DNA, 55 bp, Artificial
  Synthetic oligonucleotide
ggtgtatggggaaacaccagaatggatacaaagacagacacaattgcaacacagt

SEQ ID NO: 432432 - DNA, 58 bp, Artificial
  Synthetic oligonucleotide
ggtgtatggtcgctgtcttgacagcgagcttaacctcaatggcaaccctgaagtgtgt

SEQ ID NO: 432433 - DNA, 60 bp, Artificial
  Synthetic oligonucleotide
ggtgtatgtgaggaggtccatagaggatgtgcacagtggtgcgaatatgcagttgtctaa

SEQ ID NO: 432434 - DNA, 55 bp, Artificial
  Synthetic oligonucleotide
ggtgtattccttgatgtatatgggaatgggtatcccgaatattgcgaggattgcc

SEQ ID NO: 432435 - DNA, 59 bp, Artificial
  Synthetic oligonucleotide
ggtgtattgacaggttcagccgttgggtgtgatcccgacactttctggtcagtgattcc

SEQ ID NO: 432436 - DNA, 54 bp, Artificial
  Synthetic oligonucleotide
ggtgtattggggtaacttatatactagaaccctctatagaactattaatcttgt

SEQ ID NO: 432437 - DNA, 50 bp, Artificial
  Synthetic oligonucleotide
ggtgtcaaagtcctgtgttttttacgtaggtgtcagctgatcgctagggt

SEQ ID NO: 432438 - DNA, 55 bp, Artificial
  Synthetic oligonucleotide
ggtgtcaacaacaggatgttcggactggacggtagggtaggaacacaggaggagg

SEQ ID NO: 432439 - DNA, 59 bp, Artificial
  Synthetic oligonucleotide
ggtgtcaacaatcctactttggaggtggagtgcaaatgggcgtctagatatttggccga

SEQ ID NO: 432440 - DNA, 59 bp, Artificial
  Synthetic oligonucleotide
ggtgtcaactcaattgttgttgaatggcagtctagcagaaaaggagatagtaattagat

SEQ ID NO: 432441 - DNA, 55 bp, Artificial
  Synthetic oligonucleotide
ggtgtcaagatgaagaaaagagtccgggaggatgtgtacaaggataccccattcc

SEQ ID NO: 432442 - DNA, 51 bp, Artificial
  Synthetic oligonucleotide
ggtgtcaagcaatgacccgtcatgcggagtcattacaaagggacggtagcg

SEQ ID NO: 432443 - DNA, 55 bp, Artificial
  Synthetic oligonucleotide
ggtgtcaaggagaaatccccatacgtcgccgggtgcatctacacacctatcgagc

SEQ ID NO: 432444 - DNA, 55 bp, Artificial
  Synthetic oligonucleotide
ggtgtcaatccaactgtagcagaaggatttaaaacattaatacaaccctatgtgc

SEQ ID NO: 432445 - DNA, 55 bp, Artificial
  Synthetic oligonucleotide
ggtgtcaattattctgtcaaagaagatagacgttactaggtactttacggatgat

SEQ ID NO: 432446 - DNA, 52 bp, Artificial
  Synthetic oligonucleotide
ggtgtcacacgtaggtgtgcggaaaataattgtggatggtttgtctgtgttg

SEQ ID NO: 432447 - DNA, 55 bp, Artificial
  Synthetic oligonucleotide
ggtgtcacacttaatatgcaatccgactcaagatctgttaagctagtaattcctt

SEQ ID NO: 432448 - DNA, 55 bp, Artificial
  Synthetic oligonucleotide
ggtgtcacagctgcatgctcttacttgggagctagcagcttttatcggaatttgc

SEQ ID NO: 432449 - DNA, 60 bp, Artificial
  Synthetic oligonucleotide
ggtgtcaccaaatggagctctctcaaagttccgctatgtattggtgactggtgtacaata

SEQ ID NO: 432450 - DNA, 55 bp, Artificial
  Synthetic oligonucleotide
ggtgtcacgggagcccttgggcctggatcaagtcgaaaacagcttcgattttggg

SEQ ID NO: 432451 - DNA, 55 bp, Artificial
  Synthetic oligonucleotide
ggtgtcactaaatgctggagcgagaggggatgtacaacagatatttcagggtcgt

SEQ ID NO: 432452 - DNA, 53 bp, Artificial
  Synthetic oligonucleotide
ggtgtcactcaggcctgtgcagtatatggcaaaccgtcattcttcaggaacat

SEQ ID NO: 432453 - DNA, 60 bp, Artificial
  Synthetic oligonucleotide
ggtgtcagaacaactcactgacgatcacaccaaacaactgggtgcgaagcaactcacaaa

SEQ ID NO: 432454 - DNA, 55 bp, Artificial
  Synthetic oligonucleotide
ggtgtcagctgatcgccagggtatttaaacctgcgctctccagtcaagaggccac

SEQ ID NO: 432455 - DNA, 55 bp, Artificial
  Synthetic oligonucleotide
ggtgtcagtcaatgacggtcatattgttggaattcatggactcacatcgaatgac

SEQ ID NO: 432456 - DNA, 55 bp, Artificial
  Synthetic oligonucleotide
ggtgtcagtgcacgacaggggtttacttttgtgcgtcaaagaacaagcactaccc

SEQ ID NO: 432457 - DNA, 58 bp, Artificial
  Synthetic oligonucleotide
ggtgtcataaacaccattcagagtagatacttagttgaccactcggttgaaaacatta

SEQ ID NO: 432458 - DNA, 55 bp, Artificial
  Synthetic oligonucleotide
ggtgtcatcagatgcgtgtttgcttcgagtgccatcggggcccaaggttagaaat

SEQ ID NO: 432459 - DNA, 60 bp, Artificial
  Synthetic oligonucleotide
ggtgtcatcctggtgacatttccacgcctgataagcttagaggggcacaatgctttgacc

SEQ ID NO: 432460 - DNA, 60 bp, Artificial
  Synthetic oligonucleotide
ggtgtcatgcaaattatgactttatctgcgttacacctttaccctataatgctactgaga

SEQ ID NO: 432461 - DNA, 58 bp, Artificial
  Synthetic oligonucleotide
ggtgtccaccaacatgcttgtttgtcggaggtatggctgagttaggtgccttcttttc

SEQ ID NO: 432462 - DNA, 60 bp, Artificial
  Synthetic oligonucleotide
ggtgtccagcgatgtgcaaatttataacagacccttctggattcaaagagctcaaggaac

SEQ ID NO: 432463 - DNA, 60 bp, Artificial
  Synthetic oligonucleotide
ggtgtccagcgcaagcggatagttgtaactgccctgatggcagtgtagtaactctcggtg

SEQ ID NO: 432464 - DNA, 58 bp, Artificial
  Synthetic oligonucleotide
ggtgtccatcactctacaaattcaacccgttcagaggagggttgaacaggattgttga

SEQ ID NO: 432465 - DNA, 58 bp, Artificial
  Synthetic oligonucleotide
ggtgtcccggtgtatgtcacggggacatttcggtgcctgtcaagtctatacctctcac

SEQ ID NO: 432466 - DNA, 55 bp, Artificial
  Synthetic oligonucleotide
ggtgtccctcatcacctctattcctgcggattctgacctgaccgccgtaacctcc

SEQ ID NO: 432467 - DNA, 55 bp, Artificial
  Synthetic oligonucleotide
ggtgtccgatgcacttgtgaactagcacatgtgcgaggagaacggaaaagagtgg

SEQ ID NO: 432468 - DNA, 51 bp, Artificial
  Synthetic oligonucleotide
ggtgtcctaatgtcaactggaaaggttctcggaatacacgttggtggaaat

SEQ ID NO: 432469 - DNA, 51 bp, Artificial
  Synthetic oligonucleotide
ggtgtcctgactgttggacattaatagtagttaggaatacacctgcactta

SEQ ID NO: 432470 - DNA, 50 bp, Artificial
  Synthetic oligonucleotide
ggtgtcctggtgtcccatttatactagaagtctctaggacaccaaggggg

SEQ ID NO: 432471 - DNA, 55 bp, Artificial
  Synthetic oligonucleotide
ggtgtccttccgcagagtaacacgaaagtgcagactcataatcccgtttctagga

SEQ ID NO: 432472 - DNA, 59 bp, Artificial
  Synthetic oligonucleotide
ggtgtccttcggggtgtggattcgcacacctcccgcatataggccatcaaatgccccta

SEQ ID NO: 432473 - DNA, 56 bp, Artificial
  Synthetic oligonucleotide
ggtgtccttggctgcctgaacgtttgggtgaaaattggcagaccttcttgggtgag

SEQ ID NO: 432474 - DNA, 59 bp, Artificial
  Synthetic oligonucleotide
ggtgtcctttggagtgtggattcgcactccacctgcttataggccaccaaatgccccta

SEQ ID NO: 432475 - DNA, 55 bp, Artificial
  Synthetic oligonucleotide
ggtgtcgaccccactgagtattcgataattcgttatgtcgatcccataacaggaa

SEQ ID NO: 432476 - DNA, 55 bp, Artificial
  Synthetic oligonucleotide
ggtgtcgaccctaacatcagaactggggtaaggactatcaccacgggcgccccta

SEQ ID NO: 432477 - DNA, 55 bp, Artificial
  Synthetic oligonucleotide
ggtgtcgaccctaacatcaggactggggtaaggacgataaccacgggtgctccca

SEQ ID NO: 432478 - DNA, 60 bp, Artificial
  Synthetic oligonucleotide
ggtgtcgattgagggacgaggatttagacaggcttatagtgagttcatgaacgcggcttg

SEQ ID NO: 432479 - DNA, 57 bp, Artificial
  Synthetic oligonucleotide
ggtgtcgcagttactccggatcccacaagccgtcgtggacatggtagcgggggccca

SEQ ID NO: 432480 - DNA, 52 bp, Artificial
  Synthetic oligonucleotide
ggtgtcgctcaaccctgacatgcgcgcctggattggcacgctgcttcagtcg

SEQ ID NO: 432481 - DNA, 54 bp, Artificial
  Synthetic oligonucleotide
ggtgtcggcagtgcaattggtccacgaaattttaaggctcccacaagtcgattc

SEQ ID NO: 432482 - DNA, 55 bp, Artificial
  Synthetic oligonucleotide
ggtgtcggtcaaggttcgatgtctttagacaccatgatggtccttgttcagtacc

SEQ ID NO: 432483 - DNA, 55 bp, Artificial
  Synthetic oligonucleotide
ggtgtctaagctcaacgtcatgttcatcgacgcgaccactactcttgcatccctc

SEQ ID NO: 432484 - DNA, 55 bp, Artificial
  Synthetic oligonucleotide
ggtgtctacacagcgctccggttctcacgaaaactcaaactcagccaccgagggt

SEQ ID NO: 432485 - DNA, 51 bp, Artificial
  Synthetic oligonucleotide
ggtgtctataggattctgagtcccggcctgctttggggacaccgccaggtc

SEQ ID NO: 432486 - DNA, 58 bp, Artificial
  Synthetic oligonucleotide
ggtgtctcagcaccaattttacctggtttccacccaaccccagagatgcacatcccag

SEQ ID NO: 432487 - DNA, 55 bp, Artificial
  Synthetic oligonucleotide
ggtgtctccaattgagtttgcgagtgtctccgattgaggctcctcaaaactcgct

SEQ ID NO: 432488 - DNA, 60 bp, Artificial
  Synthetic oligonucleotide
ggtgtctcctcgtccgtgtctgacagcaccctagctcgtttcttgttgctttcatcgtgg

SEQ ID NO: 432489 - DNA, 56 bp, Artificial
  Synthetic oligonucleotide
ggtgtctcgagaaacgctgcgggtactgggtcccagaccatactacgtgggtttgc

SEQ ID NO: 432490 - DNA, 60 bp, Artificial
  Synthetic oligonucleotide
ggtgtctctagggcttgtaattgggaaagtgcttcttctttggtgagagagcactgtgga

SEQ ID NO: 432491 - DNA, 55 bp, Artificial
  Synthetic oligonucleotide
ggtgtctctcaaacttggctatgcaatcggtgtctggggtcttatttatatgtgg

SEQ ID NO: 432492 - DNA, 55 bp, Artificial
  Synthetic oligonucleotide
ggtgtctggaccgcttaccaacactccatcatcctcatcgctgctcccaccgaag

SEQ ID NO: 432493 - DNA, 55 bp, Artificial
  Synthetic oligonucleotide
ggtgtctggggtcctatatgtactaaaaaccctaaatggcatagatgtaaattta

SEQ ID NO: 432494 - DNA, 55 bp, Artificial
  Synthetic oligonucleotide
ggtgtctgggtcgtaatgagtaattctgggatgggaccgactactttgggtgtcc

SEQ ID NO: 432495 - DNA, 60 bp, Artificial
  Synthetic oligonucleotide
ggtgtctggtggattacccctacaggctgtggcactatccctgcactgtcaacttcacct

SEQ ID NO: 432496 - DNA, 54 bp, Artificial
  Synthetic oligonucleotide
ggtgtctgtgcccaaggtatcgggctaccagtaccgtgtgttccatgtgaagct

SEQ ID NO: 432497 - DNA, 55 bp, Artificial
  Synthetic oligonucleotide
ggtgtcttcaaattataacaggagattcaccccggaaatagcagaaagacccaaa

SEQ ID NO: 432498 - DNA, 55 bp, Artificial
  Synthetic oligonucleotide
ggtgtctttaattcaaaatgcctaagcgggatgctccgtggcgtttaatggcggg

SEQ ID NO: 432499 - DNA, 55 bp, Artificial
  Synthetic oligonucleotide
ggtgtctttcaatcaaaacctggattatcaaataggatatatctgcagtggggtg

SEQ ID NO: 432500 - DNA, 57 bp, Artificial
  Synthetic oligonucleotide
ggtgtctttcggagtgtggattcgcactcctcccgcttacagaccaccaaatgcccc

SEQ ID NO: 432501 - DNA, 55 bp, Artificial
  Synthetic oligonucleotide
ggtgtctttgtgtgacgttgcttgttcgctcggaaactgtgcttactttccgcag

SEQ ID NO: 432502 - DNA, 55 bp, Artificial
  Synthetic oligonucleotide
ggtgtgaagaaagaggcgatttcaacgattcatgaggcacaaggtggtacctatg

SEQ ID NO: 432503 - DNA, 57 bp, Artificial
  Synthetic oligonucleotide
ggtgtgaatccacccacggtcgggtccgttggtcgtatgcaccggatggctgcactc

SEQ ID NO: 432504 - DNA, 55 bp, Artificial
  Synthetic oligonucleotide
ggtgtgacacacgtgttggaacttcccaccgaccacaagggtgtctacggacaac

SEQ ID NO: 432505 - DNA, 60 bp, Artificial
  Synthetic oligonucleotide
ggtgtgacagccatatgtaataccgtcttagcttatgttcatagaccattagtcgcgtag

SEQ ID NO: 432506 - DNA, 55 bp, Artificial
  Synthetic oligonucleotide
ggtgtgacaggagtatactggcacactcgggataaaatttggactgcccatataa

SEQ ID NO: 432507 - DNA, 60 bp, Artificial
  Synthetic oligonucleotide
ggtgtgaccatttgaatggtgcagaatgggacgttttcatagagaggcccaatgcagtag

SEQ ID NO: 432508 - DNA, 55 bp, Artificial
  Synthetic oligonucleotide
ggtgtgacgttctctgtggtactgtggtacccaaggattctagtcactgtcctga

SEQ ID NO: 432509 - DNA, 54 bp, Artificial
  Synthetic oligonucleotide
ggtgtgactataccgttagaacaccatgaagctaaatggagcccagaagaactt

SEQ ID NO: 432510 - DNA, 55 bp, Artificial
  Synthetic oligonucleotide
ggtgtgactggcacagtggtcgttcgcaccatctcacacccatggcgggacacac

SEQ ID NO: 432511 - DNA, 55 bp, Artificial
  Synthetic oligonucleotide
ggtgtgagctggttaacaattggggtttctgggccagataatggggcggtggctg

SEQ ID NO: 432512 - DNA, 50 bp, Artificial
  Synthetic oligonucleotide
ggtgtgagggtagttattcctgatccctgtcccttcgaggatcgggtgct

SEQ ID NO: 432513 - DNA, 55 bp, Artificial
  Synthetic oligonucleotide
ggtgtgagggtcgggcaggtccttggaacgatgatgagcggtcacaggggcacta

SEQ ID NO: 432514 - DNA, 60 bp, Artificial
  Synthetic oligonucleotide
ggtgtgataatagcttatgatgggcaagcgccggttaatgtgaataacccaggtctagga

SEQ ID NO: 432515 - DNA, 60 bp, Artificial
  Synthetic oligonucleotide
ggtgtgatacagtctctgtctaaaggaaatatgctggctaggaaaatagcgtctagtgta

SEQ ID NO: 432516 - DNA, 55 bp, Artificial
  Synthetic oligonucleotide
ggtgtgataccggatgtcttctgttcttaataccgtatacaagtcggtgtcggag

SEQ ID NO: 432517 - DNA, 60 bp, Artificial
  Synthetic oligonucleotide
ggtgtgatgagatcaaattatgatatccgcgaattacggcaaaagatcaaaaatgaacga

SEQ ID NO: 432518 - DNA, 58 bp, Artificial
  Synthetic oligonucleotide
ggtgtgatgagggcggataaagacaacgttagaacggtggattccttcttgatgcacc

SEQ ID NO: 432519 - DNA, 60 bp, Artificial
  Synthetic oligonucleotide
ggtgtgatgatagacaagagctgtggtttatgtcacatcaaggtcacttagtcgatggta

SEQ ID NO: 432520 - DNA, 55 bp, Artificial
  Synthetic oligonucleotide
ggtgtgatgcacaccacgtgcccttgcggagcacaactggcgggccacatcaaga

SEQ ID NO: 432521 - DNA, 55 bp, Artificial
  Synthetic oligonucleotide
ggtgtgatgttgctgaattagatcacttgccgttatgcactgaacagactgatgc

SEQ ID NO: 432522 - DNA, 60 bp, Artificial
  Synthetic oligonucleotide
ggtgtgattatgaatggactcatggtgtggtgtattgagaatggcacatcaccaaatctc

SEQ ID NO: 432523 - DNA, 58 bp, Artificial
  Synthetic oligonucleotide
ggtgtgattatgaatggttttatggtttggtgtatcgataacggtacatctccagacg

SEQ ID NO: 432524 - DNA, 60 bp, Artificial
  Synthetic oligonucleotide
ggtgtgattgacgtacgcgcatcagagctgactgggtgttcgccattcaagacggtgaaa

SEQ ID NO: 432525 - DNA, 58 bp, Artificial
  Synthetic oligonucleotide
ggtgtgcaaacctctcctacgggaggaggtcacattccaggtcgggctcaatcagtac

SEQ ID NO: 432526 - DNA, 55 bp, Artificial
  Synthetic oligonucleotide
ggtgtgcaaggcctgcgagtctgagcagcccctcgactttaacctatgcacggcc

SEQ ID NO: 432527 - DNA, 55 bp, Artificial
  Synthetic oligonucleotide
ggtgtgcacaccacaaattagtcatactgatccatatcctgcgacctgccctgtc

SEQ ID NO: 432528 - DNA, 55 bp, Artificial
  Synthetic oligonucleotide
ggtgtgcacctgggtagatggacagaccgttgagtccctaacgattgcgaacacc

SEQ ID NO: 432529 - DNA, 60 bp, Artificial
  Synthetic oligonucleotide
ggtgtgcagatttagagcagcatgcttccgaatatggtaccgcgtcagagttatccgacg

SEQ ID NO: 432530 - DNA, 52 bp, Artificial
  Synthetic oligonucleotide
ggtgtgcagcctcctacctcatcgatattagaggacacctatcggtatatag

SEQ ID NO: 432531 - DNA, 55 bp, Artificial
  Synthetic oligonucleotide
ggtgtgccaactatgattgttttggaggattggcgttgtgatctaagatactgtc

SEQ ID NO: 432532 - DNA, 55 bp, Artificial
  Synthetic oligonucleotide
ggtgtgccaccaattatatttacagtcttatgtttctgctggaggctagttaggc

SEQ ID NO: 432533 - DNA, 54 bp, Artificial
  Synthetic oligonucleotide
ggtgtgccctctgtccgagagccttgcgccccagtggaagggtagagaggattg

SEQ ID NO: 432534 - DNA, 55 bp, Artificial
  Synthetic oligonucleotide
ggtgtgccctgatgcactgaaccgtaggtttcactttgacattgacgtgagtgcc

SEQ ID NO: 432535 - DNA, 55 bp, Artificial
  Synthetic oligonucleotide
ggtgtgcgaagaacttggtcactattactgctcccaccgctccctcatccatgcg

SEQ ID NO: 432536 - DNA, 55 bp, Artificial
  Synthetic oligonucleotide
ggtgtgcgccacttgtgagcaaattgctgattcccaacatcggtctcacaggcag

SEQ ID NO: 432537 - DNA, 58 bp, Artificial
  Synthetic oligonucleotide
ggtgtgcgcgcgactaggaagacttccgagcggtcacaacctcgtggaaggcgacaac

SEQ ID NO: 432538 - DNA, 55 bp, Artificial
  Synthetic oligonucleotide
ggtgtgcgcgtggtcttgtacgttgatcacggcggtgatgacatagacctagggc

SEQ ID NO: 432539 - DNA, 56 bp, Artificial
  Synthetic oligonucleotide
ggtgtgctaaggaaccccaaggtatacagtctcccataaagagctgaatatacccg

SEQ ID NO: 432540 - DNA, 55 bp, Artificial
  Synthetic oligonucleotide
ggtgtggaaccttggacattacaggacaccagttatgaaatgtggctaacaccac

SEQ ID NO: 432541 - DNA, 59 bp, Artificial
  Synthetic oligonucleotide
ggtgtggaactcaacctatacctaactgaactgactacagtattcgggccacagatcac

SEQ ID NO: 432542 - DNA, 53 bp, Artificial
  Synthetic oligonucleotide
ggtgtggaagcgcggtctgaacatatcaattcaagtggcatgaacgccctaca

SEQ ID NO: 432543 - DNA, 55 bp, Artificial
  Synthetic oligonucleotide
ggtgtggagcacaggctcgatgccgcatgcaactggactcgaggagagcgttgca

SEQ ID NO: 432544 - DNA, 59 bp, Artificial
  Synthetic oligonucleotide
ggtgtggattcgagggaaactacatccgccgatccaacggcatctgaaaccacacacaa

SEQ ID NO: 432545 - DNA, 54 bp, Artificial
  Synthetic oligonucleotide
ggtgtggattctttcttgttcgttgaaccattccgcacaaattagaccgggtaa

SEQ ID NO: 432546 - DNA, 60 bp, Artificial
  Synthetic oligonucleotide
ggtgtggcaaaagtagatgggccaatgagcagcctgggactaaatattataaaatgcgcg

SEQ ID NO: 432547 - DNA, 60 bp, Artificial
  Synthetic oligonucleotide
ggtgtggcatctggaacgatgagggatggcaggagggtatcttcatgctcggacgcgtac

SEQ ID NO: 432548 - DNA, 55 bp, Artificial
  Synthetic oligonucleotide
ggtgtggccaatagcattaaggctttggatgatttgtctaaggctgcaacaggta

SEQ ID NO: 432549 - DNA, 56 bp, Artificial
  Synthetic oligonucleotide
ggtgtggccccccgatccgcgttgccgcggatcggggaggcacctgtggtgcggaa

SEQ ID NO: 432550 - DNA, 60 bp, Artificial
  Synthetic oligonucleotide
ggtgtggcccctgcaaaccactttggcactttgactgtagctgctaatgatgaaggttac

SEQ ID NO: 432551 - DNA, 55 bp, Artificial
  Synthetic oligonucleotide
ggtgtggcggagggttatgtccgctgcgatgctggacccatcttaatggtggggc

SEQ ID NO: 432552 - DNA, 57 bp, Artificial
  Synthetic oligonucleotide
ggtgtggctccggtccttggattacacccagatgcttggtcaactacccttatagac

SEQ ID NO: 432553 - DNA, 55 bp, Artificial
  Synthetic oligonucleotide
ggtgtgggagcaacccctcggctccgggttaattgagccaactaaagctgtgcca

SEQ ID NO: 432554 - DNA, 60 bp, Artificial
  Synthetic oligonucleotide
ggtgtgggatgaatgtaatgtgcttaatcgaaagaaggaattcatcaacatcgccacatt

SEQ ID NO: 432555 - DNA, 55 bp, Artificial
  Synthetic oligonucleotide
ggtgtgggcctgcaaaggccttgaaataggccggggacagccattaggagttgga

SEQ ID NO: 432556 - DNA, 54 bp, Artificial
  Synthetic oligonucleotide
ggtgtgggcctgtataggtttagaggtaggtaggggtcagccattaggtgttgg

SEQ ID NO: 432557 - DNA, 51 bp, Artificial
  Synthetic oligonucleotide
ggtgtgggttttaatctggtatgtagtgtgagtttgacagaatgtgctagt

SEQ ID NO: 432558 - DNA, 55 bp, Artificial
  Synthetic oligonucleotide
ggtgtggtatagtgcactctgagaaccaaggccactcacggaaaatcgaatgccc

SEQ ID NO: 432559 - DNA, 55 bp, Artificial
  Synthetic oligonucleotide
ggtgtggtcaagttatgaaagagacttgattgtgtcgtccacaacagcacatggg

SEQ ID NO: 432560 - DNA, 60 bp, Artificial
  Synthetic oligonucleotide
ggtgtggtgtgtgctcttaacatgtgaacttatcgtatgggctgctagtgcagagactcc

SEQ ID NO: 432561 - DNA, 52 bp, Artificial
  Synthetic oligonucleotide
ggtgtggttctggacagtactgaggccctgtgccttgccatctcccggaact

SEQ ID NO: 432562 - DNA, 59 bp, Artificial
  Synthetic oligonucleotide
ggtgtggttggtgatgctattccagacaaagcatatattaagggtactggtactggccg

SEQ ID NO: 432563 - DNA, 58 bp, Artificial
  Synthetic oligonucleotide
ggtgtgtaagtggcaactgggtcaggaaatagatggcgtgccgtgtactcgaagtctt

SEQ ID NO: 432564 - DNA, 54 bp, Artificial
  Synthetic oligonucleotide
ggtgtgtatgttgtaatcctttaattcgaggaatttttagtgttgtttgtactg

SEQ ID NO: 432565 - DNA, 55 bp, Artificial
  Synthetic oligonucleotide
ggtgtgtcagaacgaaaggagcatccgtaaccctgacagcacagacctccggcgg

SEQ ID NO: 432566 - DNA, 58 bp, Artificial
  Synthetic oligonucleotide
ggtgtgtccaccttgcctcacccggcaagcagccacagagatctacgaacccggtagg

SEQ ID NO: 432567 - DNA, 55 bp, Artificial
  Synthetic oligonucleotide
ggtgtgtcgattcgcgaagcacttagttcgaattggcagtctagacttactcccc

SEQ ID NO: 432568 - DNA, 55 bp, Artificial
  Synthetic oligonucleotide
ggtgtgtctggaatgtctcttgggaggtttcacatacgccagttttcagacccgg

SEQ ID NO: 432569 - DNA, 55 bp, Artificial
  Synthetic oligonucleotide
ggtgtgtctttgtgggtaaccagatgcaaaattgtaggatcctcatggcttggac

SEQ ID NO: 432570 - DNA, 55 bp, Artificial
  Synthetic oligonucleotide
ggtgtgtgcacggatcctagcgtcatgctgtattggaacatagctttgggcaggt

SEQ ID NO: 432571 - DNA, 56 bp, Artificial
  Synthetic oligonucleotide
ggtgtgtgcggtctggaagtcctcggaggcgttctggtctggggcgttgggtgagc

SEQ ID NO: 432572 - DNA, 55 bp, Artificial
  Synthetic oligonucleotide
ggtgtgtggatccatggcaatatatttccgcatcaatggaattagttgatcaggg

SEQ ID NO: 432573 - DNA, 55 bp, Artificial
  Synthetic oligonucleotide
ggtgtgtgtctttatagacttcgtcgcgaagtagttgagcgcgtcaacatgtggg

SEQ ID NO: 432574 - DNA, 59 bp, Artificial
  Synthetic oligonucleotide
ggtgtgtgtggtttcattcacaccaaggactccaattcgagagcttctctctctaaaat

SEQ ID NO: 432575 - DNA, 55 bp, Artificial
  Synthetic oligonucleotide
ggtgtgtgttattgacatgtgagctcattgtatgggctgctagtgcagagacccc

SEQ ID NO: 432576 - DNA, 53 bp, Artificial
  Synthetic oligonucleotide
ggtgtgttatataaaataggtttaatactgggtattcatgtagggggaaatgg

SEQ ID NO: 432577 - DNA, 55 bp, Artificial
  Synthetic oligonucleotide
ggtgtgttcatagtgacatccaagtagaggacacacagcaagccttagagcagtt

SEQ ID NO: 432578 - DNA, 60 bp, Artificial
  Synthetic oligonucleotide
ggtgtgttccatgatcttgaaatagaggggatttggcaccgtccagatatatgcgccatt

SEQ ID NO: 432579 - DNA, 58 bp, Artificial
  Synthetic oligonucleotide
ggtgtgttgtgttaagttgactgctatggatttagaactaccaataacagctaaatta

SEQ ID NO: 432580 - DNA, 55 bp, Artificial
  Synthetic oligonucleotide
ggtgtgtttcccagtgtatagtaatccagagtccacagaagtgtatctcatctgc

SEQ ID NO: 432581 - DNA, 54 bp, Artificial
  Synthetic oligonucleotide
ggtgtgtttcttaaagaaatgaatggggttgaatctataggaaggcaccctggt

SEQ ID NO: 432582 - DNA, 53 bp, Artificial
  Synthetic oligonucleotide
ggtgtgttttcccctccgacggtggttcggaactgcggtgatatagttgtaac

SEQ ID NO: 432583 - DNA, 55 bp, Artificial
  Synthetic oligonucleotide
ggtgttaaaaacaatctgatgggtaaagcgattactattgaccaggctctaaacg

SEQ ID NO: 432584 - DNA, 53 bp, Artificial
  Synthetic oligonucleotide
ggtgttaaaagtactccgtttacagaggcgcttgtgtctacgataaaccaaaa

SEQ ID NO: 432585 - DNA, 59 bp, Artificial
  Synthetic oligonucleotide
ggtgttaaagagggcaattggctagtcaatgcagacagactagtaagtagcaagaccgg

SEQ ID NO: 432586 - DNA, 55 bp, Artificial
  Synthetic oligonucleotide
ggtgttaaatgtgaccccgagatcagtgttaaaatgaacggattcagcaccgctt

SEQ ID NO: 432587 - DNA, 60 bp, Artificial
  Synthetic oligonucleotide
ggtgttaacagctgaggcgattgggcatgcgccccttgaattggccgccataaatccacc

SEQ ID NO: 432588 - DNA, 53 bp, Artificial
  Synthetic oligonucleotide
ggtgttaactttaggtctaaagtcaattacattcttgagttctacatttccga

SEQ ID NO: 432589 - DNA, 55 bp, Artificial
  Synthetic oligonucleotide
ggtgttaagaacgaaattctgagttctaatgccacaaatccaatgttgacaaggc

SEQ ID NO: 432590 - DNA, 55 bp, Artificial
  Synthetic oligonucleotide
ggtgttaatgtggagatttaacagtagactggcatttgaacacaaggcccgactg

SEQ ID NO: 432591 - DNA, 57 bp, Artificial
  Synthetic oligonucleotide
ggtgttacagactatgtggaacaactgggcaatgcctttggtacaggtttcactaac

SEQ ID NO: 432592 - DNA, 58 bp, Artificial
  Synthetic oligonucleotide
ggtgttacattatccacgcaattcacagatttcgtatcattaaattcattacggttta

SEQ ID NO: 432593 - DNA, 57 bp, Artificial
  Synthetic oligonucleotide
ggtgttagcaacaccgtgttcccggcgaaggttccactttgagtaccatcagctctc

SEQ ID NO: 432594 - DNA, 55 bp, Artificial
  Synthetic oligonucleotide
ggtgttagccctggcttggtacataacctgattgggatgctccagactattgctg

SEQ ID NO: 432595 - DNA, 55 bp, Artificial
  Synthetic oligonucleotide
ggtgttagcgcacccaaacggcgcacctaccaatgttattggtgtggtctgcgag

SEQ ID NO: 432596 - DNA, 53 bp, Artificial
  Synthetic oligonucleotide
ggtgttagtgcgttgaaatcttacggtacgttccaacaatcgcttaataaggc

SEQ ID NO: 432597 - DNA, 55 bp, Artificial
  Synthetic oligonucleotide
ggtgttataacatcatgcaacaagaggaaagctattgctcggaagagacaggtgc

SEQ ID NO: 432598 - DNA, 55 bp, Artificial
  Synthetic oligonucleotide
ggtgttatccagggtggtccttagcagtgcccgtgaataccatatttgttgttcc

SEQ ID NO: 432599 - DNA, 52 bp, Artificial
  Synthetic oligonucleotide
ggtgttatcccaagctctgcctgtgatctgggatcttgagccaatgtatggc

SEQ ID NO: 432600 - DNA, 52 bp, Artificial
  Synthetic oligonucleotide
ggtgttatgagagagaaataaatcccggtttcccaaaatacccctaaatatg

SEQ ID NO: 432601 - DNA, 60 bp, Artificial
  Synthetic oligonucleotide
ggtgttatgatgcactggtgccagtaatcttagtggatcacacgaggaagactatgcacg

SEQ ID NO: 432602 - DNA, 55 bp, Artificial
  Synthetic oligonucleotide
ggtgttatgttggtcttgtgtggggggtccttcttacaactgaactcatagtttg

SEQ ID NO: 432603 - DNA, 55 bp, Artificial
  Synthetic oligonucleotide
ggtgttattggtcatgcagtctaaaatcccatttgagttgtggactgccgctgct

SEQ ID NO: 432604 - DNA, 55 bp, Artificial
  Synthetic oligonucleotide
ggtgttattgtttgctttacggtcgttgccatcctatgagtaaggagttagtcca

SEQ ID NO: 432605 - DNA, 55 bp, Artificial
  Synthetic oligonucleotide
ggtgttcaaatcttttccagactagttcttcaaagattcgcgactgctctgcact

SEQ ID NO: 432606 - DNA, 58 bp, Artificial
  Synthetic oligonucleotide
ggtgttcaacatgtacgacaacgagcccagtactgccactgtgaagaacgacctccgg

SEQ ID NO: 432607 - DNA, 59 bp, Artificial
  Synthetic oligonucleotide
ggtgttcaacatgtatgacaacgagcccagtacagctactgtgaagaacgatttgcgtg

SEQ ID NO: 432608 - DNA, 55 bp, Artificial
  Synthetic oligonucleotide
ggtgttcaaccaatagaaagtatcctttcacagatcatcgacatctcacaagtcg

SEQ ID NO: 432609 - DNA, 55 bp, Artificial
  Synthetic oligonucleotide
ggtgttcacggcgaccctgaaggatgagcggagacctttggctaaagtggaggcg

SEQ ID NO: 432610 - DNA, 55 bp, Artificial
  Synthetic oligonucleotide
ggtgttcatccaatgactatagacactcataagatcgactcaaattggtctccgg

SEQ ID NO: 432611 - DNA, 55 bp, Artificial
  Synthetic oligonucleotide
ggtgttcatgtagctggctccggtggcactaaaggatatgcttgtttgttgcccc

SEQ ID NO: 432612 - DNA, 51 bp, Artificial
  Synthetic oligonucleotide
ggtgttcattggaactggtccgctgttatttcgcctgttggacatcttact

SEQ ID NO: 432613 - DNA, 60 bp, Artificial
  Synthetic oligonucleotide
ggtgttccatgcgttacaggcctgaacgattcgtcgacaagagttgtaggaatgatgtac

SEQ ID NO: 432614 - DNA, 56 bp, Artificial
  Synthetic oligonucleotide
ggtgttcccgtcttttgactgcattaggcagtcgctttacggagtaccgacctgac

SEQ ID NO: 432615 - DNA, 57 bp, Artificial
  Synthetic oligonucleotide
ggtgttcccttggagctggggaacatgagcccgtggtcctgccagtctggggtggaa

SEQ ID NO: 432616 - DNA, 52 bp, Artificial
  Synthetic oligonucleotide
ggtgttccgccccccgagaggggacgagtgaggcttatcccggggaactcga

SEQ ID NO: 432617 - DNA, 57 bp, Artificial
  Synthetic oligonucleotide
ggtgttcgatcccccttttgaccgagtgcgctggggctctatttgcgataccgtcca

SEQ ID NO: 432618 - DNA, 57 bp, Artificial
  Synthetic oligonucleotide
ggtgttcgtaagacagccataaataacctaatagtgactacaaatctgcaaaggtta

SEQ ID NO: 432619 - DNA, 55 bp, Artificial
  Synthetic oligonucleotide
ggtgttctatctgcacagaccttcactgtgttaaatcgcccacaatttaaagagt

SEQ ID NO: 432620 - DNA, 60 bp, Artificial
  Synthetic oligonucleotide
ggtgttctcacaagaggattgcatgataaaagcagtacgaggtgatttgaattttgtcaa

SEQ ID NO: 432621 - DNA, 58 bp, Artificial
  Synthetic oligonucleotide
ggtgttctcgcatttcttgcaaataacgattataatcttttgcactacttatagctcc

SEQ ID NO: 432622 - DNA, 60 bp, Artificial
  Synthetic oligonucleotide
ggtgttgaattaccctgcaataagtacacgcacaaacgtgcagatcagggacactacgta

SEQ ID NO: 432623 - DNA, 55 bp, Artificial
  Synthetic oligonucleotide
ggtgttgagctgaaatcaggatacaaagattggatcctatggatttcctttgcca

SEQ ID NO: 432624 - DNA, 59 bp, Artificial
  Synthetic oligonucleotide
ggtgttgagttacgaatcagatagaatcatggtccccaccgatgttatcgaagaccact

SEQ ID NO: 432625 - DNA, 60 bp, Artificial
  Synthetic oligonucleotide
ggtgttgatgcgagcagatttgatcaacatgtgggggtagaagcactccaatgggagcac

SEQ ID NO: 432626 - DNA, 60 bp, Artificial
  Synthetic oligonucleotide
ggtgttgattgatggcgcgtacatatcaaccgatgctgagtacggaaccgtagcgcattg

SEQ ID NO: 432627 - DNA, 55 bp, Artificial
  Synthetic oligonucleotide
ggtgttgcacactcaattgctatcgaattatgtgtacctggatttcatggctggg

SEQ ID NO: 432628 - DNA, 59 bp, Artificial
  Synthetic oligonucleotide
ggtgttgcaccttgaccggaatagagtggctcctcgagggtgatgaatgttgcattttt

SEQ ID NO: 432629 - DNA, 55 bp, Artificial
  Synthetic oligonucleotide
ggtgttgcagacaaggttttggcattaggttcctctaggtctcgtatgtggctta

SEQ ID NO: 432630 - DNA, 55 bp, Artificial
  Synthetic oligonucleotide
ggtgttgcaggaatctaaggctgaggtacctttagacattgtacaatccacctgt

SEQ ID NO: 432631 - DNA, 60 bp, Artificial
  Synthetic oligonucleotide
ggtgttgctatcattgtcaacattgcttcttaaagaaaggcttaggcatttcctatggca

SEQ ID NO: 432632 - DNA, 55 bp, Artificial
  Synthetic oligonucleotide
ggtgttggatgcacaactgtatggatttccaggcgttttctcagaatgggagcag

SEQ ID NO: 432633 - DNA, 55 bp, Artificial
  Synthetic oligonucleotide
ggtgttggccttgagactaccagctaatccacgtgtaatctgggatgtaccgagg

SEQ ID NO: 432634 - DNA, 55 bp, Artificial
  Synthetic oligonucleotide
ggtgttggcgaaagcccaaccaactgacgacgcttctgagagcggctacgaccga

SEQ ID NO: 432635 - DNA, 55 bp, Artificial
  Synthetic oligonucleotide
ggtgttggggtgtttaccacctccgcctggaaagccagtagaacaaaacatgcca

SEQ ID NO: 432636 - DNA, 54 bp, Artificial
  Synthetic oligonucleotide
ggtgttggtggtgtagtatacaacctaaatcctggggaactgtaccaggcgccc

SEQ ID NO: 432637 - DNA, 55 bp, Artificial
  Synthetic oligonucleotide
ggtgttgtattgtcacaaaccaaacattctgaccactgcttgtttgtccacactg

SEQ ID NO: 432638 - DNA, 55 bp, Artificial
  Synthetic oligonucleotide
ggtgttgtgtgtgagtgatgtaaccaggggaggtggtataacgcatagggtaggt

SEQ ID NO: 432639 - DNA, 60 bp, Artificial
  Synthetic oligonucleotide
ggtgtttacgctaacatcagcaagaacgccatattagtttatcattgttggatgtctgat

SEQ ID NO: 432640 - DNA, 55 bp, Artificial
  Synthetic oligonucleotide
ggtgtttcagaaatttagcacccactccacaatcccgctactcattttggcgtgc

SEQ ID NO: 432641 - DNA, 60 bp, Artificial
  Synthetic oligonucleotide
ggtgtttcatctaaaattgatctaatgactccagataaagatgcgaaagatagtaacgaa

SEQ ID NO: 432642 - DNA, 56 bp, Artificial
  Synthetic oligonucleotide
ggtgtttccgcattgtgaagtaaaatgagaattcccattagatctcctggtgggtt

SEQ ID NO: 432643 - DNA, 55 bp, Artificial
  Synthetic oligonucleotide
ggtgtttccgttgccacacatttcctatcccagccaaatggcgtttccctctcct

SEQ ID NO: 432644 - DNA, 55 bp, Artificial
  Synthetic oligonucleotide
ggtgtttcgacttccgatgtaggaacgataatattagcgcctggacaagtcctac

SEQ ID NO: 432645 - DNA, 60 bp, Artificial
  Synthetic oligonucleotide
ggtgtttcgcagtcctgtggcatgaataacgagtccctaacggctgctttagcttgcaaa

SEQ ID NO: 432646 - DNA, 57 bp, Artificial
  Synthetic oligonucleotide
ggtgtttctatgtggagttgataagggggagaccacaggagactagggtatggtgga

SEQ ID NO: 432647 - DNA, 60 bp, Artificial
  Synthetic oligonucleotide
ggtgtttcttatagcggctggatcccatacttagagaggatctgcagtgaagtaaatcta

SEQ ID NO: 432648 - DNA, 55 bp, Artificial
  Synthetic oligonucleotide
ggtgtttgaagaatgcatgtcaaggattgaagagaaaggttgcatggagatctgc

SEQ ID NO: 432649 - DNA, 50 bp, Artificial
  Synthetic oligonucleotide
ggtgtttgacaagatgcaaccacgagttgaaactcatgattgcacaattg

SEQ ID NO: 432650 - DNA, 59 bp, Artificial
  Synthetic oligonucleotide
ggtgtttgacagtcaactagcattcaagcatgtagcccgtgagaaatatccggagttct

SEQ ID NO: 432651 - DNA, 60 bp, Artificial
  Synthetic oligonucleotide
ggtgtttgaggtcgaacactctgcaattcgtgcactggaacttgccttcgaattggataa

SEQ ID NO: 432652 - DNA, 52 bp, Artificial
  Synthetic oligonucleotide
ggtgtttggggttcctaagtcttattctaaggcccggactaaagcctgctta

SEQ ID NO: 432653 - DNA, 57 bp, Artificial
  Synthetic oligonucleotide
ggtgtttgtagatttaatgattgggaaagtgcctcttctttagttagagagcatttg

SEQ ID NO: 432654 - DNA, 60 bp, Artificial
  Synthetic oligonucleotide
ggtgttttactcaatctaaacatgttatttcatatgtctcgtgttagacatactgatgtt

SEQ ID NO: 432655 - DNA, 55 bp, Artificial
  Synthetic oligonucleotide
ggtgtttttatgtggagttaataagagggaggccacaggaaactagagtatggtg

SEQ ID NO: 432656 - DNA, 57 bp, Artificial
  Synthetic oligonucleotide
ggtgtttttatgtggagttgataagaggaaggccgcaggagactaacgtatggtgga

SEQ ID NO: 432657 - DNA, 57 bp, Artificial
  Synthetic oligonucleotide
ggtgtttttattaaccctagaatccatattatgggctgctagtgcctctgaaattcc

SEQ ID NO: 432658 - DNA, 49 bp, Artificial
  Synthetic oligonucleotide
ggttaaaacatggaaccttcggtcccgttcatttccgaaaccaagttaa

SEQ ID NO: 432659 - DNA, 53 bp, Artificial
  Synthetic oligonucleotide
ggttaaaactgcttaggtattataccgaattgttgtcaatatttggcccgagt

SEQ ID NO: 432660 - DNA, 60 bp, Artificial
  Synthetic oligonucleotide
ggttaaaacttggatgaagcttggatgaatgaagtagtcaatgccgttgtatccaatgtg

SEQ ID NO: 432661 - DNA, 55 bp, Artificial
  Synthetic oligonucleotide
ggttaaacctgacctgtcaaaggaggacgataacgtggaacactgagctttctta

SEQ ID NO: 432662 - DNA, 53 bp, Artificial
  Synthetic oligonucleotide
ggttaaactttatactcattagaagagtacaatgacgatttaccaagtccccc

SEQ ID NO: 432663 - DNA, 51 bp, Artificial
  Synthetic oligonucleotide
ggttaaagagatttgcacgcctctctttaaatatggatcgtgtaccctgct

SEQ ID NO: 432664 - DNA, 55 bp, Artificial
  Synthetic oligonucleotide
ggttaaagcaagaaatttggttagtcctgtcatgagtgtgattggttttttggcc

SEQ ID NO: 432665 - DNA, 52 bp, Artificial
  Synthetic oligonucleotide
ggttaaagcgatagatgttctaaagattggtacgagtaaagaagttgccgcg

SEQ ID NO: 432666 - DNA, 56 bp, Artificial
  Synthetic oligonucleotide
ggttaaagggctttgtactaggaggctgtaggcataaattggtttggtcaccagca

SEQ ID NO: 432667 - DNA, 56 bp, Artificial
  Synthetic oligonucleotide
ggttaaaggtctttgtactcggaggctgtaggcataaattggtctgcgtaccagca

SEQ ID NO: 432668 - DNA, 55 bp, Artificial
  Synthetic oligonucleotide
ggttaaagtcagtcagcaatgtcttcaagaccggccggtataggaatgaatccgg

SEQ ID NO: 432669 - DNA, 54 bp, Artificial
  Synthetic oligonucleotide
ggttaaagttaaacttccacgtttcgataagaaacgtcgcatgtgtctgcctgg

SEQ ID NO: 432670 - DNA, 53 bp, Artificial
  Synthetic oligonucleotide
ggttaaatttaacattggttaaagatccatttctaacctatctacaaggggca

SEQ ID NO: 432671 - DNA, 60 bp, Artificial
  Synthetic oligonucleotide
ggttaacaatcatgttgtgtacaaccatcaggaggaggctaaatatgccaaccatactga

SEQ ID NO: 432672 - DNA, 60 bp, Artificial
  Synthetic oligonucleotide
ggttaacacaatgtcaatggcaagctttaagtctgcttcaaagcgcataactggaaatga

SEQ ID NO: 432673 - DNA, 55 bp, Artificial
  Synthetic oligonucleotide
ggttaacaccgtcatggcacatcttcataatctcatcattgtgaaatgatctcgc

SEQ ID NO: 432674 - DNA, 55 bp, Artificial
  Synthetic oligonucleotide
ggttaacatagtacatattactcatggtgcacacctgcggaccgctttcggttgc

SEQ ID NO: 432675 - DNA, 50 bp, Artificial
  Synthetic oligonucleotide
ggttaaccaagaccttccgagaaaacaaaccacttaccgaaagtgaagtc

SEQ ID NO: 432676 - DNA, 60 bp, Artificial
  Synthetic oligonucleotide
ggttaaccataaggtgatatggaatgcagagtacggacgcagttctcaacaaaacgctga

SEQ ID NO: 432677 - DNA, 56 bp, Artificial
  Synthetic oligonucleotide
ggttaaccctttagcgtttgggagtctcgaaacatctcagtgtgtgttgagtggga

SEQ ID NO: 432678 - DNA, 60 bp, Artificial
  Synthetic oligonucleotide
ggttaaccggaaacattagcagcgatgcagaggaaatctactacaatacgccatacgcca

SEQ ID NO: 432679 - DNA, 55 bp, Artificial
  Synthetic oligonucleotide
ggttaacctcccgaaatccaatatactgagattagcgagtaaggagcagaaaggt

SEQ ID NO: 432680 - DNA, 53 bp, Artificial
  Synthetic oligonucleotide
ggttaacgatgatcggtttttgagagttagaaaccaacgcgggaatgtattac

SEQ ID NO: 432681 - DNA, 59 bp, Artificial
  Synthetic oligonucleotide
ggttaacggcgcctaattttgtgtatgagtctccgtctctgcaaggagatgtctttagc

SEQ ID NO: 432682 - DNA, 55 bp, Artificial
  Synthetic oligonucleotide
ggttaacgtcgttggatgtacccaaagcttaacttcccgatatgtgccacagcct

SEQ ID NO: 432683 - DNA, 51 bp, Artificial
  Synthetic oligonucleotide
ggttaactcttggttcagaaagaaagagaagctgggaacttatcttggaat

SEQ ID NO: 432684 - DNA, 57 bp, Artificial
  Synthetic oligonucleotide
ggttaactggaattatggtattatacatgttactcaggttaataacagtgaatacta

SEQ ID NO: 432685 - DNA, 55 bp, Artificial
  Synthetic oligonucleotide
ggttaacttcatttctagagctggtgtgagatcgagagtcgtccatctagtaggg

SEQ ID NO: 432686 - DNA, 51 bp, Artificial
  Synthetic oligonucleotide
ggttaagacatggaacctttggtcccgtccactttcgaaaccaagttaaga

SEQ ID NO: 432687 - DNA, 54 bp, Artificial
  Synthetic oligonucleotide
ggttaagaccgataccttcggtaccttcgacctctctgtcgtcttaactactgc

SEQ ID NO: 432688 - DNA, 58 bp, Artificial
  Synthetic oligonucleotide
ggttaagagagtgtaacacttcagtcattacacaagcttgtccaaaggtatcctttga

SEQ ID NO: 432689 - DNA, 60 bp, Artificial
  Synthetic oligonucleotide
ggttaagagcctatatcctgatgctacatatcagatcaaagaatttcctgaatatgttct

SEQ ID NO: 432690 - DNA, 50 bp, Artificial
  Synthetic oligonucleotide
ggttaagagtttttagaagttaagatagagtttagtttttagttttgagc

SEQ ID NO: 432691 - DNA, 55 bp, Artificial
  Synthetic oligonucleotide
ggttaagcaagcgtacaacaagcttaacttcaaacacgacaacaccatccatgct

SEQ ID NO: 432692 - DNA, 60 bp, Artificial
  Synthetic oligonucleotide
ggttaagcatataatgtcatgggtgtgtttagagcaactcaacgttgagcaacgttagtc

SEQ ID NO: 432693 - DNA, 55 bp, Artificial
  Synthetic oligonucleotide
ggttaagcgaaacactaagagataacaccccaatggtggtcgcaatacagaacgg

SEQ ID NO: 432694 - DNA, 54 bp, Artificial
  Synthetic oligonucleotide
ggttaagcgcgttaatacgtggcttaaaaattttgatcgcgaatattgggataa

SEQ ID NO: 432695 - DNA, 55 bp, Artificial
  Synthetic oligonucleotide
ggttaaggagatttcaaaccaaggacccttaaagctgtgaacagctattgggtga

SEQ ID NO: 432696 - DNA, 56 bp, Artificial
  Synthetic oligonucleotide
ggttaaggtagttgcctctttagtactttacatgaattctaaggatgattgtaaga

SEQ ID NO: 432697 - DNA, 53 bp, Artificial
  Synthetic oligonucleotide
ggttaaggttgtttatgacttttccacttataacccgaaaccagggctgcaga

SEQ ID NO: 432698 - DNA, 55 bp, Artificial
  Synthetic oligonucleotide
ggttaagtccttgctagaggtcaggtacatgaagttacccagcataggcgtggaa

SEQ ID NO: 432699 - DNA, 55 bp, Artificial
  Synthetic oligonucleotide
ggttaagtgcaagaatccaagctcgcatcaggtccctcaccgagggtctcatggg

SEQ ID NO: 432700 - DNA, 56 bp, Artificial
  Synthetic oligonucleotide
ggttaagttatatggaattagttagaccatataaaagtgataaaacacattgccaa

SEQ ID NO: 432701 - DNA, 55 bp, Artificial
  Synthetic oligonucleotide
ggttaataaactagacgatgaagaatacaaacaactctggacacgtacaagggga

SEQ ID NO: 432702 - DNA, 56 bp, Artificial
  Synthetic oligonucleotide
ggttaatacacctccaccaaaacatcgtggatgtccaatacctttatggcgttgga

SEQ ID NO: 432703 - DNA, 50 bp, Artificial
  Synthetic oligonucleotide
ggttaatacattgtaacacctcagtcattacccaagcctgtccaaagatg

SEQ ID NO: 432704 - DNA, 59 bp, Artificial
  Synthetic oligonucleotide
ggttaataggagtacagtgttactgttgtgtgtatcgctctaggcacacgaacgtacta

SEQ ID NO: 432705 - DNA, 57 bp, Artificial
  Synthetic oligonucleotide
ggttaataggcccatgtacaggaagcccaggatttatcggatgtacagatcccccga

SEQ ID NO: 432706 - DNA, 57 bp, Artificial
  Synthetic oligonucleotide
ggttaatcatcaacaggagtcagacaactttgaatttgcaactatggtgcaatgggc

SEQ ID NO: 432707 - DNA, 60 bp, Artificial
  Synthetic oligonucleotide
ggttaatccaattctatgcagcacggaactagggtcaccactagtgcttgatgactgctc

SEQ ID NO: 432708 - DNA, 55 bp, Artificial
  Synthetic oligonucleotide
ggttaatcggcccatgtatagaaagcccaggatttatcgaacgtatagatcacct

SEQ ID NO: 432709 - DNA, 51 bp, Artificial
  Synthetic oligonucleotide
ggttaatctgacgcgggcctttgagaacttgcatcagttgtggggcgtcaa

SEQ ID NO: 432710 - DNA, 60 bp, Artificial
  Synthetic oligonucleotide
ggttaatgcaatagatgctgaaatgcatgacctcaactgcagctacaacatatgccctta

SEQ ID NO: 432711 - DNA, 56 bp, Artificial
  Synthetic oligonucleotide
ggttaatgcctattcaacaccggcattaattagtaatgacgccatttttatggaag

SEQ ID NO: 432712 - DNA, 60 bp, Artificial
  Synthetic oligonucleotide
ggttaatggcgctaactctgtcaccgtattacaagcgctatatcagctggtgcttatggt

SEQ ID NO: 432713 - DNA, 55 bp, Artificial
  Synthetic oligonucleotide
ggttaatgggagaatcgttaacccaccatacgaaatgtacaacgccacgtggcac

SEQ ID NO: 432714 - DNA, 60 bp, Artificial
  Synthetic oligonucleotide
ggttaatgtagcatgtgctgctgtaggcttaacatcaagttacactccaactccattgtt

SEQ ID NO: 432715 - DNA, 55 bp, Artificial
  Synthetic oligonucleotide
ggttacaacaagcacaaggacacaataatggtatatgttggggagatcagctatt

SEQ ID NO: 432716 - DNA, 55 bp, Artificial
  Synthetic oligonucleotide
ggttacaacgttctcaaggacagaacaatggtatctgttggagaaatgagttatt

SEQ ID NO: 432717 - DNA, 51 bp, Artificial
  Synthetic oligonucleotide
ggttacaagtattgattgtaaccatgggtgcacaggtctctacacagaaaa

SEQ ID NO: 432718 - DNA, 60 bp, Artificial
  Synthetic oligonucleotide
ggttacaattgcatttgatcggaatcgtgaattctgcctgttttgtgtctccttccgtca

SEQ ID NO: 432719 - DNA, 59 bp, Artificial
  Synthetic oligonucleotide
ggttacacagcaaattgaatcaacagctagtcaaatgaatctacatgaagcattgaatg

SEQ ID NO: 432720 - DNA, 57 bp, Artificial
  Synthetic oligonucleotide
ggttacaccagtcggtgcctgacctgtttgaaagggcatcgtccacgtggaagtgga

SEQ ID NO: 432721 - DNA, 57 bp, Artificial
  Synthetic oligonucleotide
ggttacaccttttctcctcgagatgtagtagataattatgaacctccaccactctgt

SEQ ID NO: 432722 - DNA, 55 bp, Artificial
  Synthetic oligonucleotide
ggttacacggaccatggcgatggttatcgcgtaaaactttattctgacgtcaaca

SEQ ID NO: 432723 - DNA, 55 bp, Artificial
  Synthetic oligonucleotide
ggttacacggttagatgagatgcctaatttagaccatatagagaccgttagcggc

SEQ ID NO: 432724 - DNA, 55 bp, Artificial
  Synthetic oligonucleotide
ggttacacttggtggcaagccaatggacctcgccatcttaaagtgcaagctacca

SEQ ID NO: 432725 - DNA, 54 bp, Artificial
  Synthetic oligonucleotide
ggttacactttcacatctattaccctgaaaccgcctgaaattgaaaaaggttca

SEQ ID NO: 432726 - DNA, 53 bp, Artificial
  Synthetic oligonucleotide
ggttacagaaaacaagctttatcggatgcggtatatgaccaaattactgtaac

SEQ ID NO: 432727 - DNA, 55 bp, Artificial
  Synthetic oligonucleotide
ggttacagtggcagcggtggatacgttattcatgggctttatgctgtgctttctc

SEQ ID NO: 432728 - DNA, 59 bp, Artificial
  Synthetic oligonucleotide
ggttacatctatgattgatactatattaaaaccttgtgttaagataacaccatactgtg

SEQ ID NO: 432729 - DNA, 58 bp, Artificial
  Synthetic oligonucleotide
ggttacattcttgtatacatggtattcgtcgtttacttggatatctagtactggagcc

SEQ ID NO: 432730 - DNA, 57 bp, Artificial
  Synthetic oligonucleotide
ggttacattgggtataccggtaccacagctagcgtgtgtagtaattggcaagcaagg

SEQ ID NO: 432731 - DNA, 59 bp, Artificial
  Synthetic oligonucleotide
ggttaccaaagttcactgtaggcctgactcatgtactttgcaagtgggtcctgtgaata

SEQ ID NO: 432732 - DNA, 60 bp, Artificial
  Synthetic oligonucleotide
ggttaccaatctaccatggcaagctactgtgctaaatggggcaaagtacctgattggtca

SEQ ID NO: 432733 - DNA, 53 bp, Artificial
  Synthetic oligonucleotide
ggttaccacccgcaccgactgccatgcgtgaacctgggccatatctcgcacca

SEQ ID NO: 432734 - DNA, 60 bp, Artificial
  Synthetic oligonucleotide
ggttaccagctgttgaccagaacatctttgctcctgcaactatgtttgttgccacacaag

SEQ ID NO: 432735 - DNA, 55 bp, Artificial
  Synthetic oligonucleotide
ggttaccatacgagctcagccaaagaggaagtgtgttactaatcgagccaaccag

SEQ ID NO: 432736 - DNA, 58 bp, Artificial
  Synthetic oligonucleotide
ggttaccatggttatagcttacacattaactgcttggttgcgcttcgcgataaaagac

SEQ ID NO: 432737 - DNA, 58 bp, Artificial
  Synthetic oligonucleotide
ggttaccattgacagtagctaaacagataactcaagaatgccctcattgtactaagca

SEQ ID NO: 432738 - DNA, 55 bp, Artificial
  Synthetic oligonucleotide
ggttacccagtgattaatgcaccaagcaagactaaactcgagcccagtgttttcc

SEQ ID NO: 432739 - DNA, 59 bp, Artificial
  Synthetic oligonucleotide
ggttaccggtggctcaacctcagggcatatggtgatcttagactggtcttgaggacaaa

SEQ ID NO: 432740 - DNA, 55 bp, Artificial
  Synthetic oligonucleotide
ggttacctgcattactaattacagcatctcattttctacctacaatcgtgaacgg

SEQ ID NO: 432741 - DNA, 57 bp, Artificial
  Synthetic oligonucleotide
ggttaccttaacgcaccccgtgacgaaatacatcgccacgtgcatgcaagctgacct

SEQ ID NO: 432742 - DNA, 54 bp, Artificial
  Synthetic oligonucleotide
ggttaccttgatatgtttggcaagagtttatgacctatgcgacccgaacattac

SEQ ID NO: 432743 - DNA, 55 bp, Artificial
  Synthetic oligonucleotide
ggttacgaagtcagaattccaaattacgttgccaggagctgttgtttgtttccga

SEQ ID NO: 432744 - DNA, 59 bp, Artificial
  Synthetic oligonucleotide
ggttacgaagtctacagagactttgaacggaagatacgcagtgtcagcgctggacgcgc

SEQ ID NO: 432745 - DNA, 55 bp, Artificial
  Synthetic oligonucleotide
ggttacgaagtgtgtcagtcactaggtgcaagtgataaagagtttcttgcgaacg

SEQ ID NO: 432746 - DNA, 59 bp, Artificial
  Synthetic oligonucleotide
ggttacgcaagcgtatagttcgggattgtcacagaacagtatcattagtctaacaggga

SEQ ID NO: 432747 - DNA, 57 bp, Artificial
  Synthetic oligonucleotide
ggttacgcagatagaaccagtgaacgagtaatctgcgtactgggacgtaagtttaga

SEQ ID NO: 432748 - DNA, 58 bp, Artificial
  Synthetic oligonucleotide
ggttacgcagccgatcagaaaaggacacaaaatgcaatcgacggaatcaccaacaagg

SEQ ID NO: 432749 - DNA, 57 bp, Artificial
  Synthetic oligonucleotide
ggttacgcaggcctcccgctatctttagtagtgattaagtcagaattagtcccctca

SEQ ID NO: 432750 - DNA, 55 bp, Artificial
  Synthetic oligonucleotide
ggttacgcaggtactgtggaagtatcactgctcgattcgggcctgtcacctcttg

SEQ ID NO: 432751 - DNA, 57 bp, Artificial
  Synthetic oligonucleotide
ggttacgcgtctgctttaccgcgaccagtgttatttcgcgtacgtgttggctgacac

SEQ ID NO: 432752 - DNA, 55 bp, Artificial
  Synthetic oligonucleotide
ggttacgctgaagaggttaggtatgtgcagcaactttttggaagggttccaacag

SEQ ID NO: 432753 - DNA, 53 bp, Artificial
  Synthetic oligonucleotide
ggttacggaagaaagaaccctcgtaaggttcttctgaggagtattcagatagg

SEQ ID NO: 432754 - DNA, 60 bp, Artificial
  Synthetic oligonucleotide
ggttacggagagcagctcagatgagaaaccatcgtcagtgtcctcctcgcagggggatgc

SEQ ID NO: 432755 - DNA, 57 bp, Artificial
  Synthetic oligonucleotide
ggttacgtacacaatgtgactggacccatcgggaagtgataacagaatttcctgtcg

SEQ ID NO: 432756 - DNA, 52 bp, Artificial
  Synthetic oligonucleotide
ggttacgtcgccggcattttgcggccccatcgggagggtaattttatggggc

SEQ ID NO: 432757 - DNA, 56 bp, Artificial
  Synthetic oligonucleotide
ggttacgtctatcgtgagttaaatcaagggtcattacttccattagttgacgccaa

SEQ ID NO: 432758 - DNA, 57 bp, Artificial
  Synthetic oligonucleotide
ggttacgttacttcgtgcacaaggcgtgtcaggctcaagactccggcaggtggtctt

SEQ ID NO: 432759 - DNA, 53 bp, Artificial
  Synthetic oligonucleotide
ggttacgttagccatgaccgttgtggggacgtataagaggtacaggccttttc

SEQ ID NO: 432760 - DNA, 55 bp, Artificial
  Synthetic oligonucleotide
ggttactactgccaagtactcatccttagaggcaacgggcttagggtctacctta

SEQ ID NO: 432761 - DNA, 55 bp, Artificial
  Synthetic oligonucleotide
ggttactatcgatccagaatcgacggtcaacgtggtgggttacgtagatgctaac

SEQ ID NO: 432762 - DNA, 55 bp, Artificial
  Synthetic oligonucleotide
ggttactatgcagagaatttcgccagatatgccgagttgttcgtgaccaacgggg

SEQ ID NO: 432763 - DNA, 56 bp, Artificial
  Synthetic oligonucleotide
ggttactattaacaagagatggcggtaccaatgggaacaacaccgagactttcaga

SEQ ID NO: 432764 - DNA, 58 bp, Artificial
  Synthetic oligonucleotide
ggttactcagcaacttggcgaaggtcaaacgcaatcgacagaactaagttctcgtcaa

SEQ ID NO: 432765 - DNA, 55 bp, Artificial
  Synthetic oligonucleotide
ggttactccatgagaggctagatgaatatgaattgcaaggcccaactctcaccac

SEQ ID NO: 432766 - DNA, 57 bp, Artificial
  Synthetic oligonucleotide
ggttactcgtgggtcaggcattacccatagagtcgggaagaggttctgtgtgaagtc

SEQ ID NO: 432767 - DNA, 55 bp, Artificial
  Synthetic oligonucleotide
ggttactctagaactcctagacctttagattctggacctttagtagtacacgctg

SEQ ID NO: 432768 - DNA, 53 bp, Artificial
  Synthetic oligonucleotide
ggttactggtgagatagaactaagttaccctggactgttagtaagtagaccgg

SEQ ID NO: 432769 - DNA, 55 bp, Artificial
  Synthetic oligonucleotide
ggttactgtatcacttgcaatcactcacgttccgcgatgacagacggtatgtacg

SEQ ID NO: 432770 - DNA, 57 bp, Artificial
  Synthetic oligonucleotide
ggttacttatcttttctttcattctgtgagtcgaaacacacagaaagagagtaacca

SEQ ID NO: 432771 - DNA, 55 bp, Artificial
  Synthetic oligonucleotide
ggttacttccctgattggcaaaactacacaaagggaccagggatcagatacccac

SEQ ID NO: 432772 - DNA, 55 bp, Artificial
  Synthetic oligonucleotide
ggttacttcggtcagtacacctcttcatggccctacactgcctatagatgcggcg

SEQ ID NO: 432773 - DNA, 60 bp, Artificial
  Synthetic oligonucleotide
ggttacttgctcctaccactgagtctatgagagctgcaaacatggctaggaaagagatag

SEQ ID NO: 432774 - DNA, 53 bp, Artificial
  Synthetic oligonucleotide
ggttacttggaaggaaccagaacgttattagcttcccgcacgatcagtttaac

SEQ ID NO: 432775 - DNA, 55 bp, Artificial
  Synthetic oligonucleotide
ggttactttagataacgtcacgattgctacaatcactgctggatctcttgtgggc

SEQ ID NO: 432776 - DNA, 55 bp, Artificial
  Synthetic oligonucleotide
ggttagaaacagagcccataccaggagcagaaacttactatgtagaaggggcagc

SEQ ID NO: 432777 - DNA, 55 bp, Artificial
  Synthetic oligonucleotide
ggttagaaaccctttaacattatatgtcccagtagattggaatggatatggtgca

SEQ ID NO: 432778 - DNA, 60 bp, Artificial
  Synthetic oligonucleotide
ggttagaaaggggctttgaatcagagagtctggctggattagtgctagatcagaaatatg

SEQ ID NO: 432779 - DNA, 53 bp, Artificial
  Synthetic oligonucleotide
ggttagaagttacgaagaggaggccgcagatatgcgcttaagtcacaagacta

SEQ ID NO: 432780 - DNA, 56 bp, Artificial
  Synthetic oligonucleotide
ggttagacaaattaccttagggaactccacaattactactcaagaggcagcgaatg

SEQ ID NO: 432781 - DNA, 55 bp, Artificial
  Synthetic oligonucleotide
ggttagacttttagggttaactgttgaccaatcaacgattggagcaagcggagtg

SEQ ID NO: 432782 - DNA, 60 bp, Artificial
  Synthetic oligonucleotide
ggttagagaatcacaaaggaacggaattgcacctcaatcagactcgctaagaaagctgtc

SEQ ID NO: 432783 - DNA, 55 bp, Artificial
  Synthetic oligonucleotide
ggttagagaatcgcaaagaaatggaatcgcaccgcaatcggactcacttagaaag

SEQ ID NO: 432784 - DNA, 58 bp, Artificial
  Synthetic oligonucleotide
ggttagagacgtgctagtgcgtggcttcggggactctgtggaagaggccctatcggag

SEQ ID NO: 432785 - DNA, 56 bp, Artificial
  Synthetic oligonucleotide
ggttagaggagaccccgcgtctaaaaagtgcacggcccaacttggctgaagctgta

SEQ ID NO: 432786 - DNA, 60 bp, Artificial
  Synthetic oligonucleotide
ggttagaggatggaaggcccataaggccatctcacgagaacttggagaggctgctctatc

SEQ ID NO: 432787 - DNA, 57 bp, Artificial
  Synthetic oligonucleotide
ggttagaggggtaactaaccgcatgtttggcttggatggtaacataagcaccgatga

SEQ ID NO: 432788 - DNA, 60 bp, Artificial
  Synthetic oligonucleotide
ggttagagtcgtgtgcgtacgccacttagttcgactaatgcgtgcccccacactgcgcag

SEQ ID NO: 432789 - DNA, 51 bp, Artificial
  Synthetic oligonucleotide
ggttagagttccgttatgggctgatgccgttattctacgacatacagtccg

SEQ ID NO: 432790 - DNA, 59 bp, Artificial
  Synthetic oligonucleotide
ggttagatggcttacaaggacccgtcagacccacgtctgcttgagaagcgtagagcgca

SEQ ID NO: 432791 - DNA, 60 bp, Artificial
  Synthetic oligonucleotide
ggttagattggagacacatgagtggacaccaacatgggctagaggacatcagataaccca

SEQ ID NO: 432792 - DNA, 55 bp, Artificial
  Synthetic oligonucleotide
ggttagcacctaacgtcaagcgcgataagtcgaaccacgagcatgaggctttccg

SEQ ID NO: 432793 - DNA, 58 bp, Artificial
  Synthetic oligonucleotide
ggttagcagtcgaagaacctccattttcaataacgcgcacgcgagtaagtggattata

SEQ ID NO: 432794 - DNA, 59 bp, Artificial
  Synthetic oligonucleotide
ggttagccattcaattcagactgggaatcaaaaccaacctgaaacatgcaaccagagcg

SEQ ID NO: 432795 - DNA, 50 bp, Artificial
  Synthetic oligonucleotide
ggttagcgtttgacacaatgttatgaaattgtaggaagaaatgttggggt

SEQ ID NO: 432796 - DNA, 55 bp, Artificial
  Synthetic oligonucleotide
ggttagctactatactaatcgaaccaaatgtcacgtcacaaagcagaacatacac

SEQ ID NO: 432797 - DNA, 55 bp, Artificial
  Synthetic oligonucleotide
ggttagctatggagcgttcctataaaccaaggggtcttaatatctatgaccctta

SEQ ID NO: 432798 - DNA, 50 bp, Artificial
  Synthetic oligonucleotide
ggttagctatgttaccacctaggtccctgcgggggttcatgttatgaagg

SEQ ID NO: 432799 - DNA, 53 bp, Artificial
  Synthetic oligonucleotide
ggttaggaaaagagcctatatatcagataccctgctcaaacgaaaattgggaa

SEQ ID NO: 432800 - DNA, 56 bp, Artificial
  Synthetic oligonucleotide
ggttaggaaatgtggctatgtagacgtaaaggttctggacaactacgtggttgtga

SEQ ID NO: 432801 - DNA, 51 bp, Artificial
  Synthetic oligonucleotide
ggttaggaacgaactcgatcccctctcctccccgctgagacgcccttcccg

SEQ ID NO: 432802 - DNA, 60 bp, Artificial
  Synthetic oligonucleotide
ggttaggagtgcaggtgtccttcgagcacatagatggcaaggacaatacaatcgccaata

SEQ ID NO: 432803 - DNA, 55 bp, Artificial
  Synthetic oligonucleotide
ggttaggatttcggacggcagatcgcagatgctagcggagcaatccatggtaccg

SEQ ID NO: 432804 - DNA, 54 bp, Artificial
  Synthetic oligonucleotide
ggttaggcactcttgtaaatttgatataggtccttttgtccttgaaaagaagga

SEQ ID NO: 432805 - DNA, 57 bp, Artificial
  Synthetic oligonucleotide
ggttaggcccacaacaatcaggactgatctttattcactccggttggatcttaattg

SEQ ID NO: 432806 - DNA, 55 bp, Artificial
  Synthetic oligonucleotide
ggttaggctaggtaagagtagactgatcgaggcatctagtttgaatgactcagtg

SEQ ID NO: 432807 - DNA, 52 bp, Artificial
  Synthetic oligonucleotide
ggttagggactaaaattataaacgcccataagactaacggctttgaaagtgc

SEQ ID NO: 432808 - DNA, 60 bp, Artificial
  Synthetic oligonucleotide
ggttagggtacttcactgtgtagagcaggcctaagtctgttagggcctgcacaacatcat

SEQ ID NO: 432809 - DNA, 55 bp, Artificial
  Synthetic oligonucleotide
ggttagggtatgagctacacccatcccattggaaaattgccaaaatagagctacc

SEQ ID NO: 432810 - DNA, 55 bp, Artificial
  Synthetic oligonucleotide
ggttaggtgctaccgaggttggagcaaatcgtgttgtctctggtgtttatggtga

SEQ ID NO: 432811 - DNA, 57 bp, Artificial
  Synthetic oligonucleotide
ggttaggttgggccacgcttacgctgttcacttttacgccgctgattggaagactga

SEQ ID NO: 432812 - DNA, 55 bp, Artificial
  Synthetic oligonucleotide
ggttagtaatagtcgaaccttatttcaaaagctgaacggaaagggtgtgtgatgc

SEQ ID NO: 432813 - DNA, 59 bp, Artificial
  Synthetic oligonucleotide
ggttagtagcctgccacctgggaggtatcaggcacgcggaggagtagtgtccgtcagaa

SEQ ID NO: 432814 - DNA, 53 bp, Artificial
  Synthetic oligonucleotide
ggttagtcattcaattcaaacagggaatcaacaccaggctgaaccatgcaatc

SEQ ID NO: 432815 - DNA, 58 bp, Artificial
  Synthetic oligonucleotide
ggttagtcctacctctgtagaagacctgagagaacttatagcagacttgagtgaaaag

SEQ ID NO: 432816 - DNA, 60 bp, Artificial
  Synthetic oligonucleotide
ggttagtgctggagctaggggtgcacgaggcatgttcaatgcggtagttaatggcctagc

SEQ ID NO: 432817 - DNA, 51 bp, Artificial
  Synthetic oligonucleotide
ggttagtgtccatggtgtcccaatatatctgacgtttgcagcctcagaaat

SEQ ID NO: 432818 - DNA, 58 bp, Artificial
  Synthetic oligonucleotide
ggttagtgtcggaggtgttgacatgagggcggggcgtataattgcgtgggatggacag

SEQ ID NO: 432819 - DNA, 54 bp, Artificial
  Synthetic oligonucleotide
ggttagttagagatagacgtccttacggaagtagtcctcaggactttggtcagg

SEQ ID NO: 432820 - DNA, 55 bp, Artificial
  Synthetic oligonucleotide
ggttagttataatgttagaaatcccttacagtgtagtgctggtctagatgtgatg

SEQ ID NO: 432821 - DNA, 55 bp, Artificial
  Synthetic oligonucleotide
ggttagttgcatgtcttaaggctttcgttgaaacgcatactcgtaccatcgatgg

SEQ ID NO: 432822 - DNA, 56 bp, Artificial
  Synthetic oligonucleotide
ggttataaacaaccacaaaccttagccttggtgtgtcagttctacagtggtaatgc

SEQ ID NO: 432823 - DNA, 60 bp, Artificial
  Synthetic oligonucleotide
ggttatacaagttgatggagatttagcagctccacatgttggccatactttctttgtacc

SEQ ID NO: 432824 - DNA, 57 bp, Artificial
  Synthetic oligonucleotide
ggttatacagggaccctgaattaatcaagtggggcaaaccatctatctgggtgtcaa

SEQ ID NO: 432825 - DNA, 51 bp, Artificial
  Synthetic oligonucleotide
ggttatacagttcatgttcagtgtaacgctagtaagtttcaccagggaact

SEQ ID NO: 432826 - DNA, 55 bp, Artificial
  Synthetic oligonucleotide
ggttatacatcagattaccttaccgccacggcaggcaccctgcgaacgaagcgag

SEQ ID NO: 432827 - DNA, 55 bp, Artificial
  Synthetic oligonucleotide
ggttatactctagattgtacaccttatcataaattctacgtatttaatgggtacg

SEQ ID NO: 432828 - DNA, 55 bp, Artificial
  Synthetic oligonucleotide
ggttatactgttgatgtattgtatgacagagacgaagataaagtgtatccttaca

SEQ ID NO: 432829 - DNA, 55 bp, Artificial
  Synthetic oligonucleotide
ggttatactttgaacaccatttgcagaccaaatcagtgagggatgcagtgtgggc

SEQ ID NO: 432830 - DNA, 55 bp, Artificial
  Synthetic oligonucleotide
ggttatagatattttaacaggctaggcggagatgaggaggactgcgcagtcggtg

SEQ ID NO: 432831 - DNA, 60 bp, Artificial
  Synthetic oligonucleotide
ggttatagatcggactgaaagtgtgcggatgacgtacagatctcctatcgacgtcgcgca

SEQ ID NO: 432832 - DNA, 58 bp, Artificial
  Synthetic oligonucleotide
ggttatagcaactaccaacaaatcagacttctcaagtactgttttgcaagactctggg

SEQ ID NO: 432833 - DNA, 53 bp, Artificial
  Synthetic oligonucleotide
ggttatagggacccgagagggttccggctcgctcaataggggtgcctaaggcg

SEQ ID NO: 432834 - DNA, 53 bp, Artificial
  Synthetic oligonucleotide
ggttatagtaaacacgaagtttcctcgcttcccataattacgtttagcgcgaa

SEQ ID NO: 432835 - DNA, 55 bp, Artificial
  Synthetic oligonucleotide
ggttatatgtttgtctgatgtcacgaggggaatgggtttgacccatcgagtaggg

SEQ ID NO: 432836 - DNA, 57 bp, Artificial
  Synthetic oligonucleotide
ggttatatttcagttggccagaatgttccttttgtgacaggtaaagtcactggcgag

SEQ ID NO: 432837 - DNA, 54 bp, Artificial
  Synthetic oligonucleotide
ggttatcaatcgaaaaggtatacagtccagtcaacatcatcttgatgtctaggt

SEQ ID NO: 432838 - DNA, 60 bp, Artificial
  Synthetic oligonucleotide
ggttatcagtttgttgaggacgattaagcgactatggatgatagctctgtcactgctcgg

SEQ ID NO: 432839 - DNA, 55 bp, Artificial
  Synthetic oligonucleotide
ggttatccagcacttgtggagtcctaatgctctccggaggttgtggttgaactgc

SEQ ID NO: 432840 - DNA, 60 bp, Artificial
  Synthetic oligonucleotide
ggttatcctctggaatgcataaaagacttgcttgcgcgagctggcaagtcaagcgcacct

SEQ ID NO: 432841 - DNA, 60 bp, Artificial
  Synthetic oligonucleotide
ggttatcgagtcaattgctaacgcaggcgacggagtagatattctaaaccgccatagaga

SEQ ID NO: 432842 - DNA, 57 bp, Artificial
  Synthetic oligonucleotide
ggttatctgtatggggtattagacaactccgagctcgcctgctagccttagaaacct

SEQ ID NO: 432843 - DNA, 56 bp, Artificial
  Synthetic oligonucleotide
ggttatgaaactttcaaggtcactggtggttggacaacggctaattccaagtcaca

SEQ ID NO: 432844 - DNA, 58 bp, Artificial
  Synthetic oligonucleotide
ggttatgaatagagatatctacacacaaattgaaaccgtgggcgtacttgaaaagcgc

SEQ ID NO: 432845 - DNA, 56 bp, Artificial
  Synthetic oligonucleotide
ggttatgagacttttagagtcgttggtggttggaccacggctaattccaagtcaca

SEQ ID NO: 432846 - DNA, 59 bp, Artificial
  Synthetic oligonucleotide
ggttatgagcgaaaaaggaggccatcctcacgctaaggattattcagagctccagggtc

SEQ ID NO: 432847 - DNA, 59 bp, Artificial
  Synthetic oligonucleotide
ggttatgatacaagagtattgaacgataacaactttgagaacaatcgcattacattccg

SEQ ID NO: 432848 - DNA, 60 bp, Artificial
  Synthetic oligonucleotide
ggttatgatatgggcttcaaaggattatgtagagctatgcatgctcacggaaccacattt

SEQ ID NO: 432849 - DNA, 55 bp, Artificial
  Synthetic oligonucleotide
ggttatgatgcatcccttagtccagcttggttcgaggcactcaaaatggtactag

SEQ ID NO: 432850 - DNA, 60 bp, Artificial
  Synthetic oligonucleotide
ggttatgctgaagagatcagatatgtgcagcagctttttggaaaggttccgacaggtgaa

SEQ ID NO: 432851 - DNA, 59 bp, Artificial
  Synthetic oligonucleotide
ggttatgctgaagaggtcagatacgtgcaacagctttttggaagggttccaacaggtga

SEQ ID NO: 432852 - DNA, 59 bp, Artificial
  Synthetic oligonucleotide
ggttatggaactgggtcatgccacccctgtttggattaacagtaatcacatattggcaa

SEQ ID NO: 432853 - DNA, 60 bp, Artificial
  Synthetic oligonucleotide
ggttatggagatatacaaagggattgctggcgttgactcgctggatgatctaattaagtg

SEQ ID NO: 432854 - DNA, 56 bp, Artificial
  Synthetic oligonucleotide
ggttatggcgttcatagctttcctcagatttctagccattccaccaacagcaggag

SEQ ID NO: 432855 - DNA, 55 bp, Artificial
  Synthetic oligonucleotide
ggttatggtaatgctttccctactgctaatttctatagtggcaagcatccgctac

SEQ ID NO: 432856 - DNA, 55 bp, Artificial
  Synthetic oligonucleotide
ggttatggtagagtggatacctagccaggggcaatgggactgctttgcatatccc

SEQ ID NO: 432857 - DNA, 55 bp, Artificial
  Synthetic oligonucleotide
ggttatgtcgcgccttactggcatgactactgctattttaccagaaaagaaaccc

SEQ ID NO: 432858 - DNA, 54 bp, Artificial
  Synthetic oligonucleotide
ggttatgtgaccgtttggtaccaaactgcggttgtatttgcgcccaactgtcct

SEQ ID NO: 432859 - DNA, 55 bp, Artificial
  Synthetic oligonucleotide
ggttatgtgcctttgggagaaggtcctgcagtccgtgttggcaatgctcctacgg

SEQ ID NO: 432860 - DNA, 52 bp, Artificial
  Synthetic oligonucleotide
ggttatgtggactgtttaccatggtgcaggctcgaggacacttgcgggcgct

SEQ ID NO: 432861 - DNA, 56 bp, Artificial
  Synthetic oligonucleotide
ggttatgtggtgacctgtatactctgtaaggtcatcttctatctattaatagttgt

SEQ ID NO: 432862 - DNA, 55 bp, Artificial
  Synthetic oligonucleotide
ggttatgtttttccttgttcgtgatagaaggccctacggctcggctccaatggat

SEQ ID NO: 432863 - DNA, 60 bp, Artificial
  Synthetic oligonucleotide
ggttattaatgacgacaatcgacatctattattagattacaatttcagtcagagacagtg

SEQ ID NO: 432864 - DNA, 56 bp, Artificial
  Synthetic oligonucleotide
ggttattaccgagtccaagaacgttgatttcgtatgcaagcaattggaacgattcc

SEQ ID NO: 432865 - DNA, 54 bp, Artificial
  Synthetic oligonucleotide
ggttattataccgtcaaggactgtgtgactattgacgtccttccccgtacgccg

SEQ ID NO: 432866 - DNA, 52 bp, Artificial
  Synthetic oligonucleotide
ggttattcaatggttagtaggaaaggtatacttgttggttcaatgaatcgaa

SEQ ID NO: 432867 - DNA, 55 bp, Artificial
  Synthetic oligonucleotide
ggttattctactaagcttgtttctgaacccatccccgaagcaactttgtctacca

SEQ ID NO: 432868 - DNA, 57 bp, Artificial
  Synthetic oligonucleotide
ggttattctaggacttctaaatctttagactcaggacctttggtagtacatgcagta

SEQ ID NO: 432869 - DNA, 60 bp, Artificial
  Synthetic oligonucleotide
ggttattctggcgacttgattatagattggatgattagtgcttctgctctaacaaatggg

SEQ ID NO: 432870 - DNA, 59 bp, Artificial
  Synthetic oligonucleotide
ggttattggaataactagcatgcttaaccttcatgcagggtcccaaaaagttcatgaga

SEQ ID NO: 432871 - DNA, 55 bp, Artificial
  Synthetic oligonucleotide
ggttattggagaccgaaacccggttagatgggctatttgactactacatccctga

SEQ ID NO: 432872 - DNA, 60 bp, Artificial
  Synthetic oligonucleotide
ggttatttcaaaatgcgcactgggaaaagctcaataatgaggtcagatgcacctattgat

SEQ ID NO: 432873 - DNA, 55 bp, Artificial
  Synthetic oligonucleotide
ggttatttcacgtggttgtgaaattaattaactttctatcgtgtttcacacatta

SEQ ID NO: 432874 - DNA, 60 bp, Artificial
  Synthetic oligonucleotide
ggttcaaagtccttagtgagcctgaagagatgctcaccgatgaactctggttctagtgga

SEQ ID NO: 432875 - DNA, 55 bp, Artificial
  Synthetic oligonucleotide
ggttcaaccaatgtcccatcagagagctcaaatactggtcgtaataatgaaaccg

SEQ ID NO: 432876 - DNA, 50 bp, Artificial
  Synthetic oligonucleotide
ggttcaaccgaaaacggttgtatataaaccagccctaaaatttagcaaac

SEQ ID NO: 432877 - DNA, 55 bp, Artificial
  Synthetic oligonucleotide
ggttcaacgaccagattgtaaagttagtatagtgacggagcaaggtctttcaatc

SEQ ID NO: 432878 - DNA, 55 bp, Artificial
  Synthetic oligonucleotide
ggttcaacttcaaagtccgtatgacccctccagcatggagccatgacccgcagcc

SEQ ID NO: 432879 - DNA, 58 bp, Artificial
  Synthetic oligonucleotide
ggttcaacttggtatgcagttcaaatcgttcactattaagtctctgaatggtcgtact

SEQ ID NO: 432880 - DNA, 53 bp, Artificial
  Synthetic oligonucleotide
ggttcaaggatgaatccaaagttccgtttcctaaggtgttattttggagagcg

SEQ ID NO: 432881 - DNA, 55 bp, Artificial
  Synthetic oligonucleotide
ggttcaagggtattgtgaaggtggaacgtgtacatgtagaggttaacatggactg

SEQ ID NO: 432882 - DNA, 60 bp, Artificial
  Synthetic oligonucleotide
ggttcaagtatcaaagttgaagaaactccagatgctgacacaactgtatgttacagcctg

SEQ ID NO: 432883 - DNA, 60 bp, Artificial
  Synthetic oligonucleotide
ggttcaagtattttcaaacgccatgacaaaatatgcgacatcacatctaatcaatgaata

SEQ ID NO: 432884 - DNA, 55 bp, Artificial
  Synthetic oligonucleotide
ggttcaagtgccaaatccctggaaggagtgaccctctactgccctaggaatgctg

SEQ ID NO: 432885 - DNA, 57 bp, Artificial
  Synthetic oligonucleotide
ggttcacaacaaggcataggaaacccacttatgagaaggacgtagatcttggggcag

SEQ ID NO: 432886 - DNA, 60 bp, Artificial
  Synthetic oligonucleotide
ggttcacagagcgtcatgttgccattgggtcagatgtgttcgagacagttaaactgggat

SEQ ID NO: 432887 - DNA, 55 bp, Artificial
  Synthetic oligonucleotide
ggttcacatagtcaagtctatcattctcctcacaattacaaggtgtagctatagc

SEQ ID NO: 432888 - DNA, 60 bp, Artificial
  Synthetic oligonucleotide
ggttcaccatggcgctacttgaaagacaaagtttgcaagtggctgggtattgatccacca

SEQ ID NO: 432889 - DNA, 55 bp, Artificial
  Synthetic oligonucleotide
ggttcaccggaaagatgtcagaagtgagtcatcagggacgctctaagacgaaaag

SEQ ID NO: 432890 - DNA, 55 bp, Artificial
  Synthetic oligonucleotide
ggttcaccttccggatgtgcacaaactgatctcaggggtcgaccttggtcttccc

SEQ ID NO: 432891 - DNA, 58 bp, Artificial
  Synthetic oligonucleotide
ggttcaccttgagggtttctcagtcactactgggaggccttttgctgtgtatggtgta

SEQ ID NO: 432892 - DNA, 53 bp, Artificial
  Synthetic oligonucleotide
ggttcacgacgtcattctcaagacgttctcgggcaatcccccgaacctcaatt

SEQ ID NO: 432893 - DNA, 57 bp, Artificial
  Synthetic oligonucleotide
ggttcacggtttccgttgtatgctcgccgtgaaataccttcaggctgttcgagagtc

SEQ ID NO: 432894 - DNA, 55 bp, Artificial
  Synthetic oligonucleotide
ggttcactccgagcacacattgccgagcccagaggaagattacttagtacgctac

SEQ ID NO: 432895 - DNA, 52 bp, Artificial
  Synthetic oligonucleotide
ggttcactgcatcacttaaccagagagtcaaggccatactaggccatggaga

SEQ ID NO: 432896 - DNA, 54 bp, Artificial
  Synthetic oligonucleotide
ggttcactgtcgccggtcaagtagtactccagggtacgcctagggatagcggtt

SEQ ID NO: 432897 - DNA, 60 bp, Artificial
  Synthetic oligonucleotide
ggttcacttggcacatggcatttggacaactaatcagcacagacaggcattggtcgcatc

SEQ ID NO: 432898 - DNA, 55 bp, Artificial
  Synthetic oligonucleotide
ggttcactttaaccaatttgaaaccagatgcgaacactggcgtagtcaactttga

SEQ ID NO: 432899 - DNA, 58 bp, Artificial
  Synthetic oligonucleotide
ggttcactttcaaaagaacaagtgggtcatcagttaagagagaagaagaagtgctcac

SEQ ID NO: 432900 - DNA, 60 bp, Artificial
  Synthetic oligonucleotide
ggttcagaaacatcctgagcatcgcaccaataatgttctcaaacaaaatggcaagactag

SEQ ID NO: 432901 - DNA, 60 bp, Artificial
  Synthetic oligonucleotide
ggttcagaactcctcaacagggaaaatatgcaacaatccacatagaatccttgatgggag

SEQ ID NO: 432902 - DNA, 57 bp, Artificial
  Synthetic oligonucleotide
ggttcagatccagaaacaacatatatgtggaccaattgtagaggagaattcttatac

SEQ ID NO: 432903 - DNA, 60 bp, Artificial
  Synthetic oligonucleotide
ggttcagatgtcaagaatctcagagtaggcgccctactccgacaccagtccaaagaatgg

SEQ ID NO: 432904 - DNA, 52 bp, Artificial
  Synthetic oligonucleotide
ggttcagattcagatgtgcggtgagtgaacctccgttcagggttaccggtac

SEQ ID NO: 432905 - DNA, 55 bp, Artificial
  Synthetic oligonucleotide
ggttcagcagcaagaaatagaaattggatggttgatactagaactacagctagac

SEQ ID NO: 432906 - DNA, 53 bp, Artificial
  Synthetic oligonucleotide
ggttcagcgggttatcgtcaaacctttgagttcggatgggtcggttccggcac

SEQ ID NO: 432907 - DNA, 59 bp, Artificial
  Synthetic oligonucleotide
ggttcagctctcactacactcaaattgttaattgcatacactccacccggaattagagt

SEQ ID NO: 432908 - DNA, 55 bp, Artificial
  Synthetic oligonucleotide
ggttcaggacaattcctcactacagatgatgcacaatcaccatcagctttaccct

SEQ ID NO: 432909 - DNA, 54 bp, Artificial
  Synthetic oligonucleotide
ggttcaggacaatttctgactactgatgaccatagctcagcaccagtcctcccg

SEQ ID NO: 432910 - DNA, 55 bp, Artificial
  Synthetic oligonucleotide
ggttcagggagtaggaccgcctaggaggtaggactctgggtttaattgctctcac

SEQ ID NO: 432911 - DNA, 52 bp, Artificial
  Synthetic oligonucleotide
ggttcaggtagtgagtgggaagttcgttttaacggggaaactctgtttgctc

SEQ ID NO: 432912 - DNA, 60 bp, Artificial
  Synthetic oligonucleotide
ggttcagtctctctaaccattgcaacagcatgtttcctcatgcagattgccatcctagca

SEQ ID NO: 432913 - DNA, 55 bp, Artificial
  Synthetic oligonucleotide
ggttcagtgaattactaactgctccttgctctgattgctagatcttctacggtgc

SEQ ID NO: 432914 - DNA, 55 bp, Artificial
  Synthetic oligonucleotide
ggttcagtttagcagtagaagaaccgccattctctatttcaaggacacggatatc

SEQ ID NO: 432915 - DNA, 55 bp, Artificial
  Synthetic oligonucleotide
ggttcatacggaactggtaaaagccacctagcatacgctatcgcaaaagcagtca

SEQ ID NO: 432916 - DNA, 55 bp, Artificial
  Synthetic oligonucleotide
ggttcatacgtatggcaactgttttcattggcaccaggttcgagatccgtgacgc

SEQ ID NO: 432917 - DNA, 55 bp, Artificial
  Synthetic oligonucleotide
ggttcatagaggggggttggccaggtttaatcaatggttggtatggattccaaca

SEQ ID NO: 432918 - DNA, 54 bp, Artificial
  Synthetic oligonucleotide
ggttcatagcgataatgtacgccaggcagcagtagcggataggagtatccggtg

SEQ ID NO: 432919 - DNA, 55 bp, Artificial
  Synthetic oligonucleotide
ggttcatcaaacggagcgaggtcatacaatcccacactacaggactgagggcctc

SEQ ID NO: 432920 - DNA, 57 bp, Artificial
  Synthetic oligonucleotide
ggttcatcaataacatcaagtttcccagacctgagaatgactttctaggtttcaagt

SEQ ID NO: 432921 - DNA, 56 bp, Artificial
  Synthetic oligonucleotide
ggttcatcagtgaccggatcattgccacttatctgggacgacctgaggagcctgtt

SEQ ID NO: 432922 - DNA, 55 bp, Artificial
  Synthetic oligonucleotide
ggttcatctacacactggacagtggtctacacagcatggagtcacgacatgcctt

SEQ ID NO: 432923 - DNA, 60 bp, Artificial
  Synthetic oligonucleotide
ggttcatctcatattatacgacgttgaaattggaccgcagagcggagccacgtatgagtt

SEQ ID NO: 432924 - DNA, 56 bp, Artificial
  Synthetic oligonucleotide
ggttcatcttgtacagtaaaagtatgtccgttaaacacacagacgcttggaatcgg

SEQ ID NO: 432925 - DNA, 55 bp, Artificial
  Synthetic oligonucleotide
ggttcatgagcctttcgaggagatgaagtgtattgggctaactatgcagagcatg

SEQ ID NO: 432926 - DNA, 55 bp, Artificial
  Synthetic oligonucleotide
ggttcatgctgctatgcttttcgctcctgagagtatgttagtggacgaaggtcca

SEQ ID NO: 432927 - DNA, 55 bp, Artificial
  Synthetic oligonucleotide
ggttcatggactcacgtgacctacaagtggcaaccggatgttaacagcgaccgcg

SEQ ID NO: 432928 - DNA, 55 bp, Artificial
  Synthetic oligonucleotide
ggttcatggtcccaaaacatcctcaggacccaggagtcagaatgcgtttgcatca

SEQ ID NO: 432929 - DNA, 58 bp, Artificial
  Synthetic oligonucleotide
ggttcatgtcaacacagggactcaagtgtgagggcatttacataccaaaactcgaaaa

SEQ ID NO: 432930 - DNA, 60 bp, Artificial
  Synthetic oligonucleotide
ggttcatgtctcaccaggctaaactagtgggtgacttgtacataccaaagctagagcaag

SEQ ID NO: 432931 - DNA, 60 bp, Artificial
  Synthetic oligonucleotide
ggttcatgtggatttggagggtgtacccggctcaattaatagcatgctggagcgagccca

SEQ ID NO: 432932 - DNA, 55 bp, Artificial
  Synthetic oligonucleotide
ggttcattccctacatgtccgactacctgcgactcacgtcccaaggtgggacccc

SEQ ID NO: 432933 - DNA, 55 bp, Artificial
  Synthetic oligonucleotide
ggttcattcgcatttgatggtagagaatgggtagaaatttatccaatagagcacc

SEQ ID NO: 432934 - DNA, 60 bp, Artificial
  Synthetic oligonucleotide
ggttcattgagattggtgtaacaaggagagaagtccatgtatactacctggagaaggcca

SEQ ID NO: 432935 - DNA, 54 bp, Artificial
  Synthetic oligonucleotide
ggttccaaagggactttccgtggaagaaccattgatgccggacgttgtcaagaa

SEQ ID NO: 432936 - DNA, 52 bp, Artificial
  Synthetic oligonucleotide
ggttccaaattggggtctttcgcaattatgcgcttctctggggaggctagca

SEQ ID NO: 432937 - DNA, 51 bp, Artificial
  Synthetic oligonucleotide
ggttccaacagcattatgaggatgaggaatgctgacgcctgacgcctccaa

SEQ ID NO: 432938 - DNA, 54 bp, Artificial
  Synthetic oligonucleotide
ggttccaacgggggctatcggagactacctactcgtcagaactccgtttcgctg

SEQ ID NO: 432939 - DNA, 53 bp, Artificial
  Synthetic oligonucleotide
ggttccaagagactgttctcagcatacaagcatgcgtcaagagcaggaaagaa

SEQ ID NO: 432940 - DNA, 55 bp, Artificial
  Synthetic oligonucleotide
ggttccaagttcttttcatggggatccgtgagtctaggattagatgcagagtcca

SEQ ID NO: 432941 - DNA, 55 bp, Artificial
  Synthetic oligonucleotide
ggttccaatacagctgaaatagctactgaaacttggaacgcggtagctaatgatg

SEQ ID NO: 432942 - DNA, 55 bp, Artificial
  Synthetic oligonucleotide
ggttccaatgttttgtgggtggagactgtgttctgacggtttgatcaaggaaccc

SEQ ID NO: 432943 - DNA, 57 bp, Artificial
  Synthetic oligonucleotide
ggttccacaaggacgcacaacatggtcgattcatgggaaaggggagtggatgaccac

SEQ ID NO: 432944 - DNA, 55 bp, Artificial
  Synthetic oligonucleotide
ggttccacactcacaaagaaaggtccagttaatatccctattaggtgaagcagca

SEQ ID NO: 432945 - DNA, 55 bp, Artificial
  Synthetic oligonucleotide
ggttccactctgatagcgaaacccaaatgggaagactctatggagactcaaatcc

SEQ ID NO: 432946 - DNA, 55 bp, Artificial
  Synthetic oligonucleotide
ggttccagaaagtgtcaaacaggcctacataaatctagatagcacaagtgccctc

SEQ ID NO: 432947 - DNA, 55 bp, Artificial
  Synthetic oligonucleotide
ggttccagtgatgagaaaatatcatgcaccagttattggtggggcccctgggatg

SEQ ID NO: 432948 - DNA, 55 bp, Artificial
  Synthetic oligonucleotide
ggttccatccctcttcttacgggaaggaacctcatgcttcacactcccagccctc

SEQ ID NO: 432949 - DNA, 55 bp, Artificial
  Synthetic oligonucleotide
ggttccatggtgtctagtgatactcagatctttaatagacctttctggttgcaac

SEQ ID NO: 432950 - DNA, 59 bp, Artificial
  Synthetic oligonucleotide
ggttccattacgggccgcatccttctgtcataatgtggaaggcagggagtgctgcacag

SEQ ID NO: 432951 - DNA, 55 bp, Artificial
  Synthetic oligonucleotide
ggttccattagctggtctggattattcaacccattgtctggatctaagctacttg

SEQ ID NO: 432952 - DNA, 60 bp, Artificial
  Synthetic oligonucleotide
ggttccattgggaaagtatgcaggacactactggctaagtcagtattcaatagtctgtat

SEQ ID NO: 432953 - DNA, 53 bp, Artificial
  Synthetic oligonucleotide
ggttcccaaaaggaatcgatccattttgaacacgagccaaagggggatacttg

SEQ ID NO: 432954 - DNA, 50 bp, Artificial
  Synthetic oligonucleotide
ggttcccaaatggacttgtctgaccctctgcacatggagggtgatgaagc

SEQ ID NO: 432955 - DNA, 55 bp, Artificial
  Synthetic oligonucleotide
ggttcccaataggaacagccccagtactagggaattacaaggagatatgtgtggc

SEQ ID NO: 432956 - DNA, 55 bp, Artificial
  Synthetic oligonucleotide
ggttcccacgatggaagcagactctcctggatctagaacgctcgtcccgagcctg

SEQ ID NO: 432957 - DNA, 55 bp, Artificial
  Synthetic oligonucleotide
ggttcccagaagagtttgggtatcagtcaggattaccagagaaggaatggaaggc

SEQ ID NO: 432958 - DNA, 50 bp, Artificial
  Synthetic oligonucleotide
ggttcccagagtcgttcgaccccgctgagtttattatgaatgacgggttt

SEQ ID NO: 432959 - DNA, 56 bp, Artificial
  Synthetic oligonucleotide
ggttcccatcaccattgcgcgatcgcccaacgacggggaaatggtcggaagaatgg

SEQ ID NO: 432960 - DNA, 54 bp, Artificial
  Synthetic oligonucleotide
ggttccccatttccgggttcgatagtcggacgagcatcaactccgattacaggc

SEQ ID NO: 432961 - DNA, 52 bp, Artificial
  Synthetic oligonucleotide
ggttcccccgttaattcttacaccaatacgccctacactggggcgctggggc

SEQ ID NO: 432962 - DNA, 55 bp, Artificial
  Synthetic oligonucleotide
ggttccccctggcatacaagtgattttggggtatatgtcaatattctaatatgtc

SEQ ID NO: 432963 - DNA, 55 bp, Artificial
  Synthetic oligonucleotide
ggttcccctgtgggtgaatccatggtcgttaccgactaacagcctgaagtacgaa

SEQ ID NO: 432964 - DNA, 55 bp, Artificial
  Synthetic oligonucleotide
ggttcccgcttgcttggagctatagcacaaggacctgtttgtgctgaagcctcag

SEQ ID NO: 432965 - DNA, 52 bp, Artificial
  Synthetic oligonucleotide
ggttcccggtactgtggttcccggttcacaactacgttattcaactgcggaa

SEQ ID NO: 432966 - DNA, 54 bp, Artificial
  Synthetic oligonucleotide
ggttccctcgtagaagacgctttagacggtcttggagacggagaattagaggcc

SEQ ID NO: 432967 - DNA, 60 bp, Artificial
  Synthetic oligonucleotide
ggttccctgaagagtagatcaatagggagcatcctcatgggtttctcattggacactgat

SEQ ID NO: 432968 - DNA, 60 bp, Artificial
  Synthetic oligonucleotide
ggttcccttaatgtagactttgcttgtgcacctgatggcattccaatgcgctacttcaaa

SEQ ID NO: 432969 - DNA, 52 bp, Artificial
  Synthetic oligonucleotide
ggttccgacgcgagcaaaccccggggattattggattcaggcggcttttccc

SEQ ID NO: 432970 - DNA, 59 bp, Artificial
  Synthetic oligonucleotide
ggttccgagcaagcacttctgttccccggttgcgtcttatatgctgtgtgaacggcaga

SEQ ID NO: 432971 - DNA, 55 bp, Artificial
  Synthetic oligonucleotide
ggttccggctttactacctgggcagattaacgttatgaaagagaacgtgccactg

SEQ ID NO: 432972 - DNA, 57 bp, Artificial
  Synthetic oligonucleotide
ggttccggggactggtagaggagatgatcaagtcccaccgtcatctagccctagacc

SEQ ID NO: 432973 - DNA, 60 bp, Artificial
  Synthetic oligonucleotide
ggttccgtacagcatctccacatagtggtgattttggctgtgggtgtcgctgatcactta

SEQ ID NO: 432974 - DNA, 60 bp, Artificial
  Synthetic oligonucleotide
ggttccgtgattcacagttatgttttgaactatcgacacgtgtcaaggtctaatcagcag

SEQ ID NO: 432975 - DNA, 55 bp, Artificial
  Synthetic oligonucleotide
ggttccgtgtgacaacacgtggaggtatatgaatgataccaatgcagtggatcgg

SEQ ID NO: 432976 - DNA, 52 bp, Artificial
  Synthetic oligonucleotide
ggttcctaaggacttacctgctggtgtgtccgtgaggtttccaggcccccgg

SEQ ID NO: 432977 - DNA, 53 bp, Artificial
  Synthetic oligonucleotide
ggttcctatgttcgttataattatccctacgccaattactttggcaagagggt

SEQ ID NO: 432978 - DNA, 55 bp, Artificial
  Synthetic oligonucleotide
ggttcctatttgaatgagagtgactttagaaatgagtggatcttggaaagtgatc

SEQ ID NO: 432979 - DNA, 60 bp, Artificial
  Synthetic oligonucleotide
ggttcctcacgcgttcgggtggataattgtgattaagcgatcacagccacatattctagg

SEQ ID NO: 432980 - DNA, 58 bp, Artificial
  Synthetic oligonucleotide
ggttcctcctacatgttcaggtatcactaatgtttcccctgaaacaaggcctgcattc

SEQ ID NO: 432981 - DNA, 59 bp, Artificial
  Synthetic oligonucleotide
ggttcctcggtatgggaacacaaatttactcatcccctggatgctgactaatcagagga

SEQ ID NO: 432982 - DNA, 55 bp, Artificial
  Synthetic oligonucleotide
ggttcctgaaggggcacccacgtctgcgcacatcattgcactggctgctgcccaa

SEQ ID NO: 432983 - DNA, 53 bp, Artificial
  Synthetic oligonucleotide
ggttcctgcccttattagggtggtccggtccttaggtggatcgggaagctgta

SEQ ID NO: 432984 - DNA, 55 bp, Artificial
  Synthetic oligonucleotide
ggttccttgagtaacctcgataagatattgcgtgactactggtcacaatcaagcg

SEQ ID NO: 432985 - DNA, 55 bp, Artificial
  Synthetic oligonucleotide
ggttccttgcactacgatatttccttttcggatctgcgtggaaacgctcagagaa

SEQ ID NO: 432986 - DNA, 55 bp, Artificial
  Synthetic oligonucleotide
ggttccttgctacactatcatgcagctggaccacaccgcccctcacctctgggcc

SEQ ID NO: 432987 - DNA, 55 bp, Artificial
  Synthetic oligonucleotide
ggttccttggtatctaggttggtctagacaggaggccacgcggtttctccttaga

SEQ ID NO: 432988 - DNA, 60 bp, Artificial
  Synthetic oligonucleotide
ggttcctttatattcacggatgcttctccatgactagcgtaaagtatcgatctgttgttg

SEQ ID NO: 432989 - DNA, 57 bp, Artificial
  Synthetic oligonucleotide
ggttcctttgtgtacgtagattactgggatgattcacaagcttttaggaacatggtg

SEQ ID NO: 432990 - DNA, 57 bp, Artificial
  Synthetic oligonucleotide
ggttcgaaaaccgatgcctattccgtacacgaaatatgatacgaggactattaggca

SEQ ID NO: 432991 - DNA, 52 bp, Artificial
  Synthetic oligonucleotide
ggttcgacagttaataatggtgtttcgcaagtatattcgtcaactgtacgaa

SEQ ID NO: 432992 - DNA, 55 bp, Artificial
  Synthetic oligonucleotide
ggttcgacgtgtctaagatcaaattggtacaatcctcgagcgtacatgctacggg

SEQ ID NO: 432993 - DNA, 55 bp, Artificial
  Synthetic oligonucleotide
ggttcgagatacctgtgaagcaagaactccttctctcagctttaacactggggac

SEQ ID NO: 432994 - DNA, 60 bp, Artificial
  Synthetic oligonucleotide
ggttcgagatcttctagataccgcctcagctctgtatcgggaagccttagagtctcctga

SEQ ID NO: 432995 - DNA, 55 bp, Artificial
  Synthetic oligonucleotide
ggttcgagattaccagtatcgtgcaatctgggaagcattacgatacaacagacga

SEQ ID NO: 432996 - DNA, 53 bp, Artificial
  Synthetic oligonucleotide
ggttcgaggggacaactcccactccgaagccggagacgagagacagggaacct

SEQ ID NO: 432997 - DNA, 55 bp, Artificial
  Synthetic oligonucleotide
ggttcgaggtaacaccgcaaaacaaaggtgatgcatccgacaattatagatacgc

SEQ ID NO: 432998 - DNA, 54 bp, Artificial
  Synthetic oligonucleotide
ggttcgatataaatactcttaagtgggataacgtagcaccgcttcctataccct

SEQ ID NO: 432999 - DNA, 55 bp, Artificial
  Synthetic oligonucleotide
ggttcgatctatgttgagcctgtctcggcagactatgaggtcggaatcaccatcg

SEQ ID NO: 433000 - DNA, 55 bp, Artificial
  Synthetic oligonucleotide
ggttcgatgcactatgatatcacttacgagacgttaaagtcaaacgcgcaaagga

SEQ ID NO: 433001 - DNA, 55 bp, Artificial
  Synthetic oligonucleotide
ggttcgcactcgagtcaactctattacaaccaaactccgccgaagtgcatgcgat

SEQ ID NO: 433002 - DNA, 55 bp, Artificial
  Synthetic oligonucleotide
ggttcgcagcgtatacgccccacaccgcagctcgtgtaactcgcggccgcagagt

SEQ ID NO: 433003 - DNA, 57 bp, Artificial
  Synthetic oligonucleotide
ggttcgcgcccccttgcaagcccttgctacgagatgaggtgtcgtttagtgtgggac

SEQ ID NO: 433004 - DNA, 60 bp, Artificial
  Synthetic oligonucleotide
ggttcgcgctgtagtgcttggaacggttctattcgctatacgtcatgctgctcacgaagc

SEQ ID NO: 433005 - DNA, 57 bp, Artificial
  Synthetic oligonucleotide
ggttcgcgggtgcattccttcgcggtgtccttcagcaaagggagactcagttgaaaa

SEQ ID NO: 433006 - DNA, 60 bp, Artificial
  Synthetic oligonucleotide
ggttcgcgtcaaatggaatggtcagatataagaaggatgggtgtagaatgtctggagaca

SEQ ID NO: 433007 - DNA, 55 bp, Artificial
  Synthetic oligonucleotide
ggttcgctaggtttgtccttaactttactcagctgatgggaatacccatggaggc

SEQ ID NO: 433008 - DNA, 57 bp, Artificial
  Synthetic oligonucleotide
ggttcgctgcgcctagccccaattgggcaccgtccttgcgctaccgtgtcaaaccga

SEQ ID NO: 433009 - DNA, 55 bp, Artificial
  Synthetic oligonucleotide
ggttcggaacctgaggacgatgatgagaataaccgtgtaaccctcctctctacac

SEQ ID NO: 433010 - DNA, 55 bp, Artificial
  Synthetic oligonucleotide
ggttcggacgatgcagtcaagattaggtggggtgcccaagaagacatggcacgtg

SEQ ID NO: 433011 - DNA, 55 bp, Artificial
  Synthetic oligonucleotide
ggttcggacttagcaatgttcacttcaatcgccaaagggctccatattcactggg

SEQ ID NO: 433012 - DNA, 57 bp, Artificial
  Synthetic oligonucleotide
ggttcggagggagtacaattggtattaatacatccctggactgttgatctaactatg

SEQ ID NO: 433013 - DNA, 50 bp, Artificial
  Synthetic oligonucleotide
ggttcggatacttgagatttatagcaaagtgtctgtggatctactgggag

SEQ ID NO: 433014 - DNA, 54 bp, Artificial
  Synthetic oligonucleotide
ggttcggcgggacgtactgacccggctccgcttcaacgtacgtcgtggacggca

SEQ ID NO: 433015 - DNA, 55 bp, Artificial
  Synthetic oligonucleotide
ggttcgggcaaggctcggcgcgttgatgagctcgaagtctttcctgagggctgat

SEQ ID NO: 433016 - DNA, 55 bp, Artificial
  Synthetic oligonucleotide
ggttcggggagtaaatgagcgagtgttctacaccaacaaccagggcaagttgcct

SEQ ID NO: 433017 - DNA, 55 bp, Artificial
  Synthetic oligonucleotide
ggttcggtacatgcccgagagggacatagcatttataacttgtcctggtgacttg

SEQ ID NO: 433018 - DNA, 52 bp, Artificial
  Synthetic oligonucleotide
ggttcggtacccccgccccgtgtactcccctaccgtgatcgaaagattctca

SEQ ID NO: 433019 - DNA, 48 bp, Artificial
  Synthetic oligonucleotide
ggttcggtagaatgggccctaccgtcccgaaaattccgtttaaagtta

SEQ ID NO: 433020 - DNA, 50 bp, Artificial
  Synthetic oligonucleotide
ggttcggtaggaagttggccaaaggtttccggatataagccacccggtta

SEQ ID NO: 433021 - DNA, 56 bp, Artificial
  Synthetic oligonucleotide
ggttcgtaaagaagaataatagatacccagttatcagtaagacctacaacaacaca

SEQ ID NO: 433022 - DNA, 51 bp, Artificial
  Synthetic oligonucleotide
ggttcgtacttgaatgaaaccagattcagaactcaatggctaagtgaaagt

SEQ ID NO: 433023 - DNA, 57 bp, Artificial
  Synthetic oligonucleotide
ggttcgtagtgaagaggaagtggcacgtagacctcgtctcagacggcaagaaggttg

SEQ ID NO: 433024 - DNA, 53 bp, Artificial
  Synthetic oligonucleotide
ggttcgtataatctggtggatactctagtaaagttgggactgacagatgtgtt

SEQ ID NO: 433025 - DNA, 56 bp, Artificial
  Synthetic oligonucleotide
ggttcgtcaagacgtgcggggcgcctccctgtaacatcgggccaagaggcaacaac

SEQ ID NO: 433026 - DNA, 58 bp, Artificial
  Synthetic oligonucleotide
ggttcgtgactatgttaatatcaaccctagtgaccctcgcatttggtcaaaggtgcgc

SEQ ID NO: 433027 - DNA, 60 bp, Artificial
  Synthetic oligonucleotide
ggttcgtgatcaaatcatgccaaagttgggtgagtggcccaccatgatggatgttgcaac

SEQ ID NO: 433028 - DNA, 55 bp, Artificial
  Synthetic oligonucleotide
ggttcgtgccaacataagtggtggatcaacgcaccgtcacaaatcggcttatatg

SEQ ID NO: 433029 - DNA, 55 bp, Artificial
  Synthetic oligonucleotide
ggttcgtggtgaagaggaagtggtgcgtgaacctggtctccgatggaaggaaggt

SEQ ID NO: 433030 - DNA, 52 bp, Artificial
  Synthetic oligonucleotide
ggttcgttacccgcccaactagtctatgctgcgactgaaatcatggcagact

SEQ ID NO: 433031 - DNA, 56 bp, Artificial
  Synthetic oligonucleotide
ggttcgttgatgaatatctcagatgatcaacttatctcgaacctgcttatgaaaag

SEQ ID NO: 433032 - DNA, 59 bp, Artificial
  Synthetic oligonucleotide
ggttcgtttgttgacgaatccgaagtcgatgattggtatcctgaagacacctctgatgg

SEQ ID NO: 433033 - DNA, 55 bp, Artificial
  Synthetic oligonucleotide
ggttctaaactcccacttgatggaaatgctgatgctagcttatctcgtggtgcac

SEQ ID NO: 433034 - DNA, 55 bp, Artificial
  Synthetic oligonucleotide
ggttctaatactgttcttctgtccaacggtataattcagccaggcctaagacagt

SEQ ID NO: 433035 - DNA, 59 bp, Artificial
  Synthetic oligonucleotide
ggttctacaactggcaccacggagcggtgcagtatagtggaggcagatttaccatcccc

SEQ ID NO: 433036 - DNA, 55 bp, Artificial
  Synthetic oligonucleotide
ggttctacagaagccccgtctgtgactttatagtacactacaacctaatacctcc

SEQ ID NO: 433037 - DNA, 56 bp, Artificial
  Synthetic oligonucleotide
ggttctacagctgcaacactaggagacgcagtaactgaacttaaaaacccaaatgg

SEQ ID NO: 433038 - DNA, 60 bp, Artificial
  Synthetic oligonucleotide
ggttctacagctggttctggcaccagagtctcgagcctcccgtcaactgcaaggactagg

SEQ ID NO: 433039 - DNA, 57 bp, Artificial
  Synthetic oligonucleotide
ggttctacatgcctaggtatggacttcttcggaatttgagggataaaagcttggctc

SEQ ID NO: 433040 - DNA, 53 bp, Artificial
  Synthetic oligonucleotide
ggttctactgctattgatgatcatgaagatatctacagtcaagccgtgaaact

SEQ ID NO: 433041 - DNA, 57 bp, Artificial
  Synthetic oligonucleotide
ggttctacttatgtttatcatcgagtgcctgaacgaatttttacaggattattaaga

SEQ ID NO: 433042 - DNA, 55 bp, Artificial
  Synthetic oligonucleotide
ggttctagtgcttaacccctctgtagcggccacccttgggttcgggtcatacatg

SEQ ID NO: 433043 - DNA, 53 bp, Artificial
  Synthetic oligonucleotide
ggttctatagatataccctaagactacccttcgtaggttgctggtaaggggta

SEQ ID NO: 433044 - DNA, 60 bp, Artificial
  Synthetic oligonucleotide
ggttctatgcattatgacatatctttctcagatttgcgtggaaatgcgcaacggattgtc

SEQ ID NO: 433045 - DNA, 59 bp, Artificial
  Synthetic oligonucleotide
ggttctatgctctcagccaagggacaacgattagagggaaacactcaaatggaacaata

SEQ ID NO: 433046 - DNA, 58 bp, Artificial
  Synthetic oligonucleotide
ggttctcagtaaactcagaaatgcattaaacatgaccacatccagtgataataatgtg

SEQ ID NO: 433047 - DNA, 50 bp, Artificial
  Synthetic oligonucleotide
ggttctcagtacgttaggaaaacgctaagaccaggtcatattagcgtcaa

SEQ ID NO: 433048 - DNA, 55 bp, Artificial
  Synthetic oligonucleotide
ggttctcctttcgctcagttattgcctacagatgcactacaacaaggttctgtct

SEQ ID NO: 433049 - DNA, 54 bp, Artificial
  Synthetic oligonucleotide
ggttctcgcgcctggctagctctgcattcagtggtctctttggtgcacttttgg

SEQ ID NO: 433050 - DNA, 60 bp, Artificial
  Synthetic oligonucleotide
ggttctcgtatgatacccgctgttttgactccacagtcactgagcatgatatccgtacgg

SEQ ID NO: 433051 - DNA, 55 bp, Artificial
  Synthetic oligonucleotide
ggttctcgtttcttcgatttcacttcgaatacttgtagggtatctatgggtgaaa

SEQ ID NO: 433052 - DNA, 59 bp, Artificial
  Synthetic oligonucleotide
ggttctctggtaagaaatcatccgactttgtttcttaggcgattgagagagcacatttc

SEQ ID NO: 433053 - DNA, 54 bp, Artificial
  Synthetic oligonucleotide
ggttctgaacaccgggagcggtcacaagagagtaggtacaacgaaggaggtcct

SEQ ID NO: 433054 - DNA, 60 bp, Artificial
  Synthetic oligonucleotide
ggttctgacatacttgatataacagctgatccaactacagcaccacagactgagaggatg

SEQ ID NO: 433055 - DNA, 60 bp, Artificial
  Synthetic oligonucleotide
ggttctgacgctgtttagccacaatgctgcagattggttcgctgtggtcaggtcttctat

SEQ ID NO: 433056 - DNA, 56 bp, Artificial
  Synthetic oligonucleotide
ggttctgacggctggccattcctatagggagtttaggggcttacgttcactctcca

SEQ ID NO: 433057 - DNA, 55 bp, Artificial
  Synthetic oligonucleotide
ggttctgcaaatgctggtaaacctattcaagaactgcccattacaaggcctaatg

SEQ ID NO: 433058 - DNA, 55 bp, Artificial
  Synthetic oligonucleotide
ggttctgccgttggatgtgaccctgaagttttctggtcaaagatacctctcatgc

SEQ ID NO: 433059 - DNA, 55 bp, Artificial
  Synthetic oligonucleotide
ggttctgctaatatctacctagctcctagacaagaagcgtgtagactcattaacg

SEQ ID NO: 433060 - DNA, 55 bp, Artificial
  Synthetic oligonucleotide
ggttctgctcttgtggtggtatccctctcccgggagaaaataaatgggaggacga

SEQ ID NO: 433061 - DNA, 60 bp, Artificial
  Synthetic oligonucleotide
ggttctggcactgttcagccacaatgctgcagactggttcgctgtgctcaggtcgtttat

SEQ ID NO: 433062 - DNA, 60 bp, Artificial
  Synthetic oligonucleotide
ggttctggcactgtttagccacaatgccgcagactggttcgaagtggtcaggtcttctat

SEQ ID NO: 433063 - DNA, 60 bp, Artificial
  Synthetic oligonucleotide
ggttctggtaagtggtcaggcatcggatcacgcagtgttgtcgccaggtgataacagtcc

SEQ ID NO: 433064 - DNA, 57 bp, Artificial
  Synthetic oligonucleotide
ggttctgtacttgcgaatgggatgatgcctaaagacctagttccttacgggcacttg

SEQ ID NO: 433065 - DNA, 52 bp, Artificial
  Synthetic oligonucleotide
ggttctgtgtcattggcactagttgtattcaacatactgcttcatgttgcat

SEQ ID NO: 433066 - DNA, 55 bp, Artificial
  Synthetic oligonucleotide
ggttctgttcccctcaacaaggtcagctgaactcccaagaattctcgttgatcac

SEQ ID NO: 433067 - DNA, 53 bp, Artificial
  Synthetic oligonucleotide
ggttctgttgcgtgaaacacggggtcacctccccccacatacctctaagggct

SEQ ID NO: 433068 - DNA, 50 bp, Artificial
  Synthetic oligonucleotide
ggttcttaattccacgcgcccgacggaggaagttggggtctgggcaacta

SEQ ID NO: 433069 - DNA, 57 bp, Artificial
  Synthetic oligonucleotide
ggttcttacgtatacgtagattactgggatgattcacaggcttttaggaacatggta

SEQ ID NO: 433070 - DNA, 51 bp, Artificial
  Synthetic oligonucleotide
ggttcttaggtccttccgttgtaatttctagggtccctaggatataaataa

SEQ ID NO: 433071 - DNA, 56 bp, Artificial
  Synthetic oligonucleotide
ggttcttatcgtactggtcttctaagtgagcagtaacggtacgcatcaatttatca

SEQ ID NO: 433072 - DNA, 60 bp, Artificial
  Synthetic oligonucleotide
ggttcttccccagcagttcatacagaaggccagtcggaatatccagtatggtggaggcta

SEQ ID NO: 433073 - DNA, 55 bp, Artificial
  Synthetic oligonucleotide
ggttcttctgtccaactggttctgtagtgactttccaaaattcatggggttcaca

SEQ ID NO: 433074 - DNA, 59 bp, Artificial
  Synthetic oligonucleotide
ggttcttcttgcacagtcaaagtgtgtccattaaatacacaaacgcttggtattggatg

SEQ ID NO: 433075 - DNA, 57 bp, Artificial
  Synthetic oligonucleotide
ggttcttcttgcacagttaaagtgtgtccgttgaatacgcaaacactcggtattgga

SEQ ID NO: 433076 - DNA, 55 bp, Artificial
  Synthetic oligonucleotide
ggttcttctttgagaacctaagatggcggaaccgctggtcgcatagcaacgtggg

SEQ ID NO: 433077 - DNA, 55 bp, Artificial
  Synthetic oligonucleotide
ggttcttgctgccgagggtcgcaaggctaatgactcacacgccgactgctatcag

SEQ ID NO: 433078 - DNA, 60 bp, Artificial
  Synthetic oligonucleotide
ggttcttgggaaagatgcaggtgcattgaccgaagatcctgatgagggcacggctggagt

SEQ ID NO: 433079 - DNA, 55 bp, Artificial
  Synthetic oligonucleotide
ggttcttgtgtcatgcatgtacctgtcaagtgctgatgtagtttggatactcggg

SEQ ID NO: 433080 - DNA, 51 bp, Artificial
  Synthetic oligonucleotide
ggttctttcttcacggagtcggtctaccgtatcggtagtaccacttatctc

SEQ ID NO: 433081 - DNA, 57 bp, Artificial
  Synthetic oligonucleotide
ggttctttgagggtgtagaattccgcattttttgaagcccactgtttaagcgcagca

SEQ ID NO: 433082 - DNA, 52 bp, Artificial
  Synthetic oligonucleotide
ggttcttttcgaggaacaaggaaataggataactaaacggaagttagacatc

SEQ ID NO: 433083 - DNA, 57 bp, Artificial
  Synthetic oligonucleotide
ggttgaaaatgagcacaccggatctttttgctcgattgacgggaaagcaccgataag

SEQ ID NO: 433084 - DNA, 59 bp, Artificial
  Synthetic oligonucleotide
ggttgaaacgctactactcagacctctggctgtcgtacctctattaggcagacaggaac

SEQ ID NO: 433085 - DNA, 48 bp, Artificial
  Synthetic oligonucleotide
ggttgaaaggttaaaacacggaacctttggtcccgtccatttccggaa

SEQ ID NO: 433086 - DNA, 57 bp, Artificial
  Synthetic oligonucleotide
ggttgaaagtgactgatccgttatccgctttagtacttcgagaagcctagtaacatc

SEQ ID NO: 433087 - DNA, 59 bp, Artificial
  Synthetic oligonucleotide
ggttgaacagaatcctaagaggttggaggctgcataccgtgagacttgctcccggcgtg

SEQ ID NO: 433088 - DNA, 55 bp, Artificial
  Synthetic oligonucleotide
ggttgaaccgtatctgaacgtggtagaccctggtcctcgtatacggtggatcctc

SEQ ID NO: 433089 - DNA, 54 bp, Artificial
  Synthetic oligonucleotide
ggttgaacgagtgttttgcgtcgtgcgagacggtaaattgcagcgtcctctaag

SEQ ID NO: 433090 - DNA, 50 bp, Artificial
  Synthetic oligonucleotide
ggttgaacgttgagtcctgattacagggtacagaaactaccgaaacttcg

SEQ ID NO: 433091 - DNA, 59 bp, Artificial
  Synthetic oligonucleotide
ggttgaactcggagtcgtcagacgccgagtcatcttcgttttaactatggcatacacag

SEQ ID NO: 433092 - DNA, 59 bp, Artificial
  Synthetic oligonucleotide
ggttgaacttaagagctcatggtgacttaagactggttttgaggactaaggtgatgtca

SEQ ID NO: 433093 - DNA, 55 bp, Artificial
  Synthetic oligonucleotide
ggttgaagaatcctacagaaataggagatcagtaatctgttatgatctagcctgt

SEQ ID NO: 433094 - DNA, 54 bp, Artificial
  Synthetic oligonucleotide
ggttgaaggaggaatcccatcaggttgctctggaactagcatttttaacactat

SEQ ID NO: 433095 - DNA, 55 bp, Artificial
  Synthetic oligonucleotide
ggttgaaggtggagttccatcagggtgttcaggtaccagcatattcaacactatg

SEQ ID NO: 433096 - DNA, 55 bp, Artificial
  Synthetic oligonucleotide
ggttgaagtcacccgggttgatcccgatgttattatgcaagagtctgaattctcc

SEQ ID NO: 433097 - DNA, 60 bp, Artificial
  Synthetic oligonucleotide
ggttgaatgttgcaattgaaaatggtcgtttgcttgatgtaatagactcatattacttgg

SEQ ID NO: 433098 - DNA, 55 bp, Artificial
  Synthetic oligonucleotide
ggttgaattcacatgcagcataccttaggacggctgcgctgagagaggccaaacg

SEQ ID NO: 433099 - DNA, 55 bp, Artificial
  Synthetic oligonucleotide
ggttgaatttgagtagtatttgtgctgaatctctgatgccgttaattaaagcggc

SEQ ID NO: 433100 - DNA, 56 bp, Artificial
  Synthetic oligonucleotide
ggttgacaaacacgattttgagtcggtaaagtggatacgtaacgtcatggctggaa

SEQ ID NO: 433101 - DNA, 55 bp, Artificial
  Synthetic oligonucleotide
ggttgacaaagaaagggctctgcaccaagaagggaaatgtgaatcgtgcgtctac

SEQ ID NO: 433102 - DNA, 55 bp, Artificial
  Synthetic oligonucleotide
ggttgacaaccgcttgtttgagtgggacagagaggctcgtgcaggaatcccacag

SEQ ID NO: 433103 - DNA, 55 bp, Artificial
  Synthetic oligonucleotide
ggttgacaacgtgatgttcaggtatctgcatgaacgtaatgtcacatcaacctct

SEQ ID NO: 433104 - DNA, 55 bp, Artificial
  Synthetic oligonucleotide
ggttgacaatgccagtggggggccgggcccactattgttgtgggctccgagttcc

SEQ ID NO: 433105 - DNA, 55 bp, Artificial
  Synthetic oligonucleotide
ggttgacacctcgatgcatggtcgactatccataccggctttggcattacccatg

SEQ ID NO: 433106 - DNA, 51 bp, Artificial
  Synthetic oligonucleotide
ggttgacagaaccaagctcgaggatccccccaccggggggatccccgcggg

SEQ ID NO: 433107 - DNA, 53 bp, Artificial
  Synthetic oligonucleotide
ggttgaccaccctcatttacttccatttgtgggccactgcttttgttgcggtg

SEQ ID NO: 433108 - DNA, 53 bp, Artificial
  Synthetic oligonucleotide
ggttgacccatcgagttggtaagaggttttgtgttaagtccgtgtacgtgttg

SEQ ID NO: 433109 - DNA, 56 bp, Artificial
  Synthetic oligonucleotide
ggttgacccccaggtgcttggtagactacccttataggctgtggcattatccgtgc

SEQ ID NO: 433110 - DNA, 55 bp, Artificial
  Synthetic oligonucleotide
ggttgaccgaaccttcgcaatatccataggaggctgaaagttatatacggtcggt

SEQ ID NO: 433111 - DNA, 60 bp, Artificial
  Synthetic oligonucleotide
ggttgacctgcagcaagaatggtggctctcaaggggtctatgttgactttaatggactag

SEQ ID NO: 433112 - DNA, 60 bp, Artificial
  Synthetic oligonucleotide
ggttgacgaatcagacaagttgttttctgccgcaatattcatctttaatgttgctacata

SEQ ID NO: 433113 - DNA, 57 bp, Artificial
  Synthetic oligonucleotide
ggttgacgtacagttacgacattgaaggaaagttgagtgtctctattagttcaattg

SEQ ID NO: 433114 - DNA, 55 bp, Artificial
  Synthetic oligonucleotide
ggttgacgtgtcatacgacggccacgtgattccagtgatattagacttcaccacg

SEQ ID NO: 433115 - DNA, 50 bp, Artificial
  Synthetic oligonucleotide
ggttgactatactccataaatggaaacgcggtagcactttcgcactaccg

SEQ ID NO: 433116 - DNA, 51 bp, Artificial
  Synthetic oligonucleotide
ggttgactcgaacaaaggtttccaagagaattattgtggaacctgacactc

SEQ ID NO: 433117 - DNA, 56 bp, Artificial
  Synthetic oligonucleotide
ggttgacttcaacgaagctctattttcgaaatacaaagggaatgttgactgtccta

SEQ ID NO: 433118 - DNA, 55 bp, Artificial
  Synthetic oligonucleotide
ggttgagatcaaaggcagaggtaaggccaaacttggtaagcgtgagttcgcttgg

SEQ ID NO: 433119 - DNA, 56 bp, Artificial
  Synthetic oligonucleotide
ggttgagcagaaccctaagaggctggaggcggcgtaccgtgagacctgttcccgtc

SEQ ID NO: 433120 - DNA, 56 bp, Artificial
  Synthetic oligonucleotide
ggttgagcaggagtacaattactgttaatacattcttgggccgcagttttaaccaa

SEQ ID NO: 433121 - DNA, 59 bp, Artificial
  Synthetic oligonucleotide
ggttgagcatgatgcgtattgttgttttgaactttggccaccggatgtggtgttggtac

SEQ ID NO: 433122 - DNA, 59 bp, Artificial
  Synthetic oligonucleotide
ggttgagcctaacctatccagttcatatcagaagtacgaatgaagacagtgtgggtaag

SEQ ID NO: 433123 - DNA, 52 bp, Artificial
  Synthetic oligonucleotide
ggttgagcctgaaccaatattgtccaagtgtatggtgcctgagtttgacgcc

SEQ ID NO: 433124 - DNA, 54 bp, Artificial
  Synthetic oligonucleotide
ggttgagcgcgttttcctctcggcgcagctcccccttccgggactggaaccgac

SEQ ID NO: 433125 - DNA, 55 bp, Artificial
  Synthetic oligonucleotide
ggttgagctcgttcatatagttcgtacgggttgatctgtgtaccttcacatgacc

SEQ ID NO: 433126 - DNA, 55 bp, Artificial
  Synthetic oligonucleotide
ggttgagctctggccaaaggtaacctaccactcccctagttatgtttatggccag

SEQ ID NO: 433127 - DNA, 51 bp, Artificial
  Synthetic oligonucleotide
ggttgaggaagaggaagaagaggaagacgaaaagccgaaaccaaaacgtaa

SEQ ID NO: 433128 - DNA, 58 bp, Artificial
  Synthetic oligonucleotide
ggttgaggagtatctgcctgttacagggaggcatatggacggattgtctaaaaactac

SEQ ID NO: 433129 - DNA, 60 bp, Artificial
  Synthetic oligonucleotide
ggttgagggccaaatgtcttttgatcaatcagtggtagcaattatgtcaaaatgtaaagc

SEQ ID NO: 433130 - DNA, 55 bp, Artificial
  Synthetic oligonucleotide
ggttgagggtcttgctgatggcggccgtaggagagagggctgtcatctaggcagg

SEQ ID NO: 433131 - DNA, 56 bp, Artificial
  Synthetic oligonucleotide
ggttgagtcatcccttggccgtttagcgattaacgcgactggttctaccgcagtcg

SEQ ID NO: 433132 - DNA, 60 bp, Artificial
  Synthetic oligonucleotide
ggttgagtcgttgtccgcgtctagtggtcgtgtggtcgggtcgatgcgcatcgactgtga

SEQ ID NO: 433133 - DNA, 55 bp, Artificial
  Synthetic oligonucleotide
ggttgagtctttcctagttcataagatggtggatgacctagaactgaagagaggc

SEQ ID NO: 433134 - DNA, 55 bp, Artificial
  Synthetic oligonucleotide
ggttgagttgaacccagatttgagacctataatcagccgtgattctggcagggct

SEQ ID NO: 433135 - DNA, 60 bp, Artificial
  Synthetic oligonucleotide
ggttgataagactagaggcttggccagaatgagtagtgatgagtcatatagattctttct

SEQ ID NO: 433136 - DNA, 55 bp, Artificial
  Synthetic oligonucleotide
ggttgatacgccaactcttgtgaggaaagtttgctatgcgagctctgtgactgga

SEQ ID NO: 433137 - DNA, 55 bp, Artificial
  Synthetic oligonucleotide
ggttgatagaacaggagatggttaaacgagaacatttcagagcattggtgagcac

SEQ ID NO: 433138 - DNA, 57 bp, Artificial
  Synthetic oligonucleotide
ggttgatagttactcggcggtgaatagatgatcctgaagtaaagttccttcgtcgag

SEQ ID NO: 433139 - DNA, 55 bp, Artificial
  Synthetic oligonucleotide
ggttgatataatgcaagctctactgggtcaagttggaggtcctcgatgtccaacc

SEQ ID NO: 433140 - DNA, 57 bp, Artificial
  Synthetic oligonucleotide
ggttgatccgagataggagacccaataaggatcctttgacgtttgcacaggccttta

SEQ ID NO: 433141 - DNA, 58 bp, Artificial
  Synthetic oligonucleotide
ggttgatccgcggtatgaagggtggaaccaacgtgaggctataagagccaagaagcga

SEQ ID NO: 433142 - DNA, 56 bp, Artificial
  Synthetic oligonucleotide
ggttgatgagaaatggacggttctggtgctcgagtatcttgaaataaaggggattt

SEQ ID NO: 433143 - DNA, 56 bp, Artificial
  Synthetic oligonucleotide
ggttgatgatggattcctggatgtttggacatacaatgccgaactgctcgtcctac

SEQ ID NO: 433144 - DNA, 60 bp, Artificial
  Synthetic oligonucleotide
ggttgatgcgtatatcgctcggcatcccagatcttgcgaacgccttgtccgcatatgtgt

SEQ ID NO: 433145 - DNA, 59 bp, Artificial
  Synthetic oligonucleotide
ggttgatggacgtacacgaggtcgattaggacgatttcctggtgccgcggtgtgatggc

SEQ ID NO: 433146 - DNA, 55 bp, Artificial
  Synthetic oligonucleotide
ggttgatggatacaataatagagtgatgtggggcaagtgtgcgcacttaagcatt

SEQ ID NO: 433147 - DNA, 60 bp, Artificial
  Synthetic oligonucleotide
ggttgatggatcgttgggcttcatttatatcgatagacataagctggttaacaagagtga

SEQ ID NO: 433148 - DNA, 55 bp, Artificial
  Synthetic oligonucleotide
ggttgatggatgtaggatgagtggagacgtgaacactgcaatgggcaattgtctc

SEQ ID NO: 433149 - DNA, 55 bp, Artificial
  Synthetic oligonucleotide
ggttgatgtctgaagagagtttcaatgattgggccgctcaacagttgccctctac

SEQ ID NO: 433150 - DNA, 55 bp, Artificial
  Synthetic oligonucleotide
ggttgatgtttacagggatgagacgtcagcgcagataattgaaatcgagcggagc

SEQ ID NO: 433151 - DNA, 55 bp, Artificial
  Synthetic oligonucleotide
ggttgattcgagataggaggcccaataaggaccctctgacgtttgtacaggcctt

SEQ ID NO: 433152 - DNA, 55 bp, Artificial
  Synthetic oligonucleotide
ggttgattcgatcgaatggtcggccggcgagaacacggtgctgcgggaatacccg

SEQ ID NO: 433153 - DNA, 55 bp, Artificial
  Synthetic oligonucleotide
ggttgattcttcttctcgtatctgacgggttccaggggtctgagattctagcatc

SEQ ID NO: 433154 - DNA, 60 bp, Artificial
  Synthetic oligonucleotide
ggttgattgtgagccacggtcaggaatagacactagcgcctattacgttatgtcagttgg

SEQ ID NO: 433155 - DNA, 54 bp, Artificial
  Synthetic oligonucleotide
ggttgatttagtaactaatttgacatggtacaagaacacgtacattaacggtaa

SEQ ID NO: 433156 - DNA, 54 bp, Artificial
  Synthetic oligonucleotide
ggttgattttgaaggagtgacgattttatctaatagacgttttacgtgttggtc

SEQ ID NO: 433157 - DNA, 59 bp, Artificial
  Synthetic oligonucleotide
ggttgcaaccctgacgtccactggaccgagttcttctacaagttctctgagttctcaca

SEQ ID NO: 433158 - DNA, 56 bp, Artificial
  Synthetic oligonucleotide
ggttgcaacttcgtcgtgcttgggtgaactacgataagtcaggtaacttccgagtc

SEQ ID NO: 433159 - DNA, 57 bp, Artificial
  Synthetic oligonucleotide
ggttgcaattgcatttgatcggaatagtgaattccgcttgttttgtgtccccctccg

SEQ ID NO: 433160 - DNA, 60 bp, Artificial
  Synthetic oligonucleotide
ggttgcacatctagttcattcgaccattatcgtttagcactcagcacgatcaagggtgtg

SEQ ID NO: 433161 - DNA, 58 bp, Artificial
  Synthetic oligonucleotide
ggttgcaccctcagacagtactgcgcctactatgccaagcatgtttggaaccttatgt

SEQ ID NO: 433162 - DNA, 55 bp, Artificial
  Synthetic oligonucleotide
ggttgcacctttatcgctaacaattttgattgccgttacatggtctacaacgctc

SEQ ID NO: 433163 - DNA, 55 bp, Artificial
  Synthetic oligonucleotide
ggttgcacgcaaccgtaatgctgccgtataatagccgtaactcccacgcacaccc

SEQ ID NO: 433164 - DNA, 55 bp, Artificial
  Synthetic oligonucleotide
ggttgcactctaaagttagaaggctgagacgctatagatgctcagtgtatgggga

SEQ ID NO: 433165 - DNA, 57 bp, Artificial
  Synthetic oligonucleotide
ggttgcagatgtggtaagtaccccaatctaaagaaaccaacagtttggcgcagagga

SEQ ID NO: 433166 - DNA, 55 bp, Artificial
  Synthetic oligonucleotide
ggttgcagcagcttgttaccattttagttccacggcaaaaggattcacagagatg

SEQ ID NO: 433167 - DNA, 55 bp, Artificial
  Synthetic oligonucleotide
ggttgcagcattcgaggacgtcgttggaggtcgcggcgtgagttttgagtctccg

SEQ ID NO: 433168 - DNA, 55 bp, Artificial
  Synthetic oligonucleotide
ggttgcagcttagtgccttgtgcctgtccaataaactgttttatacagggtgcca

SEQ ID NO: 433169 - DNA, 55 bp, Artificial
  Synthetic oligonucleotide
ggttgcaggcccgcgacaggagcatctcgctgactctactggctgttggagggat

SEQ ID NO: 433170 - DNA, 52 bp, Artificial
  Synthetic oligonucleotide
ggttgcagggccgttaggcccgagagaccgaccagcccggagggggtagtta

SEQ ID NO: 433171 - DNA, 59 bp, Artificial
  Synthetic oligonucleotide
ggttgcaggttttacacaagttcagtgctactgtcaccggtggacaatatgcgtctagg

SEQ ID NO: 433172 - DNA, 60 bp, Artificial
  Synthetic oligonucleotide
ggttgcatatacattgcgcactgatccttgttcgttaccaagaacaatagctataatcaa

SEQ ID NO: 433173 - DNA, 60 bp, Artificial
  Synthetic oligonucleotide
ggttgcatcactactcccgaggggatagtagagtgcacagctgctgtcctattttaggac

SEQ ID NO: 433174 - DNA, 56 bp, Artificial
  Synthetic oligonucleotide
ggttgccaaaggatcgtacaacaatacaagcggagaacaaatgctaataatttggg

SEQ ID NO: 433175 - DNA, 55 bp, Artificial
  Synthetic oligonucleotide
ggttgccaacattactttggcagctgcaggagcgtttagtttcacaacacaaccg

SEQ ID NO: 433176 - DNA, 59 bp, Artificial
  Synthetic oligonucleotide
ggttgccaagcgctggtccattgtaccttcctcctgcaaaacctactgcacgagtatta

SEQ ID NO: 433177 - DNA, 55 bp, Artificial
  Synthetic oligonucleotide
ggttgccaatcgagatgaatgcacgtgaattgggtagagtcaactatcagtgtgc

SEQ ID NO: 433178 - DNA, 56 bp, Artificial
  Synthetic oligonucleotide
ggttgccacacctttaattacacttttattgcactgttactcatcttattttatac

SEQ ID NO: 433179 - DNA, 55 bp, Artificial
  Synthetic oligonucleotide
ggttgccacataaacaaccaacctattgcaacttcatccatggtaagtgttggtg

SEQ ID NO: 433180 - DNA, 60 bp, Artificial
  Synthetic oligonucleotide
ggttgccaccaatgcagaatacaaggaatatagttccagttgcgctatcatctagatcag

SEQ ID NO: 433181 - DNA, 51 bp, Artificial
  Synthetic oligonucleotide
ggttgccaccccaggacttaggggaggagttgttcccccaccgaccgagcc

SEQ ID NO: 433182 - DNA, 55 bp, Artificial
  Synthetic oligonucleotide
ggttgccagtatcccggaacacgctaatttttaatagatagctggggaaacgcga

SEQ ID NO: 433183 - DNA, 56 bp, Artificial
  Synthetic oligonucleotide
ggttgccctaccctactccacctgttagtgatatctgggtgttaccaccgccctca

SEQ ID NO: 433184 - DNA, 60 bp, Artificial
  Synthetic oligonucleotide
ggttgccctggtcgatcccaacatgccatctgaaaagcaagtcattctgaagggtcaggg

SEQ ID NO: 433185 - DNA, 55 bp, Artificial
  Synthetic oligonucleotide
ggttgcccttagcaacctgctcaattgtggccggtgccacagcctctagcacaca

SEQ ID NO: 433186 - DNA, 60 bp, Artificial
  Synthetic oligonucleotide
ggttgcctaggaccagcaactggtttccttgtcagatcaatacttgtgttgtcccatgac

SEQ ID NO: 433187 - DNA, 57 bp, Artificial
  Synthetic oligonucleotide
ggttgcgaacgggttgtccatccagcttacggctaaaatggtcagtcatgccccaaa

SEQ ID NO: 433188 - DNA, 60 bp, Artificial
  Synthetic oligonucleotide
ggttgcgaactcgtgcaagcagaatccgacgcagcaggatcagtggacgtggttgggtct

SEQ ID NO: 433189 - DNA, 55 bp, Artificial
  Synthetic oligonucleotide
ggttgcgagatatggccgctgcgggagggtttgatatacacgcagtttacccaca

SEQ ID NO: 433190 - DNA, 54 bp, Artificial
  Synthetic oligonucleotide
ggttgcgattaggtacacgtacctaccgtcttgtcccactactacgtccggcgc

SEQ ID NO: 433191 - DNA, 60 bp, Artificial
  Synthetic oligonucleotide
ggttgcgcattgaagaggtcggcaagatccatgccgtgtgagtacttggaatcttgcttg

SEQ ID NO: 433192 - DNA, 56 bp, Artificial
  Synthetic oligonucleotide
ggttgcggatgatgcatccaacgtattagggcctaattgttatgccacaacatctg

SEQ ID NO: 433193 - DNA, 50 bp, Artificial
  Synthetic oligonucleotide
ggttgcggtacgcggaacgtcccacgctagggcgtatggcgtccacttcc

SEQ ID NO: 433194 - DNA, 57 bp, Artificial
  Synthetic oligonucleotide
ggttgcgtacatgttagagagagaacttgtccgaaaaacgagatttctcccagttgc

SEQ ID NO: 433195 - DNA, 55 bp, Artificial
  Synthetic oligonucleotide
ggttgcgttagactaccacttcgttgccaccgctgctgcttgtaaatacagcagt

SEQ ID NO: 433196 - DNA, 60 bp, Artificial
  Synthetic oligonucleotide
ggttgctaaagcagcaactcagcgtcctaacatcatggcgtatgtgcacgaaggggaagg

SEQ ID NO: 433197 - DNA, 55 bp, Artificial
  Synthetic oligonucleotide
ggttgctaaatttccagtatatttctggttggtgtacgacaagaaccctggagac

SEQ ID NO: 433198 - DNA, 55 bp, Artificial
  Synthetic oligonucleotide
ggttgctagacaagaagaagcatccaatttgatgacctctgtgtcagaaggtggg

SEQ ID NO: 433199 - DNA, 54 bp, Artificial
  Synthetic oligonucleotide
ggttgctataggaccaaataagggtttggccgaacaaggacctccaatccaaga

SEQ ID NO: 433200 - DNA, 59 bp, Artificial
  Synthetic oligonucleotide
ggttgctattaacaagagatggtggtaataatgaaagcaagcccaccgagaccttcaga

SEQ ID NO: 433201 - DNA, 60 bp, Artificial
  Synthetic oligonucleotide
ggttgctcctgaatcaataccttgacttgttacgagtaattgagatgctatcaacttggg

SEQ ID NO: 433202 - DNA, 55 bp, Artificial
  Synthetic oligonucleotide
ggttgctccttgacgcggcgactaccccgggtgggatagccccgcctaggacgca

SEQ ID NO: 433203 - DNA, 55 bp, Artificial
  Synthetic oligonucleotide
ggttgctcggtctccattaacaggcatactactgttaaagaaccctccctattca

SEQ ID NO: 433204 - DNA, 55 bp, Artificial
  Synthetic oligonucleotide
ggttgctcgtagtagaactatgcaacgatcgaaaaggcttctacttaaatgctac

SEQ ID NO: 433205 - DNA, 55 bp, Artificial
  Synthetic oligonucleotide
ggttgctctcaccaacagcattaaccccgcatccctggcgttggtgcgcatttcc

SEQ ID NO: 433206 - DNA, 58 bp, Artificial
  Synthetic oligonucleotide
ggttgctgacttttgtggtcggtctgttgttcttgggccatctattcagggtgtcgta

SEQ ID NO: 433207 - DNA, 55 bp, Artificial
  Synthetic oligonucleotide
ggttgctgcctgaattggctatggtgtcttatgtgccagaggaggttgttgcagg

SEQ ID NO: 433208 - DNA, 56 bp, Artificial
  Synthetic oligonucleotide
ggttgctgggccgacgcagggtgatgtccccgtgctcacacctccgccaggtcgat

SEQ ID NO: 433209 - DNA, 58 bp, Artificial
  Synthetic oligonucleotide
ggttgctggtcaggaaatccccatctacgcaatggagtctttccgtccaccagttgac

SEQ ID NO: 433210 - DNA, 51 bp, Artificial
  Synthetic oligonucleotide
ggttgctgtcccatacgaccccagtcaggctatcaaatgtctgaaggttct

SEQ ID NO: 433211 - DNA, 55 bp, Artificial
  Synthetic oligonucleotide
ggttgctgtcccgtgggatccgactcgggtggtggataggttcctggaggaacag

SEQ ID NO: 433212 - DNA, 60 bp, Artificial
  Synthetic oligonucleotide
ggttgctgtcgcagtggtgctatttacgttgtccaggagcacattaccacaggtgggtga

SEQ ID NO: 433213 - DNA, 55 bp, Artificial
  Synthetic oligonucleotide
ggttgcttgcaaacaacgacaaggtggccagactcatccaagatgatatcaacag

SEQ ID NO: 433214 - DNA, 55 bp, Artificial
  Synthetic oligonucleotide
ggttggaaagacttagagttgtcatgggagcctgattatatctataaagcaacac

SEQ ID NO: 433215 - DNA, 58 bp, Artificial
  Synthetic oligonucleotide
ggttggaaatttaactttatgaagtatcaagacagacaaattgtcagcacactttaca

SEQ ID NO: 433216 - DNA, 60 bp, Artificial
  Synthetic oligonucleotide
ggttggaagagcaagcggatttacaagccatatatcatgatgttgatttaggacgtggta

SEQ ID NO: 433217 - DNA, 58 bp, Artificial
  Synthetic oligonucleotide
ggttggacacagaacagtaaagaccaaatcagaaggcaagtgattattgataacctaa

SEQ ID NO: 433218 - DNA, 49 bp, Artificial
  Synthetic oligonucleotide
ggttggactaattggtacctttacaggaaccgaaaaaacaaatcggaat

SEQ ID NO: 433219 - DNA, 59 bp, Artificial
  Synthetic oligonucleotide
ggttggagagcggtcaattgaacatagactgcgaggtgactaccgtgtgtattacccta

SEQ ID NO: 433220 - DNA, 50 bp, Artificial
  Synthetic oligonucleotide
ggttggagcctgaggatgattgggaggtagccatcaggaattatgctaag

SEQ ID NO: 433221 - DNA, 55 bp, Artificial
  Synthetic oligonucleotide
ggttggagctcacccgagatctattaatgataaccccaatgttttgcatcggtgc

SEQ ID NO: 433222 - DNA, 55 bp, Artificial
  Synthetic oligonucleotide
ggttggaggccctcgatctgacgactagcgcagggtacccgtacgttgcactagg

SEQ ID NO: 433223 - DNA, 55 bp, Artificial
  Synthetic oligonucleotide
ggttggaggcgagcttaaatgttctgatgactgatgtacgagagcgtgtgtcgac

SEQ ID NO: 433224 - DNA, 60 bp, Artificial
  Synthetic oligonucleotide
ggttggaggctgctagcgcctataacagcttatgcgcagcagacacgggggcttctcggc

SEQ ID NO: 433225 - DNA, 59 bp, Artificial
  Synthetic oligonucleotide
ggttggaggctggtgagggatcctttcaaagctttgtctggttttggttgctctcatgc

SEQ ID NO: 433226 - DNA, 55 bp, Artificial
  Synthetic oligonucleotide
ggttggagggtattacaaaggcacaagcagatacaatgacaatcttcaagcttcc

SEQ ID NO: 433227 - DNA, 55 bp, Artificial
  Synthetic oligonucleotide
ggttggagtgatcgtaccaacttttgagagtgtggagtacagatggaggagcctg

SEQ ID NO: 433228 - DNA, 60 bp, Artificial
  Synthetic oligonucleotide
ggttggataagcctcgtcacatgcgtatggatgagttctgcaatgaatttatcgaaccag

SEQ ID NO: 433229 - DNA, 55 bp, Artificial
  Synthetic oligonucleotide
ggttggatatactacggtggaacttggcacgaatttggtctcacggatactgggg

SEQ ID NO: 433230 - DNA, 59 bp, Artificial
  Synthetic oligonucleotide
ggttggatatagcccaatttctcaagatttcatccattcccaatagctgggacccacca

SEQ ID NO: 433231 - DNA, 55 bp, Artificial
  Synthetic oligonucleotide
ggttggatgctatgggattacttcacaagagttatacgtgaaccagtatcaactc

SEQ ID NO: 433232 - DNA, 54 bp, Artificial
  Synthetic oligonucleotide
ggttggatggcctagcccccctggaactaaatctctggagccgtgcacgtgtgg

SEQ ID NO: 433233 - DNA, 55 bp, Artificial
  Synthetic oligonucleotide
ggttggatgttacctgttgaggttaggcatattgaaattaagcgtgaatgtgccc

SEQ ID NO: 433234 - DNA, 60 bp, Artificial
  Synthetic oligonucleotide
ggttggattggcagactcttgcgaaagtgtacgtgggtagatctctatccacattcttgt

SEQ ID NO: 433235 - DNA, 55 bp, Artificial
  Synthetic oligonucleotide
ggttggcaaaatggctaggttcagtgtaccctttataggtattgcatcagcttac

SEQ ID NO: 433236 - DNA, 55 bp, Artificial
  Synthetic oligonucleotide
ggttggcaatttgaaccaccttccgatttagatttcgatacttttgcgaggacgc

SEQ ID NO: 433237 - DNA, 55 bp, Artificial
  Synthetic oligonucleotide
ggttggcacactgccaagatcaccaagcatgtgcgcggccatcttgcttccaaac

SEQ ID NO: 433238 - DNA, 57 bp, Artificial
  Synthetic oligonucleotide
ggttggcagggctctatacttcgtgcgtggattcgtacgactaaaatagttggtgac

SEQ ID NO: 433239 - DNA, 55 bp, Artificial
  Synthetic oligonucleotide
ggttggcagggttgtccgatttgtacagcaagtaccgttggcgcaagctccggtt

SEQ ID NO: 433240 - DNA, 55 bp, Artificial
  Synthetic oligonucleotide
ggttggcagtttgaacctccctccgatttagatttcgacacttttgcgcgtacgc

SEQ ID NO: 433241 - DNA, 52 bp, Artificial
  Synthetic oligonucleotide
ggttggccccgccccctttaaacgtgggtccgcgcactacttatgtcggcca

SEQ ID NO: 433242 - DNA, 55 bp, Artificial
  Synthetic oligonucleotide
ggttggcctacaaagtggcagctgaaggcatcaactatgcagacagaaggtggtg

SEQ ID NO: 433243 - DNA, 55 bp, Artificial
  Synthetic oligonucleotide
ggttggcgcatacgacatcgtatggataccgtgcagtagtcgtgtcctggctccc

SEQ ID NO: 433244 - DNA, 59 bp, Artificial
  Synthetic oligonucleotide
ggttggctgccgtactgtgagtgcctacgtctgtgtgaccggtaccctcaccgtgtgcc

SEQ ID NO: 433245 - DNA, 58 bp, Artificial
  Synthetic oligonucleotide
ggttggctgtacccaactgagcaggagtataccatcggttataatgacgatggtttgg

SEQ ID NO: 433246 - DNA, 56 bp, Artificial
  Synthetic oligonucleotide
ggttgggaaaccaaggtttctcccagatctgtatgactacaaagaagataggttca

SEQ ID NO: 433247 - DNA, 55 bp, Artificial
  Synthetic oligonucleotide
ggttgggaaatacttgaaaccgtacgagcaccatttatatcgggcaattgacgct

SEQ ID NO: 433248 - DNA, 55 bp, Artificial
  Synthetic oligonucleotide
ggttgggaagcccttaagtatctaagaagtcttgtgcagtattggggtcaggaac

SEQ ID NO: 433249 - DNA, 60 bp, Artificial
  Synthetic oligonucleotide
ggttgggaatgctattctttgggattctaagtgcagcaggtagcactatgggcgcagcgg

SEQ ID NO: 433250 - DNA, 55 bp, Artificial
  Synthetic oligonucleotide
ggttgggactaacttccaagagcaaagcacgagaagcacagtatctgaaacgagc

SEQ ID NO: 433251 - DNA, 56 bp, Artificial
  Synthetic oligonucleotide
ggttgggccaataactatggcaggtcttattaacttaagtagcacccccacaagca

SEQ ID NO: 433252 - DNA, 55 bp, Artificial
  Synthetic oligonucleotide
ggttgggcgaagagcaacagccattctaatgaaagcaaccagaaggctgatccaa

SEQ ID NO: 433253 - DNA, 55 bp, Artificial
  Synthetic oligonucleotide
ggttgggcggagagcaacagctatcctgagaaaagcaactagaaggctgattcag

SEQ ID NO: 433254 - DNA, 60 bp, Artificial
  Synthetic oligonucleotide
ggttggggagatcctatcactcattggagccacggacaaaatcagtggcccctctcatgc

SEQ ID NO: 433255 - DNA, 55 bp, Artificial
  Synthetic oligonucleotide
ggttggggcagaccccttgtccaagacgtcgatctggcgtcgggctcaaaaggcc

SEQ ID NO: 433256 - DNA, 60 bp, Artificial
  Synthetic oligonucleotide
ggttgggggctttaatgccgtaaagagcatcataaccacagtgcagggcgctagcgcttg

SEQ ID NO: 433257 - DNA, 51 bp, Artificial
  Synthetic oligonucleotide
ggttggggtggcatttgcaaatggaagttaaacaaaggggaaccccgatcc

SEQ ID NO: 433258 - DNA, 55 bp, Artificial
  Synthetic oligonucleotide
ggttgggtaacagccgcaataggaggactagtagctgtaggggtaaacttgtgga

SEQ ID NO: 433259 - DNA, 55 bp, Artificial
  Synthetic oligonucleotide
ggttgggtcacaactcccatgtgagcccgaaccggatgtatcagtgcttacttcc

SEQ ID NO: 433260 - DNA, 54 bp, Artificial
  Synthetic oligonucleotide
ggttgggtcagttcttcgaaagtggagaaaagcttgtctaaatccaggatagtt

SEQ ID NO: 433261 - DNA, 57 bp, Artificial
  Synthetic oligonucleotide
ggttgggtccaggattcagcaaccgcctaatgggcttaggcttctcaacagaccaaa

SEQ ID NO: 433262 - DNA, 53 bp, Artificial
  Synthetic oligonucleotide
ggttgggtgggtcaaatcaaacatacaatagctggggtaggtaagtttactaa

SEQ ID NO: 433263 - DNA, 55 bp, Artificial
  Synthetic oligonucleotide
ggttgggtttattgtcacgcagatggatcacagtttgatagctctctcacaccat

SEQ ID NO: 433264 - DNA, 55 bp, Artificial
  Synthetic oligonucleotide
ggttggtacggttttaggcatctaaattctgagggctcaggacaagcagcagacc

SEQ ID NO: 433265 - DNA, 55 bp, Artificial
  Synthetic oligonucleotide
ggttggtagcttctagattaagagctgaatcatttagtggtggatattctgctga

SEQ ID NO: 433266 - DNA, 55 bp, Artificial
  Synthetic oligonucleotide
ggttggtattaagtccaacaaagatgaagataggaacaagacaaatagattttct

SEQ ID NO: 433267 - DNA, 55 bp, Artificial
  Synthetic oligonucleotide
ggttggtcacatgggacgatgatttcaacgcttccttgtctgacctccccaacga

SEQ ID NO: 433268 - DNA, 54 bp, Artificial
  Synthetic oligonucleotide
ggttggtcagggaccgtaggccttatggtattcctatggatttcggacaagtgt

SEQ ID NO: 433269 - DNA, 60 bp, Artificial
  Synthetic oligonucleotide
ggttggtcgctcagctattccccatagtagacctggcagatgaggctagaaataccccac

SEQ ID NO: 433270 - DNA, 58 bp, Artificial
  Synthetic oligonucleotide
ggttggtcgtgaagaattctcgcgaagacaagcgagcgttaggctactgcacgaagaa

SEQ ID NO: 433271 - DNA, 59 bp, Artificial
  Synthetic oligonucleotide
ggttggtcgttcggctgtaccccacagtagacctggcagatgaggctagatgttcccca

SEQ ID NO: 433272 - DNA, 57 bp, Artificial
  Synthetic oligonucleotide
ggttggtgacgccttatcgtactacgtggactataaccgcagtcatagagttgtatt

SEQ ID NO: 433273 - DNA, 55 bp, Artificial
  Synthetic oligonucleotide
ggttggtgccctttatcaaggtcttgtggaaggagcaataattagtaaagaaggc

SEQ ID NO: 433274 - DNA, 57 bp, Artificial
  Synthetic oligonucleotide
ggttggtgcgatgtcaggtgcgggaaacacgaagttgacgctaccagttgtggaaaa

SEQ ID NO: 433275 - DNA, 55 bp, Artificial
  Synthetic oligonucleotide
ggttggtgcgcgtcacgacgcaaagggttacttgttcacgctcctggcgaacgct

SEQ ID NO: 433276 - DNA, 55 bp, Artificial
  Synthetic oligonucleotide
ggttggtggatgatcaagtcgaaaagcgccactgggacgcggatgcgtgtgttat

SEQ ID NO: 433277 - DNA, 55 bp, Artificial
  Synthetic oligonucleotide
ggttggtggtggaagttgcctgactgccttaaggatatggggctctttggtcaga

SEQ ID NO: 433278 - DNA, 58 bp, Artificial
  Synthetic oligonucleotide
ggttggtgtatgacgcacaacccagtggtcaggtaccagcggtaactgacatatttcc

SEQ ID NO: 433279 - DNA, 55 bp, Artificial
  Synthetic oligonucleotide
ggttggtgtgtctacaggtagtttcaataatcaaacagaatttcaatacttgggg

SEQ ID NO: 433280 - DNA, 59 bp, Artificial
  Synthetic oligonucleotide
ggttggttaccgcttgatgtgcgtgagaaattcttgcgcggccatttggggcctgctgg

SEQ ID NO: 433281 - DNA, 57 bp, Artificial
  Synthetic oligonucleotide
ggttggttacctgctccagtgagtcgattaaatggggattagtgctgtagggcccca

SEQ ID NO: 433282 - DNA, 57 bp, Artificial
  Synthetic oligonucleotide
ggttggttagagacagacgaccatatggaaccccgatggactttggccaggtgttca

SEQ ID NO: 433283 - DNA, 60 bp, Artificial
  Synthetic oligonucleotide
ggttggttagggctcccagccaagcagagagaatcgccaacgccaccaacaagcaggtga

SEQ ID NO: 433284 - DNA, 55 bp, Artificial
  Synthetic oligonucleotide
ggttggttcacttcacgtaaccatccgtgacaccatcatcgacaagcgtgcgggc

SEQ ID NO: 433285 - DNA, 58 bp, Artificial
  Synthetic oligonucleotide
ggttggttccagtccacgtgacttcaagactgaggttgacgtgatctatggaccgccg

SEQ ID NO: 433286 - DNA, 58 bp, Artificial
  Synthetic oligonucleotide
ggttggttttacagacatcattatgatcaccctaatccaaaagttgcttctgaaatac

SEQ ID NO: 433287 - DNA, 55 bp, Artificial
  Synthetic oligonucleotide
ggttggttttcattgcgttgtgcaagaccaatgcctgtctattctgttccaggcc

SEQ ID NO: 433288 - DNA, 50 bp, Artificial
  Synthetic oligonucleotide
ggttgtaaacctcctacaggtgaacactggggtaaaggtaccccgtgtag

SEQ ID NO: 433289 - DNA, 55 bp, Artificial
  Synthetic oligonucleotide
ggttgtaaggctgtgaatatcctcaagttgagataacatttgtgaatccccaacg

SEQ ID NO: 433290 - DNA, 57 bp, Artificial
  Synthetic oligonucleotide
ggttgtaatggtagaagagggtacacggtttcacaatgtctgtggtgtatggcgagg

SEQ ID NO: 433291 - DNA, 55 bp, Artificial
  Synthetic oligonucleotide
ggttgtaatttgtcgaaagaagagactgagatagtattagtgcatttgcggagaa

SEQ ID NO: 433292 - DNA, 51 bp, Artificial
  Synthetic oligonucleotide
ggttgtacccacccctagggcccacgtggcgttagtaccctggtacgctag

SEQ ID NO: 433293 - DNA, 53 bp, Artificial
  Synthetic oligonucleotide
ggttgtacccacccctggggcccacgtggcgctagtactctggttcgttagaa

SEQ ID NO: 433294 - DNA, 55 bp, Artificial
  Synthetic oligonucleotide
ggttgtacccactcacagggcccactgggcgtcagcactctggtactgaggtacc

SEQ ID NO: 433295 - DNA, 55 bp, Artificial
  Synthetic oligonucleotide
ggttgtaccgaatgtacagaagccctgatgtgccttatggctgtgagggtccatg

SEQ ID NO: 433296 - DNA, 58 bp, Artificial
  Synthetic oligonucleotide
ggttgtacctggatgaactcaaccggattcaccaaagtgtgcggagcacctccttgtg

SEQ ID NO: 433297 - DNA, 53 bp, Artificial
  Synthetic oligonucleotide
ggttgtactgcactatcaatctaagacggtccttcttcggatcgcatttcccc

SEQ ID NO: 433298 - DNA, 57 bp, Artificial
  Synthetic oligonucleotide
ggttgtagcttatggagtctggccctcctacctaagtgacaaggatgctaaccctgt

SEQ ID NO: 433299 - DNA, 54 bp, Artificial
  Synthetic oligonucleotide
ggttgtaggggccggttagggcataattaataggactacgccaatgactgttta

SEQ ID NO: 433300 - DNA, 58 bp, Artificial
  Synthetic oligonucleotide
ggttgtataaccagcttgatctacaagggcgtgctaaatctttcagagcacttaccgg

SEQ ID NO: 433301 - DNA, 55 bp, Artificial
  Synthetic oligonucleotide
ggttgtatcatctggtccggtcggcctggattctgcaggcgccgaaagagtctct

SEQ ID NO: 433302 - DNA, 55 bp, Artificial
  Synthetic oligonucleotide
ggttgtcaacaaataatgaaccaattgcaaccagctctccaaacagcaacagagg

SEQ ID NO: 433303 - DNA, 59 bp, Artificial
  Synthetic oligonucleotide
ggttgtcacatcctgcatttggttaacctcccgaaatccaatatactgagattagcgag

SEQ ID NO: 433304 - DNA, 60 bp, Artificial
  Synthetic oligonucleotide
ggttgtccaccgattctcatttactcctgtcaatcggtgaatggtgacgcatatatacta

SEQ ID NO: 433305 - DNA, 54 bp, Artificial
  Synthetic oligonucleotide
ggttgtccatttcaaaggcgggtacaggattggagacaggtatttggttggccc

SEQ ID NO: 433306 - DNA, 55 bp, Artificial
  Synthetic oligonucleotide
ggttgtcctcaggaaatcgtcctctgagaatgagtactacagacaatatatccag

SEQ ID NO: 433307 - DNA, 59 bp, Artificial
  Synthetic oligonucleotide
ggttgtcctgtttacatatctaaatggtggtgtgaatttcatagatattcctacataaa

SEQ ID NO: 433308 - DNA, 55 bp, Artificial
  Synthetic oligonucleotide
ggttgtccttgctctagtctacgtgaaatcaacctacaggctagggatgagtgct

SEQ ID NO: 433309 - DNA, 59 bp, Artificial
  Synthetic oligonucleotide
ggttgtcgacaaacggcaagtgttaagcgttatgatggtaatcgtcgacaacatctatc

SEQ ID NO: 433310 - DNA, 60 bp, Artificial
  Synthetic oligonucleotide
ggttgtcgagtggttcctgctaataagcagttatcgtctcctcccagtagcgatgtgaat

SEQ ID NO: 433311 - DNA, 57 bp, Artificial
  Synthetic oligonucleotide
ggttgtcgatatcattaagtggttcggcatttacgcgtgtgacttaatttgagagtg

SEQ ID NO: 433312 - DNA, 56 bp, Artificial
  Synthetic oligonucleotide
ggttgtcgcccctgttgtccaatccaactggcaaaaaatcgagggcttctgggcga

SEQ ID NO: 433313 - DNA, 55 bp, Artificial
  Synthetic oligonucleotide
ggttgtcgggatttgatgacttggggaattgccactctcgcaacatgtagtgctc

SEQ ID NO: 433314 - DNA, 58 bp, Artificial
  Synthetic oligonucleotide
ggttgtctaaggtcaagcacttctgtttccccggttgatgttgatatgctccaacagg

SEQ ID NO: 433315 - DNA, 55 bp, Artificial
  Synthetic oligonucleotide
ggttgtctaataatcattgacggagcgaaagctttgctccagggtgattgttcat

SEQ ID NO: 433316 - DNA, 60 bp, Artificial
  Synthetic oligonucleotide
ggttgtctagtgggctctagttggtagagaaagctatgcttttgcctaaagccatgatta

SEQ ID NO: 433317 - DNA, 55 bp, Artificial
  Synthetic oligonucleotide
ggttgtctatactctgcaaacggatgtgcacgctattgcaaggactctagcatgc

SEQ ID NO: 433318 - DNA, 51 bp, Artificial
  Synthetic oligonucleotide
ggttgtctccttgtcgcacttgtgccagagctgaagagccttgacacgcgg

SEQ ID NO: 433319 - DNA, 59 bp, Artificial
  Synthetic oligonucleotide
ggttgtctcgctggttataagtggatcatattggatgaagtgactcttttcccgaatgg

SEQ ID NO: 433320 - DNA, 55 bp, Artificial
  Synthetic oligonucleotide
ggttgtctgaacacattcgaattcagactagttctggtataccctggtttcatcg

SEQ ID NO: 433321 - DNA, 55 bp, Artificial
  Synthetic oligonucleotide
ggttgtcttataccatgttaggagagatcctgaactattacacccattgggcagg

SEQ ID NO: 433322 - DNA, 52 bp, Artificial
  Synthetic oligonucleotide
ggttgtgaaagcatcaagaggaagtgcttacgttcttattgaaacaggtggc

SEQ ID NO: 433323 - DNA, 58 bp, Artificial
  Synthetic oligonucleotide
ggttgtgaagggccttgtaaggtccagtcgtttgaatcccgccatgatgtctcccatg

SEQ ID NO: 433324 - DNA, 56 bp, Artificial
  Synthetic oligonucleotide
ggttgtgacccaagcagtctggaaggtcagactcgttacatgatcaacgaatctgt

SEQ ID NO: 433325 - DNA, 60 bp, Artificial
  Synthetic oligonucleotide
ggttgtgagcttttccgctctactttgcctagactcgcgttattgatgcaagatggtcat

SEQ ID NO: 433326 - DNA, 51 bp, Artificial
  Synthetic oligonucleotide
ggttgtgaggaataaaagaacaggtaaggagacggtacttcccaattcctt

SEQ ID NO: 433327 - DNA, 60 bp, Artificial
  Synthetic oligonucleotide
ggttgtgattgaattgtatctgaacggagatgatgtcttccttcattaggaacggcctgt

SEQ ID NO: 433328 - DNA, 55 bp, Artificial
  Synthetic oligonucleotide
ggttgtgcaatcctatggatgttacgctgtattattatcaacaaacgagtgaatc

SEQ ID NO: 433329 - DNA, 60 bp, Artificial
  Synthetic oligonucleotide
ggttgtgcattccagtctactatcgctgagcttcagcgtcttaaaatgaaggtaggtaaa

SEQ ID NO: 433330 - DNA, 55 bp, Artificial
  Synthetic oligonucleotide
ggttgtgccaccagggataagcgttccagcagtcacgttgttgctgatccactgc

SEQ ID NO: 433331 - DNA, 56 bp, Artificial
  Synthetic oligonucleotide
ggttgtgccccgtgggtcggaccacgcccgcagatcaaagtcgtggataggaggaa

SEQ ID NO: 433332 - DNA, 56 bp, Artificial
  Synthetic oligonucleotide
ggttgtgccgacttctacggatggtgtatgggataagtattctaaaatcggccttc

SEQ ID NO: 433333 - DNA, 55 bp, Artificial
  Synthetic oligonucleotide
ggttgtgctcgctaccgctacccctccgggctctatcactgtgccccatcctaac

SEQ ID NO: 433334 - DNA, 55 bp, Artificial
  Synthetic oligonucleotide
ggttgtgctggtcttcacagcctcaaaagagctcacatccaagctcggtgatatc

SEQ ID NO: 433335 - DNA, 59 bp, Artificial
  Synthetic oligonucleotide
ggttgtgcttattgctctggtatctgcttttatagtgacccccggcgctattgcggtcg

SEQ ID NO: 433336 - DNA, 60 bp, Artificial
  Synthetic oligonucleotide
ggttgtggaccctgaagtagctttacagctttcaatgcaggagcgtgccagactagtacc

SEQ ID NO: 433337 - DNA, 58 bp, Artificial
  Synthetic oligonucleotide
ggttgtggatatttgatgacgtttactccataccatccatttgttccgaccgtcagga

SEQ ID NO: 433338 - DNA, 60 bp, Artificial
  Synthetic oligonucleotide
ggttgtggattaatgagaaacaatccatagccatgatagcatcgctactatcagctttag

SEQ ID NO: 433339 - DNA, 56 bp, Artificial
  Synthetic oligonucleotide
ggttgtgggcttctgcccgttacgagtcaagttcgggacctcgataggagcgatcc

SEQ ID NO: 433340 - DNA, 53 bp, Artificial
  Synthetic oligonucleotide
ggttgtggtaaagggtaaggttccagttgaaatcgtgagcgaagtggtgcggt

SEQ ID NO: 433341 - DNA, 55 bp, Artificial
  Synthetic oligonucleotide
ggttgtggtgaactggatcgtactcagatactttgatataattgagattccatcc

SEQ ID NO: 433342 - DNA, 55 bp, Artificial
  Synthetic oligonucleotide
ggttgtggttgaaccgtatctggacgtggtacacccgcgtcgtgctggacaggac

SEQ ID NO: 433343 - DNA, 55 bp, Artificial
  Synthetic oligonucleotide
ggttgtggttgaaccttatctggatgtggtacactcttgtccgagtgtacggtgg

SEQ ID NO: 433344 - DNA, 60 bp, Artificial
  Synthetic oligonucleotide
ggttgtggttgaatcttatctgcagtaatagtaggtgtctcgcacctagatctgttgccg

SEQ ID NO: 433345 - DNA, 55 bp, Artificial
  Synthetic oligonucleotide
ggttgtgtacctttgagtgctattccagcattggctgctaatactttaactatag

SEQ ID NO: 433346 - DNA, 60 bp, Artificial
  Synthetic oligonucleotide
ggttgtgttgctgaccaatccaggaagtggattggacattgcaccatagcccaactcact

SEQ ID NO: 433347 - DNA, 52 bp, Artificial
  Synthetic oligonucleotide
ggttgttaagtgctgatagtgttaaggttgtagtccccttttctgtaaatgc

SEQ ID NO: 433348 - DNA, 56 bp, Artificial
  Synthetic oligonucleotide
ggttgttacgtgcacttcgatgggagatcagccacgaccacctgcccccccggccc

SEQ ID NO: 433349 - DNA, 60 bp, Artificial
  Synthetic oligonucleotide
ggttgttacttgactccggtgttgcgtggttcatgtctccgttaatgtcatcagctatcc

SEQ ID NO: 433350 - DNA, 57 bp, Artificial
  Synthetic oligonucleotide
ggttgttatatattcgatagactgatccacgaagttgacaaatctcacctaactatg

SEQ ID NO: 433351 - DNA, 60 bp, Artificial
  Synthetic oligonucleotide
ggttgttatgcttgtagctctggcatctcatgtaaggttaggatccatgtagatgaacca

SEQ ID NO: 433352 - DNA, 55 bp, Artificial
  Synthetic oligonucleotide
ggttgttatgtcccacaagatcgtatgatgattatctcatcagaacggaggaagg

SEQ ID NO: 433353 - DNA, 55 bp, Artificial
  Synthetic oligonucleotide
ggttgttcattcctcttttcgactattgtttcgtgtatcagcacgcaccttagcg

SEQ ID NO: 433354 - DNA, 55 bp, Artificial
  Synthetic oligonucleotide
ggttgttcccacccagatcacctacatggtgttgtacactattattacggtaatt

SEQ ID NO: 433355 - DNA, 55 bp, Artificial
  Synthetic oligonucleotide
ggttgttcttttcacgaccaaatgttgaagccgccaagcttagggctgcactccc

SEQ ID NO: 433356 - DNA, 55 bp, Artificial
  Synthetic oligonucleotide
ggttgttgataatgaaccaatgtttgtcggtaaggacattgcagaagtgctggga

SEQ ID NO: 433357 - DNA, 55 bp, Artificial
  Synthetic oligonucleotide
ggttgttggaaaatcatcctccagttacaaccttcagtagacataggttctccag

SEQ ID NO: 433358 - DNA, 56 bp, Artificial
  Synthetic oligonucleotide
ggttgttgttaacaaccacaatcgctcatagaaaaagttgactgccagaaacggtc

SEQ ID NO: 433359 - DNA, 60 bp, Artificial
  Synthetic oligonucleotide
ggttgttgttcacatacgtctcggaatgtcgccatcgttgcaatcagtagcttcatacct

SEQ ID NO: 433360 - DNA, 55 bp, Artificial
  Synthetic oligonucleotide
ggttgtttaacatggaggttaagattatggagcctagcgtcccatatgtttgcag

SEQ ID NO: 433361 - DNA, 55 bp, Artificial
  Synthetic oligonucleotide
ggttgtttatgagagaacatactgcacaactggtatattgatagagggcaagtgc

SEQ ID NO: 433362 - DNA, 55 bp, Artificial
  Synthetic oligonucleotide
ggttgtttcagacaaccattctaagtcagctttggcctgctctaggcttaagcag

SEQ ID NO: 433363 - DNA, 59 bp, Artificial
  Synthetic oligonucleotide
ggttgtttcatcaactttggcgcaggtttcaatgaatgcaggagcgcgtggagatatcc

SEQ ID NO: 433364 - DNA, 54 bp, Artificial
  Synthetic oligonucleotide
ggttgtttccagcacaaataatggcaagaaacatcataagtcctgtaatgggtg

SEQ ID NO: 433365 - DNA, 53 bp, Artificial
  Synthetic oligonucleotide
ggttgtttctacgaccctcccgtcaaggtcgtctatgaagagccgggtaacta

SEQ ID NO: 433366 - DNA, 55 bp, Artificial
  Synthetic oligonucleotide
ggttgtttgtatggacatacatcagtcgtagatggaatggtgcagtctgacccac

SEQ ID NO: 433367 - DNA, 55 bp, Artificial
  Synthetic oligonucleotide
ggtttaaagggaagttggcatattttaaaagatctagtgtcctcttctggataca

SEQ ID NO: 433368 - DNA, 51 bp, Artificial
  Synthetic oligonucleotide
ggtttaaattgcaaaagaaagccacctttggaggaggtaagtaccacaccc

SEQ ID NO: 433369 - DNA, 55 bp, Artificial
  Synthetic oligonucleotide
ggtttaacaattcctaggactggttatgttaggagtgctcctggaggtgtactat

SEQ ID NO: 433370 - DNA, 59 bp, Artificial
  Synthetic oligonucleotide
ggtttaagagtacaacatatataacccttgaccagacatgtgagcatctaaaagtctct

SEQ ID NO: 433371 - DNA, 55 bp, Artificial
  Synthetic oligonucleotide
ggtttaagatcccacgtacgcagcagccccaaattcatatctatgcagccccatg

SEQ ID NO: 433372 - DNA, 57 bp, Artificial
  Synthetic oligonucleotide
ggtttaagccagagtacgcttatttagcttgtgatttctacgatccatcaaaattaa

SEQ ID NO: 433373 - DNA, 55 bp, Artificial
  Synthetic oligonucleotide
ggtttaatactagaagaacaggaaacattcagattaggttgccctggtactccta

SEQ ID NO: 433374 - DNA, 58 bp, Artificial
  Synthetic oligonucleotide
ggtttaatgctgtatgcaagttaattggtataaacatgtctcttgaaaaatcgtatgg

SEQ ID NO: 433375 - DNA, 60 bp, Artificial
  Synthetic oligonucleotide
ggtttaatgtaaatacagagatgtggaaaagcatgtttaacctgcatgagcatattcttt

SEQ ID NO: 433376 - DNA, 56 bp, Artificial
  Synthetic oligonucleotide
ggtttaattaacttgagtagtacacccaccaataggatgattcgctacgattatcc

SEQ ID NO: 433377 - DNA, 56 bp, Artificial
  Synthetic oligonucleotide
ggtttaattatcaacaatgatgagactatccagtcagcagatttcctgacatatgg

SEQ ID NO: 433378 - DNA, 53 bp, Artificial
  Synthetic oligonucleotide
ggtttaattcgtacccagtctatgtacaatttaaggacacggaggattccgaa

SEQ ID NO: 433379 - DNA, 55 bp, Artificial
  Synthetic oligonucleotide
ggtttacaaaacacgtcgttttatgatctactagaaggagtggacgatctaccaa

SEQ ID NO: 433380 - DNA, 55 bp, Artificial
  Synthetic oligonucleotide
ggtttacaaagtacggggagcactccctggttaacatagtgcaggtgctatccca

SEQ ID NO: 433381 - DNA, 57 bp, Artificial
  Synthetic oligonucleotide
ggtttacaagcaacagacattacaagcctagtctaggtgacggagtacctggattag

SEQ ID NO: 433382 - DNA, 54 bp, Artificial
  Synthetic oligonucleotide
ggtttacataaagccagggccagtttactaccaagattactcaggccccgtcta

SEQ ID NO: 433383 - DNA, 58 bp, Artificial
  Synthetic oligonucleotide
ggtttacatatacaatgtgttttaatacattccataatacatgaccaatcgtacgtat

SEQ ID NO: 433384 - DNA, 60 bp, Artificial
  Synthetic oligonucleotide
ggtttaccaagcagacactctgatatttgctacacacgcaacatttttgagaacgataat

SEQ ID NO: 433385 - DNA, 53 bp, Artificial
  Synthetic oligonucleotide
ggtttaccaagctcgtggcgctaggtcttaaccccagcaaagaggcgttaata

SEQ ID NO: 433386 - DNA, 52 bp, Artificial
  Synthetic oligonucleotide
ggtttaccagtaatgaacactcctggatccaatcagttcttgaccacagaca

SEQ ID NO: 433387 - DNA, 59 bp, Artificial
  Synthetic oligonucleotide
ggtttacccaaatgatcgacagtgttgtgaattacatcctggttgattacctcgctgct

SEQ ID NO: 433388 - DNA, 51 bp, Artificial
  Synthetic oligonucleotide
ggtttacccccgcgagtcaaggggcaattcgggcaagggcggtctcgggga

SEQ ID NO: 433389 - DNA, 47 bp, Artificial
  Synthetic oligonucleotide
ggtttaccctagccggtcccaacgaaggggaccggggggtacacctc

SEQ ID NO: 433390 - DNA, 55 bp, Artificial
  Synthetic oligonucleotide
ggtttaccctgcagactatacctagaacttttcgctaaatctaagtgcaaaacgc

SEQ ID NO: 433391 - DNA, 60 bp, Artificial
  Synthetic oligonucleotide
ggtttaccggtcgaggactgtggtaggatcgctgcattgatgacacacagcattctaccg

SEQ ID NO: 433392 - DNA, 53 bp, Artificial
  Synthetic oligonucleotide
ggtttacctacctttcgcatggtcacaaaaacccacaggagaagataaatacc

SEQ ID NO: 433393 - DNA, 53 bp, Artificial
  Synthetic oligonucleotide
ggtttacggtcgtaacgcgcaagtgcgggatgggaccaactactttgggtgtc

SEQ ID NO: 433394 - DNA, 55 bp, Artificial
  Synthetic oligonucleotide
ggtttactaagagtcgcgcttctgatggcacccctggttgggtacaactgggtgg

SEQ ID NO: 433395 - DNA, 55 bp, Artificial
  Synthetic oligonucleotide
ggtttactcccgttgggttggcagtagacaccccatgggttgagaaggagtcagc

SEQ ID NO: 433396 - DNA, 57 bp, Artificial
  Synthetic oligonucleotide
ggtttactctcattgagtacgctcagagaaccactaggggtgctttccaaggtgttc

SEQ ID NO: 433397 - DNA, 57 bp, Artificial
  Synthetic oligonucleotide
ggtttagaaacgttttgagcatcgcacctataatgttctcaaacaaaatggcaaggc

SEQ ID NO: 433398 - DNA, 55 bp, Artificial
  Synthetic oligonucleotide
ggtttagaagcacttgaccttaacactagtgcaggatttccatatgtgactatgg

SEQ ID NO: 433399 - DNA, 59 bp, Artificial
  Synthetic oligonucleotide
ggtttagaatatacaatgccaacgactaatggtgattgtggttcaccactaatcattaa

SEQ ID NO: 433400 - DNA, 60 bp, Artificial
  Synthetic oligonucleotide
ggtttagacataacattctgtgaacatgagatgagtttggtcgtaaggaaacctggcata

SEQ ID NO: 433401 - DNA, 56 bp, Artificial
  Synthetic oligonucleotide
ggtttagagatagcattaccgtaaccttaaaagctaatgaccaagtattagctaga

SEQ ID NO: 433402 - DNA, 53 bp, Artificial
  Synthetic oligonucleotide
ggtttagagggtctacgacaaaaagggtggagtttagttagcctcctgatgat

SEQ ID NO: 433403 - DNA, 60 bp, Artificial
  Synthetic oligonucleotide
ggtttagatcaagatgtccacacaaataattgtgtggtcccagtgatctggcccacattg

SEQ ID NO: 433404 - DNA, 51 bp, Artificial
  Synthetic oligonucleotide
ggtttagatccaagtgaccgcacaagtaattgtggggtcccaaactacgcg

SEQ ID NO: 433405 - DNA, 59 bp, Artificial
  Synthetic oligonucleotide
ggtttagatcttctcctcccgactcagagtatatcacgaggttagtgagcagatgcctc

SEQ ID NO: 433406 - DNA, 59 bp, Artificial
  Synthetic oligonucleotide
ggtttagccaccgatatgcggggtttgatgagttccgctctcaattgcactggtcccga

SEQ ID NO: 433407 - DNA, 57 bp, Artificial
  Synthetic oligonucleotide
ggtttaggaaataagtgtaagaatgcgaaatgtagtgtcgtaggacatataagccca

SEQ ID NO: 433408 - DNA, 55 bp, Artificial
  Synthetic oligonucleotide
ggtttaggcagagcatgtggataggaattgtctcctattctggcagtgggctgaa

SEQ ID NO: 433409 - DNA, 54 bp, Artificial
  Synthetic oligonucleotide
ggtttaggttagtatagtaaataaatgtaccctcccctttcaatcataatcagc

SEQ ID NO: 433410 - DNA, 55 bp, Artificial
  Synthetic oligonucleotide
ggtttaggtttcggtgggttaatcattgcaaatcaccatttgttcaagagcttta

SEQ ID NO: 433411 - DNA, 54 bp, Artificial
  Synthetic oligonucleotide
ggtttagtcgacgggttgagaggagatgatgtttaatttagttgttatgggtaa

SEQ ID NO: 433412 - DNA, 51 bp, Artificial
  Synthetic oligonucleotide
ggtttagtgccactacttttgagagtcccaaactccatttcacgtgcctca

SEQ ID NO: 433413 - DNA, 55 bp, Artificial
  Synthetic oligonucleotide
ggtttagttcgcaatatagctggtttagctggtgaaacactgaattctttagttg

SEQ ID NO: 433414 - DNA, 55 bp, Artificial
  Synthetic oligonucleotide
ggtttatagaattcatacaaagggtttgtagagctatctgcaacgtacctagaag

SEQ ID NO: 433415 - DNA, 58 bp, Artificial
  Synthetic oligonucleotide
ggtttataggtgcaatagattacgcgcgaggttccctttgagctccatacatttaaga

SEQ ID NO: 433416 - DNA, 60 bp, Artificial
  Synthetic oligonucleotide
ggtttatatgcctgatggagtaagatctgaaagttacacacagcctcttgagaatggttt

SEQ ID NO: 433417 - DNA, 60 bp, Artificial
  Synthetic oligonucleotide
ggtttatcagacgctctatgaaggagataacatgtatggtagaaagtcatctagtcctac

SEQ ID NO: 433418 - DNA, 54 bp, Artificial
  Synthetic oligonucleotide
ggtttatcccccggccgatacagcatggtcattttgggtaggtacgttacgtga

SEQ ID NO: 433419 - DNA, 50 bp, Artificial
  Synthetic oligonucleotide
ggtttatccgattctaaggagcacgcatggcacttcccgagaactgggca

SEQ ID NO: 433420 - DNA, 60 bp, Artificial
  Synthetic oligonucleotide
ggtttatccggatgcattagctgatctagtaccgcatagtttgcgctggaatatacttcg

SEQ ID NO: 433421 - DNA, 53 bp, Artificial
  Synthetic oligonucleotide
ggtttatgagtacgtagctagtgtgtcgtctatacgacatacctcagactttt

SEQ ID NO: 433422 - DNA, 59 bp, Artificial
  Synthetic oligonucleotide
ggtttatgcagggaaaagtggtatctttcatgaatagacacagtcaattttggctacaa

SEQ ID NO: 433423 - DNA, 59 bp, Artificial
  Synthetic oligonucleotide
ggtttatgcttgaacatctcgacacaaataccactggtgcagtcagtttaaagataccg

SEQ ID NO: 433424 - DNA, 57 bp, Artificial
  Synthetic oligonucleotide
ggtttattatcattgcgaatcgaacgattcctttgtataagcctcctatttggtatc

SEQ ID NO: 433425 - DNA, 52 bp, Artificial
  Synthetic oligonucleotide
ggtttatttacaaatatgtcttccaccctaaagaaagccctcggggctcggc

SEQ ID NO: 433426 - DNA, 58 bp, Artificial
  Synthetic oligonucleotide
ggtttatttcaattgggcttggaagcccatacctgtgagaggatgcggatcggaccat

SEQ ID NO: 433427 - DNA, 59 bp, Artificial
  Synthetic oligonucleotide
ggtttcaaagccggcaatgatgtatggttaggtagaacagtgtcaactagtggtagatc

SEQ ID NO: 433428 - DNA, 59 bp, Artificial
  Synthetic oligonucleotide
ggtttcaaccccacggatcgattctctttggcaagaggcattgaaggaatcaggagcat

SEQ ID NO: 433429 - DNA, 55 bp, Artificial
  Synthetic oligonucleotide
ggtttcaagcaactgtcactggaggaccgtctggttgcagagaggctgctattgt

SEQ ID NO: 433430 - DNA, 55 bp, Artificial
  Synthetic oligonucleotide
ggtttcaagcacgaattttcttccaaatatggctcatttagaaaagaaaggcacc

SEQ ID NO: 433431 - DNA, 60 bp, Artificial
  Synthetic oligonucleotide
ggtttcaatgaagtatcaactgcatttagacatatagattggtggatacatacactgttg

SEQ ID NO: 433432 - DNA, 55 bp, Artificial
  Synthetic oligonucleotide
ggtttcaatgaagtgtcaacggcatttaggcacattgattggtggatacacactc

SEQ ID NO: 433433 - DNA, 56 bp, Artificial
  Synthetic oligonucleotide
ggtttcacaggtttatgtgaggccatgcattcccacggagtgcgtattttacgggg

SEQ ID NO: 433434 - DNA, 59 bp, Artificial
  Synthetic oligonucleotide
ggtttcaccacaccagttatcgaccaagctctcggcgttctcgaatcaatgttagtcga

SEQ ID NO: 433435 - DNA, 53 bp, Artificial
  Synthetic oligonucleotide
ggtttcacctgggttttctagggctatgggccttgcggttggactcgcaaggt

SEQ ID NO: 433436 - DNA, 55 bp, Artificial
  Synthetic oligonucleotide
ggtttcagactaccagcctaagacatatcgttatggtaaggagtaacgtggttgg

SEQ ID NO: 433437 - DNA, 53 bp, Artificial
  Synthetic oligonucleotide
ggtttcatagaaaatgggtgggagggaatgatagacggttggtacggtttcag

SEQ ID NO: 433438 - DNA, 60 bp, Artificial
  Synthetic oligonucleotide
ggtttcattgtcaccggttcagtcagcgcccattagtcatgggaagacagttgaggcata

SEQ ID NO: 433439 - DNA, 54 bp, Artificial
  Synthetic oligonucleotide
ggtttccaccgtccctttcgttgttcctatggctgcacttgaagacaaaggtag

SEQ ID NO: 433440 - DNA, 55 bp, Artificial
  Synthetic oligonucleotide
ggtttccagaagagttcgggtaccagtcagggctaccagaggaggagtggaaggc

SEQ ID NO: 433441 - DNA, 55 bp, Artificial
  Synthetic oligonucleotide
ggtttccagatgttctaatccaggcgaggccatctcatttctggaaggcagttct

SEQ ID NO: 433442 - DNA, 60 bp, Artificial
  Synthetic oligonucleotide
ggtttccagcatcagaatgaacaggggactggcattgctgcagacaaagcctccactcag

SEQ ID NO: 433443 - DNA, 56 bp, Artificial
  Synthetic oligonucleotide
ggtttccatgggtgggctactgctgcccttcttgtcacattctgttttgggtgggt

SEQ ID NO: 433444 - DNA, 60 bp, Artificial
  Synthetic oligonucleotide
ggtttcccattgtagagcaacagaatatataatgaagggagtatacatcaacactgctct

SEQ ID NO: 433445 - DNA, 50 bp, Artificial
  Synthetic oligonucleotide
ggtttcccgccacggggcgtcgctaccactaaccagcgtcggacatttaa

SEQ ID NO: 433446 - DNA, 55 bp, Artificial
  Synthetic oligonucleotide
ggtttcccgtacttgcagttcgattgccagtctctctgggcccccataaattcct

SEQ ID NO: 433447 - DNA, 54 bp, Artificial
  Synthetic oligonucleotide
ggtttcccgtatttcgtgttggactgccagtcccgctgggaccccatgaactcc

SEQ ID NO: 433448 - DNA, 52 bp, Artificial
  Synthetic oligonucleotide
ggtttcccgttattaaggttgatgggcgcaatttcaggaagaacacggaagt

SEQ ID NO: 433449 - DNA, 57 bp, Artificial
  Synthetic oligonucleotide
ggtttccgatgagcttggaaggtgtttctctgctcccgatccgatccgagaattcca

SEQ ID NO: 433450 - DNA, 50 bp, Artificial
  Synthetic oligonucleotide
ggtttcctacgagaagcggattgcgttgacatattcttgactatcatgat

SEQ ID NO: 433451 - DNA, 54 bp, Artificial
  Synthetic oligonucleotide
ggtttcctactatattaaattggtgttaataccgtacgatggacggtgtggctc

SEQ ID NO: 433452 - DNA, 52 bp, Artificial
  Synthetic oligonucleotide
ggtttcctcagttgactttctccctccaatggctagtttagataacaaggga

SEQ ID NO: 433453 - DNA, 55 bp, Artificial
  Synthetic oligonucleotide
ggtttcctcataaagagaataccgatgaaagtaaaagacagaataaccagagtgg

SEQ ID NO: 433454 - DNA, 55 bp, Artificial
  Synthetic oligonucleotide
ggtttcctgccgcccactggtctacacttgttgtcccgcctaaactgacttgctg

SEQ ID NO: 433455 - DNA, 55 bp, Artificial
  Synthetic oligonucleotide
ggtttcctgtatgactgtcttaacaccaggctgttctaccccggcatcgacagta

SEQ ID NO: 433456 - DNA, 55 bp, Artificial
  Synthetic oligonucleotide
ggtttcctgtgcggcaaaggttcatttcaaagagtaggtacacgctatgaaatca

SEQ ID NO: 433457 - DNA, 54 bp, Artificial
  Synthetic oligonucleotide
ggtttcctgttgttaatggttctaataaaaggaaaatatcggagatggttgctc

SEQ ID NO: 433458 - DNA, 55 bp, Artificial
  Synthetic oligonucleotide
ggtttcgatatcaccagtccaatctgcaccggtaggcaaagagagggcaatcgag

SEQ ID NO: 433459 - DNA, 58 bp, Artificial
  Synthetic oligonucleotide
ggtttcgatttttacgaaatcacagccaagacacctgtgagggcaagagaggcacact

SEQ ID NO: 433460 - DNA, 58 bp, Artificial
  Synthetic oligonucleotide
ggtttcgcctgatggggcgtacaattacgattaatacaatgttcgaccgtgctactga

SEQ ID NO: 433461 - DNA, 56 bp, Artificial
  Synthetic oligonucleotide
ggtttcgcgctccctggactggtctaaggtcaccctcgatgggcgcccactaacta

SEQ ID NO: 433462 - DNA, 53 bp, Artificial
  Synthetic oligonucleotide
ggtttcggaaaaattcggcattgatttagcggtgtcagaggaatcagatgaat

SEQ ID NO: 433463 - DNA, 55 bp, Artificial
  Synthetic oligonucleotide
ggtttcggatcatccgacgcttattgggtacaaaatgttaccgaggcacgaccag

SEQ ID NO: 433464 - DNA, 56 bp, Artificial
  Synthetic oligonucleotide
ggtttcgggctgtctaacgccgagactttcctcgtataattcgcttcgctcgtcac

SEQ ID NO: 433465 - DNA, 55 bp, Artificial
  Synthetic oligonucleotide
ggtttcgggtgagttttgcttatcaatcagctctaactctactcacaaggatgcg

SEQ ID NO: 433466 - DNA, 55 bp, Artificial
  Synthetic oligonucleotide
ggtttcgtccagatcaatgctaaccaaggtctcaccttacctctcggcgcttgcc

SEQ ID NO: 433467 - DNA, 50 bp, Artificial
  Synthetic oligonucleotide
ggtttcgtgatcggtgttgtcgccttcgaaaatgccgtattcgacactcg

SEQ ID NO: 433468 - DNA, 55 bp, Artificial
  Synthetic oligonucleotide
ggtttcgtgtgaaggctatgtcgttaagagaataacgattagcccgggcctctac

SEQ ID NO: 433469 - DNA, 55 bp, Artificial
  Synthetic oligonucleotide
ggtttcgtgtgcttcagcagaggaagtgtattgttaatacttctctctcgaccta

SEQ ID NO: 433470 - DNA, 54 bp, Artificial
  Synthetic oligonucleotide
ggtttcgttagttgtttccgttttgatataattgtccgattcgattttgcatcg

SEQ ID NO: 433471 - DNA, 54 bp, Artificial
  Synthetic oligonucleotide
ggtttctaaattctatcctgacggtcacttgactcttatccctaacggaccact

SEQ ID NO: 433472 - DNA, 60 bp, Artificial
  Synthetic oligonucleotide
ggtttctacccagattgcagcaagcaagtgaaggcagtcttcttcatcggagcagatcct

SEQ ID NO: 433473 - DNA, 57 bp, Artificial
  Synthetic oligonucleotide
ggtttctatcggatgcagatttccgacatgaatacgtttgagcccgacaagaataag

SEQ ID NO: 433474 - DNA, 50 bp, Artificial
  Synthetic oligonucleotide
ggtttctatcggttaaacggcgctttaacgtactaacgaacccatttaga

SEQ ID NO: 433475 - DNA, 55 bp, Artificial
  Synthetic oligonucleotide
ggtttctatgtggttgattccgttcttcagaaacgatgcgacttcttgtccagcc

SEQ ID NO: 433476 - DNA, 51 bp, Artificial
  Synthetic oligonucleotide
ggtttctcgataatcgggctttcgtcggcggtgaatctgttcaagccgctg

SEQ ID NO: 433477 - DNA, 51 bp, Artificial
  Synthetic oligonucleotide
ggtttctctatcaaagcagtaagtagtacatgtaatgcaacctttacacat

SEQ ID NO: 433478 - DNA, 54 bp, Artificial
  Synthetic oligonucleotide
ggtttctgaatttaacgcatctgatgcaaaccttggtaatcgttatcctgcaga

SEQ ID NO: 433479 - DNA, 56 bp, Artificial
  Synthetic oligonucleotide
ggtttctgacccgcaatcgatgaaagtgacacctatcgtcaatccctcgtcatacg

SEQ ID NO: 433480 - DNA, 59 bp, Artificial
  Synthetic oligonucleotide
ggtttctgatgccatcctggttgccctctcaacggtgattggtcggccgatcaagaacc

SEQ ID NO: 433481 - DNA, 60 bp, Artificial
  Synthetic oligonucleotide
ggtttctgcaatgccagtgaagatggatagaaatacaggacaggttcgaatgacacagta

SEQ ID NO: 433482 - DNA, 60 bp, Artificial
  Synthetic oligonucleotide
ggtttctgggagaatctcaaacgaattctccgtgacatcactggcattaccgctctgtgc

SEQ ID NO: 433483 - DNA, 60 bp, Artificial
  Synthetic oligonucleotide
ggtttctggttcatcggctggcatacctagcccgctcaagaactctccgatgcgtgatct

SEQ ID NO: 433484 - DNA, 50 bp, Artificial
  Synthetic oligonucleotide
ggtttcttacccaccacattaagcgtaagttagacgcatatgcggtcaaa

SEQ ID NO: 433485 - DNA, 55 bp, Artificial
  Synthetic oligonucleotide
ggtttcttattaattgttatcattttcgctcttctatactgttgtaaggctaagg

SEQ ID NO: 433486 - DNA, 55 bp, Artificial
  Synthetic oligonucleotide
ggtttcttcggaaggactccggtccgtgtacttctagcacaacgtgctagtttca

SEQ ID NO: 433487 - DNA, 52 bp, Artificial
  Synthetic oligonucleotide
ggtttcttctaatccgaagaggaaggagagattaaactcgccaaaaaggtta

SEQ ID NO: 433488 - DNA, 55 bp, Artificial
  Synthetic oligonucleotide
ggtttcttctcctatgacccggcagctgttcacataggagggcaagatggtgggg

SEQ ID NO: 433489 - DNA, 56 bp, Artificial
  Synthetic oligonucleotide
ggtttcttgtattagtgaaccaggttgaggcgacctggtttgccgtggagagatcc

SEQ ID NO: 433490 - DNA, 59 bp, Artificial
  Synthetic oligonucleotide
ggtttgaacaggacgatcaggtctctgaattgttcaattatattcagactgtcccaacc

SEQ ID NO: 433491 - DNA, 55 bp, Artificial
  Synthetic oligonucleotide
ggtttgaacctaatgtctgttgagtgtttcgctgacgacaatttaagcttcgcct

SEQ ID NO: 433492 - DNA, 60 bp, Artificial
  Synthetic oligonucleotide
ggtttgaactggtatgaacctgtctgtgacgtcatagttggtgtacgtgacttgccttga

SEQ ID NO: 433493 - DNA, 55 bp, Artificial
  Synthetic oligonucleotide
ggtttgaagtattatggtatacaacttttgatcgaacgccaacacttgtgcccga

SEQ ID NO: 433494 - DNA, 55 bp, Artificial
  Synthetic oligonucleotide
ggtttgaagtgggttccggagttctttcagggcacggagcattacgcgcacgcgg

SEQ ID NO: 433495 - DNA, 54 bp, Artificial
  Synthetic oligonucleotide
ggtttgaagtgtgaaaattggacgacagtgtactatggggtaccggtatggagg

SEQ ID NO: 433496 - DNA, 54 bp, Artificial
  Synthetic oligonucleotide
ggtttgaatgaagtagaagaactgaaggcacttattggatcaggagaaagagta

SEQ ID NO: 433497 - DNA, 60 bp, Artificial
  Synthetic oligonucleotide
ggtttgaccaccattggccttgtgggcgacaaaaacactggtgatgatgcgcaatagtga

SEQ ID NO: 433498 - DNA, 51 bp, Artificial
  Synthetic oligonucleotide
ggtttgaccgacacccaaatcgctaatgtcaacgtactgcaaagaattggg

SEQ ID NO: 433499 - DNA, 50 bp, Artificial
  Synthetic oligonucleotide
ggtttgacctaacctcctgggttaaatacgtttacttaggcctttatgta

SEQ ID NO: 433500 - DNA, 55 bp, Artificial
  Synthetic oligonucleotide
ggtttgacgtaagatatatgagagaaacaccgttgacaacgttaacaacaaacca

SEQ ID NO: 433501 - DNA, 56 bp, Artificial
  Synthetic oligonucleotide
ggtttgactcatacagttttgttgagaaacctacctatcattgaaatggcacaaac

SEQ ID NO: 433502 - DNA, 60 bp, Artificial
  Synthetic oligonucleotide
ggtttgagtcggttgcttggtcagcaagtgcttgccatgatggcattagttggttgacaa

SEQ ID NO: 433503 - DNA, 57 bp, Artificial
  Synthetic oligonucleotide
ggtttgataattgtttcgaatactggcaagccaatattagatacgagcgatgaagac

SEQ ID NO: 433504 - DNA, 55 bp, Artificial
  Synthetic oligonucleotide
ggtttgatatcccgaagatcccgtccatagctcccaaagtggagtcatgtgtcgg

SEQ ID NO: 433505 - DNA, 60 bp, Artificial
  Synthetic oligonucleotide
ggtttgatcaatatggactccaacatgttgccaccatctagtaaggcagcaccggcttta

SEQ ID NO: 433506 - DNA, 55 bp, Artificial
  Synthetic oligonucleotide
ggtttgatcttggctaacaaagcaactaaactggctgacgctatcaagaaagagg

SEQ ID NO: 433507 - DNA, 60 bp, Artificial
  Synthetic oligonucleotide
ggtttgatgaagactgaaggcagtagctacatgtggtctggtgagtgcctcccattcaaa

SEQ ID NO: 433508 - DNA, 59 bp, Artificial
  Synthetic oligonucleotide
ggtttgattcctgatttctattacggagacgagcatatacaaactcatttctctacagg

SEQ ID NO: 433509 - DNA, 55 bp, Artificial
  Synthetic oligonucleotide
ggtttgcaaaggaatttaagcacgttgaagggattttggcaggtgaatccgtaga

SEQ ID NO: 433510 - DNA, 58 bp, Artificial
  Synthetic oligonucleotide
ggtttgcagtcgtcggtgtcagcgattgccgggaggtcgggtgatggtcctggcacgt

SEQ ID NO: 433511 - DNA, 55 bp, Artificial
  Synthetic oligonucleotide
ggtttgcagtcttactatgagcagctgccatccctaaaccctatgcaagtcagag

SEQ ID NO: 433512 - DNA, 55 bp, Artificial
  Synthetic oligonucleotide
ggtttgcatagggcaatgcaaattgtgaacaaatctgatatgaacatcaagatgg

SEQ ID NO: 433513 - DNA, 55 bp, Artificial
  Synthetic oligonucleotide
ggtttgccaacattggatttatcagaagtggtctatatgggcgaaacatttgcca

SEQ ID NO: 433514 - DNA, 59 bp, Artificial
  Synthetic oligonucleotide
ggtttgccaacgccattcccctgactgctcgcggcttgtgggggccacgccagagcgtc

SEQ ID NO: 433515 - DNA, 52 bp, Artificial
  Synthetic oligonucleotide
ggtttgcctacaaggctcttactgaaggtggcaatggttccagtcttgttgg

SEQ ID NO: 433516 - DNA, 55 bp, Artificial
  Synthetic oligonucleotide
ggtttgcctgtctaaagctactgcttgagaaacttggttactcgcacaaggagac

SEQ ID NO: 433517 - DNA, 55 bp, Artificial
  Synthetic oligonucleotide
ggtttgcgtctatgtccagaccattccgtgttttcttttccactgttgttaagac

SEQ ID NO: 433518 - DNA, 55 bp, Artificial
  Synthetic oligonucleotide
ggtttgctgcatttacaccccactcggccgcccgtgttactagcggtcgtcgtgt

SEQ ID NO: 433519 - DNA, 55 bp, Artificial
  Synthetic oligonucleotide
ggtttgctgtgtgatagccacacttgcgtgtcctaggcgttttgaaacagtcatg

SEQ ID NO: 433520 - DNA, 60 bp, Artificial
  Synthetic oligonucleotide
ggtttgcttggccaggcttatactggcgctggcgagcagaggttaactcagtatgccact

SEQ ID NO: 433521 - DNA, 54 bp, Artificial
  Synthetic oligonucleotide
ggtttggaaagcatagtcatatggggaaagacccctaaatttagactacccatc

SEQ ID NO: 433522 - DNA, 55 bp, Artificial
  Synthetic oligonucleotide
ggtttggaaatctcctatggcaggaagaagcgacgaagatcagccgctgctacgc

SEQ ID NO: 433523 - DNA, 58 bp, Artificial
  Synthetic oligonucleotide
ggtttggaatcataactatggttcaaatgacaatgttcttggacatattatcctccac

SEQ ID NO: 433524 - DNA, 55 bp, Artificial
  Synthetic oligonucleotide
ggtttggacaaagtcattgtggggtcgccttttacactagatgttgaaggggtgc

SEQ ID NO: 433525 - DNA, 55 bp, Artificial
  Synthetic oligonucleotide
ggtttggacgcttcccggtttgaccaacatgttagtgagcaagctttagaatggg

SEQ ID NO: 433526 - DNA, 55 bp, Artificial
  Synthetic oligonucleotide
ggtttggatcgggacagctgtcacggttgcggccggtcctctttcaacagtgacc

SEQ ID NO: 433527 - DNA, 55 bp, Artificial
  Synthetic oligonucleotide
ggtttggatggtcgatgtaaagagtgtaagcgtgatgcatatctggctaaacgta

SEQ ID NO: 433528 - DNA, 55 bp, Artificial
  Synthetic oligonucleotide
ggtttggattcaggcaaggcaatgatgtgtggatgggaaggaccattagcagaac

SEQ ID NO: 433529 - DNA, 55 bp, Artificial
  Synthetic oligonucleotide
ggtttggccttcgcaagccgagctgagctaggatcggaatcgcctaccgagaggg

SEQ ID NO: 433530 - DNA, 55 bp, Artificial
  Synthetic oligonucleotide
ggtttgggagtcctatgagagggatctgttggttatgcgccatgatgcggctggg

SEQ ID NO: 433531 - DNA, 54 bp, Artificial
  Synthetic oligonucleotide
ggtttgggcacgtccggactacaaccctccgcttctagagacctggaagcgacc

SEQ ID NO: 433532 - DNA, 54 bp, Artificial
  Synthetic oligonucleotide
ggtttgggcctgtagaggcttagaaataggtaggggccagccattaggtgtagg

SEQ ID NO: 433533 - DNA, 54 bp, Artificial
  Synthetic oligonucleotide
ggtttggggaaaagataacaactccctcccagaagcaggagccgatggacgagg

SEQ ID NO: 433534 - DNA, 55 bp, Artificial
  Synthetic oligonucleotide
ggtttgggtcaaggccttgtcattggttcagtggagttaccacctgttccagtac

SEQ ID NO: 433535 - DNA, 55 bp, Artificial
  Synthetic oligonucleotide
ggtttgggtcgaaatatgagtccatcttaatatgcgatagagaggtaagggtacc

SEQ ID NO: 433536 - DNA, 54 bp, Artificial
  Synthetic oligonucleotide
ggtttggtaaaccagtgctcgtaactttaaagtatgagaacatgtccaaagaaa

SEQ ID NO: 433537 - DNA, 52 bp, Artificial
  Synthetic oligonucleotide
ggtttggtggtggcacacgggctgtgaattttgcgcgtgtttttatgagagg

SEQ ID NO: 433538 - DNA, 58 bp, Artificial
  Synthetic oligonucleotide
ggtttggttagcatcattacaatgcccaccacgggtacacagaacacggatggttatg

SEQ ID NO: 433539 - DNA, 54 bp, Artificial
  Synthetic oligonucleotide
ggtttggttttaaaacccttgaataagtcagctcatgaagtcctttatgcccga

SEQ ID NO: 433540 - DNA, 59 bp, Artificial
  Synthetic oligonucleotide
ggtttgtaaccatgggagcacaggtttcaagacaaaaagttggctcgcatgacaatgca

SEQ ID NO: 433541 - DNA, 52 bp, Artificial
  Synthetic oligonucleotide
ggtttgtaacgtcctctgccattacatgtcaaaaggatgtggcccccactga

SEQ ID NO: 433542 - DNA, 55 bp, Artificial
  Synthetic oligonucleotide
ggtttgtaagtctcagcagtccttggcaaattcttaacatattcttccagcactt

SEQ ID NO: 433543 - DNA, 55 bp, Artificial
  Synthetic oligonucleotide
ggtttgtaccctacttgcaactccacgcagtataatggtggcatcagtgtttgga

SEQ ID NO: 433544 - DNA, 60 bp, Artificial
  Synthetic oligonucleotide
ggtttgtatatcagagtgaaagatcgtataatcgaaaaatgaccacaagtgccatctgat

SEQ ID NO: 433545 - DNA, 51 bp, Artificial
  Synthetic oligonucleotide
ggtttgtatggttttggataagatgtttgtggaaggtagtgatatacgatg

SEQ ID NO: 433546 - DNA, 57 bp, Artificial
  Synthetic oligonucleotide
ggtttgtcaatatgaatgtgagacagcaaaagaattagaatctcatcggaaaagctg

SEQ ID NO: 433547 - DNA, 54 bp, Artificial
  Synthetic oligonucleotide
ggtttgtcaattagataccactgaccgatcgaaggatcttccgattaaacgttt

SEQ ID NO: 433548 - DNA, 51 bp, Artificial
  Synthetic oligonucleotide
ggtttgtcccaagtgtgaaaatgggaaatgagattgccctctgcctgcaac

SEQ ID NO: 433549 - DNA, 56 bp, Artificial
  Synthetic oligonucleotide
ggtttgtccgatttgtacagcaagtaccgatggcgcaaactccggttcatttatct

SEQ ID NO: 433550 - DNA, 55 bp, Artificial
  Synthetic oligonucleotide
ggtttgtcctcgccttaatctctactgatagcgaatacccatggaggcttctgct

SEQ ID NO: 433551 - DNA, 59 bp, Artificial
  Synthetic oligonucleotide
ggtttgtgaagatgtggggcgtcggagctgatccgatcgttgttttacagtctacggca

SEQ ID NO: 433552 - DNA, 57 bp, Artificial
  Synthetic oligonucleotide
ggtttgtgaagtcaggtgaatggatttcaggcattttcaatggtaattggatagttc

SEQ ID NO: 433553 - DNA, 58 bp, Artificial
  Synthetic oligonucleotide
ggtttgtgactccaggggaacggccttcgggcatgttcgactcctcagtcctgtgcga

SEQ ID NO: 433554 - DNA, 60 bp, Artificial
  Synthetic oligonucleotide
ggtttgtgagaacactattccagcaaatgcgcgatgtgctggggacatttgatactgtcc

SEQ ID NO: 433555 - DNA, 55 bp, Artificial
  Synthetic oligonucleotide
ggtttgtgatgttgaacttgagatgttgcaatttcaagggactgggacctctaga

SEQ ID NO: 433556 - DNA, 55 bp, Artificial
  Synthetic oligonucleotide
ggtttgtgccaccttaaaacgcacacaagctttcgtaccctcttttcaagagtca

SEQ ID NO: 433557 - DNA, 55 bp, Artificial
  Synthetic oligonucleotide
ggtttgtgctgagatggttgcaaaatatgatcttctggtgatgacaaccggtcgg

SEQ ID NO: 433558 - DNA, 53 bp, Artificial
  Synthetic oligonucleotide
ggtttgttcatactagagttagcatggcaataatgtacttacaggtttatgcc

SEQ ID NO: 433559 - DNA, 57 bp, Artificial
  Synthetic oligonucleotide
ggtttgttcccagcataaaagctggaaatgacattgcaaattgtttgagaaagtcgg

SEQ ID NO: 433560 - DNA, 53 bp, Artificial
  Synthetic oligonucleotide
ggtttgttcccgccgtctaaaactggtgttacaggcttcctcagaaggtataa

SEQ ID NO: 433561 - DNA, 52 bp, Artificial
  Synthetic oligonucleotide
ggttttaatactttccgtaaagtataatcgtcgttgagacgttgatagtgat

SEQ ID NO: 433562 - DNA, 53 bp, Artificial
  Synthetic oligonucleotide
ggttttacagaccagtaaattactaccaaggcaagctttgtgctttaccccat

SEQ ID NO: 433563 - DNA, 60 bp, Artificial
  Synthetic oligonucleotide
ggttttacatacagatgtgcactgaactcaaactcggagactacgaaggaaggctgatcc

SEQ ID NO: 433564 - DNA, 59 bp, Artificial
  Synthetic oligonucleotide
ggttttaccacaaaggaatgatggtcacgtgttgacacgaatactggatatatcattaa

SEQ ID NO: 433565 - DNA, 55 bp, Artificial
  Synthetic oligonucleotide
ggttttaccgactgtataggtcccctgatgtccctcgtggttgtgaggggccatg

SEQ ID NO: 433566 - DNA, 55 bp, Artificial
  Synthetic oligonucleotide
ggttttaccgctccagtgtgtgagagtggagaagtaattaacctcgctgctcgca

SEQ ID NO: 433567 - DNA, 57 bp, Artificial
  Synthetic oligonucleotide
ggttttacctttatatgaggctcactctcacgctctctttgccccccgtttgatatc

SEQ ID NO: 433568 - DNA, 60 bp, Artificial
  Synthetic oligonucleotide
ggttttatatacagatgtgcactgaactcaaactcagtgacaatgaagggaggctgattc

SEQ ID NO: 433569 - DNA, 54 bp, Artificial
  Synthetic oligonucleotide
ggttttatgaatcctttaaacgctaccatgcgagctaatccctttatgaacacg

SEQ ID NO: 433570 - DNA, 55 bp, Artificial
  Synthetic oligonucleotide
ggttttatggtgacaatggcaggcaacatggtcaacaacttgttcgctctcgcta

SEQ ID NO: 433571 - DNA, 57 bp, Artificial
  Synthetic oligonucleotide
ggttttattctggtcgcaaattggagaggtaccaacaggctgtggagtcgttagcaa

SEQ ID NO: 433572 - DNA, 58 bp, Artificial
  Synthetic oligonucleotide
ggttttcacaattgtagtgaatgtggactcctcaacctttattgtttcaagcatgttc

SEQ ID NO: 433573 - DNA, 60 bp, Artificial
  Synthetic oligonucleotide
ggttttcatatgatacccgctgctttgactctacagtcactgagagcgatatccgtacgg

SEQ ID NO: 433574 - DNA, 55 bp, Artificial
  Synthetic oligonucleotide
ggttttcatggacacggtgacgatttaatttgctacgccatgccagaaactaaac

SEQ ID NO: 433575 - DNA, 55 bp, Artificial
  Synthetic oligonucleotide
ggttttccagcttagtaacggtgaactgatctctcaggttagtcctggcctgatg

SEQ ID NO: 433576 - DNA, 53 bp, Artificial
  Synthetic oligonucleotide
ggttttccctccacttgaatcgaagggttggttgttggagttttcacgtgaga

SEQ ID NO: 433577 - DNA, 52 bp, Artificial
  Synthetic oligonucleotide
ggttttccgcaagaatactcgccgccagggcgtcggtaaccgtgtggttttc

SEQ ID NO: 433578 - DNA, 52 bp, Artificial
  Synthetic oligonucleotide
ggttttccgccccgcaaagtacaatgtacagaagccaattccccgggagaaa

SEQ ID NO: 433579 - DNA, 55 bp, Artificial
  Synthetic oligonucleotide
ggttttcgatcggtcaatacatcataggctttgcacttgcaattgtcttgaaagc

SEQ ID NO: 433580 - DNA, 55 bp, Artificial
  Synthetic oligonucleotide
ggttttctacgtcgaaagatgcgggaagctcctaccgtgtccgtctccggaggca

SEQ ID NO: 433581 - DNA, 56 bp, Artificial
  Synthetic oligonucleotide
ggttttctatatttcaatggataaaactttgaatcaataccccgccttgactgcag

SEQ ID NO: 433582 - DNA, 55 bp, Artificial
  Synthetic oligonucleotide
ggttttctccccagcatgccccgaaccggggtgcagaggtcccaaggccctgagc

SEQ ID NO: 433583 - DNA, 55 bp, Artificial
  Synthetic oligonucleotide
ggttttctcgcaatttgtgcaaagcaagattgcccctatcaatcagccggggccg

SEQ ID NO: 433584 - DNA, 54 bp, Artificial
  Synthetic oligonucleotide
ggttttcttagaacgcctaatggaggcctataggagatacactccgtttgaccc

SEQ ID NO: 433585 - DNA, 53 bp, Artificial
  Synthetic oligonucleotide
ggttttgaagacccttaagaaaagaccagtctgagggtgtaaggtcgtccaga

SEQ ID NO: 433586 - DNA, 57 bp, Artificial
  Synthetic oligonucleotide
ggttttgaccccttgtacaccttgtctacgcataatggagtgtccttatgcgcccta

SEQ ID NO: 433587 - DNA, 59 bp, Artificial
  Synthetic oligonucleotide
ggttttgactatagcgaattggtcaaggctcttaataagcgagagaaacatgacaggcg

SEQ ID NO: 433588 - DNA, 53 bp, Artificial
  Synthetic oligonucleotide
ggttttgatacacgtggcggccatccgtataatattaccggatggccgcgctt

SEQ ID NO: 433589 - DNA, 53 bp, Artificial
  Synthetic oligonucleotide
ggttttgatttagaggttgaattcgtcttttatgaggatacctcggttgaagg

SEQ ID NO: 433590 - DNA, 55 bp, Artificial
  Synthetic oligonucleotide
ggttttgcgcctgatgaagacatgtgtgccaccattccaaccccagtccagtgtg

SEQ ID NO: 433591 - DNA, 55 bp, Artificial
  Synthetic oligonucleotide
ggttttgctagacaatgagagggttatcatagaaagaccgttgatactcgtgggt

SEQ ID NO: 433592 - DNA, 58 bp, Artificial
  Synthetic oligonucleotide
ggttttgggagctatgatatgattatgtcccctccaaaaagttgcgtgctcgaaatgc

SEQ ID NO: 433593 - DNA, 56 bp, Artificial
  Synthetic oligonucleotide
ggttttgtggaaccaccctatacaacgtgtgatccataatgagctcgagcaatatt

SEQ ID NO: 433594 - DNA, 59 bp, Artificial
  Synthetic oligonucleotide
ggttttgtggtgagacgggttcgactcgaggctcagcctttggtcgctagtatgatgcc

SEQ ID NO: 433595 - DNA, 54 bp, Artificial
  Synthetic oligonucleotide
ggttttgtttacagtcgacttttgcgttattagacatttgttaatagcagtttc

SEQ ID NO: 433596 - DNA, 59 bp, Artificial
  Synthetic oligonucleotide
ggtttttagatgtatggacttacaatgcagaacttctggtgctcatggaaaacgaaaga

SEQ ID NO: 433597 - DNA, 54 bp, Artificial
  Synthetic oligonucleotide
ggtttttcaacctgttcattttgacaagacgtctgctggtttaggtattcctgg

SEQ ID NO: 433598 - DNA, 57 bp, Artificial
  Synthetic oligonucleotide
ggtttttcacttcttttacaaatgtcccacagctaagtagcagaactccaatcgcaa

SEQ ID NO: 433599 - DNA, 50 bp, Artificial
  Synthetic oligonucleotide
ggtttttcagggtacctaataggtggacctgtaattaggaagggcgtttc

SEQ ID NO: 433600 - DNA, 60 bp, Artificial
  Synthetic oligonucleotide
ggtttttctcgtcttaaataatggacatatatcatgatttatggacataattcatatacg

SEQ ID NO: 433601 - DNA, 58 bp, Artificial
  Synthetic oligonucleotide
ggtttttctgagacaaacattctttcttgatgcttcaccctaaggagggatttgatga

SEQ ID NO: 433602 - DNA, 55 bp, Artificial
  Synthetic oligonucleotide
ggtttttgggtttcccccagcctgttcataacatcaactcatgtcataccccagg

SEQ ID NO: 433603 - DNA, 53 bp, Artificial
  Synthetic oligonucleotide
ggtttttggtttcctgaatactagtttttgccaacattctggcttgtagtttc

SEQ ID NO: 433604 - DNA, 56 bp, Artificial
  Synthetic oligonucleotide
gtaaaaaacgctacagaagcatgacgtctaagcggctgggtacaaggttgaccggc

SEQ ID NO: 433605 - DNA, 57 bp, Artificial
  Synthetic oligonucleotide
gtaaaaaagcggtcagcggaagcatcgggtgcgacataaattccagacgtttatgcc

SEQ ID NO: 433606 - DNA, 56 bp, Artificial
  Synthetic oligonucleotide
gtaaaaaattggatgacagaaaccttgttggtccagaatgcgaacccagactgtaa

SEQ ID NO: 433607 - DNA, 54 bp, Artificial
  Synthetic oligonucleotide
gtaaaaaatttccttgacatcatgggtgacagaaagcgttatacgaaaactgtt

SEQ ID NO: 433608 - DNA, 56 bp, Artificial
  Synthetic oligonucleotide
gtaaaaactctttcgccatggacgcgtacacagccagagcgctttcggttttggag

SEQ ID NO: 433609 - DNA, 60 bp, Artificial
  Synthetic oligonucleotide
gtaaaaagaatacctggaaaatcgtcatctattgtcaaatgcacgaaattgatgcgcgat

SEQ ID NO: 433610 - DNA, 60 bp, Artificial
  Synthetic oligonucleotide
gtaaaaattctctcgtcagtacggcagagtgtgcggcagtgcggtgtaccttccatgtca

SEQ ID NO: 433611 - DNA, 58 bp, Artificial
  Synthetic oligonucleotide
gtaaaaattgtgggtatgggcgattcacctatgctagttctggataactatccctcga

SEQ ID NO: 433612 - DNA, 60 bp, Artificial
  Synthetic oligonucleotide
gtaaaacacactgaggaatgcacatgcggatttgccagcaataaaaccatagaatgtgcc

SEQ ID NO: 433613 - DNA, 53 bp, Artificial
  Synthetic oligonucleotide
gtaaaacaccataagtatgtgtcagggaaagctagggaatggttttatagaca

SEQ ID NO: 433614 - DNA, 60 bp, Artificial
  Synthetic oligonucleotide
gtaaaacacttcattagtgtacctatcaacaacactgagaatcagacttacagtagcatc

SEQ ID NO: 433615 - DNA, 50 bp, Artificial
  Synthetic oligonucleotide
gtaaaacatgatgaccacctattacaagattctgaattagctggcttgtt

SEQ ID NO: 433616 - DNA, 52 bp, Artificial
  Synthetic oligonucleotide
gtaaaacatgcccggcttaccgtgagccgcctttgaaagaaaggtttacacg

SEQ ID NO: 433617 - DNA, 55 bp, Artificial
  Synthetic oligonucleotide
gtaaaaccgggagacatacttttgattaccagcacaggaaatctaattgcccctc

SEQ ID NO: 433618 - DNA, 55 bp, Artificial
  Synthetic oligonucleotide
gtaaaacctcgtgtaaacagacggctaaatcgcgtgtatctcgaaagttggtgta

SEQ ID NO: 433619 - DNA, 54 bp, Artificial
  Synthetic oligonucleotide
gtaaaacgaggttcctcccagtggccggtggaacaagcagtgtttacattgagg

SEQ ID NO: 433620 - DNA, 58 bp, Artificial
  Synthetic oligonucleotide
gtaaaacgtgcatctgtaactgacatttacagggggtgcaaacaagcaggtacctgcc

SEQ ID NO: 433621 - DNA, 51 bp, Artificial
  Synthetic oligonucleotide
gtaaaactcattaacggcctgataggggcaacaccctttggaaaccgttag

SEQ ID NO: 433622 - DNA, 55 bp, Artificial
  Synthetic oligonucleotide
gtaaaacttctaacaactgactactcgcactttacccagaaaagtgtgtgttaga

SEQ ID NO: 433623 - DNA, 60 bp, Artificial
  Synthetic oligonucleotide
gtaaaacttctgggagcgatggcaaatccgcaaaatcgagtgcaaacagaaagacagcag

SEQ ID NO: 433624 - DNA, 50 bp, Artificial
  Synthetic oligonucleotide
gtaaaagaaaaaggagcaaccctgctgttgttcgacactataccactagt

SEQ ID NO: 433625 - DNA, 55 bp, Artificial
  Synthetic oligonucleotide
gtaaaagacaatcaggttatacagcaagcctggtctgctatgaatgctatggtag

SEQ ID NO: 433626 - DNA, 60 bp, Artificial
  Synthetic oligonucleotide
gtaaaagattggctattacagcgtgccacagatggcaattggggcaagtcgatcacctgg

SEQ ID NO: 433627 - DNA, 51 bp, Artificial
  Synthetic oligonucleotide
gtaaaagcgtttcttgttttaatttggtctaacacgtaattcgtactcttc

SEQ ID NO: 433628 - DNA, 60 bp, Artificial
  Synthetic oligonucleotide
gtaaaagctagagagatgtcgcacattctctctctagacaccgattcggagtcccttcaa

SEQ ID NO: 433629 - DNA, 52 bp, Artificial
  Synthetic oligonucleotide
gtaaaaggcgagttttacccgtgcaagcctgacatttttgaatctacttacg

SEQ ID NO: 433630 - DNA, 59 bp, Artificial
  Synthetic oligonucleotide
gtaaaaggtatccagctaggatctgaactagccccagacaccacagtgatactatcact

SEQ ID NO: 433631 - DNA, 53 bp, Artificial
  Synthetic oligonucleotide
gtaaaataccaactaattctcgttcgattccggcgaacattctattttaccaa

SEQ ID NO: 433632 - DNA, 58 bp, Artificial
  Synthetic oligonucleotide
gtaaaataccatatgcatatttcaaagaaagctagagattgggcttacagacatcact

SEQ ID NO: 433633 - DNA, 55 bp, Artificial
  Synthetic oligonucleotide
gtaaaataggtggcgtgactatacaccgtgaagtacttagaatgtcgtctcactc

SEQ ID NO: 433634 - DNA, 59 bp, Artificial
  Synthetic oligonucleotide
gtaaaatcgcccctttgatggtagcatacatgctagaaagagagttagtccgcaaaaca

SEQ ID NO: 433635 - DNA, 60 bp, Artificial
  Synthetic oligonucleotide
gtaaaatgttcgggccacacacggtgattctgctgcatcagtctttacggcgttatagga

SEQ ID NO: 433636 - DNA, 60 bp, Artificial
  Synthetic oligonucleotide
gtaaaattagctcctgatgactcacgaggtgaatggctcacagtgaacgacgactgaatc

SEQ ID NO: 433637 - DNA, 58 bp, Artificial
  Synthetic oligonucleotide
gtaaacaaataataggacagctagaaccatctattaagacaggatcagaagaaattaa

SEQ ID NO: 433638 - DNA, 60 bp, Artificial
  Synthetic oligonucleotide
gtaaacaacatccggagacgcttatgcaccttttgtcagcatgccctgtgctggcgagag

SEQ ID NO: 433639 - DNA, 60 bp, Artificial
  Synthetic oligonucleotide
gtaaacaagggaagaagcctcatggtgatgtgcagaaagagggtactgaggaagagaaga

SEQ ID NO: 433640 - DNA, 55 bp, Artificial
  Synthetic oligonucleotide
gtaaacaatacaggtagtattaacatgacattcaatcacagcagcggtggagatc

SEQ ID NO: 433641 - DNA, 55 bp, Artificial
  Synthetic oligonucleotide
gtaaacaattccaagttccaaaatggtcaacaacagcagaccaaaacggcaacga

SEQ ID NO: 433642 - DNA, 55 bp, Artificial
  Synthetic oligonucleotide
gtaaacacaaggcaccaatgcagacaaaatttcctgcactattgcttacatccaa

SEQ ID NO: 433643 - DNA, 54 bp, Artificial
  Synthetic oligonucleotide
gtaaacacatataataggtggcctaccttaaggaatgctatagttttaccctta

SEQ ID NO: 433644 - DNA, 56 bp, Artificial
  Synthetic oligonucleotide
gtaaacactccccaccgtgccctcagccaggatgcgtaactaaacgcccaccagta

SEQ ID NO: 433645 - DNA, 52 bp, Artificial
  Synthetic oligonucleotide
gtaaacactccccaccgtgtcctcagccaggaaccgtaaccaaccgtccacc

SEQ ID NO: 433646 - DNA, 55 bp, Artificial
  Synthetic oligonucleotide
gtaaacagcctcacgtccactacgatgacgctgaattacgataacggatcgcctg

SEQ ID NO: 433647 - DNA, 56 bp, Artificial
  Synthetic oligonucleotide
gtaaacagcgtagctataccgctcctttccaccggcgtgtactctggagggaaaga

SEQ ID NO: 433648 - DNA, 54 bp, Artificial
  Synthetic oligonucleotide
gtaaacaggaccaaggttccaatgttttgtgggtggagactgtgttctgacggt

SEQ ID NO: 433649 - DNA, 58 bp, Artificial
  Synthetic oligonucleotide
gtaaacatcacacctcgaattaggacactgtgggacgtccaaaagctagtgggagctc

SEQ ID NO: 433650 - DNA, 53 bp, Artificial
  Synthetic oligonucleotide
gtaaacattgtgaagcatatggttcattacaaaatgcacgagcgctgtgatga

SEQ ID NO: 433651 - DNA, 55 bp, Artificial
  Synthetic oligonucleotide
gtaaacatttgggccattatacctctcagcgcatccgtgttttaccgcggagccg

SEQ ID NO: 433652 - DNA, 57 bp, Artificial
  Synthetic oligonucleotide
gtaaacatttgttgacccgacttcatgacagactgcaaaccgttgaaactagcaccc

SEQ ID NO: 433653 - DNA, 54 bp, Artificial
  Synthetic oligonucleotide
gtaaaccaagaaactttctgttaatccagtgttctttaattacatcatataaac

SEQ ID NO: 433654 - DNA, 54 bp, Artificial
  Synthetic oligonucleotide
gtaaaccacatcaggaatcttaggtttagaaaatacccagtttcctaattcaca

SEQ ID NO: 433655 - DNA, 54 bp, Artificial
  Synthetic oligonucleotide
gtaaaccacggaacgaggttcaatcccttgtcgacccacggtttgcgcaacaca

SEQ ID NO: 433656 - DNA, 55 bp, Artificial
  Synthetic oligonucleotide
gtaaaccagcagtgcaaacagcgatcgcaactataacagatattcgtgtatcctc

SEQ ID NO: 433657 - DNA, 57 bp, Artificial
  Synthetic oligonucleotide
gtaaaccaggctagtatgattatcaacacaatcttgatgtttgttagtacactaggc

SEQ ID NO: 433658 - DNA, 52 bp, Artificial
  Synthetic oligonucleotide
gtaaaccaggtgaattctgttgtaacatcggtaatcggccgtgtgaaatcat

SEQ ID NO: 433659 - DNA, 60 bp, Artificial
  Synthetic oligonucleotide
gtaaaccattagaagctgatttgacggtgaatgagctagactatgagaacaataaaatta

SEQ ID NO: 433660 - DNA, 55 bp, Artificial
  Synthetic oligonucleotide
gtaaaccattgattcgtcgagtatttgataatgtagttcagccctatgtcgccaa

SEQ ID NO: 433661 - DNA, 56 bp, Artificial
  Synthetic oligonucleotide
gtaaacccactcgagacccatggggttcacctgttgcaactgaatggaagcctaag

SEQ ID NO: 433662 - DNA, 60 bp, Artificial
  Synthetic oligonucleotide
gtaaacccagagatccagctgtacctagaaggcgctcagagggggatgactctctaccaa

SEQ ID NO: 433663 - DNA, 58 bp, Artificial
  Synthetic oligonucleotide
gtaaacccatcgtttaatttagaacatggcctgaaattgtctgatttgcttgataaca

SEQ ID NO: 433664 - DNA, 54 bp, Artificial
  Synthetic oligonucleotide
gtaaaccccatttgggttcgagtggtagtcttcatacattcgacgaactattcg

SEQ ID NO: 433665 - DNA, 59 bp, Artificial
  Synthetic oligonucleotide
gtaaaccctgttccgactactgtctctcacatatcgtcaatcttcacgaggattgggga

SEQ ID NO: 433666 - DNA, 55 bp, Artificial
  Synthetic oligonucleotide
gtaaaccgaggttttggataatggtcgattttggcacgcatggcatgattggcgc

SEQ ID NO: 433667 - DNA, 57 bp, Artificial
  Synthetic oligonucleotide
gtaaaccgcctgcatgcgcatcataataaagtaggtaaattgcattgaaaattacac

SEQ ID NO: 433668 - DNA, 60 bp, Artificial
  Synthetic oligonucleotide
gtaaacctcatttgagcccttccggcagtctgtacacattcgatgagttatttggtgcta

SEQ ID NO: 433669 - DNA, 53 bp, Artificial
  Synthetic oligonucleotide
gtaaacctctaccatatacaaacttacatcctttactaatgttacttaaaaga

SEQ ID NO: 433670 - DNA, 55 bp, Artificial
  Synthetic oligonucleotide
gtaaacctgattaggtacctactgccactaaagtcagcaacgacctcttggaaag

SEQ ID NO: 433671 - DNA, 60 bp, Artificial
  Synthetic oligonucleotide
gtaaacgcatgcggatcggacatctgcttaagaaatatcgacatgaataagcaatttgtc

SEQ ID NO: 433672 - DNA, 54 bp, Artificial
  Synthetic oligonucleotide
gtaaacggacgggctgtagtgcgagggcataagcttgagggacaccgcggtccc

SEQ ID NO: 433673 - DNA, 56 bp, Artificial
  Synthetic oligonucleotide
gtaaacggcgcgcatatcgaattgttcctcgtccaaccatatgtgtaaacctcggt

SEQ ID NO: 433674 - DNA, 56 bp, Artificial
  Synthetic oligonucleotide
gtaaacgtctatttatggggcagaaaggagtctggaatggatcactcaaagctgag

SEQ ID NO: 433675 - DNA, 55 bp, Artificial
  Synthetic oligonucleotide
gtaaactacatcaagcacggagtaactgaggtgataccgcgcttctgagttctgc

SEQ ID NO: 433676 - DNA, 59 bp, Artificial
  Synthetic oligonucleotide
gtaaactatgctactgatatgaaataaggacctagttcatcacattcttaaactaataa

SEQ ID NO: 433677 - DNA, 58 bp, Artificial
  Synthetic oligonucleotide
gtaaactcagtgtctacaaaggagggagacagctctagtactggagctggaaaagcct

SEQ ID NO: 433678 - DNA, 60 bp, Artificial
  Synthetic oligonucleotide
gtaaactcattacgatttatatttaaatgtacagcagctgatcgagcggtgttcgataga

SEQ ID NO: 433679 - DNA, 57 bp, Artificial
  Synthetic oligonucleotide
gtaaactccattcccttcttattattatatttgatcgtcattttatgtgtctgggtc

SEQ ID NO: 433680 - DNA, 55 bp, Artificial
  Synthetic oligonucleotide
gtaaactctaacagtcacttttggctgcagccattagaagatgcaaaggtggcat

SEQ ID NO: 433681 - DNA, 59 bp, Artificial
  Synthetic oligonucleotide
gtaaactctagaattgaaatctagatgaccactcaaataattatgaattcctaatgaac

SEQ ID NO: 433682 - DNA, 60 bp, Artificial
  Synthetic oligonucleotide
gtaaactgaaatttggagactgagtctgcatagcctgtgtacgtcggtcacttttatgcg

SEQ ID NO: 433683 - DNA, 54 bp, Artificial
  Synthetic oligonucleotide
gtaaactggaagaaaagaacggtatgaatccgagtagacatttaacccaatgga

SEQ ID NO: 433684 - DNA, 58 bp, Artificial
  Synthetic oligonucleotide
gtaaacttggcgtacgcgatctgaaaatctataatagagggagagttgataggttgat

SEQ ID NO: 433685 - DNA, 56 bp, Artificial
  Synthetic oligonucleotide
gtaaacttggtttcgcaagccatgcagcacctcccgttacttgtgtactttctagg

SEQ ID NO: 433686 - DNA, 55 bp, Artificial
  Synthetic oligonucleotide
gtaaactttaccgtgcctaattatctacaaacaagtaatggctatctgttgtttg

SEQ ID NO: 433687 - DNA, 55 bp, Artificial
  Synthetic oligonucleotide
gtaaactttgacttaaacgcgccgcaataaactcaaggcctgcaaaatttcactc

SEQ ID NO: 433688 - DNA, 58 bp, Artificial
  Synthetic oligonucleotide
gtaaacttttggactcaggtccagatgtccacacaaataattgtgtggtcctagagac

SEQ ID NO: 433689 - DNA, 54 bp, Artificial
  Synthetic oligonucleotide
gtaaagaacgacctacgggatcgtttccaagtgatccacaggtttcacgccaag

SEQ ID NO: 433690 - DNA, 52 bp, Artificial
  Synthetic oligonucleotide
gtaaagaacggaatagtctcggtcgccttgactcacacgtctaatggaaaga

SEQ ID NO: 433691 - DNA, 58 bp, Artificial
  Synthetic oligonucleotide
gtaaagaagagaacagcgtcttgttacaccctataagcctgcatggaatggaggaccc

SEQ ID NO: 433692 - DNA, 55 bp, Artificial
  Synthetic oligonucleotide
gtaaagaatagcatctaagattttggtccctgaagaaagcaaactgctgatactg

SEQ ID NO: 433693 - DNA, 58 bp, Artificial
  Synthetic oligonucleotide
gtaaagaccctttggaacgtgcaaagataattgctgacggaataacagaagtcattga

SEQ ID NO: 433694 - DNA, 58 bp, Artificial
  Synthetic oligonucleotide
gtaaagagcaggttaagagacaggtagttgttgataatttgaattggtcaggatacag

SEQ ID NO: 433695 - DNA, 53 bp, Artificial
  Synthetic oligonucleotide
gtaaagagctggttaggaaacaggtagttgttgataatttaaactggtcggga

SEQ ID NO: 433696 - DNA, 56 bp, Artificial
  Synthetic oligonucleotide
gtaaagagggggacgtcatacttaccctgggcattgtggcgagagacggtcaccgc

SEQ ID NO: 433697 - DNA, 55 bp, Artificial
  Synthetic oligonucleotide
gtaaagagtcagattctagaagtcccacctcatgtggcgatgcaccaagcaacgg

SEQ ID NO: 433698 - DNA, 57 bp, Artificial
  Synthetic oligonucleotide
gtaaagatggctaagcttgaaagtgaggttaacacaatacgtgagtccatagtttct

SEQ ID NO: 433699 - DNA, 60 bp, Artificial
  Synthetic oligonucleotide
gtaaagcaaataatgctccatacagagattggtttcaagctctctggtttgaggataaga

SEQ ID NO: 433700 - DNA, 55 bp, Artificial
  Synthetic oligonucleotide
gtaaagcaactatgtaaactcctcaggggagccaaggcattaacagaggtagtag

SEQ ID NO: 433701 - DNA, 55 bp, Artificial
  Synthetic oligonucleotide
gtaaagcaactgtgtaaactcctcagaggggctaaagctctaacagacgtagtac

SEQ ID NO: 433702 - DNA, 53 bp, Artificial
  Synthetic oligonucleotide
gtaaagcacagcctatcactattggtttagtactgtgctgtaatagtatcaga

SEQ ID NO: 433703 - DNA, 60 bp, Artificial
  Synthetic oligonucleotide
gtaaagcaccatatgcataggtcaaggaaagctaaggactggtcttatagacatcactat

SEQ ID NO: 433704 - DNA, 58 bp, Artificial
  Synthetic oligonucleotide
gtaaagcactttacgtggcacccaccagagaactgagagaggctatggaccggcggat

SEQ ID NO: 433705 - DNA, 57 bp, Artificial
  Synthetic oligonucleotide
gtaaagcagtaaccttcaaagatcgtaacacttgccaaagttacccattgagtcaga

SEQ ID NO: 433706 - DNA, 58 bp, Artificial
  Synthetic oligonucleotide
gtaaagcagttaactcgtatgagaagttacttatagctgagaatgataagatgcacac

SEQ ID NO: 433707 - DNA, 50 bp, Artificial
  Synthetic oligonucleotide
gtaaagcatcaggattccaaatctgatttgaagaagattgagcacataat

SEQ ID NO: 433708 - DNA, 60 bp, Artificial
  Synthetic oligonucleotide
gtaaagccttggattgcgaagggacacagtttgtattgatgcattcttgaactgtcgtct

SEQ ID NO: 433709 - DNA, 53 bp, Artificial
  Synthetic oligonucleotide
gtaaagcgctgcctgagtgtgacgcatgctgcctatcccgccctcggtttgcc

SEQ ID NO: 433710 - DNA, 58 bp, Artificial
  Synthetic oligonucleotide
gtaaagcgtcctgggagaccttgccggtaaacgctcagtagacatcccgctgcttgct

SEQ ID NO: 433711 - DNA, 53 bp, Artificial
  Synthetic oligonucleotide
gtaaagcgtctaatgttcgttccgcggttacgggtgacgtctatattggtaaa

SEQ ID NO: 433712 - DNA, 51 bp, Artificial
  Synthetic oligonucleotide
gtaaagctaacccctctctgtgttgctttaaactgtggtgatgcaaccatt

SEQ ID NO: 433713 - DNA, 60 bp, Artificial
  Synthetic oligonucleotide
gtaaagctatgactattgatcaggcattaaatggaaaattcggctcagtagtaagaaata

SEQ ID NO: 433714 - DNA, 60 bp, Artificial
  Synthetic oligonucleotide
gtaaagctctgttaaacagcgagatattgacagaaaacagagctacgctggaccgcctca

SEQ ID NO: 433715 - DNA, 60 bp, Artificial
  Synthetic oligonucleotide
gtaaagctggctgagaagctctcatagccggtgtcctcaggcctctgggaaggtccggga

SEQ ID NO: 433716 - DNA, 57 bp, Artificial
  Synthetic oligonucleotide
gtaaaggaaaactaaacatgttgttgacaatccataattggactgaccagtgcccca

SEQ ID NO: 433717 - DNA, 55 bp, Artificial
  Synthetic oligonucleotide
gtaaaggaacatctaccgaagatggcagttgggtagcgccactgaaggatgatag

SEQ ID NO: 433718 - DNA, 59 bp, Artificial
  Synthetic oligonucleotide
gtaaaggaagtgattgctcttggtgataccgagcaagttcccttcatatctaggttgcc

SEQ ID NO: 433719 - DNA, 55 bp, Artificial
  Synthetic oligonucleotide
gtaaaggagttagctcagaaatataacatcccacaattagtagctaaacagatag

SEQ ID NO: 433720 - DNA, 50 bp, Artificial
  Synthetic oligonucleotide
gtaaaggatctgcccttaagttatttgcgacccagtcagataagactcgc

SEQ ID NO: 433721 - DNA, 60 bp, Artificial
  Synthetic oligonucleotide
gtaaagggatgggaattgtgcaaccatatatgcggaatgattttgatcggaacgagatgc

SEQ ID NO: 433722 - DNA, 58 bp, Artificial
  Synthetic oligonucleotide
gtaaagggcattcaattgggttctgagctagctcctgaaactacaattatttgtcatg

SEQ ID NO: 433723 - DNA, 52 bp, Artificial
  Synthetic oligonucleotide
gtaaagggctaactaaacttaacgttttaaccgtgcacgaggctcaaggcga

SEQ ID NO: 433724 - DNA, 58 bp, Artificial
  Synthetic oligonucleotide
gtaaagggctatctctgtatgaagaacaggtggaccaccacttgtgaaacaaattggc

SEQ ID NO: 433725 - DNA, 57 bp, Artificial
  Synthetic oligonucleotide
gtaaaggggaatttttctattgcaatacatcacgactgtttaataatacttgcataa

SEQ ID NO: 433726 - DNA, 55 bp, Artificial
  Synthetic oligonucleotide
gtaaaggtgcaactgtactaaatttggaacacttactcgagtatgctccacagca

SEQ ID NO: 433727 - DNA, 51 bp, Artificial
  Synthetic oligonucleotide
gtaaaggttaacgtacacctgggccccttactccgcgcggttatgtttgaa

SEQ ID NO: 433728 - DNA, 56 bp, Artificial
  Synthetic oligonucleotide
gtaaagtgaaaggagttgtgtgttagccttgcttagggaaccatctagtgggataa

SEQ ID NO: 433729 - DNA, 60 bp, Artificial
  Synthetic oligonucleotide
gtaaagtgccgaaatcgctgactcgtcctgatgatcttctcgaggccttgacagctttag

SEQ ID NO: 433730 - DNA, 60 bp, Artificial
  Synthetic oligonucleotide
gtaaagtgcgtgagtgtcgtggtcaacttgaggaagatgctcgtcaaggcttcatccttc

SEQ ID NO: 433731 - DNA, 57 bp, Artificial
  Synthetic oligonucleotide
gtaaagtggaatgtgtttgtagagataactggactggaaccaataggccagtattgg

SEQ ID NO: 433732 - DNA, 55 bp, Artificial
  Synthetic oligonucleotide
gtaaagttaaagagttagcaactcgggctgaccagtctgccctttgcgtggggtg

SEQ ID NO: 433733 - DNA, 60 bp, Artificial
  Synthetic oligonucleotide
gtaaagttcaatcgtttgaatctaggcatgatgtctctcatattgggaaggtgatgtgca

SEQ ID NO: 433734 - DNA, 55 bp, Artificial
  Synthetic oligonucleotide
gtaaagttgaccccactctgcgtcactttacactgtacaaatgctacctttaaga

SEQ ID NO: 433735 - DNA, 56 bp, Artificial
  Synthetic oligonucleotide
gtaaagttgaccccactctgtgtcactttaaattgtacaaatgcttctgttaatgt

SEQ ID NO: 433736 - DNA, 56 bp, Artificial
  Synthetic oligonucleotide
gtaaagttggccagggtatatcagcctggagtaagaccttttgcgccttgtttggc

SEQ ID NO: 433737 - DNA, 55 bp, Artificial
  Synthetic oligonucleotide
gtaaataatgccgtggtgatgcccgctcacggcccagccaaaagcatggagtacg

SEQ ID NO: 433738 - DNA, 59 bp, Artificial
  Synthetic oligonucleotide
gtaaatactacgcgactgcaatgcgaagggatgacacagtcgtatgcactacataggtc

SEQ ID NO: 433739 - DNA, 59 bp, Artificial
  Synthetic oligonucleotide
gtaaatactggggcagaccacctagaaaatttctcacagacatgccattttatactcac

SEQ ID NO: 433740 - DNA, 53 bp, Artificial
  Synthetic oligonucleotide
gtaaatacttcacctaaattttcagtaaacgcccaaggcgtattagatgttcc

SEQ ID NO: 433741 - DNA, 57 bp, Artificial
  Synthetic oligonucleotide
gtaaatatataaagtatggaactaatacttatattgattctaaactattgactgtta

SEQ ID NO: 433742 - DNA, 50 bp, Artificial
  Synthetic oligonucleotide
gtaaatatatcagtgcctaggcactggtttcgatctggtaatcggttggt

SEQ ID NO: 433743 - DNA, 54 bp, Artificial
  Synthetic oligonucleotide
gtaaatatccttgggtcccttggatataaataacacgtcacgaggcgggtgtag

SEQ ID NO: 433744 - DNA, 56 bp, Artificial
  Synthetic oligonucleotide
gtaaatatctgagtccccaataggtaaatgagccccccaattgagtccccaatata

SEQ ID NO: 433745 - DNA, 50 bp, Artificial
  Synthetic oligonucleotide
gtaaatatgagtcggagatcctccagtcacatagggcatttggtccctat

SEQ ID NO: 433746 - DNA, 56 bp, Artificial
  Synthetic oligonucleotide
gtaaatatggatgaaaaacctagcacatcaggtataaagaatccaaaagaattaaa

SEQ ID NO: 433747 - DNA, 55 bp, Artificial
  Synthetic oligonucleotide
gtaaatatttgtcgtcgtacaatctttcgaatcgagcccatcctcatgagtatta

SEQ ID NO: 433748 - DNA, 58 bp, Artificial
  Synthetic oligonucleotide
gtaaatcaaatgtcacaggactgctactgacacgtgatggagggacaaataccacaac

SEQ ID NO: 433749 - DNA, 60 bp, Artificial
  Synthetic oligonucleotide
gtaaatcaatccgcctcctcctgatggcccttttcttggcttgcctgtgcgctgtcttga

SEQ ID NO: 433750 - DNA, 60 bp, Artificial
  Synthetic oligonucleotide
gtaaatcaccctgctgcatacttacaggttaagcatgatgatacacctattcctctagga

SEQ ID NO: 433751 - DNA, 53 bp, Artificial
  Synthetic oligonucleotide
gtaaatcacgcggcttatctccccgtcatcgcactccatcttgcttgccggtt

SEQ ID NO: 433752 - DNA, 55 bp, Artificial
  Synthetic oligonucleotide
gtaaatccaatgccgggtccgctcacgcgagcaatcgcgcgcgccgcttatgtgt

SEQ ID NO: 433753 - DNA, 60 bp, Artificial
  Synthetic oligonucleotide
gtaaatccaatgcctggcccgcttacacgtgcgattgctcgcgccgcttacgcatagtcc

SEQ ID NO: 433754 - DNA, 51 bp, Artificial
  Synthetic oligonucleotide
gtaaatccatggttgtgacaattgatgctgcgatagatggaacagccacaa

SEQ ID NO: 433755 - DNA, 55 bp, Artificial
  Synthetic oligonucleotide
gtaaatcctacaagctggaggcatgtacagctgtctagttgcatatcgcctcgat

SEQ ID NO: 433756 - DNA, 60 bp, Artificial
  Synthetic oligonucleotide
gtaaatctacgtcacgcactgatagttaggattttttcacgctttgacatgatgtcggag

SEQ ID NO: 433757 - DNA, 60 bp, Artificial
  Synthetic oligonucleotide
gtaaatctagaaatgggttgaatatctacgatatgtatgattatatcacgacttttgatc

SEQ ID NO: 433758 - DNA, 54 bp, Artificial
  Synthetic oligonucleotide
gtaaatgaaaaacggagactaaaactgattatgcctgctaggttttatcctaac

SEQ ID NO: 433759 - DNA, 60 bp, Artificial
  Synthetic oligonucleotide
gtaaatgaccatcctaatgagttctatgcagcccctaagaatggcaaaacaatggcctcc

SEQ ID NO: 433760 - DNA, 56 bp, Artificial
  Synthetic oligonucleotide
gtaaatgaggatgataagaacggactaacgtaagtttgtggcggagcctggaagat

SEQ ID NO: 433761 - DNA, 56 bp, Artificial
  Synthetic oligonucleotide
gtaaatgatatttcaacacaaacgtctacaatcagtaaaaatcttagattaaaaga

SEQ ID NO: 433762 - DNA, 60 bp, Artificial
  Synthetic oligonucleotide
gtaaatgcatatctccatctttgtgtgcctctcgggcacatacaatatacttaggggtcc

SEQ ID NO: 433763 - DNA, 56 bp, Artificial
  Synthetic oligonucleotide
gtaaatgccacaccgacaagggttcaatctctacaactaaaccctttcagaacatc

SEQ ID NO: 433764 - DNA, 54 bp, Artificial
  Synthetic oligonucleotide
gtaaatgcgcttgtgggttaaccgtagtaccttgcaaattcaatggggaggtac

SEQ ID NO: 433765 - DNA, 57 bp, Artificial
  Synthetic oligonucleotide
gtaaatgcgtgggtaaactggacagacacggataggtaaatgagacgccgataggta

SEQ ID NO: 433766 - DNA, 60 bp, Artificial
  Synthetic oligonucleotide
gtaaatgctatcaatttgcacttgggcaaggaaccacgctggacaacaaacattcaaatg

SEQ ID NO: 433767 - DNA, 55 bp, Artificial
  Synthetic oligonucleotide
gtaaatggattaaccacaagatcaacgaattcatggggactgatttcacagtacg

SEQ ID NO: 433768 - DNA, 60 bp, Artificial
  Synthetic oligonucleotide
gtaaatggctacgcagacaaatgaatatgtattggagtagatggttggtgactctttgtt

SEQ ID NO: 433769 - DNA, 51 bp, Artificial
  Synthetic oligonucleotide
gtaaatggtctcttgcctttttctcgtccgaacccaaatgtttcaagtctg

SEQ ID NO: 433770 - DNA, 55 bp, Artificial
  Synthetic oligonucleotide
gtaaatggtggtgcaagaaaggtaagagtagcgaagaatgccatgacaaaagggg

SEQ ID NO: 433771 - DNA, 55 bp, Artificial
  Synthetic oligonucleotide
gtaaatggttcatgttttactataatgactgatggcccgagtgatgggctggcct

SEQ ID NO: 433772 - DNA, 55 bp, Artificial
  Synthetic oligonucleotide
gtaaatgtatcaacattgcccccggacactttaactaccggaatcagaccgagac

SEQ ID NO: 433773 - DNA, 54 bp, Artificial
  Synthetic oligonucleotide
gtaaatgtcactggtaaccctcttttcaatcgctatgatgacgttgaaaattct

SEQ ID NO: 433774 - DNA, 60 bp, Artificial
  Synthetic oligonucleotide
gtaaatgttctataatcactgatcttagcaagttcaatcaggcattcaggtatgaaacgt

SEQ ID NO: 433775 - DNA, 60 bp, Artificial
  Synthetic oligonucleotide
gtaaattagggtacagtggttataatgtgtatgctgacagaaataaatctgatgctgatc

SEQ ID NO: 433776 - DNA, 55 bp, Artificial
  Synthetic oligonucleotide
gtaaattccatcaaggaacactactggttgtagtgatcccggagtttgttaattc

SEQ ID NO: 433777 - DNA, 55 bp, Artificial
  Synthetic oligonucleotide
gtaaattccattgacttagaagagccaagtgggcaaacagctgattggaaatcca

SEQ ID NO: 433778 - DNA, 59 bp, Artificial
  Synthetic oligonucleotide
gtaaattctcgggttgagatcgatatgaccacataggtaattgtgaggacccagacttc

SEQ ID NO: 433779 - DNA, 60 bp, Artificial
  Synthetic oligonucleotide
gtaaattctctgtttgatctttgtgatttgtatggctgtactctggaaactttatgtgtg

SEQ ID NO: 433780 - DNA, 60 bp, Artificial
  Synthetic oligonucleotide
gtaaattgccccactgacgtggtgaggagcattaagggctatcttgaaatagatgcgact

SEQ ID NO: 433781 - DNA, 54 bp, Artificial
  Synthetic oligonucleotide
gtaaattggggtcccggtgaaacgaatgactctactacaattgaaccagtatta

SEQ ID NO: 433782 - DNA, 55 bp, Artificial
  Synthetic oligonucleotide
gtaaattgtatttcctgaatagcaatatcgggtcttgacattaggtttcgcagca

SEQ ID NO: 433783 - DNA, 60 bp, Artificial
  Synthetic oligonucleotide
gtaaatttcgtctagctatggcacgtctccatggattaatcttctcagattcattaagta

SEQ ID NO: 433784 - DNA, 55 bp, Artificial
  Synthetic oligonucleotide
gtaaattttatcgtgttaacaattatgttgtttacaaccaccaagaggcagcgaa

SEQ ID NO: 433785 - DNA, 55 bp, Artificial
  Synthetic oligonucleotide
gtaaattttccgataaagttagaggacgtgtctttatagatcacgcggttataca

SEQ ID NO: 433786 - DNA, 60 bp, Artificial
  Synthetic oligonucleotide
gtaaattttgagctagcatgaatggtattccagctttatcagagttactgtcatttcagc

SEQ ID NO: 433787 - DNA, 60 bp, Artificial
  Synthetic oligonucleotide
gtaaattttgctcactctactgtcgctatgtcaggtcgtgtggtcaaagctccttctcgt

SEQ ID NO: 433788 - DNA, 57 bp, Artificial
  Synthetic oligonucleotide
gtaaattttggccatacctacagaatagatgatgctgacagtatacaagaagttacc

SEQ ID NO: 433789 - DNA, 60 bp, Artificial
  Synthetic oligonucleotide
gtaaatttttcagcgacacttcaatgggggctggatcatcagttgtgcaacactttgaag

SEQ ID NO: 433790 - DNA, 53 bp, Artificial
  Synthetic oligonucleotide
gtaacaaaccaacagaaacacctagtggaggttacaaccagagtttaccataa

SEQ ID NO: 433791 - DNA, 55 bp, Artificial
  Synthetic oligonucleotide
gtaacaaagaagcagtttcattgcacccatgactggtattatgaccagcctaggg

SEQ ID NO: 433792 - DNA, 55 bp, Artificial
  Synthetic oligonucleotide
gtaacaacacctctaaagtgtcataccttacgtacccggcgaagtctaggtctga

SEQ ID NO: 433793 - DNA, 53 bp, Artificial
  Synthetic oligonucleotide
gtaacaaccgggttgtgttctgtttaaataggcgtttattgtgcggtggcatt

SEQ ID NO: 433794 - DNA, 56 bp, Artificial
  Synthetic oligonucleotide
gtaacaacgttaccctttctcgcagcaagaatcccactctccttatccctcactaa

SEQ ID NO: 433795 - DNA, 55 bp, Artificial
  Synthetic oligonucleotide
gtaacaaggtggccacctgtgggcgacgcttcggcaaatcggacctgggtggcaa

SEQ ID NO: 433796 - DNA, 53 bp, Artificial
  Synthetic oligonucleotide
gtaacaagtcacgtggggagggttggcgtataacccggaagtcaatcctccca

SEQ ID NO: 433797 - DNA, 55 bp, Artificial
  Synthetic oligonucleotide
gtaacaagtgaagataatgatcagaactctcggtggtcatgctaactgctactgg

SEQ ID NO: 433798 - DNA, 55 bp, Artificial
  Synthetic oligonucleotide
gtaacaatggcagctcgcgtaggtgcatggaacaagagattctgcacaagccaac

SEQ ID NO: 433799 - DNA, 55 bp, Artificial
  Synthetic oligonucleotide
gtaacaatggctttattctcctggtgctatgacactgatcaattcgatcgcatgc

SEQ ID NO: 433800 - DNA, 58 bp, Artificial
  Synthetic oligonucleotide
gtaacaattgttagtggaccaggagatgtgtcgttcagctccggtgaagaacccacac

SEQ ID NO: 433801 - DNA, 50 bp, Artificial
  Synthetic oligonucleotide
gtaacacaacaaaactgttcaatagtacttggacttggaatagtactgaa

SEQ ID NO: 433802 - DNA, 57 bp, Artificial
  Synthetic oligonucleotide
gtaacacaattgatgccctcgagcctattataggtgagcattttcaggtggagattc

SEQ ID NO: 433803 - DNA, 60 bp, Artificial
  Synthetic oligonucleotide
gtaacacaccatttgcaacagtaccacaatggttggctgcatccccagcatagctgtgac

SEQ ID NO: 433804 - DNA, 55 bp, Artificial
  Synthetic oligonucleotide
gtaacacagttcttatcgctgataacagtattggatttacttgtgcacaagatgg

SEQ ID NO: 433805 - DNA, 57 bp, Artificial
  Synthetic oligonucleotide
gtaacacccctcggattgatcttattacctgctttgcagcggggaaggccgataata

SEQ ID NO: 433806 - DNA, 55 bp, Artificial
  Synthetic oligonucleotide
gtaacacctttacatatgcatctgcactctgggaaatccagcaagttgttgatgc

SEQ ID NO: 433807 - DNA, 58 bp, Artificial
  Synthetic oligonucleotide
gtaacactacttggttcagcagctattaaagcttacaatcctgagagaattgggtttc

SEQ ID NO: 433808 - DNA, 50 bp, Artificial
  Synthetic oligonucleotide
gtaacactatgcatatgcaacatacccacccatcggcacatcacaggttt

SEQ ID NO: 433809 - DNA, 59 bp, Artificial
  Synthetic oligonucleotide
gtaacactcaaaagcactacttggacatttatcgccgcctatccaattgtatccataac

SEQ ID NO: 433810 - DNA, 55 bp, Artificial
  Synthetic oligonucleotide
gtaacactcaagctgatgatgggatgcagcatgggcagtctcgctgttatgcgct

SEQ ID NO: 433811 - DNA, 50 bp, Artificial
  Synthetic oligonucleotide
gtaacactgtttaagtttaccaacccatttcccttcgcaagtcccgggga

SEQ ID NO: 433812 - DNA, 59 bp, Artificial
  Synthetic oligonucleotide
gtaacagaactaacgctcacatcaaactcgaactacccgctaccgaacagattcatatg

SEQ ID NO: 433813 - DNA, 59 bp, Artificial
  Synthetic oligonucleotide
gtaacagaagcagagtctgacgattacaaatctgatacgccaactggaatggtgcacgg

SEQ ID NO: 433814 - DNA, 60 bp, Artificial
  Synthetic oligonucleotide
gtaacagactcacaatatgcattaggaatcatccaagcccaaccagataaaagtgaatca

SEQ ID NO: 433815 - DNA, 60 bp, Artificial
  Synthetic oligonucleotide
gtaacagcagctgatgagtatctgcaactcatcaattgggtctcccgagaaaggattaaa

SEQ ID NO: 433816 - DNA, 60 bp, Artificial
  Synthetic oligonucleotide
gtaacagcctgtaatgtgcagttatcaccagctgaaagaattaagctgagagagatagcg

SEQ ID NO: 433817 - DNA, 60 bp, Artificial
  Synthetic oligonucleotide
gtaacaggaccagattccaaggcaatagcagtagttcattatggaggggtgcctactgat

SEQ ID NO: 433818 - DNA, 60 bp, Artificial
  Synthetic oligonucleotide
gtaacaggagccctcgtagagctgcgtccaaaaggagattgctggacgacagtggttatg

SEQ ID NO: 433819 - DNA, 54 bp, Artificial
  Synthetic oligonucleotide
gtaacaggagtaaatcaagagcccgctcacaatctagagggcgggacagatcag

SEQ ID NO: 433820 - DNA, 59 bp, Artificial
  Synthetic oligonucleotide
gtaacaggatcgttaagaccggatatcaaaggcggcctttcaccatggacatggtgtga

SEQ ID NO: 433821 - DNA, 60 bp, Artificial
  Synthetic oligonucleotide
gtaacagtctatggaggcctagactcaaagaccacctactgtgccactggcgtggcagag

SEQ ID NO: 433822 - DNA, 55 bp, Artificial
  Synthetic oligonucleotide
gtaacagtgactactgataagggagagtttacaggattggggatatatgaaagag

SEQ ID NO: 433823 - DNA, 55 bp, Artificial
  Synthetic oligonucleotide
gtaacagtgagtctttatctactgtcactcgctcgcttcaggccccaactggaac

SEQ ID NO: 433824 - DNA, 58 bp, Artificial
  Synthetic oligonucleotide
gtaacatcaacaatgtagttagaataaaggttccattcatttatactagaggtgctta

SEQ ID NO: 433825 - DNA, 55 bp, Artificial
  Synthetic oligonucleotide
gtaacatcagagagcctcgccgagcttaacagaccagtaccccccaaacccccaa

SEQ ID NO: 433826 - DNA, 60 bp, Artificial
  Synthetic oligonucleotide
gtaacatcgaacaattcatctatcttaagtcgataaatgcctattgttctcttagcgata

SEQ ID NO: 433827 - DNA, 55 bp, Artificial
  Synthetic oligonucleotide
gtaacatcgatcgaaaccagagtgatggccccgacgcctgcactgctgccctcga

SEQ ID NO: 433828 - DNA, 54 bp, Artificial
  Synthetic oligonucleotide
gtaacatcgggaaagatggaaaacaaactctggtcctcaatccgcgtggggtaa

SEQ ID NO: 433829 - DNA, 55 bp, Artificial
  Synthetic oligonucleotide
gtaacatcttgatgcgaggctactcacgagagacgagcctatgtatgacacccta

SEQ ID NO: 433830 - DNA, 60 bp, Artificial
  Synthetic oligonucleotide
gtaacatgacattaacatcgagtgatatccagcgacatataactgagttcatcagctcat

SEQ ID NO: 433831 - DNA, 55 bp, Artificial
  Synthetic oligonucleotide
gtaacatgcttgtgctccatggattatctgggcagcacattggtagtccctttga

SEQ ID NO: 433832 - DNA, 60 bp, Artificial
  Synthetic oligonucleotide
gtaacatggtcagcattgcattctatgggggtatcccaggggaaatatcaacccctatca

SEQ ID NO: 433833 - DNA, 55 bp, Artificial
  Synthetic oligonucleotide
gtaacattctcaaggggaaatttcaaacagctatacaacgggcaatgatggacca

SEQ ID NO: 433834 - DNA, 60 bp, Artificial
  Synthetic oligonucleotide
gtaacattgcatttcaagcaatatgagtgcagctcccccccaaacaaccaagtaatgccg

SEQ ID NO: 433835 - DNA, 57 bp, Artificial
  Synthetic oligonucleotide
gtaacattgccggatggattttgggaaacccagaatgtgaattactattcacagtaa

SEQ ID NO: 433836 - DNA, 55 bp, Artificial
  Synthetic oligonucleotide
gtaacattgctggatggctcctgggaaatccagagtgtgaatcactcttcacagc

SEQ ID NO: 433837 - DNA, 52 bp, Artificial
  Synthetic oligonucleotide
gtaacatttattatggctgtaaggaagaggttgcgtttttcagacccaatca

SEQ ID NO: 433838 - DNA, 53 bp, Artificial
  Synthetic oligonucleotide
gtaaccaatagtatagttggacccattgtaatcacgggcacggaagtatgatg

SEQ ID NO: 433839 - DNA, 58 bp, Artificial
  Synthetic oligonucleotide
gtaaccacacgcttagcgcaaacccgtatcagttgggggcgtataaatatgatgttca

SEQ ID NO: 433840 - DNA, 58 bp, Artificial
  Synthetic oligonucleotide
gtaaccagattaagtcctgcaataagttctttaagagactgggtgtgtccacagagtg

SEQ ID NO: 433841 - DNA, 60 bp, Artificial
  Synthetic oligonucleotide
gtaaccataaatccgggtccatttgcacagactagatatgctccagtcaattggggtcat

SEQ ID NO: 433842 - DNA, 55 bp, Artificial
  Synthetic oligonucleotide
gtaaccataacaaggacgggggcgtatgcaagtcctgttcgtggattagcaacgt

SEQ ID NO: 433843 - DNA, 51 bp, Artificial
  Synthetic oligonucleotide
gtaaccatcgccgccagtactaccgatttaatccgcgtacgcgctcgcgta

SEQ ID NO: 433844 - DNA, 50 bp, Artificial
  Synthetic oligonucleotide
gtaaccatgctccgcccaggcgtagtatttgacatcaccaaatggctttt

SEQ ID NO: 433845 - DNA, 55 bp, Artificial
  Synthetic oligonucleotide
gtaacccacctgttccagtgggaggcatctataaaagatggataatcatggggtt

SEQ ID NO: 433846 - DNA, 60 bp, Artificial
  Synthetic oligonucleotide
gtaacccagctcctgaggcgactgcaccagtggataagctcggagtgtaccactccatgc

SEQ ID NO: 433847 - DNA, 50 bp, Artificial
  Synthetic oligonucleotide
gtaacccatgggtttgtgatatgggattacgaaaaccaaacaccactcta

SEQ ID NO: 433848 - DNA, 52 bp, Artificial
  Synthetic oligonucleotide
gtaaccccgagttcggggactgtgcgttcggtgtctcggacgggtacgtatc

SEQ ID NO: 433849 - DNA, 57 bp, Artificial
  Synthetic oligonucleotide
gtaacccttctgatccgtgctctgaggacggctgccagttcaacgataacccggtgt

SEQ ID NO: 433850 - DNA, 56 bp, Artificial
  Synthetic oligonucleotide
gtaaccgattggtcagggtacagcggaagtttcgttcaacatcctgagctaacagg

SEQ ID NO: 433851 - DNA, 60 bp, Artificial
  Synthetic oligonucleotide
gtaaccgcgagatacaagacagtttcttagaacaggcggcatcgggttgttctgcacatg

SEQ ID NO: 433852 - DNA, 52 bp, Artificial
  Synthetic oligonucleotide
gtaaccggcccgcggtgggccagtcaaccgttccggacgggatcactccgcg

SEQ ID NO: 433853 - DNA, 55 bp, Artificial
  Synthetic oligonucleotide
gtaacctacccaaatacgatagccagcagatacgatctgaaacaacagaaactct

SEQ ID NO: 433854 - DNA, 50 bp, Artificial
  Synthetic oligonucleotide
gtaacctattggacgttgccgccgactggcttgttaacccggctaatcga

SEQ ID NO: 433855 - DNA, 55 bp, Artificial
  Synthetic oligonucleotide
gtaacctcaagcctttgtcagacagaaccattagtacagcggtgccatatctttg

SEQ ID NO: 433856 - DNA, 56 bp, Artificial
  Synthetic oligonucleotide
gtaacctgatgatgtgcatctatactacaaatttgattagcccaggaattgattgc

SEQ ID NO: 433857 - DNA, 55 bp, Artificial
  Synthetic oligonucleotide
gtaacctggacagtctataacattactaacgctgccttgctactaacacactaac

SEQ ID NO: 433858 - DNA, 60 bp, Artificial
  Synthetic oligonucleotide
gtaacctgggcgggactgggagtggctcaccctcagatgctgcatataagcagctgcttt

SEQ ID NO: 433859 - DNA, 52 bp, Artificial
  Synthetic oligonucleotide
gtaacctgtatgctgcttttcacaagaaccctggtgtaatcaccggatcagc

SEQ ID NO: 433860 - DNA, 53 bp, Artificial
  Synthetic oligonucleotide
gtaacctttgatcaagatgctagaaggtttagcaggacaggacattggactgt

SEQ ID NO: 433861 - DNA, 55 bp, Artificial
  Synthetic oligonucleotide
gtaacgaaacttatccaaaagcagctactgatattgcgattactcgtggtgactg

SEQ ID NO: 433862 - DNA, 57 bp, Artificial
  Synthetic oligonucleotide
gtaacgaacgaccagtctacggacgactggcacaacaacggtcgggcgctgtatcac

SEQ ID NO: 433863 - DNA, 55 bp, Artificial
  Synthetic oligonucleotide
gtaacgaagggtcttatttcttcggagacaatgcagaggagtatgatagttgaag

SEQ ID NO: 433864 - DNA, 55 bp, Artificial
  Synthetic oligonucleotide
gtaacgaagtgtaccatcggtaccgtttgttccgtgataatctagattccgaagc

SEQ ID NO: 433865 - DNA, 60 bp, Artificial
  Synthetic oligonucleotide
gtaacgaagttagatgcaaagattgctgtcagaaatcctgcatctctggacgatataata

SEQ ID NO: 433866 - DNA, 59 bp, Artificial
  Synthetic oligonucleotide
gtaacgactgtaaatccattagcaaaccgacaagtgtcacctggaagcctggtcataga

SEQ ID NO: 433867 - DNA, 53 bp, Artificial
  Synthetic oligonucleotide
gtaacgagacggaaggggtgggcttcaatgtgccgggttcgtggaagtgggac

SEQ ID NO: 433868 - DNA, 60 bp, Artificial
  Synthetic oligonucleotide
gtaacgagatattgattacagctcaaataactagcgagcgagtgctccatccaactaact

SEQ ID NO: 433869 - DNA, 53 bp, Artificial
  Synthetic oligonucleotide
gtaacgaggtattctattcactcacgctgacagaaggtgttcaatctactgtg

SEQ ID NO: 433870 - DNA, 51 bp, Artificial
  Synthetic oligonucleotide
gtaacgagtgttacgaggtaacgagtgttacgagtaatttcgtaaaggtta

SEQ ID NO: 433871 - DNA, 53 bp, Artificial
  Synthetic oligonucleotide
gtaacgataccgttacgtaattgggcggcgactttacgcagatggtctattca

SEQ ID NO: 433872 - DNA, 60 bp, Artificial
  Synthetic oligonucleotide
gtaacgatcaagggagcgactgttgaccaagtgacgcctgccgacctggttggatcatat

SEQ ID NO: 433873 - DNA, 55 bp, Artificial
  Synthetic oligonucleotide
gtaacgcacgttgttgtccattcatttgtggcaaggcagttacattcaaagatcg

SEQ ID NO: 433874 - DNA, 59 bp, Artificial
  Synthetic oligonucleotide
gtaacgcccgtttatacaagtacgtctaatgtgtaactgcattaagcaagttgcagcat

SEQ ID NO: 433875 - DNA, 55 bp, Artificial
  Synthetic oligonucleotide
gtaacgccggcaatcgatgaggcactacatgcgaatcgacacgcagggatagggc

SEQ ID NO: 433876 - DNA, 55 bp, Artificial
  Synthetic oligonucleotide
gtaacggagcattagatcctgttatagtaggcgagcctgatttaggccccgctac

SEQ ID NO: 433877 - DNA, 56 bp, Artificial
  Synthetic oligonucleotide
gtaacggaggacaatgtgcaaatacgcggtcgggctaggagcgttgagggtaagaa

SEQ ID NO: 433878 - DNA, 60 bp, Artificial
  Synthetic oligonucleotide
gtaacggattcttcagttatatcacttattgcaaaactagacgctacagtctttgctcaa

SEQ ID NO: 433879 - DNA, 58 bp, Artificial
  Synthetic oligonucleotide
gtaacgggtatgactactgacaatctcaaatgcccatgccaggtcccgtcgcccgagt

SEQ ID NO: 433880 - DNA, 55 bp, Artificial
  Synthetic oligonucleotide
gtaacggtgtaccccctccccgatggagccaactcgttgacaccttgtacatgcc

SEQ ID NO: 433881 - DNA, 55 bp, Artificial
  Synthetic oligonucleotide
gtaacgtacctacttgcgtgcctattctgttgccgcaaggggtaggggctttaca

SEQ ID NO: 433882 - DNA, 54 bp, Artificial
  Synthetic oligonucleotide
gtaacgtagtgtaccatttgaagaagatggtagctgatgtgcatgtttgctctc

SEQ ID NO: 433883 - DNA, 56 bp, Artificial
  Synthetic oligonucleotide
gtaacgtattaagttatgctaattccctaatcgatatgcaaatgtcttatctgacg

SEQ ID NO: 433884 - DNA, 57 bp, Artificial
  Synthetic oligonucleotide
gtaacgtcactggaccgatgatggggaaaggagaaatgcaaaactgttctttcaata

SEQ ID NO: 433885 - DNA, 60 bp, Artificial
  Synthetic oligonucleotide
gtaacgtcctgttgtaaatgtgaggcgacactacgtctgtgtgtacagagcacacacatt

SEQ ID NO: 433886 - DNA, 56 bp, Artificial
  Synthetic oligonucleotide
gtaacgtcggtgaggtcgttggatagttggtattccgtgcgatcggaagtcgtata

SEQ ID NO: 433887 - DNA, 57 bp, Artificial
  Synthetic oligonucleotide
gtaacgtctaagttaatcgtgcacggctcggtatgtctcccgtggatggttgtctcc

SEQ ID NO: 433888 - DNA, 55 bp, Artificial
  Synthetic oligonucleotide
gtaacgtgagtccacgtaagccaagtttgtcgctgatgtttattcgtgctatatt

SEQ ID NO: 433889 - DNA, 55 bp, Artificial
  Synthetic oligonucleotide
gtaacgtgatccactcattatcgaatagatctccttgtacgtaggacactgaccg

SEQ ID NO: 433890 - DNA, 54 bp, Artificial
  Synthetic oligonucleotide
gtaacgttaatgcagaaacaaaacatcgtgaatatgattgggtagcaaaacatc

SEQ ID NO: 433891 - DNA, 55 bp, Artificial
  Synthetic oligonucleotide
gtaacgttacggtttagtaacatagatccaccaattactgacaattgactgtccg

SEQ ID NO: 433892 - DNA, 56 bp, Artificial
  Synthetic oligonucleotide
gtaacgttctccgctgacggttataaagatgttaccgcaggagtttcagtaactga

SEQ ID NO: 433893 - DNA, 55 bp, Artificial
  Synthetic oligonucleotide
gtaacgtttgaacacccaacaattgatcccagcgtcgatattgaaacgtggaaaa

SEQ ID NO: 433894 - DNA, 54 bp, Artificial
  Synthetic oligonucleotide
gtaacgtttgccgatacaaattaaactcgaacaatcattgtgagctgcataatt

SEQ ID NO: 433895 - DNA, 56 bp, Artificial
  Synthetic oligonucleotide
gtaactaagtatgtgtgctcgtgacctcgactcccacggaacggaccgatccgttg

SEQ ID NO: 433896 - DNA, 59 bp, Artificial
  Synthetic oligonucleotide
gtaactaatgcgactgaactggtccagagctcctcaacggggaaaatatgcaacaatcc

SEQ ID NO: 433897 - DNA, 50 bp, Artificial
  Synthetic oligonucleotide
gtaactacacagacacaatatacagtttgcttgaagactcgcaaaaccag

SEQ ID NO: 433898 - DNA, 56 bp, Artificial
  Synthetic oligonucleotide
gtaactactaaggctagtactaatatatcccctaatcagagttccggatacggata

SEQ ID NO: 433899 - DNA, 54 bp, Artificial
  Synthetic oligonucleotide
gtaactacttcgagataatcgatccaaagaaaggctacactcaatacgagacga

SEQ ID NO: 433900 - DNA, 60 bp, Artificial
  Synthetic oligonucleotide
gtaactagtcatgatgcagtcccagttgccacgacctgaatcaagggcaatgtaactccc

SEQ ID NO: 433901 - DNA, 54 bp, Artificial
  Synthetic oligonucleotide
gtaactatctatcatggtgtacgtgacctgctgtataaacgcagtgctaaagac

SEQ ID NO: 433902 - DNA, 55 bp, Artificial
  Synthetic oligonucleotide
gtaactcaaccaccatatacgaacttgaaccattaaactcccagtagctatcgac

SEQ ID NO: 433903 - DNA, 58 bp, Artificial
  Synthetic oligonucleotide
gtaactcaacggaacgctacatgccaagatacggacttcagcgaaacttgaccgacta

SEQ ID NO: 433904 - DNA, 59 bp, Artificial
  Synthetic oligonucleotide
gtaactcaactatcacaggactactattgtcccgcgatggaggagccacaaacgatacc

SEQ ID NO: 433905 - DNA, 50 bp, Artificial
  Synthetic oligonucleotide
gtaactcaactattacaggattgctattgacacgtgatggaggcagcaaa

SEQ ID NO: 433906 - DNA, 55 bp, Artificial
  Synthetic oligonucleotide
gtaactcagcaatgaagcaccttaaccgtgctcgacaggaaaatggagccacacc

SEQ ID NO: 433907 - DNA, 54 bp, Artificial
  Synthetic oligonucleotide
gtaactccggcgcgaccacctattgttgtggaatccgtagggcctacagaccct

SEQ ID NO: 433908 - DNA, 59 bp, Artificial
  Synthetic oligonucleotide
gtaactcgcctggaatcttggggcccttgccactccattctcatacagcgtggcctccc

SEQ ID NO: 433909 - DNA, 53 bp, Artificial
  Synthetic oligonucleotide
gtaactctacttaacttgacaggttttggcccgatttcctacgttcgagtgga

SEQ ID NO: 433910 - DNA, 56 bp, Artificial
  Synthetic oligonucleotide
gtaactgatactttggaactgtatactaagccaagtttaggcccgttatgcgataa

SEQ ID NO: 433911 - DNA, 57 bp, Artificial
  Synthetic oligonucleotide
gtaactggagcgattgtcttcccagaatagtctttaactcaggctttggtaagacca

SEQ ID NO: 433912 - DNA, 60 bp, Artificial
  Synthetic oligonucleotide
gtaactgtaacacggcgcactatagcatggagcttctctaaaactcacgtgatgataatg

SEQ ID NO: 433913 - DNA, 57 bp, Artificial
  Synthetic oligonucleotide
gtaactgtaataccaaatgtcagaccccagtaggcgctataaattccagtatgcctt

SEQ ID NO: 433914 - DNA, 56 bp, Artificial
  Synthetic oligonucleotide
gtaactgtagtcacaccaaccattttgttacgaaatgattggagcactaagttacc

SEQ ID NO: 433915 - DNA, 55 bp, Artificial
  Synthetic oligonucleotide
gtaactgttacgagtccctacgctcctatcgtaaatagattgatgccctatcgta

SEQ ID NO: 433916 - DNA, 60 bp, Artificial
  Synthetic oligonucleotide
gtaactgttagcgttggtggagtcgacatgagggcgggacgcattatagcatgggatgga

SEQ ID NO: 433917 - DNA, 52 bp, Artificial
  Synthetic oligonucleotide
gtaactgttcgaggccccgggtgtttcacttagcggtgtctacctctaaagg

SEQ ID NO: 433918 - DNA, 59 bp, Artificial
  Synthetic oligonucleotide
gtaactgttgaggtcagtaataatggccgcagcaggagtaaatcaagggcccgttcaca

SEQ ID NO: 433919 - DNA, 59 bp, Artificial
  Synthetic oligonucleotide
gtaacttacccatcggatctcaccagtgggcgtcaaaacagacagggctcatattggaa

SEQ ID NO: 433920 - DNA, 52 bp, Artificial
  Synthetic oligonucleotide
gtaacttacgaggtacaattagctaaaactcgccgtttgactctgtttaaac

SEQ ID NO: 433921 - DNA, 50 bp, Artificial
  Synthetic oligonucleotide
gtaacttagaagctgtgaactaacgatcaatagtgggtgtgacgcaccag

SEQ ID NO: 433922 - DNA, 55 bp, Artificial
  Synthetic oligonucleotide
gtaacttatggttccatcctgagggacttatcggcctctttgccccgttctcgcc

SEQ ID NO: 433923 - DNA, 55 bp, Artificial
  Synthetic oligonucleotide
gtaacttcccaaaacgggagggtcatagcttcatgggagtcatacaaaagcggag

SEQ ID NO: 433924 - DNA, 56 bp, Artificial
  Synthetic oligonucleotide
gtaacttggaacatctttgactcgatggacctgttcacctacggtgacgacggtgt

SEQ ID NO: 433925 - DNA, 55 bp, Artificial
  Synthetic oligonucleotide
gtaagaaagagtggcataaactattacagaatgtgactgcagcactacaagaaca

SEQ ID NO: 433926 - DNA, 55 bp, Artificial
  Synthetic oligonucleotide
gtaagaaatagaaattggatgactgattctaaaacagtagctaaattagatgagg

SEQ ID NO: 433927 - DNA, 59 bp, Artificial
  Synthetic oligonucleotide
gtaagaaatcagctaaggaacaatgccaaggaaattgggaatggctgctttgaattcta

SEQ ID NO: 433928 - DNA, 60 bp, Artificial
  Synthetic oligonucleotide
gtaagaacggattttaatgaggagcatattcatcacgaattatcatattgtgacgtttat

SEQ ID NO: 433929 - DNA, 58 bp, Artificial
  Synthetic oligonucleotide
gtaagaagaacgtattaggatatacatgtcagattctattgctgaaattttcaggcca

SEQ ID NO: 433930 - DNA, 55 bp, Artificial
  Synthetic oligonucleotide
gtaagaagaagcggagtgaacggaaggttgttccgaactccaagtatgcttctgg

SEQ ID NO: 433931 - DNA, 55 bp, Artificial
  Synthetic oligonucleotide
gtaagaagaatcacattccaggatgttgaggaatatattagggatcttcccgagg

SEQ ID NO: 433932 - DNA, 60 bp, Artificial
  Synthetic oligonucleotide
gtaagaagagccacagtgtcagcagatccactagcatctttattggagatgtgccacagc

SEQ ID NO: 433933 - DNA, 55 bp, Artificial
  Synthetic oligonucleotide
gtaagaagctacgcggtgtcacaacgatggagggcttaaaaaatgccctgaaggg

SEQ ID NO: 433934 - DNA, 55 bp, Artificial
  Synthetic oligonucleotide
gtaagaagctttgttagtggaggaagacaaagagaactgttacaaatagctgcag

SEQ ID NO: 433935 - DNA, 55 bp, Artificial
  Synthetic oligonucleotide
gtaagaaggtatacgggaggtcatgacagaacaaagcgagtcccgttcgtgctag

SEQ ID NO: 433936 - DNA, 60 bp, Artificial
  Synthetic oligonucleotide
gtaagaaggttcattgcagaaatgagacagcgtgtacaagctgatagaaacgttgttaat

SEQ ID NO: 433937 - DNA, 53 bp, Artificial
  Synthetic oligonucleotide
gtaagaagttatgtgagacaacgggtagttataagtttatggaattaccgggc

SEQ ID NO: 433938 - DNA, 54 bp, Artificial
  Synthetic oligonucleotide
gtaagaataaaaccaccagcaagctgggaaggcttatacccaataaacacagga

SEQ ID NO: 433939 - DNA, 56 bp, Artificial
  Synthetic oligonucleotide
gtaagaatattccactagaagatgctcatacatgggtgttttatgcatcagcgtat

SEQ ID NO: 433940 - DNA, 60 bp, Artificial
  Synthetic oligonucleotide
gtaagaatgatactaatctaactgaaaccttcagacctggaggaggagatatgagggaca

SEQ ID NO: 433941 - DNA, 53 bp, Artificial
  Synthetic oligonucleotide
gtaagacacatttggaccccgtggggtactgacaaagaactcccacccgaggc

SEQ ID NO: 433942 - DNA, 55 bp, Artificial
  Synthetic oligonucleotide
gtaagacacgcctgcaaattcagtatgaaatcttcagactttaatgtatccacag

SEQ ID NO: 433943 - DNA, 55 bp, Artificial
  Synthetic oligonucleotide
gtaagacaggtgaacaagtagatctcgggccagttctaaatgtgttaaagtggca

SEQ ID NO: 433944 - DNA, 60 bp, Artificial
  Synthetic oligonucleotide
gtaagacatatgtatgttacctattaatgcctatatttatcccaatagcatatatttacg

SEQ ID NO: 433945 - DNA, 52 bp, Artificial
  Synthetic oligonucleotide
gtaagaccacgagaacgaggttcaattccttgtcgactcacggttttaatca

SEQ ID NO: 433946 - DNA, 58 bp, Artificial
  Synthetic oligonucleotide
gtaagaccttgtgtaaggaatgcctctttaatgagaagcacgagtctaatgtgaaaat

SEQ ID NO: 433947 - DNA, 60 bp, Artificial
  Synthetic oligonucleotide
gtaagacgaccctagatcctgacaaacctcgatctatgataatattccagattgacgttg

SEQ ID NO: 433948 - DNA, 53 bp, Artificial
  Synthetic oligonucleotide
gtaagacgagtgaagctgacagcgtaggcccttcgtagaaggcagccgaggtg

SEQ ID NO: 433949 - DNA, 59 bp, Artificial
  Synthetic oligonucleotide
gtaagacgctcaatgctcgagactgagttgggttactacgaaatgttaacttatggtca

SEQ ID NO: 433950 - DNA, 53 bp, Artificial
  Synthetic oligonucleotide
gtaagacggtggttggcggataactgtcccctcgacctgtcgaaagaaaccac

SEQ ID NO: 433951 - DNA, 50 bp, Artificial
  Synthetic oligonucleotide
gtaagagaacgttgtataatgctgctgttcaaagtcttaaacgtaaggct

SEQ ID NO: 433952 - DNA, 60 bp, Artificial
  Synthetic oligonucleotide
gtaagagactcaagcagttggacatcttagaaaggcaaataacaacaatgcatgtttcta

SEQ ID NO: 433953 - DNA, 51 bp, Artificial
  Synthetic oligonucleotide
gtaagagacttaagcaaacccaattaaagatacaacggattacaaattcct

SEQ ID NO: 433954 - DNA, 55 bp, Artificial
  Synthetic oligonucleotide
gtaagagagcagcggggctagtcgacgggtgttccacctcccgagaggggacgag

SEQ ID NO: 433955 - DNA, 55 bp, Artificial
  Synthetic oligonucleotide
gtaagagatctaaacaatctctatacggactacgcaccatgtagcatgattcacg

SEQ ID NO: 433956 - DNA, 60 bp, Artificial
  Synthetic oligonucleotide
gtaagagccgctgatttactgccgctgttaagtgctgcggcgtaagcgtcgtttgcagat

SEQ ID NO: 433957 - DNA, 54 bp, Artificial
  Synthetic oligonucleotide
gtaagaggatcaggaatgagaatactcataaggggtaactcccccgtatttaac

SEQ ID NO: 433958 - DNA, 54 bp, Artificial
  Synthetic oligonucleotide
gtaagaggggcctgtggttggtatgtttcagatgacttgagagcgtctttatgt

SEQ ID NO: 433959 - DNA, 58 bp, Artificial
  Synthetic oligonucleotide
gtaagagggtcaggaatgagaatacttgtgagaggtaattcccctgtattcaattata

SEQ ID NO: 433960 - DNA, 58 bp, Artificial
  Synthetic oligonucleotide
gtaagagtagcgcgactggtagtggtgtatggacccctcagtgggaaagcactcctag

SEQ ID NO: 433961 - DNA, 51 bp, Artificial
  Synthetic oligonucleotide
gtaagagtcataaacttacgttatggcgtaaagatcatacaaactgaaagg

SEQ ID NO: 433962 - DNA, 55 bp, Artificial
  Synthetic oligonucleotide
gtaagagtgtgggtgagaatggctaatctgtcacaatgggtaaatgggacaccac

SEQ ID NO: 433963 - DNA, 51 bp, Artificial
  Synthetic oligonucleotide
gtaagataagatctaatgaccttctcccctccgattggtgcttagatgagt

SEQ ID NO: 433964 - DNA, 55 bp, Artificial
  Synthetic oligonucleotide
gtaagatcaagaagaggcttctgtggggctcagacctggcgactatgatacggtg

SEQ ID NO: 433965 - DNA, 57 bp, Artificial
  Synthetic oligonucleotide
gtaagatccgtctacaataatgttaccgctacacagtccgttcaaacgtggaagcag

SEQ ID NO: 433966 - DNA, 60 bp, Artificial
  Synthetic oligonucleotide
gtaagattgctcctttaatggtggcatacatgctagaaagagagctggttcgcaagacca

SEQ ID NO: 433967 - DNA, 57 bp, Artificial
  Synthetic oligonucleotide
gtaagattgctcctttaatggtggcatacatgttggaaagagaactggtccggaaaa

SEQ ID NO: 433968 - DNA, 55 bp, Artificial
  Synthetic oligonucleotide
gtaagattgctcctttaatggtggcttatatgttggaaagggaactagttcgaaa

SEQ ID NO: 433969 - DNA, 58 bp, Artificial
  Synthetic oligonucleotide
gtaagcaaaacaatcagactatgtatcgagctggctatccgttcaattggcagtgggt

SEQ ID NO: 433970 - DNA, 60 bp, Artificial
  Synthetic oligonucleotide
gtaagcaaatagctatgaacaattcattctcggaaccaactttcagtcaaataattgata

SEQ ID NO: 433971 - DNA, 54 bp, Artificial
  Synthetic oligonucleotide
gtaagcaaccaaagggcgatatacgggtagaacggtccgagaggccgtccctca

SEQ ID NO: 433972 - DNA, 60 bp, Artificial
  Synthetic oligonucleotide
gtaagcaattcttatcaatggctgtaggaacgatggatacaccgagtaggtatgccataa

SEQ ID NO: 433973 - DNA, 55 bp, Artificial
  Synthetic oligonucleotide
gtaagcacggcctgttggttccgacaaaacatcctcgcatcgtcaagccggtcac

SEQ ID NO: 433974 - DNA, 50 bp, Artificial
  Synthetic oligonucleotide
gtaagcactgaacataaggcgccagcgtgaacatgattgttttgagcaat

SEQ ID NO: 433975 - DNA, 60 bp, Artificial
  Synthetic oligonucleotide
gtaagcatcgtttgctgtctgctgtccccctcttgcagacctaccgtcaatctggaaggt

SEQ ID NO: 433976 - DNA, 55 bp, Artificial
  Synthetic oligonucleotide
gtaagcatgaattgcaatggttcctgtccggttctactaacgttgatgaactacg

SEQ ID NO: 433977 - DNA, 60 bp, Artificial
  Synthetic oligonucleotide
gtaagcatgacgttggactgcagcggagcattcacaacaggcactcacaagacccactac

SEQ ID NO: 433978 - DNA, 60 bp, Artificial
  Synthetic oligonucleotide
gtaagccaccagccccagtggcctccattgctgcacccccttcggggtgcagcaatggag

SEQ ID NO: 433979 - DNA, 55 bp, Artificial
  Synthetic oligonucleotide
gtaagccaccatataagttgttacaagaaaataagcctctaatgagttatgagtt

SEQ ID NO: 433980 - DNA, 55 bp, Artificial
  Synthetic oligonucleotide
gtaagccaggacacatttctagatattgtaaagcccctagaaggaagggatgctg

SEQ ID NO: 433981 - DNA, 53 bp, Artificial
  Synthetic oligonucleotide
gtaagccattctgcctgacagtatggtctgaaggtgatgtaatccctttgtac

SEQ ID NO: 433982 - DNA, 50 bp, Artificial
  Synthetic oligonucleotide
gtaagccatttgattctagatttgtgttatgtagtaccaatcataatcta

SEQ ID NO: 433983 - DNA, 55 bp, Artificial
  Synthetic oligonucleotide
gtaagcccatatacttggatgtatttaccaggcaatcttaatataggatcagctg

SEQ ID NO: 433984 - DNA, 52 bp, Artificial
  Synthetic oligonucleotide
gtaagcccctccacaaatttttcacaaagagggcttgcaatgatgacattat

SEQ ID NO: 433985 - DNA, 54 bp, Artificial
  Synthetic oligonucleotide
gtaagccctaaggaaaaccgcagagagaatgaacgtcaggcccggcgaaacgcc

SEQ ID NO: 433986 - DNA, 55 bp, Artificial
  Synthetic oligonucleotide
gtaagccgtctattggggaacattggggtaagggtactgtatgtactaatgtgca

SEQ ID NO: 433987 - DNA, 56 bp, Artificial
  Synthetic oligonucleotide
gtaagcctctcagacgatgagtatgacgagtggcgtgacctcatgcgtgattggag

SEQ ID NO: 433988 - DNA, 60 bp, Artificial
  Synthetic oligonucleotide
gtaagcgagccaaaacgggagtgcacgtcacttgcgcagccgacaacgtcagacgcggaa

SEQ ID NO: 433989 - DNA, 60 bp, Artificial
  Synthetic oligonucleotide
gtaagcgatcattgaggttattgtctatacgtccctgcgctccgctcactggattgcgtg

SEQ ID NO: 433990 - DNA, 55 bp, Artificial
  Synthetic oligonucleotide
gtaagcgatgtcagatcccagggagagaatcccacctggaaacagtggagaagag

SEQ ID NO: 433991 - DNA, 60 bp, Artificial
  Synthetic oligonucleotide
gtaagcgcgagtaagctcgagagtcaaaaacataatcgttgcaagcgcgcaccaaatact

SEQ ID NO: 433992 - DNA, 56 bp, Artificial
  Synthetic oligonucleotide
gtaagcggctccaggaacagtcgcgtccccgatactgacttgcccgactagggcgg

SEQ ID NO: 433993 - DNA, 54 bp, Artificial
  Synthetic oligonucleotide
gtaagcgggcgctcggtttgtccggtgtcgttttgtgggatggtccttgcgtcg

SEQ ID NO: 433994 - DNA, 60 bp, Artificial
  Synthetic oligonucleotide
gtaagcgtcataatgctccagtcagccattacaaaggtatggagattccactgcacaatc

SEQ ID NO: 433995 - DNA, 54 bp, Artificial
  Synthetic oligonucleotide
gtaagcgtcgtatatgttatatactcggctttcagtgtgtccttgacacgtgtc

SEQ ID NO: 433996 - DNA, 60 bp, Artificial
  Synthetic oligonucleotide
gtaagcgtcgttggctgtctgttgtcctcctctagcagatcgtccatcgatctgaaattc

SEQ ID NO: 433997 - DNA, 58 bp, Artificial
  Synthetic oligonucleotide
gtaagcgttttggcgaaaaacgatgcgatagtagcgaatactaaagagattaagcaca

SEQ ID NO: 433998 - DNA, 56 bp, Artificial
  Synthetic oligonucleotide
gtaagctaaaggaaagcaaactggtgccaaaccgggaagactagataacaatggca

SEQ ID NO: 433999 - DNA, 60 bp, Artificial
  Synthetic oligonucleotide
gtaagctagtggatgcggtaaaccatgcatggggtgtcgagaagatcaggtacgcacttg

SEQ ID NO: 434000 - DNA, 55 bp, Artificial
  Synthetic oligonucleotide
gtaagctcaatgtccgtaatgtgatcaacaaggtctggacacgatcgaatccaag

SEQ ID NO: 434001 - DNA, 53 bp, Artificial
  Synthetic oligonucleotide
gtaagctctgtaatgcaacctttgcaaatagcaagcatagtaggactaatagt

SEQ ID NO: 434002 - DNA, 50 bp, Artificial
  Synthetic oligonucleotide
gtaagctgtaagtaagcagccgctagtgttctggatttccaggcatagtg

SEQ ID NO: 434003 - DNA, 55 bp, Artificial
  Synthetic oligonucleotide
gtaagcttacaacgacagcgaagagtcctaattcgtttcgcgtagcgagtacttg

SEQ ID NO: 434004 - DNA, 53 bp, Artificial
  Synthetic oligonucleotide
gtaagcttactgctcccgagcatgcccaattcttctggggtgtgccatacgac

SEQ ID NO: 434005 - DNA, 55 bp, Artificial
  Synthetic oligonucleotide
gtaagcttgaggtggactttaatttctgcgaagggactacagtggtggtgaccgg

SEQ ID NO: 434006 - DNA, 57 bp, Artificial
  Synthetic oligonucleotide
gtaagctttaatataaccttccgaccgctgaagacgcattcaaatctgttggtacat

SEQ ID NO: 434007 - DNA, 55 bp, Artificial
  Synthetic oligonucleotide
gtaagctttgtaagcatattcccaggtttactcctaagaacacggcgacgcattc

SEQ ID NO: 434008 - DNA, 55 bp, Artificial
  Synthetic oligonucleotide
gtaaggaaaacgacgtgatactcaccattggggagccagttcaaggcaaccggag

SEQ ID NO: 434009 - DNA, 57 bp, Artificial
  Synthetic oligonucleotide
gtaaggaaacattatacagagttcaagcagagttaaataaaacgaaggcgatgaata

SEQ ID NO: 434010 - DNA, 55 bp, Artificial
  Synthetic oligonucleotide
gtaaggaagaattctcagtccaaagcctcaacaaggtcagggtacagagtctcca

SEQ ID NO: 434011 - DNA, 58 bp, Artificial
  Synthetic oligonucleotide
gtaaggaaggctgatcctgagtatgtcttctcaccaggtataattgcagaatcaaatc

SEQ ID NO: 434012 - DNA, 57 bp, Artificial
  Synthetic oligonucleotide
gtaaggaatgcctctttaatgagaagcacgagtctaatgtaaaaattaagcctcgta

SEQ ID NO: 434013 - DNA, 55 bp, Artificial
  Synthetic oligonucleotide
gtaaggacatacccatggaagaggaagatttaattgacatagcagcatcgttagg

SEQ ID NO: 434014 - DNA, 60 bp, Artificial
  Synthetic oligonucleotide
gtaaggactccttggcttcatatagctcaataaacctgctcgcttagtcgctatattgga

SEQ ID NO: 434015 - DNA, 60 bp, Artificial
  Synthetic oligonucleotide
gtaaggactgggtagcaactgtttatggagtcaacgatgatctgtatgaaagtgcaaagc

SEQ ID NO: 434016 - DNA, 56 bp, Artificial
  Synthetic oligonucleotide
gtaaggagaagaaattgtaggtcacagtctattataaggtacctgtgtagaaagaa

SEQ ID NO: 434017 - DNA, 58 bp, Artificial
  Synthetic oligonucleotide
gtaaggagacgcagggggcggtggcggagggcacacagacgatggagacgcagacggg

SEQ ID NO: 434018 - DNA, 60 bp, Artificial
  Synthetic oligonucleotide
gtaaggaggcagccataattcacaaatgccttcaggccgggtgcgatctcgctagcgagg

SEQ ID NO: 434019 - DNA, 50 bp, Artificial
  Synthetic oligonucleotide
gtaaggagtatggtctaaccatgactcctgcagataagtctccttgcttc

SEQ ID NO: 434020 - DNA, 53 bp, Artificial
  Synthetic oligonucleotide
gtaaggatccaaagaagagcaccagtagtaataagggagctggcacaagcagc

SEQ ID NO: 434021 - DNA, 55 bp, Artificial
  Synthetic oligonucleotide
gtaaggatgatgtccgttgttgcgaatgagaatgctcagaggtgactcggtagcg

SEQ ID NO: 434022 - DNA, 59 bp, Artificial
  Synthetic oligonucleotide
gtaaggattcatcgtcagtcatccttttgtcgtgaatctccactaccaccgtcccagag

SEQ ID NO: 434023 - DNA, 54 bp, Artificial
  Synthetic oligonucleotide
gtaaggcacagctatgtaaaaggacggttccgagataccgctagagaacgtcta

SEQ ID NO: 434024 - DNA, 59 bp, Artificial
  Synthetic oligonucleotide
gtaaggcatgggaaacctggcggtggtgcagctcttaagctgtcgggtatgtcggactg

SEQ ID NO: 434025 - DNA, 60 bp, Artificial
  Synthetic oligonucleotide
gtaaggcatgggttcttattgacccgtcacttaacgcatccgatcccgcatcgctgcgtc

SEQ ID NO: 434026 - DNA, 58 bp, Artificial
  Synthetic oligonucleotide
gtaaggccatgaattctcatggcgttagaattttacgtggtactattatgtttgatgg

SEQ ID NO: 434027 - DNA, 54 bp, Artificial
  Synthetic oligonucleotide
gtaaggcgaagccttccgacttccttcctacctggttcaagcggcgcaagtccc

SEQ ID NO: 434028 - DNA, 55 bp, Artificial
  Synthetic oligonucleotide
gtaaggcgacggggcttctcattaacaaatagaagattggtacaacaagtagctg

SEQ ID NO: 434029 - DNA, 60 bp, Artificial
  Synthetic oligonucleotide
gtaaggctagagtcagcgctgcatgactataacttgcggccgatccagttgcacgactgg

SEQ ID NO: 434030 - DNA, 57 bp, Artificial
  Synthetic oligonucleotide
gtaaggctcctgggagtctcccgacaccacccgcgcaggtgtggacaccaattcggc

SEQ ID NO: 434031 - DNA, 55 bp, Artificial
  Synthetic oligonucleotide
gtaaggctgatatgctttgcatcttacttgcaatcgtcagctatgtttgggagcc

SEQ ID NO: 434032 - DNA, 51 bp, Artificial
  Synthetic oligonucleotide
gtaagggaaagaatgagacgaactgagccagtagcagagccaccagcagat

SEQ ID NO: 434033 - DNA, 51 bp, Artificial
  Synthetic oligonucleotide
gtaagggaacgaatgagacgagctgagcccgcagaagcaagagatgagcca

SEQ ID NO: 434034 - DNA, 56 bp, Artificial
  Synthetic oligonucleotide
gtaagggcgagccttggagcgtcgttcgtaagcgtatagtggagatgctttgtgat

SEQ ID NO: 434035 - DNA, 60 bp, Artificial
  Synthetic oligonucleotide
gtaagggcgcgattcagggtgcagcgttggctggcgttattgcgctcatcggtgcgccgt

SEQ ID NO: 434036 - DNA, 55 bp, Artificial
  Synthetic oligonucleotide
gtaaggggaactctggacgctctgcacagcgcacttgacttgagggagaatggcg

SEQ ID NO: 434037 - DNA, 55 bp, Artificial
  Synthetic oligonucleotide
gtaagggtcattatagaattgtaaagtactcatcagttgctaatcacgctgacag

SEQ ID NO: 434038 - DNA, 54 bp, Artificial
  Synthetic oligonucleotide
gtaaggtaaatgtgtccccaataggtaaatgagtccccaatatatcggtcctta

SEQ ID NO: 434039 - DNA, 57 bp, Artificial
  Synthetic oligonucleotide
gtaaggtactggggatccacgtcggtgggaatggtcatcagggtttctcggcagctc

SEQ ID NO: 434040 - DNA, 55 bp, Artificial
  Synthetic oligonucleotide
gtaaggtagctcttatatattagaagttcctaaggggcacgtggcggccatccgt

SEQ ID NO: 434041 - DNA, 60 bp, Artificial
  Synthetic oligonucleotide
gtaaggtccagtcgtttgaatctagacacgatgtagtccatatagggaaggtcatgtgta

SEQ ID NO: 434042 - DNA, 55 bp, Artificial
  Synthetic oligonucleotide
gtaaggtccgaaaattaagacattacaattgttcagtgtacggggctagcctgga

SEQ ID NO: 434043 - DNA, 57 bp, Artificial
  Synthetic oligonucleotide
gtaaggtccgtcttaccccagagataatgtcctatttacattctatgaatgagtccc

SEQ ID NO: 434044 - DNA, 53 bp, Artificial
  Synthetic oligonucleotide
gtaaggtggaatgcgtttgcagagacaactggactggaaccaacaggccggtt

SEQ ID NO: 434045 - DNA, 60 bp, Artificial
  Synthetic oligonucleotide
gtaaggtgtggatggatgagaacatcaagctcaagaaccacacgaacagtgttatgttct

SEQ ID NO: 434046 - DNA, 57 bp, Artificial
  Synthetic oligonucleotide
gtaaggtgttgggacatataactgaaagggtggttcataagaatttcagccagagct

SEQ ID NO: 434047 - DNA, 55 bp, Artificial
  Synthetic oligonucleotide
gtaaggttagacgtcgtgccgttgctagcaacacgaggatttacccgagtgttgg

SEQ ID NO: 434048 - DNA, 60 bp, Artificial
  Synthetic oligonucleotide
gtaaggttatcaatatgaatcggagcatgcaccccaattcatcagtcgccagattatacc

SEQ ID NO: 434049 - DNA, 57 bp, Artificial
  Synthetic oligonucleotide
gtaaggttatgtgtatttcagatgtcacacgtggtggtgggcttacccaccgaacag

SEQ ID NO: 434050 - DNA, 57 bp, Artificial
  Synthetic oligonucleotide
gtaaggttggacggcgggagatcctcgtctgtccaattactaatgaagagtcacacg

SEQ ID NO: 434051 - DNA, 56 bp, Artificial
  Synthetic oligonucleotide
gtaaggtttccacgaactgaatttactgctttctagtatagataataaatggcacc

SEQ ID NO: 434052 - DNA, 52 bp, Artificial
  Synthetic oligonucleotide
gtaagtaaaaagtatatgtaatgttacctttggaaatttgtgcaatagtagg

SEQ ID NO: 434053 - DNA, 55 bp, Artificial
  Synthetic oligonucleotide
gtaagtaagccattaattacctctaccggtttagtcttgctatacttatatacca

SEQ ID NO: 434054 - DNA, 54 bp, Artificial
  Synthetic oligonucleotide
gtaagtaaggggtagccgtggcgagggacttatcaccccaagtgacggagcgac

SEQ ID NO: 434055 - DNA, 60 bp, Artificial
  Synthetic oligonucleotide
gtaagtaccccaacatgtatgtcccagttggtgctgtgactgaacagggatatcttaatc

SEQ ID NO: 434056 - DNA, 53 bp, Artificial
  Synthetic oligonucleotide
gtaagtaccctaacatgtatgtacccgtcggtgcagtaaccgaacaagggtac

SEQ ID NO: 434057 - DNA, 52 bp, Artificial
  Synthetic oligonucleotide
gtaagtactctatagaagagtaccttcaggacagggacaaatactatgagga

SEQ ID NO: 434058 - DNA, 51 bp, Artificial
  Synthetic oligonucleotide
gtaagtactgaattttaattcgacctatcccggtaaagcgaaagcgacacg

SEQ ID NO: 434059 - DNA, 51 bp, Artificial
  Synthetic oligonucleotide
gtaagtaggtaaactggtaggttaaaaaatgagaccccgataggaaaatga

SEQ ID NO: 434060 - DNA, 59 bp, Artificial
  Synthetic oligonucleotide
gtaagtagtggaatcaggaaagtgctgtttctagacggaatagataaggctcaagaaga

SEQ ID NO: 434061 - DNA, 60 bp, Artificial
  Synthetic oligonucleotide
gtaagtataattagttagcctatgtaatgaatcctttaatctggtcaataatagcactga

SEQ ID NO: 434062 - DNA, 60 bp, Artificial
  Synthetic oligonucleotide
gtaagtatatgtaatgttagatttagcagcaagagtagattacaaactaggagtgggagc

SEQ ID NO: 434063 - DNA, 60 bp, Artificial
  Synthetic oligonucleotide
gtaagtatatgtcatgttaagtttactagacaaagtagactatagattaggagtagcagc

SEQ ID NO: 434064 - DNA, 53 bp, Artificial
  Synthetic oligonucleotide
gtaagtatccggatgtcattgagaaatttgtgaccaataggtccgtagacgcg

SEQ ID NO: 434065 - DNA, 60 bp, Artificial
  Synthetic oligonucleotide
gtaagtattattaagtagtgtatgtaatgtcatatttgttagcaatactcattgtagctt

SEQ ID NO: 434066 - DNA, 51 bp, Artificial
  Synthetic oligonucleotide
gtaagtatttccttacctattttgagtatacgcgcgatgctagaaccactg

SEQ ID NO: 434067 - DNA, 54 bp, Artificial
  Synthetic oligonucleotide
gtaagtccacatcacagttttaaggttcaattccttttgctccctgttgggccc

SEQ ID NO: 434068 - DNA, 57 bp, Artificial
  Synthetic oligonucleotide
gtaagtcgagggctctttttgtggtgccaacacagttagtctatggtttctggagga

SEQ ID NO: 434069 - DNA, 57 bp, Artificial
  Synthetic oligonucleotide
gtaagtcgcatcgaatacagagttttcaagaataaccgtgtgggctaatgtaccgaa

SEQ ID NO: 434070 - DNA, 59 bp, Artificial
  Synthetic oligonucleotide
gtaagtcgtcccagaagctgtcagggatgtcgtccagacttggaagttgagaaatgcct

SEQ ID NO: 434071 - DNA, 53 bp, Artificial
  Synthetic oligonucleotide
gtaagtctaacctgagaggtcactagggagctccccactcccgttttgtcacc

SEQ ID NO: 434072 - DNA, 60 bp, Artificial
  Synthetic oligonucleotide
gtaagtctatgttacatctaattgggaaagtccatgacgcctgcagtgactcgttgtcgg

SEQ ID NO: 434073 - DNA, 58 bp, Artificial
  Synthetic oligonucleotide
gtaagtgactctgctgtacgcggggcgaggcagaggtttccttctaaattgaaagaga

SEQ ID NO: 434074 - DNA, 58 bp, Artificial
  Synthetic oligonucleotide
gtaagtgatttaccacgagttcaaattccgactgatgtcttgttagtcgatgaagact

SEQ ID NO: 434075 - DNA, 55 bp, Artificial
  Synthetic oligonucleotide
gtaagtgctgtcatcatggagagcccataaagggacagacagatgcttcacttgg

SEQ ID NO: 434076 - DNA, 60 bp, Artificial
  Synthetic oligonucleotide
gtaagtggaaaagacgagcagtcaattgctgaagcaataattgtagccatggtattctca

SEQ ID NO: 434077 - DNA, 58 bp, Artificial
  Synthetic oligonucleotide
gtaagtggaagagacgaacagtcaatcgctgaagcagtcattgtagcgatggtgtttt

SEQ ID NO: 434078 - DNA, 60 bp, Artificial
  Synthetic oligonucleotide
gtaagtggaagagacgaacagtcaattgctgaagcgatcatagtagcaatggtgttctca

SEQ ID NO: 434079 - DNA, 52 bp, Artificial
  Synthetic oligonucleotide
gtaagtggaagggcgtctaccagcaggacaccagctatcctggccgcgacaa

SEQ ID NO: 434080 - DNA, 58 bp, Artificial
  Synthetic oligonucleotide
gtaagtggagagttggaattttgctctcatattctgaaaagccccaccctcgccattc

SEQ ID NO: 434081 - DNA, 54 bp, Artificial
  Synthetic oligonucleotide
gtaagtggataagggcagtatgatgcttggacggtttttcgggcttgtgccaca

SEQ ID NO: 434082 - DNA, 55 bp, Artificial
  Synthetic oligonucleotide
gtaagtgtaatacgtgattagtaataatgtttaactcgctttaataataaataca

SEQ ID NO: 434083 - DNA, 60 bp, Artificial
  Synthetic oligonucleotide
gtaagtgtgagatcctaaattgtcttactgaataacatcataagtcgataactgttgaca

SEQ ID NO: 434084 - DNA, 55 bp, Artificial
  Synthetic oligonucleotide
gtaagttaaccaacatagtgaattcttgcacactattgacgataggtgtagccga

SEQ ID NO: 434085 - DNA, 54 bp, Artificial
  Synthetic oligonucleotide
gtaagttagacgacgctagcacggcttttcataagagtttagctacgttaaagg

SEQ ID NO: 434086 - DNA, 55 bp, Artificial
  Synthetic oligonucleotide
gtaagttcacagacccagttaaggatgtattggaaaaaggaatccccactttgca

SEQ ID NO: 434087 - DNA, 60 bp, Artificial
  Synthetic oligonucleotide
gtaagttcctgatagcatacacccctccaggtgctgatatcccggagacacgtcgtgatg

SEQ ID NO: 434088 - DNA, 55 bp, Artificial
  Synthetic oligonucleotide
gtaagttcgtcaaggtcatcttgtctggaaactacgcagcctacatcgaccgaga

SEQ ID NO: 434089 - DNA, 56 bp, Artificial
  Synthetic oligonucleotide
gtaagttctacgatagagatatcttaggacactggacagtagcagagggagctatc

SEQ ID NO: 434090 - DNA, 56 bp, Artificial
  Synthetic oligonucleotide
gtaagttcttctcctcagacacactgtgtaacccaaataataagtctagaataccc

SEQ ID NO: 434091 - DNA, 58 bp, Artificial
  Synthetic oligonucleotide
gtaagttcttgcgcgtctggactcgccattgtgaaaacgtggtcgcaaggagccctcc

SEQ ID NO: 434092 - DNA, 50 bp, Artificial
  Synthetic oligonucleotide
gtaagttgaatccatgtgagtctgaaccaccacatcccaatgtgattcca

SEQ ID NO: 434093 - DNA, 51 bp, Artificial
  Synthetic oligonucleotide
gtaagttgcaccccagtgttttttacaatgtcttcccaggtagtaaagaac

SEQ ID NO: 434094 - DNA, 54 bp, Artificial
  Synthetic oligonucleotide
gtaagttgggtgtgttcctacgatttctgcaacccaagccccttgacgttttga

SEQ ID NO: 434095 - DNA, 54 bp, Artificial
  Synthetic oligonucleotide
gtaagttgttgtttatcgtcgaagtgcctttagtgagcagtgaagcttttgacg

SEQ ID NO: 434096 - DNA, 55 bp, Artificial
  Synthetic oligonucleotide
gtaagtttacctccttcactgcattactactgaccattgacaacttaacaaaccc

SEQ ID NO: 434097 - DNA, 58 bp, Artificial
  Synthetic oligonucleotide
gtaagtttactaatcgtaaggtagctactaagttgattattgcactacagcttggtca

SEQ ID NO: 434098 - DNA, 50 bp, Artificial
  Synthetic oligonucleotide
gtaagtttttagcgtaattattggggggttaacaggcaagggagttcttg

SEQ ID NO: 434099 - DNA, 60 bp, Artificial
  Synthetic oligonucleotide
gtaataaactggactaaggactctataacagacatttggacgtatcaagctgaattgctg

SEQ ID NO: 434100 - DNA, 54 bp, Artificial
  Synthetic oligonucleotide
gtaataaagggctcccccatccgcagtgtcaatttatacgaacgatcacgcatg

SEQ ID NO: 434101 - DNA, 60 bp, Artificial
  Synthetic oligonucleotide
gtaataaatgatacgtcaaatgattctaactcgagaagaatcatgacaagtgaagtacta

SEQ ID NO: 434102 - DNA, 57 bp, Artificial
  Synthetic oligonucleotide
gtaataaatgattggtataccctatcaaagaaaacttatgctccgccaagagaagga

SEQ ID NO: 434103 - DNA, 58 bp, Artificial
  Synthetic oligonucleotide
gtaataaatgtcagctaaaaggggaagccttacatggacaagtagattgtagtccaga

SEQ ID NO: 434104 - DNA, 58 bp, Artificial
  Synthetic oligonucleotide
gtaataacatctatggaggttgcaatctccccgcgtaggggctcgttggtccagcaaa

SEQ ID NO: 434105 - DNA, 50 bp, Artificial
  Synthetic oligonucleotide
gtaataacgtataaggccccagttaggtccaccggtaaattaagggtcca

SEQ ID NO: 434106 - DNA, 59 bp, Artificial
  Synthetic oligonucleotide
gtaataagaaggggtactccagatgagttactccaattgagccttctcaaacttgctca

SEQ ID NO: 434107 - DNA, 54 bp, Artificial
  Synthetic oligonucleotide
gtaataagacaataacctttaatcaatcctcaggaggggacttagaaattacaa

SEQ ID NO: 434108 - DNA, 57 bp, Artificial
  Synthetic oligonucleotide
gtaataagaggggtgtactccgattgagctctcaaacttctgtgctatgttttgggg

SEQ ID NO: 434109 - DNA, 60 bp, Artificial
  Synthetic oligonucleotide
gtaataagcggatccagattccttcgctcttaccttgcgataactagagtctactcagta

SEQ ID NO: 434110 - DNA, 54 bp, Artificial
  Synthetic oligonucleotide
gtaataagcgtcaaccgggttattggagcgtaagttacgaatacgcatccgcgg

SEQ ID NO: 434111 - DNA, 59 bp, Artificial
  Synthetic oligonucleotide
gtaataagtagccgccgtccagaagaagatagtaccaacatgtcgagtgaaggtagata

SEQ ID NO: 434112 - DNA, 52 bp, Artificial
  Synthetic oligonucleotide
gtaataagttaaactttaatttgaattaaaaggctcaaaaggcgcagaacac

SEQ ID NO: 434113 - DNA, 57 bp, Artificial
  Synthetic oligonucleotide
gtaataatggtttaaagcgtgcaacctttgttagacgcaatgatggtaaacgtcgca

SEQ ID NO: 434114 - DNA, 57 bp, Artificial
  Synthetic oligonucleotide
gtaatacaaagaggatttagagcttttctgcacatacctgcaagaataagacagggc

SEQ ID NO: 434115 - DNA, 53 bp, Artificial
  Synthetic oligonucleotide
gtaatacaacaagactgtttaatagtacttggaatggtactgaatggttaggt

SEQ ID NO: 434116 - DNA, 59 bp, Artificial
  Synthetic oligonucleotide
gtaatacaacacaactgtttaatagtacttggaatgatactagcaactcaaataccaca

SEQ ID NO: 434117 - DNA, 55 bp, Artificial
  Synthetic oligonucleotide
gtaatacaacacaactgtttaatagtacttgggatagtactgcagggagcaacac

SEQ ID NO: 434118 - DNA, 55 bp, Artificial
  Synthetic oligonucleotide
gtaatacaacacagctgtttaatagtacttggacgtggaatgataccacttacac

SEQ ID NO: 434119 - DNA, 54 bp, Artificial
  Synthetic oligonucleotide
gtaatacaagatggacccttcgcatgtcgtcctctacctcagtcggtcgctctg

SEQ ID NO: 434120 - DNA, 57 bp, Artificial
  Synthetic oligonucleotide
gtaatacaagtcagggttggcttgaccgaaccagaatgtctggtgcaccttccgttc

SEQ ID NO: 434121 - DNA, 53 bp, Artificial
  Synthetic oligonucleotide
gtaatacactgatattaccaagagtgcgggtatcgcctgtggttttccacagg

SEQ ID NO: 434122 - DNA, 55 bp, Artificial
  Synthetic oligonucleotide
gtaataccaatttaattgcagaacaagctgtagctccagtaacactagcaggcaa

SEQ ID NO: 434123 - DNA, 55 bp, Artificial
  Synthetic oligonucleotide
gtaatacccgcgctattcttcatggtatcccgttcatccgtgacttagctttccg

SEQ ID NO: 434124 - DNA, 55 bp, Artificial
  Synthetic oligonucleotide
gtaataccgtcttagcttatgttcatagaccattagtcgcgtagcctttagcgcc

SEQ ID NO: 434125 - DNA, 55 bp, Artificial
  Synthetic oligonucleotide
gtaatacggctccgcaaacggcatttcaaagtataatgccgtctctatctgcgtt

SEQ ID NO: 434126 - DNA, 58 bp, Artificial
  Synthetic oligonucleotide
gtaatactagtgtaatgcgcaatgcttgtgaaaaacagacttttcgcccatttcccat

SEQ ID NO: 434127 - DNA, 59 bp, Artificial
  Synthetic oligonucleotide
gtaatacttaccctgggcattgtggcgagagacggtcaccgcgcgttcgatggagctgt

SEQ ID NO: 434128 - DNA, 60 bp, Artificial
  Synthetic oligonucleotide
gtaatacttccgattctggtgtagcatcgactggggccccctagcgtgagctcagcacgt

SEQ ID NO: 434129 - DNA, 60 bp, Artificial
  Synthetic oligonucleotide
gtaatacttgcttacgattatctgcagcatttgaacagaggacatatagtcaatgtattg

SEQ ID NO: 434130 - DNA, 60 bp, Artificial
  Synthetic oligonucleotide
gtaatagaagttggtgatgacctgtcgcttcatactgaatcatatgtttgcagtgcagat

SEQ ID NO: 434131 - DNA, 60 bp, Artificial
  Synthetic oligonucleotide
gtaatagagaacgcgacattattgtccatattatcatattcgtatgacaagtataacgct

SEQ ID NO: 434132 - DNA, 53 bp, Artificial
  Synthetic oligonucleotide
gtaatagatattcccctttagaatcccttaagattgaggtaggaaaagacgcg

SEQ ID NO: 434133 - DNA, 59 bp, Artificial
  Synthetic oligonucleotide
gtaatagcatgaccttgttgtctgcagacataccttacacattgcattttggagtgcga

SEQ ID NO: 434134 - DNA, 58 bp, Artificial
  Synthetic oligonucleotide
gtaatagctatgctggatggaacgagtaccaccgcggtaaatgctggacgcctttacg

SEQ ID NO: 434135 - DNA, 55 bp, Artificial
  Synthetic oligonucleotide
gtaatagctgactttcatgatcctatgtgtaattgttggcacccttttgggcacc

SEQ ID NO: 434136 - DNA, 59 bp, Artificial
  Synthetic oligonucleotide
gtaatagctttctagccagattaatggtagataaaactgatccagaacatcctaaatac

SEQ ID NO: 434137 - DNA, 55 bp, Artificial
  Synthetic oligonucleotide
gtaataggcgtccgtcactgcaggtcgcagagtatctgtggacgaccaacaaggc

SEQ ID NO: 434138 - DNA, 54 bp, Artificial
  Synthetic oligonucleotide
gtaataggtagggaaatagaggtagacagtggaagtttgctttgttgtgtagca

SEQ ID NO: 434139 - DNA, 55 bp, Artificial
  Synthetic oligonucleotide
gtaatagtcgcgatctggaaatttatggacttagcaaacattcagctgtagagtc

SEQ ID NO: 434140 - DNA, 59 bp, Artificial
  Synthetic oligonucleotide
gtaatagtgaacaaccaaaactggtcaggatactcaggagcgttcatcgattattgggc

SEQ ID NO: 434141 - DNA, 55 bp, Artificial
  Synthetic oligonucleotide
gtaatagtgcagtgtatgaaagctttatgcgtactgctaacttgcgcagttccgt

SEQ ID NO: 434142 - DNA, 60 bp, Artificial
  Synthetic oligonucleotide
gtaatagtggaccgagacgacgtccgttgaccgtgaaatcacagtattgtctgacgctca

SEQ ID NO: 434143 - DNA, 59 bp, Artificial
  Synthetic oligonucleotide
gtaatatacctaaaaaggagaattggttgaccttctctcgtgagcatactagcacatgg

SEQ ID NO: 434144 - DNA, 59 bp, Artificial
  Synthetic oligonucleotide
gtaatatagctaagtctgtgtatgaacgcgataaagctgtagctcgcaaacttgaacgt

SEQ ID NO: 434145 - DNA, 60 bp, Artificial
  Synthetic oligonucleotide
gtaatatctctagtaccaactaatgacgattatcagacgccaatagctaattcagtgacg

SEQ ID NO: 434146 - DNA, 60 bp, Artificial
  Synthetic oligonucleotide
gtaatatgggcagtgaacgaattagatagatttggattagcagagaccctgttggaatca

SEQ ID NO: 434147 - DNA, 56 bp, Artificial
  Synthetic oligonucleotide
gtaatatgggggaagagatctcctaagtttaaactacccatactgaaagagacatg

SEQ ID NO: 434148 - DNA, 56 bp, Artificial
  Synthetic oligonucleotide
gtaatattgctaagtcagcatacgagcgtgatagagctgttgctcgcaagctggaa

SEQ ID NO: 434149 - DNA, 60 bp, Artificial
  Synthetic oligonucleotide
gtaatattgctgttttcgggtcatctgataagacccagtttcctgctgttggatttgata

SEQ ID NO: 434150 - DNA, 56 bp, Artificial
  Synthetic oligonucleotide
gtaatcaaataccaattccagctctcttttgacaactggtcttataccaactttcc

SEQ ID NO: 434151 - DNA, 59 bp, Artificial
  Synthetic oligonucleotide
gtaatcaagaatcctacagacttgatcacatcgcttttgtcgaactaggacaaaggaag

SEQ ID NO: 434152 - DNA, 55 bp, Artificial
  Synthetic oligonucleotide
gtaatcacggaatatcttatcaaaacacactttgtccccatgttcaagggactaa

SEQ ID NO: 434153 - DNA, 60 bp, Artificial
  Synthetic oligonucleotide
gtaatcactaggcatcagtacagtaaccctgcatttgaggtgtccattacttctaactct

SEQ ID NO: 434154 - DNA, 59 bp, Artificial
  Synthetic oligonucleotide
gtaatcacttaccagttaagctagtttcacgatttgcatgtttcacattgacggcgaag

SEQ ID NO: 434155 - DNA, 54 bp, Artificial
  Synthetic oligonucleotide
gtaatcagaaccagaactaaccctgttatcagccttagttcttttactttcctg

SEQ ID NO: 434156 - DNA, 57 bp, Artificial
  Synthetic oligonucleotide
gtaatcatataacagttggagatttcacatgggctcgttcccctgttacccgtgatt

SEQ ID NO: 434157 - DNA, 60 bp, Artificial
  Synthetic oligonucleotide
gtaatcatgctttgaagcgtgcaatcgttgttagacgcaatgatgggaaacgtcgtaatg

SEQ ID NO: 434158 - DNA, 60 bp, Artificial
  Synthetic oligonucleotide
gtaatcattgcagcctgacaattgggccaaatgagtttttcgaaatgcctaggggcatgc

SEQ ID NO: 434159 - DNA, 53 bp, Artificial
  Synthetic oligonucleotide
gtaatccaaggtggcacaccggaaaatccgtacatcaagattcgcgcgctcac

SEQ ID NO: 434160 - DNA, 55 bp, Artificial
  Synthetic oligonucleotide
gtaatccaatgtgtgccaggatcagaccgttaccaatccgggaaatctgtgtctg

SEQ ID NO: 434161 - DNA, 60 bp, Artificial
  Synthetic oligonucleotide
gtaatccagtctgagcagagctacgaccgtcactcaggcagtcccttgagtcgccaccga

SEQ ID NO: 434162 - DNA, 60 bp, Artificial
  Synthetic oligonucleotide
gtaatccatgcagagattcaacatttaggtcattggatggatggcacatttaatttgaaa

SEQ ID NO: 434163 - DNA, 55 bp, Artificial
  Synthetic oligonucleotide
gtaatcccagctatgtcatgttcgacaatgaaacagcctattcgagtaccggacg

SEQ ID NO: 434164 - DNA, 54 bp, Artificial
  Synthetic oligonucleotide
gtaatcccgaatatcgggtctataccctgggtaaggggtctgtccagtagaata

SEQ ID NO: 434165 - DNA, 60 bp, Artificial
  Synthetic oligonucleotide
gtaatcccgagctcataagttcgaggctacagtccgatggcagtggtgttgccgtctcga

SEQ ID NO: 434166 - DNA, 59 bp, Artificial
  Synthetic oligonucleotide
gtaatccgctctgatcgcaagggtatccaggtgtgcaacactgaatttataaggtcgtt

SEQ ID NO: 434167 - DNA, 50 bp, Artificial
  Synthetic oligonucleotide
gtaatccgtgattacacatctgacattattatcactaatatatgcaaggg

SEQ ID NO: 434168 - DNA, 52 bp, Artificial
  Synthetic oligonucleotide
gtaatcctattatcggggaaaagatggacaggggggaaataaaaaactgctc

SEQ ID NO: 434169 - DNA, 58 bp, Artificial
  Synthetic oligonucleotide
gtaatcctcgaacggccatgctgccggtattccctcttgacctataaagtcattcagg

SEQ ID NO: 434170 - DNA, 50 bp, Artificial
  Synthetic oligonucleotide
gtaatcctgtcaaaagcatgtggagtgagggggccacttttagtgccaac

SEQ ID NO: 434171 - DNA, 55 bp, Artificial
  Synthetic oligonucleotide
gtaatcgcccatcttctgataacgagtactgcgttcctgccctgctcctagaggc

SEQ ID NO: 434172 - DNA, 54 bp, Artificial
  Synthetic oligonucleotide
gtaatcgccgtaagagggacacattactgggtaggaggctagcggggtaccgaa

SEQ ID NO: 434173 - DNA, 57 bp, Artificial
  Synthetic oligonucleotide
gtaatcggaaggacagtggtattactctgggctcaaaaggtcaactattgagagacc

SEQ ID NO: 434174 - DNA, 53 bp, Artificial
  Synthetic oligonucleotide
gtaatcgtacttgagtttcgttatgggatcagctgaacctattagtgcaatcg

SEQ ID NO: 434175 - DNA, 60 bp, Artificial
  Synthetic oligonucleotide
gtaatcgtagcttattcgttatgccaactagcccagattggaacatggacgtcaatttga

SEQ ID NO: 434176 - DNA, 57 bp, Artificial
  Synthetic oligonucleotide
gtaatcgtcgttaagacgttgagtgcttacaagcaatcaaggtgcgtatcccggggc

SEQ ID NO: 434177 - DNA, 55 bp, Artificial
  Synthetic oligonucleotide
gtaatcgttagttctgacgttgagatggattcactgagaccggtaatggtcgtcc

SEQ ID NO: 434178 - DNA, 56 bp, Artificial
  Synthetic oligonucleotide
gtaatcgttggcgtccgcgaacgggagccactcgccggcgtcgcaataatatttac

SEQ ID NO: 434179 - DNA, 55 bp, Artificial
  Synthetic oligonucleotide
gtaatctacataagccaacacgctacagtaccatcaagaagcatctcgataacag

SEQ ID NO: 434180 - DNA, 55 bp, Artificial
  Synthetic oligonucleotide
gtaatctcaccatattcccacaccagattataaacctaaggacaaataactccag

SEQ ID NO: 434181 - DNA, 55 bp, Artificial
  Synthetic oligonucleotide
gtaatctccggaggatcacacccgcccgggaaccatgccgtccaaggagggctcc

SEQ ID NO: 434182 - DNA, 54 bp, Artificial
  Synthetic oligonucleotide
gtaatctccgtcttgtttcccctttttccacggaccagaagtctatgcaatctg

SEQ ID NO: 434183 - DNA, 60 bp, Artificial
  Synthetic oligonucleotide
gtaatctgcacaccaccagtgctcacctcagagaggagatcgaatagctcttcaggctca

SEQ ID NO: 434184 - DNA, 59 bp, Artificial
  Synthetic oligonucleotide
gtaatctggggagtgcaccaccctccaactgctactgaacaacaaagtctctaccagaa

SEQ ID NO: 434185 - DNA, 58 bp, Artificial
  Synthetic oligonucleotide
gtaatctggtacaatagaaggcctgttacagaagtcaatacatgggcccgaaacatac

SEQ ID NO: 434186 - DNA, 55 bp, Artificial
  Synthetic oligonucleotide
gtaatctgtagtggcggtgattatagtttcgcattaccggtaggtgcatatccag

SEQ ID NO: 434187 - DNA, 57 bp, Artificial
  Synthetic oligonucleotide
gtaatcttgagttcggtgggcttcctgattgggaccccgggtacaagcagcttgaga

SEQ ID NO: 434188 - DNA, 60 bp, Artificial
  Synthetic oligonucleotide
gtaatcttgatgataccatatatgcggttcagcaaatgaagacttctatagttcagtgtg

SEQ ID NO: 434189 - DNA, 55 bp, Artificial
  Synthetic oligonucleotide
gtaatcttgtcgctatttctgatttactatccaaatgctgacgtcaccgctggca

SEQ ID NO: 434190 - DNA, 56 bp, Artificial
  Synthetic oligonucleotide
gtaatctttctgaaccgtagctcccatcgcacgaatggcttccgatcggtcatacg

SEQ ID NO: 434191 - DNA, 54 bp, Artificial
  Synthetic oligonucleotide
gtaatctttgggggctagttccctaatgactctaagagcttccgacttacttcc

SEQ ID NO: 434192 - DNA, 58 bp, Artificial
  Synthetic oligonucleotide
gtaatgaaacggaaacgggactctagcatacttactgacagccagacagcgaccaaaa

SEQ ID NO: 434193 - DNA, 55 bp, Artificial
  Synthetic oligonucleotide
gtaatgaaggtagacatgcgacatctctcgttgatgcagagaagattcccagatg

SEQ ID NO: 434194 - DNA, 57 bp, Artificial
  Synthetic oligonucleotide
gtaatgaatccaagggctggtggtggaaattacctgatgctttaaaggacatgggaa

SEQ ID NO: 434195 - DNA, 51 bp, Artificial
  Synthetic oligonucleotide
gtaatgaattcagtctgcatcgaacattcgccgtgtgaacacggaaactta

SEQ ID NO: 434196 - DNA, 60 bp, Artificial
  Synthetic oligonucleotide
gtaatgactcttgcatggagacaataagaaatggaacgtacaatcatactgaatatgagg

SEQ ID NO: 434197 - DNA, 55 bp, Artificial
  Synthetic oligonucleotide
gtaatgactgtctcattaccacttcagttaaagtgtgcttgatagggaccatatc

SEQ ID NO: 434198 - DNA, 60 bp, Artificial
  Synthetic oligonucleotide
gtaatgacttaacgacccatactaaccgattctcagaccacggtgctcgcactatgttca

SEQ ID NO: 434199 - DNA, 60 bp, Artificial
  Synthetic oligonucleotide
gtaatgagtatatgacaattgaattttatgattggaatggaaatacgatgttattagacg

SEQ ID NO: 434200 - DNA, 60 bp, Artificial
  Synthetic oligonucleotide
gtaatgatacgttcggcgttctagaggcagagtagagtgtttcgcatttgcgggctatcg

SEQ ID NO: 434201 - DNA, 60 bp, Artificial
  Synthetic oligonucleotide
gtaatgatcccatgatgatatatctagtttggaggagaattgaaaacttcgcgatggcgc

SEQ ID NO: 434202 - DNA, 50 bp, Artificial
  Synthetic oligonucleotide
gtaatgatcctatgatgatatatttagtgtggaggagaatcgaaaatttc

SEQ ID NO: 434203 - DNA, 57 bp, Artificial
  Synthetic oligonucleotide
gtaatgatctggttttctttgatgagattcagctcttcccacctggctaccttgact

SEQ ID NO: 434204 - DNA, 59 bp, Artificial
  Synthetic oligonucleotide
gtaatgcaaggaacaattcagagcataatacagggtgaaaatttgggggactcaatcaa

SEQ ID NO: 434205 - DNA, 50 bp, Artificial
  Synthetic oligonucleotide
gtaatgcacaagttttatgcgaaggtcactggtggacaatatgcgagcaa

SEQ ID NO: 434206 - DNA, 56 bp, Artificial
  Synthetic oligonucleotide
gtaatgcagacaatctgtgggtcacagtgtattatggggtgcctgtatggaaggaa

SEQ ID NO: 434207 - DNA, 55 bp, Artificial
  Synthetic oligonucleotide
gtaatgcaggtactcgcaagtgcaacggccccaatagcagcactcagtggtggtc

SEQ ID NO: 434208 - DNA, 60 bp, Artificial
  Synthetic oligonucleotide
gtaatgcccactgagattgcaatctctacatgtggaattgtcaacgttcgttttaatgga

SEQ ID NO: 434209 - DNA, 54 bp, Artificial
  Synthetic oligonucleotide
gtaatgccggaggtggcgagagcgtggttggcatgcacgtttgcggtgacttca

SEQ ID NO: 434210 - DNA, 60 bp, Artificial
  Synthetic oligonucleotide
gtaatgcgctatgtccttgggagtcagcatctgtgtgagtggttcctatggtgcttctac

SEQ ID NO: 434211 - DNA, 51 bp, Artificial
  Synthetic oligonucleotide
gtaatgctaactggagttgatcgcggttattcttgtacttacaccgttaaa

SEQ ID NO: 434212 - DNA, 55 bp, Artificial
  Synthetic oligonucleotide
gtaatgctagcttgtcctgccgcacaactgatgatgttcaacgttggctggatgc

SEQ ID NO: 434213 - DNA, 55 bp, Artificial
  Synthetic oligonucleotide
gtaatgctgttccgcactggtacgctgacatctttagcgtaatggctagtgacgg

SEQ ID NO: 434214 - DNA, 60 bp, Artificial
  Synthetic oligonucleotide
gtaatggacattacaggagtgcaatcaaccttgagatttcgtgttccttggatttctgat

SEQ ID NO: 434215 - DNA, 57 bp, Artificial
  Synthetic oligonucleotide
gtaatggacttgtggacaccttcacaaactcttactccttttgtgagagtgtcccta

SEQ ID NO: 434216 - DNA, 60 bp, Artificial
  Synthetic oligonucleotide
gtaatggagtgcaatttatactagaaccctcaatctcgcgaatagcgagattcacacacg

SEQ ID NO: 434217 - DNA, 60 bp, Artificial
  Synthetic oligonucleotide
gtaatggatcgcaccgatagaggattagatgctagaagagcagcaatgcaatttgataat

SEQ ID NO: 434218 - DNA, 55 bp, Artificial
  Synthetic oligonucleotide
gtaatggattgcacttcttttcagtgataccgtgtgagaacttcaaacccgggac

SEQ ID NO: 434219 - DNA, 60 bp, Artificial
  Synthetic oligonucleotide
gtaatggccgcgcagcggaactgacgacgttctctgcagcccattcttcgagttcctctg

SEQ ID NO: 434220 - DNA, 51 bp, Artificial
  Synthetic oligonucleotide
gtaatggcgggcatgccactcgtggtctccgctacccgcttggtacaggta

SEQ ID NO: 434221 - DNA, 60 bp, Artificial
  Synthetic oligonucleotide
gtaatggctcataatacatcaatatctacgttcatcaattatccccaactgggtaagact

SEQ ID NO: 434222 - DNA, 56 bp, Artificial
  Synthetic oligonucleotide
gtaatgggaagcccgcctacggttctgcttatactgaggagcgtcaccaggaactt

SEQ ID NO: 434223 - DNA, 60 bp, Artificial
  Synthetic oligonucleotide
gtaatgggaatgatagggatactacccgacatgaccccaagttctgaggtgtcgctgaga

SEQ ID NO: 434224 - DNA, 55 bp, Artificial
  Synthetic oligonucleotide
gtaatgggaatggtcggaatattgcccgatatgactccaagcacagaaatgtcac

SEQ ID NO: 434225 - DNA, 55 bp, Artificial
  Synthetic oligonucleotide
gtaatgggccagtgtttcggtcttccaaacttatttacacgaacacatgaattct

SEQ ID NO: 434226 - DNA, 57 bp, Artificial
  Synthetic oligonucleotide
gtaatgggcttaatacataaatgggccgccaaataagcgtacagttcagtatcttcg

SEQ ID NO: 434227 - DNA, 56 bp, Artificial
  Synthetic oligonucleotide
gtaatggtaacctgatcgctcctcgggggtatttcaaaatgcgcactgggaaaagc

SEQ ID NO: 434228 - DNA, 56 bp, Artificial
  Synthetic oligonucleotide
gtaatggtacctggattggtaaaaattttactgggagcaacatcacgctcccatgc

SEQ ID NO: 434229 - DNA, 54 bp, Artificial
  Synthetic oligonucleotide
gtaatggtacgcattaccggatcctggcagtctgtctccgaacatagcgaaacg

SEQ ID NO: 434230 - DNA, 52 bp, Artificial
  Synthetic oligonucleotide
gtaatggtagacctactcaagcaggctgaataatatacgcatcgttaatcac

SEQ ID NO: 434231 - DNA, 55 bp, Artificial
  Synthetic oligonucleotide
gtaatggtaggactcatacttgcattcatcatgtggacatgcaacagtggaaact

SEQ ID NO: 434232 - DNA, 57 bp, Artificial
  Synthetic oligonucleotide
gtaatggtttcccctgtgcgtaaatccatacttatgacaattaatgcttacgtaata

SEQ ID NO: 434233 - DNA, 52 bp, Artificial
  Synthetic oligonucleotide
gtaatgtaaagttcgtattcgagacttaccacatcgttgaccctcttgtgaa

SEQ ID NO: 434234 - DNA, 57 bp, Artificial
  Synthetic oligonucleotide
gtaatgtaacagctggttataatttcactcatccaggagaaaagggtaggactgttg

SEQ ID NO: 434235 - DNA, 60 bp, Artificial
  Synthetic oligonucleotide
gtaatgtatacagtgagtttgcaccaggtaacagtggagcattcacaagcaagtataata

SEQ ID NO: 434236 - DNA, 54 bp, Artificial
  Synthetic oligonucleotide
gtaatgtatttccacaagggattagtagttaaggaggaggagttaaggggatca

SEQ ID NO: 434237 - DNA, 60 bp, Artificial
  Synthetic oligonucleotide
gtaatgtcagccaaccatgtgcgagactgggagactcggtagttacgaatggaggattaa

SEQ ID NO: 434238 - DNA, 50 bp, Artificial
  Synthetic oligonucleotide
gtaatgtcagtagagcaaaatggaacgaaactttacgagggatagccaaa

SEQ ID NO: 434239 - DNA, 55 bp, Artificial
  Synthetic oligonucleotide
gtaatgtctcaggcttttaagccttccgaagagattaagggacagttccaagccc

SEQ ID NO: 434240 - DNA, 60 bp, Artificial
  Synthetic oligonucleotide
gtaatgttagatggtcatctcatagccttcgactactccgggtacgatgccagtctaagt

SEQ ID NO: 434241 - DNA, 56 bp, Artificial
  Synthetic oligonucleotide
gtaattaaacaagagtatctaaatgacaaagaccacattgtctcgttaactgggaa

SEQ ID NO: 434242 - DNA, 55 bp, Artificial
  Synthetic oligonucleotide
gtaattaaccatggataccagccaacatatgaataccccacctacccagatctcg

SEQ ID NO: 434243 - DNA, 60 bp, Artificial
  Synthetic oligonucleotide
gtaattaattggaatctggatgagagagatgaagaggatagagatgaacggggggatgag

SEQ ID NO: 434244 - DNA, 60 bp, Artificial
  Synthetic oligonucleotide
gtaattacaagcccctacccgctgtggatgtcagcgagagtgtcacagaggacgcgcatt

SEQ ID NO: 434245 - DNA, 58 bp, Artificial
  Synthetic oligonucleotide
gtaattacatacagttcaagtccaaatgccgtattgaacctgtgtgtttactcctcca

SEQ ID NO: 434246 - DNA, 51 bp, Artificial
  Synthetic oligonucleotide
gtaattacatgcaagctaggcaatatggcgcttgggttagtaaggtggaaa

SEQ ID NO: 434247 - DNA, 55 bp, Artificial
  Synthetic oligonucleotide
gtaattaccatgaaagttccagtcaatatcccggtaattgcggccatccgtataa

SEQ ID NO: 434248 - DNA, 60 bp, Artificial
  Synthetic oligonucleotide
gtaattaggtatagtgtgaagattggtatttatgttgcagacacattgtgaaattagata

SEQ ID NO: 434249 - DNA, 52 bp, Artificial
  Synthetic oligonucleotide
gtaattagtatgaaggaggagttaaaatcccgcctttctgttaaaacttctg

SEQ ID NO: 434250 - DNA, 53 bp, Artificial
  Synthetic oligonucleotide
gtaattatattagtgagagtggcccggcactgctacaatcggcagtgggtttg

SEQ ID NO: 434251 - DNA, 60 bp, Artificial
  Synthetic oligonucleotide
gtaattatgctagtatgagtagagtataattatattgagtcctatagaccaacgcagtta

SEQ ID NO: 434252 - DNA, 55 bp, Artificial
  Synthetic oligonucleotide
gtaattatgtggacctaatgatctagcccacatggttttcccagtcctgctgtca

SEQ ID NO: 434253 - DNA, 57 bp, Artificial
  Synthetic oligonucleotide
gtaattattacagcggaaaatgcagttagaagagttgaggttgcgggagtatatggt

SEQ ID NO: 434254 - DNA, 51 bp, Artificial
  Synthetic oligonucleotide
gtaattattgacgggggagaaactaaggtttataacactacgatggtaacg

SEQ ID NO: 434255 - DNA, 60 bp, Artificial
  Synthetic oligonucleotide
gtaattcaattcccatcactgacgaagattattggagtaatgccagaagaccagctctct

SEQ ID NO: 434256 - DNA, 60 bp, Artificial
  Synthetic oligonucleotide
gtaattcaattgcgtggtctgttgtaaatcacttataatacgtggacaatggatgtttga

SEQ ID NO: 434257 - DNA, 55 bp, Artificial
  Synthetic oligonucleotide
gtaattcatacagacaatggcagtaatttcaccagtgctgcagttaaggccgcct

SEQ ID NO: 434258 - DNA, 55 bp, Artificial
  Synthetic oligonucleotide
gtaattcatgggaaagaatacctgtcacatgcttgagctacatttgaggtcatag

SEQ ID NO: 434259 - DNA, 55 bp, Artificial
  Synthetic oligonucleotide
gtaattcctcagtcattacacagacctgtccaaaggtatcctttgagccaattcc

SEQ ID NO: 434260 - DNA, 55 bp, Artificial
  Synthetic oligonucleotide
gtaattcgattgtgcgtagtattgtcgcagtatatttgaacctagatagtctcag

SEQ ID NO: 434261 - DNA, 55 bp, Artificial
  Synthetic oligonucleotide
gtaattcggagtccggtaaggatgtctgaagagaatccgtctgttttccggcgag

SEQ ID NO: 434262 - DNA, 55 bp, Artificial
  Synthetic oligonucleotide
gtaattctaaactcgtaggcaatagtcttaacgttaccagcagtggtgcttctgc

SEQ ID NO: 434263 - DNA, 51 bp, Artificial
  Synthetic oligonucleotide
gtaattcttgtatgatcacacaggaagctgctagtggagcagtggttgcct

SEQ ID NO: 434264 - DNA, 59 bp, Artificial
  Synthetic oligonucleotide
gtaattctttcatgcttcgcaccgaggactacccgtgaggagaaattgttaggagcata

SEQ ID NO: 434265 - DNA, 59 bp, Artificial
  Synthetic oligonucleotide
gtaattgaaaaatcagtcttatctacagtctggatcggaccagaattaagaagtggata

SEQ ID NO: 434266 - DNA, 55 bp, Artificial
  Synthetic oligonucleotide
gtaattgaaccggatttggatgtggtatattctcgtccttgtgtacattggatcc

SEQ ID NO: 434267 - DNA, 57 bp, Artificial
  Synthetic oligonucleotide
gtaattgacggaagagacgacaatggattagaacaggtaagaaatatgaatgggtgt

SEQ ID NO: 434268 - DNA, 57 bp, Artificial
  Synthetic oligonucleotide
gtaattgatgcgctagaaatagccataaacccatttggcatgcctggaaatcctacg

SEQ ID NO: 434269 - DNA, 59 bp, Artificial
  Synthetic oligonucleotide
gtaattgcctcaacagtgtcagctctttttggagcaccggctgtagtggcctttcaagg

SEQ ID NO: 434270 - DNA, 60 bp, Artificial
  Synthetic oligonucleotide
gtaattgccttgcagtttgcttttcgtctgataggcacaccagagttctccgattttgtg

SEQ ID NO: 434271 - DNA, 60 bp, Artificial
  Synthetic oligonucleotide
gtaattgcggatgggtagctagaggatcgagtgaatcaataatagcggctacgtctatat

SEQ ID NO: 434272 - DNA, 60 bp, Artificial
  Synthetic oligonucleotide
gtaattgctcctggcaatggtgtaacctttactgcccatgggcagacacgtctgtacttc

SEQ ID NO: 434273 - DNA, 56 bp, Artificial
  Synthetic oligonucleotide
gtaattgcttcctacccccacgaggttgacgctagtctcctagcccaatcaggaaa

SEQ ID NO: 434274 - DNA, 54 bp, Artificial
  Synthetic oligonucleotide
gtaattggacctaggtttgacgtggtagttggtttggagaattatcttgactta

SEQ ID NO: 434275 - DNA, 55 bp, Artificial
  Synthetic oligonucleotide
gtaattggcaatgaactatccccatctgtggttaatgttatgagcatgttggaca

SEQ ID NO: 434276 - DNA, 60 bp, Artificial
  Synthetic oligonucleotide
gtaattggctacgagaaaatttatatgaatttgctgtttgggcattatgaaccgcagaga

SEQ ID NO: 434277 - DNA, 56 bp, Artificial
  Synthetic oligonucleotide
gtaattgggaaagtgcctcttccttcgtaagagagcactttggatacgtgaggaaa

SEQ ID NO: 434278 - DNA, 58 bp, Artificial
  Synthetic oligonucleotide
gtaattgggacaccgatacatcggttcccctattagtgcctcaatgtgcaatttccaa

SEQ ID NO: 434279 - DNA, 60 bp, Artificial
  Synthetic oligonucleotide
gtaattggggctagagtcttgttatatgctcccagaaagtactatgcgtcaactctatca

SEQ ID NO: 434280 - DNA, 53 bp, Artificial
  Synthetic oligonucleotide
gtaattgggggtcccctaacctcaacagtactagctctgaaagctttaagctt

SEQ ID NO: 434281 - DNA, 54 bp, Artificial
  Synthetic oligonucleotide
gtaattgtagttaagtgtattaattgttctatgttaacatgttaagtttgagtt

SEQ ID NO: 434282 - DNA, 55 bp, Artificial
  Synthetic oligonucleotide
gtaattgtcgatgatgggatgtggtgggttaccacagctgctaggacacagcagt

SEQ ID NO: 434283 - DNA, 55 bp, Artificial
  Synthetic oligonucleotide
gtaattgtcgctctaaacggatagaaattcaacgcgcgatagaatcaacgcgtgt

SEQ ID NO: 434284 - DNA, 58 bp, Artificial
  Synthetic oligonucleotide
gtaattgtgaagaatacgcaaacaacatatttagcacagaacctggtggtattatacc

SEQ ID NO: 434285 - DNA, 51 bp, Artificial
  Synthetic oligonucleotide
gtaattgtgacaatttgagatcccttagtgtcgaaccgatgaactctcctg

SEQ ID NO: 434286 - DNA, 58 bp, Artificial
  Synthetic oligonucleotide
gtaatttagccatagtcccgacattgaaggaccgcttttacattcgtcacgtgatgaa

SEQ ID NO: 434287 - DNA, 58 bp, Artificial
  Synthetic oligonucleotide
gtaatttagtcgtcccacttgatctagccgagtttagacagaagatgaagggcgacta

SEQ ID NO: 434288 - DNA, 60 bp, Artificial
  Synthetic oligonucleotide
gtaatttatgactctatgtaaaaaccggacatgacatgtctatgacacgacattaaactg

SEQ ID NO: 434289 - DNA, 55 bp, Artificial
  Synthetic oligonucleotide
gtaatttatgttaagctggtctccgggtggtgggagttctttatgatatgtctgc

SEQ ID NO: 434290 - DNA, 52 bp, Artificial
  Synthetic oligonucleotide
gtaatttccagtgacgtagtaccatgccagcaagtgagcacgataagtctta

SEQ ID NO: 434291 - DNA, 51 bp, Artificial
  Synthetic oligonucleotide
gtaatttcggaaagttatggctttgacatacagaagtccaattgaggaggt

SEQ ID NO: 434292 - DNA, 55 bp, Artificial
  Synthetic oligonucleotide
gtaatttgagattggttaacagtaatagatatccgtctatgtctaggggagcacc

SEQ ID NO: 434293 - DNA, 60 bp, Artificial
  Synthetic oligonucleotide
gtaatttgcacaaaggaacaggaaaaactatgaagggcctcattgactgaagcacatgca

SEQ ID NO: 434294 - DNA, 54 bp, Artificial
  Synthetic oligonucleotide
gtaatttgcctattagaaactggactttcgattttggtctattaggtacaacac

SEQ ID NO: 434295 - DNA, 55 bp, Artificial
  Synthetic oligonucleotide
gtaatttgcgccaattaggtaggagagaagttatgtgatggaaatttgcgctcag

SEQ ID NO: 434296 - DNA, 57 bp, Artificial
  Synthetic oligonucleotide
gtaatttgctaccgctgttaatggcctgcgcgtaagcgtcattggctgtttgctgac

SEQ ID NO: 434297 - DNA, 60 bp, Artificial
  Synthetic oligonucleotide
gtaatttggaatgttccaagatgccatatagcaaatctaatcacaaatgtcgcgttatgc

SEQ ID NO: 434298 - DNA, 51 bp, Artificial
  Synthetic oligonucleotide
gtaattttgcttctctatcaaaccccattaggcggccagtaaatgcggact

SEQ ID NO: 434299 - DNA, 55 bp, Artificial
  Synthetic oligonucleotide
gtacaaaacctacggacggaaactgcgcctgtattcccgtcccatcatcttgggc

SEQ ID NO: 434300 - DNA, 53 bp, Artificial
  Synthetic oligonucleotide
gtacaaaagcattcgccactaattgcgtcaccacaggagttacgatgcccctt

SEQ ID NO: 434301 - DNA, 55 bp, Artificial
  Synthetic oligonucleotide
gtacaaacacgttggattccaagtgacctgtttgccgaggctattggtgttgagg

SEQ ID NO: 434302 - DNA, 58 bp, Artificial
  Synthetic oligonucleotide
gtacaaacatgtggaataacgtttccgtcgaaagtctctcaccacagaatatggcagt

SEQ ID NO: 434303 - DNA, 55 bp, Artificial
  Synthetic oligonucleotide
gtacaaactacctcatgttaccacactacactcattttaacagcactttagctgg

SEQ ID NO: 434304 - DNA, 57 bp, Artificial
  Synthetic oligonucleotide
gtacaaactctactccagtttgtaaacaaaccgcattacaacatctatttcagtatg

SEQ ID NO: 434305 - DNA, 60 bp, Artificial
  Synthetic oligonucleotide
gtacaaactttgaccactgagaagttgcaattaacatcagttacgtctttatgcatgtta

SEQ ID NO: 434306 - DNA, 60 bp, Artificial
  Synthetic oligonucleotide
gtacaaagaatctatactttaaatggtgagatataattgttgctgtgtctgaatttgcat

SEQ ID NO: 434307 - DNA, 51 bp, Artificial
  Synthetic oligonucleotide
gtacaaagcactggggaaactttacaagtaccccgcagttgctaaggggtt

SEQ ID NO: 434308 - DNA, 58 bp, Artificial
  Synthetic oligonucleotide
gtacaaagctggtttgtatccagggagtaaatcggatgaagacattcacccatattcc

SEQ ID NO: 434309 - DNA, 58 bp, Artificial
  Synthetic oligonucleotide
gtacaaaggatgtatgattcgaggcttacggagtagagatgttcatttttccagcttt

SEQ ID NO: 434310 - DNA, 55 bp, Artificial
  Synthetic oligonucleotide
gtacaaaggattatggccatgcgacctgcagctgcagatatagtcatttccactc

SEQ ID NO: 434311 - DNA, 52 bp, Artificial
  Synthetic oligonucleotide
gtacaaagtactcgttctgaatccgtccgttgccgccaccttaggttttggg

SEQ ID NO: 434312 - DNA, 55 bp, Artificial
  Synthetic oligonucleotide
gtacaaataaacactcagcctcctttcttagacacaaacctcaccgcggccagca

SEQ ID NO: 434313 - DNA, 50 bp, Artificial
  Synthetic oligonucleotide
gtacaaatcctgggacagaacatcaacaagggactgcaactgttgaatga

SEQ ID NO: 434314 - DNA, 59 bp, Artificial
  Synthetic oligonucleotide
gtacaaatccttgccaagaagcgtggccagtacttggaccgtgttcagtttagagcaca

SEQ ID NO: 434315 - DNA, 50 bp, Artificial
  Synthetic oligonucleotide
gtacaaatgttagcactgtacaatgtactcatggaattaggccagtagta

SEQ ID NO: 434316 - DNA, 57 bp, Artificial
  Synthetic oligonucleotide
gtacaaattgctattgtaaaaggtgttgctttcattgtcaacggtgctttgtaacaa

SEQ ID NO: 434317 - DNA, 58 bp, Artificial
  Synthetic oligonucleotide
gtacaacaacgacctaacagctggtgtccacattttttgtgacggcgaacacgcatac

SEQ ID NO: 434318 - DNA, 60 bp, Artificial
  Synthetic oligonucleotide
gtacaacaaggctaatagcgatgtaggagctttcctgacagccatgaagttcacagggaa

SEQ ID NO: 434319 - DNA, 50 bp, Artificial
  Synthetic oligonucleotide
gtacaacaagtggccggcaactatacccatgtgccactaagtccccgaac

SEQ ID NO: 434320 - DNA, 59 bp, Artificial
  Synthetic oligonucleotide
gtacaacacgaattcagtgaaatagaggagaggataaaccgattgtcgaaacatgtaga

SEQ ID NO: 434321 - DNA, 56 bp, Artificial
  Synthetic oligonucleotide
gtacaacacgaggatccaggttcaatatggtccaacgggagaaccgctagatttcc

SEQ ID NO: 434322 - DNA, 58 bp, Artificial
  Synthetic oligonucleotide
gtacaacactcgatgagcaaatttatgtagacgtaaaattggtacaagaacactttgc

SEQ ID NO: 434323 - DNA, 53 bp, Artificial
  Synthetic oligonucleotide
gtacaacagacaatctcgaatcttgccaacccgtctaaacatgtcgacttcaa

SEQ ID NO: 434324 - DNA, 60 bp, Artificial
  Synthetic oligonucleotide
gtacaacagatatttcagggtcgtaatgatcctatgatgatatatttagtgtggaggaga

SEQ ID NO: 434325 - DNA, 55 bp, Artificial
  Synthetic oligonucleotide
gtacaacagcagtggccaaatcacattaaaagacaacatatcagggcttccatcc

SEQ ID NO: 434326 - DNA, 55 bp, Artificial
  Synthetic oligonucleotide
gtacaacatggtcatgggtaggtggggactgctgtgatagagtaggcagatctag

SEQ ID NO: 434327 - DNA, 57 bp, Artificial
  Synthetic oligonucleotide
gtacaacccgacgtgggcaacattcgccatgaacgtggggccctcaatggtagtaga

SEQ ID NO: 434328 - DNA, 53 bp, Artificial
  Synthetic oligonucleotide
gtacaacgaacaccagacagataagaaattatgctgcgatagtcaaccttgct

SEQ ID NO: 434329 - DNA, 60 bp, Artificial
  Synthetic oligonucleotide
gtacaactatacaacattgtcagcatgcatagtcatgaacatgcatttggttggaacctt

SEQ ID NO: 434330 - DNA, 60 bp, Artificial
  Synthetic oligonucleotide
gtacaactattaccgcgcagtcgttttgccagatcatgttaaggaaatctatgatggtat

SEQ ID NO: 434331 - DNA, 56 bp, Artificial
  Synthetic oligonucleotide
gtacaacttaatacggttgccttcttgtgttccataccacggttctggttgctgaa

SEQ ID NO: 434332 - DNA, 55 bp, Artificial
  Synthetic oligonucleotide
gtacaacttcccaactaaagccggccaatgtggaggtgtcctcatgtcgacaggg

SEQ ID NO: 434333 - DNA, 54 bp, Artificial
  Synthetic oligonucleotide
gtacaacttccctacaaaggcgggacagtgtggaggggtagtcacctcagtcgg

SEQ ID NO: 434334 - DNA, 59 bp, Artificial
  Synthetic oligonucleotide
gtacaagaaagacagaaacttaatattagagtcttatatttatcagattatgtcagtta

SEQ ID NO: 434335 - DNA, 55 bp, Artificial
  Synthetic oligonucleotide
gtacaagaaaggagattagctcaaccaacgccagtaccaaggagtagaagaagtt

SEQ ID NO: 434336 - DNA, 56 bp, Artificial
  Synthetic oligonucleotide
gtacaagaacaaccctggaagagtcactgtgtctaccaaaactagtcaaacaagtg

SEQ ID NO: 434337 - DNA, 55 bp, Artificial
  Synthetic oligonucleotide
gtacaagaatatggcaggtgcgtacccgacttataacactaactgggccgatgaa

SEQ ID NO: 434338 - DNA, 53 bp, Artificial
  Synthetic oligonucleotide
gtacaagacaccactggtcaaacctgacaagcagatgtgcaacttcgacctgt

SEQ ID NO: 434339 - DNA, 55 bp, Artificial
  Synthetic oligonucleotide
gtacaagacccaacaacaatacaagaaggagtataaatataggaccagggagagc

SEQ ID NO: 434340 - DNA, 55 bp, Artificial
  Synthetic oligonucleotide
gtacaagacccaacaacaatacaagagaaaggttatctataggaccagggagagc

SEQ ID NO: 434341 - DNA, 54 bp, Artificial
  Synthetic oligonucleotide
gtacaagacccaacaacaatactaggaaaggtatacatatgggaccagggaaat

SEQ ID NO: 434342 - DNA, 58 bp, Artificial
  Synthetic oligonucleotide
gtacaagacccaataacaatacaagacaaggtatacatataggaccagggagagcatt

SEQ ID NO: 434343 - DNA, 55 bp, Artificial
  Synthetic oligonucleotide
gtacaagaccccacaacaatacaagaagaagtatatcttttacaccagggagtgc

SEQ ID NO: 434344 - DNA, 54 bp, Artificial
  Synthetic oligonucleotide
gtacaagacccggaaataatacaagaagaggtatacatatgggaccaggtcggg

SEQ ID NO: 434345 - DNA, 58 bp, Artificial
  Synthetic oligonucleotide
gtacaagacttgccacggtatagggcaccaaatgttctcggtgttcaaggacacatac

SEQ ID NO: 434346 - DNA, 59 bp, Artificial
  Synthetic oligonucleotide
gtacaagataacctcgctccagctccgatactcaactagggtcactgaaaccgaggcca

SEQ ID NO: 434347 - DNA, 55 bp, Artificial
  Synthetic oligonucleotide
gtacaagattatcggagtgcctgggatgtgtccacccgaactcattcgacattgc

SEQ ID NO: 434348 - DNA, 55 bp, Artificial
  Synthetic oligonucleotide
gtacaagccctctggatgaggttttaagacaagtcccgtataagcctccacggac

SEQ ID NO: 434349 - DNA, 55 bp, Artificial
  Synthetic oligonucleotide
gtacaaggaaaggatgctatagaaagggactcaggtagtcttttgtgttgtttaa

SEQ ID NO: 434350 - DNA, 57 bp, Artificial
  Synthetic oligonucleotide
gtacaaggcccaacaacaattcaaggaaaagtatacatataggaccaggaagagcat

SEQ ID NO: 434351 - DNA, 54 bp, Artificial
  Synthetic oligonucleotide
gtacaagggatatcccggataatacgttggcggtaagcgttctatcgaagaacc

SEQ ID NO: 434352 - DNA, 58 bp, Artificial
  Synthetic oligonucleotide
gtacaaggtaatgttgaggggacagctgaggcgatatgtgcatattggttaaaatcaa

SEQ ID NO: 434353 - DNA, 60 bp, Artificial
  Synthetic oligonucleotide
gtacaagtaggggttaaaccaaaatatcctgacaacgtgatgcagcatgaggcaatcgta

SEQ ID NO: 434354 - DNA, 56 bp, Artificial
  Synthetic oligonucleotide
gtacaagtctaaacaggttatgtatgaaaggaaggagccataaagacctgggcaac

SEQ ID NO: 434355 - DNA, 50 bp, Artificial
  Synthetic oligonucleotide
gtacaagttgcccgggtccgcgggtctgaagcacgcactcttccgttgaa

SEQ ID NO: 434356 - DNA, 58 bp, Artificial
  Synthetic oligonucleotide
gtacaagtttataagattagagactacgagcttaatggcaggaatgaataaactagtc

SEQ ID NO: 434357 - DNA, 56 bp, Artificial
  Synthetic oligonucleotide
gtacaataagatggagtttgaaccgttccaatctttggtacctaaagctgccagag

SEQ ID NO: 434358 - DNA, 58 bp, Artificial
  Synthetic oligonucleotide
gtacaataatcgttttgggctgacgtcatacctagagtatatggctttctttccatcg

SEQ ID NO: 434359 - DNA, 55 bp, Artificial
  Synthetic oligonucleotide
gtacaatacaaaatgacgaatgcaattgggccattgatatagcccaaaacaaagc

SEQ ID NO: 434360 - DNA, 60 bp, Artificial
  Synthetic oligonucleotide
gtacaatagggacatcaccatcagattcaaatttgctaatcgaataataaaatctggagg

SEQ ID NO: 434361 - DNA, 60 bp, Artificial
  Synthetic oligonucleotide
gtacaatatatgtggtcggggagactagatactttcttcatgaactcagtacagaacgca

SEQ ID NO: 434362 - DNA, 50 bp, Artificial
  Synthetic oligonucleotide
gtacaatcagcagccaggatacgcaaggagaataaaacccttcgttaacg

SEQ ID NO: 434363 - DNA, 55 bp, Artificial
  Synthetic oligonucleotide
gtacaatcgaagggatctctccctccggctgtggccgcgtgcttaaacactccca

SEQ ID NO: 434364 - DNA, 60 bp, Artificial
  Synthetic oligonucleotide
gtacaatcggaaaggcggcggagcggtttgctgagagtgagatcggatcagccgcaatcg

SEQ ID NO: 434365 - DNA, 59 bp, Artificial
  Synthetic oligonucleotide
gtacaatctaatcttgtcagaatatctctcattcatttacaactcacaatctgctgtgc

SEQ ID NO: 434366 - DNA, 54 bp, Artificial
  Synthetic oligonucleotide
gtacaatctccagatgaattatttacgttaataaggtgtaattttacgtacgat

SEQ ID NO: 434367 - DNA, 54 bp, Artificial
  Synthetic oligonucleotide
gtacaatgaacttatttttcgactataaaaagtctcctgcgtgaaaaaagcgac

SEQ ID NO: 434368 - DNA, 55 bp, Artificial
  Synthetic oligonucleotide
gtacaatgagccagttcgagttgggtcagtgaatttctcgtgcttgatacgagct

SEQ ID NO: 434369 - DNA, 55 bp, Artificial
  Synthetic oligonucleotide
gtacaatggttatgcaggcggtttcgaagtgcaagtaatcctcgcggggaacgcg

SEQ ID NO: 434370 - DNA, 58 bp, Artificial
  Synthetic oligonucleotide
gtacaatgtacccatggaattaagccagtggtgtcaacccaactactgttaaatggca

SEQ ID NO: 434371 - DNA, 58 bp, Artificial
  Synthetic oligonucleotide
gtacaattaaagtatgtccactaaacacacagactttaggaattggctgtctgaccac

SEQ ID NO: 434372 - DNA, 53 bp, Artificial
  Synthetic oligonucleotide
gtacaattactaagtagacttagaaagggctataggcctgttttctcttcccc

SEQ ID NO: 434373 - DNA, 56 bp, Artificial
  Synthetic oligonucleotide
gtacaattaggaattgtaagaagttgggaccaagagaaaatgtagcgattatacaa

SEQ ID NO: 434374 - DNA, 59 bp, Artificial
  Synthetic oligonucleotide
gtacaattatatcaggcaatatggaaccacaatcaaagggttcaaggtcctgatgaaaa

SEQ ID NO: 434375 - DNA, 60 bp, Artificial
  Synthetic oligonucleotide
gtacaattatgataaatgtggggcatccgttgccagacgattatgtcggttatgatgcta

SEQ ID NO: 434376 - DNA, 60 bp, Artificial
  Synthetic oligonucleotide
gtacaattcaaggttcgaatcggttgcttggtcagcaagtgcatgccatgatggcatgag

SEQ ID NO: 434377 - DNA, 55 bp, Artificial
  Synthetic oligonucleotide
gtacaatttggagattggtgggatcaacaagtggctgcaggtataacaataccgc

SEQ ID NO: 434378 - DNA, 57 bp, Artificial
  Synthetic oligonucleotide
gtacacaactcagaacacgcaaaggcgatgaatactataccccagattatgcggttg

SEQ ID NO: 434379 - DNA, 54 bp, Artificial
  Synthetic oligonucleotide
gtacacaagctaggccagggcttggaacctattccccacttgggcggggaggtg

SEQ ID NO: 434380 - DNA, 57 bp, Artificial
  Synthetic oligonucleotide
gtacacaatagcacatcactttattgcatgcttccttggcatcacattaatagattc

SEQ ID NO: 434381 - DNA, 60 bp, Artificial
  Synthetic oligonucleotide
gtacacaatttactacctcaacatgctgatttcttgattgcttttcaaggagtctactac

SEQ ID NO: 434382 - DNA, 60 bp, Artificial
  Synthetic oligonucleotide
gtacacaatttccaaacttgacagcaagcactacatcaagagacatgaacaatcctatac

SEQ ID NO: 434383 - DNA, 55 bp, Artificial
  Synthetic oligonucleotide
gtacacacagggaaaggctcagtaatgaaatcagatgcacctattgacacctgca

SEQ ID NO: 434384 - DNA, 52 bp, Artificial
  Synthetic oligonucleotide
gtacacacctagaaggaaaaatcatcatagtggctgttcatgttgctagtgg

SEQ ID NO: 434385 - DNA, 55 bp, Artificial
  Synthetic oligonucleotide
gtacacacctggcgcacagctaggcgcggtttggcaactacacaatacattccta

SEQ ID NO: 434386 - DNA, 60 bp, Artificial
  Synthetic oligonucleotide
gtacacactctggacaactcactaactatagtgatggatgttcttagtcctaagtccact

SEQ ID NO: 434387 - DNA, 60 bp, Artificial
  Synthetic oligonucleotide
gtacacagatgtataagcatgacagatttaagatactacaagcttatatttacaatttac

SEQ ID NO: 434388 - DNA, 60 bp, Artificial
  Synthetic oligonucleotide
gtacacagcggaacgtagggaagtcgcagtgtcttgtgatgctctctaaaataatgtgac

SEQ ID NO: 434389 - DNA, 52 bp, Artificial
  Synthetic oligonucleotide
gtacacataccaataggggaagctaaactagtaataaaaacatattggggtt

SEQ ID NO: 434390 - DNA, 58 bp, Artificial
  Synthetic oligonucleotide
gtacacatgcctcgaatcctgtgtacgctacgcttaaaatacgcatctatttctatga

SEQ ID NO: 434391 - DNA, 55 bp, Artificial
  Synthetic oligonucleotide
gtacacatggaattaagccactagtatcaacccaattgttgttaaatggcagtct

SEQ ID NO: 434392 - DNA, 55 bp, Artificial
  Synthetic oligonucleotide
gtacacattccactaggagatgctacattggtaataagaacatattggggtctgc

SEQ ID NO: 434393 - DNA, 55 bp, Artificial
  Synthetic oligonucleotide
gtacacatttagaaggaaaggtcattatagtagcagtccacgtagccagtggcta

SEQ ID NO: 434394 - DNA, 57 bp, Artificial
  Synthetic oligonucleotide
gtacaccaaaagtatcctctcaaatcaaggaccattcaagggtttcaatgaagtctc

SEQ ID NO: 434395 - DNA, 55 bp, Artificial
  Synthetic oligonucleotide
gtacaccaatgtggaccaagacctcgtaggctggctcgcccctcaaggtgcccgt

SEQ ID NO: 434396 - DNA, 60 bp, Artificial
  Synthetic oligonucleotide
gtacaccagcccatatcagctagaactttgaatgcatgggtaaaggtagtagaggagaag

SEQ ID NO: 434397 - DNA, 55 bp, Artificial
  Synthetic oligonucleotide
gtacaccaggaggttcatgatctgggaggcgggcaccttcccgtccattggctcg

SEQ ID NO: 434398 - DNA, 60 bp, Artificial
  Synthetic oligonucleotide
gtacaccaggttgtttgtaaacaccacaggagcatatacccatatggttcaatctatgag

SEQ ID NO: 434399 - DNA, 60 bp, Artificial
  Synthetic oligonucleotide
gtacaccccaggcggagaagtgagaaatgatgatgttgaccagagtttgatcatcgctgc

SEQ ID NO: 434400 - DNA, 58 bp, Artificial
  Synthetic oligonucleotide
gtacaccccatatacttaggctcactccactatgatatttcgttttcgacattacgaa

SEQ ID NO: 434401 - DNA, 53 bp, Artificial
  Synthetic oligonucleotide
gtacacccgactctagtatttgacatcactaaactattgctggctgtcttcgg

SEQ ID NO: 434402 - DNA, 56 bp, Artificial
  Synthetic oligonucleotide
gtacacccgatcgtcaggattgaagacgttaaaactcgacgacctagtgcaagtcg

SEQ ID NO: 434403 - DNA, 55 bp, Artificial
  Synthetic oligonucleotide
gtacaccctaaaccaagctcgatacaaccatactgcatctctacagttgctacga

SEQ ID NO: 434404 - DNA, 60 bp, Artificial
  Synthetic oligonucleotide
gtacaccctcatggatcctaccacagactatcaccgcgttggtgcaagtcgtgtaaagag

SEQ ID NO: 434405 - DNA, 54 bp, Artificial
  Synthetic oligonucleotide
gtacaccgctttcggtgcaccgcctcggtttgtccttttttctaggagagattg

SEQ ID NO: 434406 - DNA, 51 bp, Artificial
  Synthetic oligonucleotide
gtacaccggaaatgccaagacgaccgggtcctttcttggatcaagccgctc

SEQ ID NO: 434407 - DNA, 60 bp, Artificial
  Synthetic oligonucleotide
gtacacctgaagagcatagagcatgtttttatgcagcgttagatctattaattggagcaa

SEQ ID NO: 434408 - DNA, 58 bp, Artificial
  Synthetic oligonucleotide
gtacaccttaatgaatctatagaaattgtgtgtacaaggcctggtaataatacaagga

SEQ ID NO: 434409 - DNA, 60 bp, Artificial
  Synthetic oligonucleotide
gtacacctttggactcagatccagatgaccgcacagataattatgtgggcccaatgaacg

SEQ ID NO: 434410 - DNA, 55 bp, Artificial
  Synthetic oligonucleotide
gtacacgaagtcgcacacgtacgagatcgttgccagcggttgccgtcctgggcag

SEQ ID NO: 434411 - DNA, 55 bp, Artificial
  Synthetic oligonucleotide
gtacacgaagtggccccgtacctcgttaagccgctgtacgacgttgagacgtatc

SEQ ID NO: 434412 - DNA, 57 bp, Artificial
  Synthetic oligonucleotide
gtacacgactgtcctacttcagggcattcggtatagaaccggccgtccagagaatag

SEQ ID NO: 434413 - DNA, 55 bp, Artificial
  Synthetic oligonucleotide
gtacacgaggtcggaaaagcgttcctactgccagtcaaggctggggctaaaatcg

SEQ ID NO: 434414 - DNA, 51 bp, Artificial
  Synthetic oligonucleotide
gtacacgcgtgtcaggattatacgggttaccagcagctaatccgaataacg

SEQ ID NO: 434415 - DNA, 60 bp, Artificial
  Synthetic oligonucleotide
gtacacggaatctgcatccttttgtgccgaaattcctcagctcgacacctacaagtacaa

SEQ ID NO: 434416 - DNA, 58 bp, Artificial
  Synthetic oligonucleotide
gtacacggacctcagaacaataatcttgtggacttaccacctcttgagcaacttagca

SEQ ID NO: 434417 - DNA, 55 bp, Artificial
  Synthetic oligonucleotide
gtacacggcactttaatttcacgagacaatgaagctagtatgttgctaggcggga

SEQ ID NO: 434418 - DNA, 56 bp, Artificial
  Synthetic oligonucleotide
gtacacgggttggaactattgggaccggagcaatctaccattcacgttctgcgaaa

SEQ ID NO: 434419 - DNA, 55 bp, Artificial
  Synthetic oligonucleotide
gtacacggtggcaaccagagacggactcgccgcgtccacacggatgtagcgttcc

SEQ ID NO: 434420 - DNA, 57 bp, Artificial
  Synthetic oligonucleotide
gtacacggttctctcagcacgggtggccttaaataggggaatgttctgattagtgcg

SEQ ID NO: 434421 - DNA, 60 bp, Artificial
  Synthetic oligonucleotide
gtacacgtggcggccatccgtataatattaccggatggccgcgcggagtatgctatgtgt

SEQ ID NO: 434422 - DNA, 54 bp, Artificial
  Synthetic oligonucleotide
gtacactccggaggttggtcccgcgcgtgatttccacaggtgctaggaatcttt

SEQ ID NO: 434423 - DNA, 57 bp, Artificial
  Synthetic oligonucleotide
gtacactcggatagtgaagaggcttcccaccttttgtgaaaggatatttgtactcac

SEQ ID NO: 434424 - DNA, 58 bp, Artificial
  Synthetic oligonucleotide
gtacactctagtataggtagtagattacgtagcagtatgtcttggactagtagtaagg

SEQ ID NO: 434425 - DNA, 60 bp, Artificial
  Synthetic oligonucleotide
gtacactgaaggctcttgggaacctgggaagatttgcgctgcatttggagacccgatcca

SEQ ID NO: 434426 - DNA, 60 bp, Artificial
  Synthetic oligonucleotide
gtacactggaataactccaagaacactgcctctaacagtagaatgcagatacaatccatt

SEQ ID NO: 434427 - DNA, 59 bp, Artificial
  Synthetic oligonucleotide
gtacactggccccaccaacaacaaggctaagtacatggtggcatacatcccacctggca

SEQ ID NO: 434428 - DNA, 54 bp, Artificial
  Synthetic oligonucleotide
gtacactggtctctgggtctatagggaataggtttatcctatccaaggggaacc

SEQ ID NO: 434429 - DNA, 60 bp, Artificial
  Synthetic oligonucleotide
gtacactgttagttgcttgtctcccagagtacgttaatgctcgcgcaagtactaacagta

SEQ ID NO: 434430 - DNA, 60 bp, Artificial
  Synthetic oligonucleotide
gtacactgttgacttgcgcacacaagttgatctagctaaagaagtgttctccataccagt

SEQ ID NO: 434431 - DNA, 60 bp, Artificial
  Synthetic oligonucleotide
gtacacttagcaatagagttactgacaatgagcggtctatctcgcaactgtcaggagacg

SEQ ID NO: 434432 - DNA, 55 bp, Artificial
  Synthetic oligonucleotide
gtacacttgaaggaagggtgtatgggaccacatgtgccacaatggccgttgacgg

SEQ ID NO: 434433 - DNA, 57 bp, Artificial
  Synthetic oligonucleotide
gtacagaaaactgtaattgatctcggtgggacactcacttctttcgaagggccatct

SEQ ID NO: 434434 - DNA, 55 bp, Artificial
  Synthetic oligonucleotide
gtacagaaagctcaaaagggaaattacattccacggggccaaagaggtggcactc

SEQ ID NO: 434435 - DNA, 60 bp, Artificial
  Synthetic oligonucleotide
gtacagaagccctgatgttccaaagggttgtgaaggcccatgtaaggtgcagtcctatga

SEQ ID NO: 434436 - DNA, 55 bp, Artificial
  Synthetic oligonucleotide
gtacagaatgtatagaagtcccgacgtgccaaggggttgtgaaggaccttgtaag

SEQ ID NO: 434437 - DNA, 55 bp, Artificial
  Synthetic oligonucleotide
gtacagaattttcgattaatgagttcatggtaaggaaatgcgaatgaatgcctgc

SEQ ID NO: 434438 - DNA, 60 bp, Artificial
  Synthetic oligonucleotide
gtacagacaaacaagtgggaaaaaggatggcattacaatcctaatctgatctcctggtgc

SEQ ID NO: 434439 - DNA, 55 bp, Artificial
  Synthetic oligonucleotide
gtacagacacaaaacgctactatgtatctaatggagtctcagtacgctatgtacg

SEQ ID NO: 434440 - DNA, 55 bp, Artificial
  Synthetic oligonucleotide
gtacagacacctcaaggacgatgaagaaaccggttacaggaaaatcattgagaga

SEQ ID NO: 434441 - DNA, 60 bp, Artificial
  Synthetic oligonucleotide
gtacagacccattctttgatgaagggtatagtgcaacagcaggacaacctgctaagagca

SEQ ID NO: 434442 - DNA, 60 bp, Artificial
  Synthetic oligonucleotide
gtacagaccctcctggtatcatatcgcaaaattatggagaagccgtatccctgatagata

SEQ ID NO: 434443 - DNA, 55 bp, Artificial
  Synthetic oligonucleotide
gtacagagatccagccccttatgtgcatgcacagcgctacatacgttattgtggc

SEQ ID NO: 434444 - DNA, 60 bp, Artificial
  Synthetic oligonucleotide
gtacagaggcacaagggatctggcgggtgcagacctcttccaactttccagatagatgca

SEQ ID NO: 434445 - DNA, 56 bp, Artificial
  Synthetic oligonucleotide
gtacagaggggtaacaggactacggagacttttagatctagtctgcatgggaacct

SEQ ID NO: 434446 - DNA, 50 bp, Artificial
  Synthetic oligonucleotide
gtacagataaacccgggagtaagaggtcgatagacgctttagctgcgata

SEQ ID NO: 434447 - DNA, 55 bp, Artificial
  Synthetic oligonucleotide
gtacagatgttcgtggctcttgctaacatggttcgtccttacaacataaacgaca

SEQ ID NO: 434448 - DNA, 55 bp, Artificial
  Synthetic oligonucleotide
gtacagccgcttaagagtggcattaggtgatgcccaccggaccttaacgtgggtt

SEQ ID NO: 434449 - DNA, 60 bp, Artificial
  Synthetic oligonucleotide
gtacagcgattggatcgaagcgagtcttcacgaagtctttcacagaacatggtgtaatcc

SEQ ID NO: 434450 - DNA, 58 bp, Artificial
  Synthetic oligonucleotide
gtacagcgctgcgcatctaataaacctcatgtgcttgaagatccttgtcctactggtt

SEQ ID NO: 434451 - DNA, 59 bp, Artificial
  Synthetic oligonucleotide
gtacagcggaagccctgggtggaacgtgtagtcaagaccgctccgacaggtgctgttga

SEQ ID NO: 434452 - DNA, 60 bp, Artificial
  Synthetic oligonucleotide
gtacagcggaagtttcgttcaacatcctgagctaacaggactagactgtatgaggccttg

SEQ ID NO: 434453 - DNA, 60 bp, Artificial
  Synthetic oligonucleotide
gtacagcggggggatatgcagaccacctgtacggggcgagagtcgccaagatctcagtga

SEQ ID NO: 434454 - DNA, 60 bp, Artificial
  Synthetic oligonucleotide
gtacagctcacttctacgcttagcgaagaacacatcctcgggaatgtcaaccacagttga

SEQ ID NO: 434455 - DNA, 56 bp, Artificial
  Synthetic oligonucleotide
gtacagctggatagtcctgtaaatattacttgtatcaggcctaacaacaatacaag

SEQ ID NO: 434456 - DNA, 50 bp, Artificial
  Synthetic oligonucleotide
gtacagcttattgcaaaagctgagtaagctagaaggaattaatctaacca

SEQ ID NO: 434457 - DNA, 58 bp, Artificial
  Synthetic oligonucleotide
gtacaggaaaccaatcaaggactcgctcgaggctgtgaaatccgacttcctttctgct

SEQ ID NO: 434458 - DNA, 55 bp, Artificial
  Synthetic oligonucleotide
gtacaggaccgggttggacatatgggatattgcctgaatggattagtaatcagac

SEQ ID NO: 434459 - DNA, 57 bp, Artificial
  Synthetic oligonucleotide
gtacaggagaaccggaatgagccaacggccattcggatgttctcctggaagattggg

SEQ ID NO: 434460 - DNA, 55 bp, Artificial
  Synthetic oligonucleotide
gtacaggatgtatagaagtcccgacgttccaaggggatgtgaaggcccttgtaaa

SEQ ID NO: 434461 - DNA, 53 bp, Artificial
  Synthetic oligonucleotide
gtacaggcaatgtatgtccctccaggtgcaccaaatcctgttaaatggaatga

SEQ ID NO: 434462 - DNA, 60 bp, Artificial
  Synthetic oligonucleotide
gtacaggcagttatcctgatgtacattgttttcatgctcctgggtctggaccagtttatg

SEQ ID NO: 434463 - DNA, 55 bp, Artificial
  Synthetic oligonucleotide
gtacaggcctgacgctctggactaaggcatggaggtgccattctccatctgcgtg

SEQ ID NO: 434464 - DNA, 52 bp, Artificial
  Synthetic oligonucleotide
gtacaggcgtccatccgcctgttaggtacgagccatctccattttatcatat

SEQ ID NO: 434465 - DNA, 60 bp, Artificial
  Synthetic oligonucleotide
gtacaggctaggcttctcacgaccgaggaagcctgtgatctgaccccctcgcattcagct

SEQ ID NO: 434466 - DNA, 60 bp, Artificial
  Synthetic oligonucleotide
gtacaggctgttatgcttgtagttctggcatctcatgcaaagttagaattcatgtggatg

SEQ ID NO: 434467 - DNA, 60 bp, Artificial
  Synthetic oligonucleotide
gtacaggcttgcgtgctctggacgccactttagtggtgggccagatgtcccgagttagtg

SEQ ID NO: 434468 - DNA, 60 bp, Artificial
  Synthetic oligonucleotide
gtacagggttattacatctgtattgtgggaggaaattctgcaccgatctatgtccctaca

SEQ ID NO: 434469 - DNA, 60 bp, Artificial
  Synthetic oligonucleotide
gtacaggtacaagaggtgaattcttacgcaagcattacactacagaaggcgtgtttgcat

SEQ ID NO: 434470 - DNA, 57 bp, Artificial
  Synthetic oligonucleotide
gtacaggtcaatgtgaatcagggaactgctgggagtgctttggtagtgtatgaacca

SEQ ID NO: 434471 - DNA, 60 bp, Artificial
  Synthetic oligonucleotide
gtacaggtcgcaactgtgtggggttcgattccctactgctctatactaagatagtatcta

SEQ ID NO: 434472 - DNA, 55 bp, Artificial
  Synthetic oligonucleotide
gtacaggtctaggaaggccaaggactggtactacagacatcattatgaatctaga

SEQ ID NO: 434473 - DNA, 55 bp, Artificial
  Synthetic oligonucleotide
gtacaggtgcaatttgctccgccacatttaacctctgcgggagcctgatcgagca

SEQ ID NO: 434474 - DNA, 55 bp, Artificial
  Synthetic oligonucleotide
gtacagtaaaacaaactaatgcagacgaatatgaaggggatccatgttgtagatg

SEQ ID NO: 434475 - DNA, 55 bp, Artificial
  Synthetic oligonucleotide
gtacagtaccgcaccctgtattactcaccggtactatgactgccaactatgcttt

SEQ ID NO: 434476 - DNA, 53 bp, Artificial
  Synthetic oligonucleotide
gtacagtagatccggaccataatccgtgtaatggtacgaagggaaaaggtaag

SEQ ID NO: 434477 - DNA, 54 bp, Artificial
  Synthetic oligonucleotide
gtacagtcggagtatttgttgtacgagtagttgtaccatacatttcttttgata

SEQ ID NO: 434478 - DNA, 59 bp, Artificial
  Synthetic oligonucleotide
gtacagtcgtttgaatctcgacacgatatcgttcatattggtaaggtaatgtgtatttc

SEQ ID NO: 434479 - DNA, 60 bp, Artificial
  Synthetic oligonucleotide
gtacagtcttattagattcaggtgctctgaggagaaggtttccatacattatgcatatta

SEQ ID NO: 434480 - DNA, 60 bp, Artificial
  Synthetic oligonucleotide
gtacagtcttttgaatctcgacacgatattgttcacatgggtaaggtaatctgtatatcg

SEQ ID NO: 434481 - DNA, 53 bp, Artificial
  Synthetic oligonucleotide
gtacagtgaaagtgcaattataccgttgttaacaacagtgcgtgatcttcgta

SEQ ID NO: 434482 - DNA, 60 bp, Artificial
  Synthetic oligonucleotide
gtacagtgcgtagattctgcttcacgtggaataatcccacggagttagatttcgctctgt

SEQ ID NO: 434483 - DNA, 60 bp, Artificial
  Synthetic oligonucleotide
gtacagtgtatacttctagctgcgctataagtctataaatacccgatatatgcttcgtag

SEQ ID NO: 434484 - DNA, 60 bp, Artificial
  Synthetic oligonucleotide
gtacagtgtgtattaaaaacagccagatggagtctgacggaagttcaatgttgggcctgc

SEQ ID NO: 434485 - DNA, 55 bp, Artificial
  Synthetic oligonucleotide
gtacagtgttactgttgtgtgtatcgctctaggcacacgaacgtactaccccacg

SEQ ID NO: 434486 - DNA, 55 bp, Artificial
  Synthetic oligonucleotide
gtacagttcaagaccaaacaccgcattgaaccagtatgtcttttgattcatggaa

SEQ ID NO: 434487 - DNA, 60 bp, Artificial
  Synthetic oligonucleotide
gtacagttccatgcctgcttcaatcagcatatgtcctgtgtcagattcttacacaggaca

SEQ ID NO: 434488 - DNA, 55 bp, Artificial
  Synthetic oligonucleotide
gtacataaattgctcgcctgtgtcattttatgccaaatgcggcgcgccagctggc

SEQ ID NO: 434489 - DNA, 54 bp, Artificial
  Synthetic oligonucleotide
gtacataaccttattggtatgctacagactatagccgatgggaaggctcacttt

SEQ ID NO: 434490 - DNA, 60 bp, Artificial
  Synthetic oligonucleotide
gtacataagagagtaacctcaccagaagactggatgatgatgcagccagacagttacatt

SEQ ID NO: 434491 - DNA, 56 bp, Artificial
  Synthetic oligonucleotide
gtacataaggtatactatcaacctaataaagacttataagttaacattcaaaagca

SEQ ID NO: 434492 - DNA, 59 bp, Artificial
  Synthetic oligonucleotide
gtacataataggactcttggagtctcctcaatgtcgacgaccaaccttgatgcatactt

SEQ ID NO: 434493 - DNA, 60 bp, Artificial
  Synthetic oligonucleotide
gtacataatggctttcgaattggccgtaatgaagcatctgcgtttaccagcagaccttat

SEQ ID NO: 434494 - DNA, 50 bp, Artificial
  Synthetic oligonucleotide
gtacataattcaaacgttaactggttaacggaaacgtaaaatgtagttct

SEQ ID NO: 434495 - DNA, 57 bp, Artificial
  Synthetic oligonucleotide
gtacatacaatcctgcatacagtcataatgagacagaaagtaattcaaccatcatgc

SEQ ID NO: 434496 - DNA, 54 bp, Artificial
  Synthetic oligonucleotide
gtacatacacgagttattagttttactcagaggcaaggtgtgtgaagtttcgag

SEQ ID NO: 434497 - DNA, 55 bp, Artificial
  Synthetic oligonucleotide
gtacatacagagacacatttccaacagggcaagtttgataggacagaccaaacag

SEQ ID NO: 434498 - DNA, 55 bp, Artificial
  Synthetic oligonucleotide
gtacataccgtatacaaatcagagaggaacggttactaacgaattcgcatcccgg

SEQ ID NO: 434499 - DNA, 55 bp, Artificial
  Synthetic oligonucleotide
gtacatagaacagttgctgcatcaggagtcagaaagaggcaatctgccaggtggt

SEQ ID NO: 434500 - DNA, 60 bp, Artificial
  Synthetic oligonucleotide
gtacatagactactgggacgattcacaagcatttagaaacatggtatatgtacgctcgtt

SEQ ID NO: 434501 - DNA, 55 bp, Artificial
  Synthetic oligonucleotide
gtacatagtcaatgccgactgtgtgatatgcaacagtgatggattatccagtgcc

SEQ ID NO: 434502 - DNA, 55 bp, Artificial
  Synthetic oligonucleotide
gtacatatcaccaattatggaatatcccttgaggatttattcccgaaagagcagc

SEQ ID NO: 434503 - DNA, 58 bp, Artificial
  Synthetic oligonucleotide
gtacatatgcccgaggatccgatgagggcaaccgtcacaccagcgaaaccctaacgta

SEQ ID NO: 434504 - DNA, 55 bp, Artificial
  Synthetic oligonucleotide
gtacatcatgtacgattaaagtatgtcctctaaatacccagactctcgggatagg

SEQ ID NO: 434505 - DNA, 53 bp, Artificial
  Synthetic oligonucleotide
gtacatcattatcagagagctataatgcgtagcatgacaatgtcagcatatgt

SEQ ID NO: 434506 - DNA, 60 bp, Artificial
  Synthetic oligonucleotide
gtacatcgtggcccgtgctagttctgactatatgagttacagaaggacatcacaattaac

SEQ ID NO: 434507 - DNA, 58 bp, Artificial
  Synthetic oligonucleotide
gtacatctagatctaacactggtaacacccttagtatccagttctatgaattgaaacc

SEQ ID NO: 434508 - DNA, 53 bp, Artificial
  Synthetic oligonucleotide
gtacatctcaatgagcctgtagagattaactgtataagacccggtaataatac

SEQ ID NO: 434509 - DNA, 51 bp, Artificial
  Synthetic oligonucleotide
gtacatctcatggagttgactatgatcgaattgtccaactgaatgaggaac

SEQ ID NO: 434510 - DNA, 57 bp, Artificial
  Synthetic oligonucleotide
gtacatctcttaaaccccctacggtgatggaaccagctgccctccatcgtcgattct

SEQ ID NO: 434511 - DNA, 60 bp, Artificial
  Synthetic oligonucleotide
gtacatctgggcagctctgcacagatttctcatttaatagacaggcttcaatgatttcag

SEQ ID NO: 434512 - DNA, 60 bp, Artificial
  Synthetic oligonucleotide
gtacatcttgaaatagaggggattttgtatctcccagatatacacgccattctccgcctg

SEQ ID NO: 434513 - DNA, 55 bp, Artificial
  Synthetic oligonucleotide
gtacatgaaacactgtaatgactctgtcatcacccagtcttgtgaaactagccgc

SEQ ID NO: 434514 - DNA, 60 bp, Artificial
  Synthetic oligonucleotide
gtacatgacgaccaacaaatgcttgacggcgcgaatttcgtgagacaaagatcccgtctg

SEQ ID NO: 434515 - DNA, 60 bp, Artificial
  Synthetic oligonucleotide
gtacatgagaatcgagcctcaacattttccctatgtacacatacacggcgttattgtaaa

SEQ ID NO: 434516 - DNA, 57 bp, Artificial
  Synthetic oligonucleotide
gtacatgagaattaagcacgtgagagcttgggtacctaggcccctccggtcccaagc

SEQ ID NO: 434517 - DNA, 60 bp, Artificial
  Synthetic oligonucleotide
gtacatgagcaccgggaggaatgacacgttcacatacgctggatgccaggggttaactaa

SEQ ID NO: 434518 - DNA, 60 bp, Artificial
  Synthetic oligonucleotide
gtacatgagtttgatctgcttaaaaaatgcgagtaatgttgatacatggactggattgat

SEQ ID NO: 434519 - DNA, 60 bp, Artificial
  Synthetic oligonucleotide
gtacatgatgcaaatgcaattgccttcgtaagctttctcaaggaatattcatttgacggc

SEQ ID NO: 434520 - DNA, 55 bp, Artificial
  Synthetic oligonucleotide
gtacatgcccactggggatctgggaatgtatagttggattagtctaatacgtccc

SEQ ID NO: 434521 - DNA, 59 bp, Artificial
  Synthetic oligonucleotide
gtacatgccctacagtcactacaagattgggactctttgtggaattggtttgacctatc

SEQ ID NO: 434522 - DNA, 60 bp, Artificial
  Synthetic oligonucleotide
gtacatggagtgtattgtgacccatcaaaagacttagtagcagaaatacagaagcagggg

SEQ ID NO: 434523 - DNA, 55 bp, Artificial
  Synthetic oligonucleotide
gtacatggatgacttattgattggcactgatagatcagagaaggcacatcaggag

SEQ ID NO: 434524 - DNA, 51 bp, Artificial
  Synthetic oligonucleotide
gtacatggttgacaataaggcgagcattgctcacaacgacaattggctgta

SEQ ID NO: 434525 - DNA, 55 bp, Artificial
  Synthetic oligonucleotide
gtacatggtttccgttgtatgttagccgtaaagtatttacagttagtagagtcta

SEQ ID NO: 434526 - DNA, 55 bp, Artificial
  Synthetic oligonucleotide
gtacatgtaatccgactgttcaggagtcatatcctcgagccaatcttcgtctggg

SEQ ID NO: 434527 - DNA, 52 bp, Artificial
  Synthetic oligonucleotide
gtacatgtggattccgaagggcgcatgtggtctgctgctaacttggttgaag

SEQ ID NO: 434528 - DNA, 55 bp, Artificial
  Synthetic oligonucleotide
gtacatgtgtaacggggatgacttgattctcaatgttcctaatgatgaagtaagc

SEQ ID NO: 434529 - DNA, 59 bp, Artificial
  Synthetic oligonucleotide
gtacatgttaacaacaagaggtaggcagacttcgaaggacaacaaggggatgaggatca

SEQ ID NO: 434530 - DNA, 55 bp, Artificial
  Synthetic oligonucleotide
gtacatgttcgattatccgtcgatcaagatcgatgtgaggtgtcacagactcctg

SEQ ID NO: 434531 - DNA, 51 bp, Artificial
  Synthetic oligonucleotide
gtacattaataatggactgccaccaattcaaaacactagaaacgtagtgcc

SEQ ID NO: 434532 - DNA, 50 bp, Artificial
  Synthetic oligonucleotide
gtacattatatcgggccagtttcatctcacggtctattaagtcataccgg

SEQ ID NO: 434533 - DNA, 57 bp, Artificial
  Synthetic oligonucleotide
gtacattatgttgaagcggatggttgctttactgaaaggaagaattatctctattgg

SEQ ID NO: 434534 - DNA, 60 bp, Artificial
  Synthetic oligonucleotide
gtacattcactgcgctgaaagctgacaccatctgtgtaggataccatgccaacaactcca

SEQ ID NO: 434535 - DNA, 60 bp, Artificial
  Synthetic oligonucleotide
gtacattggatgtatgaagttgacggcccagctgagacaacgtatgacaacggttatatg

SEQ ID NO: 434536 - DNA, 60 bp, Artificial
  Synthetic oligonucleotide
gtacattgtatcagacgaggatgctatgcctaagacaatccaatacagtgaagttaggat

SEQ ID NO: 434537 - DNA, 58 bp, Artificial
  Synthetic oligonucleotide
gtacatttacgttccatactggtgtaaggagtcatttagaacacttgttgcgcgggca

SEQ ID NO: 434538 - DNA, 60 bp, Artificial
  Synthetic oligonucleotide
gtacatttactgtactgaaagctgacaccatctgtgtgggctaccatgcaaacaactcta

SEQ ID NO: 434539 - DNA, 60 bp, Artificial
  Synthetic oligonucleotide
gtacatttcgttgcaacgcccgacccaaatgtggatcgtcgcggcacactgtgctctgca

SEQ ID NO: 434540 - DNA, 56 bp, Artificial
  Synthetic oligonucleotide
gtacatttggggggttcaccacccgagcacggacagtgaccaaaccagcctatatg

SEQ ID NO: 434541 - DNA, 55 bp, Artificial
  Synthetic oligonucleotide
gtacattttagcgcagctggggctaacttttggaaaggtttcgacagatgcttcc

SEQ ID NO: 434542 - DNA, 60 bp, Artificial
  Synthetic oligonucleotide
gtaccaaagcagtaagtattaacaattagtataggtaatgcactcactagaaatagctgc

SEQ ID NO: 434543 - DNA, 58 bp, Artificial
  Synthetic oligonucleotide
gtaccaaaggtgtctggtaatcaatacagagtgttaagagtattattaccagatccta

SEQ ID NO: 434544 - DNA, 58 bp, Artificial
  Synthetic oligonucleotide
gtaccaaataatcgcgtctctccagtattacaccagttgtgtgctaaggttattgcgc

SEQ ID NO: 434545 - DNA, 60 bp, Artificial
  Synthetic oligonucleotide
gtaccaaatgcgcagggacaaatgatacatcaggccctctcccccaggactttaaatgca

SEQ ID NO: 434546 - DNA, 53 bp, Artificial
  Synthetic oligonucleotide
gtaccaaatgttgcacactctttagctgtggagctttgtgtccccggcgtcca

SEQ ID NO: 434547 - DNA, 59 bp, Artificial
  Synthetic oligonucleotide
gtaccaacatcttcaggactcccctaacttgtgggtgtccagtgtcttggttcatgtca

SEQ ID NO: 434548 - DNA, 53 bp, Artificial
  Synthetic oligonucleotide
gtaccaaccgtccacggggcgcacctctctttacgcggtctccccgtttgtgc

SEQ ID NO: 434549 - DNA, 58 bp, Artificial
  Synthetic oligonucleotide
gtaccaatactcatataatggccacggaagcttctaattatgcccagtaccgggttgc

SEQ ID NO: 434550 - DNA, 55 bp, Artificial
  Synthetic oligonucleotide
gtaccaatgctgctttgaacaatagcaaggccactagaggcaatgtctctaacat

SEQ ID NO: 434551 - DNA, 55 bp, Artificial
  Synthetic oligonucleotide
gtaccaatggatccaaaagcggtagaggaagccactgagggagagaacaacagtt

SEQ ID NO: 434552 - DNA, 60 bp, Artificial
  Synthetic oligonucleotide
gtaccaatgtctgccatacccttagctaatcgacgaaggattgccatctcacgtttggat

SEQ ID NO: 434553 - DNA, 60 bp, Artificial
  Synthetic oligonucleotide
gtaccaattcagggtcagctggctatctcgcaactcgaaactggatatggtgtgcggata

SEQ ID NO: 434554 - DNA, 55 bp, Artificial
  Synthetic oligonucleotide
gtaccaattctctgggtaatcagttccaaacacaacaagctcgaacaactgttca

SEQ ID NO: 434555 - DNA, 58 bp, Artificial
  Synthetic oligonucleotide
gtaccacaaagatcgcaccggctctgcgataaccatagattcgtcccagggggccact

SEQ ID NO: 434556 - DNA, 55 bp, Artificial
  Synthetic oligonucleotide
gtaccacaatggttggctgcatccccagcatagctgtgactcaggttgtactgca

SEQ ID NO: 434557 - DNA, 55 bp, Artificial
  Synthetic oligonucleotide
gtaccacagcacatggctgcgacaccatcgctagatgtcagtgcacaaccggtgt

SEQ ID NO: 434558 - DNA, 55 bp, Artificial
  Synthetic oligonucleotide
gtaccaccatggtactcagacctgaacgtagttgacgctaggatttatttcacta

SEQ ID NO: 434559 - DNA, 60 bp, Artificial
  Synthetic oligonucleotide
gtaccacctgtaggtgtgggagtacatactgtcgccacaataggcggctgtggaggtgta

SEQ ID NO: 434560 - DNA, 60 bp, Artificial
  Synthetic oligonucleotide
gtaccacttcaccagtgctgtcaggcctgacatccctgccatggttctggagaacggctg

SEQ ID NO: 434561 - DNA, 57 bp, Artificial
  Synthetic oligonucleotide
gtaccacttttgatgtagttaggttggtcgctccctgcaaacccagcagtagacctg

SEQ ID NO: 434562 - DNA, 57 bp, Artificial
  Synthetic oligonucleotide
gtaccagaatacaggaactggtcgaaaccgcagtgtcagattacagggtttgctcct

SEQ ID NO: 434563 - DNA, 55 bp, Artificial
  Synthetic oligonucleotide
gtaccagaccaactttgtagtacctgatagtactccagataacgccaaaatggtg

SEQ ID NO: 434564 - DNA, 55 bp, Artificial
  Synthetic oligonucleotide
gtaccagacctgcaaggcttttgacagaccacccagaccaaacccgctagagccc

SEQ ID NO: 434565 - DNA, 60 bp, Artificial
  Synthetic oligonucleotide
gtaccagatcagagtgtagtgagtattataaagcatggcatatttgatattgcaagcgtt

SEQ ID NO: 434566 - DNA, 55 bp, Artificial
  Synthetic oligonucleotide
gtaccagcaccactgcgctacgcatctggtaaagttgggtgtggtctagccaagg

SEQ ID NO: 434567 - DNA, 55 bp, Artificial
  Synthetic oligonucleotide
gtaccagcgcaaatcttacaaacagtgtttggggtaacaaatactcattacaggt

SEQ ID NO: 434568 - DNA, 57 bp, Artificial
  Synthetic oligonucleotide
gtaccaggatagactgtcttcccccggaggcatggttgaattgttcacttatttgct

SEQ ID NO: 434569 - DNA, 55 bp, Artificial
  Synthetic oligonucleotide
gtaccaggcctaacaataatacgagaacaagtatacatttagggccaggacgagc

SEQ ID NO: 434570 - DNA, 55 bp, Artificial
  Synthetic oligonucleotide
gtaccagggaacaaccaaacacaagacgtcatggtagcaccaggttcaccaacgg

SEQ ID NO: 434571 - DNA, 54 bp, Artificial
  Synthetic oligonucleotide
gtaccaggtaccggagggtcacccacacttcaaaccgaagatggggctatctta

SEQ ID NO: 434572 - DNA, 50 bp, Artificial
  Synthetic oligonucleotide
gtaccagtaaacgtattcgtgcggataacattaagaaactcacggaaccg

SEQ ID NO: 434573 - DNA, 57 bp, Artificial
  Synthetic oligonucleotide
gtaccagtagagtctaccaaagcttttgataagtcttgtacttgctccttagtggat

SEQ ID NO: 434574 - DNA, 55 bp, Artificial
  Synthetic oligonucleotide
gtaccagtccacaagcgaacttcgctagctttcggtacatatgcacgaatcgcag

SEQ ID NO: 434575 - DNA, 55 bp, Artificial
  Synthetic oligonucleotide
gtaccagtggcacgccttgtaggtttcctcttgtagccgggtgagatggttttcg

SEQ ID NO: 434576 - DNA, 53 bp, Artificial
  Synthetic oligonucleotide
gtaccagttatcgttataaacctcactaggcaaaacctctccacccctaaaca

SEQ ID NO: 434577 - DNA, 55 bp, Artificial
  Synthetic oligonucleotide
gtaccataacgagtctaagcgtctcctcatccaatcggctacccgcgaaggcgac

SEQ ID NO: 434578 - DNA, 59 bp, Artificial
  Synthetic oligonucleotide
gtaccataacgctacgcagcagctagctacccggagctagctcgcccacgtctaatatt

SEQ ID NO: 434579 - DNA, 60 bp, Artificial
  Synthetic oligonucleotide
gtaccatactgtaattactcaaagttctggtatctggaacatgctaagactggtgagact

SEQ ID NO: 434580 - DNA, 59 bp, Artificial
  Synthetic oligonucleotide
gtaccatcgtttatgatacttgcttatatatggatgttaatgcttctagagctttagcc

SEQ ID NO: 434581 - DNA, 60 bp, Artificial
  Synthetic oligonucleotide
gtaccatggctctagatctgtcaaccaaatttacatctccggtatagtctttgatgtcga

SEQ ID NO: 434582 - DNA, 60 bp, Artificial
  Synthetic oligonucleotide
gtaccatggctttagttgtcttccgtgacaacagatggtctggagaccagtctatcttcg

SEQ ID NO: 434583 - DNA, 55 bp, Artificial
  Synthetic oligonucleotide
gtaccatgggttagtgcaagccattatcgaaatacaactccagacactttctcac

SEQ ID NO: 434584 - DNA, 60 bp, Artificial
  Synthetic oligonucleotide
gtaccatgtgttggtatgcctcctggaagattgacattctcttcctattactcccgctcg

SEQ ID NO: 434585 - DNA, 55 bp, Artificial
  Synthetic oligonucleotide
gtaccatgttcgtagaaagacccagcttctttctgtatgtacttcagactcttgg

SEQ ID NO: 434586 - DNA, 55 bp, Artificial
  Synthetic oligonucleotide
gtaccattagaaagctggtgaatagttgggtcactcatgccaggatcctgtatgg

SEQ ID NO: 434587 - DNA, 55 bp, Artificial
  Synthetic oligonucleotide
gtaccattcgtaggcattgcatcagcctacaactgtttctatgatggatactcac

SEQ ID NO: 434588 - DNA, 55 bp, Artificial
  Synthetic oligonucleotide
gtaccattgctggcattcacctgagaggtatttctggtacttccagtggcaaggc

SEQ ID NO: 434589 - DNA, 58 bp, Artificial
  Synthetic oligonucleotide
gtaccattgtttatgatttctgcttatatatggatgtcaatgcttctagagccttagc

SEQ ID NO: 434590 - DNA, 58 bp, Artificial
  Synthetic oligonucleotide
gtaccatttaccaaagacatactacgataaatgttgttatgaagagggatgataaatc

SEQ ID NO: 434591 - DNA, 55 bp, Artificial
  Synthetic oligonucleotide
gtacccaaagagagattgggatgcaatgaaagacataccagaggacttcagaggc

SEQ ID NO: 434592 - DNA, 55 bp, Artificial
  Synthetic oligonucleotide
gtacccaacacgtagcttcgctgaacctcagcgtccggatggcccacggtctggt

SEQ ID NO: 434593 - DNA, 53 bp, Artificial
  Synthetic oligonucleotide
gtacccaagtaatcaaacgccctccgtcggaggcggcgttaagaacggcatac

SEQ ID NO: 434594 - DNA, 55 bp, Artificial
  Synthetic oligonucleotide
gtacccacaattttgaagtgttcagtggacttgaaggagtttccgacaccgtcgc

SEQ ID NO: 434595 - DNA, 55 bp, Artificial
  Synthetic oligonucleotide
gtacccacccacagggcccactgggcgctagcactccgattctgcggaatctttg

SEQ ID NO: 434596 - DNA, 55 bp, Artificial
  Synthetic oligonucleotide
gtacccacccacagggcccattgggcgctagcacactggtattccggtacccttg

SEQ ID NO: 434597 - DNA, 54 bp, Artificial
  Synthetic oligonucleotide
gtacccacgttttgtaaatatacgtgttgttgtgttggtataccctcgtatgag

SEQ ID NO: 434598 - DNA, 55 bp, Artificial
  Synthetic oligonucleotide
gtacccagatgattatgctgcgagctgcaataggacttcctaagaaacagatgag

SEQ ID NO: 434599 - DNA, 56 bp, Artificial
  Synthetic oligonucleotide
gtacccatcaaagatggtaagtccccgatttgggtcaaagctgccttctctttagc

SEQ ID NO: 434600 - DNA, 53 bp, Artificial
  Synthetic oligonucleotide
gtacccatgctagtaaccctgtttatgctccgcttaagattcggatttatttt

SEQ ID NO: 434601 - DNA, 59 bp, Artificial
  Synthetic oligonucleotide
gtacccatgcttgcgcggcacgttgattgcggcggagacaaaattaggcgatgtttact

SEQ ID NO: 434602 - DNA, 53 bp, Artificial
  Synthetic oligonucleotide
gtacccatggaagtagtaaaaccgccacgttttgtgcgtcggatttcgctact

SEQ ID NO: 434603 - DNA, 60 bp, Artificial
  Synthetic oligonucleotide
gtacccatggctggaccattagtggccgggggcttgctgatagcgtgctacgtcataact

SEQ ID NO: 434604 - DNA, 59 bp, Artificial
  Synthetic oligonucleotide
gtacccatggttagctgagaccgtgccctctgtcggctgtcctgtcgctacctccgtcc

SEQ ID NO: 434605 - DNA, 57 bp, Artificial
  Synthetic oligonucleotide
gtaccccaaaaatttttgactagcggaggctagaaggagagagatgggtgcgagagc

SEQ ID NO: 434606 - DNA, 55 bp, Artificial
  Synthetic oligonucleotide
gtaccccaaagcgcttgaactcaatatgcttctctaatcaggtgatcgtcatgtc

SEQ ID NO: 434607 - DNA, 56 bp, Artificial
  Synthetic oligonucleotide
gtaccccaacatacactaggtccgagtcaatatgttaacgagaaccaagcgacagg

SEQ ID NO: 434608 - DNA, 53 bp, Artificial
  Synthetic oligonucleotide
gtaccccaccgtctgaggctataccgttacagcccatacgccccccagttacc

SEQ ID NO: 434609 - DNA, 59 bp, Artificial
  Synthetic oligonucleotide
gtaccccactggcgacagtggtccaggctgcgttggcggcctactcatggtgaaaacca

SEQ ID NO: 434610 - DNA, 57 bp, Artificial
  Synthetic oligonucleotide
gtaccccacttttaggagatgaccaaacgcagtaaccgcaagcaattgcctgtagcg

SEQ ID NO: 434611 - DNA, 53 bp, Artificial
  Synthetic oligonucleotide
gtaccccacttttgaaagttgaacctgtagcgtcagtaaaacgcagaaaccaa

SEQ ID NO: 434612 - DNA, 57 bp, Artificial
  Synthetic oligonucleotide
gtaccccatgatattacaccagaaggcagctttagaaaccatagtttcctgtggacc

SEQ ID NO: 434613 - DNA, 55 bp, Artificial
  Synthetic oligonucleotide
gtaccccattaatttgggatgccaaagtcatttgatgctgacctccactgggtgg

SEQ ID NO: 434614 - DNA, 60 bp, Artificial
  Synthetic oligonucleotide
gtacccccacgcgagctgtagtgcatgtgcaagaaaagtagcggagagagagcgtgagct

SEQ ID NO: 434615 - DNA, 51 bp, Artificial
  Synthetic oligonucleotide
gtaccccccttcctttggcgtacccttttgacgtggtgcgctgaataccgt

SEQ ID NO: 434616 - DNA, 54 bp, Artificial
  Synthetic oligonucleotide
gtaccccgaagtatccccatccaaacatacgatatactactaccaaggggatcc

SEQ ID NO: 434617 - DNA, 55 bp, Artificial
  Synthetic oligonucleotide
gtaccccgattgactgctcctctcaaacttcccaggcaatcggtgtaacggggta

SEQ ID NO: 434618 - DNA, 55 bp, Artificial
  Synthetic oligonucleotide
gtaccccgattgagctctcgttcaaaagtctctatgaatcggtgtaatggtgcca

SEQ ID NO: 434619 - DNA, 53 bp, Artificial
  Synthetic oligonucleotide
gtaccccgttgacgacgttcgtgtcgtcaaccctgtatagaaccttccaagga

SEQ ID NO: 434620 - DNA, 55 bp, Artificial
  Synthetic oligonucleotide
gtacccctgggagggtagaaaccactacgctacgcagcagccttagctacgccgg

SEQ ID NO: 434621 - DNA, 56 bp, Artificial
  Synthetic oligonucleotide
gtacccctgggagggtagtaacctctacgctacgcagcagccttagctacgccgga

SEQ ID NO: 434622 - DNA, 55 bp, Artificial
  Synthetic oligonucleotide
gtacccctgtgtagtgtgtgtcctgtatgtaacccctatgtactgtgtgtcctgt

SEQ ID NO: 434623 - DNA, 54 bp, Artificial
  Synthetic oligonucleotide
gtaccccttgtgcacgtactaatactaccccaggagactgtcctcccttggagt

SEQ ID NO: 434624 - DNA, 50 bp, Artificial
  Synthetic oligonucleotide
gtacccctttttagtccacccagtcatgcccatgaaggatatccacgaat

SEQ ID NO: 434625 - DNA, 56 bp, Artificial
  Synthetic oligonucleotide
gtacccgactcccccaccaatgttgagcgccacttaaatagagctgccttgattat

SEQ ID NO: 434626 - DNA, 54 bp, Artificial
  Synthetic oligonucleotide
gtacccggccccctacagtagtggatgtggggcccactgcccgtcctcctgtgg

SEQ ID NO: 434627 - DNA, 55 bp, Artificial
  Synthetic oligonucleotide
gtacccgggaatggtgtggcaggacagagacatttactaccaagggcccatttgg

SEQ ID NO: 434628 - DNA, 53 bp, Artificial
  Synthetic oligonucleotide
gtacccgggacaacaaacgtactagattcgttggtctataaatccgggagaga

SEQ ID NO: 434629 - DNA, 57 bp, Artificial
  Synthetic oligonucleotide
gtacccggttcgcgtacgctaacaggagcctcgcatgggcaaggttgtaggatcgta

SEQ ID NO: 434630 - DNA, 55 bp, Artificial
  Synthetic oligonucleotide
gtacccgtggcgttaattggaacctgttgcctgtactctattacgcagtggtcga

SEQ ID NO: 434631 - DNA, 58 bp, Artificial
  Synthetic oligonucleotide
gtacccgtgtacattttggccatgcttatagtatagatgatgctgacagtatagaaga

SEQ ID NO: 434632 - DNA, 60 bp, Artificial
  Synthetic oligonucleotide
gtaccctaatacctgtgaataataccaacgctaacatcaagaatgtgagtatgtacactg

SEQ ID NO: 434633 - DNA, 60 bp, Artificial
  Synthetic oligonucleotide
gtaccctaggtttgcagggttgtgcattccagtccactattgctgagcttcagcgcctta

SEQ ID NO: 434634 - DNA, 52 bp, Artificial
  Synthetic oligonucleotide
gtaccctgcaaatagtgctgagcgatataagcgggtatctgtgcccggagat

SEQ ID NO: 434635 - DNA, 58 bp, Artificial
  Synthetic oligonucleotide
gtaccctgtcagaatcaggtaggataagttacactgtggagtttagtttgccaacgca

SEQ ID NO: 434636 - DNA, 55 bp, Artificial
  Synthetic oligonucleotide
gtacccttagggggcaggtctaatactgttgtggatgttggccccactaggccac

SEQ ID NO: 434637 - DNA, 56 bp, Artificial
  Synthetic oligonucleotide
gtacccttagtacgtataagtgtaagcgtcgtatatgttatatactcggctttcag

SEQ ID NO: 434638 - DNA, 57 bp, Artificial
  Synthetic oligonucleotide
gtacccttcgggttaaaacaagctccatctatctttcaaagacacatgaacaatgcg

SEQ ID NO: 434639 - DNA, 50 bp, Artificial
  Synthetic oligonucleotide
gtaccgaacccagctaagttgttaatcaaactcggggttaaatcgatgac

SEQ ID NO: 434640 - DNA, 56 bp, Artificial
  Synthetic oligonucleotide
gtaccgaattcacaggcataagatccaaaactgtagttccacaagggttaccgaca

SEQ ID NO: 434641 - DNA, 60 bp, Artificial
  Synthetic oligonucleotide
gtaccgacgcgagtccagactctacgctgccagtcagccgcaaccagctagtgccaatga

SEQ ID NO: 434642 - DNA, 51 bp, Artificial
  Synthetic oligonucleotide
gtaccgactcaatagcaaggtgcaattgcaatgcgggggtgtactattgtg

SEQ ID NO: 434643 - DNA, 57 bp, Artificial
  Synthetic oligonucleotide
gtaccgagtctgttaagttccctatacggatgtgtggcgtcccccacatcagaatcc

SEQ ID NO: 434644 - DNA, 60 bp, Artificial
  Synthetic oligonucleotide
gtaccgatctatgatgtatcactttagattcactgagtgtcagaaatgtctgtactggga

SEQ ID NO: 434645 - DNA, 55 bp, Artificial
  Synthetic oligonucleotide
gtaccgattgggtgtatgctgtgttcggggttaatcccaccatagccgagggctt

SEQ ID NO: 434646 - DNA, 55 bp, Artificial
  Synthetic oligonucleotide
gtaccgcactcaacatattacgcactgagagggcatttggtggcaaagatgttct

SEQ ID NO: 434647 - DNA, 55 bp, Artificial
  Synthetic oligonucleotide
gtaccgccattatggtgtgcagtgtggttctacagttttccacatggactcagag

SEQ ID NO: 434648 - DNA, 55 bp, Artificial
  Synthetic oligonucleotide
gtaccgccctccgcagatcggggagatcatgaatcgaattgacaccatcggctac

SEQ ID NO: 434649 - DNA, 57 bp, Artificial
  Synthetic oligonucleotide
gtaccgccggatgtccccatccaagggctagtgtccaatacaggtaagtcgtactca

SEQ ID NO: 434650 - DNA, 56 bp, Artificial
  Synthetic oligonucleotide
gtaccgctactgttaagaacgatttgcgtgaccgttttcaagttatgcataagttc

SEQ ID NO: 434651 - DNA, 56 bp, Artificial
  Synthetic oligonucleotide
gtaccgctatattcccccctggtggggcaccgagtgctacaccaggtgaagtggcg

SEQ ID NO: 434652 - DNA, 52 bp, Artificial
  Synthetic oligonucleotide
gtaccgctttacttttagtcgttcaatgagaagcgctcctcagcactacgat

SEQ ID NO: 434653 - DNA, 55 bp, Artificial
  Synthetic oligonucleotide
gtaccggaaagaagagtcatcaatcgagaagattacgtcaaggatttcgctggtc

SEQ ID NO: 434654 - DNA, 55 bp, Artificial
  Synthetic oligonucleotide
gtaccggaaccacctgtagttataccggaatcctctataatcatacctttagcca

SEQ ID NO: 434655 - DNA, 52 bp, Artificial
  Synthetic oligonucleotide
gtaccggaacccagagtacaccccttattttaagccttactgggcttctctg

SEQ ID NO: 434656 - DNA, 60 bp, Artificial
  Synthetic oligonucleotide
gtaccggaatggtcatacatcgtggaaaaagataatccagtcaatggtctgtgctaccca

SEQ ID NO: 434657 - DNA, 54 bp, Artificial
  Synthetic oligonucleotide
gtaccggagtagtatcagcagcaacgttaaataaagggttgaccttgactttaa

SEQ ID NO: 434658 - DNA, 57 bp, Artificial
  Synthetic oligonucleotide
gtaccgggcgcgctagtcccagcgctgcaaaggttgcgtattactgagttaaacacc

SEQ ID NO: 434659 - DNA, 60 bp, Artificial
  Synthetic oligonucleotide
gtaccggttcccacaatgagagcgtgattggaatgaaaaattgctctttcaatgcaacca

SEQ ID NO: 434660 - DNA, 55 bp, Artificial
  Synthetic oligonucleotide
gtaccggttccggaagtagatactgctggtcagaatacccacatggtccgttacc

SEQ ID NO: 434661 - DNA, 60 bp, Artificial
  Synthetic oligonucleotide
gtaccggttgatgctaattgtgaaggggaatgccaccacagtggaggtactatagcaagc

SEQ ID NO: 434662 - DNA, 55 bp, Artificial
  Synthetic oligonucleotide
gtaccgtaaacgtttgatggatacgcgtatagctgtgaaagagggcaacgtttcc

SEQ ID NO: 434663 - DNA, 57 bp, Artificial
  Synthetic oligonucleotide
gtaccgtaattcaccatagttactttgtgagataagaaatcgccaagcttatatccc

SEQ ID NO: 434664 - DNA, 56 bp, Artificial
  Synthetic oligonucleotide
gtaccgtactaacgcatccaatgaatcacgaagattagttgaagtatttatagcag

SEQ ID NO: 434665 - DNA, 57 bp, Artificial
  Synthetic oligonucleotide
gtaccgtcgagagtgtcccgacctccttctctcctcctgtggagattgatccgtgtt

SEQ ID NO: 434666 - DNA, 55 bp, Artificial
  Synthetic oligonucleotide
gtaccgtcggtatttacttcttcgttgaatttggataccatctgcacacgagtat

SEQ ID NO: 434667 - DNA, 55 bp, Artificial
  Synthetic oligonucleotide
gtaccgtctgtggattctcgatgggtcccatgtcctccggctgcttgttgatccg

SEQ ID NO: 434668 - DNA, 58 bp, Artificial
  Synthetic oligonucleotide
gtaccgtgacttattacatcaaaacatagatttgcacaatgaaaatacaaaactacga

SEQ ID NO: 434669 - DNA, 58 bp, Artificial
  Synthetic oligonucleotide
gtacctaaaaaaggcattaaggcgacgctatggttccttgactgcagacaaatggatg

SEQ ID NO: 434670 - DNA, 53 bp, Artificial
  Synthetic oligonucleotide
gtacctaaactctcggtcggaactagtgttcccaaactactttgacaaatgga

SEQ ID NO: 434671 - DNA, 55 bp, Artificial
  Synthetic oligonucleotide
gtacctaaatgacacaaggaacggaaagacatctctgccaaaatgttggaaagtt

SEQ ID NO: 434672 - DNA, 55 bp, Artificial
  Synthetic oligonucleotide
gtacctaagcaacctatataccactttctctgcaggagtgattagatcctctctc

SEQ ID NO: 434673 - DNA, 55 bp, Artificial
  Synthetic oligonucleotide
gtacctaccagacaggagtagaccggtggcttttaagctccccgagactctgccg

SEQ ID NO: 434674 - DNA, 55 bp, Artificial
  Synthetic oligonucleotide
gtacctactagtatgttcattagagagtcactcgttgcttgccagcttgcagtag

SEQ ID NO: 434675 - DNA, 60 bp, Artificial
  Synthetic oligonucleotide
gtacctactatgtctgcaagtgagtgaggttgtacctcgacacttatagtgggcactatt

SEQ ID NO: 434676 - DNA, 55 bp, Artificial
  Synthetic oligonucleotide
gtacctactttaggaggctctgcagactccccattacctgcctaagaaacaaggg

SEQ ID NO: 434677 - DNA, 55 bp, Artificial
  Synthetic oligonucleotide
gtacctagaaattcttccagaacggatggcacctgggaggatctcttctgcgatg

SEQ ID NO: 434678 - DNA, 60 bp, Artificial
  Synthetic oligonucleotide
gtacctagctttgatggccactttcagaatgagaccaatgttcgcagtcggactcttatt

SEQ ID NO: 434679 - DNA, 55 bp, Artificial
  Synthetic oligonucleotide
gtacctagttcacaagcttaggcctacactgaaagatgcgtgggaggactgtgag

SEQ ID NO: 434680 - DNA, 59 bp, Artificial
  Synthetic oligonucleotide
gtacctcaaactgtacgctctcatgggttgccgcatccccaacactagccgccaccctc

SEQ ID NO: 434681 - DNA, 55 bp, Artificial
  Synthetic oligonucleotide
gtacctctcctcgatgatgactccgctcgagaccaccgtactgaccgaagccggg

SEQ ID NO: 434682 - DNA, 50 bp, Artificial
  Synthetic oligonucleotide
gtacctctcgcgtggacgggcactcctcaaccccctcgggccgtcgctct

SEQ ID NO: 434683 - DNA, 58 bp, Artificial
  Synthetic oligonucleotide
gtacctcttgttacaaatggtcctgaagctagaattagtattgattttgtagctactg

SEQ ID NO: 434684 - DNA, 55 bp, Artificial
  Synthetic oligonucleotide
gtacctgagcgaatacgtttactgtggcccttgcgtcggtggtagaatctcctac

SEQ ID NO: 434685 - DNA, 55 bp, Artificial
  Synthetic oligonucleotide
gtacctgatattaaccccggatggttatgcgcccgcccccgattttatgctgccg

SEQ ID NO: 434686 - DNA, 55 bp, Artificial
  Synthetic oligonucleotide
gtacctgccacaaattcttgagacactttagtctgcataagctcaccccttaagg

SEQ ID NO: 434687 - DNA, 56 bp, Artificial
  Synthetic oligonucleotide
gtacctgctaactttccattattaggccacttaccaattaatagacccatctttga

SEQ ID NO: 434688 - DNA, 55 bp, Artificial
  Synthetic oligonucleotide
gtacctggaagagcatcccagtgccgggagagaccccaagaaaaccggaggacca

SEQ ID NO: 434689 - DNA, 55 bp, Artificial
  Synthetic oligonucleotide
gtacctggatgttgtatccgatccagagtctataaatcatagacccctatggtgg

SEQ ID NO: 434690 - DNA, 60 bp, Artificial
  Synthetic oligonucleotide
gtacctggcagttggatgatgctcagactaacgctaacaacgcttggcctgacgcttggg

SEQ ID NO: 434691 - DNA, 60 bp, Artificial
  Synthetic oligonucleotide
gtacctgttgccggtattctatgacgcagtggtctatcttcatacagctacggctgagtc

SEQ ID NO: 434692 - DNA, 60 bp, Artificial
  Synthetic oligonucleotide
gtacctgttgcctgtactcgattacgcagtgatcgattttcatacagctccgactgagtc

SEQ ID NO: 434693 - DNA, 60 bp, Artificial
  Synthetic oligonucleotide
gtacctgttgcctgtattctatgacgcagtgatctattttcatacaactgcgacttaatc

SEQ ID NO: 434694 - DNA, 57 bp, Artificial
  Synthetic oligonucleotide
gtaccttaactacgagtatctattgtggtaagagatgtgagcgaaagcatgtatatt

SEQ ID NO: 434695 - DNA, 60 bp, Artificial
  Synthetic oligonucleotide
gtaccttaagcatggcagaaagacagtcagtggagagagctccagcggagccaatgggag

SEQ ID NO: 434696 - DNA, 57 bp, Artificial
  Synthetic oligonucleotide
gtaccttacattgaaagacaagcaaacgacggctggtttagaaaattcaatgatgca

SEQ ID NO: 434697 - DNA, 55 bp, Artificial
  Synthetic oligonucleotide
gtaccttcaatgttacagggccatatagggacaagaaggaaatgcaaagtgcagt

SEQ ID NO: 434698 - DNA, 55 bp, Artificial
  Synthetic oligonucleotide
gtaccttcggcttcaggacagcggggaccttgaccgatctgaggtagcgtggcag

SEQ ID NO: 434699 - DNA, 58 bp, Artificial
  Synthetic oligonucleotide
gtaccttgttgcctatcaggccacagtatgcgccagggcgaaagcccccccaccctca

SEQ ID NO: 434700 - DNA, 60 bp, Artificial
  Synthetic oligonucleotide
gtacctttgccacgtgtagccactgatgctacaccaacacatggcgcaatatcccatatc

SEQ ID NO: 434701 - DNA, 60 bp, Artificial
  Synthetic oligonucleotide
gtacctttggtatgtaccattgtttatgatttctgcttatatatggatgtcaatgcttct

SEQ ID NO: 434702 - DNA, 59 bp, Artificial
  Synthetic oligonucleotide
gtacgaaactcaccgccagcgaacaagtcgcagtcctccgtgaacttatgttcatgaac

SEQ ID NO: 434703 - DNA, 59 bp, Artificial
  Synthetic oligonucleotide
gtacgaaatccccgatattcagccgaccgactttgtgccggccaatctcgctgcgtgga

SEQ ID NO: 434704 - DNA, 55 bp, Artificial
  Synthetic oligonucleotide
gtacgaacttcatggaaaattgagctcgtactgggacgagttaaagacggtaggc

SEQ ID NO: 434705 - DNA, 52 bp, Artificial
  Synthetic oligonucleotide
gtacgaagctggacattgccgtcaacggtgcttaaggctggcggaaaggctc

SEQ ID NO: 434706 - DNA, 53 bp, Artificial
  Synthetic oligonucleotide
gtacgaatacaactgacagatggtttgcttgtgtgctagttgaaccaaatgtg

SEQ ID NO: 434707 - DNA, 56 bp, Artificial
  Synthetic oligonucleotide
gtacgacacctacccgcctggcgcaaagaacagtaatcacgagttttcagcggacc

SEQ ID NO: 434708 - DNA, 55 bp, Artificial
  Synthetic oligonucleotide
gtacgacacgaaggcaatttgacttgggtgcccaacggtgcccctgagggcgctc

SEQ ID NO: 434709 - DNA, 60 bp, Artificial
  Synthetic oligonucleotide
gtacgacctccatctgtcccagcaagaacacgctcctcacggacttgctggtgccctccg

SEQ ID NO: 434710 - DNA, 57 bp, Artificial
  Synthetic oligonucleotide
gtacgacgaaagcaggaggggcccaagaatacctctgtgccctccagtgaggaaaca

SEQ ID NO: 434711 - DNA, 54 bp, Artificial
  Synthetic oligonucleotide
gtacgacgtcccaatgttctgcgggaagtttttgcttaaaacgtcgtcatgtta

SEQ ID NO: 434712 - DNA, 60 bp, Artificial
  Synthetic oligonucleotide
gtacgactatcgccctcgataacgacactaataggtctatgtggccgcgcagcggaatcc

SEQ ID NO: 434713 - DNA, 59 bp, Artificial
  Synthetic oligonucleotide
gtacgactgaactccaatatggctggagtaggggcttggataagagtctggtctaggat

SEQ ID NO: 434714 - DNA, 56 bp, Artificial
  Synthetic oligonucleotide
gtacgactgaaggaattgattccaaaaccagaaccacggaagattcagatggggtg

SEQ ID NO: 434715 - DNA, 60 bp, Artificial
  Synthetic oligonucleotide
gtacgacttctctggtgataccatccgggcttcttccaatacctgggtgcgtgagagaga

SEQ ID NO: 434716 - DNA, 60 bp, Artificial
  Synthetic oligonucleotide
gtacgagaaccataccgagaacgccctattattgtacatggcatgtactcatgcctcgaa

SEQ ID NO: 434717 - DNA, 60 bp, Artificial
  Synthetic oligonucleotide
gtacgagaatcatactgagaacgccttgttattgtatatggcatgtacgcatgcctctaa

SEQ ID NO: 434718 - DNA, 60 bp, Artificial
  Synthetic oligonucleotide
gtacgagcagctcagtagatctggatccgtggagcaacccagccccggtgctagctttgc

SEQ ID NO: 434719 - DNA, 55 bp, Artificial
  Synthetic oligonucleotide
gtacgagccatagtgccagatcaaacattcgacgaactaaaacaaatgcttgata

SEQ ID NO: 434720 - DNA, 55 bp, Artificial
  Synthetic oligonucleotide
gtacgagcctcttagtattaattttccttcccttgttcatgtcttagttatggcg

SEQ ID NO: 434721 - DNA, 60 bp, Artificial
  Synthetic oligonucleotide
gtacgaggtgatctgaattttgtcaacagagcgaaccagcggctaaatcctatgcatcaa

SEQ ID NO: 434722 - DNA, 60 bp, Artificial
  Synthetic oligonucleotide
gtacgaggttgcaattttcgtgcatggctcaacggactccacgtcacatggcaattactc

SEQ ID NO: 434723 - DNA, 56 bp, Artificial
  Synthetic oligonucleotide
gtacgagtctccgtctctgcaaggagatgtctttagcgacgccgacgtttcagaca

SEQ ID NO: 434724 - DNA, 56 bp, Artificial
  Synthetic oligonucleotide
gtacgagttgacgggacggcgtctcgggaaagttgagggcacgcattgtcgaagat

SEQ ID NO: 434725 - DNA, 55 bp, Artificial
  Synthetic oligonucleotide
gtacgagttgatgggaaatcgtacttacaactgcagactaagcacacttcaggcc

SEQ ID NO: 434726 - DNA, 58 bp, Artificial
  Synthetic oligonucleotide
gtacgataagcgtcagtaagcacggattccacgtgggtgagaatccaagtattactta

SEQ ID NO: 434727 - DNA, 60 bp, Artificial
  Synthetic oligonucleotide
gtacgatcagactacgtatgggtcgtctaccaaccctatgtatgtctctgatacagttac

SEQ ID NO: 434728 - DNA, 60 bp, Artificial
  Synthetic oligonucleotide
gtacgatcagtatctttcacacatacgtgaacggttgcatattacgaacgtccctgatcc

SEQ ID NO: 434729 - DNA, 55 bp, Artificial
  Synthetic oligonucleotide
gtacgatcctgcctacgccggctccgtctttctcggctgggcccagaaaaagttc

SEQ ID NO: 434730 - DNA, 58 bp, Artificial
  Synthetic oligonucleotide
gtacgatctgagcttgtaaacaaacgtgagaccaatgtaggtaaacgcactcacaaag

SEQ ID NO: 434731 - DNA, 56 bp, Artificial
  Synthetic oligonucleotide
gtacgatcttgtacgagatttgatttcagttgttcgtgcgaagaattatgtcgaag

SEQ ID NO: 434732 - DNA, 52 bp, Artificial
  Synthetic oligonucleotide
gtacgatctttcgtagcactcattaccaacaacctaaacagcgatttgcttg

SEQ ID NO: 434733 - DNA, 55 bp, Artificial
  Synthetic oligonucleotide
gtacgatggttcccttagttcaatgctactgtgggaagctgtggaagtcttggca

SEQ ID NO: 434734 - DNA, 60 bp, Artificial
  Synthetic oligonucleotide
gtacgatgtggctcaatgcaggatcagaaattcaggtcgctggattcgactattcatgtg

SEQ ID NO: 434735 - DNA, 52 bp, Artificial
  Synthetic oligonucleotide
gtacgattctcttcacctgctctttcgctccgagccgccagcccagcgaaag

SEQ ID NO: 434736 - DNA, 53 bp, Artificial
  Synthetic oligonucleotide
gtacgattgtaatgctttccgagcggacccacaaacgggtcgaggttacaacg

SEQ ID NO: 434737 - DNA, 53 bp, Artificial
  Synthetic oligonucleotide
gtacgcaaagggaataagaaattggctaaaccagcgaccacaaaggccgttaa

SEQ ID NO: 434738 - DNA, 55 bp, Artificial
  Synthetic oligonucleotide
gtacgcaaatcaccataagccaccttggataattgatctcaacccacaagagaag

SEQ ID NO: 434739 - DNA, 60 bp, Artificial
  Synthetic oligonucleotide
gtacgcaacttcatgttggcctacacaccgaaggccgactggcagccctacacgggctga

SEQ ID NO: 434740 - DNA, 57 bp, Artificial
  Synthetic oligonucleotide
gtacgcaataacttgacaacgttatgactatctatatagacctttccagtatatgcg

SEQ ID NO: 434741 - DNA, 54 bp, Artificial
  Synthetic oligonucleotide
gtacgcagacgttccccaaagtatgcgtgcagatacgtttcgttacacccatga

SEQ ID NO: 434742 - DNA, 56 bp, Artificial
  Synthetic oligonucleotide
gtacgcagcctgataacttgttttctgccctccatccggaaagcggcaactttcgg

SEQ ID NO: 434743 - DNA, 60 bp, Artificial
  Synthetic oligonucleotide
gtacgcatgaagccacgtagacttgcgcacgtaagacataagtgtcgctatagtagggat

SEQ ID NO: 434744 - DNA, 55 bp, Artificial
  Synthetic oligonucleotide
gtacgcatggcgtagtggactagcggttagaggagacccctcccttgcaagtcgc

SEQ ID NO: 434745 - DNA, 55 bp, Artificial
  Synthetic oligonucleotide
gtacgccaagattggccgtattggacccacaggaactaccgaagctatctacggt

SEQ ID NO: 434746 - DNA, 58 bp, Artificial
  Synthetic oligonucleotide
gtacgccactgcgagatttgtggaggcgagtttctcggtctcagtaaccggcagcgtt

SEQ ID NO: 434747 - DNA, 60 bp, Artificial
  Synthetic oligonucleotide
gtacgccgacgtctcaacttcggcagcccatacgcgtgccgtgttgctgcccccattgtc

SEQ ID NO: 434748 - DNA, 50 bp, Artificial
  Synthetic oligonucleotide
gtacgccgatggaggccaagaacgcggctaacaataacgatatggaccag

SEQ ID NO: 434749 - DNA, 60 bp, Artificial
  Synthetic oligonucleotide
gtacgccggcatatgcttgcatgtatccttgcaagaagcggcccattagctcctggaacg

SEQ ID NO: 434750 - DNA, 60 bp, Artificial
  Synthetic oligonucleotide
gtacgccgtcgtctgaatttcgacagcccatacagcagtcgtgctgttgcccccactgtc

SEQ ID NO: 434751 - DNA, 55 bp, Artificial
  Synthetic oligonucleotide
gtacgccgttccgtgcgatctccatcgctttaacaccctggttccatgatccgtc

SEQ ID NO: 434752 - DNA, 55 bp, Artificial
  Synthetic oligonucleotide
gtacgcctactaggtaagactcatgaccatcagtgagcaccatactagagaaccc

SEQ ID NO: 434753 - DNA, 60 bp, Artificial
  Synthetic oligonucleotide
gtacgcctcagtatataagtaagaacttgtgggtggagcagtggcaggatggagtactac

SEQ ID NO: 434754 - DNA, 55 bp, Artificial
  Synthetic oligonucleotide
gtacgcctgagctgcccacaactattaaagagttagctgaccttttagatatacc

SEQ ID NO: 434755 - DNA, 59 bp, Artificial
  Synthetic oligonucleotide
gtacgcgatattgtcatggaaccccagggaaacgcctcttcatctgacaagagtaactc

SEQ ID NO: 434756 - DNA, 59 bp, Artificial
  Synthetic oligonucleotide
gtacgcgatcttctagataccgccgcgtcctgagcattgttcacctcaccatactgcac

SEQ ID NO: 434757 - DNA, 50 bp, Artificial
  Synthetic oligonucleotide
gtacgcgcctgcgtttaatcctaaagaacactatacgaccgattttgcgg

SEQ ID NO: 434758 - DNA, 60 bp, Artificial
  Synthetic oligonucleotide
gtacgcgtaccgatccgtggtgatccatggggttccttgaatcgtcaggagcatatagtc

SEQ ID NO: 434759 - DNA, 57 bp, Artificial
  Synthetic oligonucleotide
gtacgcgtcgtgtcgtacgaatcggcccgcggcaaccgctagggatgttcttagctg

SEQ ID NO: 434760 - DNA, 55 bp, Artificial
  Synthetic oligonucleotide
gtacgctaatagaccgttgcctttgcctaggttcgggtcatagacgattgggctt

SEQ ID NO: 434761 - DNA, 55 bp, Artificial
  Synthetic oligonucleotide
gtacgctacaacatactacatactacaaatgtagggtggtgtgatgattacgttg

SEQ ID NO: 434762 - DNA, 55 bp, Artificial
  Synthetic oligonucleotide
gtacgctccgccgtgcaagccactactgcgggaggatgtcacattccaggtcgga

SEQ ID NO: 434763 - DNA, 56 bp, Artificial
  Synthetic oligonucleotide
gtacgctccggcgtgcaaacctctcctacgggaggaggtcacattccaggtcgggc

SEQ ID NO: 434764 - DNA, 55 bp, Artificial
  Synthetic oligonucleotide
gtacgctcgccatgcgtcctaacggattggaaccccaactgattgacaatgctgg

SEQ ID NO: 434765 - DNA, 60 bp, Artificial
  Synthetic oligonucleotide
gtacgctctgctcaggacggaatgaatattcaagtaggaagcggttcagccgtaattgaa

SEQ ID NO: 434766 - DNA, 56 bp, Artificial
  Synthetic oligonucleotide
gtacgcttccatgagcgtgggcatttacccaacgtcgaacttgatgcagtttgccg

SEQ ID NO: 434767 - DNA, 50 bp, Artificial
  Synthetic oligonucleotide
gtacgcttgggttgaaccgacagtatcgtttccaacgaaagttgactcta

SEQ ID NO: 434768 - DNA, 58 bp, Artificial
  Synthetic oligonucleotide
gtacggaaatcccagccagtcttcacgatggccgtaccttcgttcaccgctgcacgga

SEQ ID NO: 434769 - DNA, 57 bp, Artificial
  Synthetic oligonucleotide
gtacggaagccagaccagcctagaagtagttaacgccattctatatgcggaagactt

SEQ ID NO: 434770 - DNA, 60 bp, Artificial
  Synthetic oligonucleotide
gtacggaatggaaatcagacctgttaggcatgatgaaacaacactcgtcagatcacaggt

SEQ ID NO: 434771 - DNA, 60 bp, Artificial
  Synthetic oligonucleotide
gtacggaatggaacctgatctgacagcaaaccttctgagactatacgatgactgccctta

SEQ ID NO: 434772 - DNA, 55 bp, Artificial
  Synthetic oligonucleotide
gtacggacaatttggctctgatgttgaatttgctggccaacagaaaggaggacat

SEQ ID NO: 434773 - DNA, 55 bp, Artificial
  Synthetic oligonucleotide
gtacggacgttatagtgcattacgccggcactttacccgaaagggcactgttaga

SEQ ID NO: 434774 - DNA, 50 bp, Artificial
  Synthetic oligonucleotide
gtacggactacggcaaacttacattacgttttcttggaactttaacacgg

SEQ ID NO: 434775 - DNA, 58 bp, Artificial
  Synthetic oligonucleotide
gtacggactgatggacacaatgagggttggagggcaactcaagggcgttagaaccatg

SEQ ID NO: 434776 - DNA, 53 bp, Artificial
  Synthetic oligonucleotide
gtacggagcaactacggtgataccgtatcctggattctgacgaagttctacct

SEQ ID NO: 434777 - DNA, 55 bp, Artificial
  Synthetic oligonucleotide
gtacggagcaatgaaatacagtggtcgtatttatacatatgaaggtgaaactcct

SEQ ID NO: 434778 - DNA, 60 bp, Artificial
  Synthetic oligonucleotide
gtacggagctgtatgataggtctgttatctagcaggatccaggttatctacgagaagaca

SEQ ID NO: 434779 - DNA, 58 bp, Artificial
  Synthetic oligonucleotide
gtacggaggtcctcgttgctatgagcacataacgaataatcaagtcctcctagctggt

SEQ ID NO: 434780 - DNA, 60 bp, Artificial
  Synthetic oligonucleotide
gtacggagtcacatactctatcactccgctggatctcccagcaatcattcaacgactcca

SEQ ID NO: 434781 - DNA, 55 bp, Artificial
  Synthetic oligonucleotide
gtacggagtgcacgaccactcattgggcaatgttcggaggggacttgttgagcgg

SEQ ID NO: 434782 - DNA, 60 bp, Artificial
  Synthetic oligonucleotide
gtacggatctgttctcttcgagtatgacgctcctagactcattcctccgtcgatatttct

SEQ ID NO: 434783 - DNA, 55 bp, Artificial
  Synthetic oligonucleotide
gtacggatgaatatgtggaaagaactgacatctattatcatgcaactagtgatcg

SEQ ID NO: 434784 - DNA, 60 bp, Artificial
  Synthetic oligonucleotide
gtacggcaatatcgattatgataagccggattggcgcattactaccaactttcatcaaaa

SEQ ID NO: 434785 - DNA, 54 bp, Artificial
  Synthetic oligonucleotide
gtacggccttgaactgcaatgacacccttcaaaccggctggttagcggggcctt

SEQ ID NO: 434786 - DNA, 59 bp, Artificial
  Synthetic oligonucleotide
gtacggcgcgcctgacatcattggatcagctaatttattcaccccccccgacgtactgc

SEQ ID NO: 434787 - DNA, 55 bp, Artificial
  Synthetic oligonucleotide
gtacggcgttactaagcgagtagcgcaagcacacggttattttggtgatatgcgc

SEQ ID NO: 434788 - DNA, 56 bp, Artificial
  Synthetic oligonucleotide
gtacggctatggggcaaaagacgtccgttgccatgccagaaaggccgtaaaccaca

SEQ ID NO: 434789 - DNA, 55 bp, Artificial
  Synthetic oligonucleotide
gtacggctatggggccaaggaagtccgctcccttagcaggaaagccctcactcac

SEQ ID NO: 434790 - DNA, 55 bp, Artificial
  Synthetic oligonucleotide
gtacggctgcaaacgtgatcggagtgcttctccagtacagggtaaagtgtaccct

SEQ ID NO: 434791 - DNA, 58 bp, Artificial
  Synthetic oligonucleotide
gtacggctgcgacatactgtgtagtttggtagttgagaacgaggattcagattaccgg

SEQ ID NO: 434792 - DNA, 55 bp, Artificial
  Synthetic oligonucleotide
gtacgggactgaaggtcttgaagccctagacctcacaactagtgccggctaccct

SEQ ID NO: 434793 - DNA, 57 bp, Artificial
  Synthetic oligonucleotide
gtacgggagctaaaaaggtaatatgctttagccctcggggtgtgagtcagccatatg

SEQ ID NO: 434794 - DNA, 55 bp, Artificial
  Synthetic oligonucleotide
gtacgggatggaggcccaaataacgcagcagaaatattcagacctggaggaggca

SEQ ID NO: 434795 - DNA, 60 bp, Artificial
  Synthetic oligonucleotide
gtacgggcatgcgtcacagtgacagatgcgagagttagcttggatccaggagtgatggag

SEQ ID NO: 434796 - DNA, 55 bp, Artificial
  Synthetic oligonucleotide
gtacgggcctagaacccataagtagtacacccacacctggggtgcggcgccttgc

SEQ ID NO: 434797 - DNA, 55 bp, Artificial
  Synthetic oligonucleotide
gtacgggcgaggagataaacgacatcgtcactaaccttggtgcgatgatggcaga

SEQ ID NO: 434798 - DNA, 55 bp, Artificial
  Synthetic oligonucleotide
gtacggggagcactccctggttaacatagtgcaggtgctatcccatgatagtcct

SEQ ID NO: 434799 - DNA, 50 bp, Artificial
  Synthetic oligonucleotide
gtacgggggcccgcccggtaattcaggctagcccttgttggtttcctctt

SEQ ID NO: 434800 - DNA, 55 bp, Artificial
  Synthetic oligonucleotide
gtacggggtgtacgactggacctccaagagcctcgaccactggttgatcaaccgg

SEQ ID NO: 434801 - DNA, 60 bp, Artificial
  Synthetic oligonucleotide
gtacgggtattgcacaatgcacaccaaccggaacggtgcacgattcaatgaccggagtgc

SEQ ID NO: 434802 - DNA, 55 bp, Artificial
  Synthetic oligonucleotide
gtacgggtgcttgcgtttgaaagagtgcacgcgggcgcggttagctggagaccac

SEQ ID NO: 434803 - DNA, 55 bp, Artificial
  Synthetic oligonucleotide
gtacggtaacacctacgtctcggcatttaaccgcaagctgacggcgattattagc

SEQ ID NO: 434804 - DNA, 57 bp, Artificial
  Synthetic oligonucleotide
gtacggtccacgtcgccctacaatgtctctcttgaccaataggctttgccggcgagt

SEQ ID NO: 434805 - DNA, 53 bp, Artificial
  Synthetic oligonucleotide
gtacggtccctaaaggtccagttcgtaccaatcgtcctttgtccacgactcta

SEQ ID NO: 434806 - DNA, 55 bp, Artificial
  Synthetic oligonucleotide
gtacggtcgaggctttgggtgggtgtacgatattgacagctctgactcggccgag

SEQ ID NO: 434807 - DNA, 56 bp, Artificial
  Synthetic oligonucleotide
gtacggtcgcgaatctttgaaggttccgatgcgcgggacttacacttttggcagtg

SEQ ID NO: 434808 - DNA, 55 bp, Artificial
  Synthetic oligonucleotide
gtacggtcgtccttagatccaatggcaatggttcgcgcagacgcagacagagagt

SEQ ID NO: 434809 - DNA, 55 bp, Artificial
  Synthetic oligonucleotide
gtacggtcgttttgtcagcattcgtgaagtcgaagcagccacttgtgatgccggg

SEQ ID NO: 434810 - DNA, 55 bp, Artificial
  Synthetic oligonucleotide
gtacggtcttgaatgagttcgacgccgttaccatgaactgttcggacatttctct

SEQ ID NO: 434811 - DNA, 60 bp, Artificial
  Synthetic oligonucleotide
gtacggtgaaaacagagtatggcgagttcaccatgttgggcatctatgacaggtgggctg

SEQ ID NO: 434812 - DNA, 60 bp, Artificial
  Synthetic oligonucleotide
gtacggtgatgagatgaaatgtctagttccagtccttcggactgcgatgccggataagcg

SEQ ID NO: 434813 - DNA, 55 bp, Artificial
  Synthetic oligonucleotide
gtacggtggattaaataaaagcaagccttactacacaggagagcatgcaaaggcc

SEQ ID NO: 434814 - DNA, 58 bp, Artificial
  Synthetic oligonucleotide
gtacggttaggttgcatgcgaaaaaagcggacaccgcttcatatcatgttgagtccgt

SEQ ID NO: 434815 - DNA, 55 bp, Artificial
  Synthetic oligonucleotide
gtacgtaccgtaaatcgttctacagtgtcatgtgttgtccgtcatgtgttgtccg

SEQ ID NO: 434816 - DNA, 56 bp, Artificial
  Synthetic oligonucleotide
gtacgtacgtttatgaccacctcactccactgcgggactgggcccacgagggccta

SEQ ID NO: 434817 - DNA, 55 bp, Artificial
  Synthetic oligonucleotide
gtacgtagacaggttctacagatgccttagagcagaacaaacagatcaggcagtc

SEQ ID NO: 434818 - DNA, 55 bp, Artificial
  Synthetic oligonucleotide
gtacgtagattctagtgcactaggaccatcaccaggcagctctccagctgtgctg

SEQ ID NO: 434819 - DNA, 55 bp, Artificial
  Synthetic oligonucleotide
gtacgtaggcaaaactgtctggtttgtgcccagcgtgcgcatggggaacgagatg

SEQ ID NO: 434820 - DNA, 59 bp, Artificial
  Synthetic oligonucleotide
gtacgtatctgtgataccttagagccagtcctacagactcaccggttggtcattaagga

SEQ ID NO: 434821 - DNA, 56 bp, Artificial
  Synthetic oligonucleotide
gtacgtatgtggcagagagtaggacaagcaatgtatgcccctcccctcagcgtagt

SEQ ID NO: 434822 - DNA, 55 bp, Artificial
  Synthetic oligonucleotide
gtacgtcagatagggcaaatgtttccgccgacacttgtagatcgtgggccggttg

SEQ ID NO: 434823 - DNA, 60 bp, Artificial
  Synthetic oligonucleotide
gtacgtccagtgatgtttgtcacgaaatttataatgccggacctgttgatccgatgcctc

SEQ ID NO: 434824 - DNA, 60 bp, Artificial
  Synthetic oligonucleotide
gtacgtccttgatcggagctcgtacagtattcgtactgatttgcacaaatcttcgcagtg

SEQ ID NO: 434825 - DNA, 58 bp, Artificial
  Synthetic oligonucleotide
gtacgtcgaagaacgccggtatgtgactcaactatttggagattgcccagcaggggag

SEQ ID NO: 434826 - DNA, 50 bp, Artificial
  Synthetic oligonucleotide
gtacgtcgactgtgaaccggactccttgagtgtttatgccgcttctagtc

SEQ ID NO: 434827 - DNA, 60 bp, Artificial
  Synthetic oligonucleotide
gtacgtcgcatctcacatgtacccgacattcttaaggcttgtcaatgagttactaactcc

SEQ ID NO: 434828 - DNA, 55 bp, Artificial
  Synthetic oligonucleotide
gtacgtctctaaggtcttcgtctcccgtcaaactaccagcggaactacgctatcc

SEQ ID NO: 434829 - DNA, 58 bp, Artificial
  Synthetic oligonucleotide
gtacgtcttcaaactataatctactagctacaaatgtatcaggaacgatgaataacct

SEQ ID NO: 434830 - DNA, 55 bp, Artificial
  Synthetic oligonucleotide
gtacgtcttgcgtccccatgtcggatggcacagtcagtaaaccacacgtgtaaac

SEQ ID NO: 434831 - DNA, 55 bp, Artificial
  Synthetic oligonucleotide
gtacgtgaaacagaaatacttgcgctaggtaccatgtgtacagcattagtagcac

SEQ ID NO: 434832 - DNA, 54 bp, Artificial
  Synthetic oligonucleotide
gtacgtgaaactgcttgttttgcaaggagaaggtacacggcacgctcttcaaaa

SEQ ID NO: 434833 - DNA, 60 bp, Artificial
  Synthetic oligonucleotide
gtacgtgcctctggatgaaggtacaggagccactgatttaggtagtgtgagagtgtttgt

SEQ ID NO: 434834 - DNA, 60 bp, Artificial
  Synthetic oligonucleotide
gtacgtgcgttcgcaagtgcaaacgatgataacgaaggtgagtagaggattttgtcatga

SEQ ID NO: 434835 - DNA, 58 bp, Artificial
  Synthetic oligonucleotide
gtacgtggacaggagtagacaccagtagtggggtaacaagagcttgcccatataacag

SEQ ID NO: 434836 - DNA, 50 bp, Artificial
  Synthetic oligonucleotide
gtacgtggagtgtcaatggcaactgcgtgtccgcgactcgcacgaccgtt

SEQ ID NO: 434837 - DNA, 55 bp, Artificial
  Synthetic oligonucleotide
gtacgtggctactaggcaaaacaagaacatccttgttcacgccgttaccacgcgc

SEQ ID NO: 434838 - DNA, 59 bp, Artificial
  Synthetic oligonucleotide
gtacgtggtactgctacaatagacgttatgaattagggctaaaagcagtagcgtatgga

SEQ ID NO: 434839 - DNA, 55 bp, Artificial
  Synthetic oligonucleotide
gtacgtggtggtcttgttggtgatgctataccagatgatgcagttcaacaagatc

SEQ ID NO: 434840 - DNA, 60 bp, Artificial
  Synthetic oligonucleotide
gtacgtgtactggacgatcccttcatactcgattagcgatggtgactttgtggatagtat

SEQ ID NO: 434841 - DNA, 55 bp, Artificial
  Synthetic oligonucleotide
gtacgtgtgttgattcatggcaccccagggtcagggaaatctcttgccacctcct

SEQ ID NO: 434842 - DNA, 55 bp, Artificial
  Synthetic oligonucleotide
gtacgttactaaaggtactgattcgatacctcagagcgtctacgtgtggaacaca

SEQ ID NO: 434843 - DNA, 55 bp, Artificial
  Synthetic oligonucleotide
gtacgttaggatgaagcgggcggaactctactgcccgcgacctctcctcacgcac

SEQ ID NO: 434844 - DNA, 57 bp, Artificial
  Synthetic oligonucleotide
gtacgttaggtacaacaaggccaatggtgatgtaggagctttcctaaccaccatgaa

SEQ ID NO: 434845 - DNA, 60 bp, Artificial
  Synthetic oligonucleotide
gtacgttatcgatgtacgtgaccatacgcgcattttgagctcattgcctcggcacgttca

SEQ ID NO: 434846 - DNA, 60 bp, Artificial
  Synthetic oligonucleotide
gtacgttatgggaatgtccggactacacactcggtatcaggtatggcaagcacaaatagc

SEQ ID NO: 434847 - DNA, 50 bp, Artificial
  Synthetic oligonucleotide
gtacgttatgtctgagaaacttggtttagagtctgatgagtgggtccgtt

SEQ ID NO: 434848 - DNA, 51 bp, Artificial
  Synthetic oligonucleotide
gtacgttcgatgggccgatggaatgtcggttatctcccgcagccaaccttt

SEQ ID NO: 434849 - DNA, 60 bp, Artificial
  Synthetic oligonucleotide
gtacgttcttaatgacacactttcgtcagatacaaaactgcaggctgcaatgaaatacgg

SEQ ID NO: 434850 - DNA, 55 bp, Artificial
  Synthetic oligonucleotide
gtacgttggagcttttcaacttacccagactgccgatgatgaaccagcactggct

SEQ ID NO: 434851 - DNA, 55 bp, Artificial
  Synthetic oligonucleotide
gtacgttgtggccctgtaataccattcgtcatacaccatttcaacttcagacgtg

SEQ ID NO: 434852 - DNA, 60 bp, Artificial
  Synthetic oligonucleotide
gtacgtttctggatttacagtagtatcatgtgtaggtcgcgtcagcgctgacccttgaac

SEQ ID NO: 434853 - DNA, 57 bp, Artificial
  Synthetic oligonucleotide
gtactaaaatcaggtcaattgtgtacttgggagtgtcaaacattgatattcccaacg

SEQ ID NO: 434854 - DNA, 54 bp, Artificial
  Synthetic oligonucleotide
gtactaaagctaaacatgtgggatccacttgtaaacgagttccctgaaaccgta

SEQ ID NO: 434855 - DNA, 55 bp, Artificial
  Synthetic oligonucleotide
gtactaaaggggttgggaatgaatcctactttagaggaaatgttgacagcctgtc

SEQ ID NO: 434856 - DNA, 60 bp, Artificial
  Synthetic oligonucleotide
gtactaaatcatgctgaacgtacttttgcgacatataatgcaatcaaaaagacgaaatct

SEQ ID NO: 434857 - DNA, 50 bp, Artificial
  Synthetic oligonucleotide
gtactaacaaaatgcgctgcggccccatactcaatcatatgagattcgca

SEQ ID NO: 434858 - DNA, 59 bp, Artificial
  Synthetic oligonucleotide
gtactaacgcggtggttggttgctacatcattcgcttggctggttcttatctaaataca

SEQ ID NO: 434859 - DNA, 58 bp, Artificial
  Synthetic oligonucleotide
gtactaactgaaatgccagattatttactacttaaagacatggctgttgaaaacaaga

SEQ ID NO: 434860 - DNA, 55 bp, Artificial
  Synthetic oligonucleotide
gtactaagtgcattatatatgtgtactcctcctgaagtcgtagcaagcttcttcg

SEQ ID NO: 434861 - DNA, 57 bp, Artificial
  Synthetic oligonucleotide
gtactaagtggagaaaattagtcgatttcagagaactcaataagaggactcaagact

SEQ ID NO: 434862 - DNA, 55 bp, Artificial
  Synthetic oligonucleotide
gtactaatcataatttgttggcacctcctactataacctctctaccagccatgaa

SEQ ID NO: 434863 - DNA, 55 bp, Artificial
  Synthetic oligonucleotide
gtactaatgaaatatgacgcgacgttgcaattggatatgtcagaacttgcggatc

SEQ ID NO: 434864 - DNA, 53 bp, Artificial
  Synthetic oligonucleotide
gtactacaaaggggccacactaagagtagactttagcaacggaaagagtgtaa

SEQ ID NO: 434865 - DNA, 55 bp, Artificial
  Synthetic oligonucleotide
gtactacaactcgatattacctcgggcagtacctctcctgagtatttgatcgtgg

SEQ ID NO: 434866 - DNA, 55 bp, Artificial
  Synthetic oligonucleotide
gtactacagctaaagctatggaacaggtggcagggtcaagcgaacaagcagcaga

SEQ ID NO: 434867 - DNA, 60 bp, Artificial
  Synthetic oligonucleotide
gtactacattctcactagaggatggtcagacaacggtgaccccatgttcaatcagacgtg

SEQ ID NO: 434868 - DNA, 60 bp, Artificial
  Synthetic oligonucleotide
gtactaccaattgagaatccatggccgcgcagcggcaatcctcgacaaatttgacgagga

SEQ ID NO: 434869 - DNA, 55 bp, Artificial
  Synthetic oligonucleotide
gtactacctatcatgaaggacaggatacatactccttagggacgcataggaaggt

SEQ ID NO: 434870 - DNA, 52 bp, Artificial
  Synthetic oligonucleotide
gtactacctgaagcatgtagtaaaactgcacagttgaacattgtcacaaacg

SEQ ID NO: 434871 - DNA, 60 bp, Artificial
  Synthetic oligonucleotide
gtactacctgaccagagaccctagcactccactcgccagggctgcctgggagacagctag

SEQ ID NO: 434872 - DNA, 55 bp, Artificial
  Synthetic oligonucleotide
gtactactacaaatacagcaacatttgaagaagtggctacaagtgagaaattggc

SEQ ID NO: 434873 - DNA, 60 bp, Artificial
  Synthetic oligonucleotide
gtactactacatgtcaatttggtgatcccggagatataatgagtacacccacagggatga

SEQ ID NO: 434874 - DNA, 59 bp, Artificial
  Synthetic oligonucleotide
gtactactacctatatgctttaagttaagggatacccttagaaagcatgaagatgcata

SEQ ID NO: 434875 - DNA, 60 bp, Artificial
  Synthetic oligonucleotide
gtactacttagtaacttgggctaactcatctatagaaatgcttatgtcagtgttttcaca

SEQ ID NO: 434876 - DNA, 51 bp, Artificial
  Synthetic oligonucleotide
gtactacttctcagacctggaggttgcgcttgtacacacaggcccagcaac

SEQ ID NO: 434877 - DNA, 55 bp, Artificial
  Synthetic oligonucleotide
gtactagagtcctcgagttttctagtcctcggagtgtcgagccctcgaatagtcg

SEQ ID NO: 434878 - DNA, 55 bp, Artificial
  Synthetic oligonucleotide
gtactagggctggagtcactggtgactctgcatccactggtttcagtgtggtctg

SEQ ID NO: 434879 - DNA, 60 bp, Artificial
  Synthetic oligonucleotide
gtactagttatacttacatgctgtctgatagtacatatgtagcaaatgctagtggtgtgc

SEQ ID NO: 434880 - DNA, 55 bp, Artificial
  Synthetic oligonucleotide
gtactataaagggatcagcgagtatctacgactacttgccccaattgcgccgcgt

SEQ ID NO: 434881 - DNA, 55 bp, Artificial
  Synthetic oligonucleotide
gtactataacaggattaatacagcaagcaccaattacgttatgagcaccacaagt

SEQ ID NO: 434882 - DNA, 60 bp, Artificial
  Synthetic oligonucleotide
gtactataacagtactggtaacatgggggtgctggctggtcaagcgtctcagttaaatgc

SEQ ID NO: 434883 - DNA, 57 bp, Artificial
  Synthetic oligonucleotide
gtactataactgaaggatatctcagtgttttaagaacaggttggtacaccaatgtct

SEQ ID NO: 434884 - DNA, 57 bp, Artificial
  Synthetic oligonucleotide
gtactataataaggaagtacctaccaattatgaatcaactcataaataggtatctaa

SEQ ID NO: 434885 - DNA, 56 bp, Artificial
  Synthetic oligonucleotide
gtactatcatattctaatagatcaactctggcgaaattagtctcatcaccgatgtc

SEQ ID NO: 434886 - DNA, 57 bp, Artificial
  Synthetic oligonucleotide
gtactatcccataatttgtgaaaaacccacttgtatctggatcgaaggcagtaatta

SEQ ID NO: 434887 - DNA, 57 bp, Artificial
  Synthetic oligonucleotide
gtactatgaagttgaggggggagtgccatcaggttgttctggaacaagtatatttaa

SEQ ID NO: 434888 - DNA, 53 bp, Artificial
  Synthetic oligonucleotide
gtactatggtagtgccatggattagcaacaccacgtatcggcaaaccatagat

SEQ ID NO: 434889 - DNA, 55 bp, Artificial
  Synthetic oligonucleotide
gtactatgtacccagtaaatataatcctgctgatggcccaaccaggcacaaacct

SEQ ID NO: 434890 - DNA, 59 bp, Artificial
  Synthetic oligonucleotide
gtactattctgtgggtgtatggcccacatggaggcgagggcaaaagtgtctttgctaaa

SEQ ID NO: 434891 - DNA, 60 bp, Artificial
  Synthetic oligonucleotide
gtactattgaactgaggagcagatactgggctataagaaccaggagtggaggaaacacca

SEQ ID NO: 434892 - DNA, 55 bp, Artificial
  Synthetic oligonucleotide
gtactattgttggacaatggtgaggtggttagagttggagtgaggtcgcctcatg

SEQ ID NO: 434893 - DNA, 51 bp, Artificial
  Synthetic oligonucleotide
gtactcaaatctgtttgacgacttgcgcaaatcatcggttgccatcgtgtc

SEQ ID NO: 434894 - DNA, 55 bp, Artificial
  Synthetic oligonucleotide
gtactcaagggcgaaacctacagaagatcggagatagtggcaatggtccgaaagc

SEQ ID NO: 434895 - DNA, 55 bp, Artificial
  Synthetic oligonucleotide
gtactcacaattcgattcctttcttatgtatgatctaggcggaggtacatacgat

SEQ ID NO: 434896 - DNA, 53 bp, Artificial
  Synthetic oligonucleotide
gtactcacctttatcgtttcagacccataccccaaccccaaggggtctcgaca

SEQ ID NO: 434897 - DNA, 60 bp, Artificial
  Synthetic oligonucleotide
gtactcacgcatcaaatcctgtatatgctactttgaaaatccggatctacttttatgatt

SEQ ID NO: 434898 - DNA, 60 bp, Artificial
  Synthetic oligonucleotide
gtactcagaggtgtgccttgcaggttgatcaacaacggtgacgactgtgtagtcgtgtgt

SEQ ID NO: 434899 - DNA, 60 bp, Artificial
  Synthetic oligonucleotide
gtactcagctataagagtgggcacagttgtcactgcttatgaagactgctcagggttggt

SEQ ID NO: 434900 - DNA, 55 bp, Artificial
  Synthetic oligonucleotide
gtactcaggggaaccattggtgagacgaccaataaatttgatgagggtaataggg

SEQ ID NO: 434901 - DNA, 58 bp, Artificial
  Synthetic oligonucleotide
gtactcagtaaaccctctggacctaccagccataattgagaggatacatgggctcgac

SEQ ID NO: 434902 - DNA, 57 bp, Artificial
  Synthetic oligonucleotide
gtactcatagtctatcaacctattccaaattacaccatctgaacataatcttagccc

SEQ ID NO: 434903 - DNA, 59 bp, Artificial
  Synthetic oligonucleotide
gtactcatgcctcaaaccctgtgtatgctacgttaaagatacggatctacttctacgat

SEQ ID NO: 434904 - DNA, 56 bp, Artificial
  Synthetic oligonucleotide
gtactcatttagaaggaaagattatactggtcgcagtaaacacagaatcaggatac

SEQ ID NO: 434905 - DNA, 60 bp, Artificial
  Synthetic oligonucleotide
gtactccatagagccgttaacgatggactttacgagctgacagagtggttgtgcaaacaa

SEQ ID NO: 434906 - DNA, 58 bp, Artificial
  Synthetic oligonucleotide
gtactcccccaccgctgcctcttgcgagtacttcgatgggtatactggccaggccgtc

SEQ ID NO: 434907 - DNA, 56 bp, Artificial
  Synthetic oligonucleotide
gtactccggttctattccgtactcggatggtaccttttatctcacgcacacgttca

SEQ ID NO: 434908 - DNA, 55 bp, Artificial
  Synthetic oligonucleotide
gtactccgtgctattgtaaatactgtagcttccattgtctagtttgctttcagac

SEQ ID NO: 434909 - DNA, 59 bp, Artificial
  Synthetic oligonucleotide
gtactcctatgttagaagcaatgggaattacaaattatgatagacctggtatagaacac

SEQ ID NO: 434910 - DNA, 55 bp, Artificial
  Synthetic oligonucleotide
gtactcctctctagatgttgcgtgcgtcatgatttctctcatgacctcatccttg

SEQ ID NO: 434911 - DNA, 54 bp, Artificial
  Synthetic oligonucleotide
gtactcctgcagggtttggtttagcacacaattttgttacactagttattaggg

SEQ ID NO: 434912 - DNA, 52 bp, Artificial
  Synthetic oligonucleotide
gtactccttaaagtcgggtcttattcagggaacttcagtccgacgacttacc

SEQ ID NO: 434913 - DNA, 58 bp, Artificial
  Synthetic oligonucleotide
gtactcgagtgttttcagccgaacgctcctgggtgagatcctcaattactacacccac

SEQ ID NO: 434914 - DNA, 55 bp, Artificial
  Synthetic oligonucleotide
gtactcgatacatggaggcagaaccttttatgtggccagtatatgaggtaataag

SEQ ID NO: 434915 - DNA, 55 bp, Artificial
  Synthetic oligonucleotide
gtactcgatgacacaatgatctatcttcatgcaccttctccttacagttgcaccc

SEQ ID NO: 434916 - DNA, 55 bp, Artificial
  Synthetic oligonucleotide
gtactcgcagtggaaagcaaataggggctaaagtacattactaccaagacttaag

SEQ ID NO: 434917 - DNA, 55 bp, Artificial
  Synthetic oligonucleotide
gtactcggaaacagcggtgaggcagaaggtcgatcctccagggaacgacagtcga

SEQ ID NO: 434918 - DNA, 55 bp, Artificial
  Synthetic oligonucleotide
gtactcgggaggttgtgcaactaatagtcaactgctaggggtaagtaatttgatc

SEQ ID NO: 434919 - DNA, 55 bp, Artificial
  Synthetic oligonucleotide
gtactcgggattcaccccaagaaccatggtgtgccccgacgcactcaaccggagg

SEQ ID NO: 434920 - DNA, 60 bp, Artificial
  Synthetic oligonucleotide
gtactcggttggatctcctgagcacacagcaatacccccctcacattcatgtccgccaca

SEQ ID NO: 434921 - DNA, 55 bp, Artificial
  Synthetic oligonucleotide
gtactcgtctctaatggtggtcggtaggttgaataaatagtttaggcgtgatagg

SEQ ID NO: 434922 - DNA, 56 bp, Artificial
  Synthetic oligonucleotide
gtactcgtggcaccaggaacgtccggttagtttccacacccatcgaccattggcca

SEQ ID NO: 434923 - DNA, 55 bp, Artificial
  Synthetic oligonucleotide
gtactcgttacgctagttttggattgtcttgtgcccaacactagacctcggtctc

SEQ ID NO: 434924 - DNA, 55 bp, Artificial
  Synthetic oligonucleotide
gtactcgttgatattctatctcacttgaaatgcgtagaagacgttacaaccttcg

SEQ ID NO: 434925 - DNA, 58 bp, Artificial
  Synthetic oligonucleotide
gtactctaaataaccggcatgcacagcttagggattgcaaaatacgtgaggaaagact

SEQ ID NO: 434926 - DNA, 60 bp, Artificial
  Synthetic oligonucleotide
gtactctaacgtggccttgtacctgcctgacatgtacaagtacactccagataatgtcac

SEQ ID NO: 434927 - DNA, 60 bp, Artificial
  Synthetic oligonucleotide
gtactctaatccatcatttgaggtgcacatcacatctacatcggggtctggggagtcctc

SEQ ID NO: 434928 - DNA, 50 bp, Artificial
  Synthetic oligonucleotide
gtactctacgtcagtgacccacattgccctcccgacctagataatcatat

SEQ ID NO: 434929 - DNA, 55 bp, Artificial
  Synthetic oligonucleotide
gtactctactacccataaagttgccggcgcccgagtgcgtctctttggacccgct

SEQ ID NO: 434930 - DNA, 53 bp, Artificial
  Synthetic oligonucleotide
gtactctccagtaacaagtgagtactgtcacatgattgagaggtgttatatga

SEQ ID NO: 434931 - DNA, 55 bp, Artificial
  Synthetic oligonucleotide
gtactctccgatttggaagccgccacctgtctgctagtcgcctacggacacgcgc

SEQ ID NO: 434932 - DNA, 59 bp, Artificial
  Synthetic oligonucleotide
gtactctctggttggaatagatcctttccgtctgcttcaaaacagccaagtgttcagtc

SEQ ID NO: 434933 - DNA, 55 bp, Artificial
  Synthetic oligonucleotide
gtactctgaaggtcgagcgtgtacatgccgatgtgaatatggacggtgcaagttc

SEQ ID NO: 434934 - DNA, 60 bp, Artificial
  Synthetic oligonucleotide
gtactctgcgagtgctatgatgctggatgtgcctggtacgaactgacaccagctgagacc

SEQ ID NO: 434935 - DNA, 57 bp, Artificial
  Synthetic oligonucleotide
gtactcttaattacgacgaatactgcatgttagattacactgatttcaactcacagc

SEQ ID NO: 434936 - DNA, 55 bp, Artificial
  Synthetic oligonucleotide
gtactcttgctggtccattcgatggcccgggaaacccagggaacattactggaac

SEQ ID NO: 434937 - DNA, 60 bp, Artificial
  Synthetic oligonucleotide
gtactgaaatatcacaccgggctgaggcaatttgtgcagcaatgatagaggcatggggct

SEQ ID NO: 434938 - DNA, 55 bp, Artificial
  Synthetic oligonucleotide
gtactgaaggacgctgtaaggcgcgatattccctccgggcactggccggggggta

SEQ ID NO: 434939 - DNA, 52 bp, Artificial
  Synthetic oligonucleotide
gtactgaccaacaaagtctctaccagaatgcagatgcttatgtttttgtagg

SEQ ID NO: 434940 - DNA, 55 bp, Artificial
  Synthetic oligonucleotide
gtactgaccctctgctgcatattactctcattgctggccgccttactaaccccgt

SEQ ID NO: 434941 - DNA, 55 bp, Artificial
  Synthetic oligonucleotide
gtactgactgggtattatctgtatatggagtttctactgaactaatagaggcatc

SEQ ID NO: 434942 - DNA, 60 bp, Artificial
  Synthetic oligonucleotide
gtactgagacctacatcgatgtcaaagacgttcaagagtgtaaggtatccaacatcgatt

SEQ ID NO: 434943 - DNA, 56 bp, Artificial
  Synthetic oligonucleotide
gtactgagacggtgcacaagtccggttatacgtctgaaaggtactcctatagcggt

SEQ ID NO: 434944 - DNA, 60 bp, Artificial
  Synthetic oligonucleotide
gtactgagagagtggtcgtgagcattgatcgtttcttgagggtccgagatcagcggggaa

SEQ ID NO: 434945 - DNA, 55 bp, Artificial
  Synthetic oligonucleotide
gtactgagagccataatgtctgggctacacatgcgtgtgtgcctacagaccccga

SEQ ID NO: 434946 - DNA, 55 bp, Artificial
  Synthetic oligonucleotide
gtactgagtcctgcgcacattgccaaactgaacaaactactcactgaggagtccg

SEQ ID NO: 434947 - DNA, 52 bp, Artificial
  Synthetic oligonucleotide
gtactgataaagcgtccaactttttcgtcgggtgtctcagttggtacaactt

SEQ ID NO: 434948 - DNA, 55 bp, Artificial
  Synthetic oligonucleotide
gtactgataacaatggaggtatgaacatatcaaggcagcaagcgagcctctgcgc

SEQ ID NO: 434949 - DNA, 52 bp, Artificial
  Synthetic oligonucleotide
gtactgatcactctctttacactcacccccgggtataagacccttctcagcc

SEQ ID NO: 434950 - DNA, 60 bp, Artificial
  Synthetic oligonucleotide
gtactgatcatgcgacgcggattatgcgaaaataattagtaatgcgcgctaattacttta

SEQ ID NO: 434951 - DNA, 56 bp, Artificial
  Synthetic oligonucleotide
gtactgatcttggaccaagaagtagaaatccacaaggtttagtccgattatattac

SEQ ID NO: 434952 - DNA, 60 bp, Artificial
  Synthetic oligonucleotide
gtactgatgtggaagtttgacagcctcctggcatggagacacgtagccagagagagacat

SEQ ID NO: 434953 - DNA, 58 bp, Artificial
  Synthetic oligonucleotide
gtactgatgtggagaagaataatactactaataccacaactactagtaccacaactac

SEQ ID NO: 434954 - DNA, 60 bp, Artificial
  Synthetic oligonucleotide
gtactgattcgaaatggaagattttgtgcgacaatgcttcaatccgatgattgtcgagct

SEQ ID NO: 434955 - DNA, 54 bp, Artificial
  Synthetic oligonucleotide
gtactgcaaatacgagtctgtggccataaccaatgcgggtcctgtacctattaa

SEQ ID NO: 434956 - DNA, 55 bp, Artificial
  Synthetic oligonucleotide
gtactgcaacaccccggatgctccggtgtggatggccgatggttcgttcaaggag

SEQ ID NO: 434957 - DNA, 60 bp, Artificial
  Synthetic oligonucleotide
gtactgcaacggtgatgaacgacaagcgtgatcgctaccaggtcctgagacggtttcagg

SEQ ID NO: 434958 - DNA, 55 bp, Artificial
  Synthetic oligonucleotide
gtactgcaaggtatcattaacacagcaaggagggacaaggcgctcctacatagtc

SEQ ID NO: 434959 - DNA, 60 bp, Artificial
  Synthetic oligonucleotide
gtactgcacatgatgtcattctatgtgatgacacacctagaggtttgttagcatgccaat

SEQ ID NO: 434960 - DNA, 55 bp, Artificial
  Synthetic oligonucleotide
gtactgcagaggtttattcattcgcatataaacagttatatgtagtgtaccgagg

SEQ ID NO: 434961 - DNA, 60 bp, Artificial
  Synthetic oligonucleotide
gtactgcagcgggagcatcccaagactacagtaccagattaaattggctcagcgccggtc

SEQ ID NO: 434962 - DNA, 55 bp, Artificial
  Synthetic oligonucleotide
gtactgcccagaccaaacaggcctgggtagaccgaaccaagctcgatgacccccc

SEQ ID NO: 434963 - DNA, 59 bp, Artificial
  Synthetic oligonucleotide
gtactgcctccgtaggaggcagctcacggggagaataccatttctcccctggcgacata

SEQ ID NO: 434964 - DNA, 55 bp, Artificial
  Synthetic oligonucleotide
gtactgcggtgcatatggctacagattttgggaaatatataattgctcacacaga

SEQ ID NO: 434965 - DNA, 50 bp, Artificial
  Synthetic oligonucleotide
gtactgcgtaaccgtacgtcatacattcatacgcactgtggttctgcggt

SEQ ID NO: 434966 - DNA, 60 bp, Artificial
  Synthetic oligonucleotide
gtactgcgttcttgaggtgggggatatgctcctgaggactgcaataggccaagtatcaag

SEQ ID NO: 434967 - DNA, 50 bp, Artificial
  Synthetic oligonucleotide
gtactgctgaatccaacatccattgttgtaaataccccacatcctaacac

SEQ ID NO: 434968 - DNA, 55 bp, Artificial
  Synthetic oligonucleotide
gtactgcttattttagaactatcacaggctttgcggatgctgataataacccacc

SEQ ID NO: 434969 - DNA, 55 bp, Artificial
  Synthetic oligonucleotide
gtactggaagcactgttttcttgggtgaaggcacacaatctcacaatgtgttggt

SEQ ID NO: 434970 - DNA, 60 bp, Artificial
  Synthetic oligonucleotide
gtactggagatgcgctcacatacttgggaaacacgatagtgacgctagcttgtctgtgtc

SEQ ID NO: 434971 - DNA, 60 bp, Artificial
  Synthetic oligonucleotide
gtactggagcgacaatggctggtgcacttgtgacgctcatcgtcatgtcaccttttcttt

SEQ ID NO: 434972 - DNA, 55 bp, Artificial
  Synthetic oligonucleotide
gtactggataattccatttcagtaccagcctcagttgcatccgacccggacattg

SEQ ID NO: 434973 - DNA, 51 bp, Artificial
  Synthetic oligonucleotide
gtactggcgccaaagaagcgacgcatagacgcagtagcgacagacgatgta

SEQ ID NO: 434974 - DNA, 58 bp, Artificial
  Synthetic oligonucleotide
gtactgggccataaggaccaggagtggaggaaacactaatcaacagagggcctccgca

SEQ ID NO: 434975 - DNA, 57 bp, Artificial
  Synthetic oligonucleotide
gtactggtcctcagtaacactggaacaggtctgaattgcaacgggacaattataaag

SEQ ID NO: 434976 - DNA, 53 bp, Artificial
  Synthetic oligonucleotide
gtactggtctgacccacagagtaggtaagcgtttctgtgttaagtctgtgtat

SEQ ID NO: 434977 - DNA, 53 bp, Artificial
  Synthetic oligonucleotide
gtactggtgattttgcatactctacacaaacgttaatatagcgagagtctccc

SEQ ID NO: 434978 - DNA, 55 bp, Artificial
  Synthetic oligonucleotide
gtactggtgcagtgggcgtatgacaatgaaataactgaggaaagtgagctagcct

SEQ ID NO: 434979 - DNA, 57 bp, Artificial
  Synthetic oligonucleotide
gtactggtgggaagtctatcagctcttcctaccccaccatcggggaaggctccaaca

SEQ ID NO: 434980 - DNA, 55 bp, Artificial
  Synthetic oligonucleotide
gtactggtttacttatggcacatagtaggcctcgaagacgtaaacgtgcgtctgc

SEQ ID NO: 434981 - DNA, 55 bp, Artificial
  Synthetic oligonucleotide
gtactgtaaggatataacatgtgaagtgtgcaagagagttgcgcgcagcaacagg

SEQ ID NO: 434982 - DNA, 60 bp, Artificial
  Synthetic oligonucleotide
gtactgtaatcatactcaccctggatcttgcgctggatgcaagtggtgtcacagtacgaa

SEQ ID NO: 434983 - DNA, 60 bp, Artificial
  Synthetic oligonucleotide
gtactgtacagatctaggcgagacactgttcatcacagagtttatacacaccgatctgaa

SEQ ID NO: 434984 - DNA, 54 bp, Artificial
  Synthetic oligonucleotide
gtactgtacctctgttgggtcctcaccctttgttaatcctaaagggactatcga

SEQ ID NO: 434985 - DNA, 55 bp, Artificial
  Synthetic oligonucleotide
gtactgtaggtccctattggtagttcactaaaagtaaccttctgtgtatgatccc

SEQ ID NO: 434986 - DNA, 56 bp, Artificial
  Synthetic oligonucleotide
gtactgtcatactatgtcgttttgtttgaattccgtactcaaagcactattttaaa

SEQ ID NO: 434987 - DNA, 55 bp, Artificial
  Synthetic oligonucleotide
gtactgtcggggctgagtatatacgggatctaataggggttctacggtgtaagaa

SEQ ID NO: 434988 - DNA, 59 bp, Artificial
  Synthetic oligonucleotide
gtactgtctccattggcaattaacgatggaactctgacacttaatatgaaccctagatt

SEQ ID NO: 434989 - DNA, 55 bp, Artificial
  Synthetic oligonucleotide
gtactgtctcctgttaatgtggcaccagcaggccttaaggtccaagacttggtcg

SEQ ID NO: 434990 - DNA, 55 bp, Artificial
  Synthetic oligonucleotide
gtactgtgctggtaggtctcatacttgcattcataatgtgggcatgcagcagtgg

SEQ ID NO: 434991 - DNA, 54 bp, Artificial
  Synthetic oligonucleotide
gtactgtttatgttagcgtggtttaaccaccttagtgtgctttatattatagtt

SEQ ID NO: 434992 - DNA, 57 bp, Artificial
  Synthetic oligonucleotide
gtactgtttctagatggaatagataaagctcaagaagagcatgagaaataccacaac

SEQ ID NO: 434993 - DNA, 52 bp, Artificial
  Synthetic oligonucleotide
gtactgtttggaactgggttggagattgctcacataatcatagtcgcatgct

SEQ ID NO: 434994 - DNA, 50 bp, Artificial
  Synthetic oligonucleotide
gtactgtttggagcagtgggccgttgtttgggctgggatcaagtgttttg

SEQ ID NO: 434995 - DNA, 56 bp, Artificial
  Synthetic oligonucleotide
gtacttaaatatggaattaactattccaattttcgctacgaactccgattgcgagc

SEQ ID NO: 434996 - DNA, 60 bp, Artificial
  Synthetic oligonucleotide
gtacttaagagctttttagcttacgcgcgatgctattcagatgttgagatatctttatgc

SEQ ID NO: 434997 - DNA, 57 bp, Artificial
  Synthetic oligonucleotide
gtacttaattcgaaatcagcacacgaatttacgtttgcgagtccgtatatgcataaa

SEQ ID NO: 434998 - DNA, 55 bp, Artificial
  Synthetic oligonucleotide
gtacttacccaataaatggaaccatggaggggtataatggcactattaatgacac

SEQ ID NO: 434999 - DNA, 55 bp, Artificial
  Synthetic oligonucleotide
gtacttagaactggtgagagcactgaatttacttttaactttgactgtgaatggg

SEQ ID NO: 435000 - DNA, 55 bp, Artificial
  Synthetic oligonucleotide
gtacttatataggaaaccactaaattcccatataaggattacacctgacggatac

SEQ ID NO: 435001 - DNA, 57 bp, Artificial
  Synthetic oligonucleotide
gtacttcaaagactgctgacactgagctttctacaaaggactttccgctaaggactt

SEQ ID NO: 435002 - DNA, 57 bp, Artificial
  Synthetic oligonucleotide
gtacttcaagttcaagtatgtcaaacccctgattttgtgcctcttctatgtcgacct

SEQ ID NO: 435003 - DNA, 55 bp, Artificial
  Synthetic oligonucleotide
gtacttcatgtcgacgttgagcaccaacgcattcccacgtcaggggtgctcccag

SEQ ID NO: 435004 - DNA, 60 bp, Artificial
  Synthetic oligonucleotide
gtacttccgatggatgggccctcagcgcttaatgttccttgtgctgtggaagcttgctcg

SEQ ID NO: 435005 - DNA, 55 bp, Artificial
  Synthetic oligonucleotide
gtacttcgtctcgaagttatgagtgagggccctatgtgtggatatctaaccgcat

SEQ ID NO: 435006 - DNA, 50 bp, Artificial
  Synthetic oligonucleotide
gtacttctaacagcccatgactctccgggcattatttcaagtgggttgtg

SEQ ID NO: 435007 - DNA, 54 bp, Artificial
  Synthetic oligonucleotide
gtacttctagacaacgtgctagtttcagagtacgggtgtcccccacttttgtgg

SEQ ID NO: 435008 - DNA, 60 bp, Artificial
  Synthetic oligonucleotide
gtacttctccgactatgaggagctgagggagcaattaagttcagtatcatcattcgagag

SEQ ID NO: 435009 - DNA, 60 bp, Artificial
  Synthetic oligonucleotide
gtacttctcggcccctcgtgcggcctatacgagcctcaagcgttactacgcagtgcagga

SEQ ID NO: 435010 - DNA, 60 bp, Artificial
  Synthetic oligonucleotide
gtacttctcttgctgcgcagcagaggactcagacaatgagtgatggcaccgaccaatctg

SEQ ID NO: 435011 - DNA, 60 bp, Artificial
  Synthetic oligonucleotide
gtacttctgcttatacatcattgaatgtcttggctagattcactgatttagagcttcatg

SEQ ID NO: 435012 - DNA, 56 bp, Artificial
  Synthetic oligonucleotide
gtacttctgtcccctagttaagacaagtgcatggcgcactaagatcagtgccataa

SEQ ID NO: 435013 - DNA, 58 bp, Artificial
  Synthetic oligonucleotide
gtacttgatatgggtagtacatactttgatattcgaggtcggcttgatagggggccta

SEQ ID NO: 435014 - DNA, 55 bp, Artificial
  Synthetic oligonucleotide
gtacttgatgctttggataaggcgttagtagacagatatcgatccccatatagtg

SEQ ID NO: 435015 - DNA, 60 bp, Artificial
  Synthetic oligonucleotide
gtacttgcatatggtgagtggcctacatacttatccgacattgatgcaacgtccgtcgat

SEQ ID NO: 435016 - DNA, 52 bp, Artificial
  Synthetic oligonucleotide
gtacttgcctcctatgaaggacataagcaatagatcaccgtcatcttgcatt

SEQ ID NO: 435017 - DNA, 59 bp, Artificial
  Synthetic oligonucleotide
gtacttgcgggtcggcggatctgtacctggttaccaggcatgcagacgtcattcccgcc

SEQ ID NO: 435018 - DNA, 60 bp, Artificial
  Synthetic oligonucleotide
gtacttgctcttcttgtgtctgctactatggaatagaggagatgccagaaacctaaatga

SEQ ID NO: 435019 - DNA, 55 bp, Artificial
  Synthetic oligonucleotide
gtacttggaatagtacagtaggaaaagcaatgtatgcccctcccatcagcggacc

SEQ ID NO: 435020 - DNA, 55 bp, Artificial
  Synthetic oligonucleotide
gtacttggaatagtactacttggaacagcactaaagggtcacataacagtacagg

SEQ ID NO: 435021 - DNA, 56 bp, Artificial
  Synthetic oligonucleotide
gtacttggaatagtactgaagggtcaaataaaacggaaggaaatgacacaatcaca

SEQ ID NO: 435022 - DNA, 60 bp, Artificial
  Synthetic oligonucleotide
gtacttggaatattaatagtacttggaatgatactggagagtcaaataacactgtaggca

SEQ ID NO: 435023 - DNA, 55 bp, Artificial
  Synthetic oligonucleotide
gtacttggaatggtaatagtacttggaatgttactgaagggtcaaatactgaagg

SEQ ID NO: 435024 - DNA, 59 bp, Artificial
  Synthetic oligonucleotide
gtacttggaatggtactgaagggacaggtactgaagggaatgacacaatcacactccca

SEQ ID NO: 435025 - DNA, 55 bp, Artificial
  Synthetic oligonucleotide
gtacttggacaggaaatgaaaccatggaggggagtaatggcactatcacacttcc

SEQ ID NO: 435026 - DNA, 56 bp, Artificial
  Synthetic oligonucleotide
gtacttggacccctgcatgggccccgccctttgcaacaggagagtcgttgggtcca

SEQ ID NO: 435027 - DNA, 53 bp, Artificial
  Synthetic oligonucleotide
gtacttggactgttatgatgtcgtggttcattaggaatggccggttgtggtgc

SEQ ID NO: 435028 - DNA, 59 bp, Artificial
  Synthetic oligonucleotide
gtacttggagtagtgcttggaatggtactacagggactaataacactggagtaatcaca

SEQ ID NO: 435029 - DNA, 57 bp, Artificial
  Synthetic oligonucleotide
gtacttggatgtctaatagtacttggaatgctactacagagacaaataacattgacc

SEQ ID NO: 435030 - DNA, 55 bp, Artificial
  Synthetic oligonucleotide
gtacttgggacagccaactctccactgagcgtgtttgaagccattaagggcgtcg

SEQ ID NO: 435031 - DNA, 55 bp, Artificial
  Synthetic oligonucleotide
gtacttgggagtcagacgcttcggagcagctgcctgagagcactcgctcggaggt

SEQ ID NO: 435032 - DNA, 56 bp, Artificial
  Synthetic oligonucleotide
gtacttgggctgccacttaaactcggggatcaccagtttaggaacagcaatctcgg

SEQ ID NO: 435033 - DNA, 55 bp, Artificial
  Synthetic oligonucleotide
gtacttgggttaatggtactaggaatgatactgcaaggccaaatgacactgacac

SEQ ID NO: 435034 - DNA, 55 bp, Artificial
  Synthetic oligonucleotide
gtacttgggtttggaatagtactgggaatgatactgaaggatcaaataacgaaac

SEQ ID NO: 435035 - DNA, 56 bp, Artificial
  Synthetic oligonucleotide
gtacttggtgtttgagtctttattgagtggggtttggattgttaggagcaaactga

SEQ ID NO: 435036 - DNA, 56 bp, Artificial
  Synthetic oligonucleotide
gtacttgtacggggtagggtcaagcattgcgtcctgggctatcaagtgggattacg

SEQ ID NO: 435037 - DNA, 57 bp, Artificial
  Synthetic oligonucleotide
gtacttgtgttgcggtaaacgaagaattcaacgactccaaattgatttctcagacca

SEQ ID NO: 435038 - DNA, 60 bp, Artificial
  Synthetic oligonucleotide
gtacttgttgtctgtactctatgacgcagtggtcgattttcatgcagctacggctgagcc

SEQ ID NO: 435039 - DNA, 50 bp, Artificial
  Synthetic oligonucleotide
gtactttaatgctggtaatgccttgaatcaggtgtaccaaataatgtatg

SEQ ID NO: 435040 - DNA, 50 bp, Artificial
  Synthetic oligonucleotide
gtactttatccggtacaagaccaactacggtgtgagtaacacgctaccag

SEQ ID NO: 435041 - DNA, 57 bp, Artificial
  Synthetic oligonucleotide
gtactttgacgggtacacccagcaaccagttgtaattatggatgatgttggacaaaa

SEQ ID NO: 435042 - DNA, 60 bp, Artificial
  Synthetic oligonucleotide
gtactttgcacagacgctattcatggcgaagacggtgtcgggtctcgacgtcaatgcaat

SEQ ID NO: 435043 - DNA, 55 bp, Artificial
  Synthetic oligonucleotide
gtactttgcccaacacattactttcatctgcagatgtgaaggcgatggacgcgtc

SEQ ID NO: 435044 - DNA, 60 bp, Artificial
  Synthetic oligonucleotide
gtactttgctagattggctgcaaactttttgccaatctttgtcttggctctctcaacaag

SEQ ID NO: 435045 - DNA, 60 bp, Artificial
  Synthetic oligonucleotide
gtactttgtcgaaacactagcaagaagcatttgcgagaagcttgagcagtccggactccc

SEQ ID NO: 435046 - DNA, 59 bp, Artificial
  Synthetic oligonucleotide
gtactttgtcgaaacactggcaaggagcatttgtgaaaaacttgagcaatctggacttc

SEQ ID NO: 435047 - DNA, 60 bp, Artificial
  Synthetic oligonucleotide
gtactttgttgaaacgctagctaggagcatatgtgagaagcttgaacagtctggacttcc

SEQ ID NO: 435048 - DNA, 60 bp, Artificial
  Synthetic oligonucleotide
gtactttgttgaacacttagcgaggagtatctgtgaggaacttgagcaatctggactccc

SEQ ID NO: 435049 - DNA, 55 bp, Artificial
  Synthetic oligonucleotide
gtactttgttgacgctcatggcactctgaatgttcgggtggaaaccatcaatgtc

SEQ ID NO: 435050 - DNA, 60 bp, Artificial
  Synthetic oligonucleotide
gtactttgttgagacactggcgagaagcatttgcgagaagcttgaacagtctgggctacc

SEQ ID NO: 435051 - DNA, 50 bp, Artificial
  Synthetic oligonucleotide
gtacttttaaagtgatgatggttacaaaggcaaaaggggtaaaacccctc

SEQ ID NO: 435052 - DNA, 55 bp, Artificial
  Synthetic oligonucleotide
gtacttttcgggaggtgcggggtccattttccttcagcttagatggcacaaggga

SEQ ID NO: 435053 - DNA, 55 bp, Artificial
  Synthetic oligonucleotide
gtagaaaaaatgctatcatacgcaaagcatactagagagtacgcagaattttact

SEQ ID NO: 435054 - DNA, 56 bp, Artificial
  Synthetic oligonucleotide
gtagaaaaagtgcttattgcagccaaaattatccctaattgtgggattattctggg

SEQ ID NO: 435055 - DNA, 55 bp, Artificial
  Synthetic oligonucleotide
gtagaaaactcggacggtcttaccaaaggtatgatcttctataacgaggctactg

SEQ ID NO: 435056 - DNA, 55 bp, Artificial
  Synthetic oligonucleotide
gtagaaaaggccaatgaaggagagaacaactgcttactgcaccctgtgagtctgc

SEQ ID NO: 435057 - DNA, 52 bp, Artificial
  Synthetic oligonucleotide
gtagaaaatacgtattcccccgattcgttgggatacgacctaatacgtgatt

SEQ ID NO: 435058 - DNA, 59 bp, Artificial
  Synthetic oligonucleotide
gtagaaaatgcacttcaatgagagattatttttgttacgcaattagtatgaataacctg

SEQ ID NO: 435059 - DNA, 59 bp, Artificial
  Synthetic oligonucleotide
gtagaaaggtggagttgttcacctacatgcgtttcgacgcagagttcacctttgttgca

SEQ ID NO: 435060 - DNA, 58 bp, Artificial
  Synthetic oligonucleotide
gtagaaataggagcaactgctgatgtgggtccagagacactaattgaaacaaggtatg

SEQ ID NO: 435061 - DNA, 57 bp, Artificial
  Synthetic oligonucleotide
gtagaaatcagaaacaagcgaccaactgatgagatagaacataagaaggaccttttg

SEQ ID NO: 435062 - DNA, 60 bp, Artificial
  Synthetic oligonucleotide
gtagaaattatgccgaagcgttcaatagatacagtgacgtcgttgccaatgtctataaca

SEQ ID NO: 435063 - DNA, 56 bp, Artificial
  Synthetic oligonucleotide
gtagaaattgaaccactaggaatagcacccaccagggcaaaaagacaagtggtgca

SEQ ID NO: 435064 - DNA, 60 bp, Artificial
  Synthetic oligonucleotide
gtagaaattgcaaataagactgtgatagatactgaacctttaaaatcatgtctgacagcc

SEQ ID NO: 435065 - DNA, 54 bp, Artificial
  Synthetic oligonucleotide
gtagaaccaaagttgacaggatctggattggaacgttggtgataggaatgtcag

SEQ ID NO: 435066 - DNA, 59 bp, Artificial
  Synthetic oligonucleotide
gtagaaccctctatagaactttcaatctggttcgcacacgtggcggccatccgctataa

SEQ ID NO: 435067 - DNA, 60 bp, Artificial
  Synthetic oligonucleotide
gtagaactacagctgcggagatgctcaaacatttcttgttttgtgcattgcaaggtcctt

SEQ ID NO: 435068 - DNA, 58 bp, Artificial
  Synthetic oligonucleotide
gtagaactattcgaaaacttgctaagaacacatgacaactttgaaaatgagtatagtc

SEQ ID NO: 435069 - DNA, 51 bp, Artificial
  Synthetic oligonucleotide
gtagaactcgacgtgatgtgtagaatgtgccgcgatgacagaggactagga

SEQ ID NO: 435070 - DNA, 60 bp, Artificial
  Synthetic oligonucleotide
gtagaactctgttggcaaaatctgtattcaacagcttgtacgcatctccacagctagaag

SEQ ID NO: 435071 - DNA, 52 bp, Artificial
  Synthetic oligonucleotide
gtagaacttcaaacaccaggtcgcgtagatgacatcgatcgtgggtttcctg

SEQ ID NO: 435072 - DNA, 56 bp, Artificial
  Synthetic oligonucleotide
gtagaagaagttgcagcagttctaatggaaaacaacggaagaggccccaaccaagc

SEQ ID NO: 435073 - DNA, 60 bp, Artificial
  Synthetic oligonucleotide
gtagaagaattgaagacaacattgcaagactttacctacaaacatctatatactgctcag

SEQ ID NO: 435074 - DNA, 60 bp, Artificial
  Synthetic oligonucleotide
gtagaagagaaggccttcagcccagaagtgatacccatgttttcagctttatcagaagga

SEQ ID NO: 435075 - DNA, 57 bp, Artificial
  Synthetic oligonucleotide
gtagaagagccctagaagaagcccaggcgacaggaaacggatcgatatactacaaac

SEQ ID NO: 435076 - DNA, 59 bp, Artificial
  Synthetic oligonucleotide
gtagaagagccgtccttcgagtatgactatgttctatcccttgacacggacgacaacga

SEQ ID NO: 435077 - DNA, 55 bp, Artificial
  Synthetic oligonucleotide
gtagaagaggccaccgaaggagagaacaactgcttgctacaccctctgaaccagc

SEQ ID NO: 435078 - DNA, 55 bp, Artificial
  Synthetic oligonucleotide
gtagaagatagatggaacgagccccagaagaccaagggccgcagagggaaccata

SEQ ID NO: 435079 - DNA, 55 bp, Artificial
  Synthetic oligonucleotide
gtagaagattggtttagagaatacgaaaattcaagaactagaccagtaccaacgc

SEQ ID NO: 435080 - DNA, 57 bp, Artificial
  Synthetic oligonucleotide
gtagaagcagcaatgggaatgagctatcaggacgcaccgaacaacgtgcgcagggac

SEQ ID NO: 435081 - DNA, 59 bp, Artificial
  Synthetic oligonucleotide
gtagaagccgtcgtctcaaagcacccaaacacctacgtgcgttatcatcgcggtatcca

SEQ ID NO: 435082 - DNA, 52 bp, Artificial
  Synthetic oligonucleotide
gtagaagcgcaactgcacgtgtgggttccccccctcaacgttcggggggggc

SEQ ID NO: 435083 - DNA, 60 bp, Artificial
  Synthetic oligonucleotide
gtagaagcgtggcatgctacagtccgctcaaaggttggaaagatcctgaaacaggtggta

SEQ ID NO: 435084 - DNA, 55 bp, Artificial
  Synthetic oligonucleotide
gtagaagctgtaaaggttatgtattaatggtgggccactatatacttgcaggcga

SEQ ID NO: 435085 - DNA, 59 bp, Artificial
  Synthetic oligonucleotide
gtagaaggaagaattcaggaccttgagaaatatgtcgaggacactaagatagacctatg

SEQ ID NO: 435086 - DNA, 57 bp, Artificial
  Synthetic oligonucleotide
gtagaaggagtattctcgatggtagttgtggttgatcggaaaccacatgttaaccca

SEQ ID NO: 435087 - DNA, 53 bp, Artificial
  Synthetic oligonucleotide
gtagaaggagtgttttcacttgtcatcgtagtggaccgtaaaccccacttggg

SEQ ID NO: 435088 - DNA, 55 bp, Artificial
  Synthetic oligonucleotide
gtagaaggcatgaccttggagctgaaattagaccatttaggtgtccaagaaggca

SEQ ID NO: 435089 - DNA, 52 bp, Artificial
  Synthetic oligonucleotide
gtagaataaactaggaattgaaatctgaactgtcaaacttaaacggaatttt

SEQ ID NO: 435090 - DNA, 60 bp, Artificial
  Synthetic oligonucleotide
gtagaataagctgacgcgagaccgcgtccagtaggtatcccttatgaactcacttatgaa

SEQ ID NO: 435091 - DNA, 60 bp, Artificial
  Synthetic oligonucleotide
gtagaatacctgaccagacgacgtgtatggatgcagaaaacgcagttgacggaggcaacc

SEQ ID NO: 435092 - DNA, 56 bp, Artificial
  Synthetic oligonucleotide
gtagaatctatgaataaagagctaaagaagatcataggacaggtaagagagcaagc

SEQ ID NO: 435093 - DNA, 55 bp, Artificial
  Synthetic oligonucleotide
gtagaatgtaccatcgggttctggggtagttgataccatcggcatgcactgacgg

SEQ ID NO: 435094 - DNA, 55 bp, Artificial
  Synthetic oligonucleotide
gtagaatgtacgcactgcaccaagggacaaccattagaaacaagcactcaaacgg

SEQ ID NO: 435095 - DNA, 60 bp, Artificial
  Synthetic oligonucleotide
gtagaatgtgttggatggtccagcacttcatgccatgacggcatctcaagaatgtcaatc

SEQ ID NO: 435096 - DNA, 60 bp, Artificial
  Synthetic oligonucleotide
gtagaattaaaacgatcagcgcggcagcaggcatagatagtgatggacatctagcagcga

SEQ ID NO: 435097 - DNA, 59 bp, Artificial
  Synthetic oligonucleotide
gtagaatttttcaagtttgtaagacatgtcaacaatgaattacagtagaccaaatgcaa

SEQ ID NO: 435098 - DNA, 56 bp, Artificial
  Synthetic oligonucleotide
gtagacaaattaacccaggggagacagacttttgattggacagtatgtagaaacca

SEQ ID NO: 435099 - DNA, 55 bp, Artificial
  Synthetic oligonucleotide
gtagacaacactataatggttgttctggcaatgcactacgctatggagagagaga

SEQ ID NO: 435100 - DNA, 60 bp, Artificial
  Synthetic oligonucleotide
gtagacaatgtatgtatggacgaaatggttagagaatcacaaagaaatggaattgcacca

SEQ ID NO: 435101 - DNA, 55 bp, Artificial
  Synthetic oligonucleotide
gtagacaatgtgagaaggtcataaatgattttgtgagagatatgtcgtctggtga

SEQ ID NO: 435102 - DNA, 55 bp, Artificial
  Synthetic oligonucleotide
gtagacacatatcaatgtttcatgaacgtaataattacacgtcgacaccgtacac

SEQ ID NO: 435103 - DNA, 60 bp, Artificial
  Synthetic oligonucleotide
gtagacaccaatagcaaatgggccattattggccgtgatatcctccagaaatgccagagt

SEQ ID NO: 435104 - DNA, 55 bp, Artificial
  Synthetic oligonucleotide
gtagacactgcaacatctttagcttgaatagtctgtaaacggattggatactggg

SEQ ID NO: 435105 - DNA, 58 bp, Artificial
  Synthetic oligonucleotide
gtagacactgctacgtttgttcggcttcatcatgagctcctttgtgctcacgaaggac

SEQ ID NO: 435106 - DNA, 60 bp, Artificial
  Synthetic oligonucleotide
gtagacacttgataccagttggatgtgaggctctgttcgtttcttcgaatttctgccgca

SEQ ID NO: 435107 - DNA, 55 bp, Artificial
  Synthetic oligonucleotide
gtagacagctgcaaggggctccgttcaatgtaagccctacgctacagatgagagg

SEQ ID NO: 435108 - DNA, 59 bp, Artificial
  Synthetic oligonucleotide
gtagacaggatgaagattagaacatggaatagtctggtaaagcaccacatgtatgtttc

SEQ ID NO: 435109 - DNA, 60 bp, Artificial
  Synthetic oligonucleotide
gtagacatgcgacatctttcgttgatgcagaggagattcccagatgtcctaattcaagca

SEQ ID NO: 435110 - DNA, 55 bp, Artificial
  Synthetic oligonucleotide
gtagacatggtggttatgtctggattagacagccccgtgaaaatggccaatacgg

SEQ ID NO: 435111 - DNA, 60 bp, Artificial
  Synthetic oligonucleotide
gtagacattaccacacaatactcttgtggaggtgagagtagaccactcagagtgaagggt

SEQ ID NO: 435112 - DNA, 58 bp, Artificial
  Synthetic oligonucleotide
gtagacattaccggttcatttgtgcataacatgcgtaaatgaactttcaggtttggac

SEQ ID NO: 435113 - DNA, 60 bp, Artificial
  Synthetic oligonucleotide
gtagacattactatggctttctcatacagaacgccacaggaagagctcttgaacaggtta

SEQ ID NO: 435114 - DNA, 55 bp, Artificial
  Synthetic oligonucleotide
gtagaccctattggttgtgaaacggcgcctgcggaagtgcctacgtcgcctgcgg

SEQ ID NO: 435115 - DNA, 55 bp, Artificial
  Synthetic oligonucleotide
gtagaccggaagatatgattacacctaaacgagctagagttcaaaataagcaact

SEQ ID NO: 435116 - DNA, 58 bp, Artificial
  Synthetic oligonucleotide
gtagacctcgtctcagacggcaagaaggttgggtcgtccaccgctgatacgcggtata

SEQ ID NO: 435117 - DNA, 52 bp, Artificial
  Synthetic oligonucleotide
gtagaccttttcatgtttaacgagttattggctttggtcaacccaagaaacg

SEQ ID NO: 435118 - DNA, 60 bp, Artificial
  Synthetic oligonucleotide
gtagacgaagacgacgagattgcgcgtcgtcacgacttggcatacgctaacgctacatct

SEQ ID NO: 435119 - DNA, 55 bp, Artificial
  Synthetic oligonucleotide
gtagacgacagggattgtctaaaagcaagaagaatatgtaatgcacctaaagggc

SEQ ID NO: 435120 - DNA, 55 bp, Artificial
  Synthetic oligonucleotide
gtagacgaccacagagccctctctaggagccaatagttggaggacgtcgctcacg

SEQ ID NO: 435121 - DNA, 59 bp, Artificial
  Synthetic oligonucleotide
gtagacgcgaatagaatatgttctagtgacccatttaatttcgagagtgctggtttagc

SEQ ID NO: 435122 - DNA, 57 bp, Artificial
  Synthetic oligonucleotide
gtagacgctttgtccaaaatgccctaaatgggaatggagacccgaataacatggata

SEQ ID NO: 435123 - DNA, 57 bp, Artificial
  Synthetic oligonucleotide
gtagacgctttgtccaaaatgcccttaatgggaatggggatccaaataacatggaca

SEQ ID NO: 435124 - DNA, 55 bp, Artificial
  Synthetic oligonucleotide
gtagacgctttgtccaaaatgccttaaacgggaacggagatccaaacaacatgga

SEQ ID NO: 435125 - DNA, 57 bp, Artificial
  Synthetic oligonucleotide
gtagacgctttgtccagaatgccctcaacgggaacggtgacccaaacaacatggaca

SEQ ID NO: 435126 - DNA, 60 bp, Artificial
  Synthetic oligonucleotide
gtagacgctttgtccagaatgctcttaatgggaatggagatccaaacaacatggataggg

SEQ ID NO: 435127 - DNA, 60 bp, Artificial
  Synthetic oligonucleotide
gtagacgctttgttcaaaatgcccttaatgggaatggagatccgagcaacatggacagag

SEQ ID NO: 435128 - DNA, 59 bp, Artificial
  Synthetic oligonucleotide
gtagacggattacgagacttgacaacaacggaacgccaacacaatgcctatggagatcc

SEQ ID NO: 435129 - DNA, 57 bp, Artificial
  Synthetic oligonucleotide
gtagacgggcggctgtgtcaacattggagacaaaactcggggaacttaagaggcagc

SEQ ID NO: 435130 - DNA, 50 bp, Artificial
  Synthetic oligonucleotide
gtagacgggtgcagttggcaccgcggagggtacagcgggcagagcgggtg

SEQ ID NO: 435131 - DNA, 53 bp, Artificial
  Synthetic oligonucleotide
gtagacggtaagctcccaggggatccgaaactgtaccttaaagtaggacgtca

SEQ ID NO: 435132 - DNA, 55 bp, Artificial
  Synthetic oligonucleotide
gtagacggtttgtccagaatgcccttaatgggaatggggaccccaacaacatgga

SEQ ID NO: 435133 - DNA, 60 bp, Artificial
  Synthetic oligonucleotide
gtagacgtaaagttgaggccgatcgtgtggaagcggcaagagtcaaaaaggcagctgatg

SEQ ID NO: 435134 - DNA, 55 bp, Artificial
  Synthetic oligonucleotide
gtagacgtgagcaatagcaatagccggtatatcattcattgttagataaggcgtc

SEQ ID NO: 435135 - DNA, 58 bp, Artificial
  Synthetic oligonucleotide
gtagacgtggatcgaattacattcaagcacgtggaaactcacggaccccattattcaa

SEQ ID NO: 435136 - DNA, 57 bp, Artificial
  Synthetic oligonucleotide
gtagacgttttgttcagaatgccctaaatgggaatggagacccaaacaacatggaca

SEQ ID NO: 435137 - DNA, 60 bp, Artificial
  Synthetic oligonucleotide
gtagactaaactacccgcgagcaaacgattcaatgctgtcaaggaacaagagagtgcttg

SEQ ID NO: 435138 - DNA, 55 bp, Artificial
  Synthetic oligonucleotide
gtagactagcgattcctcggtctgcgcttcgcccattcctaggaggagcgccaac

SEQ ID NO: 435139 - DNA, 59 bp, Artificial
  Synthetic oligonucleotide
gtagactatatagatactatagttaatgcgatgtctaaacgtgcaacgtcattagatgc

SEQ ID NO: 435140 - DNA, 56 bp, Artificial
  Synthetic oligonucleotide
gtagactcctgaggggaaccaaagcactaacagaagtaataccactaacagaagaa

SEQ ID NO: 435141 - DNA, 59 bp, Artificial
  Synthetic oligonucleotide
gtagactcgtgggttgaagtccagatgtccactaagatagttatgtgggcctaaggcac

SEQ ID NO: 435142 - DNA, 60 bp, Artificial
  Synthetic oligonucleotide
gtagacttcacagaagtgaagcctggccggtatggaaacaggtatctgctggtattcata

SEQ ID NO: 435143 - DNA, 55 bp, Artificial
  Synthetic oligonucleotide
gtagacttcaggaatggctcagtgttgacagctagtgacctgaccactgcagagc

SEQ ID NO: 435144 - DNA, 60 bp, Artificial
  Synthetic oligonucleotide
gtagacttcggatcaacaagagaatgcacagtctggttaagactcctgagtctctgcaag

SEQ ID NO: 435145 - DNA, 55 bp, Artificial
  Synthetic oligonucleotide
gtagacttgttcacatcgtaaaagcatacgagatctttggcaatcgtgctaaggc

SEQ ID NO: 435146 - DNA, 56 bp, Artificial
  Synthetic oligonucleotide
gtagactttatagtacagataaatactcaacctccttttttagacacgcacctcac

SEQ ID NO: 435147 - DNA, 60 bp, Artificial
  Synthetic oligonucleotide
gtagactttgaggattgcaaggacgttagcgatctaaaacagtatgatagtgatgagcca

SEQ ID NO: 435148 - DNA, 54 bp, Artificial
  Synthetic oligonucleotide
gtagacttttgtagaggcgtcccatgcagccagagtcgagagaggcgggtacgc

SEQ ID NO: 435149 - DNA, 60 bp, Artificial
  Synthetic oligonucleotide
gtagagaactaataatacgattaagagttgctaatcaggtgaggatccagctagctgata

SEQ ID NO: 435150 - DNA, 60 bp, Artificial
  Synthetic oligonucleotide
gtagagacaagataacaacgttgggaaagtttggacagcaatcaggcgccatatatgtgg

SEQ ID NO: 435151 - DNA, 58 bp, Artificial
  Synthetic oligonucleotide
gtagagacggttgtacagatgttcccgaacttcaagcaggagattcaagctaatttcg

SEQ ID NO: 435152 - DNA, 55 bp, Artificial
  Synthetic oligonucleotide
gtagagagaagcgggagtttctctctctagaatggaatcgggtgctctacaaacc

SEQ ID NO: 435153 - DNA, 55 bp, Artificial
  Synthetic oligonucleotide
gtagagagcatatgggccaattctcatgtgctactcaatccagacgctcttaacg

SEQ ID NO: 435154 - DNA, 60 bp, Artificial
  Synthetic oligonucleotide
gtagagagcctagagacaaccatgaggtctccggtgttcacagacaactcctccccacca

SEQ ID NO: 435155 - DNA, 55 bp, Artificial
  Synthetic oligonucleotide
gtagagaggcaagcatgtgtgaagtaactaggagagttggtagagtaaccggtag

SEQ ID NO: 435156 - DNA, 59 bp, Artificial
  Synthetic oligonucleotide
gtagagaggctcatatttggccaagagagtgcgaagagagtccaaggcgtactgtggtt

SEQ ID NO: 435157 - DNA, 55 bp, Artificial
  Synthetic oligonucleotide
gtagagagtggaactcagattcgtaatagtcataaggaagggctgtcaacatcct

SEQ ID NO: 435158 - DNA, 58 bp, Artificial
  Synthetic oligonucleotide
gtagagatacaggagtacaccacgggcacagtccctgggattgaagtctccggggcta

SEQ ID NO: 435159 - DNA, 60 bp, Artificial
  Synthetic oligonucleotide
gtagagatctaaggctgatggctaatgcaatcaactcagctgtccccattgactgggtcc

SEQ ID NO: 435160 - DNA, 55 bp, Artificial
  Synthetic oligonucleotide
gtagagatgtgtatactcaatttgaaaagaggatacgtagtgtcagcgctggtcg

SEQ ID NO: 435161 - DNA, 60 bp, Artificial
  Synthetic oligonucleotide
gtagagattctcttgttgacattttaaaagagcgtggattactatctgagtccgatgctg

SEQ ID NO: 435162 - DNA, 58 bp, Artificial
  Synthetic oligonucleotide
gtagagcaaggatcaaaaccaggctatttaccataagacaagaaatggccagtagagg

SEQ ID NO: 435163 - DNA, 59 bp, Artificial
  Synthetic oligonucleotide
gtagagcaatctggtacatgtggttgggcagccgattcctagagtttgaggccctgggg

SEQ ID NO: 435164 - DNA, 51 bp, Artificial
  Synthetic oligonucleotide
gtagagcaatctgtatcatggcaacatttgaaggcagaacctgaatgtcct

SEQ ID NO: 435165 - DNA, 50 bp, Artificial
  Synthetic oligonucleotide
gtagagcatacgtaacgaaatctgacgattgctccacagatcacgctctg

SEQ ID NO: 435166 - DNA, 54 bp, Artificial
  Synthetic oligonucleotide
gtagagccaacaacttaaatgttgacttgaacccaagtggtaccttaggtggac

SEQ ID NO: 435167 - DNA, 57 bp, Artificial
  Synthetic oligonucleotide
gtagagccagtaccaagcacccccccagtcagaactagtgtcagctggtcacagcac

SEQ ID NO: 435168 - DNA, 60 bp, Artificial
  Synthetic oligonucleotide
gtagagccataatgaagcgcgctgacttccgacttgtaatgcatgagacggatgaggttc

SEQ ID NO: 435169 - DNA, 55 bp, Artificial
  Synthetic oligonucleotide
gtagagccattaaggcgttaggaggacatactattactaagtgggagaccagttg

SEQ ID NO: 435170 - DNA, 56 bp, Artificial
  Synthetic oligonucleotide
gtagagccgtaccgatgggaggggatgctaggagttgggggagaccgaagcgagga

SEQ ID NO: 435171 - DNA, 55 bp, Artificial
  Synthetic oligonucleotide
gtagagcggagcaatgctttcagcaattgttacccttatgatgtaccagactatg

SEQ ID NO: 435172 - DNA, 58 bp, Artificial
  Synthetic oligonucleotide
gtagagctacaatacgaggttacatccaaagaattactgggaaataggctctggcttc

SEQ ID NO: 435173 - DNA, 60 bp, Artificial
  Synthetic oligonucleotide
gtagagctccacgcaatcacccagtgctggctgctcttcgtgaggttatgaggcaggagt

SEQ ID NO: 435174 - DNA, 55 bp, Artificial
  Synthetic oligonucleotide
gtagaggaagacgaggagccggaagtggaggaagtggaggaaacggacaagccga

SEQ ID NO: 435175 - DNA, 55 bp, Artificial
  Synthetic oligonucleotide
gtagaggaagccaataatggagagaacaacagtttattacatcccatctgccagc

SEQ ID NO: 435176 - DNA, 59 bp, Artificial
  Synthetic oligonucleotide
gtagaggaagcgattagacaacaacaaatcacttattgcgattatcaacggtcatgggg

SEQ ID NO: 435177 - DNA, 55 bp, Artificial
  Synthetic oligonucleotide
gtagaggactatttggtgccatagctggattcatcgagggaggttggccagggct

SEQ ID NO: 435178 - DNA, 50 bp, Artificial
  Synthetic oligonucleotide
gtagaggagatcagttcactgtgaccccccatgtgttgacatttgcgccc

SEQ ID NO: 435179 - DNA, 55 bp, Artificial
  Synthetic oligonucleotide
gtagaggatagatggaacaattcccagaagaccagggaccacagagggaaccata

SEQ ID NO: 435180 - DNA, 60 bp, Artificial
  Synthetic oligonucleotide
gtagaggcttcgggtcaggaatcatcgtctcaaatgcatcgatggatgagtgtgacgcga

SEQ ID NO: 435181 - DNA, 59 bp, Artificial
  Synthetic oligonucleotide
gtagagggcgctccatatacgcctgtagagcacgttgtgtttaacccttctagtcgtga

SEQ ID NO: 435182 - DNA, 55 bp, Artificial
  Synthetic oligonucleotide
gtagaggtgcccggagtggggcttggagatctagattcatcagagggaagggtgg

SEQ ID NO: 435183 - DNA, 57 bp, Artificial
  Synthetic oligonucleotide
gtagaggtggaccactaaatgtaggtactgcaggtcatcctttatttaacaaagctc

SEQ ID NO: 435184 - DNA, 60 bp, Artificial
  Synthetic oligonucleotide
gtagaggttgtggaagacggcagtcatgttatagaccactgtagtccgcgcacacaacta

SEQ ID NO: 435185 - DNA, 60 bp, Artificial
  Synthetic oligonucleotide
gtagagtaagcctaaatctgtgagcgcttgcacaacatcattgagtggtgtttgtgactg

SEQ ID NO: 435186 - DNA, 54 bp, Artificial
  Synthetic oligonucleotide
gtagagtaagtttcaaattaaagctcaatgactaaaattcaaggccgtgggtgt

SEQ ID NO: 435187 - DNA, 60 bp, Artificial
  Synthetic oligonucleotide
gtagagtaggcagtatcactacaaatagaagcagagattgtaacgcagtaaccaattcta

SEQ ID NO: 435188 - DNA, 60 bp, Artificial
  Synthetic oligonucleotide
gtagagtatagccagttaatgagtcagcttaaaacacatattcatgaagatgaattgaat

SEQ ID NO: 435189 - DNA, 60 bp, Artificial
  Synthetic oligonucleotide
gtagagtccgcggtgaggactacgcccatctcaaacatctctgcaacccatgcattgact

SEQ ID NO: 435190 - DNA, 55 bp, Artificial
  Synthetic oligonucleotide
gtagagtctatcaggtcgagagtcataattaatggggtcacagctaggtctgagt

SEQ ID NO: 435191 - DNA, 53 bp, Artificial
  Synthetic oligonucleotide
gtagagtgggcgttggagggtgacgaagattgcattttttaccgcccagtttt

SEQ ID NO: 435192 - DNA, 56 bp, Artificial
  Synthetic oligonucleotide
gtagagttttcaaaagcgtaactttaacatgggattcgaaatgtaatctgccaagc

SEQ ID NO: 435193 - DNA, 55 bp, Artificial
  Synthetic oligonucleotide
gtagataacaagagattggaagcggttaagattggcaatgcacttgtgttatggg

SEQ ID NO: 435194 - DNA, 58 bp, Artificial
  Synthetic oligonucleotide
gtagatacggagtggttctcgtggacgccttatgatgcgtctgggccccttggtggta

SEQ ID NO: 435195 - DNA, 60 bp, Artificial
  Synthetic oligonucleotide
gtagatactggcgtcgttaaagaaggggcatctgcaggtacttcctgcataggagcagtc

SEQ ID NO: 435196 - DNA, 51 bp, Artificial
  Synthetic oligonucleotide
gtagatagagagcaagcatctacagaaattgcagtagaaaatgtcaaatct

SEQ ID NO: 435197 - DNA, 52 bp, Artificial
  Synthetic oligonucleotide
gtagatagatatgggcaattcaagttctgggatgttgacatctcggatcgtc

SEQ ID NO: 435198 - DNA, 55 bp, Artificial
  Synthetic oligonucleotide
gtagataggttgcccagagccttgagcaacaaagcgctaactagtgctattggga

SEQ ID NO: 435199 - DNA, 60 bp, Artificial
  Synthetic oligonucleotide
gtagatatggttaggagtatgggagtggtaactgttagaacatttgactcatatagaatg

SEQ ID NO: 435200 - DNA, 60 bp, Artificial
  Synthetic oligonucleotide
gtagatattatgaacacgccccgatagagttgatttacgcatgcagatcagcaaaggaat

SEQ ID NO: 435201 - DNA, 60 bp, Artificial
  Synthetic oligonucleotide
gtagatcaacacgacgacgtctgttccccttcttggcatgcctgtgctgcactttgattg

SEQ ID NO: 435202 - DNA, 53 bp, Artificial
  Synthetic oligonucleotide
gtagatcagcaacccattaaatcatatctctcgacatcgggctcttgtaagtc

SEQ ID NO: 435203 - DNA, 55 bp, Artificial
  Synthetic oligonucleotide
gtagatcagctctatgggctaatgtgagtatgacaagtggttatgcaacttggtc

SEQ ID NO: 435204 - DNA, 56 bp, Artificial
  Synthetic oligonucleotide
gtagatcagtctgtaggactgtcggtaaccgtgcaggggctttcccgtctacgctt

SEQ ID NO: 435205 - DNA, 60 bp, Artificial
  Synthetic oligonucleotide
gtagatctacatccataagatcagtaggtagtaacacaacaatgcgaattagtactgcta

SEQ ID NO: 435206 - DNA, 60 bp, Artificial
  Synthetic oligonucleotide
gtagatgaatactccagcacagagagagtagtggtgagcattgaccgttttttaagagtt

SEQ ID NO: 435207 - DNA, 60 bp, Artificial
  Synthetic oligonucleotide
gtagatgaatactccagtactgagagggtggtagtgagtattgatcgcttcttgcgggtt

SEQ ID NO: 435208 - DNA, 55 bp, Artificial
  Synthetic oligonucleotide
gtagatgaatcatcaatgatttctacaggattcaactctagatctgcttctgcca

SEQ ID NO: 435209 - DNA, 55 bp, Artificial
  Synthetic oligonucleotide
gtagatgagagagagattttggaatacttcaatcgctttctagacttagagttgg

SEQ ID NO: 435210 - DNA, 50 bp, Artificial
  Synthetic oligonucleotide
gtagatgctttcttgataatgaaccgcacttactgagaatgagaacgttc

SEQ ID NO: 435211 - DNA, 60 bp, Artificial
  Synthetic oligonucleotide
gtagatggaatggagcagtctgacccacagacatggggttgttgaagaattctgctgctc

SEQ ID NO: 435212 - DNA, 60 bp, Artificial
  Synthetic oligonucleotide
gtagatggccatttccaccggatcatttggtgttccttcaatgtcaatccatgtggtagc

SEQ ID NO: 435213 - DNA, 55 bp, Artificial
  Synthetic oligonucleotide
gtagatgggtccatgtatagaaacatggctctaacgggaattaataccataagcc

SEQ ID NO: 435214 - DNA, 56 bp, Artificial
  Synthetic oligonucleotide
gtagatgggtggtatggctatcatcatcagaatgagcaaggatctggctatgctgc

SEQ ID NO: 435215 - DNA, 57 bp, Artificial
  Synthetic oligonucleotide
gtagatggtgcatgctctgatatgcccacggcaacgatgtgcgcttttgaggtgaac

SEQ ID NO: 435216 - DNA, 55 bp, Artificial
  Synthetic oligonucleotide
gtagatggttcggaattgacagggtcatgccgccatgtgaacgtggcggagttac

SEQ ID NO: 435217 - DNA, 60 bp, Artificial
  Synthetic oligonucleotide
gtagatgtgcatgcattgggtcattggtttgatggccgccttaatcttaagacatccttt

SEQ ID NO: 435218 - DNA, 55 bp, Artificial
  Synthetic oligonucleotide
gtagatgttaggcaactggaacctgtgttgatccctttgcccgatgttaggaata

SEQ ID NO: 435219 - DNA, 59 bp, Artificial
  Synthetic oligonucleotide
gtagattatggtatgcctgaattgatcacttccaagattttcttttcttggtatcgatc

SEQ ID NO: 435220 - DNA, 60 bp, Artificial
  Synthetic oligonucleotide
gtagattcacaaacgaagaatcactgaggcagatccttcgaagatcaggaggaattggta

SEQ ID NO: 435221 - DNA, 55 bp, Artificial
  Synthetic oligonucleotide
gtagattcatcggactgcgcgttgaatcatctgtgttgagagtccgaaacccaac

SEQ ID NO: 435222 - DNA, 55 bp, Artificial
  Synthetic oligonucleotide
gtagattcgaaccctttcgttggggtgacattggggattacagtagatgctttcg

SEQ ID NO: 435223 - DNA, 60 bp, Artificial
  Synthetic oligonucleotide
gtagatttaggcgctgtatacaatatatcagctacgcatctaatatcagatttagtgcag

SEQ ID NO: 435224 - DNA, 55 bp, Artificial
  Synthetic oligonucleotide
gtagatttaggttctacttctcctgtgacgattaattctcttcgtgaagctttcc

SEQ ID NO: 435225 - DNA, 55 bp, Artificial
  Synthetic oligonucleotide
gtagattttctagtctactgttctgcgcctgaaattgaacaggcacggagggccc

SEQ ID NO: 435226 - DNA, 56 bp, Artificial
  Synthetic oligonucleotide
gtagattttttgtaggtttagtgtggtgtatgttgcttgttttagagctaattgta

SEQ ID NO: 435227 - DNA, 50 bp, Artificial
  Synthetic oligonucleotide
gtagcaaagttagcccaaccattgaacccctcaggcacaccgcgaagagt

SEQ ID NO: 435228 - DNA, 56 bp, Artificial
  Synthetic oligonucleotide
gtagcaaatgtactaaacaatgtagatactgcatcaaagatagatttcctggcagg

SEQ ID NO: 435229 - DNA, 55 bp, Artificial
  Synthetic oligonucleotide
gtagcaacggcttgtaatatactggctacatttcatccagacacccgaagatcgg

SEQ ID NO: 435230 - DNA, 55 bp, Artificial
  Synthetic oligonucleotide
gtagcaagacagatagtaaactcatgtgcccaatgccaacagaaaggagaagcca

SEQ ID NO: 435231 - DNA, 58 bp, Artificial
  Synthetic oligonucleotide
gtagcaagagttaggcagggatattctcccctctcgttgcagacccttatcccaacga

SEQ ID NO: 435232 - DNA, 60 bp, Artificial
  Synthetic oligonucleotide
gtagcaagctactggcgcttcactttcattccgacggacctgcatacgcgcacgcttcgg

SEQ ID NO: 435233 - DNA, 53 bp, Artificial
  Synthetic oligonucleotide
gtagcaagtccgcttgcgacgttccgccgagttgccccgatggacacaaccgc

SEQ ID NO: 435234 - DNA, 59 bp, Artificial
  Synthetic oligonucleotide
gtagcaatggcaactgaactttgtaaagactgtcataaacccagtaacttcagcaggtg

SEQ ID NO: 435235 - DNA, 60 bp, Artificial
  Synthetic oligonucleotide
gtagcaatgtggagactggtaagagtggagtctgcactggtgatcacatattttgtcaga

SEQ ID NO: 435236 - DNA, 60 bp, Artificial
  Synthetic oligonucleotide
gtagcacacccataccagggtctcgcccagtggcacgcctaggattatatagtcgcacaa

SEQ ID NO: 435237 - DNA, 60 bp, Artificial
  Synthetic oligonucleotide
gtagcacagcacatttggagcgcatggaatcaattccagacacctgtagccataggattt

SEQ ID NO: 435238 - DNA, 55 bp, Artificial
  Synthetic oligonucleotide
gtagcacaggatttcgagcccgcgaactggtccaaatcatcaccagttcacctgc

SEQ ID NO: 435239 - DNA, 59 bp, Artificial
  Synthetic oligonucleotide
gtagcacccagagggaggaagccacacggagttgacagagaaatcacctccagaggacc

SEQ ID NO: 435240 - DNA, 55 bp, Artificial
  Synthetic oligonucleotide
gtagcaccggctggagttcatgccagagatttactgctagaggatgcagagacca

SEQ ID NO: 435241 - DNA, 56 bp, Artificial
  Synthetic oligonucleotide
gtagcacctcagggtcacgaaacgctggacgtaacggcggaacagattattgaggt

SEQ ID NO: 435242 - DNA, 60 bp, Artificial
  Synthetic oligonucleotide
gtagcactacgacagatgtcttgtgccgctggtactacacaaacagcttgtactgatgac

SEQ ID NO: 435243 - DNA, 52 bp, Artificial
  Synthetic oligonucleotide
gtagcactccgcacctgtgaatattacgggttagtgtgcaattacaaactag

SEQ ID NO: 435244 - DNA, 60 bp, Artificial
  Synthetic oligonucleotide
gtagcactcgcacaaaagggatgggtcgcaagtcgagaaatttcatacacttgtatggag

SEQ ID NO: 435245 - DNA, 52 bp, Artificial
  Synthetic oligonucleotide
gtagcagacgaagcttacaggcgcgaaccaacttttgtatgactggtcgtgc

SEQ ID NO: 435246 - DNA, 60 bp, Artificial
  Synthetic oligonucleotide
gtagcagatgacagttcgcctgatagagttcgtgctaaagctgatcagataatggttgca

SEQ ID NO: 435247 - DNA, 59 bp, Artificial
  Synthetic oligonucleotide
gtagcagcaactgcagggatcctaatgaagagaggggaaacccaggagtgaaaggatgg

SEQ ID NO: 435248 - DNA, 55 bp, Artificial
  Synthetic oligonucleotide
gtagcagccagtggtgacgacagtctcattggttctctacaaccgttgcctcggg

SEQ ID NO: 435249 - DNA, 51 bp, Artificial
  Synthetic oligonucleotide
gtagcagcggcactcagcaccgtttgacgtacaaagacggcactagctggc

SEQ ID NO: 435250 - DNA, 55 bp, Artificial
  Synthetic oligonucleotide
gtagcaggtagagcctgggtgttccctgctagactctcaccagcacttggccggt

SEQ ID NO: 435251 - DNA, 55 bp, Artificial
  Synthetic oligonucleotide
gtagcaggtccccgcctttacagtagggcctaccaacaagtgtcagtggctaacc

SEQ ID NO: 435252 - DNA, 55 bp, Artificial
  Synthetic oligonucleotide
gtagcaggtcccgtccttacgctttcatcacctgtggtggtgacgtttggaacag

SEQ ID NO: 435253 - DNA, 55 bp, Artificial
  Synthetic oligonucleotide
gtagcaggtcttgtgtcacatgagggactgtattatatgcacgaaggagagaaac

SEQ ID NO: 435254 - DNA, 60 bp, Artificial
  Synthetic oligonucleotide
gtagcagtcatacaggtaggcggcgcgaacattttagacatcacagctgatccaacaact

SEQ ID NO: 435255 - DNA, 60 bp, Artificial
  Synthetic oligonucleotide
gtagcagttacatccggccatcatcttatatggggtggtaataggccggtgtcgcagtca

SEQ ID NO: 435256 - DNA, 60 bp, Artificial
  Synthetic oligonucleotide
gtagcagttgcttcgatgggaaggagtggatgcatgtttgcatgacagggaacgacaatg

SEQ ID NO: 435257 - DNA, 60 bp, Artificial
  Synthetic oligonucleotide
gtagcagttgtacttgctacgaggaccgattacggtgcagttctatagctcctggggcta

SEQ ID NO: 435258 - DNA, 60 bp, Artificial
  Synthetic oligonucleotide
gtagcataatttccagcatgtataagatcatggataatggtgatcaatgttttctctgga

SEQ ID NO: 435259 - DNA, 55 bp, Artificial
  Synthetic oligonucleotide
gtagcatagtgggatggcctgaaattagggaacggataagacaaacccctgtagc

SEQ ID NO: 435260 - DNA, 55 bp, Artificial
  Synthetic oligonucleotide
gtagcatagttggatggcctgctgtaagggagagaataagacgaactgagccagc

SEQ ID NO: 435261 - DNA, 55 bp, Artificial
  Synthetic oligonucleotide
gtagcatatatgctggagagagaactggtccgcaaaaccagattcttaccagtag

SEQ ID NO: 435262 - DNA, 55 bp, Artificial
  Synthetic oligonucleotide
gtagcatatctgccgaagatcctattgaattagaactgctaggtcagcattcagg

SEQ ID NO: 435263 - DNA, 51 bp, Artificial
  Synthetic oligonucleotide
gtagcatctgcgatagtcaacactcttgacgtatctaagtgtataacaccc

SEQ ID NO: 435264 - DNA, 56 bp, Artificial
  Synthetic oligonucleotide
gtagcatgacaaaaatattagagccttttagggcacaaaacccagaaatagtcatc

SEQ ID NO: 435265 - DNA, 60 bp, Artificial
  Synthetic oligonucleotide
gtagcatgacaagaatcttagagccctttagagcaaataatccagaaatggtgatctacc

SEQ ID NO: 435266 - DNA, 55 bp, Artificial
  Synthetic oligonucleotide
gtagcatggtagtttacaaaacgaatgataatgtagtagaattgggcccagatgt

SEQ ID NO: 435267 - DNA, 55 bp, Artificial
  Synthetic oligonucleotide
gtagcattactaaagacccttttgcagacttgcaggcaaagtgtgctgaccgaat

SEQ ID NO: 435268 - DNA, 57 bp, Artificial
  Synthetic oligonucleotide
gtagcattagcgagttttatgccatacgtcttttggtgaaaggagtttatagacctc

SEQ ID NO: 435269 - DNA, 55 bp, Artificial
  Synthetic oligonucleotide
gtagcattcacgttagagtttgcctgtacgtgggttcggccaatctcgatgctcg

SEQ ID NO: 435270 - DNA, 59 bp, Artificial
  Synthetic oligonucleotide
gtagcattcgtacatatatcgtagtcgtcccctatacgtatatcaattactggggcttc

SEQ ID NO: 435271 - DNA, 55 bp, Artificial
  Synthetic oligonucleotide
gtagcattgataagactcagatttacaaccttatcacaccttatggtcggaagtc

SEQ ID NO: 435272 - DNA, 54 bp, Artificial
  Synthetic oligonucleotide
gtagccaacgggtcgtacacgcaattcaagcgtggactcgaaaagtacggcgac

SEQ ID NO: 435273 - DNA, 57 bp, Artificial
  Synthetic oligonucleotide
gtagccaacttagcaaagaatcagttagtaggaccctttattggaggatatgagtat

SEQ ID NO: 435274 - DNA, 55 bp, Artificial
  Synthetic oligonucleotide
gtagccaagctagtggtcattggctcgtatcccgaagtgcacgagccgcgtgtgg

SEQ ID NO: 435275 - DNA, 55 bp, Artificial
  Synthetic oligonucleotide
gtagccacagcggtaaagtctcaacctgacattaaagacctgtggctccgtgcgc

SEQ ID NO: 435276 - DNA, 55 bp, Artificial
  Synthetic oligonucleotide
gtagccaccttacaaacaggagaagctaccaaacatgttattgcccatctactac

SEQ ID NO: 435277 - DNA, 54 bp, Artificial
  Synthetic oligonucleotide
gtagccacgttacacccacggggaggcgtccctctatggtgtataaattgaaac

SEQ ID NO: 435278 - DNA, 58 bp, Artificial
  Synthetic oligonucleotide
gtagccacttgtttagcagccaaaatcaattctagtgttttttcacgcgtgcgaaatg

SEQ ID NO: 435279 - DNA, 54 bp, Artificial
  Synthetic oligonucleotide
gtagccagtctacccaccagtataatcccatggcactccagttcgttcttcata

SEQ ID NO: 435280 - DNA, 55 bp, Artificial
  Synthetic oligonucleotide
gtagccatagtgctaggaggagtaaacgaaggttcacgcactgcactgtccgttg

SEQ ID NO: 435281 - DNA, 55 bp, Artificial
  Synthetic oligonucleotide
gtagccatcatgctggtctccacggaggaccaccgttcacgagtacatgtagcgc

SEQ ID NO: 435282 - DNA, 60 bp, Artificial
  Synthetic oligonucleotide
gtagccatgagcagattacagctaaacacacacatgttgatactgtattggataaatttt

SEQ ID NO: 435283 - DNA, 55 bp, Artificial
  Synthetic oligonucleotide
gtagccattttctagcgcttggtacagctagtatggttacacagtgtgcgtcagc

SEQ ID NO: 435284 - DNA, 53 bp, Artificial
  Synthetic oligonucleotide
gtagcccaagaaccttcgggtgagggcgggtggcatttccttttctataccga

SEQ ID NO: 435285 - DNA, 55 bp, Artificial
  Synthetic oligonucleotide
gtagcccacagatctgttaggccttgcaacaacatcattcaaagtctctcctccc

SEQ ID NO: 435286 - DNA, 60 bp, Artificial
  Synthetic oligonucleotide
gtagcccacatgggaaaagtccacatctttgtctgtgaactgtttggacaggatcttcac

SEQ ID NO: 435287 - DNA, 60 bp, Artificial
  Synthetic oligonucleotide
gtagcccacatgtgagaaatcgacatccttctcggaaaattgcttagacaggatcttcac

SEQ ID NO: 435288 - DNA, 55 bp, Artificial
  Synthetic oligonucleotide
gtagcccactgagcttcagacgctttagttctctaggtacaaacttcctaactgg

SEQ ID NO: 435289 - DNA, 54 bp, Artificial
  Synthetic oligonucleotide
gtagcccagtgttccttgatggaacaatgagcctaggtgctgaaattctacccg

SEQ ID NO: 435290 - DNA, 60 bp, Artificial
  Synthetic oligonucleotide
gtagcccattattcagcccagttagccactctagacatagacccacaaccaatagcactg

SEQ ID NO: 435291 - DNA, 59 bp, Artificial
  Synthetic oligonucleotide
gtagccccaatgacatagtaactgctcaaatgttagcccagggctacagcccaggaaaa

SEQ ID NO: 435292 - DNA, 56 bp, Artificial
  Synthetic oligonucleotide
gtagccccgaattctagcatgggcggatgggtgggccaggactttacactcttaaa

SEQ ID NO: 435293 - DNA, 55 bp, Artificial
  Synthetic oligonucleotide
gtagccccttccattgtgcacattgacagattcaaccgttctgtggcctttgaga

SEQ ID NO: 435294 - DNA, 59 bp, Artificial
  Synthetic oligonucleotide
gtagcccgtgtcctaggaaggccatacagaaggacgctggaaaggcttatgaatccaga

SEQ ID NO: 435295 - DNA, 55 bp, Artificial
  Synthetic oligonucleotide
gtagcccgtgtgcatcataatgtgacacatgcactgcaacacgttcagtagcctg

SEQ ID NO: 435296 - DNA, 57 bp, Artificial
  Synthetic oligonucleotide
gtagccctatagactgggtctctgagaccctaaatgtggcgaagtctctgtcgggca

SEQ ID NO: 435297 - DNA, 60 bp, Artificial
  Synthetic oligonucleotide
gtagccctgtcttaatccatcgttgtatgtgtgcctatatcacgcgttcagagcctgacc

SEQ ID NO: 435298 - DNA, 60 bp, Artificial
  Synthetic oligonucleotide
gtagccgacgttttggcggcgcaacctgtgacgacaaatctgctcaaatttatgcgcgct

SEQ ID NO: 435299 - DNA, 56 bp, Artificial
  Synthetic oligonucleotide
gtagccgctggtaacgttgctggatttctagtaacgaaccactgtctacgaaaata

SEQ ID NO: 435300 - DNA, 56 bp, Artificial
  Synthetic oligonucleotide
gtagccgtgcttagtaaattaggtgttactgacaagcaaaggtcacgttctaaatc

SEQ ID NO: 435301 - DNA, 55 bp, Artificial
  Synthetic oligonucleotide
gtagccgtgtctgcccttagccatcagagactcacctccctgatccacgttctgg

SEQ ID NO: 435302 - DNA, 60 bp, Artificial
  Synthetic oligonucleotide
gtagcctacactcttcagacagacgtcaactccatacagcgaacagtcactatcatagat

SEQ ID NO: 435303 - DNA, 60 bp, Artificial
  Synthetic oligonucleotide
gtagcctcattgcagtgtgttagacttcttaatgcagtccctgcagatctcttgtactgt

SEQ ID NO: 435304 - DNA, 60 bp, Artificial
  Synthetic oligonucleotide
gtagcctgagcagctccaagtattttagccctgacaccatctaagtgcatttggtcgtac

SEQ ID NO: 435305 - DNA, 60 bp, Artificial
  Synthetic oligonucleotide
gtagcctgcgtggatatgcccactggaatttacagattggagacgcattataataggtct

SEQ ID NO: 435306 - DNA, 58 bp, Artificial
  Synthetic oligonucleotide
gtagcctgcttagtagctgtagaactagtttcaaaagctatacgattagatcgaaata

SEQ ID NO: 435307 - DNA, 60 bp, Artificial
  Synthetic oligonucleotide
gtagccttgctagacctctccattgtaatgagaactgccgtattctggcaaccacttagt

SEQ ID NO: 435308 - DNA, 55 bp, Artificial
  Synthetic oligonucleotide
gtagcctttcgtcgaagtgatcggagataacgaaatggttctcaacgcaaagcaa

SEQ ID NO: 435309 - DNA, 60 bp, Artificial
  Synthetic oligonucleotide
gtagcctttggtgcgccagactgcgtcacgcctcacgtaaagctgtgcgtccacgccgaa

SEQ ID NO: 435310 - DNA, 52 bp, Artificial
  Synthetic oligonucleotide
gtagcgaaggtttggacgacctgttatcaggtagtaacatgcctagcatacg

SEQ ID NO: 435311 - DNA, 55 bp, Artificial
  Synthetic oligonucleotide
gtagcgacaccgcccctggtaccaacaccttgccaaacgcatcttttaatgtcgg

SEQ ID NO: 435312 - DNA, 55 bp, Artificial
  Synthetic oligonucleotide
gtagcgaccttcccagcagtcacagaaacagtctttaagcgaagtttactcaagc

SEQ ID NO: 435313 - DNA, 50 bp, Artificial
  Synthetic oligonucleotide
gtagcgagaacatcattaagctccagaacgcgcggtcacaacttcttgaa

SEQ ID NO: 435314 - DNA, 54 bp, Artificial
  Synthetic oligonucleotide
gtagcgagaagaatcgtcggcagtcgtcggtgcgggtgggcttcgtcgaggaat

SEQ ID NO: 435315 - DNA, 54 bp, Artificial
  Synthetic oligonucleotide
gtagcgaggcggaacgtttcgaaatctatcgaatcttccggaggcacggaatcg

SEQ ID NO: 435316 - DNA, 60 bp, Artificial
  Synthetic oligonucleotide
gtagcgataactgattggtcaggatatagcgggagttttgtccagcacccagaactgaca

SEQ ID NO: 435317 - DNA, 60 bp, Artificial
  Synthetic oligonucleotide
gtagcgatacttataccaccttatattacgtgcacgtgaaatctgatcttaagcagaagt

SEQ ID NO: 435318 - DNA, 55 bp, Artificial
  Synthetic oligonucleotide
gtagcgatgttacctacaataccagtagtgttaaagagaataccaccaacaatgc

SEQ ID NO: 435319 - DNA, 54 bp, Artificial
  Synthetic oligonucleotide
gtagcgcaatcttaaccgttgaatggggtccccactttaatttgaaactgccca

SEQ ID NO: 435320 - DNA, 55 bp, Artificial
  Synthetic oligonucleotide
gtagcgcagataagattagatatggtaatgatttcgtcattcgagctggggtgga

SEQ ID NO: 435321 - DNA, 58 bp, Artificial
  Synthetic oligonucleotide
gtagcgcagctaaaggctacccgagtatgaagcctgcaataagaaactacacctaaca

SEQ ID NO: 435322 - DNA, 60 bp, Artificial
  Synthetic oligonucleotide
gtagcgcagtcattgagaatcactccaatcgctcttgtagggattggcttgcggacacgg

SEQ ID NO: 435323 - DNA, 55 bp, Artificial
  Synthetic oligonucleotide
gtagcgcattatttaaatggaaagcttattatttcccttcagtaaaagaggaagc

SEQ ID NO: 435324 - DNA, 54 bp, Artificial
  Synthetic oligonucleotide
gtagcgcggacgcaatcggctctacaatggaagtactttggggcttagcagagt

SEQ ID NO: 435325 - DNA, 51 bp, Artificial
  Synthetic oligonucleotide
gtagcgcgtcggatgtgtcgcaaaaagtttgacaaaccacgtcgaatatag

SEQ ID NO: 435326 - DNA, 51 bp, Artificial
  Synthetic oligonucleotide
gtagcgcgtgcaacagcatactttacctcgcctacgggagacccaaattgg

SEQ ID NO: 435327 - DNA, 55 bp, Artificial
  Synthetic oligonucleotide
gtagcggaagtgatggaccccataccactggatggcactaaccagtgtgacaggg

SEQ ID NO: 435328 - DNA, 60 bp, Artificial
  Synthetic oligonucleotide
gtagcggacgcatcaacgcaaatatctaacgttagcagaagtctgcggttacgtgaattc

SEQ ID NO: 435329 - DNA, 60 bp, Artificial
  Synthetic oligonucleotide
gtagcggcgttatttccgaatgcacagccatttgaacatcatgctacagtaggactcacg

SEQ ID NO: 435330 - DNA, 60 bp, Artificial
  Synthetic oligonucleotide
gtagcgggatggcttcttggcaacccagaatgtgaccagttgctcactgcgaactcatgg

SEQ ID NO: 435331 - DNA, 55 bp, Artificial
  Synthetic oligonucleotide
gtagcggggtggacagatagggttatagaggtagcacaagcagcttggagagcca

SEQ ID NO: 435332 - DNA, 57 bp, Artificial
  Synthetic oligonucleotide
gtagcggtagaggaggattgcctacaacatcctgggttgaggaaaatattaagcgtc

SEQ ID NO: 435333 - DNA, 55 bp, Artificial
  Synthetic oligonucleotide
gtagcggtataagcctagtgataatgacgacatagagcccctccgtaatggaggg

SEQ ID NO: 435334 - DNA, 55 bp, Artificial
  Synthetic oligonucleotide
gtagcggtgagctttgacaccaaagcatgggacacccaagttactagtagagacc

SEQ ID NO: 435335 - DNA, 55 bp, Artificial
  Synthetic oligonucleotide
gtagcgtaggtggaaggtatcgtgtggtgtttaaacaccacatagtctcttaggg

SEQ ID NO: 435336 - DNA, 58 bp, Artificial
  Synthetic oligonucleotide
gtagcgttccaagttggttaaagccatatcatgtattatctaatggagaaaaaatgcg

SEQ ID NO: 435337 - DNA, 55 bp, Artificial
  Synthetic oligonucleotide
gtagcgttctggcgcgaccttaaagacggaattttagccgctgttcgtaatcctg

SEQ ID NO: 435338 - DNA, 55 bp, Artificial
  Synthetic oligonucleotide
gtagctacactcccgaatccttaaatgcctcacttccgaatgatgctgctagatg

SEQ ID NO: 435339 - DNA, 60 bp, Artificial
  Synthetic oligonucleotide
gtagctacagcacacttatacataagcagacaaccttcaatcatgatgatgaacaaccac

SEQ ID NO: 435340 - DNA, 55 bp, Artificial
  Synthetic oligonucleotide
gtagctacatagttgccagaagaaaggatcaaactgctagatctgttataggtcc

SEQ ID NO: 435341 - DNA, 55 bp, Artificial
  Synthetic oligonucleotide
gtagctacccttctggagccacttcctggtggtaagcagaaatccaagggtacgg

SEQ ID NO: 435342 - DNA, 60 bp, Artificial
  Synthetic oligonucleotide
gtagctatcatcctgacaaagacatatttagtatatctgctcataccaatcttttacccc

SEQ ID NO: 435343 - DNA, 60 bp, Artificial
  Synthetic oligonucleotide
gtagctccaattgaacacattgcaagtatgaggaggaactatttcacagcagaagtgtca

SEQ ID NO: 435344 - DNA, 60 bp, Artificial
  Synthetic oligonucleotide
gtagctccatcgtggggatgtagctccatcgtggggatgtagctccatcgtggggatgta

SEQ ID NO: 435345 - DNA, 57 bp, Artificial
  Synthetic oligonucleotide
gtagctccgagtgatggggctcgcgattcccccgtggtaacacggtcgcttgcccgc

SEQ ID NO: 435346 - DNA, 52 bp, Artificial
  Synthetic oligonucleotide
gtagctccttttgatgtatgggattgaatataccacaattctaacctttctg

SEQ ID NO: 435347 - DNA, 60 bp, Artificial
  Synthetic oligonucleotide
gtagctctggactaccatttcgttgctagtgcagcagcctgcaagtattccagtattggc

SEQ ID NO: 435348 - DNA, 60 bp, Artificial
  Synthetic oligonucleotide
gtagctcttgcagatgccgccagagtccatagctggcagcaggagctactccgctcaccc

SEQ ID NO: 435349 - DNA, 59 bp, Artificial
  Synthetic oligonucleotide
gtagctgaacgaggaaggatattgtttggtatacgatccgcggctgcggtgcaaggaaa

SEQ ID NO: 435350 - DNA, 58 bp, Artificial
  Synthetic oligonucleotide
gtagctgaagggacagataggattatagaagtaggacaaagaatttggagagcttttc

SEQ ID NO: 435351 - DNA, 60 bp, Artificial
  Synthetic oligonucleotide
gtagctgagacctgacctttgagttgaggggcatcatataaatcatatctgtaaggctgt

SEQ ID NO: 435352 - DNA, 55 bp, Artificial
  Synthetic oligonucleotide
gtagctgattggataagtcgtcgtagacaagaaggatacaatttgatctggtcga

SEQ ID NO: 435353 - DNA, 60 bp, Artificial
  Synthetic oligonucleotide
gtagctgcaccaccttgggaactcaccggctagtctcgtcaggcattcctggcggccctg

SEQ ID NO: 435354 - DNA, 60 bp, Artificial
  Synthetic oligonucleotide
gtagctgccaaaccaaacggtcagctagtatcacaattgttgcagtacatgtatgtgcct

SEQ ID NO: 435355 - DNA, 60 bp, Artificial
  Synthetic oligonucleotide
gtagctgcgttgaacgtaatgtttgtcgtgacgataggagtgtgtgctcgagtgttagcc

SEQ ID NO: 435356 - DNA, 58 bp, Artificial
  Synthetic oligonucleotide
gtagctggatcaatagtaccaaagcctataccaacgtcatggttacagaaagacccca

SEQ ID NO: 435357 - DNA, 55 bp, Artificial
  Synthetic oligonucleotide
gtagctggctggacagataggattatagaaataggacaaggaattggtagagcta

SEQ ID NO: 435358 - DNA, 55 bp, Artificial
  Synthetic oligonucleotide
gtagctggtccacagcccgcagatagagataacgccgttaaggagggtaatcttc

SEQ ID NO: 435359 - DNA, 56 bp, Artificial
  Synthetic oligonucleotide
gtagctggtcgtaatgagtaattgcgggatgggaccaactactttgggtgtccgtg

SEQ ID NO: 435360 - DNA, 60 bp, Artificial
  Synthetic oligonucleotide
gtagctgtaatacaagttggtggtcctaatgtgttagacataacagcagatccaacaact

SEQ ID NO: 435361 - DNA, 60 bp, Artificial
  Synthetic oligonucleotide
gtagctgttgcatgtaatccaacatgtatgcagtcgtaatgggcaactatgggatggaac

SEQ ID NO: 435362 - DNA, 55 bp, Artificial
  Synthetic oligonucleotide
gtagcttaaatagcgtactcggtgagtcacaactaagtgcccttgaagctagggt

SEQ ID NO: 435363 - DNA, 57 bp, Artificial
  Synthetic oligonucleotide
gtagcttaagtttcaatgattgcaggtaacgcggacttctccatgtccgtttgggaa

SEQ ID NO: 435364 - DNA, 51 bp, Artificial
  Synthetic oligonucleotide
gtagcttatactgaactagatgaagacaccttccttcagacacaacaaaga

SEQ ID NO: 435365 - DNA, 60 bp, Artificial
  Synthetic oligonucleotide
gtagcttccattcgaagcatgttgattaagtgaggaccagactaaccatctggtatccaa

SEQ ID NO: 435366 - DNA, 55 bp, Artificial
  Synthetic oligonucleotide
gtagcttcctttatgaaccagtctaaggtgaggcgtttctctgacccagagacac

SEQ ID NO: 435367 - DNA, 55 bp, Artificial
  Synthetic oligonucleotide
gtagcttcgtcatgaaggcgctaaggtgcgggctgtaaaatttaccgtgacgcac

SEQ ID NO: 435368 - DNA, 60 bp, Artificial
  Synthetic oligonucleotide
gtagcttctacatgcaccaggatgatggaaacgcaaacttccacatggtttggctttaat

SEQ ID NO: 435369 - DNA, 55 bp, Artificial
  Synthetic oligonucleotide
gtagcttgtgttcgttggataaagacgtgccaatcggatacctctcaacaagtgg

SEQ ID NO: 435370 - DNA, 55 bp, Artificial
  Synthetic oligonucleotide
gtagctttatggctacgggcaaagtcatcttgtgttacacaccgccaggaggctc

SEQ ID NO: 435371 - DNA, 55 bp, Artificial
  Synthetic oligonucleotide
gtagctttgtattaggttctggtgctaactccaaatcttatggatcacgtagtgg

SEQ ID NO: 435372 - DNA, 52 bp, Artificial
  Synthetic oligonucleotide
gtaggaaccgcaaaaacagttatgtgcggtacgtatccagtaatccacgccg

SEQ ID NO: 435373 - DNA, 57 bp, Artificial
  Synthetic oligonucleotide
gtaggaaccgtaaatcaatatgcgttgagtaacccattaggattcgtggctgaagga

SEQ ID NO: 435374 - DNA, 59 bp, Artificial
  Synthetic oligonucleotide
gtaggaacgccctatgttatcatacaaactagggagagttcggatagcattgccgtcaa

SEQ ID NO: 435375 - DNA, 59 bp, Artificial
  Synthetic oligonucleotide
gtaggaacgtaaagacagcaaacactacacttagaagcatgagtgtcaagcctattgtg

SEQ ID NO: 435376 - DNA, 57 bp, Artificial
  Synthetic oligonucleotide
gtaggaacgttgtggtctaacttaagactagctgaatcggtgctataaccgatagtc

SEQ ID NO: 435377 - DNA, 55 bp, Artificial
  Synthetic oligonucleotide
gtaggaaggggaatctatgcacctccaataccaggacatataacttgtaactctc

SEQ ID NO: 435378 - DNA, 53 bp, Artificial
  Synthetic oligonucleotide
gtaggaaggttgttagattatgaatctgaattagagctagtataccagactaa

SEQ ID NO: 435379 - DNA, 55 bp, Artificial
  Synthetic oligonucleotide
gtaggaagtagctcagagccattatatgttccgacattagacgattatcggtctg

SEQ ID NO: 435380 - DNA, 55 bp, Artificial
  Synthetic oligonucleotide
gtaggaatgctcgtgtccgtgcttcactcgggcggtagagtcaccgctgcgaggt

SEQ ID NO: 435381 - DNA, 56 bp, Artificial
  Synthetic oligonucleotide
gtaggaattaaactgagaccaccagtaatcccagtctggggtaccatatgtgggta

SEQ ID NO: 435382 - DNA, 60 bp, Artificial
  Synthetic oligonucleotide
gtaggaattgatcccacgagttctgaatggtcgctcctagccaatgggtttagagcagtc

SEQ ID NO: 435383 - DNA, 50 bp, Artificial
  Synthetic oligonucleotide
gtaggaatttatagggccagggtttaaaggagattagaagtttaatttcc

SEQ ID NO: 435384 - DNA, 51 bp, Artificial
  Synthetic oligonucleotide
gtaggacaaagatttgggagaggtcttctccatatacctagaagaatcaga

SEQ ID NO: 435385 - DNA, 57 bp, Artificial
  Synthetic oligonucleotide
gtaggacacgtggacggaccgaaatactcctgcatctctataaataccctacaatgg

SEQ ID NO: 435386 - DNA, 53 bp, Artificial
  Synthetic oligonucleotide
gtaggaccaagcttctcaaattactcggagtccgaaggggaccgggaattggc

SEQ ID NO: 435387 - DNA, 60 bp, Artificial
  Synthetic oligonucleotide
gtaggaccatcagagggcgctgctcaatggatgaataggctcatagcgtttgcgtcgcgg

SEQ ID NO: 435388 - DNA, 58 bp, Artificial
  Synthetic oligonucleotide
gtaggacctggacggcacgcaaagcaaactatgccggaaatagaccgaacacgagcat

SEQ ID NO: 435389 - DNA, 55 bp, Artificial
  Synthetic oligonucleotide
gtaggactcaattcgttcgtagtgggatcccaactcccatgcgagccagagccgg

SEQ ID NO: 435390 - DNA, 56 bp, Artificial
  Synthetic oligonucleotide
gtaggactgtttcaagtagtagctttactttaaattcaatcgcaacattgtggagg

SEQ ID NO: 435391 - DNA, 60 bp, Artificial
  Synthetic oligonucleotide
gtaggagagattgtcaattccaagccctagacgatttatatacctcatggctcgatgtga

SEQ ID NO: 435392 - DNA, 53 bp, Artificial
  Synthetic oligonucleotide
gtaggagatctagtgtggaggcaatcattaataggaaagagcattcctaacat

SEQ ID NO: 435393 - DNA, 60 bp, Artificial
  Synthetic oligonucleotide
gtaggaggataggggcagtgccaattgatctggcaaaagggacatctggcagccccatcc

SEQ ID NO: 435394 - DNA, 55 bp, Artificial
  Synthetic oligonucleotide
gtaggaggatcgaatgcttctatttggacctgcgtgtttagcaccacgggcgtct

SEQ ID NO: 435395 - DNA, 54 bp, Artificial
  Synthetic oligonucleotide
gtaggaggcttgataggtttgagaataatctttggtgtgctttccatagtgaga

SEQ ID NO: 435396 - DNA, 55 bp, Artificial
  Synthetic oligonucleotide
gtaggagggcagtccttaacgggaattgggttgtcaaatgttgtgggtatggatg

SEQ ID NO: 435397 - DNA, 52 bp, Artificial
  Synthetic oligonucleotide
gtaggaggtgaactatggctagaacacaagctaagagttacgtaggaactaa

SEQ ID NO: 435398 - DNA, 55 bp, Artificial
  Synthetic oligonucleotide
gtaggagtgggatcattcggaccagggttcaccccaccacacggcaatcttttgg

SEQ ID NO: 435399 - DNA, 50 bp, Artificial
  Synthetic oligonucleotide
gtaggagtgtaaggacatgaggtgactgtctctatgccgcctactgttgc

SEQ ID NO: 435400 - DNA, 56 bp, Artificial
  Synthetic oligonucleotide
gtaggatacaagagtctgtgaccacgtccggaggagggaaacagggacgtcttata

SEQ ID NO: 435401 - DNA, 54 bp, Artificial
  Synthetic oligonucleotide
gtaggatccttatggcctggaccccacagggttttaataccacacacccaacta

SEQ ID NO: 435402 - DNA, 60 bp, Artificial
  Synthetic oligonucleotide
gtaggatgacgaacgagtagcaatagattgtaagacgatgcctcctgtccacattataga

SEQ ID NO: 435403 - DNA, 60 bp, Artificial
  Synthetic oligonucleotide
gtaggatgcaattttcctcattgactgtgaatgtgagaggatcagggttgaggatactgg

SEQ ID NO: 435404 - DNA, 60 bp, Artificial
  Synthetic oligonucleotide
gtaggatgcagttctcctccctgactgtaaatgtgagaggatcaggaatgaggatactgg

SEQ ID NO: 435405 - DNA, 60 bp, Artificial
  Synthetic oligonucleotide
gtaggatgcctgttaagcgcgcgagatttgagccatgggaaggttctctgattgctgtgt

SEQ ID NO: 435406 - DNA, 60 bp, Artificial
  Synthetic oligonucleotide
gtaggatggctttctaccggagtttgggagcccacgggcatctggaacatggagcatgtg

SEQ ID NO: 435407 - DNA, 55 bp, Artificial
  Synthetic oligonucleotide
gtaggatgttgatactctccaacccagaccttttaccttctacattccttaacga

SEQ ID NO: 435408 - DNA, 57 bp, Artificial
  Synthetic oligonucleotide
gtaggattagactgccttaccaacatgcgaaaccttgatgggaaacccataagtgag

SEQ ID NO: 435409 - DNA, 51 bp, Artificial
  Synthetic oligonucleotide
gtaggattggcccaaatctaccctggtacataacctaccaaccacgcatga

SEQ ID NO: 435410 - DNA, 54 bp, Artificial
  Synthetic oligonucleotide
gtaggattgtaggaactatagggaatgtgtctaaaggtagtatatccgttttac

SEQ ID NO: 435411 - DNA, 55 bp, Artificial
  Synthetic oligonucleotide
gtaggcaaagctttggtgtaagtgttaatgaagcgagctacttgtgaaggttgca

SEQ ID NO: 435412 - DNA, 55 bp, Artificial
  Synthetic oligonucleotide
gtaggcaacgcgcgtaagtctattgccatttacgaatctcatggggccagagtat

SEQ ID NO: 435413 - DNA, 54 bp, Artificial
  Synthetic oligonucleotide
gtaggcaataacgcggattgggttgtggacccgtcgcgttcgcgtagcggtgat

SEQ ID NO: 435414 - DNA, 60 bp, Artificial
  Synthetic oligonucleotide
gtaggcaatcacggaaaggacagatggtgctgcaaaccattgttgaaccctccgccagag

SEQ ID NO: 435415 - DNA, 55 bp, Artificial
  Synthetic oligonucleotide
gtaggcaatcatccggtgatgagtggtggcgcagtgaccttaacgtctgctggtg

SEQ ID NO: 435416 - DNA, 55 bp, Artificial
  Synthetic oligonucleotide
gtaggcaatgttatcttgtccttgcgacgtaggcggaagtagtagacgcggttgg

SEQ ID NO: 435417 - DNA, 60 bp, Artificial
  Synthetic oligonucleotide
gtaggcactttccatgctagagaatccttcagtaccttcgtagtgtggcgtggtcgatat

SEQ ID NO: 435418 - DNA, 55 bp, Artificial
  Synthetic oligonucleotide
gtaggcagacttcgaaggacaacaaggggatgaggatcagattcaaggatgacag

SEQ ID NO: 435419 - DNA, 60 bp, Artificial
  Synthetic oligonucleotide
gtaggcagaggcttactaagtatactatgatggacttctgctacgctttgaggcattttg

SEQ ID NO: 435420 - DNA, 55 bp, Artificial
  Synthetic oligonucleotide
gtaggcagtatcacaatacggttagtagacacctatagtgcatccgattcatgct

SEQ ID NO: 435421 - DNA, 59 bp, Artificial
  Synthetic oligonucleotide
gtaggccaacattaactgagtctgcagagggatatgttagagtgagtcgtttgggaaga

SEQ ID NO: 435422 - DNA, 57 bp, Artificial
  Synthetic oligonucleotide
gtaggccacaaaagggcagttgaagtctatcaaataagagaaagctatacaggtatt

SEQ ID NO: 435423 - DNA, 55 bp, Artificial
  Synthetic oligonucleotide
gtaggccagaaacaagtgggcgagatgaaacaacgcactatgttggtgcgctgag

SEQ ID NO: 435424 - DNA, 56 bp, Artificial
  Synthetic oligonucleotide
gtaggccctcacttgagccaacccctgaaatgcggaggaatccggagaacccatac

SEQ ID NO: 435425 - DNA, 60 bp, Artificial
  Synthetic oligonucleotide
gtaggccctctagatatagtgcctgaggtagctgatcctgggggtcctactctggtgcca

SEQ ID NO: 435426 - DNA, 60 bp, Artificial
  Synthetic oligonucleotide
gtaggccctgtagagcctattggacctggcacacccactgtcatagatgcaactccccct

SEQ ID NO: 435427 - DNA, 57 bp, Artificial
  Synthetic oligonucleotide
gtaggccgaaattctatcctgtaccgtgccacatgatttctcgtttatacaggtact

SEQ ID NO: 435428 - DNA, 51 bp, Artificial
  Synthetic oligonucleotide
gtaggccgtagctagcggatgtagtcgcatgaaggcttgagcaaggggccg

SEQ ID NO: 435429 - DNA, 55 bp, Artificial
  Synthetic oligonucleotide
gtaggcctgtaaatgaaatgcctaatgctagagcctttgtgggcctagtagatcc

SEQ ID NO: 435430 - DNA, 56 bp, Artificial
  Synthetic oligonucleotide
gtaggcgcgtgtgagtggactgaaaaaggtgaccttctctctcctaaaactcctcc

SEQ ID NO: 435431 - DNA, 60 bp, Artificial
  Synthetic oligonucleotide
gtaggcggcgcgaacattttagacatcacagctgacccaacgactgcgccacagatagag

SEQ ID NO: 435432 - DNA, 52 bp, Artificial
  Synthetic oligonucleotide
gtaggcgggtcgaaacgaaaggtcaccgttaccgacgaacggtctgcggtca

SEQ ID NO: 435433 - DNA, 51 bp, Artificial
  Synthetic oligonucleotide
gtaggcggtgggggtaggcgacgcgagtgaggcgggccagccgtgtttcgc

SEQ ID NO: 435434 - DNA, 55 bp, Artificial
  Synthetic oligonucleotide
gtaggctcgtacagcggttcgcagatgtatttggcgaccgattctttctggaaac

SEQ ID NO: 435435 - DNA, 55 bp, Artificial
  Synthetic oligonucleotide
gtaggctgaactggttgtacaaatcaggtaacacatatccgatgctaaacgtgac

SEQ ID NO: 435436 - DNA, 55 bp, Artificial
  Synthetic oligonucleotide
gtaggctgcaaaccctgcatagggagtcactggggtcttgcaaagtcctgtgtgg

SEQ ID NO: 435437 - DNA, 58 bp, Artificial
  Synthetic oligonucleotide
gtaggcttacatggaacaggtgtaggttgggaattctatacctatcataaattagtga

SEQ ID NO: 435438 - DNA, 59 bp, Artificial
  Synthetic oligonucleotide
gtaggcttgttttggcttggacaccacagggttttaatgcatcaatgccagaaactatg

SEQ ID NO: 435439 - DNA, 58 bp, Artificial
  Synthetic oligonucleotide
gtagggaaacgtttttgcgtgaagtcattgatttgcagggagaacatcaagactaaga

SEQ ID NO: 435440 - DNA, 57 bp, Artificial
  Synthetic oligonucleotide
gtagggaacagagaatagctaggaaaaacgaacatatcctaaagtccaattgctcag

SEQ ID NO: 435441 - DNA, 60 bp, Artificial
  Synthetic oligonucleotide
gtagggaagtatgctaggacaaaacatgcccacacaaatgagttaagggtgcttgcagga

SEQ ID NO: 435442 - DNA, 55 bp, Artificial
  Synthetic oligonucleotide
gtagggaagtttcattgcactgacatgaagtacatagccccgtatcagattaggc

SEQ ID NO: 435443 - DNA, 55 bp, Artificial
  Synthetic oligonucleotide
gtagggacaattggacagggaccaacagaccagtactggttatctcgcctgatct

SEQ ID NO: 435444 - DNA, 55 bp, Artificial
  Synthetic oligonucleotide
gtagggacagtgctcgtccccatgtcatatataggggctataatgggacggacta

SEQ ID NO: 435445 - DNA, 55 bp, Artificial
  Synthetic oligonucleotide
gtagggacgttcttccttgccaagttggcattaatccctattccaggcaatgggg

SEQ ID NO: 435446 - DNA, 55 bp, Artificial
  Synthetic oligonucleotide
gtagggactgcccaaggtttgctatattctatcctcgtagcaatacatgatcctg

SEQ ID NO: 435447 - DNA, 53 bp, Artificial
  Synthetic oligonucleotide
gtagggagaaggtcgagaaatttaccggtcctcctcgcgtacagctttcggac

SEQ ID NO: 435448 - DNA, 56 bp, Artificial
  Synthetic oligonucleotide
gtagggataatcatgcagtctcgttgcattcaatctacgatatcccttattcttcg

SEQ ID NO: 435449 - DNA, 55 bp, Artificial
  Synthetic oligonucleotide
gtagggatcaaagtaaagaatgctctgctttcaagcggcatgagattcgaccaca

SEQ ID NO: 435450 - DNA, 55 bp, Artificial
  Synthetic oligonucleotide
gtagggatccagaccccagaggctaaataccaagacaaaccgcccattaaatggc

SEQ ID NO: 435451 - DNA, 51 bp, Artificial
  Synthetic oligonucleotide
gtagggcaacccggagacactttaactttcccagcatttatctacagtggg

SEQ ID NO: 435452 - DNA, 55 bp, Artificial
  Synthetic oligonucleotide
gtagggcacgaagcatcacccgccaagacgacgatgttgccattttcagcggaga

SEQ ID NO: 435453 - DNA, 60 bp, Artificial
  Synthetic oligonucleotide
gtagggcactctgtaaaactttgtgagaccccctgcatcatgacaaggcctaacatgatg

SEQ ID NO: 435454 - DNA, 58 bp, Artificial
  Synthetic oligonucleotide
gtagggcactctgtcaaactttgtgagacccccggcaccatgataaggccgaacatgg

SEQ ID NO: 435455 - DNA, 55 bp, Artificial
  Synthetic oligonucleotide
gtagggcctacaccagtagacattataggtaggaacatcttatcagccctagggg

SEQ ID NO: 435456 - DNA, 59 bp, Artificial
  Synthetic oligonucleotide
gtagggctttgattggcacttgagaacagcggctcgtatagggtgaggaaggttgcatt

SEQ ID NO: 435457 - DNA, 58 bp, Artificial
  Synthetic oligonucleotide
gtaggggagttagtatggagacaatccataattggaaaaagcattcctaacattctga

SEQ ID NO: 435458 - DNA, 55 bp, Artificial
  Synthetic oligonucleotide
gtaggggagttatatgaaggtagatctatattgtcaataggttatacccagaacg

SEQ ID NO: 435459 - DNA, 60 bp, Artificial
  Synthetic oligonucleotide
gtaggggattcacatccaaggttgatttagctgtcaactctggcaactataacgctaggc

SEQ ID NO: 435460 - DNA, 55 bp, Artificial
  Synthetic oligonucleotide
gtaggggcaacttcagcattttggacgagtacctatcgggtgaatactcaactgg

SEQ ID NO: 435461 - DNA, 57 bp, Artificial
  Synthetic oligonucleotide
gtaggggccccaagactctttcaggacaagtggtacccccagagcgagctctgtgac

SEQ ID NO: 435462 - DNA, 55 bp, Artificial
  Synthetic oligonucleotide
gtaggggctcagtgcttgccagcaaatccgcctcctgctcgcaagtcaggaaggc

SEQ ID NO: 435463 - DNA, 52 bp, Artificial
  Synthetic oligonucleotide
gtagggggtcgccataacttgggtcgccattttagggtccgcgaactaccaa

SEQ ID NO: 435464 - DNA, 54 bp, Artificial
  Synthetic oligonucleotide
gtaggggtaggcatctacctactccccaaccgatgaacggggagataaacactc

SEQ ID NO: 435465 - DNA, 52 bp, Artificial
  Synthetic oligonucleotide
gtaggggttagaggaaaggagcttatgagcgattcgattgactatatcaatc

SEQ ID NO: 435466 - DNA, 55 bp, Artificial
  Synthetic oligonucleotide
gtagggtatctgggtcaccctggatacgatagcgagggtctacttcccaagcccc

SEQ ID NO: 435467 - DNA, 60 bp, Artificial
  Synthetic oligonucleotide
gtagggtcctcaacgcagtctcaatgtcagtgaggcagtctttcagatcaggacatgatc

SEQ ID NO: 435468 - DNA, 51 bp, Artificial
  Synthetic oligonucleotide
gtagggtcgccgacatgacacaaggggttgtgaccggggtggacacgtacg

SEQ ID NO: 435469 - DNA, 52 bp, Artificial
  Synthetic oligonucleotide
gtagggtgctgaaagataccacgccaatgttaccatgctacgggtcttacgc

SEQ ID NO: 435470 - DNA, 59 bp, Artificial
  Synthetic oligonucleotide
gtagggtgtgatcctgaaatattctggtcaaccatacctcttatgttagatggggaatg

SEQ ID NO: 435471 - DNA, 57 bp, Artificial
  Synthetic oligonucleotide
gtagggtgtgtagatatcgaaagtagtgtaggtaagtgttctcacactttaaactga

SEQ ID NO: 435472 - DNA, 57 bp, Artificial
  Synthetic oligonucleotide
gtagggttaggactaaagtgttaattgctaatactgatgtggattattggtattctc

SEQ ID NO: 435473 - DNA, 60 bp, Artificial
  Synthetic oligonucleotide
gtagggttattgagctgttgcagatcagaggggggaaccactggaaggatgatgcaaagc

SEQ ID NO: 435474 - DNA, 58 bp, Artificial
  Synthetic oligonucleotide
gtagggttgcggaaggaacaaacacaacgaatagatggttcgcttgcgtgctcgttga

SEQ ID NO: 435475 - DNA, 60 bp, Artificial
  Synthetic oligonucleotide
gtaggtaacaagtgacactatggatctgatctggggccaactacctctatcaaggtgagt

SEQ ID NO: 435476 - DNA, 60 bp, Artificial
  Synthetic oligonucleotide
gtaggtaacaagtgacactatggatctgatctggggctggatacctctatcttggtgatc

SEQ ID NO: 435477 - DNA, 58 bp, Artificial
  Synthetic oligonucleotide
gtaggtaacaagtgacactatggatctgatctggggtcgaccacccctatccaggtgg

SEQ ID NO: 435478 - DNA, 59 bp, Artificial
  Synthetic oligonucleotide
gtaggtacacaatccacaagtacaactgcaccatatgcaaacagtaattttaaggaata

SEQ ID NO: 435479 - DNA, 60 bp, Artificial
  Synthetic oligonucleotide
gtaggtaccaccaatctacgcagcagccttagctacgccggagcttagctcgcccacgct

SEQ ID NO: 435480 - DNA, 60 bp, Artificial
  Synthetic oligonucleotide
gtaggtacgtccagatggcgctattagcccttggtagatggaccggcacttacatctatg

SEQ ID NO: 435481 - DNA, 60 bp, Artificial
  Synthetic oligonucleotide
gtaggtacgtccagatggcgctgttagcctttggtaggtggactggcacttatatctatg

SEQ ID NO: 435482 - DNA, 57 bp, Artificial
  Synthetic oligonucleotide
gtaggtactataaattccagtatgcctttccacaatgtccatccccttaccattgga

SEQ ID NO: 435483 - DNA, 59 bp, Artificial
  Synthetic oligonucleotide
gtaggtactatagggaagtcccacctgaagaggtgactcaggtatcagttcctgcgaga

SEQ ID NO: 435484 - DNA, 55 bp, Artificial
  Synthetic oligonucleotide
gtaggtagagccttgaaactccctacgtacagagtacttcgccagaaatggcttg

SEQ ID NO: 435485 - DNA, 56 bp, Artificial
  Synthetic oligonucleotide
gtaggtagccggaattccattcctaggaggtttgacctatgcgagcttttagtgcc

SEQ ID NO: 435486 - DNA, 50 bp, Artificial
  Synthetic oligonucleotide
gtaggtagtctcgtaggagcaggagcagcactatctgacgccatatccac

SEQ ID NO: 435487 - DNA, 60 bp, Artificial
  Synthetic oligonucleotide
gtaggtatcaatccttatagcatggaatggtccatagttgcatcgagattgaagagtcaa

SEQ ID NO: 435488 - DNA, 55 bp, Artificial
  Synthetic oligonucleotide
gtaggtatcaatccttatagtcgcgagtggactgatttgtatcaccggttagcgg

SEQ ID NO: 435489 - DNA, 60 bp, Artificial
  Synthetic oligonucleotide
gtaggtatctacgtctctcacactagtgattctgtgagcctccatgtgaaagcacactgc

SEQ ID NO: 435490 - DNA, 55 bp, Artificial
  Synthetic oligonucleotide
gtaggtcaaggcataacgtcacaaatacagccgattggtcaacttcacatggaac

SEQ ID NO: 435491 - DNA, 56 bp, Artificial
  Synthetic oligonucleotide
gtaggtcactagcctcccattaaaatgggttccatgacctttgtttgattaatcga

SEQ ID NO: 435492 - DNA, 55 bp, Artificial
  Synthetic oligonucleotide
gtaggtcatgtaactgattcaccattaagcctaggtgagaatggacatgactgaa

SEQ ID NO: 435493 - DNA, 60 bp, Artificial
  Synthetic oligonucleotide
gtaggtccatatgattctgtgtttaggtaattatattgtagatgctccatgaatttatca

SEQ ID NO: 435494 - DNA, 55 bp, Artificial
  Synthetic oligonucleotide
gtaggtcgagctcttcaaccagttagagacaagttttcagactgttatatcattc

SEQ ID NO: 435495 - DNA, 58 bp, Artificial
  Synthetic oligonucleotide
gtaggtgaagctcaagctttacaagaaatgtatgatatagcgtttccgggaaattcta

SEQ ID NO: 435496 - DNA, 55 bp, Artificial
  Synthetic oligonucleotide
gtaggtgacacatctaggtttagtgtaccttttgtaggtcttgcctcagcataca

SEQ ID NO: 435497 - DNA, 58 bp, Artificial
  Synthetic oligonucleotide
gtaggtgattatatcaaacttgtaaatatatcatttacaggtacagtgtgtattaaaa

SEQ ID NO: 435498 - DNA, 60 bp, Artificial
  Synthetic oligonucleotide
gtaggtgatttggaagcgacggggtcgcgtgtggtcgatgctgcagattgctttagaaac

SEQ ID NO: 435499 - DNA, 60 bp, Artificial
  Synthetic oligonucleotide
gtaggtgccattgactggtcaatcggtgactcccaaacttgtctatgcaattggggaatg

SEQ ID NO: 435500 - DNA, 59 bp, Artificial
  Synthetic oligonucleotide
gtaggtgcccgctccagtgtctccgttcgcaaacgtccagcgtccaccacgagaggatc

SEQ ID NO: 435501 - DNA, 60 bp, Artificial
  Synthetic oligonucleotide
gtaggtggagacggagggtctggccaaataagctgcagcccagtgtttgcagtggaaaga

SEQ ID NO: 435502 - DNA, 51 bp, Artificial
  Synthetic oligonucleotide
gtaggtgtggcgtctcacgatgcgtcctccttttcaggtgtagaagtgcgt

SEQ ID NO: 435503 - DNA, 58 bp, Artificial
  Synthetic oligonucleotide
gtaggttattggatgttactttcacctactgcagctggagtaatagtagagggaacga

SEQ ID NO: 435504 - DNA, 57 bp, Artificial
  Synthetic oligonucleotide
gtaggttgaagccttacgtctatgatgaacttcagaccccatccgttattgtatgtg

SEQ ID NO: 435505 - DNA, 51 bp, Artificial
  Synthetic oligonucleotide
gtaggttgctgcggagagcgcatcggggagagacagggattccgcacgcgt

SEQ ID NO: 435506 - DNA, 51 bp, Artificial
  Synthetic oligonucleotide
gtaggtttagtctagtttaccagaagaaagttgttgttaacagcccccttc

SEQ ID NO: 435507 - DNA, 56 bp, Artificial
  Synthetic oligonucleotide
gtaggtttctctactggtgcaggctttgtagttacgcctgagggacttgtagatac

SEQ ID NO: 435508 - DNA, 57 bp, Artificial
  Synthetic oligonucleotide
gtaggtttggaggtaattcctcctctcctacgcataatgctacataccattaagaaa

SEQ ID NO: 435509 - DNA, 53 bp, Artificial
  Synthetic oligonucleotide
gtaggttttgtggtaattgactcatcaagccaccacgttttttcgaccctggt

SEQ ID NO: 435510 - DNA, 55 bp, Artificial
  Synthetic oligonucleotide
gtagtaaaacgcatttagtgattgaaacaggcaagatagacgcgggatatcacgg

SEQ ID NO: 435511 - DNA, 51 bp, Artificial
  Synthetic oligonucleotide
gtagtaaactattaggggattcgtacgtctcactgtaccacgaacacagag

SEQ ID NO: 435512 - DNA, 55 bp, Artificial
  Synthetic oligonucleotide
gtagtaacagtacagatgaaatcttcagacctggaggaggagatatgagggacaa

SEQ ID NO: 435513 - DNA, 60 bp, Artificial
  Synthetic oligonucleotide
gtagtaaccaatacctcactgctgataacttccagtcgccgtgtgcattgcctgagtttg

SEQ ID NO: 435514 - DNA, 60 bp, Artificial
  Synthetic oligonucleotide
gtagtaagaagtgcactggggacgcagcattttgctctgcttatgagtgcactgctcagt

SEQ ID NO: 435515 - DNA, 58 bp, Artificial
  Synthetic oligonucleotide
gtagtaagagcagccgcaaggaagatcaattctccgtctccgtattggtttccgcttg

SEQ ID NO: 435516 - DNA, 60 bp, Artificial
  Synthetic oligonucleotide
gtagtaatgccagctcatggcccggccaagagtatggaatatgatgccgttgcaactacg

SEQ ID NO: 435517 - DNA, 55 bp, Artificial
  Synthetic oligonucleotide
gtagtaatttggaaccaacagccagggacctagtagtcagttatgttaacactaa

SEQ ID NO: 435518 - DNA, 57 bp, Artificial
  Synthetic oligonucleotide
gtagtacaaagagcttttagggctatcttacacatacctagaagaataagacagggc

SEQ ID NO: 435519 - DNA, 56 bp, Artificial
  Synthetic oligonucleotide
gtagtacaatgtcaaactgagaaaggtggtttgaacacgaccttgcccttccacaa

SEQ ID NO: 435520 - DNA, 60 bp, Artificial
  Synthetic oligonucleotide
gtagtacatgtcgtgcatggagtggtgcggttgatactacacatgtaacctttgatatgg

SEQ ID NO: 435521 - DNA, 60 bp, Artificial
  Synthetic oligonucleotide
gtagtaccaaccatagtatgttagctccacccacaatcacatcattgcctgcaatgaata

SEQ ID NO: 435522 - DNA, 55 bp, Artificial
  Synthetic oligonucleotide
gtagtaccagtgagcataacatcgagagaaataagacacacacgtgcacaaatga

SEQ ID NO: 435523 - DNA, 60 bp, Artificial
  Synthetic oligonucleotide
gtagtaccagtgagcattacatccagagaaatacggtatacgaaagcacaagtgaatgaa

SEQ ID NO: 435524 - DNA, 55 bp, Artificial
  Synthetic oligonucleotide
gtagtacctgacgacgaatttgtgaatgttatggagggcaaagcccgcacagcgc

SEQ ID NO: 435525 - DNA, 53 bp, Artificial
  Synthetic oligonucleotide
gtagtacgctacctgaaaacagatgccagacacgtgcatgtctgtgctcctgt

SEQ ID NO: 435526 - DNA, 55 bp, Artificial
  Synthetic oligonucleotide
gtagtacgtcttactcttagtggtgtagatatgaaagtgatagctttaagacgcg

SEQ ID NO: 435527 - DNA, 60 bp, Artificial
  Synthetic oligonucleotide
gtagtactgttactactatggttgcccaccgtgccacacgacgcaaacgcgcatctgcaa

SEQ ID NO: 435528 - DNA, 60 bp, Artificial
  Synthetic oligonucleotide
gtagtagaaaaaatgttgtcatatgcaaaacatactagggaatatgcagagttctactca

SEQ ID NO: 435529 - DNA, 57 bp, Artificial
  Synthetic oligonucleotide
gtagtagaaggaagttgatctacgtcgaagtcgtcaatgtcttccggattaccttca

SEQ ID NO: 435530 - DNA, 55 bp, Artificial
  Synthetic oligonucleotide
gtagtagaattgcatgaagtgccctggattgtcaatgctgaaggggagctagttg

SEQ ID NO: 435531 - DNA, 59 bp, Artificial
  Synthetic oligonucleotide
gtagtagagctacatgttgttatgcttattcgtataacggtcctcgcgcttgtaaaggc

SEQ ID NO: 435532 - DNA, 59 bp, Artificial
  Synthetic oligonucleotide
gtagtagcaaatgcacaaagacaaatagtacatcaggccctctcccccagaactctaaa

SEQ ID NO: 435533 - DNA, 55 bp, Artificial
  Synthetic oligonucleotide
gtagtagctaacgggacagataggattatagaagtattacaaagagctggtagag

SEQ ID NO: 435534 - DNA, 59 bp, Artificial
  Synthetic oligonucleotide
gtagtagctaattggacagatagagctatagaagtagtgcaaagagttggtagggctat

SEQ ID NO: 435535 - DNA, 60 bp, Artificial
  Synthetic oligonucleotide
gtagtaggaatagcagccttagtagtggcatttatcttagtagtaattgtgtggaccata

SEQ ID NO: 435536 - DNA, 56 bp, Artificial
  Synthetic oligonucleotide
gtagtaggatacctactcttaaactaacaagtaatgcagattatgccaacacatcc

SEQ ID NO: 435537 - DNA, 55 bp, Artificial
  Synthetic oligonucleotide
gtagtagtccaaagttaagtctcgaaatcatcaagacacggagctggctctggac

SEQ ID NO: 435538 - DNA, 60 bp, Artificial
  Synthetic oligonucleotide
gtagtagtgcaggttacaattgcatttgatgggaatattaaactcagcctgtttcgtgtc

SEQ ID NO: 435539 - DNA, 60 bp, Artificial
  Synthetic oligonucleotide
gtagtagtggagagcgcctgcaaacaccccggtgagaagcagaaggaccagcatcttgca

SEQ ID NO: 435540 - DNA, 55 bp, Artificial
  Synthetic oligonucleotide
gtagtagttggtactactgatcgcaaaggccttcccacgtacaactggggagcaa

SEQ ID NO: 435541 - DNA, 56 bp, Artificial
  Synthetic oligonucleotide
gtagtatcaactcaattactgttaaatggtagtctagcaaaagaagggatagtaat

SEQ ID NO: 435542 - DNA, 55 bp, Artificial
  Synthetic oligonucleotide
gtagtatcatgtgtaggtcgcgtcagcgctgacccttgaactggaaatacgcggt

SEQ ID NO: 435543 - DNA, 60 bp, Artificial
  Synthetic oligonucleotide
gtagtatgcgctattacattagtggtgtgtttagcaatccttacggctattagattatgt

SEQ ID NO: 435544 - DNA, 60 bp, Artificial
  Synthetic oligonucleotide
gtagtatgtagctacgggctggccaggtacggacatactcagagcgcaatcagagcgctc

SEQ ID NO: 435545 - DNA, 58 bp, Artificial
  Synthetic oligonucleotide
gtagtatgttgtaccagcgaggttatacctccgagattatttggaagggcttctgcga

SEQ ID NO: 435546 - DNA, 55 bp, Artificial
  Synthetic oligonucleotide
gtagtattcggaagatgattgataatttactcggctatcgcgaggaatgcaggaa

SEQ ID NO: 435547 - DNA, 60 bp, Artificial
  Synthetic oligonucleotide
gtagtattggtcatgctaacaagttgcgaaagcaagttgctgacatggtcggtgtcacac

SEQ ID NO: 435548 - DNA, 55 bp, Artificial
  Synthetic oligonucleotide
gtagtcaagcctatacaaaagtaatgtatttccacaagggattagtagttaagga

SEQ ID NO: 435549 - DNA, 55 bp, Artificial
  Synthetic oligonucleotide
gtagtcaagggacgcccgtgttcgaggagtttcgcaaacacgtagaaatggtgcg

SEQ ID NO: 435550 - DNA, 55 bp, Artificial
  Synthetic oligonucleotide
gtagtcaaggggactaaggccgttagctctaatggttggacagcttctggagact

SEQ ID NO: 435551 - DNA, 55 bp, Artificial
  Synthetic oligonucleotide
gtagtcaatagagagagggatggacaaactgggtcgggtggtcgtgcccgagggc

SEQ ID NO: 435552 - DNA, 55 bp, Artificial
  Synthetic oligonucleotide
gtagtcaatcctagagaggcctcctggaacataatctcttggattaagggattca

SEQ ID NO: 435553 - DNA, 58 bp, Artificial
  Synthetic oligonucleotide
gtagtcaattatgttaacactaacatgggcctaaagatcagacaattattgtggttcc

SEQ ID NO: 435554 - DNA, 60 bp, Artificial
  Synthetic oligonucleotide
gtagtcaccaagaaactcaggcaaggcaagatgatcctcgcagggaatgatttctacatt

SEQ ID NO: 435555 - DNA, 54 bp, Artificial
  Synthetic oligonucleotide
gtagtcacgtcaaacatgtgggatcctttactaaacgagtttcccgaaactgta

SEQ ID NO: 435556 - DNA, 55 bp, Artificial
  Synthetic oligonucleotide
gtagtcacttctccgctacatcgtcaggtgaacttgaccactccctaaccagggg

SEQ ID NO: 435557 - DNA, 53 bp, Artificial
  Synthetic oligonucleotide
gtagtcagagtgttttccatatgtgaataaacgtttatcgttttaaaggtttc

SEQ ID NO: 435558 - DNA, 54 bp, Artificial
  Synthetic oligonucleotide
gtagtcatgtaccttctggagccacgggttttggcgatagtacccgtaacccca

SEQ ID NO: 435559 - DNA, 55 bp, Artificial
  Synthetic oligonucleotide
gtagtcatgttcaccggagaacttgtcgtagacgcggactgtgaaaagcccgagg

SEQ ID NO: 435560 - DNA, 60 bp, Artificial
  Synthetic oligonucleotide
gtagtcattgatggtgtattgaaccaggtgctgaatgataacatcaggaatggacatgtt

SEQ ID NO: 435561 - DNA, 60 bp, Artificial
  Synthetic oligonucleotide
gtagtccaaacggttactcatttaggatcctgcggcatatcctgagatcgttcgacgaga

SEQ ID NO: 435562 - DNA, 55 bp, Artificial
  Synthetic oligonucleotide
gtagtccaccgaaaacacgacttgccgatctccggatatcacctggagagtgtcg

SEQ ID NO: 435563 - DNA, 60 bp, Artificial
  Synthetic oligonucleotide
gtagtccatatagggaaggttatgtgtatcagtgatgttactcgcggtactgggctcacc

SEQ ID NO: 435564 - DNA, 55 bp, Artificial
  Synthetic oligonucleotide
gtagtccatatgttagtcctttaggccatatagaacagtcagtggactgtgatat

SEQ ID NO: 435565 - DNA, 55 bp, Artificial
  Synthetic oligonucleotide
gtagtccattgggtcgtaaagaacccaacgatcttcggagagtttgtcaagcttg

SEQ ID NO: 435566 - DNA, 52 bp, Artificial
  Synthetic oligonucleotide
gtagtcccacaaatttcccaaggacttaaatgctctgggatttaccaaacct

SEQ ID NO: 435567 - DNA, 60 bp, Artificial
  Synthetic oligonucleotide
gtagtcccagaggagaggtcttaagagactgatatgatcacggtgaacttccggatgtcc

SEQ ID NO: 435568 - DNA, 59 bp, Artificial
  Synthetic oligonucleotide
gtagtcccgcagtcgtacacgcgctccgagcaattgcatggattctccgtttattgcac

SEQ ID NO: 435569 - DNA, 55 bp, Artificial
  Synthetic oligonucleotide
gtagtccggagagaagactgcaaagaagactcttcacggatcatcaagccaggtg

SEQ ID NO: 435570 - DNA, 58 bp, Artificial
  Synthetic oligonucleotide
gtagtccgtgtcacaggagctccaataaagaagagatccggaattagtaagttgtcaa

SEQ ID NO: 435571 - DNA, 58 bp, Artificial
  Synthetic oligonucleotide
gtagtcctaactaattcgcttaactgacccattgacattgttatgttggattccgctc

SEQ ID NO: 435572 - DNA, 58 bp, Artificial
  Synthetic oligonucleotide
gtagtcctagtgacatagtcactgcccaaatgttagcccaaggctacagccccggaaa

SEQ ID NO: 435573 - DNA, 51 bp, Artificial
  Synthetic oligonucleotide
gtagtcctcaccgaatcaaccctatctactgctttggccgagcttgccact

SEQ ID NO: 435574 - DNA, 60 bp, Artificial
  Synthetic oligonucleotide
gtagtcgacgtgcgagaagtccacatcattatccgtgaactgtttggacaggatcttcac

SEQ ID NO: 435575 - DNA, 55 bp, Artificial
  Synthetic oligonucleotide
gtagtcgagatggttagcaacgtcgaccgtctgatggacagcctgcaatcgatcg

SEQ ID NO: 435576 - DNA, 60 bp, Artificial
  Synthetic oligonucleotide
gtagtcgatgacgaatgtctttgttgatatggctggagattgtgtcgaactgatccgcat

SEQ ID NO: 435577 - DNA, 60 bp, Artificial
  Synthetic oligonucleotide
gtagtcggacctgggcctcgtgttgagacagtggaacctaaccatgagcaatcgagcgga

SEQ ID NO: 435578 - DNA, 53 bp, Artificial
  Synthetic oligonucleotide
gtagtcggttcaatagctggtggtaaaagtaaagaccctttggaacgtgcaaa

SEQ ID NO: 435579 - DNA, 55 bp, Artificial
  Synthetic oligonucleotide
gtagtcgtatgttcttgagctggtttgcattatggcgagattttcgtctatatcc

SEQ ID NO: 435580 - DNA, 55 bp, Artificial
  Synthetic oligonucleotide
gtagtctaactaactttccgattttgacacctgtcagctaactcgttcgcacacc

SEQ ID NO: 435581 - DNA, 60 bp, Artificial
  Synthetic oligonucleotide
gtagtctaatggatatctatggaaacgttagaccacaaaactggacagccgatgatgaaa

SEQ ID NO: 435582 - DNA, 56 bp, Artificial
  Synthetic oligonucleotide
gtagtctatttgtggtccctactagtccggattggaacatggatgttaatcttatt

SEQ ID NO: 435583 - DNA, 55 bp, Artificial
  Synthetic oligonucleotide
gtagtctcggagagaagactacagagagttacttcacggatcatcaagccaggtg

SEQ ID NO: 435584 - DNA, 57 bp, Artificial
  Synthetic oligonucleotide
gtagtctctgggaccagagtcttaaaccatgtgtaaagctaactcctttatgtgtaa

SEQ ID NO: 435585 - DNA, 55 bp, Artificial
  Synthetic oligonucleotide
gtagtctggcagaagatgaggtagtaattagatctgccaatttcacagacaatgc

SEQ ID NO: 435586 - DNA, 58 bp, Artificial
  Synthetic oligonucleotide
gtagtctgtaagggtacgaaatgcatactcacacataataggtcgcgtaggcgaccat

SEQ ID NO: 435587 - DNA, 55 bp, Artificial
  Synthetic oligonucleotide
gtagtctgttgcattccttgtgatatgagggaggtcgaaagcgtacctcatcatg

SEQ ID NO: 435588 - DNA, 58 bp, Artificial
  Synthetic oligonucleotide
gtagtcttttagtatcgatccctcgactctcgaccgcactaaatctcatcgttattac

SEQ ID NO: 435589 - DNA, 54 bp, Artificial
  Synthetic oligonucleotide
gtagtgaacagtatttgcaacaccacaggagttggaaaacccaagtttctcccg

SEQ ID NO: 435590 - DNA, 60 bp, Artificial
  Synthetic oligonucleotide
gtagtgaagatctatgttacatctgataggaaaggtccacgacgcctgtagtgattcatt

SEQ ID NO: 435591 - DNA, 57 bp, Artificial
  Synthetic oligonucleotide
gtagtgaagggtttgtgagagggctccaaacaagagaccaattaatgtcttatatcc

SEQ ID NO: 435592 - DNA, 60 bp, Artificial
  Synthetic oligonucleotide
gtagtgaatagatacgtgaccagtgcagatagaatgaggtacacgaatgatttcgtgcca

SEQ ID NO: 435593 - DNA, 55 bp, Artificial
  Synthetic oligonucleotide
gtagtgaatgtggactcctcaacctttattgtttcaagcatgttcccaccatcaa

SEQ ID NO: 435594 - DNA, 57 bp, Artificial
  Synthetic oligonucleotide
gtagtgacataggccatatagtcatgcaatacatgtatgtaccacctggggccccag

SEQ ID NO: 435595 - DNA, 60 bp, Artificial
  Synthetic oligonucleotide
gtagtgacgggaagtgctgttggctgtgatccagatttgttttggagtaagattccagta

SEQ ID NO: 435596 - DNA, 50 bp, Artificial
  Synthetic oligonucleotide
gtagtgaggagagttgtcattaaggggtggtggccacttattcagtgcat

SEQ ID NO: 435597 - DNA, 60 bp, Artificial
  Synthetic oligonucleotide
gtagtgagtagcgtgtcccatgcctcatggacatacttgttctcggcgcgcgtgtactca

SEQ ID NO: 435598 - DNA, 60 bp, Artificial
  Synthetic oligonucleotide
gtagtgatagcggtttattagatgcgtgcgtcgatttgatctttgacgtagtctctaaag

SEQ ID NO: 435599 - DNA, 55 bp, Artificial
  Synthetic oligonucleotide
gtagtgattgcaagaatcctaacaatgataaagggaatcatggagtgaaaggctg

SEQ ID NO: 435600 - DNA, 57 bp, Artificial
  Synthetic oligonucleotide
gtagtgcaatcgaaaggttctacaacaagagtgctgaacacaagccttctgagatca

SEQ ID NO: 435601 - DNA, 59 bp, Artificial
  Synthetic oligonucleotide
gtagtgcactccgcactatgtgggatccattagtgaacgagtttcccgaaactgttcac

SEQ ID NO: 435602 - DNA, 60 bp, Artificial
  Synthetic oligonucleotide
gtagtgcaggttacaattgcatttgatcggaatagtgaactcagcctgtttcgtgtcccc

SEQ ID NO: 435603 - DNA, 60 bp, Artificial
  Synthetic oligonucleotide
gtagtgcatcaataaagataatgttaggcgatctaatatatcaacaagcatcagtgcaag

SEQ ID NO: 435604 - DNA, 50 bp, Artificial
  Synthetic oligonucleotide
gtagtgcatgtagttggttcgttacttcagtagtgacaatttcacgaccc

SEQ ID NO: 435605 - DNA, 60 bp, Artificial
  Synthetic oligonucleotide
gtagtgccagatccagaggcgtggatcaagtgcgtagagggcatgcatgttacgtattca

SEQ ID NO: 435606 - DNA, 60 bp, Artificial
  Synthetic oligonucleotide
gtagtgccatgtgaaccaatcataatagagaggaacatagtgcatttaaatagtactacc

SEQ ID NO: 435607 - DNA, 60 bp, Artificial
  Synthetic oligonucleotide
gtagtgccccaaagcctctcccctgaacaactctcagcactacacgagcttggcaactcc

SEQ ID NO: 435608 - DNA, 56 bp, Artificial
  Synthetic oligonucleotide
gtagtgcggctcgctcaaacctaacatcttgcctccttaaaacggaagttcttcaa

SEQ ID NO: 435609 - DNA, 57 bp, Artificial
  Synthetic oligonucleotide
gtagtgcggtctggctaaccgtaacggcgtatcggcttggctttccaatgattaggc

SEQ ID NO: 435610 - DNA, 60 bp, Artificial
  Synthetic oligonucleotide
gtagtgctatagtattagtttatgccagcagggaggctattaccctgcgagcttacatca

SEQ ID NO: 435611 - DNA, 60 bp, Artificial
  Synthetic oligonucleotide
gtagtgctatcgtgttgtgagttacgttagtgctgacgtgatggaaggataaagacccac

SEQ ID NO: 435612 - DNA, 57 bp, Artificial
  Synthetic oligonucleotide
gtagtgctctacttgataagcttgtctggaactactccggtggtgtttaacaagtgt

SEQ ID NO: 435613 - DNA, 60 bp, Artificial
  Synthetic oligonucleotide
gtagtgctgccagaaaaggacagctggactgtcaatgacatacagaagttagtgggaaaa

SEQ ID NO: 435614 - DNA, 55 bp, Artificial
  Synthetic oligonucleotide
gtagtggagccccctagcctccaccttttcctttcctctggcaatagcgcctaaa

SEQ ID NO: 435615 - DNA, 50 bp, Artificial
  Synthetic oligonucleotide
gtagtggagtcagaactcttaaatgcattgaaaaaatctaaatgttgggc

SEQ ID NO: 435616 - DNA, 55 bp, Artificial
  Synthetic oligonucleotide
gtagtggatattgcagttacaccctatgggtattgtgaactcagcctgctttgag

SEQ ID NO: 435617 - DNA, 52 bp, Artificial
  Synthetic oligonucleotide
gtagtggcggttgagcccgtcatcttctctgacatggagaccaagattatca

SEQ ID NO: 435618 - DNA, 60 bp, Artificial
  Synthetic oligonucleotide
gtagtggctatgatattcctataacagcagggccagacattgtatttaactctaatacta

SEQ ID NO: 435619 - DNA, 60 bp, Artificial
  Synthetic oligonucleotide
gtagtggctcctgaatgggacacttcctcttgattccagaagggagattggacatcgcag

SEQ ID NO: 435620 - DNA, 54 bp, Artificial
  Synthetic oligonucleotide
gtagtgggcttcttcaagagcatccttggtttggcttcaaattggtacattcta

SEQ ID NO: 435621 - DNA, 59 bp, Artificial
  Synthetic oligonucleotide
gtagtggggatcgacgtcatcaatgacgttgtaccaggcctcattactgtacacctttg

SEQ ID NO: 435622 - DNA, 60 bp, Artificial
  Synthetic oligonucleotide
gtagtggggctgacacagaggatgtcgtgtgctgctcaatgtcttattcctggacaggtg

SEQ ID NO: 435623 - DNA, 55 bp, Artificial
  Synthetic oligonucleotide
gtagtgggtcaaggtgtgcgacagtcagtggtagagtagacaatcctaaccgggc

SEQ ID NO: 435624 - DNA, 58 bp, Artificial
  Synthetic oligonucleotide
gtagtggtagaacggtgttgagccggtcatgtagctgttcgtgtccccgaacatcgcc

SEQ ID NO: 435625 - DNA, 52 bp, Artificial
  Synthetic oligonucleotide
gtagtggtagccacgagaggctatgaggaatggcaaggaggagaatcaaacc

SEQ ID NO: 435626 - DNA, 52 bp, Artificial
  Synthetic oligonucleotide
gtagtggtgagcattgaccggtttctaagggttcgggaccaacgagggaacg

SEQ ID NO: 435627 - DNA, 60 bp, Artificial
  Synthetic oligonucleotide
gtagtgtagagttaagtcatggagaagtgttatcacgacagcagaaccattggatagcgt

SEQ ID NO: 435628 - DNA, 55 bp, Artificial
  Synthetic oligonucleotide
gtagtgtatcccactgagatcttcgctggagcgaaacactcactcaacccatggt

SEQ ID NO: 435629 - DNA, 55 bp, Artificial
  Synthetic oligonucleotide
gtagtgtcaactcaactactgttaaatggcagtctagcagagggagagatagtga

SEQ ID NO: 435630 - DNA, 60 bp, Artificial
  Synthetic oligonucleotide
gtagtgtcaactcaattgctgttaaatggcagtctagcagaagaaggtgtagtaattaga

SEQ ID NO: 435631 - DNA, 60 bp, Artificial
  Synthetic oligonucleotide
gtagtgtcagacgtgtactccatgacacattctaatcccatggcacactttgtacaccca

SEQ ID NO: 435632 - DNA, 55 bp, Artificial
  Synthetic oligonucleotide
gtagtgtgcaaccagaagatacagttgagacccgctatgtacaaacttcccagac

SEQ ID NO: 435633 - DNA, 55 bp, Artificial
  Synthetic oligonucleotide
gtagtgtgcctgccttgccttttgcaaattgtgtccagtagcatccgaaagatga

SEQ ID NO: 435634 - DNA, 55 bp, Artificial
  Synthetic oligonucleotide
gtagtgtggctgatcaagaagaataatgtgtaccgaacaataaagaggacctacc

SEQ ID NO: 435635 - DNA, 55 bp, Artificial
  Synthetic oligonucleotide
gtagtgtggggctcccttctgtaaataccatcaaatatagtatactaggagcatc

SEQ ID NO: 435636 - DNA, 60 bp, Artificial
  Synthetic oligonucleotide
gtagtgttgatcagcgtcctcacatggaacgtggtcaaggcgtcttccattgagccgttg

SEQ ID NO: 435637 - DNA, 52 bp, Artificial
  Synthetic oligonucleotide
gtagtgttggttacaccttacgaggtaaaaccttactactacactatatgca

SEQ ID NO: 435638 - DNA, 54 bp, Artificial
  Synthetic oligonucleotide
gtagtgttgtctgactttgcaccagaaacggctagcgcaatgtatctgatccta

SEQ ID NO: 435639 - DNA, 55 bp, Artificial
  Synthetic oligonucleotide
gtagtgttttatccaatccttgctccaatgaatcgttttctcgagactcggagtg

SEQ ID NO: 435640 - DNA, 60 bp, Artificial
  Synthetic oligonucleotide
gtagttaagcgcgatggtagtgcgtttagaagtgatcgtctctctcttcagttccgataa

SEQ ID NO: 435641 - DNA, 52 bp, Artificial
  Synthetic oligonucleotide
gtagttaatttagtgagaggttcaaataccgtaaagattgttgggaaaggag

SEQ ID NO: 435642 - DNA, 55 bp, Artificial
  Synthetic oligonucleotide
gtagttacacacgacactagagataatgtgtcagtggattataaacaaacccagt

SEQ ID NO: 435643 - DNA, 55 bp, Artificial
  Synthetic oligonucleotide
gtagttaccagaatgtgtgttatattgaagttaatggaaatagggcgtttgttag

SEQ ID NO: 435644 - DNA, 59 bp, Artificial
  Synthetic oligonucleotide
gtagttagaaggatctgcttactggtgttgtcacagtttcctgaaatatccccatccaa

SEQ ID NO: 435645 - DNA, 55 bp, Artificial
  Synthetic oligonucleotide
gtagttagccctagttgtgaataccacacaggacacaaccaggtaggatctctac

SEQ ID NO: 435646 - DNA, 54 bp, Artificial
  Synthetic oligonucleotide
gtagttagtacatgtgatgtggccgcctttgacaatctgtgcaatagtaggact

SEQ ID NO: 435647 - DNA, 55 bp, Artificial
  Synthetic oligonucleotide
gtagttcaaacacaattctctcaactctgaaatggcttcatccattgcgcatcaa

SEQ ID NO: 435648 - DNA, 55 bp, Artificial
  Synthetic oligonucleotide
gtagttcaagccaccactacagtgaatacaactaatttaacccaacacccttcag

SEQ ID NO: 435649 - DNA, 55 bp, Artificial
  Synthetic oligonucleotide
gtagttcactaaaagtaaccttctgtgtatgatccctaccctgagtgaacgacag

SEQ ID NO: 435650 - DNA, 53 bp, Artificial
  Synthetic oligonucleotide
gtagttcccagaggacagctggcaaccagaggagtgcaaattgcctccaatga

SEQ ID NO: 435651 - DNA, 55 bp, Artificial
  Synthetic oligonucleotide
gtagttctctattgtgtacacgaaaagatagaggtccgagacaccaaagaggcct

SEQ ID NO: 435652 - DNA, 60 bp, Artificial
  Synthetic oligonucleotide
gtagttctggcatttcctgcaaagttaggattcatgtggatgaaccagatgaacttacag

SEQ ID NO: 435653 - DNA, 53 bp, Artificial
  Synthetic oligonucleotide
gtagttcttagagcccccttacccctgtacccccttcatgcccgtgtcctgtc

SEQ ID NO: 435654 - DNA, 55 bp, Artificial
  Synthetic oligonucleotide
gtagttgacaagctcagagccgcaatgtctgatggcatggctaaagacatgccga

SEQ ID NO: 435655 - DNA, 54 bp, Artificial
  Synthetic oligonucleotide
gtagttgagggtggcatgccatcaggatgttcaggcactagtatatttaattcc

SEQ ID NO: 435656 - DNA, 55 bp, Artificial
  Synthetic oligonucleotide
gtagttgcaagccagcaatcgacctgtcgtaacgcgtaagtctgtggcggaaccg

SEQ ID NO: 435657 - DNA, 58 bp, Artificial
  Synthetic oligonucleotide
gtagttgcttgcaattgtggtacaagacttcgcttatacgtctttgctacggaacttg

SEQ ID NO: 435658 - DNA, 55 bp, Artificial
  Synthetic oligonucleotide
gtagttggcacatcaatcgcacagccttgaactgcaatgatagcctccataccgg

SEQ ID NO: 435659 - DNA, 55 bp, Artificial
  Synthetic oligonucleotide
gtagttggcttgccaatggtacttggagtagtacttggaacactactggagagtt

SEQ ID NO: 435660 - DNA, 55 bp, Artificial
  Synthetic oligonucleotide
gtagttgttaggcctggctttaatttagccaacgtagatggagtagacactggcg

SEQ ID NO: 435661 - DNA, 56 bp, Artificial
  Synthetic oligonucleotide
gtagtttcagataatcatacaccagcacaaaacattggaaaattctgttatactac

SEQ ID NO: 435662 - DNA, 53 bp, Artificial
  Synthetic oligonucleotide
gtagtttctcactgcctaaatggttggagagtactactgtcagtgttgaagac

SEQ ID NO: 435663 - DNA, 60 bp, Artificial
  Synthetic oligonucleotide
gtagtttctcagtaaagcaagacattgtagcaataactgattggtcaggatatagtggga

SEQ ID NO: 435664 - DNA, 58 bp, Artificial
  Synthetic oligonucleotide
gtagtttctgcgctcctctagtgaagttggaggaaagcttattctgaagtgttttgac

SEQ ID NO: 435665 - DNA, 60 bp, Artificial
  Synthetic oligonucleotide
gtagttttcatggtcatcagtgagtcaacctccttgtttaggtccctcagactgatgaga

SEQ ID NO: 435666 - DNA, 53 bp, Artificial
  Synthetic oligonucleotide
gtagttttgtgcgacaatcgtccgagcacggtactgttgtgatagtttacatg

SEQ ID NO: 435667 - DNA, 60 bp, Artificial
  Synthetic oligonucleotide
gtataaaatactgtcaatttacagctgcattgcaagcagtctcgtactggcagcactcat

SEQ ID NO: 435668 - DNA, 57 bp, Artificial
  Synthetic oligonucleotide
gtataaaatttgtatccgatagtagcacatagattcacgatcacatccccgttctta

SEQ ID NO: 435669 - DNA, 58 bp, Artificial
  Synthetic oligonucleotide
gtataaacatttctatgttcgcgtcttgcagcacgtttttagagataaccaagaaatc

SEQ ID NO: 435670 - DNA, 55 bp, Artificial
  Synthetic oligonucleotide
gtataaacgatatgcccacattattggcacgtggctcaacactggttcttacacg

SEQ ID NO: 435671 - DNA, 57 bp, Artificial
  Synthetic oligonucleotide
gtataaactgtgagagttcccgtagtgaaatggtaatcacatagaccttatacaatt

SEQ ID NO: 435672 - DNA, 55 bp, Artificial
  Synthetic oligonucleotide
gtataaagcaaacaatcgcgatcgtaagtctcagaaccgtttctgatatagacta

SEQ ID NO: 435673 - DNA, 50 bp, Artificial
  Synthetic oligonucleotide
gtataaaggtttgtacatctattacgtggcgaaggtctttctgaataagg

SEQ ID NO: 435674 - DNA, 55 bp, Artificial
  Synthetic oligonucleotide
gtataaatataaagtggtaggacttaagccattgggagtagcacccactgaggca

SEQ ID NO: 435675 - DNA, 57 bp, Artificial
  Synthetic oligonucleotide
gtataaatgcgattacatggttgtggaggaatacacctggtattcctcacctaggtt

SEQ ID NO: 435676 - DNA, 55 bp, Artificial
  Synthetic oligonucleotide
gtataaatgtacccgcttcttgcattgtattcagtcgctctgcggagaggctggc

SEQ ID NO: 435677 - DNA, 60 bp, Artificial
  Synthetic oligonucleotide
gtataaatgttggaccgatatcgccagactatactcaacatatggctacaattggtgtgc

SEQ ID NO: 435678 - DNA, 60 bp, Artificial
  Synthetic oligonucleotide
gtataacactaatgcctgctttgctactaattgatttcctctgttacaacaatctacctc

SEQ ID NO: 435679 - DNA, 60 bp, Artificial
  Synthetic oligonucleotide
gtataacagcataactgcacctgtatgggctggatttgatggagctactgttcagctatt

SEQ ID NO: 435680 - DNA, 54 bp, Artificial
  Synthetic oligonucleotide
gtataacgagagcgcccttaatgttccagcccgattgggggaactttctccgag

SEQ ID NO: 435681 - DNA, 54 bp, Artificial
  Synthetic oligonucleotide
gtataacgctgtagagcgtaaattaactaaatatgctaaaggtaaaccgttgga

SEQ ID NO: 435682 - DNA, 60 bp, Artificial
  Synthetic oligonucleotide
gtataacttattggtaagcaaagcataaatattttggatacagtcattatatcatgccgt

SEQ ID NO: 435683 - DNA, 57 bp, Artificial
  Synthetic oligonucleotide
gtataagacgccgtataggagtccgtatggctcccgtataacaccatatgttaatcg

SEQ ID NO: 435684 - DNA, 60 bp, Artificial
  Synthetic oligonucleotide
gtataagcctatgactgacatcatagattgcacagctgctctagtagatccatttgctgc

SEQ ID NO: 435685 - DNA, 55 bp, Artificial
  Synthetic oligonucleotide
gtataagcgggtatatggaagagtttgggtttgcaccgagtgtgcgagatatggc

SEQ ID NO: 435686 - DNA, 55 bp, Artificial
  Synthetic oligonucleotide
gtataagctaccgacatatctaattaagtttaagccaactcctcccttcaagctc

SEQ ID NO: 435687 - DNA, 60 bp, Artificial
  Synthetic oligonucleotide
gtataagctacgcacagctgagacaggggagtgttatacagaactgtataaaatgataga

SEQ ID NO: 435688 - DNA, 60 bp, Artificial
  Synthetic oligonucleotide
gtataaggtactatgtaaagcagttaactcgtatgagaagttacttatagctgagaatga

SEQ ID NO: 435689 - DNA, 60 bp, Artificial
  Synthetic oligonucleotide
gtataaggtgggttctcctagtcatcactcgagtgccgctcgtgggcaacgttctactga

SEQ ID NO: 435690 - DNA, 53 bp, Artificial
  Synthetic oligonucleotide
gtataagtaaacagcaagcgttgaaccttttgcggtctgatccaaaagtatta

SEQ ID NO: 435691 - DNA, 56 bp, Artificial
  Synthetic oligonucleotide
gtataagtacaaagtagttagtatagaacccataggagtagcaccaggtaaagcca

SEQ ID NO: 435692 - DNA, 60 bp, Artificial
  Synthetic oligonucleotide
gtataagtagcaccctggtaacttcgtcagagctgctactctcagcatctgttgcttagt

SEQ ID NO: 435693 - DNA, 58 bp, Artificial
  Synthetic oligonucleotide
gtataataagatggaatttgaaccgtttcagtctcttgtccctaaagcagccagaggc

SEQ ID NO: 435694 - DNA, 60 bp, Artificial
  Synthetic oligonucleotide
gtataatacagaggcactgataagcacataactcgaacactattaaatcgtatcttgtag

SEQ ID NO: 435695 - DNA, 55 bp, Artificial
  Synthetic oligonucleotide
gtataatccctgacaagactatagccgttgcctataaccgcctcaagatcggcga

SEQ ID NO: 435696 - DNA, 55 bp, Artificial
  Synthetic oligonucleotide
gtataatcctgtttgtgtgtcttttgataggaaggtgcagggttacggagtcaat

SEQ ID NO: 435697 - DNA, 60 bp, Artificial
  Synthetic oligonucleotide
gtataatgaaagatcacacgtgcgagaatatatcagtgcttgaaggagcaaagtcacagt

SEQ ID NO: 435698 - DNA, 60 bp, Artificial
  Synthetic oligonucleotide
gtataatgagtaagataaccgactatgccaggacaactgccaaaggtaatagtgtcgcgc

SEQ ID NO: 435699 - DNA, 60 bp, Artificial
  Synthetic oligonucleotide
gtataatggagatttctgtaacaagtgtggtttttgcatgtgtggtgtattagaggatgt

SEQ ID NO: 435700 - DNA, 58 bp, Artificial
  Synthetic oligonucleotide
gtataatggtagatataatccctctattgttccgaaagtcgatcaaactagcccaata

SEQ ID NO: 435701 - DNA, 56 bp, Artificial
  Synthetic oligonucleotide
gtataattgttgtgaccgtagtcaccttgaaaaatgtcgtaaacgcgttgaagcac

SEQ ID NO: 435702 - DNA, 60 bp, Artificial
  Synthetic oligonucleotide
gtataatttcacagaccatgctgtcgatatatcaacttaggtgttattgccaaagaccgc

SEQ ID NO: 435703 - DNA, 54 bp, Artificial
  Synthetic oligonucleotide
gtatacaaacattggactcaactcgtttcaaaacgaccccttaaagatatccgc

SEQ ID NO: 435704 - DNA, 57 bp, Artificial
  Synthetic oligonucleotide
gtatacaacgagtgtcagctcctcgtttgtatagtaaggcctatcaacaggtaaagg

SEQ ID NO: 435705 - DNA, 55 bp, Artificial
  Synthetic oligonucleotide
gtatacaagagttctcaatgatgggtcgtcaggattgtccagttgagctagtttc

SEQ ID NO: 435706 - DNA, 60 bp, Artificial
  Synthetic oligonucleotide
gtatacagagatgaagcattaaacaaccggttccagatcaaaggcgttgagctgaagtca

SEQ ID NO: 435707 - DNA, 59 bp, Artificial
  Synthetic oligonucleotide
gtatacagccgccaactctatcctaccggagtatgccttacatccgtcaattacgccga

SEQ ID NO: 435708 - DNA, 60 bp, Artificial
  Synthetic oligonucleotide
gtatacagtatcgaggaaggtatacacgccaccgaggccagatgcgttaaagtgcagtgc

SEQ ID NO: 435709 - DNA, 55 bp, Artificial
  Synthetic oligonucleotide
gtatacagtgacgactatttatccctaatgtctacttccggtcaatccatctacg

SEQ ID NO: 435710 - DNA, 60 bp, Artificial
  Synthetic oligonucleotide
gtatacatcaatactgcattgcttaatgcgtcctgtgcagccatggatgatttccaacta

SEQ ID NO: 435711 - DNA, 60 bp, Artificial
  Synthetic oligonucleotide
gtatacatcactgcgttaaaccctagcagtctcaacttctgttgaggagtgagtacacgg

SEQ ID NO: 435712 - DNA, 57 bp, Artificial
  Synthetic oligonucleotide
gtatacatctaggacgggggagaataatgtatgtaacagaacgaatacaaggaggta

SEQ ID NO: 435713 - DNA, 60 bp, Artificial
  Synthetic oligonucleotide
gtatacatgtaggcggtaatggtagagatggattttcagccacactaattagatcatatt

SEQ ID NO: 435714 - DNA, 57 bp, Artificial
  Synthetic oligonucleotide
gtatacatgtagggggaaatggtagggatggcttttcttctatgttgcttagatcat

SEQ ID NO: 435715 - DNA, 54 bp, Artificial
  Synthetic oligonucleotide
gtatacattaaatctgctaagttaaaagctacttattctcttgagtatcaaaca

SEQ ID NO: 435716 - DNA, 52 bp, Artificial
  Synthetic oligonucleotide
gtatacccatacacaacagcttcttgagatggctcctgagatcaggtgagag

SEQ ID NO: 435717 - DNA, 54 bp, Artificial
  Synthetic oligonucleotide
gtataccccaaacgagatccaagttcgtaaccagtcttgccgccggagtctttg

SEQ ID NO: 435718 - DNA, 58 bp, Artificial
  Synthetic oligonucleotide
gtataccgattgcttctctacccccctatcggtatatcggtatcttgtatatactaga

SEQ ID NO: 435719 - DNA, 60 bp, Artificial
  Synthetic oligonucleotide
gtataccgtgcaaccacaagggatgtcaatcctgcgtctcctgattgctctcttcttggc

SEQ ID NO: 435720 - DNA, 55 bp, Artificial
  Synthetic oligonucleotide
gtatacctattagaccaccagttagcattgaccctgtaggtcccttggacccctc

SEQ ID NO: 435721 - DNA, 56 bp, Artificial
  Synthetic oligonucleotide
gtatacctcgagggtcctggtctcgtggaggtacaggagagtgaatactaccccaa

SEQ ID NO: 435722 - DNA, 50 bp, Artificial
  Synthetic oligonucleotide
gtatacctgagcagttccaaaccacatggttaaaaccttacgagcaatgt

SEQ ID NO: 435723 - DNA, 51 bp, Artificial
  Synthetic oligonucleotide
gtatacctggaacatgtcaccctttatatcagacaaatatacaaactctct

SEQ ID NO: 435724 - DNA, 50 bp, Artificial
  Synthetic oligonucleotide
gtatacctttgaacgtcatacctgggaccaagattacggtggcctacttg

SEQ ID NO: 435725 - DNA, 55 bp, Artificial
  Synthetic oligonucleotide
gtatacgacaccgccatagtcctcccgcgtcacgctatgcctgggaggaccgttg

SEQ ID NO: 435726 - DNA, 57 bp, Artificial
  Synthetic oligonucleotide
gtatacgaggttagctcgttctcgtatacgacattggatacactaaatttcgatttg

SEQ ID NO: 435727 - DNA, 59 bp, Artificial
  Synthetic oligonucleotide
gtatacgatttaaagatgacacatcctttgaagacataaatggtatcagacgaccgaaa

SEQ ID NO: 435728 - DNA, 58 bp, Artificial
  Synthetic oligonucleotide
gtatacgcctctaaaaatatacagagatcttttactagacgtggacacactcaacgcc

SEQ ID NO: 435729 - DNA, 58 bp, Artificial
  Synthetic oligonucleotide
gtatacggaacgtatactgacaaagtaattaaatgataggcgaagcatgactaacagg

SEQ ID NO: 435730 - DNA, 55 bp, Artificial
  Synthetic oligonucleotide
gtatacggaactactattagtgttaccaacactctgaccttaagtaagactgctg

SEQ ID NO: 435731 - DNA, 55 bp, Artificial
  Synthetic oligonucleotide
gtatacggacgtgcaagtatacactcgaatttatcgcactcataaactacgatct

SEQ ID NO: 435732 - DNA, 50 bp, Artificial
  Synthetic oligonucleotide
gtatacggaggttgtgtacacacccatcttaacaccggacggaacggtcg

SEQ ID NO: 435733 - DNA, 60 bp, Artificial
  Synthetic oligonucleotide
gtatacgtattggaccagggcaatcattctatgcaacaggtgacataataggagacataa

SEQ ID NO: 435734 - DNA, 60 bp, Artificial
  Synthetic oligonucleotide
gtatacgttagatcattatcggctaatttgaatgatgtaatctgtagtggtggtgattat

SEQ ID NO: 435735 - DNA, 53 bp, Artificial
  Synthetic oligonucleotide
gtatactaaggatgaacccttgggtttccacctttgaccaagcttttgttgag

SEQ ID NO: 435736 - DNA, 59 bp, Artificial
  Synthetic oligonucleotide
gtatactatggacatgctggtatcagaaatgtttagagagtactcacacagaaattcaa

SEQ ID NO: 435737 - DNA, 57 bp, Artificial
  Synthetic oligonucleotide
gtatactcaaaaaatggcttagaaaaccaatggatgaatacaatcttcaacacccac

SEQ ID NO: 435738 - DNA, 54 bp, Artificial
  Synthetic oligonucleotide
gtatactctagtataggtagtagattacgtagtggcatgtcgtggactagtagc

SEQ ID NO: 435739 - DNA, 53 bp, Artificial
  Synthetic oligonucleotide
gtatactcttttgaaaagtgagtaaatagtaggagtttaacgttatttgtgac

SEQ ID NO: 435740 - DNA, 58 bp, Artificial
  Synthetic oligonucleotide
gtatactgagtgagtttgatggacaagttatcgctaatatacttgcaagtgaattgag

SEQ ID NO: 435741 - DNA, 59 bp, Artificial
  Synthetic oligonucleotide
gtatactggtacgcaggaactacaccgaatgcctcagaaagctattatctaacaataaa

SEQ ID NO: 435742 - DNA, 60 bp, Artificial
  Synthetic oligonucleotide
gtatacttcctgagtgcaacaatattccaggattcagggaggcaagagttctcaattctg

SEQ ID NO: 435743 - DNA, 55 bp, Artificial
  Synthetic oligonucleotide
gtatacttctggtatgtctacatactccctgcagtgtgcaaccttacaccgtcgc

SEQ ID NO: 435744 - DNA, 60 bp, Artificial
  Synthetic oligonucleotide
gtatactttagggcttagatcaagatgtccacacaaataattgtgtggtcccaatgatct

SEQ ID NO: 435745 - DNA, 54 bp, Artificial
  Synthetic oligonucleotide
gtatagaaccggtatgtccaatgttagtgaggttataggggaaacacccgagtg

SEQ ID NO: 435746 - DNA, 60 bp, Artificial
  Synthetic oligonucleotide
gtatagacaaaagattgatgcactcaagagcgcgatagagattgagcgtgacgggatgca

SEQ ID NO: 435747 - DNA, 54 bp, Artificial
  Synthetic oligonucleotide
gtatagacagtatgagaacttaggactagtaaacatcagtcagcgaccagatgg

SEQ ID NO: 435748 - DNA, 55 bp, Artificial
  Synthetic oligonucleotide
gtatagacatgataatcggtacgaatttcttaagggctatgtctggtggagttcg

SEQ ID NO: 435749 - DNA, 60 bp, Artificial
  Synthetic oligonucleotide
gtatagacatggagctcctctctctgtacgacgaccaatttatagacggacttatgtccg

SEQ ID NO: 435750 - DNA, 50 bp, Artificial
  Synthetic oligonucleotide
gtatagacgaggagggtgactggaaagaaatcgggaactttcttagatat

SEQ ID NO: 435751 - DNA, 60 bp, Artificial
  Synthetic oligonucleotide
gtatagacgtggctggatatctaatcaacgacgaggctattcacgtcagtctttcttcaa

SEQ ID NO: 435752 - DNA, 51 bp, Artificial
  Synthetic oligonucleotide
gtatagacgttatagcaggtctgtgtatggtactacattagaggcaattac

SEQ ID NO: 435753 - DNA, 58 bp, Artificial
  Synthetic oligonucleotide
gtatagactaagagatagattgcggttattaccagtagaagtaagacgattagacatt

SEQ ID NO: 435754 - DNA, 60 bp, Artificial
  Synthetic oligonucleotide
gtatagagataggccaattccagatgattcactagcagtcagcgtacttgagaagaggag

SEQ ID NO: 435755 - DNA, 57 bp, Artificial
  Synthetic oligonucleotide
gtatagaggggggcagtgggagggctgcgacagttgaaacggaagcggttgaagtgc

SEQ ID NO: 435756 - DNA, 60 bp, Artificial
  Synthetic oligonucleotide
gtatagagggtgctagtatcacaacttcgatacctgccttgagcggcactagtgtaggat

SEQ ID NO: 435757 - DNA, 55 bp, Artificial
  Synthetic oligonucleotide
gtatagagtcaatcagaaacgggacctatgatcacgacatataccgagatgaagc

SEQ ID NO: 435758 - DNA, 55 bp, Artificial
  Synthetic oligonucleotide
gtatagatagtaggggtaccatcaatatctctgagcaggtaaagaagatgatggg

SEQ ID NO: 435759 - DNA, 57 bp, Artificial
  Synthetic oligonucleotide
gtatagatcgccggccaactcgcgacctgggaaaacagccgggaatatgtgacgtcc

SEQ ID NO: 435760 - DNA, 60 bp, Artificial
  Synthetic oligonucleotide
gtatagatgaaacttgggataatacaggtcatcacatgtcaccgctatgggacaaagaaa

SEQ ID NO: 435761 - DNA, 60 bp, Artificial
  Synthetic oligonucleotide
gtatagatgaaatgtcaagagagtctcaaagaaatggagtagctccacaatctgaagcgt

SEQ ID NO: 435762 - DNA, 60 bp, Artificial
  Synthetic oligonucleotide
gtatagattataatatagttggtactacagtaatgattaatgacagactagtctcagtta

SEQ ID NO: 435763 - DNA, 55 bp, Artificial
  Synthetic oligonucleotide
gtatagattcactaagctgcgatttacatatattccgactaccaacacgactgcg

SEQ ID NO: 435764 - DNA, 53 bp, Artificial
  Synthetic oligonucleotide
gtatagattgagagacagattacgattgttaccagtggaagtcagaagactag

SEQ ID NO: 435765 - DNA, 55 bp, Artificial
  Synthetic oligonucleotide
gtatagattggaccgatcacttggacttggtgctcccttcgctaccttcaagacc

SEQ ID NO: 435766 - DNA, 54 bp, Artificial
  Synthetic oligonucleotide
gtatagcaaccccacttttgaggtttctctaacaactacctctggttctggaga

SEQ ID NO: 435767 - DNA, 53 bp, Artificial
  Synthetic oligonucleotide
gtatagcaatgacttgactccacgttatttgatagtcgttgtttgcggtcccg

SEQ ID NO: 435768 - DNA, 55 bp, Artificial
  Synthetic oligonucleotide
gtatagcaggtattatatacgtcatctacaaactcttctgtacactacaaggacc

SEQ ID NO: 435769 - DNA, 60 bp, Artificial
  Synthetic oligonucleotide
gtatagcagtcaatgatgaggcggtcgcgagaggaattgctcatagaagcaaagcagaca

SEQ ID NO: 435770 - DNA, 55 bp, Artificial
  Synthetic oligonucleotide
gtatagcatggtctagttcaagttgtcacgatgggaaagcatggctgcatgtctg

SEQ ID NO: 435771 - DNA, 60 bp, Artificial
  Synthetic oligonucleotide
gtatagcattggcctgtgctatgaatagttctattagggggcgcgccagttctgatattt

SEQ ID NO: 435772 - DNA, 58 bp, Artificial
  Synthetic oligonucleotide
gtatagccaaattcagtgtatacgtctatcggtttggtctccgtatatggataacaat

SEQ ID NO: 435773 - DNA, 55 bp, Artificial
  Synthetic oligonucleotide
gtatagcctttataggggaaggggcaggaaatttgttgttacgcacagtagtgga

SEQ ID NO: 435774 - DNA, 54 bp, Artificial
  Synthetic oligonucleotide
gtatagcgccatgacggggtttttcaacgtggcgataggttcgggggcttgtcc

SEQ ID NO: 435775 - DNA, 60 bp, Artificial
  Synthetic oligonucleotide
gtatagcggctagagggtacatatcaactcgtgtaggaatgggagaggcagccgcaattt

SEQ ID NO: 435776 - DNA, 55 bp, Artificial
  Synthetic oligonucleotide
gtatagctcgcaaatgcatgctcggaggatgatgcggtcgaagaccgtacacccc

SEQ ID NO: 435777 - DNA, 60 bp, Artificial
  Synthetic oligonucleotide
gtatagcttgagcattaccgtcgtgtaattgcaacacttggcttgccaaatgacgctaaa

SEQ ID NO: 435778 - DNA, 55 bp, Artificial
  Synthetic oligonucleotide
gtataggaagcccaggatttatcggatgtacagatcccccgatgttccgaaaggg

SEQ ID NO: 435779 - DNA, 55 bp, Artificial
  Synthetic oligonucleotide
gtataggaagcttaagagggagataacattccatggggccaaagaaatagcactc

SEQ ID NO: 435780 - DNA, 54 bp, Artificial
  Synthetic oligonucleotide
gtataggaatcccaggaacaaaccagctctgataatctggggagtgcatcactc

SEQ ID NO: 435781 - DNA, 55 bp, Artificial
  Synthetic oligonucleotide
gtataggaccaggacaagccttctatagaacaggaggcataataggagatataac

SEQ ID NO: 435782 - DNA, 60 bp, Artificial
  Synthetic oligonucleotide
gtataggagaacagataattgcattaaagacattacaagattttgtaaatgacgagataa

SEQ ID NO: 435783 - DNA, 55 bp, Artificial
  Synthetic oligonucleotide
gtataggcaattcgttatccataaggtcctcagggtcatcgacgttatacctgtc

SEQ ID NO: 435784 - DNA, 60 bp, Artificial
  Synthetic oligonucleotide
gtataggccaaagagcatccttgcacctgcgcagtggcacaattgttggaactaatgtgc

SEQ ID NO: 435785 - DNA, 51 bp, Artificial
  Synthetic oligonucleotide
gtataggcgcgttgagcagagctaatgttatatacaattacgaagatcctt

SEQ ID NO: 435786 - DNA, 53 bp, Artificial
  Synthetic oligonucleotide
gtataggtgcccccttagaggtacaccaacaataggtataagtgcccccttag

SEQ ID NO: 435787 - DNA, 54 bp, Artificial
  Synthetic oligonucleotide
gtataggtgggagttataattttagattgcccgtaggtaaatggcctattatga

SEQ ID NO: 435788 - DNA, 57 bp, Artificial
  Synthetic oligonucleotide
gtataggttaaacagcatggtgttcttttatcatgaataccttgaagaagtaggtgg

SEQ ID NO: 435789 - DNA, 60 bp, Artificial
  Synthetic oligonucleotide
gtataggttaccatgcaaataattcaactgacactgttgacacagtactagaaaagaatg

SEQ ID NO: 435790 - DNA, 55 bp, Artificial
  Synthetic oligonucleotide
gtatagtaaaataactggtgagccccataagcagggaccatctgattggttaaag

SEQ ID NO: 435791 - DNA, 57 bp, Artificial
  Synthetic oligonucleotide
gtatagtcacaacgtcttccacctctgatatagcagctgaaggggctacagctatca

SEQ ID NO: 435792 - DNA, 55 bp, Artificial
  Synthetic oligonucleotide
gtatagtgagacggaccattgggtggtcaggacgttgaaagggccagaattaccg

SEQ ID NO: 435793 - DNA, 59 bp, Artificial
  Synthetic oligonucleotide
gtatagtgtggagctatcttacagtaagtttagggaaattgccatagagtttgatgttc

SEQ ID NO: 435794 - DNA, 55 bp, Artificial
  Synthetic oligonucleotide
gtatagttattcacgtgatggtgaacaagttactgcacataccacttgttcagta

SEQ ID NO: 435795 - DNA, 55 bp, Artificial
  Synthetic oligonucleotide
gtatagttcgtggcgaacaccctgacatgctgatcacgcctaggacaggaagcca

SEQ ID NO: 435796 - DNA, 60 bp, Artificial
  Synthetic oligonucleotide
gtatataagcaggtgcagacctgtgtggtcagttcagagcaggactcatggagatctgga

SEQ ID NO: 435797 - DNA, 56 bp, Artificial
  Synthetic oligonucleotide
gtatataaggcggtgtctggagcggccaatcacccatccaccttaagtggttccgg

SEQ ID NO: 435798 - DNA, 55 bp, Artificial
  Synthetic oligonucleotide
gtatataagtacttggtatctaaagacccttaagaaaagaccagtctgaggctgt

SEQ ID NO: 435799 - DNA, 55 bp, Artificial
  Synthetic oligonucleotide
gtatatacaccagaacctaatattacgcaacaatggtccattcctttaggagacc

SEQ ID NO: 435800 - DNA, 60 bp, Artificial
  Synthetic oligonucleotide
gtatatacccgttagaaactcaatggatacgatcgtgcagcatgaatctactgtgttacg

SEQ ID NO: 435801 - DNA, 58 bp, Artificial
  Synthetic oligonucleotide
gtatatacccgttagaactcaatggattctgtggttgaacacgcttctagtgttcttc

SEQ ID NO: 435802 - DNA, 55 bp, Artificial
  Synthetic oligonucleotide
gtatatacgaaaacgcaagcagatggacaattcgctacaggttcttatgtaagag

SEQ ID NO: 435803 - DNA, 60 bp, Artificial
  Synthetic oligonucleotide
gtatatacgccactctctgctcgatccgcagtgatgtactcccctgtgcgtgaatccatc

SEQ ID NO: 435804 - DNA, 60 bp, Artificial
  Synthetic oligonucleotide
gtatatagaaacttacatttgtgtgaaccagaaaatctgaatgactcagtgctgatctgt

SEQ ID NO: 435805 - DNA, 59 bp, Artificial
  Synthetic oligonucleotide
gtatatagaaagaccctccagcctcacactgcatcaggctactcagatgaacaagtacg

SEQ ID NO: 435806 - DNA, 60 bp, Artificial
  Synthetic oligonucleotide
gtatatagccgagtgaatctgtttgattcaacgcttagacctggcgataagattatacat

SEQ ID NO: 435807 - DNA, 59 bp, Artificial
  Synthetic oligonucleotide
gtatatagggacgaggcactaaataatcggtttcagatcaaaggtgttgagctgaggtc

SEQ ID NO: 435808 - DNA, 60 bp, Artificial
  Synthetic oligonucleotide
gtatatatgcagtggagttttcggagataatccacgccccagtgatggggcaggcagttg

SEQ ID NO: 435809 - DNA, 60 bp, Artificial
  Synthetic oligonucleotide
gtatatattgggctcaagccagtcctggacggtttcattgcagaggaggtcaatgtctgt

SEQ ID NO: 435810 - DNA, 55 bp, Artificial
  Synthetic oligonucleotide
gtatatcaaataatgtacgttccaccaggagctcccacacctagtgcttgggacg

SEQ ID NO: 435811 - DNA, 60 bp, Artificial
  Synthetic oligonucleotide
gtatatcctgataagatagtcaatgctttctttggtccgatcataaaggagattaatgaa

SEQ ID NO: 435812 - DNA, 53 bp, Artificial
  Synthetic oligonucleotide
gtatatctcaaagaaagctaagggatgggtttataaacatcactacgaaagca

SEQ ID NO: 435813 - DNA, 56 bp, Artificial
  Synthetic oligonucleotide
gtatatcttgtattatccatacatattccgtcagccattacgtcatacaggctcat

SEQ ID NO: 435814 - DNA, 51 bp, Artificial
  Synthetic oligonucleotide
gtatatgaacggtcgcgtgacgccacccgggctggttgacacctacgttaa

SEQ ID NO: 435815 - DNA, 51 bp, Artificial
  Synthetic oligonucleotide
gtatatgaaggggaggatgttagtgtacaatttagtcatgattctatacac

SEQ ID NO: 435816 - DNA, 59 bp, Artificial
  Synthetic oligonucleotide
gtatatgaaggttaatgctcatgtggtttataaccaccaagaagctgggaagtacgaga

SEQ ID NO: 435817 - DNA, 55 bp, Artificial
  Synthetic oligonucleotide
gtatatgaagtgccccttttcatacctactggacacctggtgtggaacgtgttgc

SEQ ID NO: 435818 - DNA, 59 bp, Artificial
  Synthetic oligonucleotide
gtatatgactttgcttttcgggatttatgcatagtatatagagatgggaatccatatgc

SEQ ID NO: 435819 - DNA, 55 bp, Artificial
  Synthetic oligonucleotide
gtatatgagtgtgtaatggttgttatgcaaatgtaacacaagccaatactgctgc

SEQ ID NO: 435820 - DNA, 55 bp, Artificial
  Synthetic oligonucleotide
gtatatgcagagaaaggtgctggtaaaacatcattcttatcaacgtacgctcaac

SEQ ID NO: 435821 - DNA, 60 bp, Artificial
  Synthetic oligonucleotide
gtatatgcatgatacgtgttgaggatgggatcgtagtacacgtgtaaatgatcccccttg

SEQ ID NO: 435822 - DNA, 55 bp, Artificial
  Synthetic oligonucleotide
gtatatgcctgcgaatcatctgaacgagctaatgcactggctagacgactggagc

SEQ ID NO: 435823 - DNA, 60 bp, Artificial
  Synthetic oligonucleotide
gtatatgctcaggcaccgtttgctggcgaagcaattaacaaaaacggcctgcagatagga

SEQ ID NO: 435824 - DNA, 55 bp, Artificial
  Synthetic oligonucleotide
gtatatgctggcaaaatcagctgtttgtaaccgtggccgataacacccggggcac

SEQ ID NO: 435825 - DNA, 60 bp, Artificial
  Synthetic oligonucleotide
gtatatggcatgtacacatgcctcgaaccctgtgtatgcaacgcttaagatacgcatcta

SEQ ID NO: 435826 - DNA, 55 bp, Artificial
  Synthetic oligonucleotide
gtatatggccccgaacatattgggcgcagtggaattcggagaggtaggttacgat

SEQ ID NO: 435827 - DNA, 60 bp, Artificial
  Synthetic oligonucleotide
gtatatggcgtgtacgcatgcctctaatcctgtgtatgcgacattgaaaattcgggtcta

SEQ ID NO: 435828 - DNA, 55 bp, Artificial
  Synthetic oligonucleotide
gtatatgggtgaaatgtatttctcacccgagagctattctaccgttttctgtaag

SEQ ID NO: 435829 - DNA, 55 bp, Artificial
  Synthetic oligonucleotide
gtatatgtaatgctggacttattagcaagagtagattatagagtaggggtaggag

SEQ ID NO: 435830 - DNA, 58 bp, Artificial
  Synthetic oligonucleotide
gtatatgtgagaaatccatattgaagtataagtgcaaagtcgttttggttaggatgcc

SEQ ID NO: 435831 - DNA, 60 bp, Artificial
  Synthetic oligonucleotide
gtatatgttagatcattagcagctaatttgaactcagtgaaatgtacaggtggaagttac

SEQ ID NO: 435832 - DNA, 55 bp, Artificial
  Synthetic oligonucleotide
gtatatgttagatggatatgaggctggcgacgttatcgatgcactcgtccacaag

SEQ ID NO: 435833 - DNA, 57 bp, Artificial
  Synthetic oligonucleotide
gtatatgttgttttgtttcgaacaagattttcagtgattatttgtgattgttagtcc

SEQ ID NO: 435834 - DNA, 54 bp, Artificial
  Synthetic oligonucleotide
gtatattataatagcgaaaactcgcttagaattgaaactacgctattatacgag

SEQ ID NO: 435835 - DNA, 55 bp, Artificial
  Synthetic oligonucleotide
gtatattattccttgaagagatggctgtggacgttacaggggaaatttcagcccc

SEQ ID NO: 435836 - DNA, 52 bp, Artificial
  Synthetic oligonucleotide
gtatattattcttgccccgggcaacggccttgagtttacggttaacggccaa

SEQ ID NO: 435837 - DNA, 60 bp, Artificial
  Synthetic oligonucleotide
gtatattcatcccggaatactagctgttagaatacagcctctgcatccagactggtcagg

SEQ ID NO: 435838 - DNA, 60 bp, Artificial
  Synthetic oligonucleotide
gtatattccacggatggcagattgtgcctgggtgctttcttaatgccccgtgttatagtg

SEQ ID NO: 435839 - DNA, 57 bp, Artificial
  Synthetic oligonucleotide
gtatattcttgcaacccaaattctatgcggaacgctatacaaacggaaaagaagtca

SEQ ID NO: 435840 - DNA, 55 bp, Artificial
  Synthetic oligonucleotide
gtatattctttgcccagagtgtgttgacgaacgcgatctagactactattatggc

SEQ ID NO: 435841 - DNA, 55 bp, Artificial
  Synthetic oligonucleotide
gtatattgaacaaccgcagtccaagtctattcgtcgacgccggatggctctagtc

SEQ ID NO: 435842 - DNA, 59 bp, Artificial
  Synthetic oligonucleotide
gtatattgaagtgttacatttaacccaaggaacatgctgggagcagatgtacaccccag

SEQ ID NO: 435843 - DNA, 58 bp, Artificial
  Synthetic oligonucleotide
gtatattgactaggaacactaaaaagcgaaatactcgttataggttcatcgatcaaca

SEQ ID NO: 435844 - DNA, 56 bp, Artificial
  Synthetic oligonucleotide
gtatattgcttgctccaacgggggcgtcaagttataccagcgaccaaacaaacctc

SEQ ID NO: 435845 - DNA, 55 bp, Artificial
  Synthetic oligonucleotide
gtatattgggctccgtggacgatcatgtatccatgcaatgtgaggtgaatctagc

SEQ ID NO: 435846 - DNA, 60 bp, Artificial
  Synthetic oligonucleotide
gtatattgttactggcagccagctgcaacccctctaccaagcacttggcataccttccga

SEQ ID NO: 435847 - DNA, 55 bp, Artificial
  Synthetic oligonucleotide
gtatatttacggatattcatagccgccgtagcgtgtacgattctctgtagacatg

SEQ ID NO: 435848 - DNA, 55 bp, Artificial
  Synthetic oligonucleotide
gtatcaaaatccacttatgtctgggctacgagtggttcagtgggctaccggagct

SEQ ID NO: 435849 - DNA, 51 bp, Artificial
  Synthetic oligonucleotide
gtatcaaacaggttctagaaaaagagatactggccatccagatagggtgcg

SEQ ID NO: 435850 - DNA, 53 bp, Artificial
  Synthetic oligonucleotide
gtatcaaactaggtgggttcactgagattggcctgaagacattagggtccaag

SEQ ID NO: 435851 - DNA, 50 bp, Artificial
  Synthetic oligonucleotide
gtatcaaagagggccatacagttgtcattgatgagattcaactcttccct

SEQ ID NO: 435852 - DNA, 55 bp, Artificial
  Synthetic oligonucleotide
gtatcaaagcctaatccctgactacatcaaccaattgatcacatacacacaaccg

SEQ ID NO: 435853 - DNA, 57 bp, Artificial
  Synthetic oligonucleotide
gtatcaaaggttggggtttaaagtcgaggttgcctcacagctagaattttgctcaca

SEQ ID NO: 435854 - DNA, 55 bp, Artificial
  Synthetic oligonucleotide
gtatcaaagttgccactgtacagtccaaaatgtccgacgtaaagtgcacatcagt

SEQ ID NO: 435855 - DNA, 60 bp, Artificial
  Synthetic oligonucleotide
gtatcaaatattacaggactactattgacaagagatggtggaggtaataatgactcgagt

SEQ ID NO: 435856 - DNA, 59 bp, Artificial
  Synthetic oligonucleotide
gtatcaaattccgcaaacttggtcgcggtcttgcaggttgacatgcctgcctttatacg

SEQ ID NO: 435857 - DNA, 59 bp, Artificial
  Synthetic oligonucleotide
gtatcaaattcttgccatttatagtacggtatcgagcagtctagttttggtagggctga

SEQ ID NO: 435858 - DNA, 51 bp, Artificial
  Synthetic oligonucleotide
gtatcaacaggggaaggggataatacaagctatatactgataacttgtaac

SEQ ID NO: 435859 - DNA, 55 bp, Artificial
  Synthetic oligonucleotide
gtatcaacatcattgctggctaaatgtacagtgcagcaggctagagtgatgtgcc

SEQ ID NO: 435860 - DNA, 60 bp, Artificial
  Synthetic oligonucleotide
gtatcaacatgagcacggataacccctccgtagaggcttcccctagcccagcaggcatgt

SEQ ID NO: 435861 - DNA, 60 bp, Artificial
  Synthetic oligonucleotide
gtatcaactactcaatacgttcagatggacaattttgaacccatctgtgctgaacacaat

SEQ ID NO: 435862 - DNA, 57 bp, Artificial
  Synthetic oligonucleotide
gtatcaactcaattgctattaaatggcagcctatcggaagaaggggtagtaattagg

SEQ ID NO: 435863 - DNA, 59 bp, Artificial
  Synthetic oligonucleotide
gtatcaactgatgcaaacaatatctcctagtttaaatttgaaacctaatcttgagctta

SEQ ID NO: 435864 - DNA, 60 bp, Artificial
  Synthetic oligonucleotide
gtatcaaggagctcatcagttagatcactaggatcaactgtttcagcttggacggaagta

SEQ ID NO: 435865 - DNA, 57 bp, Artificial
  Synthetic oligonucleotide
gtatcaataagatcaaaggtttccttgaacgtaatagagcttggatacttggaattg

SEQ ID NO: 435866 - DNA, 56 bp, Artificial
  Synthetic oligonucleotide
gtatcacaaattcatacagacgttccagggaacgtactaggccctagaccggtctg

SEQ ID NO: 435867 - DNA, 60 bp, Artificial
  Synthetic oligonucleotide
gtatcacagcgttagagtacatgtaatccgactgttcaggagtcatatcctcgagccaat

SEQ ID NO: 435868 - DNA, 60 bp, Artificial
  Synthetic oligonucleotide
gtatcacagtaattggagagcaatggctagtgattttaacctgccacctgtagtagcaaa

SEQ ID NO: 435869 - DNA, 55 bp, Artificial
  Synthetic oligonucleotide
gtatcacagtattacgggataccaatggccgagagacaaaacaatgagtggctaa

SEQ ID NO: 435870 - DNA, 55 bp, Artificial
  Synthetic oligonucleotide
gtatcaccttaagcctcacacaagtgagagaattacacgcacagattaacttgtg

SEQ ID NO: 435871 - DNA, 60 bp, Artificial
  Synthetic oligonucleotide
gtatcacgggacctagcaagacatggagcaataaccagtagaaacacatcccagacaaat

SEQ ID NO: 435872 - DNA, 53 bp, Artificial
  Synthetic oligonucleotide
gtatcactaaaacgggttccggtggtatctccacgatgtacgatggtttgtct

SEQ ID NO: 435873 - DNA, 55 bp, Artificial
  Synthetic oligonucleotide
gtatcactaatgtttcccctgaaacaaggcctgcattctgagctggcatagactg

SEQ ID NO: 435874 - DNA, 58 bp, Artificial
  Synthetic oligonucleotide
gtatcactacaatccgcgaagggtgagggttcccagaccagaaatgctaagagaggga

SEQ ID NO: 435875 - DNA, 55 bp, Artificial
  Synthetic oligonucleotide
gtatcactccaaatggaagcattcccaatgacaaaccctttcaaaacgtaaacaa

SEQ ID NO: 435876 - DNA, 53 bp, Artificial
  Synthetic oligonucleotide
gtatcacttaactcgttaagatttagattcagtttaaccgttgaagaaccacc

SEQ ID NO: 435877 - DNA, 58 bp, Artificial
  Synthetic oligonucleotide
gtatcactttgagagcatcgtttattccattaccgccgcaaatgggtatgaaaccgta

SEQ ID NO: 435878 - DNA, 59 bp, Artificial
  Synthetic oligonucleotide
gtatcagaaaggggttgacttgatacaaaaattgaggactgttcattcaatggctcagg

SEQ ID NO: 435879 - DNA, 60 bp, Artificial
  Synthetic oligonucleotide
gtatcagaactagaggcatacagaagccaggacccattcctgagggcaatttcgcgatcc

SEQ ID NO: 435880 - DNA, 60 bp, Artificial
  Synthetic oligonucleotide
gtatcagaactggccaatggactggacaactgcaatatcagaccccaactatcaattgga

SEQ ID NO: 435881 - DNA, 53 bp, Artificial
  Synthetic oligonucleotide
gtatcagcaatagagaaggccatagtagatccagagtataaaaagatttcctg

SEQ ID NO: 435882 - DNA, 56 bp, Artificial
  Synthetic oligonucleotide
gtatcagcttatagtagattaggtttatcagcgatgttaaatgcatccgctatagc

SEQ ID NO: 435883 - DNA, 58 bp, Artificial
  Synthetic oligonucleotide
gtatcagcttgcaagttacgcctcgtacatccgagttcctgttaactctacggtgtac

SEQ ID NO: 435884 - DNA, 60 bp, Artificial
  Synthetic oligonucleotide
gtatcaggagagcatttgatcaatggattatcaaactgatgtcagtgaggacaatgtgca

SEQ ID NO: 435885 - DNA, 55 bp, Artificial
  Synthetic oligonucleotide
gtatcagttatggtgagcgaattcagcggctgggcagagttggtaggattcaaaa

SEQ ID NO: 435886 - DNA, 57 bp, Artificial
  Synthetic oligonucleotide
gtatcataccatcgttcaggagtgcaactgttccatctatacggggcacgttacggg

SEQ ID NO: 435887 - DNA, 51 bp, Artificial
  Synthetic oligonucleotide
gtatcataggaacagtatctaagatccaaccgtctgacacattgttgttct

SEQ ID NO: 435888 - DNA, 58 bp, Artificial
  Synthetic oligonucleotide
gtatcatatatcatgcatatcggcaaatgggagataactgacacattcgttgatgaga

SEQ ID NO: 435889 - DNA, 58 bp, Artificial
  Synthetic oligonucleotide
gtatcatcaacacagccctggactactttctctgcgtggtgtcagggtggtcccatct

SEQ ID NO: 435890 - DNA, 56 bp, Artificial
  Synthetic oligonucleotide
gtatcatcaattagagacggatactacttagtatcaggtggtaatacattagcagc

SEQ ID NO: 435891 - DNA, 55 bp, Artificial
  Synthetic oligonucleotide
gtatcatcacgggaccttctgagggcagtgaggctatgattcaaccaccgatgac

SEQ ID NO: 435892 - DNA, 60 bp, Artificial
  Synthetic oligonucleotide
gtatcatcgcgtgatagtagagaattccgatgggataattatgaattactgttataatct

SEQ ID NO: 435893 - DNA, 56 bp, Artificial
  Synthetic oligonucleotide
gtatcatgcaatacgctggaacagtcgacgtagaattatttgccacattctgcaga

SEQ ID NO: 435894 - DNA, 60 bp, Artificial
  Synthetic oligonucleotide
gtatcatgcatggttattccgtcaatctggacagtatgtatttcgccccaatttacaatc

SEQ ID NO: 435895 - DNA, 55 bp, Artificial
  Synthetic oligonucleotide
gtatcatgcggctgtttaacataccggagtggatcattgagctccatgttgaact

SEQ ID NO: 435896 - DNA, 60 bp, Artificial
  Synthetic oligonucleotide
gtatcattggggttggttgtattcaatgttctattgcacatcgtgagcatcatagtaaca

SEQ ID NO: 435897 - DNA, 60 bp, Artificial
  Synthetic oligonucleotide
gtatccaacattggctgcaatatataaaacaatgctatttgctattaggcttttcccaga

SEQ ID NO: 435898 - DNA, 59 bp, Artificial
  Synthetic oligonucleotide
gtatccaaggtgcggaggaggctgaactacgacagcccatacacgaaccgtgttgttgc

SEQ ID NO: 435899 - DNA, 60 bp, Artificial
  Synthetic oligonucleotide
gtatccaattgctgatggtgaacaaagcttggcacaatgccagaattcagtgtttgtaac

SEQ ID NO: 435900 - DNA, 55 bp, Artificial
  Synthetic oligonucleotide
gtatccaccctcacacccaccacatttcacatcaagaacagtaccaatgacaagg

SEQ ID NO: 435901 - DNA, 57 bp, Artificial
  Synthetic oligonucleotide
gtatccacgccccaaaggcaccgaagcggacgtcgtatttgtctagtctgctttcga

SEQ ID NO: 435902 - DNA, 60 bp, Artificial
  Synthetic oligonucleotide
gtatccagaagcagatggaactagtgcgcatttcagtgcgcaagggccattcccaccagg

SEQ ID NO: 435903 - DNA, 60 bp, Artificial
  Synthetic oligonucleotide
gtatccagaggaatagcattgactgaaaaggcgaagttgaactcatacgcgccaatatca

SEQ ID NO: 435904 - DNA, 60 bp, Artificial
  Synthetic oligonucleotide
gtatccagcttgtttatttgcaccgggtcaagcgtacgtagcgttgagcagaagcacaca

SEQ ID NO: 435905 - DNA, 60 bp, Artificial
  Synthetic oligonucleotide
gtatccagttaggtactgagcaaacatgtaagacaattgattctaatgattgtttggtaa

SEQ ID NO: 435906 - DNA, 57 bp, Artificial
  Synthetic oligonucleotide
gtatccatactctcggcatcataaaaactctggataaaatatggagctgacatacct

SEQ ID NO: 435907 - DNA, 52 bp, Artificial
  Synthetic oligonucleotide
gtatccatagaatggaggaaagggaaatatagcacacaagtagaccccaact

SEQ ID NO: 435908 - DNA, 59 bp, Artificial
  Synthetic oligonucleotide
gtatccatgcaatgtgaggtgaatctagcgcgaaccctcggcacaaggggtcaatcatc

SEQ ID NO: 435909 - DNA, 55 bp, Artificial
  Synthetic oligonucleotide
gtatccatgcgccaggatcaggaccactgtacataaatctcatgggctcatggat

SEQ ID NO: 435910 - DNA, 55 bp, Artificial
  Synthetic oligonucleotide
gtatccatggctcccctgtcaattcttatactaatacaccctatactggtgcatt

SEQ ID NO: 435911 - DNA, 60 bp, Artificial
  Synthetic oligonucleotide
gtatccatggttgaaatggacagagacggcgtatcattcatctacgagaagcctagcatc

SEQ ID NO: 435912 - DNA, 55 bp, Artificial
  Synthetic oligonucleotide
gtatccatgtctgggctgacgatccgagtacgccactcggcacagtgggcattca

SEQ ID NO: 435913 - DNA, 59 bp, Artificial
  Synthetic oligonucleotide
gtatccatgtgaattcccctacttctgaacagagtcagggtgaggatcgtgttccccga

SEQ ID NO: 435914 - DNA, 58 bp, Artificial
  Synthetic oligonucleotide
gtatccattgtcacggtaatttatctgtcgtacctgcattgaaggaccgttactacat

SEQ ID NO: 435915 - DNA, 56 bp, Artificial
  Synthetic oligonucleotide
gtatcccaatgggacgcctcgcaacataacactgagccttatcgttcagcttggat

SEQ ID NO: 435916 - DNA, 60 bp, Artificial
  Synthetic oligonucleotide
gtatcccctgttctcaaagtcgatctcacacatcatgtgcctcttaaagtctgcgacaat

SEQ ID NO: 435917 - DNA, 60 bp, Artificial
  Synthetic oligonucleotide
gtatccccttcaattactgagtatgctgaacagatatcagacgaatttgctaaggctcga

SEQ ID NO: 435918 - DNA, 55 bp, Artificial
  Synthetic oligonucleotide
gtatcccggaaggctgggtgttctgagtggatatgttctgctcagcaagtagcaa

SEQ ID NO: 435919 - DNA, 53 bp, Artificial
  Synthetic oligonucleotide
gtatcccgggaggtttcccattgtcccctccctacatgggagtggtacaccaa

SEQ ID NO: 435920 - DNA, 53 bp, Artificial
  Synthetic oligonucleotide
gtatcccgttcggggtattaatggcgatggtcgttcaagggactatattaaat

SEQ ID NO: 435921 - DNA, 55 bp, Artificial
  Synthetic oligonucleotide
gtatccctacaggatgccttttgccagaataactctgaaagctacactggtccac

SEQ ID NO: 435922 - DNA, 57 bp, Artificial
  Synthetic oligonucleotide
gtatccgaacaccggtaatgctcaaataaaagtagcgtgttgcttgtaacgcaatta

SEQ ID NO: 435923 - DNA, 57 bp, Artificial
  Synthetic oligonucleotide
gtatccgagctgggactattatgactccaaaggaccaggtaaaaggaatgaacaaga

SEQ ID NO: 435924 - DNA, 54 bp, Artificial
  Synthetic oligonucleotide
gtatccgcaagtccttgaataccgataccgatgggtcggtgtctgaaattcgat

SEQ ID NO: 435925 - DNA, 54 bp, Artificial
  Synthetic oligonucleotide
gtatccggactaagtcgctatccgcgggggtgcggtcggtgtataataacgtta

SEQ ID NO: 435926 - DNA, 56 bp, Artificial
  Synthetic oligonucleotide
gtatccgggacctggcgcggatagttcgccaagcagggaaggccgttgggcaacgc

SEQ ID NO: 435927 - DNA, 56 bp, Artificial
  Synthetic oligonucleotide
gtatccgtaggaacatcaacactaaatcaaaggtcaataccaaaaattgctaccag

SEQ ID NO: 435928 - DNA, 55 bp, Artificial
  Synthetic oligonucleotide
gtatccgtctggaacaatgagaggtagacctgggcagacgacccctgattctatc

SEQ ID NO: 435929 - DNA, 55 bp, Artificial
  Synthetic oligonucleotide
gtatccgttcatgaaaacgaccataaccttacttcacccataagtcaataggagg

SEQ ID NO: 435930 - DNA, 53 bp, Artificial
  Synthetic oligonucleotide
gtatcctataacgctaactgtcaacggacgtgtccacacatgcttgaactacg

SEQ ID NO: 435931 - DNA, 56 bp, Artificial
  Synthetic oligonucleotide
gtatcctcgtggagtctacaggaccagatagggttcgtagatccccgaaagctttg

SEQ ID NO: 435932 - DNA, 60 bp, Artificial
  Synthetic oligonucleotide
gtatcctggcaaagaataatgcaatcgtggcgaatacaagagaggtccaacatattaagg

SEQ ID NO: 435933 - DNA, 60 bp, Artificial
  Synthetic oligonucleotide
gtatccttatgtacgtatcatggctcatactggatctgctatgcaggcaagtgtactact

SEQ ID NO: 435934 - DNA, 55 bp, Artificial
  Synthetic oligonucleotide
gtatccttgacatcagacaagggccaaaggagccctttagagattatgtggacag

SEQ ID NO: 435935 - DNA, 58 bp, Artificial
  Synthetic oligonucleotide
gtatcgaaactcgacagagcgttatatgccaagatacggacttcagcgaaacttaacc

SEQ ID NO: 435936 - DNA, 59 bp, Artificial
  Synthetic oligonucleotide
gtatcgaaagaaaaatataccattagccaacttgccaagtttgcaaaccagctgtgtgc

SEQ ID NO: 435937 - DNA, 55 bp, Artificial
  Synthetic oligonucleotide
gtatcgaacgtatctgatacgaaatggaagtttgttgaaatgatgaagacgacag

SEQ ID NO: 435938 - DNA, 60 bp, Artificial
  Synthetic oligonucleotide
gtatcgaagtgcgttcagtcatcggtttagcgaagaggatgagaggacacttcgagtgat

SEQ ID NO: 435939 - DNA, 57 bp, Artificial
  Synthetic oligonucleotide
gtatcgactacgctacaccaacccgcgatggcatgtctggtgcgccccttgtcaacc

SEQ ID NO: 435940 - DNA, 55 bp, Artificial
  Synthetic oligonucleotide
gtatcgagatgccttagaatctcctgagcattgttcaccgcaccacactgcactc

SEQ ID NO: 435941 - DNA, 55 bp, Artificial
  Synthetic oligonucleotide
gtatcgagtgacgctgacaccgcagagcgtgtccgcgtgggtgatttccagcgga

SEQ ID NO: 435942 - DNA, 57 bp, Artificial
  Synthetic oligonucleotide
gtatcgcaagtaaccgtaaccccggttcgccgggtcatcacagagcatgaccgagga

SEQ ID NO: 435943 - DNA, 58 bp, Artificial
  Synthetic oligonucleotide
gtatcgcaattggatccgctttacaactcccaagggcaggaatatttctagtatcttc

SEQ ID NO: 435944 - DNA, 55 bp, Artificial
  Synthetic oligonucleotide
gtatcgcatatcgtgtgacgccggcaaaagtgaccactgtgttccagacgtaccg

SEQ ID NO: 435945 - DNA, 58 bp, Artificial
  Synthetic oligonucleotide
gtatcgcatggaggaaccagagtacataaaggagttagaccaactggatttccaagct

SEQ ID NO: 435946 - DNA, 60 bp, Artificial
  Synthetic oligonucleotide
gtatcgccatgctattagcgccttgtggactagggtgatggatgcgtagggttgaagccg

SEQ ID NO: 435947 - DNA, 60 bp, Artificial
  Synthetic oligonucleotide
gtatcgcccggtagatcgcccgactgacccatatgcgcaggcaggagaatccattggcgg

SEQ ID NO: 435948 - DNA, 55 bp, Artificial
  Synthetic oligonucleotide
gtatcgccctaatattgttaccgtcctccgccaacatagtagttagattatcagc

SEQ ID NO: 435949 - DNA, 55 bp, Artificial
  Synthetic oligonucleotide
gtatcgccgccagtgcctaaacatccccaacccgccccctatgccaaagccttat

SEQ ID NO: 435950 - DNA, 58 bp, Artificial
  Synthetic oligonucleotide
gtatcgcctgaaaggtgagtctaggaagactttcgtggaactcatgaggaggggcgac

SEQ ID NO: 435951 - DNA, 58 bp, Artificial
  Synthetic oligonucleotide
gtatcgctataagacttcgaaaattactggcaagttccgatcaaatgctacaagttct

SEQ ID NO: 435952 - DNA, 59 bp, Artificial
  Synthetic oligonucleotide
gtatcgctatcacatgctaatgaagaacctgttaatcaagaaatgtactgggttcattc

SEQ ID NO: 435953 - DNA, 53 bp, Artificial
  Synthetic oligonucleotide
gtatcgctgggtcatatatcgtcactggtagccagttgcagcccctctaccaa

SEQ ID NO: 435954 - DNA, 56 bp, Artificial
  Synthetic oligonucleotide
gtatcgctttcgtttccccgtggcactacgcagacgtcggaggtctcgtttcagcg

SEQ ID NO: 435955 - DNA, 56 bp, Artificial
  Synthetic oligonucleotide
gtatcggacagctctgagacgccatctttagcgtcggacgatactgctgatgtttg

SEQ ID NO: 435956 - DNA, 59 bp, Artificial
  Synthetic oligonucleotide
gtatcggacggtcactggtggtcagtacgcgtctaaggagcaggcattagttaggagat

SEQ ID NO: 435957 - DNA, 58 bp, Artificial
  Synthetic oligonucleotide
gtatcggaggaatcataacacctttttggaatcagcaccaacttgctctttgtaaata

SEQ ID NO: 435958 - DNA, 55 bp, Artificial
  Synthetic oligonucleotide
gtatcggataatgtgaatgttaacataccactgctgatgtatgtaattaggcgtg

SEQ ID NO: 435959 - DNA, 55 bp, Artificial
  Synthetic oligonucleotide
gtatcggcgtatggtgaggaagggcctcccggacctgaatcgctggaagtcaccg

SEQ ID NO: 435960 - DNA, 55 bp, Artificial
  Synthetic oligonucleotide
gtatcggctctgggaaatgtggtaaccatccaacattttcatactcatcttgcgc

SEQ ID NO: 435961 - DNA, 54 bp, Artificial
  Synthetic oligonucleotide
gtatcggggttattgtgagccaccccgttcggcttggttgccaatctacttggt

SEQ ID NO: 435962 - DNA, 55 bp, Artificial
  Synthetic oligonucleotide
gtatcgggtaccacgccaacaattccacagagaaagtcgacacaatcttggaacg

SEQ ID NO: 435963 - DNA, 53 bp, Artificial
  Synthetic oligonucleotide
gtatcgggtcgactaacagtcctttcagattcatggaggatctccctagtatg

SEQ ID NO: 435964 - DNA, 55 bp, Artificial
  Synthetic oligonucleotide
gtatcggtcctttccgggtgagggttcctaacacgagggacattacacgtgtgca

SEQ ID NO: 435965 - DNA, 59 bp, Artificial
  Synthetic oligonucleotide
gtatcggtgtatcggtgtcttatatatactagagctactaaaagccttaggggcactca

SEQ ID NO: 435966 - DNA, 52 bp, Artificial
  Synthetic oligonucleotide
gtatcggttgggtgtttaagcggcagggccgttggaaggcgtaccgcgatca

SEQ ID NO: 435967 - DNA, 56 bp, Artificial
  Synthetic oligonucleotide
gtatcgtacccgcgtcacaggtgtgtggtccagtgtactgtttcaccccaagcccc

SEQ ID NO: 435968 - DNA, 55 bp, Artificial
  Synthetic oligonucleotide
gtatcgtcgttcgtgaaatatattgccttgaacttgcctaacggtggcttgcttg

SEQ ID NO: 435969 - DNA, 57 bp, Artificial
  Synthetic oligonucleotide
gtatcgtgcggtcttggtaaatgttatcaatttgcacttgggcaggggaccaccttg

SEQ ID NO: 435970 - DNA, 58 bp, Artificial
  Synthetic oligonucleotide
gtatcgtggactaacgtggcgcgacaacataatgtcctcactagccccgccttcccaa

SEQ ID NO: 435971 - DNA, 55 bp, Artificial
  Synthetic oligonucleotide
gtatcgtggtccgcagctctaaccaccgagaaagtcgagtggacgtagcaccagg

SEQ ID NO: 435972 - DNA, 50 bp, Artificial
  Synthetic oligonucleotide
gtatcgttatgttacctttccaacacgtatcacgtaagtaaacgcatatc

SEQ ID NO: 435973 - DNA, 53 bp, Artificial
  Synthetic oligonucleotide
gtatctaagtgttcatcgcaaaattttggaattaacgtacctatcacgggatc

SEQ ID NO: 435974 - DNA, 55 bp, Artificial
  Synthetic oligonucleotide
gtatctaatccgccgggagtgaacagagtgattactagggaagaattcgaggctt

SEQ ID NO: 435975 - DNA, 60 bp, Artificial
  Synthetic oligonucleotide
gtatctaatgctggagggcaactgttttatggccgccctcaggtgtctgagaacggtgag

SEQ ID NO: 435976 - DNA, 55 bp, Artificial
  Synthetic oligonucleotide
gtatctacaacatgatgggaaagcgtgagaagaagactggagaatttgggaaggc

SEQ ID NO: 435977 - DNA, 56 bp, Artificial
  Synthetic oligonucleotide
gtatctagaaatgccagagagtgatcatttcatgaacaatacagaaccattgtgtg

SEQ ID NO: 435978 - DNA, 55 bp, Artificial
  Synthetic oligonucleotide
gtatctagcaccacctgcgcacctgaggcttcctgtcagcagcccatattaccag

SEQ ID NO: 435979 - DNA, 53 bp, Artificial
  Synthetic oligonucleotide
gtatctatacccttcattaaaatcttattgggttctttatcagacttaccagg

SEQ ID NO: 435980 - DNA, 58 bp, Artificial
  Synthetic oligonucleotide
gtatctatagattcgatgaaggacaaccattcactgttaaatttcgtcagaaagggaa

SEQ ID NO: 435981 - DNA, 55 bp, Artificial
  Synthetic oligonucleotide
gtatctatctaccgctctaggcgatgtccccagttttgcgagacttcatgacctg

SEQ ID NO: 435982 - DNA, 56 bp, Artificial
  Synthetic oligonucleotide
gtatctatgagagtgatggtgtactgcaaccatccttacttggtaatgtagcgcgg

SEQ ID NO: 435983 - DNA, 55 bp, Artificial
  Synthetic oligonucleotide
gtatctcaggttttgaagaaacttctgagacctcttactcggatgagtcaagatt

SEQ ID NO: 435984 - DNA, 55 bp, Artificial
  Synthetic oligonucleotide
gtatctccaaattgtactaggaaactagcaattggaagattgttggtctcaacga

SEQ ID NO: 435985 - DNA, 60 bp, Artificial
  Synthetic oligonucleotide
gtatctccaacagttggatgtcaaggaggcgcataatctaaatgaacccttatctcttct

SEQ ID NO: 435986 - DNA, 52 bp, Artificial
  Synthetic oligonucleotide
gtatctccgagccgatagcgcagagggtccgttccgtacacagattggcacc

SEQ ID NO: 435987 - DNA, 60 bp, Artificial
  Synthetic oligonucleotide
gtatctccgtccttatcgacataggatttgacgtcggacgatgacttagctctctgaatg

SEQ ID NO: 435988 - DNA, 54 bp, Artificial
  Synthetic oligonucleotide
gtatctcctttaacctaaggataggggacatgaaagaagggggcgatgcaaccg

SEQ ID NO: 435989 - DNA, 55 bp, Artificial
  Synthetic oligonucleotide
gtatctcgcctctcaagtaagagttgacaaacaaaacaagatcaatatggggagg

SEQ ID NO: 435990 - DNA, 60 bp, Artificial
  Synthetic oligonucleotide
gtatctcgcctggaagggaggggctcgcttatccgacttcgatccagccacctgtcacga

SEQ ID NO: 435991 - DNA, 60 bp, Artificial
  Synthetic oligonucleotide
gtatctcgggacctggaaaaacatggagcaatcacaagcagcaatgctaatcatcctgat

SEQ ID NO: 435992 - DNA, 60 bp, Artificial
  Synthetic oligonucleotide
gtatctcgtagaatacctgaccagacgacgtgtatggatgcagaaaacgcagttggcgga

SEQ ID NO: 435993 - DNA, 55 bp, Artificial
  Synthetic oligonucleotide
gtatctcgttaggaataaacgtgggtccacattcaaccaacgtcgttattatcca

SEQ ID NO: 435994 - DNA, 53 bp, Artificial
  Synthetic oligonucleotide
gtatctctccctgacccaaaccaatttgcatttgcagagcgtcccacgcatga

SEQ ID NO: 435995 - DNA, 60 bp, Artificial
  Synthetic oligonucleotide
gtatctgagttctgaagagagtgtaacttccatatattatgcttcaggtggcaattctgt

SEQ ID NO: 435996 - DNA, 55 bp, Artificial
  Synthetic oligonucleotide
gtatctgcgacggatggaagcgatttggctctgattgacacccatctatcaggtg

SEQ ID NO: 435997 - DNA, 59 bp, Artificial
  Synthetic oligonucleotide
gtatctgcttggtgtcaagagaacgtgatgaatgcggtttaccatagatggtttaaccg

SEQ ID NO: 435998 - DNA, 55 bp, Artificial
  Synthetic oligonucleotide
gtatctggaatggctcactcaaagcagaaatacgaccaattgagaaagtccaggc

SEQ ID NO: 435999 - DNA, 55 bp, Artificial
  Synthetic oligonucleotide
gtatctgggacgtggtccagtaccagctgcctgggcctgacgatgaggcgagggg

SEQ ID NO: 436000 - DNA, 60 bp, Artificial
  Synthetic oligonucleotide
gtatctggtcaatgtgtgtttgatattttcactattagtgcagatgattagtgtattaca

SEQ ID NO: 436001 - DNA, 54 bp, Artificial
  Synthetic oligonucleotide
gtatctgtcatttcccacaagtgggctgcttcgttctaatgttacaagagtaag

SEQ ID NO: 436002 - DNA, 55 bp, Artificial
  Synthetic oligonucleotide
gtatctgtcggatttctgaatgagttccggagacttccagttcgagacttgctcg

SEQ ID NO: 436003 - DNA, 52 bp, Artificial
  Synthetic oligonucleotide
gtatctgtggacgaccaacaaggctggtgtgacgttctcgcctggtggggga

SEQ ID NO: 436004 - DNA, 51 bp, Artificial
  Synthetic oligonucleotide
gtatctgtggacgactaataaagctggtgtgacgttttcgcctggggggag

SEQ ID NO: 436005 - DNA, 60 bp, Artificial
  Synthetic oligonucleotide
gtatctgtgtctacaatgcatatgtggtccccatatttagtgtcgtacttcttgttaatg

SEQ ID NO: 436006 - DNA, 55 bp, Artificial
  Synthetic oligonucleotide
gtatctgtgtgggctagcccaattgtactctttgaagcccacgattcacctggtc

SEQ ID NO: 436007 - DNA, 57 bp, Artificial
  Synthetic oligonucleotide
gtatctgttaatggtggcaaggtgttaattaccgccgacgactcgaacatcctcact

SEQ ID NO: 436008 - DNA, 56 bp, Artificial
  Synthetic oligonucleotide
gtatcttaaattatgctgtaagctggggtcttattattgctggattattggttgga

SEQ ID NO: 436009 - DNA, 56 bp, Artificial
  Synthetic oligonucleotide
gtatcttatgaccttgattatgtgggttaactattaataaaatggcgtttaattga

SEQ ID NO: 436010 - DNA, 55 bp, Artificial
  Synthetic oligonucleotide
gtatcttcctgagcttgccgccaaatggttcgaggccaataagcctacccgcccg

SEQ ID NO: 436011 - DNA, 57 bp, Artificial
  Synthetic oligonucleotide
gtatcttcgtctatacgctattacgaaacctgtgaagacgtctctaactcccctagc

SEQ ID NO: 436012 - DNA, 51 bp, Artificial
  Synthetic oligonucleotide
gtatcttgaccgtcggtgcccggaaggggatatctaccgagtgtttcgctg

SEQ ID NO: 436013 - DNA, 50 bp, Artificial
  Synthetic oligonucleotide
gtatctttaccaaataccatttccgtacaattcactgagtaaatctaggt

SEQ ID NO: 436014 - DNA, 57 bp, Artificial
  Synthetic oligonucleotide
gtatgaaaaattcctcaaatagcaactgtccaaactgcaattggaccgattaccctc

SEQ ID NO: 436015 - DNA, 54 bp, Artificial
  Synthetic oligonucleotide
gtatgaaaaggaccctgatgaccttaacaaaagggcattgagtgaccgggaaag

SEQ ID NO: 436016 - DNA, 57 bp, Artificial
  Synthetic oligonucleotide
gtatgaaacggtctctccaatagttactgaccttattgctaaggatgtgttaaacgc

SEQ ID NO: 436017 - DNA, 56 bp, Artificial
  Synthetic oligonucleotide
gtatgaaacttagaactcaaatacctgcagaaatgctagcaaacatcgatttgaag

SEQ ID NO: 436018 - DNA, 53 bp, Artificial
  Synthetic oligonucleotide
gtatgaacactaacccgccttagtcgggtaagtcaagacgaccacggaagaaa

SEQ ID NO: 436019 - DNA, 53 bp, Artificial
  Synthetic oligonucleotide
gtatgaacccgtcgcccgttacgtgtcaagggtcaatttcgagattcttccgg

SEQ ID NO: 436020 - DNA, 60 bp, Artificial
  Synthetic oligonucleotide
gtatgaacccttccgacgatgtgtatcgagcgccgcataagcaatcgataatggctatca

SEQ ID NO: 436021 - DNA, 60 bp, Artificial
  Synthetic oligonucleotide
gtatgaactacatcctgacaaatggacagtgcagcctatacaattgccagacaaggatag

SEQ ID NO: 436022 - DNA, 60 bp, Artificial
  Synthetic oligonucleotide
gtatgaactggactgatctgatcactaattactcaccatctagagaggataacttgcaac

SEQ ID NO: 436023 - DNA, 60 bp, Artificial
  Synthetic oligonucleotide
gtatgaagaagacactctagttgagagttggactcgtatcaccactaggtatgcatatat

SEQ ID NO: 436024 - DNA, 51 bp, Artificial
  Synthetic oligonucleotide
gtatgaagatgccacaggccttatcgtacatcagaagtcttacaattgttt

SEQ ID NO: 436025 - DNA, 60 bp, Artificial
  Synthetic oligonucleotide
gtatgaaggaactacgcatttgtgatacgctggagcctgtactctctacgcaccgccttg

SEQ ID NO: 436026 - DNA, 57 bp, Artificial
  Synthetic oligonucleotide
gtatgaaggtctcctaaagcgtagtgcgttggcctcaaccccggaccattgtatcac

SEQ ID NO: 436027 - DNA, 56 bp, Artificial
  Synthetic oligonucleotide
gtatgaatgataagattgttatgtacagcggaatgaacctagaaacactttccgag

SEQ ID NO: 436028 - DNA, 55 bp, Artificial
  Synthetic oligonucleotide
gtatgaatttggagatgatagtttcggtgtagaagtaccagaggatggggcattc

SEQ ID NO: 436029 - DNA, 57 bp, Artificial
  Synthetic oligonucleotide
gtatgaatttggggtccacaacaactctgcggttaacctggaacgtggactgatgga

SEQ ID NO: 436030 - DNA, 55 bp, Artificial
  Synthetic oligonucleotide
gtatgacaaagctaatacagaggcttatgcaagagcgttagacaacaaggatacg

SEQ ID NO: 436031 - DNA, 56 bp, Artificial
  Synthetic oligonucleotide
gtatgacaacctccataaaatggagacggttcgtaacccacgtggtctgtactgga

SEQ ID NO: 436032 - DNA, 55 bp, Artificial
  Synthetic oligonucleotide
gtatgacaatccgaccatgtgcgtagacgacctgtttccgtctcgactgtgggca

SEQ ID NO: 436033 - DNA, 51 bp, Artificial
  Synthetic oligonucleotide
gtatgacacccgctgctttgactccacggtgactgaaagggacatcagggt

SEQ ID NO: 436034 - DNA, 55 bp, Artificial
  Synthetic oligonucleotide
gtatgacagtgatgaaccagagtctagatcgctagcaagctggattcagagcgag

SEQ ID NO: 436035 - DNA, 55 bp, Artificial
  Synthetic oligonucleotide
gtatgacagttttgtgccccagtcgtaaggcagtgaagtctgcactagtgaaagg

SEQ ID NO: 436036 - DNA, 57 bp, Artificial
  Synthetic oligonucleotide
gtatgacatacactctctttggggcttcctttgtgagatgctccccgactctctctt

SEQ ID NO: 436037 - DNA, 60 bp, Artificial
  Synthetic oligonucleotide
gtatgacatagtcactgcaagtgagcttgggaactttgcacatggatcgagtggagtttt

SEQ ID NO: 436038 - DNA, 50 bp, Artificial
  Synthetic oligonucleotide
gtatgacccacgaactggtatgactgagtggagcaataatctggctctgg

SEQ ID NO: 436039 - DNA, 55 bp, Artificial
  Synthetic oligonucleotide
gtatgaccctagcccggtaccagagggagacttcgcaagacttgatctagccatc

SEQ ID NO: 436040 - DNA, 57 bp, Artificial
  Synthetic oligonucleotide
gtatgaccctgaccaggaaaggcttgtatggggcctacgaggtgttgagatatcccg

SEQ ID NO: 436041 - DNA, 52 bp, Artificial
  Synthetic oligonucleotide
gtatgaccctgtagtctttgacactatggtaccgtggatgttattgccacta

SEQ ID NO: 436042 - DNA, 60 bp, Artificial
  Synthetic oligonucleotide
gtatgacctgtctacccagactgataagatgggattcgtcgggatccatacgcctgaagg

SEQ ID NO: 436043 - DNA, 55 bp, Artificial
  Synthetic oligonucleotide
gtatgaccttgcgaaaatcgaggagcgcgttctagcgtggcaagtgggacccggc

SEQ ID NO: 436044 - DNA, 58 bp, Artificial
  Synthetic oligonucleotide
gtatgacgagtacaaaaggtttatgaactactggacagcatctaacgaagacctagac

SEQ ID NO: 436045 - DNA, 58 bp, Artificial
  Synthetic oligonucleotide
gtatgacgcagtggtataatcacttactaatgccaataacgttacaatctctatcaat

SEQ ID NO: 436046 - DNA, 54 bp, Artificial
  Synthetic oligonucleotide
gtatgacgcgctgaaagcttaaataactctccccccttataaatacttcgggcc

SEQ ID NO: 436047 - DNA, 60 bp, Artificial
  Synthetic oligonucleotide
gtatgacgctacactgcaactggacatgtccgaattagcagatttgatacttaatgagtg

SEQ ID NO: 436048 - DNA, 55 bp, Artificial
  Synthetic oligonucleotide
gtatgacggatcgttatcagagagagctgcccgtatgtgcgcaaatccgataccc

SEQ ID NO: 436049 - DNA, 60 bp, Artificial
  Synthetic oligonucleotide
gtatgagaatcataccgagaatgcgttgttattgtatatggcatgtacacatgcctcaaa

SEQ ID NO: 436050 - DNA, 55 bp, Artificial
  Synthetic oligonucleotide
gtatgagacagtgtaggtgtggagagccgtcggagtgttcctctcttgcgactct

SEQ ID NO: 436051 - DNA, 55 bp, Artificial
  Synthetic oligonucleotide
gtatgagagtcaccattactacgcttcaagattctgtgtccactctctcaacgac

SEQ ID NO: 436052 - DNA, 60 bp, Artificial
  Synthetic oligonucleotide
gtatgagatggctgacacacaagagcaattcttaccctattcaagacgctcaatatacca

SEQ ID NO: 436053 - DNA, 55 bp, Artificial
  Synthetic oligonucleotide
gtatgagattaatatgtacgtgtgaggcctgggactgctaaccccatggtagctg

SEQ ID NO: 436054 - DNA, 60 bp, Artificial
  Synthetic oligonucleotide
gtatgagattctcagtctagtgtatggatgagtagttgagccaatgaatctagggtttaa

SEQ ID NO: 436055 - DNA, 60 bp, Artificial
  Synthetic oligonucleotide
gtatgaggagaggcaggggcggacacccctatcattggtcgacgtctgcttttggagcac

SEQ ID NO: 436056 - DNA, 60 bp, Artificial
  Synthetic oligonucleotide
gtatgaggaggaactattttacagcagaagtgtcccactgcagggccactgagtacataa

SEQ ID NO: 436057 - DNA, 51 bp, Artificial
  Synthetic oligonucleotide
gtatgaggattagtgtccaagattggctaacttcgcgtaaatacggctgcc

SEQ ID NO: 436058 - DNA, 55 bp, Artificial
  Synthetic oligonucleotide
gtatgaggcagcccattcagacgtccgagaatccctagctaggtatattcctact

SEQ ID NO: 436059 - DNA, 60 bp, Artificial
  Synthetic oligonucleotide
gtatgaggttgctcacgtacagtgtgttcggctcctgcaggcagcaaaagaggacatttc

SEQ ID NO: 436060 - DNA, 51 bp, Artificial
  Synthetic oligonucleotide
gtatgagtacgaacactggtcaggtcttagcgacaatcgactttacaggta

SEQ ID NO: 436061 - DNA, 51 bp, Artificial
  Synthetic oligonucleotide
gtatgagtagagagcactatttctaaatcccatcaggccgtatacggaatt

SEQ ID NO: 436062 - DNA, 55 bp, Artificial
  Synthetic oligonucleotide
gtatgagtgctattcccggtactctgaaattaccctacggtttggccaagttgac

SEQ ID NO: 436063 - DNA, 58 bp, Artificial
  Synthetic oligonucleotide
gtatgagtgtgaaacattaaaggaattgaaggcacataatctatcatgtgttcaaggg

SEQ ID NO: 436064 - DNA, 55 bp, Artificial
  Synthetic oligonucleotide
gtatgataaagtcagaatgcagctgagagacaacgtcaaagaactaggaaacgga

SEQ ID NO: 436065 - DNA, 60 bp, Artificial
  Synthetic oligonucleotide
gtatgataacacacgaaattggattagtgaagcccagaactcagatgtggttcgcctatt

SEQ ID NO: 436066 - DNA, 60 bp, Artificial
  Synthetic oligonucleotide
gtatgataatgagcctagcactgctactgtcaaaaatgatttgagggatcggtatcaggt

SEQ ID NO: 436067 - DNA, 55 bp, Artificial
  Synthetic oligonucleotide
gtatgatacccatcgtcactattcactccattcctgaatatttggatcattggtt

SEQ ID NO: 436068 - DNA, 60 bp, Artificial
  Synthetic oligonucleotide
gtatgatacccgctgctttgactcaacagtcactgagagtgacatccgtgttgaggagtc

SEQ ID NO: 436069 - DNA, 54 bp, Artificial
  Synthetic oligonucleotide
gtatgataccgtctacgggattcctaggttaaaggaaaatatacgacatcgtta

SEQ ID NO: 436070 - DNA, 55 bp, Artificial
  Synthetic oligonucleotide
gtatgatattcgcgagggcaagaaacctggtgctttcggtaacattgagcgattc

SEQ ID NO: 436071 - DNA, 60 bp, Artificial
  Synthetic oligonucleotide
gtatgatcagaccacttatggttcttctactaatcctatgtatgtctctgatacagttac

SEQ ID NO: 436072 - DNA, 55 bp, Artificial
  Synthetic oligonucleotide
gtatgatcaggaggtgcaatgtgagccagggacacaaggcaataggtcaggagtc

SEQ ID NO: 436073 - DNA, 60 bp, Artificial
  Synthetic oligonucleotide
gtatgatcgtacccatccacctgatgggcctagaccgctgccctatttcactgccgcaga

SEQ ID NO: 436074 - DNA, 56 bp, Artificial
  Synthetic oligonucleotide
gtatgatcgtagtgcccttgtgacgccagctggtcagaagttcatccaactatctg

SEQ ID NO: 436075 - DNA, 58 bp, Artificial
  Synthetic oligonucleotide
gtatgatcttggtatgaccgtaccttattaggaaggcaacagacgggtcttatatgga

SEQ ID NO: 436076 - DNA, 60 bp, Artificial
  Synthetic oligonucleotide
gtatgatgagactgctttagaattactacaacgcattaacacggctcttagccgcactga

SEQ ID NO: 436077 - DNA, 60 bp, Artificial
  Synthetic oligonucleotide
gtatgatggtgcggtactgtgtacaagttccgtggagaggtcagtcagtgcggaggttgt

SEQ ID NO: 436078 - DNA, 60 bp, Artificial
  Synthetic oligonucleotide
gtatgatgttgtacggtaatagtaacagtggaaagactcagttgattgacgctttgacag

SEQ ID NO: 436079 - DNA, 56 bp, Artificial
  Synthetic oligonucleotide
gtatgcaaaccgggccgtttgtagtgtcatcccaaaccccgcttctagagacatta

SEQ ID NO: 436080 - DNA, 60 bp, Artificial
  Synthetic oligonucleotide
gtatgcaaatggaagctccatccctctgacacaagactggcagaaaaggtctgtgcgtac

SEQ ID NO: 436081 - DNA, 54 bp, Artificial
  Synthetic oligonucleotide
gtatgcaacgaaaagggcggagcaggtaaatctagcgttgctcaatctctcgca

SEQ ID NO: 436082 - DNA, 52 bp, Artificial
  Synthetic oligonucleotide
gtatgcaattttttgggttcctagggtataaaaccgaggcgggcatagtatt

SEQ ID NO: 436083 - DNA, 60 bp, Artificial
  Synthetic oligonucleotide
gtatgcaccagcgtcttctgcgggtgccctgagggacatgcccatgccgtaatgtatgac

SEQ ID NO: 436084 - DNA, 60 bp, Artificial
  Synthetic oligonucleotide
gtatgcagagattgtgtacacaccaatacttgcacctgatggcacaatattcaagaaatt

SEQ ID NO: 436085 - DNA, 60 bp, Artificial
  Synthetic oligonucleotide
gtatgcagtacacctacccatagcagtaaaacgaggcgttcgtgccacgcctatcttata

SEQ ID NO: 436086 - DNA, 60 bp, Artificial
  Synthetic oligonucleotide
gtatgcagtgaggcatgatgttgtagaccagatgataaaacatgactggtctgacaataa

SEQ ID NO: 436087 - DNA, 60 bp, Artificial
  Synthetic oligonucleotide
gtatgcatactggcattgttttgaggacaatccgagtgtgcaaagcaactttgatgcaca

SEQ ID NO: 436088 - DNA, 55 bp, Artificial
  Synthetic oligonucleotide
gtatgcatcaacttcagagcacgttaacgtgttattgacacgcacagagggcaag

SEQ ID NO: 436089 - DNA, 60 bp, Artificial
  Synthetic oligonucleotide
gtatgcatcaccacaattggaaggattttcagcggagtcaagaaaactgctccttgttgt

SEQ ID NO: 436090 - DNA, 60 bp, Artificial
  Synthetic oligonucleotide
gtatgcatgacagtttcatgtgtggttgcacccaatgagtaaggtactgtccctttattg

SEQ ID NO: 436091 - DNA, 60 bp, Artificial
  Synthetic oligonucleotide
gtatgcatggatgaaatggttcgagaatcgcagaggaatggaattgcgccgcagtcagat

SEQ ID NO: 436092 - DNA, 55 bp, Artificial
  Synthetic oligonucleotide
gtatgccacaatggaacatgtgtagtaataatgaccgatggatcagcaagcagcc

SEQ ID NO: 436093 - DNA, 59 bp, Artificial
  Synthetic oligonucleotide
gtatgccattcctattagccatcgaagggcaagtgcttacagctctgatatcaagaaca

SEQ ID NO: 436094 - DNA, 55 bp, Artificial
  Synthetic oligonucleotide
gtatgcccactcctgatgcgccaatgtcaaatcatcaggcggccaccatgagaga

SEQ ID NO: 436095 - DNA, 55 bp, Artificial
  Synthetic oligonucleotide
gtatgcccctcccatcagcggaccaattagatgttcatcaaatattactaggctg

SEQ ID NO: 436096 - DNA, 55 bp, Artificial
  Synthetic oligonucleotide
gtatgcccctcccattagcggaccaattaactgttcatcaagtattacagggctg

SEQ ID NO: 436097 - DNA, 60 bp, Artificial
  Synthetic oligonucleotide
gtatgcccgttcgttcattatcgaaactgattggtcaactagcatatccagaacgccacg

SEQ ID NO: 436098 - DNA, 59 bp, Artificial
  Synthetic oligonucleotide
gtatgccctagcttatacttgtataatgtgggatccattgcttaacgaatttcctgaaa

SEQ ID NO: 436099 - DNA, 60 bp, Artificial
  Synthetic oligonucleotide
gtatgccgcactacatcttccccctgaggtgctgctaccacccggcacctatcacacaac

SEQ ID NO: 436100 - DNA, 52 bp, Artificial
  Synthetic oligonucleotide
gtatgccgctcccagtcgttacggcaaccctccagaagcggttgccacttct

SEQ ID NO: 436101 - DNA, 50 bp, Artificial
  Synthetic oligonucleotide
gtatgcctctcaggcgggagaagaccctcgggggtacgaacggtctcgtt

SEQ ID NO: 436102 - DNA, 55 bp, Artificial
  Synthetic oligonucleotide
gtatgcctgcatacaagccaagcaagctttcactttctcgccaacttataaggcc

SEQ ID NO: 436103 - DNA, 50 bp, Artificial
  Synthetic oligonucleotide
gtatgcctgtgtacccgcagaccctaatccacaagaagtagtactggaaa

SEQ ID NO: 436104 - DNA, 55 bp, Artificial
  Synthetic oligonucleotide
gtatgccttgaagtcagtcactgcaattatgagatgctaagaaatgctatgccaa

SEQ ID NO: 436105 - DNA, 60 bp, Artificial
  Synthetic oligonucleotide
gtatgccttgtgtagatccaaagctttcctcacgttgtggttgaacctgatctgcacgtg

SEQ ID NO: 436106 - DNA, 50 bp, Artificial
  Synthetic oligonucleotide
gtatgcgaagtgtgaagcgaaattctttgggtcaataagtgttattgatg

SEQ ID NO: 436107 - DNA, 60 bp, Artificial
  Synthetic oligonucleotide
gtatgcgatcgttctccctctgagctgcggcaaatctagtttggcgtcagtgttaagcgg

SEQ ID NO: 436108 - DNA, 60 bp, Artificial
  Synthetic oligonucleotide
gtatgcgcaatggtggtgtttctaaccgccagcgcagaaatgccaggagggccgcgaatt

SEQ ID NO: 436109 - DNA, 60 bp, Artificial
  Synthetic oligonucleotide
gtatgcgccacatgtgaacaaattgctgattcccagcatcgatctcacagacagatggta

SEQ ID NO: 436110 - DNA, 55 bp, Artificial
  Synthetic oligonucleotide
gtatgcggaaaacaaatgccctgtggtgttgtccacaggaggggtagaccgacac

SEQ ID NO: 436111 - DNA, 52 bp, Artificial
  Synthetic oligonucleotide
gtatgcgggcaaattgctgtgtgcgctcataccacccggtgttgatcccagt

SEQ ID NO: 436112 - DNA, 55 bp, Artificial
  Synthetic oligonucleotide
gtatgcgtctccacaattagaaggattctcagctgaatcaaggaaattgcttctc

SEQ ID NO: 436113 - DNA, 60 bp, Artificial
  Synthetic oligonucleotide
gtatgcgtgaagaagacatttcggcgttggaattcggtgatatgaagattgatccagttg

SEQ ID NO: 436114 - DNA, 60 bp, Artificial
  Synthetic oligonucleotide
gtatgctaacgacagagagaagaataggatgaatgttgggttgaagcgcattatggagaa

SEQ ID NO: 436115 - DNA, 60 bp, Artificial
  Synthetic oligonucleotide
gtatgctagcaattaagtatttgcaagttgtagaaaatacgtactctccagatacattag

SEQ ID NO: 436116 - DNA, 55 bp, Artificial
  Synthetic oligonucleotide
gtatgctagttgatgaacgaagatgggtggttgcgctctccagagccaagatgaa

SEQ ID NO: 436117 - DNA, 60 bp, Artificial
  Synthetic oligonucleotide
gtatgctcgccgtgaaatatttgcaggctgttcgtgagtcgtacgatccttccacccttg

SEQ ID NO: 436118 - DNA, 60 bp, Artificial
  Synthetic oligonucleotide
gtatgctggaaaccgaggaaagtatctcccagattcgagtgatagcataagtatgctttt

SEQ ID NO: 436119 - DNA, 60 bp, Artificial
  Synthetic oligonucleotide
gtatgctggtcttagggtgatagctacccccttgatcatgtagtaatcgtaggagtagtg

SEQ ID NO: 436120 - DNA, 57 bp, Artificial
  Synthetic oligonucleotide
gtatgctgtacaagacgaactattagaaagttccaaacaacttttaattcagcattg

SEQ ID NO: 436121 - DNA, 60 bp, Artificial
  Synthetic oligonucleotide
gtatgctgttccatgtcttactcatggacaggcgctcccatcaccccttgcgcagctgag

SEQ ID NO: 436122 - DNA, 60 bp, Artificial
  Synthetic oligonucleotide
gtatgcttgcggttaagtacctgttagcggttgaagctacatactctcctgatactatag

SEQ ID NO: 436123 - DNA, 51 bp, Artificial
  Synthetic oligonucleotide
gtatgcttgtgagaacaagagagtatcaatgattcaaaaggagctacaacg

SEQ ID NO: 436124 - DNA, 53 bp, Artificial
  Synthetic oligonucleotide
gtatgctttcagtatacacttttccgcaggtttttagtaaccaacccgcaatt

SEQ ID NO: 436125 - DNA, 60 bp, Artificial
  Synthetic oligonucleotide
gtatgctttgacgtccgatgccgatttagctccctgaatgttcggatggaaatgtgctga

SEQ ID NO: 436126 - DNA, 60 bp, Artificial
  Synthetic oligonucleotide
gtatggaaatgagacgctgtcttcttcaatcccttcaacagattgagagcatgatcgagg

SEQ ID NO: 436127 - DNA, 57 bp, Artificial
  Synthetic oligonucleotide
gtatggaacaacattagaacagcaatacaacaaaccgttgtgtgatttgttaattag

SEQ ID NO: 436128 - DNA, 55 bp, Artificial
  Synthetic oligonucleotide
gtatggaacacgcgtcaccctaacatatctcaattgtccacgcaattttctaggg

SEQ ID NO: 436129 - DNA, 51 bp, Artificial
  Synthetic oligonucleotide
gtatggaagtttgacagtagcctagcacggagacatcttgcccgagagctg

SEQ ID NO: 436130 - DNA, 55 bp, Artificial
  Synthetic oligonucleotide
gtatggaatgcttgtataccaggtctctttggattagcaaccctaggatactggt

SEQ ID NO: 436131 - DNA, 53 bp, Artificial
  Synthetic oligonucleotide
gtatggacaacgtagtactatggtccatgaagagtaacagactcatagacaaa

SEQ ID NO: 436132 - DNA, 60 bp, Artificial
  Synthetic oligonucleotide
gtatggacagtgcaataagtacaatgttcatgacctcctctattacatgagggacttcct

SEQ ID NO: 436133 - DNA, 55 bp, Artificial
  Synthetic oligonucleotide
gtatggacatataatgccgaacttctggttttaatggaaaacgagagaacacttg

SEQ ID NO: 436134 - DNA, 60 bp, Artificial
  Synthetic oligonucleotide
gtatggaccagcattgagcatcaacgaattgagcaatcttgcaaagggggagaaggctaa

SEQ ID NO: 436135 - DNA, 55 bp, Artificial
  Synthetic oligonucleotide
gtatggaccatgtgcaaaacgataaggtattctgacacattgtttacgtgggcca

SEQ ID NO: 436136 - DNA, 56 bp, Artificial
  Synthetic oligonucleotide
gtatggactggctaaattattgggctcaagtaagcgtttgtggtttggcgcatgta

SEQ ID NO: 436137 - DNA, 55 bp, Artificial
  Synthetic oligonucleotide
gtatggacttacaatgcagaacttctagtgctcatggaaaacgaaagaactctgg

SEQ ID NO: 436138 - DNA, 60 bp, Artificial
  Synthetic oligonucleotide
gtatggacttgctgtagccagcggatatgactttgagagagaggggtactccctggtcgg

SEQ ID NO: 436139 - DNA, 60 bp, Artificial
  Synthetic oligonucleotide
gtatggagacctgttcacaaagctgtgcacgcatgttgagaagaaattgctaggatcatc

SEQ ID NO: 436140 - DNA, 60 bp, Artificial
  Synthetic oligonucleotide
gtatggagtacaatatatatgaggagttcctagagtgcataaagcggccatccgttctaa

SEQ ID NO: 436141 - DNA, 59 bp, Artificial
  Synthetic oligonucleotide
gtatggagtcacttgtaccacaacacttggacaagtaaacatgcctggtgcgaagttta

SEQ ID NO: 436142 - DNA, 58 bp, Artificial
  Synthetic oligonucleotide
gtatggatacctcaccctgaacaacgggagtcaggcagtaggacgctcttcattttac

SEQ ID NO: 436143 - DNA, 60 bp, Artificial
  Synthetic oligonucleotide
gtatggatgcagaaaacgcagttgacggaggcaaccggagatgcagagctcgtcagaggt

SEQ ID NO: 436144 - DNA, 60 bp, Artificial
  Synthetic oligonucleotide
gtatggatgcatcgatgtcatttatcaccaatcgaaagaagctctcagtaaacgactcgg

SEQ ID NO: 436145 - DNA, 55 bp, Artificial
  Synthetic oligonucleotide
gtatggattgaatctcccaatggtcactttcttgaaggatgagttaaggccgctg

SEQ ID NO: 436146 - DNA, 55 bp, Artificial
  Synthetic oligonucleotide
gtatggcagacagacaggatgaggattaaaacatggcatagtttagtaaagcacc

SEQ ID NO: 436147 - DNA, 55 bp, Artificial
  Synthetic oligonucleotide
gtatggcaggtagacaggatgaggatcagaacatggaatagcctagtaaagcacc

SEQ ID NO: 436148 - DNA, 60 bp, Artificial
  Synthetic oligonucleotide
gtatggcatgcgtgcatcgactgcttgggggtgtccctgacccccttaattcaacgtcta

SEQ ID NO: 436149 - DNA, 60 bp, Artificial
  Synthetic oligonucleotide
gtatggcccattggatcttgaccctctgtgcaatggttgaggtgacccggattgaccctg

SEQ ID NO: 436150 - DNA, 55 bp, Artificial
  Synthetic oligonucleotide
gtatggcgatgtgtgtatcataattttataggtgtgctacgggccaatctagagg

SEQ ID NO: 436151 - DNA, 54 bp, Artificial
  Synthetic oligonucleotide
gtatggcggcttcaatgtataaacggggtttaaaatggtcatacaccccgacaa

SEQ ID NO: 436152 - DNA, 55 bp, Artificial
  Synthetic oligonucleotide
gtatggcgggaggagtagtttacataggggtcataggttagggcattggcctttg

SEQ ID NO: 436153 - DNA, 60 bp, Artificial
  Synthetic oligonucleotide
gtatggcgttcaaagaaagtccctatgggattctcttacgacaccagatgctttgactca

SEQ ID NO: 436154 - DNA, 55 bp, Artificial
  Synthetic oligonucleotide
gtatggctataccagatccttgtcgaaggttggctgctgtgtggaactttgactg

SEQ ID NO: 436155 - DNA, 55 bp, Artificial
  Synthetic oligonucleotide
gtatggctcatctagtggtgtcgtattccataattcatgggaagatgccaaagct

SEQ ID NO: 436156 - DNA, 60 bp, Artificial
  Synthetic oligonucleotide
gtatggctgccgatggttatcttccagattggctcgaggacactctctctgaaggaataa

SEQ ID NO: 436157 - DNA, 60 bp, Artificial
  Synthetic oligonucleotide
gtatggcttgcctgtcatgactcataatgtgggactgagtttactcaagaactgcaccgt

SEQ ID NO: 436158 - DNA, 51 bp, Artificial
  Synthetic oligonucleotide
gtatgggacaccgacgctcaatccattgtagctcaaacggtgtacatcact

SEQ ID NO: 436159 - DNA, 58 bp, Artificial
  Synthetic oligonucleotide
gtatgggcaagcagggagctggaaagattcgcagttaaccctagcctcttagaaacac

SEQ ID NO: 436160 - DNA, 58 bp, Artificial
  Synthetic oligonucleotide
gtatgggcaagcagggagctggaaagattcgcttgtaacccctccctcatggaaacaa

SEQ ID NO: 436161 - DNA, 60 bp, Artificial
  Synthetic oligonucleotide
gtatgggcaagcagggagctggaaagatttgcttgtaaccctggtctaatggagacagct

SEQ ID NO: 436162 - DNA, 60 bp, Artificial
  Synthetic oligonucleotide
gtatgggcaagcagggagctggacagatttgcacttaaccctggccttttagagacatca

SEQ ID NO: 436163 - DNA, 55 bp, Artificial
  Synthetic oligonucleotide
gtatgggccccatggagaatatcccacctttgcaggtaaagcaaatggtacacca

SEQ ID NO: 436164 - DNA, 60 bp, Artificial
  Synthetic oligonucleotide
gtatgggccggaagcgagctgcaacgtttcgcgatgaatcccggtctcatggagaacgta

SEQ ID NO: 436165 - DNA, 60 bp, Artificial
  Synthetic oligonucleotide
gtatgggcgactaggatggttaaacatctcatgcgtctcacatctcaattgtatggagtc

SEQ ID NO: 436166 - DNA, 55 bp, Artificial
  Synthetic oligonucleotide
gtatgggcgggctgctaaatataccagagcaccatatgcttattgaaccgcccaa

SEQ ID NO: 436167 - DNA, 57 bp, Artificial
  Synthetic oligonucleotide
gtatggggaccataccttcggcaaaagcttcaatactccacgaagtcagacctgtta

SEQ ID NO: 436168 - DNA, 56 bp, Artificial
  Synthetic oligonucleotide
gtatggggacttctggactagaattgaccttcaccaatgattccatcatcagtcac

SEQ ID NO: 436169 - DNA, 60 bp, Artificial
  Synthetic oligonucleotide
gtatgggtacaacacaatcgcgtcaggcgggaatctcgcgtatagcgttgctgcgtctcc

SEQ ID NO: 436170 - DNA, 55 bp, Artificial
  Synthetic oligonucleotide
gtatgggtcttcatatccatatgggtgcccaatatatcttgtccgccatgacatc

SEQ ID NO: 436171 - DNA, 55 bp, Artificial
  Synthetic oligonucleotide
gtatgggtgattcatacttcgcgctgtcatagccgcattaattccggttgttcgc

SEQ ID NO: 436172 - DNA, 60 bp, Artificial
  Synthetic oligonucleotide
gtatgggtgcgttgcgttctctatatcggagtctgcgtctgagtgattgattccgacagt

SEQ ID NO: 436173 - DNA, 60 bp, Artificial
  Synthetic oligonucleotide
gtatgggtgtattgcgttctccagttcagagtctgtgtctgtatgacccattcctatggt

SEQ ID NO: 436174 - DNA, 54 bp, Artificial
  Synthetic oligonucleotide
gtatggtcccaacgcgaaaggtggacgtggagaaaagatccaaataacttcgcg

SEQ ID NO: 436175 - DNA, 57 bp, Artificial
  Synthetic oligonucleotide
gtatggtctcaaagtttgtcaactcagccaaagcagtcgggaagaaaacacacgatt

SEQ ID NO: 436176 - DNA, 60 bp, Artificial
  Synthetic oligonucleotide
gtatggtgaattcaccatgttgggcatctatgacaggtgggctgtcttgccgcgtcatgc

SEQ ID NO: 436177 - DNA, 55 bp, Artificial
  Synthetic oligonucleotide
gtatggtgatgacaggctaacgtcgtcaccgagtgttccggatgactatgtcccc

SEQ ID NO: 436178 - DNA, 55 bp, Artificial
  Synthetic oligonucleotide
gtatggtgatttcggtgcagaagctagcgagtaagtgctatcaacaggtttacgt

SEQ ID NO: 436179 - DNA, 59 bp, Artificial
  Synthetic oligonucleotide
gtatggtggacaagtaatagtctaattgccctgtgtggaagcccattctcagttgggtc

SEQ ID NO: 436180 - DNA, 55 bp, Artificial
  Synthetic oligonucleotide
gtatggtgtcaagactgactcagggtgcccagatggtgccagatgttacgtgctg

SEQ ID NO: 436181 - DNA, 50 bp, Artificial
  Synthetic oligonucleotide
gtatggtgtcatggttgataggaatgatcaccaaataagagtggataggg

SEQ ID NO: 436182 - DNA, 51 bp, Artificial
  Synthetic oligonucleotide
gtatggtgtctacggtaaggatgtggtacaacgtgtcagccgctcggtcct

SEQ ID NO: 436183 - DNA, 60 bp, Artificial
  Synthetic oligonucleotide
gtatggtgtgttaattcctatctgtgttgttatttctatgttcctgatatagataacgat

SEQ ID NO: 436184 - DNA, 50 bp, Artificial
  Synthetic oligonucleotide
gtatggtgtgtttagttcctatctgtattgttattcctgtgttcatgata

SEQ ID NO: 436185 - DNA, 56 bp, Artificial
  Synthetic oligonucleotide
gtatggttagggttgatacccatatgttacataagtcagtaggtacgtatcctgtt

SEQ ID NO: 436186 - DNA, 59 bp, Artificial
  Synthetic oligonucleotide
gtatggttatacacctctaggggacagtggtgcggtgcgagttggtggcagaagtacac

SEQ ID NO: 436187 - DNA, 50 bp, Artificial
  Synthetic oligonucleotide
gtatggttcccagtttatggagggcttaaacccaattcgcctagtgacat

SEQ ID NO: 436188 - DNA, 55 bp, Artificial
  Synthetic oligonucleotide
gtatggttctggtgatagatatgttagaatgggtactgagagcatgaactttgcc

SEQ ID NO: 436189 - DNA, 52 bp, Artificial
  Synthetic oligonucleotide
gtatggttgagaaggaactgtattcaaattacggcaacaccatgacttttgg

SEQ ID NO: 436190 - DNA, 51 bp, Artificial
  Synthetic oligonucleotide
gtatggtttcacatttgcaacctttacagaggtaacaagccattcaagtct

SEQ ID NO: 436191 - DNA, 56 bp, Artificial
  Synthetic oligonucleotide
gtatggtttgcttcgaaacttacgggataggagtttggcacgatatgctttcgact

SEQ ID NO: 436192 - DNA, 55 bp, Artificial
  Synthetic oligonucleotide
gtatgtaactacgcacaccaatagttacaatgagtacgttcgcgaagtcgcagag

SEQ ID NO: 436193 - DNA, 55 bp, Artificial
  Synthetic oligonucleotide
gtatgtaactgagcaagtatatattatgatgacggctaatgatgatgtagaggcg

SEQ ID NO: 436194 - DNA, 59 bp, Artificial
  Synthetic oligonucleotide
gtatgtaagttgcctttgagcgtaaaatgtcttatatgcccataatcgtaatcgattct

SEQ ID NO: 436195 - DNA, 58 bp, Artificial
  Synthetic oligonucleotide
gtatgtaagttgcctttgggtgtaaaagttcttgcatgcacataatcgtaatcgattc

SEQ ID NO: 436196 - DNA, 53 bp, Artificial
  Synthetic oligonucleotide
gtatgtaatagggtccaggttttttgatatttcctctactactagtactgtcc

SEQ ID NO: 436197 - DNA, 59 bp, Artificial
  Synthetic oligonucleotide
gtatgtaatatgtacttctcttcatttcgtttaatctgacttcgagcaacgaaatgtgg

SEQ ID NO: 436198 - DNA, 56 bp, Artificial
  Synthetic oligonucleotide
gtatgtactcaaagactgaaggcgcactcaccacaccatatatggccctcagaggc

SEQ ID NO: 436199 - DNA, 57 bp, Artificial
  Synthetic oligonucleotide
gtatgtagaaataaatagacacaagcaaacccaattatgtaaaaattgtacagataa

SEQ ID NO: 436200 - DNA, 60 bp, Artificial
  Synthetic oligonucleotide
gtatgtagagacggttggactggaaccaacaggcctgtactagtcatctcgcctgatctc

SEQ ID NO: 436201 - DNA, 57 bp, Artificial
  Synthetic oligonucleotide
gtatgtagatccggttttcgggacaacacaacgagcttttggtcaagcgagcaccac

SEQ ID NO: 436202 - DNA, 55 bp, Artificial
  Synthetic oligonucleotide
gtatgtaggtgatttgaataccaagcttaccacgagattggtggaggactatgct

SEQ ID NO: 436203 - DNA, 55 bp, Artificial
  Synthetic oligonucleotide
gtatgtagtcggttcaattgcaggtggtaaaagtaaagaccctttggaacgtgca

SEQ ID NO: 436204 - DNA, 52 bp, Artificial
  Synthetic oligonucleotide
gtatgtagttgttggaatttccgggatcatgttcctaaaaactacgggaacc

SEQ ID NO: 436205 - DNA, 54 bp, Artificial
  Synthetic oligonucleotide
gtatgtataggcgacagttctaatagatatcaattgggatgggaaaacatcacg

SEQ ID NO: 436206 - DNA, 55 bp, Artificial
  Synthetic oligonucleotide
gtatgtatcatcggtacagtttcaaagttctcgcaaggtgataccctagtattcc

SEQ ID NO: 436207 - DNA, 55 bp, Artificial
  Synthetic oligonucleotide
gtatgtatgtaggttgaaaaccctacccgcttaggattgcttagcagtccttccc

SEQ ID NO: 436208 - DNA, 56 bp, Artificial
  Synthetic oligonucleotide
gtatgtatgttgggtgcgctatccttcagtccctagaagcaaggcaaatcccagtt

SEQ ID NO: 436209 - DNA, 60 bp, Artificial
  Synthetic oligonucleotide
gtatgtattcaaagactgagggtgcactcactacaccatacatagctctcaagggctcag

SEQ ID NO: 436210 - DNA, 55 bp, Artificial
  Synthetic oligonucleotide
gtatgtatttacctgatgcttgtcgcaaagactatatgggactcttttgagatgt

SEQ ID NO: 436211 - DNA, 54 bp, Artificial
  Synthetic oligonucleotide
gtatgtatttgacttcggggtacaacgttgtggtgtattaggtaaattaacaca

SEQ ID NO: 436212 - DNA, 53 bp, Artificial
  Synthetic oligonucleotide
gtatgtcaaaagtgatagcctaaggctggcaactggtttgagaaatgtcccac

SEQ ID NO: 436213 - DNA, 57 bp, Artificial
  Synthetic oligonucleotide
gtatgtcaactaagagatggtggaagaacccttaccttgttgaggccgttggcgtga

SEQ ID NO: 436214 - DNA, 60 bp, Artificial
  Synthetic oligonucleotide
gtatgtcaatagcaataccgacaaccgtcgtttcgtctattcacaatattccggacatga

SEQ ID NO: 436215 - DNA, 60 bp, Artificial
  Synthetic oligonucleotide
gtatgtcagaatcccaaggatatcgtaccaaaggctcaatgcatctttggttttccagat

SEQ ID NO: 436216 - DNA, 58 bp, Artificial
  Synthetic oligonucleotide
gtatgtccactaaatacgcaaacattaggaattgggtgcctaacaactgatacaaaca

SEQ ID NO: 436217 - DNA, 57 bp, Artificial
  Synthetic oligonucleotide
gtatgtcctacatctatacctagtgatcaaatatccactactgaaactgctgaccca

SEQ ID NO: 436218 - DNA, 60 bp, Artificial
  Synthetic oligonucleotide
gtatgtcgaaaagctttttgatgtcatctgctccttgaacagtaataactgaaccctgtg

SEQ ID NO: 436219 - DNA, 54 bp, Artificial
  Synthetic oligonucleotide
gtatgtcggggctacgtcatctatgacgttatattccacttcgttggaatacac

SEQ ID NO: 436220 - DNA, 55 bp, Artificial
  Synthetic oligonucleotide
gtatgtcgggtcctcgtcgtctgtcatcagttgtggtgcgctggtacttgggtgg

SEQ ID NO: 436221 - DNA, 55 bp, Artificial
  Synthetic oligonucleotide
gtatgtcgtctatacgcagcggtggcatggaactacatgcacttacagcagactc

SEQ ID NO: 436222 - DNA, 55 bp, Artificial
  Synthetic oligonucleotide
gtatgtctgacttcagctgagaagaagatgttgtgcgaagtatttccagacattg

SEQ ID NO: 436223 - DNA, 53 bp, Artificial
  Synthetic oligonucleotide
gtatgtcttattattcatggctcaccgggaaccggaaaatcagttgcctctaa

SEQ ID NO: 436224 - DNA, 55 bp, Artificial
  Synthetic oligonucleotide
gtatgtgacgtaccctattcttggtctagagggcaacgggggacgtagcagggac

SEQ ID NO: 436225 - DNA, 51 bp, Artificial
  Synthetic oligonucleotide
gtatgtgagtatactaaaccaggttactgtgtgtcattgaactctcaatgg

SEQ ID NO: 436226 - DNA, 60 bp, Artificial
  Synthetic oligonucleotide
gtatgtgatgaaatagaggaaacatggagagattgccaggaggagtttgaaacgttcgag

SEQ ID NO: 436227 - DNA, 55 bp, Artificial
  Synthetic oligonucleotide
gtatgtgatgcatggtaaggtacacacgcgtgaaactggcttgacaacgaatcac

SEQ ID NO: 436228 - DNA, 55 bp, Artificial
  Synthetic oligonucleotide
gtatgtgattagaaagaacccaaacggacaaagagaattggcaatcgggtcgctc

SEQ ID NO: 436229 - DNA, 55 bp, Artificial
  Synthetic oligonucleotide
gtatgtgcattcttgttggtggcttgtgctataaccccagtatttggaaaatgct

SEQ ID NO: 436230 - DNA, 56 bp, Artificial
  Synthetic oligonucleotide
gtatgtgcctcccggagctccaaaacctacgtcccgggattcctttgcctggcaga

SEQ ID NO: 436231 - DNA, 56 bp, Artificial
  Synthetic oligonucleotide
gtatgtggaccaataaaccatgtaccatgcttggaaaagtagccgaaagtcaagcg

SEQ ID NO: 436232 - DNA, 59 bp, Artificial
  Synthetic oligonucleotide
gtatgtggacttttgtgttaaacatggagaatcaatcaatctccattccgttaggatct

SEQ ID NO: 436233 - DNA, 55 bp, Artificial
  Synthetic oligonucleotide
gtatgtggagaaggcctatgtggatatagaggacggagtgtctgctattgagctg

SEQ ID NO: 436234 - DNA, 55 bp, Artificial
  Synthetic oligonucleotide
gtatgtggatttgcccacagcaaaaggaggtgcaatgtttatagcaaaggcaggt

SEQ ID NO: 436235 - DNA, 52 bp, Artificial
  Synthetic oligonucleotide
gtatgtggcctgtttccaacccagattcaagtacgtaacataatgagtcctg

SEQ ID NO: 436236 - DNA, 55 bp, Artificial
  Synthetic oligonucleotide
gtatgtggcttatttcctacacagatacaagtgcgtaacatcatgagtccagtaa

SEQ ID NO: 436237 - DNA, 59 bp, Artificial
  Synthetic oligonucleotide
gtatgtgggcaatgtattgcatgaacctgacgagtacgtacatcaagctgctctccact

SEQ ID NO: 436238 - DNA, 54 bp, Artificial
  Synthetic oligonucleotide
gtatgtgggtaacccgtcctccaaggctctgacggcgcagttgttcttgattgt

SEQ ID NO: 436239 - DNA, 54 bp, Artificial
  Synthetic oligonucleotide
gtatgtggtagccacagctgagcgaggaggtcgggcccatagatcggctcttga

SEQ ID NO: 436240 - DNA, 55 bp, Artificial
  Synthetic oligonucleotide
gtatgtggtccaggaaactcagatggtctgttttgtatgggtagatcttatgcag

SEQ ID NO: 436241 - DNA, 55 bp, Artificial
  Synthetic oligonucleotide
gtatgtgtgacgtcatagtacgtataaaaaacttggaatatttcttaacgatacg

SEQ ID NO: 436242 - DNA, 55 bp, Artificial
  Synthetic oligonucleotide
gtatgtgtgcaccgacggttgtatcctagtgaagacagccaagagagaaggacag

SEQ ID NO: 436243 - DNA, 56 bp, Artificial
  Synthetic oligonucleotide
gtatgtgttctcatacacggcacccctggatcaggtaaatcattaacaacctccct

SEQ ID NO: 436244 - DNA, 56 bp, Artificial
  Synthetic oligonucleotide
gtatgttaattggaaatactacagttattccgagcccacaaacattgtttcattat

SEQ ID NO: 436245 - DNA, 55 bp, Artificial
  Synthetic oligonucleotide
gtatgttagaaaatcgccaagaccaggtcattttggcgtcaatcgctctcaccga

SEQ ID NO: 436246 - DNA, 59 bp, Artificial
  Synthetic oligonucleotide
gtatgttagcgcagatgctactaagtggtcaccaggagacaactcagctaaatttcgta

SEQ ID NO: 436247 - DNA, 58 bp, Artificial
  Synthetic oligonucleotide
gtatgttcaacttacatgaacatatcctacttcttggctctataaaaatttcacctaa

SEQ ID NO: 436248 - DNA, 58 bp, Artificial
  Synthetic oligonucleotide
gtatgttctggttagttagggataggaggccttatggcactcctcaagactttggtca

SEQ ID NO: 436249 - DNA, 60 bp, Artificial
  Synthetic oligonucleotide
gtatgttgaagacacaaagattgacctgtggtcttataatgctgaattattggtggcatt

SEQ ID NO: 436250 - DNA, 55 bp, Artificial
  Synthetic oligonucleotide
gtatgttgataatctccttaatcgccatgtgcttttgccatctggtgaagtcacc

SEQ ID NO: 436251 - DNA, 51 bp, Artificial
  Synthetic oligonucleotide
gtatgttgcaagttacaacgaggttgaccagttgtcacgactcctcaccga

SEQ ID NO: 436252 - DNA, 59 bp, Artificial
  Synthetic oligonucleotide
gtatgttgcaggagtaccagaacttggggccttttttgctatactacaagacatgagga

SEQ ID NO: 436253 - DNA, 60 bp, Artificial
  Synthetic oligonucleotide
gtatgttgcagttgaatcccgtcaatattgcttgattggttgagtagacctggactgaca

SEQ ID NO: 436254 - DNA, 59 bp, Artificial
  Synthetic oligonucleotide
gtatgttgcagttgcaccctatgggtattgtgaactcggcctgtttcgaatcaccttcg

SEQ ID NO: 436255 - DNA, 55 bp, Artificial
  Synthetic oligonucleotide
gtatgttgctacggttgccatagctcactatggtaagaacagactcgctgagagc

SEQ ID NO: 436256 - DNA, 54 bp, Artificial
  Synthetic oligonucleotide
gtatgttggatataacggaagtgacactagggggcattataacttttcttttaa

SEQ ID NO: 436257 - DNA, 60 bp, Artificial
  Synthetic oligonucleotide
gtatgttgtatgtagtacgctacaacatactacatactacaaatgtagggtggtgtgatg

SEQ ID NO: 436258 - DNA, 59 bp, Artificial
  Synthetic oligonucleotide
gtatgttgttagcaatttctctagtccctcgtgtaatgctactcctctaattatcgacg

SEQ ID NO: 436259 - DNA, 57 bp, Artificial
  Synthetic oligonucleotide
gtatgtttaataataccatacgtatagatgatttactttctccactactaggtcaag

SEQ ID NO: 436260 - DNA, 59 bp, Artificial
  Synthetic oligonucleotide
gtatgtttcgcctaatagcgcagcggtcactcggcgactttgcaaactaagcatccttt

SEQ ID NO: 436261 - DNA, 60 bp, Artificial
  Synthetic oligonucleotide
gtatgtttctagtggagattccagtgtcctgggcacttactctagcgagtcagctgtgga

SEQ ID NO: 436262 - DNA, 55 bp, Artificial
  Synthetic oligonucleotide
gtatgttttgggagataagttcaaatgtgcagcaaacattataggcctcctgagg

SEQ ID NO: 436263 - DNA, 56 bp, Artificial
  Synthetic oligonucleotide
gtattaaaattcagcaattgtccaatttaggaaacattctgtttaagagttgacaa

SEQ ID NO: 436264 - DNA, 60 bp, Artificial
  Synthetic oligonucleotide
gtattaaagaacttgttgctgaattaagatggcagtataacagatttgctgtaataacac

SEQ ID NO: 436265 - DNA, 60 bp, Artificial
  Synthetic oligonucleotide
gtattaaagcacaagatggtagaggattcctatcgcagccgtaagtcaataatctgttat

SEQ ID NO: 436266 - DNA, 56 bp, Artificial
  Synthetic oligonucleotide
gtattaaagccaaacatgtgggatccgctgctaaatgagtttcccgaaaccgtaca

SEQ ID NO: 436267 - DNA, 55 bp, Artificial
  Synthetic oligonucleotide
gtattaaggcatgtgaagttgttgtaacaaatcttaataagagtgctggttggcc

SEQ ID NO: 436268 - DNA, 58 bp, Artificial
  Synthetic oligonucleotide
gtattaaggtggaagtttgacagccacctagcatacagacacatggcccgcgagctac

SEQ ID NO: 436269 - DNA, 60 bp, Artificial
  Synthetic oligonucleotide
gtattaatatgcttgatttcgaggcgtattaaattactagagcagttagtgcttaatgcc

SEQ ID NO: 436270 - DNA, 55 bp, Artificial
  Synthetic oligonucleotide
gtattaatgggcataggattaggataggaagaagtagctcagctctctaaggatg

SEQ ID NO: 436271 - DNA, 60 bp, Artificial
  Synthetic oligonucleotide
gtattacaaagagcttatagagctatcctgcacatacctacaagaataagacaaggcttc

SEQ ID NO: 436272 - DNA, 55 bp, Artificial
  Synthetic oligonucleotide
gtattacacacaggtttctgtacgcgaccctaaattcttagaacagcctcgtgag

SEQ ID NO: 436273 - DNA, 55 bp, Artificial
  Synthetic oligonucleotide
gtattaccactacctaggaagatccgggtacactgtgcacgtgcagtgtaatgca

SEQ ID NO: 436274 - DNA, 60 bp, Artificial
  Synthetic oligonucleotide
gtattaccaggattggtattagcatcagtagagaatggaaagtgtgtaggttgagattcc

SEQ ID NO: 436275 - DNA, 54 bp, Artificial
  Synthetic oligonucleotide
gtattaccgctgagcgtgctgttgttaatctttacgctaatatgaatgttagca

SEQ ID NO: 436276 - DNA, 60 bp, Artificial
  Synthetic oligonucleotide
gtattacctagacgatacatttttgagggctaacgatattgcttatgttcattacgatga

SEQ ID NO: 436277 - DNA, 59 bp, Artificial
  Synthetic oligonucleotide
gtattacctagaggtacaacgttagcgattcttggcgcaattaaagagccagctgttga

SEQ ID NO: 436278 - DNA, 60 bp, Artificial
  Synthetic oligonucleotide
gtattacctgggacttctttctatctgtgattatggcggctatacatgaaggtgttgcta

SEQ ID NO: 436279 - DNA, 56 bp, Artificial
  Synthetic oligonucleotide
gtattacgcgctccaattcctattattcgagtgttaaaccaaataatacacaatcc

SEQ ID NO: 436280 - DNA, 58 bp, Artificial
  Synthetic oligonucleotide
gtattacggaatactcagaggcgttgaatacgaaatcttgaccgaggcaacacttaca

SEQ ID NO: 436281 - DNA, 52 bp, Artificial
  Synthetic oligonucleotide
gtattacggagttaatgatagaccttcgaaaaacgcaaactctaaaggtaaa

SEQ ID NO: 436282 - DNA, 59 bp, Artificial
  Synthetic oligonucleotide
gtattactctcgtcgaagaccggtcagccaccaagagttcaagtcacacgcatattagt

SEQ ID NO: 436283 - DNA, 60 bp, Artificial
  Synthetic oligonucleotide
gtattactgagccatttgtaacaattgtgtatgtcctacatacctggcaaatagggcaca

SEQ ID NO: 436284 - DNA, 55 bp, Artificial
  Synthetic oligonucleotide
gtattactgttttgtatccgaaacagaacctccagaaatggattccttatcttta

SEQ ID NO: 436285 - DNA, 57 bp, Artificial
  Synthetic oligonucleotide
gtattagacacgctatacacacaaaacagttattgggaatctaatctaactcagttt

SEQ ID NO: 436286 - DNA, 55 bp, Artificial
  Synthetic oligonucleotide
gtattagacactaatgtaacatttgatcaagaatcagcggttgtacgtgcagtga

SEQ ID NO: 436287 - DNA, 55 bp, Artificial
  Synthetic oligonucleotide
gtattagactcagtgacttggagtacaaacatgcaattcttgaagactctcagta

SEQ ID NO: 436288 - DNA, 55 bp, Artificial
  Synthetic oligonucleotide
gtattagaggtcgaggtttcttgaaagggttgctagacggactaatgagagccag

SEQ ID NO: 436289 - DNA, 50 bp, Artificial
  Synthetic oligonucleotide
gtattagctatggattactctggatttgatgcttcacatacctctggcat

SEQ ID NO: 436290 - DNA, 58 bp, Artificial
  Synthetic oligonucleotide
gtattaggagatcgtttagacgtaccactcttcttacgaaatgcttgaacgcagcgac

SEQ ID NO: 436291 - DNA, 54 bp, Artificial
  Synthetic oligonucleotide
gtattaggctggagaaactgccagtggtccgagcacaaactgacacaaccagtt

SEQ ID NO: 436292 - DNA, 60 bp, Artificial
  Synthetic oligonucleotide
gtattagggcctacctcatgaaccggcaagcagtcctagatgaaacacatctgccagaca

SEQ ID NO: 436293 - DNA, 57 bp, Artificial
  Synthetic oligonucleotide
gtattaggttgcttgtaaacaacggagtggtgatcggtagatccgtctggcgtggaa

SEQ ID NO: 436294 - DNA, 57 bp, Artificial
  Synthetic oligonucleotide
gtattagtaatacagtgtacagacttttccaagagttggctagaattccaaatcgaa

SEQ ID NO: 436295 - DNA, 55 bp, Artificial
  Synthetic oligonucleotide
gtattagtgtggaagtttgacagcaccctagcacacaaacacatagcccgcgagc

SEQ ID NO: 436296 - DNA, 60 bp, Artificial
  Synthetic oligonucleotide
gtattataaagactgctgacacagaagggaagactgctgacacagagggactttccgcct

SEQ ID NO: 436297 - DNA, 59 bp, Artificial
  Synthetic oligonucleotide
gtattatatgtgatggagttgctggaaaagtctcaaccctttctcgtgagtacactaag

SEQ ID NO: 436298 - DNA, 60 bp, Artificial
  Synthetic oligonucleotide
gtattatcacctggcgtgctgatggcattattcaatagtggctcactggagaaggctact

SEQ ID NO: 436299 - DNA, 60 bp, Artificial
  Synthetic oligonucleotide
gtattatcatttcagatacaccagtccacgattgtaatgcgacctgtcaaacacccaaag

SEQ ID NO: 436300 - DNA, 60 bp, Artificial
  Synthetic oligonucleotide
gtattatcctgttgaggcatcaaacgaaatagctgatactgaatggaaagatactttatc

SEQ ID NO: 436301 - DNA, 60 bp, Artificial
  Synthetic oligonucleotide
gtattatcgttgttcgatgtacttccgagcagcggtaagggtggtgcataatgccacctg

SEQ ID NO: 436302 - DNA, 51 bp, Artificial
  Synthetic oligonucleotide
gtattatgtatacttgaccagccgtgatgtgtcacgcgtacgtgacaaccc

SEQ ID NO: 436303 - DNA, 50 bp, Artificial
  Synthetic oligonucleotide
gtattatgtgatttgaatcgcataatggcagcaggatttattcgatcggg

SEQ ID NO: 436304 - DNA, 60 bp, Artificial
  Synthetic oligonucleotide
gtattattagactatgaagtgaactgggaagtgaggggactagtcatgcaaaacatggat

SEQ ID NO: 436305 - DNA, 55 bp, Artificial
  Synthetic oligonucleotide
gtattattgaacaggacgcaacgagtctacagacgcgcataaatccggtcgcccc

SEQ ID NO: 436306 - DNA, 55 bp, Artificial
  Synthetic oligonucleotide
gtattattgcaacagttagtagtgaacgggacgttctggggctttgcagatagga

SEQ ID NO: 436307 - DNA, 60 bp, Artificial
  Synthetic oligonucleotide
gtattatttatctaatactgatgcatctttagtctgttgttctaattctggagctggaca

SEQ ID NO: 436308 - DNA, 54 bp, Artificial
  Synthetic oligonucleotide
gtattatttggggagccgagtgatatacacccccagtccacacttaaactaccc

SEQ ID NO: 436309 - DNA, 55 bp, Artificial
  Synthetic oligonucleotide
gtattcaacaccctcatatcaactactacgttgtgtataacggtccacatgccgg

SEQ ID NO: 436310 - DNA, 60 bp, Artificial
  Synthetic oligonucleotide
gtattcaatatgattataatgaagtttatactagagttaagagcaaatttgattacgtga

SEQ ID NO: 436311 - DNA, 55 bp, Artificial
  Synthetic oligonucleotide
gtattcaatgttctactgcatgtcgtgagcatcatagtaacagtattggtcctgg

SEQ ID NO: 436312 - DNA, 54 bp, Artificial
  Synthetic oligonucleotide
gtattcagaagaagcaagattaaaaagagaggaaataagtggggtaaaattgga

SEQ ID NO: 436313 - DNA, 59 bp, Artificial
  Synthetic oligonucleotide
gtattcagattaaacggcctcacggccagtgaatctggaagactcatagacttcctaaa

SEQ ID NO: 436314 - DNA, 54 bp, Artificial
  Synthetic oligonucleotide
gtattcatacacttgcactcgtatacacattgtacatttcgtctacatgaatgt

SEQ ID NO: 436315 - DNA, 60 bp, Artificial
  Synthetic oligonucleotide
gtattcatagagaggcccaacacaatagacacttgctacccattcgacgtgccagattac

SEQ ID NO: 436316 - DNA, 60 bp, Artificial
  Synthetic oligonucleotide
gtattcatcgatcggcactggcgtggtgtggttggtgtacgacgcacagccttcggggaa

SEQ ID NO: 436317 - DNA, 60 bp, Artificial
  Synthetic oligonucleotide
gtattcatctgagcataaataccctttgagaacgaaagaccatctgtcaaccaagcaagt

SEQ ID NO: 436318 - DNA, 60 bp, Artificial
  Synthetic oligonucleotide
gtattcatctgagcataaataccctttgagagcagaagatctttcgtcaaccaagcaatt

SEQ ID NO: 436319 - DNA, 58 bp, Artificial
  Synthetic oligonucleotide
gtattcatttgtccttatatacttggtccccaagttgtttgtccagcaatatgtggga

SEQ ID NO: 436320 - DNA, 59 bp, Artificial
  Synthetic oligonucleotide
gtattccaattctgttattggtcccgcatcatatgccaattatgtggtacggggcgaaa

SEQ ID NO: 436321 - DNA, 50 bp, Artificial
  Synthetic oligonucleotide
gtattccaccggtatagtaagacatcgtatatgtgagaaatccatattga

SEQ ID NO: 436322 - DNA, 58 bp, Artificial
  Synthetic oligonucleotide
gtattccacgcggggaaccagtacggactaggagctactcaaacgcaagccagagagc

SEQ ID NO: 436323 - DNA, 60 bp, Artificial
  Synthetic oligonucleotide
gtattccagcaacttgactgtacaggctatgtatgtccctcctggtgctcctaaccctga

SEQ ID NO: 436324 - DNA, 60 bp, Artificial
  Synthetic oligonucleotide
gtattccatgatagaatacttgtaactccgaacgagcataaatatgcattaaaagttgta

SEQ ID NO: 436325 - DNA, 55 bp, Artificial
  Synthetic oligonucleotide
gtattccattagctcgtaaatttactcaatctatctattcagcccaaccaatggc

SEQ ID NO: 436326 - DNA, 55 bp, Artificial
  Synthetic oligonucleotide
gtattccccacgctaacgatttgaagcgggggggggggtatggcgtcatctgata

SEQ ID NO: 436327 - DNA, 56 bp, Artificial
  Synthetic oligonucleotide
gtattccccagatactctgggatacgatttaattagggatttgatttcagttatta

SEQ ID NO: 436328 - DNA, 58 bp, Artificial
  Synthetic oligonucleotide
gtattcctcccctcgacctacgaccacaacatggccataacgatgacgtgcgaagaca

SEQ ID NO: 436329 - DNA, 59 bp, Artificial
  Synthetic oligonucleotide
gtattcctctgacagaaccaaacatccaatggatacggtattgcccacgtataatgtac

SEQ ID NO: 436330 - DNA, 55 bp, Artificial
  Synthetic oligonucleotide
gtattcctgggcgtatatactgttttcgaacccagtgccaaggcctacgtggtct

SEQ ID NO: 436331 - DNA, 55 bp, Artificial
  Synthetic oligonucleotide
gtattcgatcataaagtcgagtgattacgtttcacagatgagatggctggaggac

SEQ ID NO: 436332 - DNA, 60 bp, Artificial
  Synthetic oligonucleotide
gtattcgattcagaagactttattatagagtatgggacaactgatgatgaagtgtatata

SEQ ID NO: 436333 - DNA, 58 bp, Artificial
  Synthetic oligonucleotide
gtattcgcaccgcccgtcagcggacgcattatccagcatagcactccttgcatcgagc

SEQ ID NO: 436334 - DNA, 59 bp, Artificial
  Synthetic oligonucleotide
gtattcggttctcttacagtgtagcgtgaagcggagcacgactagagaccataccatcc

SEQ ID NO: 436335 - DNA, 55 bp, Artificial
  Synthetic oligonucleotide
gtattcgtcgtttacttgtatatctattactggagcctcttgttgtatcatcata

SEQ ID NO: 436336 - DNA, 59 bp, Artificial
  Synthetic oligonucleotide
gtattcgtctaagttccgacgtggggcatcatattcacagcgacgattttatccacgta

SEQ ID NO: 436337 - DNA, 60 bp, Artificial
  Synthetic oligonucleotide
gtattcgtgtacatcgatggttccatgtaatacatcatacaatacatgtgatactgctct

SEQ ID NO: 436338 - DNA, 60 bp, Artificial
  Synthetic oligonucleotide
gtattcgtgttctgttgcagtctagcgtaaagcgaaggacgactacagacgataccatcc

SEQ ID NO: 436339 - DNA, 55 bp, Artificial
  Synthetic oligonucleotide
gtattctagagtaaagaataaatttgactttgtaatggatgattctggggttaaa

SEQ ID NO: 436340 - DNA, 57 bp, Artificial
  Synthetic oligonucleotide
gtattctagatccttattatcaactatgagatctgtcattgcaactagcttctcctc

SEQ ID NO: 436341 - DNA, 60 bp, Artificial
  Synthetic oligonucleotide
gtattctatcgagatgaagttggatatgagatggtcacaaagcacaacaagctaacgcct

SEQ ID NO: 436342 - DNA, 54 bp, Artificial
  Synthetic oligonucleotide
gtattctcaaaaaaactagttggagcgttccaaaaatacttaagtgatatggaa

SEQ ID NO: 436343 - DNA, 59 bp, Artificial
  Synthetic oligonucleotide
gtattctccacaagattaatcgtcaagagcaatctaaaggatggacgtttaacatcgaa

SEQ ID NO: 436344 - DNA, 56 bp, Artificial
  Synthetic oligonucleotide
gtattctccagacacattaggttacgatttaattcgtgatttaatattagttatcc

SEQ ID NO: 436345 - DNA, 58 bp, Artificial
  Synthetic oligonucleotide
gtattctccgagcttaagataccacttgcaatttgattccgaatcggacgatttccaa

SEQ ID NO: 436346 - DNA, 58 bp, Artificial
  Synthetic oligonucleotide
gtattctctgagcataataccacttactctaaacaactccgaatcggacgatttccaa

SEQ ID NO: 436347 - DNA, 59 bp, Artificial
  Synthetic oligonucleotide
gtattctctgagcataataccacttgaacaatttgattccgaagcggacgctttccagt

SEQ ID NO: 436348 - DNA, 57 bp, Artificial
  Synthetic oligonucleotide
gtattctgaagttgaaagggctaaatgtattgtggagttggattggtctaagtttga

SEQ ID NO: 436349 - DNA, 60 bp, Artificial
  Synthetic oligonucleotide
gtattctgatacaattgcctaatggcaacatgcgaagtgtgcaccagcgagttcactcca

SEQ ID NO: 436350 - DNA, 59 bp, Artificial
  Synthetic oligonucleotide
gtattctgccacgccccaccccacggaggctgtccttttaccttgtcgctatgtctgca

SEQ ID NO: 436351 - DNA, 54 bp, Artificial
  Synthetic oligonucleotide
gtattctgctcttaagtttacagagctagatagtgaaacaagtctgcaaggcac

SEQ ID NO: 436352 - DNA, 60 bp, Artificial
  Synthetic oligonucleotide
gtattctggcatcttctctgttgaaggcaaaagctgcatcaataggtgtttttatgtgga

SEQ ID NO: 436353 - DNA, 54 bp, Artificial
  Synthetic oligonucleotide
gtattctgtggtgtttgtttttggcctaggtcaaggattagataccacggtttc

SEQ ID NO: 436354 - DNA, 57 bp, Artificial
  Synthetic oligonucleotide
gtattctgtggtgtttgtttttggccttggtcaagtacacaacattacaggttcgca

SEQ ID NO: 436355 - DNA, 55 bp, Artificial
  Synthetic oligonucleotide
gtattctgtttacaggcgtgggtataagacgccgtataggagttcgtatggcgct

SEQ ID NO: 436356 - DNA, 55 bp, Artificial
  Synthetic oligonucleotide
gtattctttactccaccagagagatgcgacacactgctatgcgacataggagaat

SEQ ID NO: 436357 - DNA, 52 bp, Artificial
  Synthetic oligonucleotide
gtattctttgaatcagctagcgaagctattcgcttccgtgatgatatgatgc

SEQ ID NO: 436358 - DNA, 55 bp, Artificial
  Synthetic oligonucleotide
gtattgaaaacaccctacttgagagagttgggtttaacttgccgaaagagccatg

SEQ ID NO: 436359 - DNA, 57 bp, Artificial
  Synthetic oligonucleotide
gtattgaaaccaggtcaaacactgcgagtaaggtccaatgggaatctaatcgctcca

SEQ ID NO: 436360 - DNA, 59 bp, Artificial
  Synthetic oligonucleotide
gtattgaacattatgcgtaaagcttacatcctccaccaggtggagttttacatacagga

SEQ ID NO: 436361 - DNA, 50 bp, Artificial
  Synthetic oligonucleotide
gtattgaacctgtatgtctactcttgcatgggagccccggcgcaggtaag

SEQ ID NO: 436362 - DNA, 51 bp, Artificial
  Synthetic oligonucleotide
gtattgaagattctcttgctttacatgctacattgaatcgtaaattcaaag

SEQ ID NO: 436363 - DNA, 55 bp, Artificial
  Synthetic oligonucleotide
gtattgaagttatgccttatatgctaactttcgcaggtaagtggttagacagccc

SEQ ID NO: 436364 - DNA, 55 bp, Artificial
  Synthetic oligonucleotide
gtattgacaattatgcgatagaggtgtcctatgcatatagattgggtgagctatc

SEQ ID NO: 436365 - DNA, 55 bp, Artificial
  Synthetic oligonucleotide
gtattgaggataaatacaggtttttatcttctttggctaccccctgtcctgaaca

SEQ ID NO: 436366 - DNA, 52 bp, Artificial
  Synthetic oligonucleotide
gtattgaggatcaatacagattcattacatccagagctactcgttgtccaac

SEQ ID NO: 436367 - DNA, 60 bp, Artificial
  Synthetic oligonucleotide
gtattgatgagatatgataatacatctgaattagatgcatcggagttagcagatcttata

SEQ ID NO: 436368 - DNA, 55 bp, Artificial
  Synthetic oligonucleotide
gtattgatggaggaaaagctatttgcctttgattatacagggtatgatgcttctc

SEQ ID NO: 436369 - DNA, 55 bp, Artificial
  Synthetic oligonucleotide
gtattgccagcaaaagtaacaccttgtgctacaacttctgaaccattataaacag

SEQ ID NO: 436370 - DNA, 56 bp, Artificial
  Synthetic oligonucleotide
gtattgcctttatcttctcgccattggtccgtttaaaacacgccataggccgcgga

SEQ ID NO: 436371 - DNA, 59 bp, Artificial
  Synthetic oligonucleotide
gtattgcgaatcattattttgatcgcgacccggattaatcagttttctgagtatatacc

SEQ ID NO: 436372 - DNA, 57 bp, Artificial
  Synthetic oligonucleotide
gtattgcgattaacaggtataatggattaacgcttcgtggggttacaatgcgcccga

SEQ ID NO: 436373 - DNA, 58 bp, Artificial
  Synthetic oligonucleotide
gtattggaaattccctgatctactaacgcagaaaggagtgtttggacagaacgctcag

SEQ ID NO: 436374 - DNA, 55 bp, Artificial
  Synthetic oligonucleotide
gtattggatgtgggggatgcatatttttcagttcccttaggcgaaaactttagaa

SEQ ID NO: 436375 - DNA, 56 bp, Artificial
  Synthetic oligonucleotide
gtattggattgccagtccctttgggcccccatgaactccttaaagtgcttgaggaa

SEQ ID NO: 436376 - DNA, 58 bp, Artificial
  Synthetic oligonucleotide
gtattggcaggccacgtggattcctgagtgggagtttgttaacacccctcatctggta

SEQ ID NO: 436377 - DNA, 60 bp, Artificial
  Synthetic oligonucleotide
gtattggcatcatagagaatccaataatgctcctcggaaatagttttgcatccaattatt

SEQ ID NO: 436378 - DNA, 55 bp, Artificial
  Synthetic oligonucleotide
gtattggctaacagttcctcatgtaatctactacaattcaaggctagatgatcac

SEQ ID NO: 436379 - DNA, 59 bp, Artificial
  Synthetic oligonucleotide
gtattgggaccaggagtatcaccctaactgtcgtgattgtattgaggacaggtgtttga

SEQ ID NO: 436380 - DNA, 53 bp, Artificial
  Synthetic oligonucleotide
gtattgggactcaggaaggcaaactagtaaaagggtcctttgggaaagcacta

SEQ ID NO: 436381 - DNA, 59 bp, Artificial
  Synthetic oligonucleotide
gtattgggcaaggtgtggatggatgagagtatcaaaactaagaatcacacgaatagtgt

SEQ ID NO: 436382 - DNA, 57 bp, Artificial
  Synthetic oligonucleotide
gtattgggctgacgcacagggttggcaagaggttctgtgtgaagtccgtttatgttt

SEQ ID NO: 436383 - DNA, 55 bp, Artificial
  Synthetic oligonucleotide
gtattggtcttcctatgcataccgcaacagacaatgcggtggacaattgtattcg

SEQ ID NO: 436384 - DNA, 53 bp, Artificial
  Synthetic oligonucleotide
gtattggtgaaggtggtttaatcttcgttgcatacggtatccagtgttcagcg

SEQ ID NO: 436385 - DNA, 55 bp, Artificial
  Synthetic oligonucleotide
gtattggtgctgaatcctggtaaacaggcttgacaggtttgggtggttccaaacc

SEQ ID NO: 436386 - DNA, 55 bp, Artificial
  Synthetic oligonucleotide
gtattggtgtttagcaccagaccatggatatacgtccgattgggacacaatatcc

SEQ ID NO: 436387 - DNA, 52 bp, Artificial
  Synthetic oligonucleotide
gtattgtaccccagttgtatacgttaactccattaacagtagggttacctgt

SEQ ID NO: 436388 - DNA, 58 bp, Artificial
  Synthetic oligonucleotide
gtattgtagtcctctgaagcaagtggaggtagaattgagtccgcagctgcagtctgtc

SEQ ID NO: 436389 - DNA, 55 bp, Artificial
  Synthetic oligonucleotide
gtattgtccgtggagaaggatacgatgatggttgacgtggaagggtccacaacgc

SEQ ID NO: 436390 - DNA, 58 bp, Artificial
  Synthetic oligonucleotide
gtattgtctaagcccaaattgcgacttagattgctacccttattatccagccaaccta

SEQ ID NO: 436391 - DNA, 51 bp, Artificial
  Synthetic oligonucleotide
gtattgtctgacaacaggctgcgtggtcattgtgggcaggattatcctgtc

SEQ ID NO: 436392 - DNA, 56 bp, Artificial
  Synthetic oligonucleotide
gtattgtgaaacgttatttcgttcacgacccggattaatcagttattctgagtata

SEQ ID NO: 436393 - DNA, 55 bp, Artificial
  Synthetic oligonucleotide
gtattgtgaaagtggaacgggttcatgcagaggtgaacatggattgctcagtgcc

SEQ ID NO: 436394 - DNA, 55 bp, Artificial
  Synthetic oligonucleotide
gtattgtgacagaaccgattatgttcgcgaacgtgtaaggggtctctttaccgag

SEQ ID NO: 436395 - DNA, 60 bp, Artificial
  Synthetic oligonucleotide
gtattgtgaccaggggtactgtcatgctagttgtcgaaggcataggtcggctttgaggtg

SEQ ID NO: 436396 - DNA, 58 bp, Artificial
  Synthetic oligonucleotide
gtattgtgcagtattattttacgcacgacccggattaatcagttttctgagtatatac

SEQ ID NO: 436397 - DNA, 53 bp, Artificial
  Synthetic oligonucleotide
gtattgtgcccgcacgggacgtctgtggcccggtatattgtttcactcccagt

SEQ ID NO: 436398 - DNA, 60 bp, Artificial
  Synthetic oligonucleotide
gtattgtgtgctgttactcgaacagtttctaccgatgctgagggatctttgagaatatac

SEQ ID NO: 436399 - DNA, 55 bp, Artificial
  Synthetic oligonucleotide
gtattgttaccgatcgattcagcaaaccgtctgtttggtcttgcgtcccctccat

SEQ ID NO: 436400 - DNA, 60 bp, Artificial
  Synthetic oligonucleotide
gtattgttcgaaacgctagtctggacccaaattgcccagatctcgtcttgagcagtaata

SEQ ID NO: 436401 - DNA, 57 bp, Artificial
  Synthetic oligonucleotide
gtattgttctgtgggtcgttagtgagtggaacgggaccactatggactggaatgaac

SEQ ID NO: 436402 - DNA, 60 bp, Artificial
  Synthetic oligonucleotide
gtattgttgccacagtatgatgttataatacaacatccagcagatatgagctggtgttcc

SEQ ID NO: 436403 - DNA, 55 bp, Artificial
  Synthetic oligonucleotide
gtattgttgtatgactatggtgcaccgatatgagcttacataattacatgacagc

SEQ ID NO: 436404 - DNA, 58 bp, Artificial
  Synthetic oligonucleotide
gtattgttgttttctgtaccactagattccctgatgttgaaagagtggtcacaccacg

SEQ ID NO: 436405 - DNA, 57 bp, Artificial
  Synthetic oligonucleotide
gtatttaaaattacagaggaaccatgatatccgacgcagttgtaagaggctttaagc

SEQ ID NO: 436406 - DNA, 51 bp, Artificial
  Synthetic oligonucleotide
gtatttaataaaccctttgcgtacgcaaagggttttaatttgccttgcgga

SEQ ID NO: 436407 - DNA, 60 bp, Artificial
  Synthetic oligonucleotide
gtatttaatcagaagttgcgtgaatttttgagagttaacacgcagatcagtggcgtagcg

SEQ ID NO: 436408 - DNA, 60 bp, Artificial
  Synthetic oligonucleotide
gtatttacacaatggatgtcaatgatgagttcgatgggaatggctcctgtacccttctta

SEQ ID NO: 436409 - DNA, 58 bp, Artificial
  Synthetic oligonucleotide
gtatttacatcgtataaaacagtgtcctagggtatctatacctatatgattaaatgta

SEQ ID NO: 436410 - DNA, 60 bp, Artificial
  Synthetic oligonucleotide
gtatttaccgatcacacatccgaacaaatgcattgtagcgatcgaggtatctgatgaaag

SEQ ID NO: 436411 - DNA, 60 bp, Artificial
  Synthetic oligonucleotide
gtatttacgttcaatggagttatctgatgatgtgaaagtagatattgagcaacagcttaa

SEQ ID NO: 436412 - DNA, 55 bp, Artificial
  Synthetic oligonucleotide
gtatttactttccaaacgctgcaataggttcaccaggtccaggtaaagacgatgg

SEQ ID NO: 436413 - DNA, 55 bp, Artificial
  Synthetic oligonucleotide
gtatttagactaacctgttatcctccggcctcacaactcctccggcaggtggtcg

SEQ ID NO: 436414 - DNA, 56 bp, Artificial
  Synthetic oligonucleotide
gtatttagcgctaggtgtacttcggacatccgcaacagggagggtattcttttcta

SEQ ID NO: 436415 - DNA, 56 bp, Artificial
  Synthetic oligonucleotide
gtatttattgcaaagacttcggctgtgccgggttacaattgttactaatacattcg

SEQ ID NO: 436416 - DNA, 58 bp, Artificial
  Synthetic oligonucleotide
gtatttattgtcccgactctgtgtccagtacctttagatccaacgtatcctctgttga

SEQ ID NO: 436417 - DNA, 55 bp, Artificial
  Synthetic oligonucleotide
gtatttcaagaagtaggccatgtttgaagtatccccttagcctacttcagcgcac

SEQ ID NO: 436418 - DNA, 60 bp, Artificial
  Synthetic oligonucleotide
gtatttcaccgttgatcccatggtgaatgttcatttctccacgggccggtggatgcatcc

SEQ ID NO: 436419 - DNA, 52 bp, Artificial
  Synthetic oligonucleotide
gtatttcactcaagacccagtttgctcaagtgatagcctcacgttatcatca

SEQ ID NO: 436420 - DNA, 51 bp, Artificial
  Synthetic oligonucleotide
gtatttcatttgaatacatgctaccattactaacgacgagtgtaccggaag

SEQ ID NO: 436421 - DNA, 54 bp, Artificial
  Synthetic oligonucleotide
gtatttccacgacaaagtttcctacccaacctttgaagcaactggagaaatcag

SEQ ID NO: 436422 - DNA, 56 bp, Artificial
  Synthetic oligonucleotide
gtatttcctatcacttaacgtcgttagacaacacaagtgttaacgaaatacagatc

SEQ ID NO: 436423 - DNA, 58 bp, Artificial
  Synthetic oligonucleotide
gtatttccttctggagttgacgaaatggcgataggatatgtttgtggtaatcctgccg

SEQ ID NO: 436424 - DNA, 55 bp, Artificial
  Synthetic oligonucleotide
gtatttcgcgccggtatttaatttagtttcaccttgctttctgattcataagaag

SEQ ID NO: 436425 - DNA, 58 bp, Artificial
  Synthetic oligonucleotide
gtatttctaacaaatattcattcgaaacgaagataataagagttgacggagatgacaa

SEQ ID NO: 436426 - DNA, 60 bp, Artificial
  Synthetic oligonucleotide
gtatttctataacaagctctctcgcaccatgcgtgcggaggcttgtccttcttgtgctag

SEQ ID NO: 436427 - DNA, 55 bp, Artificial
  Synthetic oligonucleotide
gtatttcttcgccaagactgcaggtacttaatgggtatggctctcaaagctctga

SEQ ID NO: 436428 - DNA, 59 bp, Artificial
  Synthetic oligonucleotide
gtatttgaattactgcgaaggggagtatgtgaactctatgatctctacccccaatatat

SEQ ID NO: 436429 - DNA, 59 bp, Artificial
  Synthetic oligonucleotide
gtatttgaattatcccatttgtcgccaaatgtccaagattttgaataatcatgattaaa

SEQ ID NO: 436430 - DNA, 59 bp, Artificial
  Synthetic oligonucleotide
gtatttgacatacccagagttagttcagagtatgtgaattatggtgtaatagaacaggt

SEQ ID NO: 436431 - DNA, 57 bp, Artificial
  Synthetic oligonucleotide
gtatttgagtcctacgaggagctttggtcgcatgtgtacaatgcatttaaggcgcat

SEQ ID NO: 436432 - DNA, 55 bp, Artificial
  Synthetic oligonucleotide
gtatttgagttcacaagaggttttgcagctcagtccgcgcctgcagtctatcact

SEQ ID NO: 436433 - DNA, 52 bp, Artificial
  Synthetic oligonucleotide
gtatttgatcgtcattgttggcctgtgttatccttggactgaagggatctcc

SEQ ID NO: 436434 - DNA, 51 bp, Artificial
  Synthetic oligonucleotide
gtatttgcaactggtagaaaatacatactccccagatacattagggtacga

SEQ ID NO: 436435 - DNA, 56 bp, Artificial
  Synthetic oligonucleotide
gtatttgcagatgcagtagctactactaagacatcaattttagttggagagttagc

SEQ ID NO: 436436 - DNA, 60 bp, Artificial
  Synthetic oligonucleotide
gtatttgcatgtgcaccagatcgttgcccaccaacagcattgtatgttgccggggtccct

SEQ ID NO: 436437 - DNA, 55 bp, Artificial
  Synthetic oligonucleotide
gtatttgctggggaaaccacttgtttgttactgtggtagataccacacgcagtac

SEQ ID NO: 436438 - DNA, 55 bp, Artificial
  Synthetic oligonucleotide
gtatttggaaatgcccaattggaggggtttagtgccgaatctaggagacttctac

SEQ ID NO: 436439 - DNA, 59 bp, Artificial
  Synthetic oligonucleotide
gtatttggaacatgcgaagactggtgaaactagtgttccgaaatgttggcttgtcacca

SEQ ID NO: 436440 - DNA, 56 bp, Artificial
  Synthetic oligonucleotide
gtatttggaattacaaccaggataccatgtataccgtctctcggcccactggtttc

SEQ ID NO: 436441 - DNA, 55 bp, Artificial
  Synthetic oligonucleotide
gtatttgggaaagtgcttcttctttactaagggaacactgtggatacgtgaggaa

SEQ ID NO: 436442 - DNA, 57 bp, Artificial
  Synthetic oligonucleotide
gtatttggggggtaccctattctatacaatctgataatggcaccgcgttcactagta

SEQ ID NO: 436443 - DNA, 58 bp, Artificial
  Synthetic oligonucleotide
gtatttggtgatcaaagaccgatcgatgtgtatagtttttgtaccgatatctttaaga

SEQ ID NO: 436444 - DNA, 59 bp, Artificial
  Synthetic oligonucleotide
gtatttggtggtgcgggttctggtgataagaatgctattacgaagactgggtctgttga

SEQ ID NO: 436445 - DNA, 53 bp, Artificial
  Synthetic oligonucleotide
gtatttgtagaaatgaattggggttacgcttaaactctattgtatcggggtta

SEQ ID NO: 436446 - DNA, 59 bp, Artificial
  Synthetic oligonucleotide
gtatttgtcaccgtggataagtctgtcgtatccacgcaagtaatgaaaagtattgcctg

SEQ ID NO: 436447 - DNA, 56 bp, Artificial
  Synthetic oligonucleotide
gtatttgtcccttgttaagaatcctacgccagtcaaacctagcgtagaccgcacta

SEQ ID NO: 436448 - DNA, 56 bp, Artificial
  Synthetic oligonucleotide
gtatttgtgttcaaaggtcctaactgacacaagtcgccccaatgaccccactaatg

SEQ ID NO: 436449 - DNA, 56 bp, Artificial
  Synthetic oligonucleotide
gtattttgacagacaagggaaaaccccaataacacttgttgacatctgcttttgga

SEQ ID NO: 436450 - DNA, 60 bp, Artificial
  Synthetic oligonucleotide
gtatttttatgcttgggcgcgtgctgttgagatgggagctgacgaaggcacaacgcagtg

SEQ ID NO: 436451 - DNA, 60 bp, Artificial
  Synthetic oligonucleotide
gtatttttgtgtgccagagtatggtacacagcacggtcgtctacatttccacgcagtgca

SEQ ID NO: 436452 - DNA, 50 bp, Artificial
  Synthetic oligonucleotide
gtatttttgtgttgtcttcgttctacataaaacattagtactccgttaac

SEQ ID NO: 436453 - DNA, 58 bp, Artificial
  Synthetic oligonucleotide
gtcaaaaaccttaacgcccggctcacagctttagagacgtatctcagagaccaggcca

SEQ ID NO: 436454 - DNA, 58 bp, Artificial
  Synthetic oligonucleotide
gtcaaaaacggttccatgagaatcgttgggcctagaacctgcagcaacacgtggcacg

SEQ ID NO: 436455 - DNA, 60 bp, Artificial
  Synthetic oligonucleotide
gtcaaaaattcagatcgaggatctaacagaactcgccgtgaagactggcggacagttcat

SEQ ID NO: 436456 - DNA, 58 bp, Artificial
  Synthetic oligonucleotide
gtcaaaaccggtctctattaatggaaaatacagaatggtcagaaggcccgatagcata

SEQ ID NO: 436457 - DNA, 60 bp, Artificial
  Synthetic oligonucleotide
gtcaaaacctgcggcgctcctccatgcactgttaccaccagcaatgggtcttggcattgt

SEQ ID NO: 436458 - DNA, 54 bp, Artificial
  Synthetic oligonucleotide
gtcaaaacttagtagagagggatggcctgctgtaagggaaagaatgaggcgagc

SEQ ID NO: 436459 - DNA, 55 bp, Artificial
  Synthetic oligonucleotide
gtcaaaagaagagcacaattctgaacactgcagttcccataggatcttgtgttag

SEQ ID NO: 436460 - DNA, 60 bp, Artificial
  Synthetic oligonucleotide
gtcaaaagatcagactggacttcaactgtgcagctgttccttaggcaatccatgaatacc

SEQ ID NO: 436461 - DNA, 60 bp, Artificial
  Synthetic oligonucleotide
gtcaaaagcattaggcatctcctatggcaggaagaagcggagacagcgacgaagaactcc

SEQ ID NO: 436462 - DNA, 60 bp, Artificial
  Synthetic oligonucleotide
gtcaaaagcgatcaggtcggcactcatgacagtgttcgaggcaaagatcccagggctaaa

SEQ ID NO: 436463 - DNA, 51 bp, Artificial
  Synthetic oligonucleotide
gtcaaaagctggcacggccgacgcggaactgcattgtgcttgcagtcgagg

SEQ ID NO: 436464 - DNA, 56 bp, Artificial
  Synthetic oligonucleotide
gtcaaaagtttcgcgattaaagaattcgcggattataatcaacgccttagtgacaa

SEQ ID NO: 436465 - DNA, 60 bp, Artificial
  Synthetic oligonucleotide
gtcaaaataaattgctaagcatgattggtggtgtagagaggaagatggctccgatagggg

SEQ ID NO: 436466 - DNA, 51 bp, Artificial
  Synthetic oligonucleotide
gtcaaaataagtgagggactaaaagtgtaaataggtgggttcttaggtcct

SEQ ID NO: 436467 - DNA, 55 bp, Artificial
  Synthetic oligonucleotide
gtcaaaatgctgtggctagatccatgttagggctaaccacgcagactgttgattc

SEQ ID NO: 436468 - DNA, 55 bp, Artificial
  Synthetic oligonucleotide
gtcaaaattatcctatagtgcagaacatacaggggcaaatggtacaccaacccct

SEQ ID NO: 436469 - DNA, 58 bp, Artificial
  Synthetic oligonucleotide
gtcaaacaaacaagatggcggacatgtttaacgcaggtaagtacgacaggcgacaggc

SEQ ID NO: 436470 - DNA, 55 bp, Artificial
  Synthetic oligonucleotide
gtcaaacaaccaatatcacatggagaacgaatccaacgattgggaagggtcgggc

SEQ ID NO: 436471 - DNA, 55 bp, Artificial
  Synthetic oligonucleotide
gtcaaacacccaaaggtgctataaacaccagccttccatttcagaatatacaccc

SEQ ID NO: 436472 - DNA, 60 bp, Artificial
  Synthetic oligonucleotide
gtcaaacaggcccatgtatcggaagcccatgatgtaccggatgtacagaagccctgatgt

SEQ ID NO: 436473 - DNA, 58 bp, Artificial
  Synthetic oligonucleotide
gtcaaacaggcttgtccaaaggtaacctttgagcccattcccatacattactgtgctc

SEQ ID NO: 436474 - DNA, 60 bp, Artificial
  Synthetic oligonucleotide
gtcaaacagtatggaggacttatttacgatctcatgattttggtgcatgtgttgtttatc

SEQ ID NO: 436475 - DNA, 60 bp, Artificial
  Synthetic oligonucleotide
gtcaaacagtttttagaatgcatcgcggatcgagttgttgttgattcccagttacaagca

SEQ ID NO: 436476 - DNA, 60 bp, Artificial
  Synthetic oligonucleotide
gtcaaacataagatgatggatgcacagttcctgaaaaaagccttgcggcagagatatggg

SEQ ID NO: 436477 - DNA, 59 bp, Artificial
  Synthetic oligonucleotide
gtcaaacataccccaggttctctataccattttctagtattgcctcagcttattacatg

SEQ ID NO: 436478 - DNA, 60 bp, Artificial
  Synthetic oligonucleotide
gtcaaacatagtgatacacctattcccttaggtgggagcggtgctatgtcaataatggag

SEQ ID NO: 436479 - DNA, 55 bp, Artificial
  Synthetic oligonucleotide
gtcaaaccaacacggcgcgacgggtatacaacagggatacccgcacggttgatag

SEQ ID NO: 436480 - DNA, 55 bp, Artificial
  Synthetic oligonucleotide
gtcaaaccagattcagataagaaacttctttgcacggttagaaggcagatcccga

SEQ ID NO: 436481 - DNA, 55 bp, Artificial
  Synthetic oligonucleotide
gtcaaaccgtcgtcgtccgacactctcaatgttgacaggcctgttcccgcgacta

SEQ ID NO: 436482 - DNA, 60 bp, Artificial
  Synthetic oligonucleotide
gtcaaacctaccccagattcacaatacctttcatgagcattgcctcagcatattacatgt

SEQ ID NO: 436483 - DNA, 55 bp, Artificial
  Synthetic oligonucleotide
gtcaaacctcaggtgcctttaagaccaatgacctataaggcagcagtcgatctcg

SEQ ID NO: 436484 - DNA, 60 bp, Artificial
  Synthetic oligonucleotide
gtcaaacgataagtcgattgactggcgtttctgttcagcacgcggagctgccagcgatat

SEQ ID NO: 436485 - DNA, 56 bp, Artificial
  Synthetic oligonucleotide
gtcaaacgcgttgctcctcccttggtcactaaacttgtaaacaaggctagtgagga

SEQ ID NO: 436486 - DNA, 52 bp, Artificial
  Synthetic oligonucleotide
gtcaaacgtccgggcaaaaaaggcccgcgcgcccccgatccgaacagcgaaa

SEQ ID NO: 436487 - DNA, 55 bp, Artificial
  Synthetic oligonucleotide
gtcaaacgtgttttgtcccaacgagtttagcgtgacaacatttacacaatctact

SEQ ID NO: 436488 - DNA, 59 bp, Artificial
  Synthetic oligonucleotide
gtcaaactccgcctctccaggaaatgagtcaatgccagaaaccctgcagcaataaaagt

SEQ ID NO: 436489 - DNA, 59 bp, Artificial
  Synthetic oligonucleotide
gtcaaactggggggactaggttatatatggtccgaaatatcatatatagcagcaaacta

SEQ ID NO: 436490 - DNA, 55 bp, Artificial
  Synthetic oligonucleotide
gtcaaagattcccttaatgttagatggagattgccttatggcttttgactacagc

SEQ ID NO: 436491 - DNA, 60 bp, Artificial
  Synthetic oligonucleotide
gtcaaagcacgcaatgggatcaagctgcagtactgtattcaaattatatcgttaacagat

SEQ ID NO: 436492 - DNA, 51 bp, Artificial
  Synthetic oligonucleotide
gtcaaagccccaagccacttgtgagcacagccccaccacacgcactggaat

SEQ ID NO: 436493 - DNA, 60 bp, Artificial
  Synthetic oligonucleotide
gtcaaagcctggtgccctagagctcctagagcagtcccttacacacacagctacgtaact

SEQ ID NO: 436494 - DNA, 51 bp, Artificial
  Synthetic oligonucleotide
gtcaaagctctggtttattggacatctcaaaaaccagccgtagacgtgttc

SEQ ID NO: 436495 - DNA, 58 bp, Artificial
  Synthetic oligonucleotide
gtcaaaggagttgcgaaggttaccgaacgtgacatctacgctaaggtcagacagctca

SEQ ID NO: 436496 - DNA, 52 bp, Artificial
  Synthetic oligonucleotide
gtcaaaggatttctacaagtgtgcatgctttaggccattggtttgatggaag

SEQ ID NO: 436497 - DNA, 57 bp, Artificial
  Synthetic oligonucleotide
gtcaaaggccgagttatcatcggttaagttggacaatagggactctgacaccttaca

SEQ ID NO: 436498 - DNA, 59 bp, Artificial
  Synthetic oligonucleotide
gtcaaagggtactttgaagtatatgcaatatctgtaccatacggccactgagaatttct

SEQ ID NO: 436499 - DNA, 59 bp, Artificial
  Synthetic oligonucleotide
gtcaaaggtcattgtctgcgtcagctactcgaaatggcggtatattccttccgggtcaa

SEQ ID NO: 436500 - DNA, 58 bp, Artificial
  Synthetic oligonucleotide
gtcaaaggtgaccagatttgcattggttaccatgcaaacaactcgacagagcaggttg

SEQ ID NO: 436501 - DNA, 55 bp, Artificial
  Synthetic oligonucleotide
gtcaaagttcaatttggatctcaagatttggaggtcgttagtttacgcgacaaag

SEQ ID NO: 436502 - DNA, 54 bp, Artificial
  Synthetic oligonucleotide
gtcaaataatagaactgttaataaacaaggaaaaggtctacctggcatgggtac

SEQ ID NO: 436503 - DNA, 55 bp, Artificial
  Synthetic oligonucleotide
gtcaaataatagagcagctaataaacaaagaaagggtctacctctcatgggtacc

SEQ ID NO: 436504 - DNA, 55 bp, Artificial
  Synthetic oligonucleotide
gtcaaatagactgtagcgacagcagtaacatggatgttgaaaacatagttccaac

SEQ ID NO: 436505 - DNA, 60 bp, Artificial
  Synthetic oligonucleotide
gtcaaatcaatgcaccatcgtgattactggcgagtcagtttccatagtagggtgcacata

SEQ ID NO: 436506 - DNA, 58 bp, Artificial
  Synthetic oligonucleotide
gtcaaatcacagggttcgctccattctctaaggacaactcaattaggctttccgcagg

SEQ ID NO: 436507 - DNA, 55 bp, Artificial
  Synthetic oligonucleotide
gtcaaatcattcagctacctgagaggggcccctataactctctacggctaacctg

SEQ ID NO: 436508 - DNA, 57 bp, Artificial
  Synthetic oligonucleotide
gtcaaatccatccagcacttgtgaagattcaaggattggcggaggttgtggttgaat

SEQ ID NO: 436509 - DNA, 60 bp, Artificial
  Synthetic oligonucleotide
gtcaaatcggctcaatcatgtagtctagacatgtatctgagacaccacacctgcatcaat

SEQ ID NO: 436510 - DNA, 59 bp, Artificial
  Synthetic oligonucleotide
gtcaaatctgacaaattaatggccgacaggtgcgccacttggttgaacatggaggtcaa

SEQ ID NO: 436511 - DNA, 55 bp, Artificial
  Synthetic oligonucleotide
gtcaaatctggtgttgtcatacatggttgtggcggctccggaaaatcacaagcat

SEQ ID NO: 436512 - DNA, 58 bp, Artificial
  Synthetic oligonucleotide
gtcaaatgagagaaccaaggggaagtgacatagcaggaactactagtacccttcagga

SEQ ID NO: 436513 - DNA, 55 bp, Artificial
  Synthetic oligonucleotide
gtcaaatggaacccacgcatatgaagcaacgagattacaaccagtccggaccttc

SEQ ID NO: 436514 - DNA, 56 bp, Artificial
  Synthetic oligonucleotide
gtcaaatggtttctagtgttaccttcattccgccaatggccgacttaccagacaag

SEQ ID NO: 436515 - DNA, 56 bp, Artificial
  Synthetic oligonucleotide
gtcaaattaaatgtggagactgatacagcagaaataagattgatgtgcacagagac

SEQ ID NO: 436516 - DNA, 57 bp, Artificial
  Synthetic oligonucleotide
gtcaaattccacacggaaaccaggaccgtgtggcaactctccgtagctggcgtgtcg

SEQ ID NO: 436517 - DNA, 59 bp, Artificial
  Synthetic oligonucleotide
gtcaaatttccacgtggtgtataggatggggaattactcttcaatagtgcagaactaca

SEQ ID NO: 436518 - DNA, 60 bp, Artificial
  Synthetic oligonucleotide
gtcaaatttcgggatggatgcgtttcgcactcgtgtaaagcgccgtagatcacgtgctcc

SEQ ID NO: 436519 - DNA, 55 bp, Artificial
  Synthetic oligonucleotide
gtcaaatttgccgtactcaggggacaacatacatcaatttccacatggaggacgt

SEQ ID NO: 436520 - DNA, 58 bp, Artificial
  Synthetic oligonucleotide
gtcaacaactttacttgattggagtgtgggatatgtactaatgtatattgatagtccc

SEQ ID NO: 436521 - DNA, 54 bp, Artificial
  Synthetic oligonucleotide
gtcaacaagcaagccatccactgataatcagggtaccagtacccccactattcc

SEQ ID NO: 436522 - DNA, 59 bp, Artificial
  Synthetic oligonucleotide
gtcaacaagcaccaccttagaacaaaggggctaaagaaatgcgtctcagctctgaaaca

SEQ ID NO: 436523 - DNA, 60 bp, Artificial
  Synthetic oligonucleotide
gtcaacaatagcccttctcatcggagtgggaaacctggttttcaacacagtcatacatga

SEQ ID NO: 436524 - DNA, 60 bp, Artificial
  Synthetic oligonucleotide
gtcaacaatcatgtggtctacaaccaccaagaagctgcgaagtacgagaaccacacagag

SEQ ID NO: 436525 - DNA, 55 bp, Artificial
  Synthetic oligonucleotide
gtcaacacactaactgagaaaggagtggaagtggtcaatgccacggagacagtgg

SEQ ID NO: 436526 - DNA, 55 bp, Artificial
  Synthetic oligonucleotide
gtcaacacagagcgaccgcacccggtttatctgattataaagtgcacctggtgca

SEQ ID NO: 436527 - DNA, 55 bp, Artificial
  Synthetic oligonucleotide
gtcaacacagtttggaccactcacttgcatgcgcctcactggagaaccaggaact

SEQ ID NO: 436528 - DNA, 55 bp, Artificial
  Synthetic oligonucleotide
gtcaacaccattatgatgtacctaaccagccctttctttatttatgaggacttcg

SEQ ID NO: 436529 - DNA, 60 bp, Artificial
  Synthetic oligonucleotide
gtcaacacttatcagtggatcatcaggaactgggagactgtgaaaattcaatggtcacaa

SEQ ID NO: 436530 - DNA, 57 bp, Artificial
  Synthetic oligonucleotide
gtcaacagaatctatcggatcctcgccacaggtctacattcagttatccgcagtgtc

SEQ ID NO: 436531 - DNA, 51 bp, Artificial
  Synthetic oligonucleotide
gtcaacagagagcatctgcaggacagataagtgtgcaacccactttctcag

SEQ ID NO: 436532 - DNA, 60 bp, Artificial
  Synthetic oligonucleotide
gtcaacaggatcagtttacttcaatggatacgcagatattgcatcattctctgtagaacc

SEQ ID NO: 436533 - DNA, 57 bp, Artificial
  Synthetic oligonucleotide
gtcaacagtcctaatataggaaccatgtattgccttttaaatgataagcccattgag

SEQ ID NO: 436534 - DNA, 55 bp, Artificial
  Synthetic oligonucleotide
gtcaacatagcagaataggtattactcaacagaggagaacaagaaatggagcccg

SEQ ID NO: 436535 - DNA, 52 bp, Artificial
  Synthetic oligonucleotide
gtcaacatctcccgccattagtgtgtcaatcccagatcaaccatctacgatt

SEQ ID NO: 436536 - DNA, 60 bp, Artificial
  Synthetic oligonucleotide
gtcaacattcagagcctttagtggtgcctgctttggaagacttccgttcagcagaaatct

SEQ ID NO: 436537 - DNA, 59 bp, Artificial
  Synthetic oligonucleotide
gtcaaccagatatgaaggaccaaggataactgtcaaaggtgtctgcaagataggaaact

SEQ ID NO: 436538 - DNA, 55 bp, Artificial
  Synthetic oligonucleotide
gtcaaccagggacctgcccaccaattcgaggtttaagaccggtagagaaatgtgc

SEQ ID NO: 436539 - DNA, 57 bp, Artificial
  Synthetic oligonucleotide
gtcaacccagaaaaacggactatagaactactcctggtgagcagtctcttcgggtca

SEQ ID NO: 436540 - DNA, 58 bp, Artificial
  Synthetic oligonucleotide
gtcaacccatccagcgcccaagacactccaagcaagcacgagcagtcagtagagtgcg

SEQ ID NO: 436541 - DNA, 55 bp, Artificial
  Synthetic oligonucleotide
gtcaaccctataactctcacagcagctcttctgctattggtagcacattatgcca

SEQ ID NO: 436542 - DNA, 60 bp, Artificial
  Synthetic oligonucleotide
gtcaaccggctgactcaattgccgttacgtcctgattatggtagcatatgggttggtgac

SEQ ID NO: 436543 - DNA, 55 bp, Artificial
  Synthetic oligonucleotide
gtcaacctaacgttgctaccgataatctaactacagaattgggcgatgttctgct

SEQ ID NO: 436544 - DNA, 55 bp, Artificial
  Synthetic oligonucleotide
gtcaacctacggaaatccctgagttcctcggatgtccaggccgtcccctcttcta

SEQ ID NO: 436545 - DNA, 56 bp, Artificial
  Synthetic oligonucleotide
gtcaacctacgggaatccctgtgttcctctgatgtccaggccgtcccctcctctag

SEQ ID NO: 436546 - DNA, 59 bp, Artificial
  Synthetic oligonucleotide
gtcaacctatatcgtgaggcggacgttatgcatggtttagtcattaagtatgtttccca

SEQ ID NO: 436547 - DNA, 58 bp, Artificial
  Synthetic oligonucleotide
gtcaaccttccaatccacctggtacgggagcgaagttggcgcatgtgttggtacaggc

SEQ ID NO: 436548 - DNA, 55 bp, Artificial
  Synthetic oligonucleotide
gtcaaccttcttcaagaagcatcataggtacccacccatcacgggaaccccagga

SEQ ID NO: 436549 - DNA, 57 bp, Artificial
  Synthetic oligonucleotide
gtcaaccttggggagatgaattttagtttagatcactcaaaatggggaccatatatg

SEQ ID NO: 436550 - DNA, 60 bp, Artificial
  Synthetic oligonucleotide
gtcaacgaaggttcgatctttggagcctggaaagcttgccagacccttgctctcatgcac

SEQ ID NO: 436551 - DNA, 55 bp, Artificial
  Synthetic oligonucleotide
gtcaacgcgggtctcagctcggcgtacatgcgccagatcggcgggtttacgttca

SEQ ID NO: 436552 - DNA, 51 bp, Artificial
  Synthetic oligonucleotide
gtcaacggacaaggggggagaatggaattcttttggactctattgaagaca

SEQ ID NO: 436553 - DNA, 60 bp, Artificial
  Synthetic oligonucleotide
gtcaacggcagatagctcttcgaattcggtactcattttcgctcacttatagtcaaccca

SEQ ID NO: 436554 - DNA, 55 bp, Artificial
  Synthetic oligonucleotide
gtcaacgtcacgtggggaggacggcgtgtaacccggaagtcatcctcatcacgtg

SEQ ID NO: 436555 - DNA, 55 bp, Artificial
  Synthetic oligonucleotide
gtcaacgtggcgcattatagaccatggtcttaaataagttaagcttgaacatgta

SEQ ID NO: 436556 - DNA, 55 bp, Artificial
  Synthetic oligonucleotide
gtcaacgtttgaaaaatcgagaaaggttcgaaacgagactacggcatgaggctgg

SEQ ID NO: 436557 - DNA, 55 bp, Artificial
  Synthetic oligonucleotide
gtcaactagcaccgattgaccactccagatacttctccctagtgaattggggttc

SEQ ID NO: 436558 - DNA, 55 bp, Artificial
  Synthetic oligonucleotide
gtcaactatgttgaactcggccgtctatgagacttttctcggacctgaccctgac

SEQ ID NO: 436559 - DNA, 55 bp, Artificial
  Synthetic oligonucleotide
gtcaactcacctcagcatctgataaagatttgcctggatcttttgacttaagaaa

SEQ ID NO: 436560 - DNA, 55 bp, Artificial
  Synthetic oligonucleotide
gtcaactcgtagcaagtacgttcgttcacccgctcctatcccacgggcgcgtcct

SEQ ID NO: 436561 - DNA, 60 bp, Artificial
  Synthetic oligonucleotide
gtcaactctattacaaccaaactccgccgaagtgcatgcgataaatgggaagcggctaga

SEQ ID NO: 436562 - DNA, 58 bp, Artificial
  Synthetic oligonucleotide
gtcaactgaaagaattttctaatctcaatggatcagtcgacgaagagaacttaatctc

SEQ ID NO: 436563 - DNA, 51 bp, Artificial
  Synthetic oligonucleotide
gtcaactgaagcaactagtggagtgaatagccaggaggtgccagctctaac

SEQ ID NO: 436564 - DNA, 59 bp, Artificial
  Synthetic oligonucleotide
gtcaactgatgactatataaagcctactaatttatactttcacgcgtatacagaacgcc

SEQ ID NO: 436565 - DNA, 55 bp, Artificial
  Synthetic oligonucleotide
gtcaactgctacccaaactttcctggcgacgtgcatcaacggggtatgctggact

SEQ ID NO: 436566 - DNA, 56 bp, Artificial
  Synthetic oligonucleotide
gtcaactgtcctttaacagtaataagaaacgtatcactgactgcaaagagagggtt

SEQ ID NO: 436567 - DNA, 55 bp, Artificial
  Synthetic oligonucleotide
gtcaacttggatgacgacgtgttttaccctcctgataccaacatggactggaccg

SEQ ID NO: 436568 - DNA, 60 bp, Artificial
  Synthetic oligonucleotide
gtcaagaaaccgcaactggatcaaaggactaccattatgacctgttgcaggcacagaggt

SEQ ID NO: 436569 - DNA, 55 bp, Artificial
  Synthetic oligonucleotide
gtcaagaaatgaccagaagtccgatcagtttgtgcttgttggattcgccttgaca

SEQ ID NO: 436570 - DNA, 60 bp, Artificial
  Synthetic oligonucleotide
gtcaagaacttcggcactctcttcagtatgccgaaatcaaacgtctagtatatacattgt

SEQ ID NO: 436571 - DNA, 50 bp, Artificial
  Synthetic oligonucleotide
gtcaagaagaaccaagcgtcctagatctaaattgttatgaggatatacct

SEQ ID NO: 436572 - DNA, 54 bp, Artificial
  Synthetic oligonucleotide
gtcaagaagcaagcccgggttccccctccccgggctggcccctctgtcaggaga

SEQ ID NO: 436573 - DNA, 55 bp, Artificial
  Synthetic oligonucleotide
gtcaagaagtagcttgcgttcctctgcaataggtatcacccagctaactgccgtc

SEQ ID NO: 436574 - DNA, 58 bp, Artificial
  Synthetic oligonucleotide
gtcaagacatcataaaagaggaactatctgtttacaggaaagatacagaagaagtgac

SEQ ID NO: 436575 - DNA, 60 bp, Artificial
  Synthetic oligonucleotide
gtcaagaccaccaagacagcacctcgccagcaaaacacgcgtcaagtgcgcaatttcgtg

SEQ ID NO: 436576 - DNA, 54 bp, Artificial
  Synthetic oligonucleotide
gtcaagacctatcttgtggggtttattagggggggctctcaaagcgtgtagatt

SEQ ID NO: 436577 - DNA, 56 bp, Artificial
  Synthetic oligonucleotide
gtcaagactaattgtttgggttgttcccacaataccagactctaaaggattcgtca

SEQ ID NO: 436578 - DNA, 58 bp, Artificial
  Synthetic oligonucleotide
gtcaagactgcccttcaaaagtacgcactgaccactgaacgctacgtgtctgaccgtt

SEQ ID NO: 436579 - DNA, 55 bp, Artificial
  Synthetic oligonucleotide
gtcaagagaaaagatggctcatccctgagttacctaccaacattgacagggcagt

SEQ ID NO: 436580 - DNA, 55 bp, Artificial
  Synthetic oligonucleotide
gtcaagagaactcagacatttactccggaccaaagatacctttcaagggagtttg

SEQ ID NO: 436581 - DNA, 55 bp, Artificial
  Synthetic oligonucleotide
gtcaagaggctagctttaaggaaaacttttctattcacctaaatttcagtggctc

SEQ ID NO: 436582 - DNA, 60 bp, Artificial
  Synthetic oligonucleotide
gtcaagaggttcatgaagattaacaaccatgttacttacaatcatcaagaggctgcgaag

SEQ ID NO: 436583 - DNA, 55 bp, Artificial
  Synthetic oligonucleotide
gtcaagagttttctgatgcatctacattattattagaggttgcacgctacctacg

SEQ ID NO: 436584 - DNA, 53 bp, Artificial
  Synthetic oligonucleotide
gtcaagataaaggtttcgggtcctctgacgcctattgggtacaaaatgttacc

SEQ ID NO: 436585 - DNA, 59 bp, Artificial
  Synthetic oligonucleotide
gtcaagataaccagtaggatttatcacaaggctaaacatatcagtgcatggtgtccaag

SEQ ID NO: 436586 - DNA, 56 bp, Artificial
  Synthetic oligonucleotide
gtcaagataatgtttcgttaggatattgccgggtgtcctaccctctaggaagtcta

SEQ ID NO: 436587 - DNA, 51 bp, Artificial
  Synthetic oligonucleotide
gtcaagatcccttatcactcgttgttttctatcagcggactcaagcaaaac

SEQ ID NO: 436588 - DNA, 52 bp, Artificial
  Synthetic oligonucleotide
gtcaagatgatcatagtggacatagccctggaaggagaactggtaattctag

SEQ ID NO: 436589 - DNA, 60 bp, Artificial
  Synthetic oligonucleotide
gtcaagcagggagaatgaactattactggacactagttgagcctggggacacgataacat

SEQ ID NO: 436590 - DNA, 57 bp, Artificial
  Synthetic oligonucleotide
gtcaagcagggaggatgaactattactggaccttgctaaaacccggagacacaataa

SEQ ID NO: 436591 - DNA, 55 bp, Artificial
  Synthetic oligonucleotide
gtcaagccataatctcgttctttgacaagacatctcagaacaagccatcccgagt

SEQ ID NO: 436592 - DNA, 55 bp, Artificial
  Synthetic oligonucleotide
gtcaagccgaatcacggcggctcaagcgtagacgcgcagaaccgtcagctaagag

SEQ ID NO: 436593 - DNA, 60 bp, Artificial
  Synthetic oligonucleotide
gtcaagccgcgttttgatgcgcgcgagtggtttgatgagttgcgcaggatcgcacccaca

SEQ ID NO: 436594 - DNA, 60 bp, Artificial
  Synthetic oligonucleotide
gtcaagccgtgtcgatatcgaatcctacgcggaggcatacaccgggattggtgcggcaac

SEQ ID NO: 436595 - DNA, 56 bp, Artificial
  Synthetic oligonucleotide
gtcaagccttctagtaggacgtcatatgtttctggcgtcatgagatgctaatccgc

SEQ ID NO: 436596 - DNA, 55 bp, Artificial
  Synthetic oligonucleotide
gtcaagcggaagaccaacggtcacgtccaacacgagctggactcccgactgagcc

SEQ ID NO: 436597 - DNA, 55 bp, Artificial
  Synthetic oligonucleotide
gtcaagcggcgtggctgcggatacaggacaacccgtgactttagcgggagccgat

SEQ ID NO: 436598 - DNA, 60 bp, Artificial
  Synthetic oligonucleotide
gtcaagctaggcagatggtgcaggcaatgagaaccattggaactcatccaagttccagtg

SEQ ID NO: 436599 - DNA, 55 bp, Artificial
  Synthetic oligonucleotide
gtcaagctatcctgcgcgacttggcggccttagtagagaagacagttatgacgcc

SEQ ID NO: 436600 - DNA, 60 bp, Artificial
  Synthetic oligonucleotide
gtcaaggaaatcatgtatacgtagtaatgctgtcagctgacgcagaggataacccaggag

SEQ ID NO: 436601 - DNA, 57 bp, Artificial
  Synthetic oligonucleotide
gtcaaggacacccccacaccgacagtccaaacaagtccacctagcactcccgacgca

SEQ ID NO: 436602 - DNA, 55 bp, Artificial
  Synthetic oligonucleotide
gtcaaggacttatttacctctggtgttgaaacgcagagcaagcgagaaagatggg

SEQ ID NO: 436603 - DNA, 55 bp, Artificial
  Synthetic oligonucleotide
gtcaaggacttctcctctgacccatttcccacagggaacttcctgtcatatctat

SEQ ID NO: 436604 - DNA, 55 bp, Artificial
  Synthetic oligonucleotide
gtcaaggagggcttaagtatcttagttaagagtgttcacaacttggaagtaggac

SEQ ID NO: 436605 - DNA, 60 bp, Artificial
  Synthetic oligonucleotide
gtcaaggaggtcacgacgaatgatggcgtcacaaccatcgctaataaccttaccagcacg

SEQ ID NO: 436606 - DNA, 57 bp, Artificial
  Synthetic oligonucleotide
gtcaaggagtggtagaatctatgaataaagagctaaaaaagatcataaaacaagtaa

SEQ ID NO: 436607 - DNA, 55 bp, Artificial
  Synthetic oligonucleotide
gtcaaggatttgttgacatctggtgttgaaacacagagtaagcgagagaggtggg

SEQ ID NO: 436608 - DNA, 58 bp, Artificial
  Synthetic oligonucleotide
gtcaaggcccaacgtattcatgagaatcaatacggtccagatttctcaatagcccata

SEQ ID NO: 436609 - DNA, 60 bp, Artificial
  Synthetic oligonucleotide
gtcaaggcttctgctttgtctactatccaccggaggaacttcgatcatcacagcaagtac

SEQ ID NO: 436610 - DNA, 60 bp, Artificial
  Synthetic oligonucleotide
gtcaaggggacatgtgtttgtcataagagaaccattcgtggcatgtggtcccacagaatg

SEQ ID NO: 436611 - DNA, 51 bp, Artificial
  Synthetic oligonucleotide
gtcaaggggagtccaagaggaaccgaaacttcggggacgcctgaagtaagg

SEQ ID NO: 436612 - DNA, 58 bp, Artificial
  Synthetic oligonucleotide
gtcaaggggtttgcattcctagatggggaaaattcatggcttggaaggacaattagca

SEQ ID NO: 436613 - DNA, 55 bp, Artificial
  Synthetic oligonucleotide
gtcaaggtaccaagtatatcttttaggcacatcgttatgcaatcgagagatcgag

SEQ ID NO: 436614 - DNA, 50 bp, Artificial
  Synthetic oligonucleotide
gtcaaggtgcccagctttattactaattctggttctgacactccgactgg

SEQ ID NO: 436615 - DNA, 60 bp, Artificial
  Synthetic oligonucleotide
gtcaaggtgcgtgcattagacgagagactaggccctatgccgtgcagacctaaagagatt

SEQ ID NO: 436616 - DNA, 51 bp, Artificial
  Synthetic oligonucleotide
gtcaaggtgtgtagtccaaacggatattcctttaggatcctgcgtcacatt

SEQ ID NO: 436617 - DNA, 60 bp, Artificial
  Synthetic oligonucleotide
gtcaaggttaacctgctgtacactggcgaaagaggagccacacgatgattgtcaatgccg

SEQ ID NO: 436618 - DNA, 59 bp, Artificial
  Synthetic oligonucleotide
gtcaagtactcttgaactgagaagcaggtactgggccataagaaccagaagtggaggaa

SEQ ID NO: 436619 - DNA, 60 bp, Artificial
  Synthetic oligonucleotide
gtcaagtatgaggagattcgcaaggtgaggcagttcatggtcaagtttccgtttggccga

SEQ ID NO: 436620 - DNA, 60 bp, Artificial
  Synthetic oligonucleotide
gtcaagtcaaaagatgggtgagaaacctgttgatccgactgggctggagccagacgacca

SEQ ID NO: 436621 - DNA, 55 bp, Artificial
  Synthetic oligonucleotide
gtcaagtccatcaggaatgaccactacaattccagtcacagtcactattgcccct

SEQ ID NO: 436622 - DNA, 60 bp, Artificial
  Synthetic oligonucleotide
gtcaagtctcacccctatatgtacagcatatggcagtagtgttagaagcattggcgaatc

SEQ ID NO: 436623 - DNA, 53 bp, Artificial
  Synthetic oligonucleotide
gtcaagtcttgtaaatataaagagggtcgctcccccggttcctgactcctttg

SEQ ID NO: 436624 - DNA, 60 bp, Artificial
  Synthetic oligonucleotide
gtcaagtgacgttactacatttatcaatctagcacgtgcatcatgtgctggtggtaacag

SEQ ID NO: 436625 - DNA, 50 bp, Artificial
  Synthetic oligonucleotide
gtcaagtgatagagggttaactgtctctaggcaaggtgaatcgataggcc

SEQ ID NO: 436626 - DNA, 51 bp, Artificial
  Synthetic oligonucleotide
gtcaagtgtcggggatcgaacccatcgctggggcagatcggattgagaagg

SEQ ID NO: 436627 - DNA, 52 bp, Artificial
  Synthetic oligonucleotide
gtcaagtgttaagatcacacgcccaaaatactcagctcaagccatcgtcgac

SEQ ID NO: 436628 - DNA, 60 bp, Artificial
  Synthetic oligonucleotide
gtcaagttgtccagctacacctacgctttcaaagccagtgttctccagcatgttccgtgg

SEQ ID NO: 436629 - DNA, 57 bp, Artificial
  Synthetic oligonucleotide
gtcaagtttcacacctcccagactcgcccatcgaccgtgaagcgacccttgtggacg

SEQ ID NO: 436630 - DNA, 55 bp, Artificial
  Synthetic oligonucleotide
gtcaagtttgacaacttgtatcccgccttagcctactttaaactgaaaggtgaga

SEQ ID NO: 436631 - DNA, 55 bp, Artificial
  Synthetic oligonucleotide
gtcaagtttggtggagttttaggtagcctgttatgttttggttgtggagccaaga

SEQ ID NO: 436632 - DNA, 56 bp, Artificial
  Synthetic oligonucleotide
gtcaataacctaaacattgcatacaaatatctatcgacaggaaaagccaaggtgtg

SEQ ID NO: 436633 - DNA, 60 bp, Artificial
  Synthetic oligonucleotide
gtcaataagaccagcaaagcttggatgcatcatgggcctaggatagcttggggacaggct

SEQ ID NO: 436634 - DNA, 60 bp, Artificial
  Synthetic oligonucleotide
gtcaatacacatgtggatgaatacatgctagaagcagttgaccattatgcaggacaatta

SEQ ID NO: 436635 - DNA, 60 bp, Artificial
  Synthetic oligonucleotide
gtcaatacagtgggtttgtgagaacgctattccaacaaatgcgtgatgtattggggacat

SEQ ID NO: 436636 - DNA, 60 bp, Artificial
  Synthetic oligonucleotide
gtcaatacatgggagaattcgcgtgccaaactcaactgtgagcggcaaggtataaacacc

SEQ ID NO: 436637 - DNA, 54 bp, Artificial
  Synthetic oligonucleotide
gtcaatacctaaaggagagagggtgtcgattggaaacggtcgtgcggtttggga

SEQ ID NO: 436638 - DNA, 54 bp, Artificial
  Synthetic oligonucleotide
gtcaatacctattgtttggggtgtcaaggactttaatactctttctcaagaagg

SEQ ID NO: 436639 - DNA, 53 bp, Artificial
  Synthetic oligonucleotide
gtcaatacgctgtacgttgacgaggcttacgcctgtcactcgggcactctgct

SEQ ID NO: 436640 - DNA, 60 bp, Artificial
  Synthetic oligonucleotide
gtcaatagagcgaatcagcgattgaatcccatgcatcaacttttgagacattttcagaag

SEQ ID NO: 436641 - DNA, 57 bp, Artificial
  Synthetic oligonucleotide
gtcaatagagtccctagaagcatacaaatcgttgacccgaaatacaactcaccggaa

SEQ ID NO: 436642 - DNA, 60 bp, Artificial
  Synthetic oligonucleotide
gtcaatatagtaactgactcacaatatgtattgggcattattaattcccagcctgatcat

SEQ ID NO: 436643 - DNA, 55 bp, Artificial
  Synthetic oligonucleotide
gtcaatatcaattacgaaagctatgctctcccttactgagccttcacgttatatg

SEQ ID NO: 436644 - DNA, 55 bp, Artificial
  Synthetic oligonucleotide
gtcaatatgcatgtcaggaccaaacaataatgcatcagctgtggtgtggtatggg

SEQ ID NO: 436645 - DNA, 55 bp, Artificial
  Synthetic oligonucleotide
gtcaatcaataagactgacgctcaaagcgccataaacattcctagtgctaacgga

SEQ ID NO: 436646 - DNA, 53 bp, Artificial
  Synthetic oligonucleotide
gtcaatccaaagtgagtatccttcgttgcaaactatagtgtaccactcgaaaa

SEQ ID NO: 436647 - DNA, 57 bp, Artificial
  Synthetic oligonucleotide
gtcaatccaattccaaacaacatttttccgtatgcttatatggtgaacctggtcaag

SEQ ID NO: 436648 - DNA, 60 bp, Artificial
  Synthetic oligonucleotide
gtcaatccacgtcttggcatttggatccacggcggccatcagatctttaagagctagtat

SEQ ID NO: 436649 - DNA, 55 bp, Artificial
  Synthetic oligonucleotide
gtcaatccccttgaattcgatgaagttatcatgagagttggtaaacttgagactg

SEQ ID NO: 436650 - DNA, 53 bp, Artificial
  Synthetic oligonucleotide
gtcaatcccgaacttcaatcaatacgaagcaatggcctgtgacttcaatggag

SEQ ID NO: 436651 - DNA, 50 bp, Artificial
  Synthetic oligonucleotide
gtcaatccgttgttgatctcgcgtatttgtactacattgcaagtgtattc

SEQ ID NO: 436652 - DNA, 60 bp, Artificial
  Synthetic oligonucleotide
gtcaatcctccgtctcctgattgctctcttcttcgcctcccgatgctgaactttgattgg

SEQ ID NO: 436653 - DNA, 58 bp, Artificial
  Synthetic oligonucleotide
gtcaatcctttggactcttaaggcatcatcgataatatagagttaaaggatatttacc

SEQ ID NO: 436654 - DNA, 53 bp, Artificial
  Synthetic oligonucleotide
gtcaatcgacagacgcgtgttaatagaagtgatttggacgatttagcagcatc

SEQ ID NO: 436655 - DNA, 52 bp, Artificial
  Synthetic oligonucleotide
gtcaatcgccgaagcgatcatagtagcaatggtattttcacaagaggattgc

SEQ ID NO: 436656 - DNA, 60 bp, Artificial
  Synthetic oligonucleotide
gtcaatcgcgtgcctaatgccaaaagggcgtattacagcagttagatagggttccatgcc

SEQ ID NO: 436657 - DNA, 51 bp, Artificial
  Synthetic oligonucleotide
gtcaatcggatgtctctcgactctctctatgtatcggggtattggagtcct

SEQ ID NO: 436658 - DNA, 60 bp, Artificial
  Synthetic oligonucleotide
gtcaatctccgtttgtgagtctacaggttatctatatgtaacggctatgtcaagcatacc

SEQ ID NO: 436659 - DNA, 59 bp, Artificial
  Synthetic oligonucleotide
gtcaatctggaaggtaccccagtcaagtatgtctccgtctttctcgatgtatgccttaa

SEQ ID NO: 436660 - DNA, 60 bp, Artificial
  Synthetic oligonucleotide
gtcaatctggctgcctccatacattcgacgagctctttggtgcacggattcatagccatg

SEQ ID NO: 436661 - DNA, 55 bp, Artificial
  Synthetic oligonucleotide
gtcaatgacaatgtcagactggatgaactacccgccaatcaacatgtggtaaccg

SEQ ID NO: 436662 - DNA, 60 bp, Artificial
  Synthetic oligonucleotide
gtcaatgacatacagaagttagtgggaaaattgaattgggcaagtcagatttatgcaggg

SEQ ID NO: 436663 - DNA, 60 bp, Artificial
  Synthetic oligonucleotide
gtcaatgacgtcgctatcgcgaatcataaatgcacacttgaacgatctttccacacctat

SEQ ID NO: 436664 - DNA, 60 bp, Artificial
  Synthetic oligonucleotide
gtcaatgacgttagtgtagacattatgagttctagggctccaattaatgcatccatctgg

SEQ ID NO: 436665 - DNA, 55 bp, Artificial
  Synthetic oligonucleotide
gtcaatgagctcgtgtttaggttcaggctggcagtggctataatggaggaggcaa

SEQ ID NO: 436666 - DNA, 55 bp, Artificial
  Synthetic oligonucleotide
gtcaatgatagtgttaggttggatgaactacccgccaatcaacatgtggtaactg

SEQ ID NO: 436667 - DNA, 55 bp, Artificial
  Synthetic oligonucleotide
gtcaatgatgagttcgatgggaatggctcctgtacccttcttaatgccagaatcc

SEQ ID NO: 436668 - DNA, 60 bp, Artificial
  Synthetic oligonucleotide
gtcaatgcacgtcattgattcatatggatcactcagtgttggattccacattctaaaggc

SEQ ID NO: 436669 - DNA, 60 bp, Artificial
  Synthetic oligonucleotide
gtcaatgcatttatactattacaagtctcttttcactgttgccaggggttgcccattcta

SEQ ID NO: 436670 - DNA, 55 bp, Artificial
  Synthetic oligonucleotide
gtcaatgccgactgcccaatcgactatgaaggcagaggagttgacccctggtcga

SEQ ID NO: 436671 - DNA, 55 bp, Artificial
  Synthetic oligonucleotide
gtcaatgcgcgacgtgcctaaccccgaggatgcgaaccggtatctaccggcgact

SEQ ID NO: 436672 - DNA, 56 bp, Artificial
  Synthetic oligonucleotide
gtcaatggaggacctggagtcaaaggttttggcttcaaaaagggtaatgatgtatg

SEQ ID NO: 436673 - DNA, 56 bp, Artificial
  Synthetic oligonucleotide
gtcaatgggtaaaaacatgaggacctgataggtaaatgaggacccgatacatcggg

SEQ ID NO: 436674 - DNA, 50 bp, Artificial
  Synthetic oligonucleotide
gtcaatggtgtttatgactttaatttcaatagtggatcgctgccaacaga

SEQ ID NO: 436675 - DNA, 57 bp, Artificial
  Synthetic oligonucleotide
gtcaatgtacttacccgttggtcagacaaagtggcaaaggagttgacgctgttagta

SEQ ID NO: 436676 - DNA, 55 bp, Artificial
  Synthetic oligonucleotide
gtcaatgtcccaattgctaactcagcgtcacgattcactgcttctggattatggg

SEQ ID NO: 436677 - DNA, 52 bp, Artificial
  Synthetic oligonucleotide
gtcaatgtcgtactcgcccggggggtacggcgggcgcgagcccaggcccaca

SEQ ID NO: 436678 - DNA, 53 bp, Artificial
  Synthetic oligonucleotide
gtcaattaactatgtacagctcacgtcgaccgcgtctccacgtccccaatcgt

SEQ ID NO: 436679 - DNA, 56 bp, Artificial
  Synthetic oligonucleotide
gtcaattacactgaatggaatgacactttgaaagaagtagcccaacaattaggaac

SEQ ID NO: 436680 - DNA, 55 bp, Artificial
  Synthetic oligonucleotide
gtcaattagtacacagaggtcaagaaatttgatcctgggactccacctcatgttt

SEQ ID NO: 436681 - DNA, 60 bp, Artificial
  Synthetic oligonucleotide
gtcaattcaattgaccttgaggaaccaagtgggcagactgctgactggaaagcaatcggg

SEQ ID NO: 436682 - DNA, 60 bp, Artificial
  Synthetic oligonucleotide
gtcaattctaagtcgggtactatgggcgattatgtgcctccagtgttcgcggcatttcag

SEQ ID NO: 436683 - DNA, 55 bp, Artificial
  Synthetic oligonucleotide
gtcaattctatggaggcgtacagggtggaggtcaacacatcgaaacacgcaggag

SEQ ID NO: 436684 - DNA, 55 bp, Artificial
  Synthetic oligonucleotide
gtcaattgcactaggaacagtactaatgccaatagtagtaataggaactgtactg

SEQ ID NO: 436685 - DNA, 60 bp, Artificial
  Synthetic oligonucleotide
gtcaattgcatagaattagatgttagtggtccttacgagatggagtcttttgatacatct

SEQ ID NO: 436686 - DNA, 60 bp, Artificial
  Synthetic oligonucleotide
gtcaattggtcttgggccggtgtatctcatgcttgtagagcgcccaatcgtggattttgt

SEQ ID NO: 436687 - DNA, 60 bp, Artificial
  Synthetic oligonucleotide
gtcaatttacagctgcattgcaagcagtcttgtgttggcagcaatcatcatggggttcgt

SEQ ID NO: 436688 - DNA, 55 bp, Artificial
  Synthetic oligonucleotide
gtcaatttccacgatggctcagttttatggcatacgtttcggtaataccttaaac

SEQ ID NO: 436689 - DNA, 58 bp, Artificial
  Synthetic oligonucleotide
gtcaatttgatcctgagttcaacgttgacggggtgtttgtgttcgggttcacagctgc

SEQ ID NO: 436690 - DNA, 59 bp, Artificial
  Synthetic oligonucleotide
gtcaatttgtctggcggcgaagaacgaatctggctgcctgcctttgcaccgggagtggt

SEQ ID NO: 436691 - DNA, 58 bp, Artificial
  Synthetic oligonucleotide
gtcacaaaccagtggcgtcatggtcgtaacgagcaattctgtggcggaaccgactact

SEQ ID NO: 436692 - DNA, 57 bp, Artificial
  Synthetic oligonucleotide
gtcacaaacctcttcccagtgcaggtgggcgttgacccatccagcgctagctgtgtg

SEQ ID NO: 436693 - DNA, 60 bp, Artificial
  Synthetic oligonucleotide
gtcacaaacgactgctccaactcaagcatcgtgtatgaagcagtggacgtgatcatgcat

SEQ ID NO: 436694 - DNA, 60 bp, Artificial
  Synthetic oligonucleotide
gtcacaaagcttcaacacatgattgacacctatggacttgacctaccatatgtgacctat

SEQ ID NO: 436695 - DNA, 60 bp, Artificial
  Synthetic oligonucleotide
gtcacaaataaataggcaaatcatagttgacagtgataatttgtctgggtattctggtat

SEQ ID NO: 436696 - DNA, 55 bp, Artificial
  Synthetic oligonucleotide
gtcacaaatcatgttgtgaaaattggattgtatttgtgtatgcagcgggaacaga

SEQ ID NO: 436697 - DNA, 60 bp, Artificial
  Synthetic oligonucleotide
gtcacaaatgggttgcgacccttcctagcggacatcgtgctacaacgttcatcaatacag

SEQ ID NO: 436698 - DNA, 54 bp, Artificial
  Synthetic oligonucleotide
gtcacaacaagcggagcatccgtgactctaaccgcacagaccccaggtggggcc

SEQ ID NO: 436699 - DNA, 51 bp, Artificial
  Synthetic oligonucleotide
gtcacaacggaacgacatatactaaggttgaagagttggttacaccacacg

SEQ ID NO: 436700 - DNA, 57 bp, Artificial
  Synthetic oligonucleotide
gtcacaactcaaggaaagaaaagacagatacaaaagcttaaattcagagacgccttc

SEQ ID NO: 436701 - DNA, 55 bp, Artificial
  Synthetic oligonucleotide
gtcacaaggagtgatgactgtttagtgtgcattggcacacagggttttgtaagtg

SEQ ID NO: 436702 - DNA, 55 bp, Artificial
  Synthetic oligonucleotide
gtcacaatacagtttgagcgggatttggcagaagttactgcagcaccaaatgagg

SEQ ID NO: 436703 - DNA, 55 bp, Artificial
  Synthetic oligonucleotide
gtcacaatctcgcactcgcgagatacttaccaaaactactgtagaccacatggcc

SEQ ID NO: 436704 - DNA, 56 bp, Artificial
  Synthetic oligonucleotide
gtcacaatggcctacgtgacttggtatacgtgacctaaaacaacaaagtggcgtac

SEQ ID NO: 436705 - DNA, 60 bp, Artificial
  Synthetic oligonucleotide
gtcacaatggtgactaggtgatcattaggtaagcctaataatcagctggtgaccgtgcta

SEQ ID NO: 436706 - DNA, 60 bp, Artificial
  Synthetic oligonucleotide
gtcacaattacctttggcatgcttgagacttcatgcggaagtaatgcggatttggaacta

SEQ ID NO: 436707 - DNA, 56 bp, Artificial
  Synthetic oligonucleotide
gtcacaattgctaatattgccatatccaaggctcccgatgttggagaagttcccac

SEQ ID NO: 436708 - DNA, 53 bp, Artificial
  Synthetic oligonucleotide
gtcacaattgtagtaatacatgaaacgtccgtcaaattctttttgagaccccc

SEQ ID NO: 436709 - DNA, 54 bp, Artificial
  Synthetic oligonucleotide
gtcacacaaccgaaacgttccagtataaaacctggcttcttagatccctcgccc

SEQ ID NO: 436710 - DNA, 55 bp, Artificial
  Synthetic oligonucleotide
gtcacacaacgaaacggttgctccacacagtccgacaagagtggtttgtgacatg

SEQ ID NO: 436711 - DNA, 50 bp, Artificial
  Synthetic oligonucleotide
gtcacacaagtcaaatagagtcgaatgatggtgacatattggcattacaa

SEQ ID NO: 436712 - DNA, 55 bp, Artificial
  Synthetic oligonucleotide
gtcacacagacaaaggctctatctccacaagtaagccctttcaaaacatctcgag

SEQ ID NO: 436713 - DNA, 60 bp, Artificial
  Synthetic oligonucleotide
gtcacacagagaagtgtgttattttggatgccccgggactgcttcgcgaggtgggcatat

SEQ ID NO: 436714 - DNA, 55 bp, Artificial
  Synthetic oligonucleotide
gtcacacagaggaatttgcttacgaggtaggagcgctacccatactggcaatcac

SEQ ID NO: 436715 - DNA, 60 bp, Artificial
  Synthetic oligonucleotide
gtcacacagcatgggcgttttagattacgagcgggtcaaaatattacaacagcatacgtg

SEQ ID NO: 436716 - DNA, 57 bp, Artificial
  Synthetic oligonucleotide
gtcacacagggtctcccaacaacttcaactcctgggtcaaatcagtttttgactaca

SEQ ID NO: 436717 - DNA, 55 bp, Artificial
  Synthetic oligonucleotide
gtcacacaggttgccgatactgtctcttctatttctaatgtggtggatggtcttg

SEQ ID NO: 436718 - DNA, 60 bp, Artificial
  Synthetic oligonucleotide
gtcacacatgctcaggacatactggaaaaagaacacaatggaagactctgcagtcttaaa

SEQ ID NO: 436719 - DNA, 55 bp, Artificial
  Synthetic oligonucleotide
gtcacaccacatgattggtatgaaattcaggagagtgagtattacccaaaacaca

SEQ ID NO: 436720 - DNA, 60 bp, Artificial
  Synthetic oligonucleotide
gtcacaccgtggatactacgacaagtatcagtgcttacaggacttatgtctgtggttcac

SEQ ID NO: 436721 - DNA, 60 bp, Artificial
  Synthetic oligonucleotide
gtcacacgactgcggcggttcgcgtagccagtacgcctgtaagatctgcggtagactctg

SEQ ID NO: 436722 - DNA, 60 bp, Artificial
  Synthetic oligonucleotide
gtcacacgaggaaaggatcgagatgtagatgcaggaacgattgggaccttctcagtacct

SEQ ID NO: 436723 - DNA, 55 bp, Artificial
  Synthetic oligonucleotide
gtcacacgccacacccactgggaaaacccacacgccccgcctctgtgcaacgtta

SEQ ID NO: 436724 - DNA, 56 bp, Artificial
  Synthetic oligonucleotide
gtcacacgtggcagtggtataacccaccgtgttggtaagcgtttctgcgttaagtc

SEQ ID NO: 436725 - DNA, 60 bp, Artificial
  Synthetic oligonucleotide
gtcacactaccacttccgactgatctgtaccgggccttatgctgtgttgagaattatctt

SEQ ID NO: 436726 - DNA, 55 bp, Artificial
  Synthetic oligonucleotide
gtcacactggaccaccatgattcatacactggaaatgaggtcgccatttgggacg

SEQ ID NO: 436727 - DNA, 55 bp, Artificial
  Synthetic oligonucleotide
gtcacactggcgggaccacgaagcaaccacaatcggagacctgggtacaagacac

SEQ ID NO: 436728 - DNA, 53 bp, Artificial
  Synthetic oligonucleotide
gtcacacttcgatcaaaagggggcgtacgggtttaacacacttaacaagatgg

SEQ ID NO: 436729 - DNA, 55 bp, Artificial
  Synthetic oligonucleotide
gtcacagaagaagaatgagatgttgtggttagctcagaaaatcgtttcagcatac

SEQ ID NO: 436730 - DNA, 55 bp, Artificial
  Synthetic oligonucleotide
gtcacagaggatgcgcattccctccgaaccccagacggagctccctccgaagagg

SEQ ID NO: 436731 - DNA, 60 bp, Artificial
  Synthetic oligonucleotide
gtcacagagttatattgtgagcgacaccactcaagtatcttagcgtatttcgctgcttgt

SEQ ID NO: 436732 - DNA, 55 bp, Artificial
  Synthetic oligonucleotide
gtcacagccacgtggtccgtttgcgacagtttgcgacaccatgtggtcaggaggg

SEQ ID NO: 436733 - DNA, 55 bp, Artificial
  Synthetic oligonucleotide
gtcacagctgagttggatgtcgacaatagagccataatttataaacgtgtcagca

SEQ ID NO: 436734 - DNA, 57 bp, Artificial
  Synthetic oligonucleotide
gtcacaggcccaaaagtacgaacatttgacatcccaaattatagacctcaacaattg

SEQ ID NO: 436735 - DNA, 60 bp, Artificial
  Synthetic oligonucleotide
gtcacagggcccgacgctcaagcagttgcagtggtgcactatggaggtgttccggttgac

SEQ ID NO: 436736 - DNA, 50 bp, Artificial
  Synthetic oligonucleotide
gtcacagggtttccgtgccaggaaatcaacctggcatatcgccctgtgtt

SEQ ID NO: 436737 - DNA, 60 bp, Artificial
  Synthetic oligonucleotide
gtcacaggtacaggctaggcttctcacaaccgaggaagcctgtgatctgacccccccgca

SEQ ID NO: 436738 - DNA, 55 bp, Artificial
  Synthetic oligonucleotide
gtcacagtaccactctcttctgggtttgatttgcctgcatatacaggccctgaca

SEQ ID NO: 436739 - DNA, 55 bp, Artificial
  Synthetic oligonucleotide
gtcacagtcacccaccgtgagtacttaacccaggtgaacaactcccctgctttta

SEQ ID NO: 436740 - DNA, 58 bp, Artificial
  Synthetic oligonucleotide
gtcacatacttgggattcaagatccataagggatcacggaccctatcaaatagccgaa

SEQ ID NO: 436741 - DNA, 51 bp, Artificial
  Synthetic oligonucleotide
gtcacatcactaatcggttcggtaacgtctgtggacggaggcaccacttct

SEQ ID NO: 436742 - DNA, 55 bp, Artificial
  Synthetic oligonucleotide
gtcacatcatccagggttgcagctgggagagaatggtgtcgatcaaagtgtcttt

SEQ ID NO: 436743 - DNA, 55 bp, Artificial
  Synthetic oligonucleotide
gtcacatccgccaggaaccatcttcatcaagctagcaagaattccagtaccagga

SEQ ID NO: 436744 - DNA, 58 bp, Artificial
  Synthetic oligonucleotide
gtcacatgacaggggtccacttaaacacggaagtaggccccgacatgtgactcgtcac

SEQ ID NO: 436745 - DNA, 55 bp, Artificial
  Synthetic oligonucleotide
gtcacatgcatcctgatgcggcggtgatgaaagttgtgtcccgtgatgtgcgtag

SEQ ID NO: 436746 - DNA, 55 bp, Artificial
  Synthetic oligonucleotide
gtcacattcaagaatacttgtaggaatggagttgtacagaggattgctgacgctc

SEQ ID NO: 436747 - DNA, 60 bp, Artificial
  Synthetic oligonucleotide
gtcaccaaagatgaggaggccagcccaaccgatgtgagccactccgtgatatgctcgtac

SEQ ID NO: 436748 - DNA, 60 bp, Artificial
  Synthetic oligonucleotide
gtcaccaagttgataacagatcttgacagtatgcaagtgtatgctcaagcgcgctcggac

SEQ ID NO: 436749 - DNA, 60 bp, Artificial
  Synthetic oligonucleotide
gtcaccaatgattgccctaactcgagtattgtgtacgagacggccgataccattctacac

SEQ ID NO: 436750 - DNA, 60 bp, Artificial
  Synthetic oligonucleotide
gtcaccaatgcatgcgaggcgtatgattagatcaaaaacagttcacccgatctacctagg

SEQ ID NO: 436751 - DNA, 55 bp, Artificial
  Synthetic oligonucleotide
gtcaccaatttcagtgaaggtgatcctgttatcaatctggagctttacagtgagc

SEQ ID NO: 436752 - DNA, 56 bp, Artificial
  Synthetic oligonucleotide
gtcaccaatttttcggcaccgcttaactcacttcaacagttatccaccgggctaga

SEQ ID NO: 436753 - DNA, 60 bp, Artificial
  Synthetic oligonucleotide
gtcaccacagggacgttggttgcactgcttgccctagatgccactagcatgagtatggac

SEQ ID NO: 436754 - DNA, 60 bp, Artificial
  Synthetic oligonucleotide
gtcaccacattgattgatagtcacataacatactttcccttcctcacatgggtcgtagaa

SEQ ID NO: 436755 - DNA, 55 bp, Artificial
  Synthetic oligonucleotide
gtcaccaccttaagtcctctccttatgtcaccaccttatgtcaccaccttaagtc

SEQ ID NO: 436756 - DNA, 55 bp, Artificial
  Synthetic oligonucleotide
gtcaccacgcgcattgtcaagcgcatgaacatacaagacctttggtccaagccac

SEQ ID NO: 436757 - DNA, 55 bp, Artificial
  Synthetic oligonucleotide
gtcaccacgttcagttacaatggttcatcaggttgagacagttgacattgagggg

SEQ ID NO: 436758 - DNA, 55 bp, Artificial
  Synthetic oligonucleotide
gtcaccactagtgcaatattttgatcgtaaggctgaaagagtattgttatgatgc

SEQ ID NO: 436759 - DNA, 58 bp, Artificial
  Synthetic oligonucleotide
gtcaccagcaatattccagagtagcatgacaaaaatcctagaaccttttagggcaaaa

SEQ ID NO: 436760 - DNA, 55 bp, Artificial
  Synthetic oligonucleotide
gtcaccagcttgacaggcagagacaacaatatagtgactggtgaggtgcaggtac

SEQ ID NO: 436761 - DNA, 60 bp, Artificial
  Synthetic oligonucleotide
gtcaccaggctttgacctcatgtatgaggttgctcacgtccagtgtgttcggctcctgca

SEQ ID NO: 436762 - DNA, 57 bp, Artificial
  Synthetic oligonucleotide
gtcaccagggaagtcgggaatgagaagcgtgttgtcaataggcacgccaaagggtac

SEQ ID NO: 436763 - DNA, 55 bp, Artificial
  Synthetic oligonucleotide
gtcaccaggtgtcatcctggcattttacaatagtggatctctagagtacttgatg

SEQ ID NO: 436764 - DNA, 55 bp, Artificial
  Synthetic oligonucleotide
gtcaccagttacgcaggagaagacaaaatcggctcttacgcggtgctctccccac

SEQ ID NO: 436765 - DNA, 58 bp, Artificial
  Synthetic oligonucleotide
gtcaccatcagccacacctactcaaaatggagggcaatttcttccgggtcaaaggtca

SEQ ID NO: 436766 - DNA, 54 bp, Artificial
  Synthetic oligonucleotide
gtcaccatggaatcttattgaagtgaagattgatcccggtattttccctgatag

SEQ ID NO: 436767 - DNA, 57 bp, Artificial
  Synthetic oligonucleotide
gtcaccatggctgagtttgcctggtgttacgacaccgaccaattcgaaaagctttta

SEQ ID NO: 436768 - DNA, 60 bp, Artificial
  Synthetic oligonucleotide
gtcaccatgtaagagaatatatataagtatgttgccttattattatttggcaaagatgac

SEQ ID NO: 436769 - DNA, 54 bp, Artificial
  Synthetic oligonucleotide
gtcaccatgtggcaccagactaacatggtcataccccccggcttcccgaacacc

SEQ ID NO: 436770 - DNA, 59 bp, Artificial
  Synthetic oligonucleotide
gtcaccattcattaaagcacagaactatggtattaatcttcctattacaggttctatgg

SEQ ID NO: 436771 - DNA, 58 bp, Artificial
  Synthetic oligonucleotide
gtcaccattcctagacattgacaataggagtattgcttacaataagattagtgttagc

SEQ ID NO: 436772 - DNA, 60 bp, Artificial
  Synthetic oligonucleotide
gtcacccaaccggcaaccgcttgctcatctatagactcagaggcaaactgaacagcaatc

SEQ ID NO: 436773 - DNA, 60 bp, Artificial
  Synthetic oligonucleotide
gtcacccaaccttgaatttcagcgaggttgatggcttctcctgaaaactcaacagcaatc

SEQ ID NO: 436774 - DNA, 55 bp, Artificial
  Synthetic oligonucleotide
gtcacccaagtatacgccggtgacgacatggctatggaccatgtgtgccctgaga

SEQ ID NO: 436775 - DNA, 60 bp, Artificial
  Synthetic oligonucleotide
gtcacccagttaagctgcatggtcgggggtatatcaatgcctcgaaaaccactgcgacac

SEQ ID NO: 436776 - DNA, 55 bp, Artificial
  Synthetic oligonucleotide
gtcacccctcagaggaaagccttagaaaggtgttgaccaaacgatttgtgtggga

SEQ ID NO: 436777 - DNA, 60 bp, Artificial
  Synthetic oligonucleotide
gtcacccgctgcattggaccgtgttggaaccatagcgaaggcgtatgcgttgtggagacc

SEQ ID NO: 436778 - DNA, 58 bp, Artificial
  Synthetic oligonucleotide
gtcacccgtggtaatgggcttacccatcgtgctggtaagagattctgtgtgaaatccg

SEQ ID NO: 436779 - DNA, 54 bp, Artificial
  Synthetic oligonucleotide
gtcacccgttttgtgagcgggaaaagttgattacaggtctatataagcccgacc

SEQ ID NO: 436780 - DNA, 55 bp, Artificial
  Synthetic oligonucleotide
gtcaccctacggagggttgactttcctgactgccccaaaggccgaaatgtttgca

SEQ ID NO: 436781 - DNA, 58 bp, Artificial
  Synthetic oligonucleotide
gtcaccctcaaaagggagaatttctttaactttcaggctatcaaaggagcatgatcac

SEQ ID NO: 436782 - DNA, 55 bp, Artificial
  Synthetic oligonucleotide
gtcaccctgcgctctcccacagtatgatgtaaccccaccaatgcacataccagga

SEQ ID NO: 436783 - DNA, 57 bp, Artificial
  Synthetic oligonucleotide
gtcaccctggccgcgcgggacaagaatcaggacctcgcatgggagtgaacgagccag

SEQ ID NO: 436784 - DNA, 54 bp, Artificial
  Synthetic oligonucleotide
gtcaccgaaacgattcctatcgtattcggacggtaataaaatcgcgttagatcg

SEQ ID NO: 436785 - DNA, 59 bp, Artificial
  Synthetic oligonucleotide
gtcaccgacgtgtatcccgtcgattgatagagaggacgtaatgccaactacgacaccga

SEQ ID NO: 436786 - DNA, 55 bp, Artificial
  Synthetic oligonucleotide
gtcaccgactcgaatacgactgatcgtaagttggttgacctgggacagtttgctt

SEQ ID NO: 436787 - DNA, 54 bp, Artificial
  Synthetic oligonucleotide
gtcaccgatttatttgggcaagtcaaaattcgacccgatacctgctcctgacaa

SEQ ID NO: 436788 - DNA, 60 bp, Artificial
  Synthetic oligonucleotide
gtcaccgcaacgcatttctccgctgtgcttaccgacagcgcagtccaatcgttcatgcta

SEQ ID NO: 436789 - DNA, 59 bp, Artificial
  Synthetic oligonucleotide
gtcaccgcataagaagaaatggttgccatctagttcgtcaattttaaaatacacagatc

SEQ ID NO: 436790 - DNA, 60 bp, Artificial
  Synthetic oligonucleotide
gtcaccgcattacaagcgctatgtcagccagtgcatctggtggctccagtacttcctgac

SEQ ID NO: 436791 - DNA, 60 bp, Artificial
  Synthetic oligonucleotide
gtcaccgccactaccagtaagggagagttcaccatgctgggagtacacgacaatgtggcg

SEQ ID NO: 436792 - DNA, 55 bp, Artificial
  Synthetic oligonucleotide
gtcaccgctcagtatgaacgtcttgttgtgccatctaaaggcagtgtcaatcttt

SEQ ID NO: 436793 - DNA, 57 bp, Artificial
  Synthetic oligonucleotide
gtcaccggggggagtgctgcttcgaccacggctggaatcgccagtctttttagagtg

SEQ ID NO: 436794 - DNA, 55 bp, Artificial
  Synthetic oligonucleotide
gtcaccggttcaatcagcacctgttggtcatggtaagacgatcgaaacatatcag

SEQ ID NO: 436795 - DNA, 55 bp, Artificial
  Synthetic oligonucleotide
gtcaccgtacattatacccagagggcactacttatgtatacagtactttaacacc

SEQ ID NO: 436796 - DNA, 60 bp, Artificial
  Synthetic oligonucleotide
gtcaccgtcaaatatacacctgagaactgtgagccgtggtccctagtaactaccatgtgc

SEQ ID NO: 436797 - DNA, 59 bp, Artificial
  Synthetic oligonucleotide
gtcaccgtccttgtccagataagacttgacgtcggagcttgatttagctccctgaatat

SEQ ID NO: 436798 - DNA, 55 bp, Artificial
  Synthetic oligonucleotide
gtcaccgtcgttaaccagtatggcaatttgaaagcaacgaaaacgcctgttgcgg

SEQ ID NO: 436799 - DNA, 55 bp, Artificial
  Synthetic oligonucleotide
gtcaccgtggctacttcaggccagccttttaaccttgcagctggcgctgaagcgg

SEQ ID NO: 436800 - DNA, 55 bp, Artificial
  Synthetic oligonucleotide
gtcaccgttacaagtccctacgcgcctagcgttaatcgattgatgccgtaccgga

SEQ ID NO: 436801 - DNA, 54 bp, Artificial
  Synthetic oligonucleotide
gtcacctactccataactccacttgatcttccacagatcattcagaggttgcac

SEQ ID NO: 436802 - DNA, 51 bp, Artificial
  Synthetic oligonucleotide
gtcacctactgattatatagtggcattatatgctttatccaatgactttaa

SEQ ID NO: 436803 - DNA, 52 bp, Artificial
  Synthetic oligonucleotide
gtcacctattctatcactccattggatttaccgccgattatccagcggttac

SEQ ID NO: 436804 - DNA, 54 bp, Artificial
  Synthetic oligonucleotide
gtcacctcacccacgcatttggggtccatgcgataaaagtgtaacagcgcgccg

SEQ ID NO: 436805 - DNA, 55 bp, Artificial
  Synthetic oligonucleotide
gtcacctcaccgagcatagttacatgcatgaacatagtgtattccagcagctctc

SEQ ID NO: 436806 - DNA, 51 bp, Artificial
  Synthetic oligonucleotide
gtcacctcagcctactcccagtccgagtatgcctgcactaagtccagcaat

SEQ ID NO: 436807 - DNA, 54 bp, Artificial
  Synthetic oligonucleotide
gtcacctcccataatgcttagagtcaagctgaatattaacataagccaggatcc

SEQ ID NO: 436808 - DNA, 57 bp, Artificial
  Synthetic oligonucleotide
gtcacctcgaagtttctgaatgctggatgttgttacataaaaaagttagttccagcg

SEQ ID NO: 436809 - DNA, 57 bp, Artificial
  Synthetic oligonucleotide
gtcacctcggtaggaccgagttgccgtacattagaggtaattcctgtgtacgatgtg

SEQ ID NO: 436810 - DNA, 56 bp, Artificial
  Synthetic oligonucleotide
gtcacctcgtgcttcctatacgtcacttaaccgttactatgcggtacaggacgtta

SEQ ID NO: 436811 - DNA, 60 bp, Artificial
  Synthetic oligonucleotide
gtcacctgcttcgatgcattctctcagggtcggcactccggaggctgctcaagcccctaa

SEQ ID NO: 436812 - DNA, 55 bp, Artificial
  Synthetic oligonucleotide
gtcacctggacagaccagtgtcatacagatcatcttagcaccatgcacctcatcc

SEQ ID NO: 436813 - DNA, 55 bp, Artificial
  Synthetic oligonucleotide
gtcacctggggaaaggtgcccaaaatgaaagtcccagcaaagagagaggattggg

SEQ ID NO: 436814 - DNA, 55 bp, Artificial
  Synthetic oligonucleotide
gtcaccttattcggacactcggcaagggatctgatggaacttgatatagcagtgc

SEQ ID NO: 436815 - DNA, 59 bp, Artificial
  Synthetic oligonucleotide
gtcacgaaaagcgtgatgaataaactattgtggcgttcaatacccacatctgtccttgg

SEQ ID NO: 436816 - DNA, 60 bp, Artificial
  Synthetic oligonucleotide
gtcacgaaagggttacatggaatgactggcagacatctcgtcacttagatatggggtcta

SEQ ID NO: 436817 - DNA, 60 bp, Artificial
  Synthetic oligonucleotide
gtcacgaacgactgctccaacacaagcatcgtgtatgaggcagcggatatgatcatgcat

SEQ ID NO: 436818 - DNA, 60 bp, Artificial
  Synthetic oligonucleotide
gtcacgaacgactgctccaactcaagcatagtgtatgaggcagcggacttgattatgcac

SEQ ID NO: 436819 - DNA, 55 bp, Artificial
  Synthetic oligonucleotide
gtcacgaataaacaaggaatcagttacgacgatttgtttgattgcggtgttgact

SEQ ID NO: 436820 - DNA, 60 bp, Artificial
  Synthetic oligonucleotide
gtcacgaatacgtatcttgtataagagaatgttacagtgtcatgaggccattatcagaac

SEQ ID NO: 436821 - DNA, 54 bp, Artificial
  Synthetic oligonucleotide
gtcacgaattttgttttcgatctggagggttggtcccttacgacggtaccagca

SEQ ID NO: 436822 - DNA, 58 bp, Artificial
  Synthetic oligonucleotide
gtcacgacaaattggcgtgaaattatagtgtcacaacatccatcaacgacggaaccgg

SEQ ID NO: 436823 - DNA, 53 bp, Artificial
  Synthetic oligonucleotide
gtcacgactattaactgagaaacattacaaggtgacaaaggttgatgggagaa

SEQ ID NO: 436824 - DNA, 60 bp, Artificial
  Synthetic oligonucleotide
gtcacgagaaaacccatgctctgaagagctctgttcggtcttcaatgatcaacctccaga

SEQ ID NO: 436825 - DNA, 55 bp, Artificial
  Synthetic oligonucleotide
gtcacgaggaatgaaggacacgaccaggaagttaccagcaacgaagatagtctgg

SEQ ID NO: 436826 - DNA, 53 bp, Artificial
  Synthetic oligonucleotide
gtcacgagggaccattacgattgcagtgagtcggtctgtcattcggtttcctt

SEQ ID NO: 436827 - DNA, 55 bp, Artificial
  Synthetic oligonucleotide
gtcacgatatctcccatactggtaaggtgatgtgcgtctccgatgtgacacgtgg

SEQ ID NO: 436828 - DNA, 58 bp, Artificial
  Synthetic oligonucleotide
gtcacgcaaaagtgtgtcaagacctccttccaaccggttcccatacactactgtgctc

SEQ ID NO: 436829 - DNA, 59 bp, Artificial
  Synthetic oligonucleotide
gtcacgcaagggtttcccaccgagctgaaacctggcacaaatcaatttctgaccactga

SEQ ID NO: 436830 - DNA, 60 bp, Artificial
  Synthetic oligonucleotide
gtcacgcaagtatgacgtgtgcggttttgtataaaacggtagcagcagtggagagcggca

SEQ ID NO: 436831 - DNA, 55 bp, Artificial
  Synthetic oligonucleotide
gtcacgcagtctgatgttgcaagtgtactttcaagagtagtttctgtgagacatc

SEQ ID NO: 436832 - DNA, 55 bp, Artificial
  Synthetic oligonucleotide
gtcacgcagtggggtcaacgtgcgcactttgcctacgtgacttcaacaacgtgcg

SEQ ID NO: 436833 - DNA, 55 bp, Artificial
  Synthetic oligonucleotide
gtcacgccacagattgaaaagaatctatcttgggttgcacttcaaggcactaatg

SEQ ID NO: 436834 - DNA, 55 bp, Artificial
  Synthetic oligonucleotide
gtcacgcctgttatcgtcactatggcttcttcactcagagcagcgatctccaaga

SEQ ID NO: 436835 - DNA, 55 bp, Artificial
  Synthetic oligonucleotide
gtcacgctacccctcatctaacttattcgctttcgctccaccaatactcgccgcg

SEQ ID NO: 436836 - DNA, 55 bp, Artificial
  Synthetic oligonucleotide
gtcacgctactatggagccggacggccttactcattgccacctgatcccaagcat

SEQ ID NO: 436837 - DNA, 60 bp, Artificial
  Synthetic oligonucleotide
gtcacgcttgcacagtgtgttgggcacagcaaatgccccactgagcatcttcgaggcaat

SEQ ID NO: 436838 - DNA, 59 bp, Artificial
  Synthetic oligonucleotide
gtcacggacacgcgcaacttttacgcaccactacccaacaatatccgcaccgtgtgcaa

SEQ ID NO: 436839 - DNA, 60 bp, Artificial
  Synthetic oligonucleotide
gtcacggacggtggtgttggtagcatacaacgaggagctctgtatatgtgcattgcccct

SEQ ID NO: 436840 - DNA, 55 bp, Artificial
  Synthetic oligonucleotide
gtcacggacttcacccatgccctgatgtcgttcatgtcagcgaccgtagtgtcag

SEQ ID NO: 436841 - DNA, 58 bp, Artificial
  Synthetic oligonucleotide
gtcacggatatttcctcctcgcacgctgcccagagggcgactctatcaccatggagtt

SEQ ID NO: 436842 - DNA, 58 bp, Artificial
  Synthetic oligonucleotide
gtcacggcagccattttgtcgtgacgtttgagacacgtgatgggggcgtgcctaaacc

SEQ ID NO: 436843 - DNA, 55 bp, Artificial
  Synthetic oligonucleotide
gtcacggccggctatgggcctgtgtgcagcaaggtatatgcggcgcacttgcagt

SEQ ID NO: 436844 - DNA, 55 bp, Artificial
  Synthetic oligonucleotide
gtcacgggacgttcaaggagagtgataactgatacaaaagcagtccgagacaggt

SEQ ID NO: 436845 - DNA, 60 bp, Artificial
  Synthetic oligonucleotide
gtcacggtggaggagcctaccaccatgaattcagctccttagagtggctcaaggctggcc

SEQ ID NO: 436846 - DNA, 60 bp, Artificial
  Synthetic oligonucleotide
gtcacgtacagtttggccgaatggagttggtgaaatgcgagtaagggatgcatacaacac

SEQ ID NO: 436847 - DNA, 57 bp, Artificial
  Synthetic oligonucleotide
gtcacgtactaaacaatgtcaacggtatgacggaaggcaccggcaggtatggattcc

SEQ ID NO: 436848 - DNA, 55 bp, Artificial
  Synthetic oligonucleotide
gtcacgtacttgtgtccttagttgccccacgctgttctgtcagtgtggtgtgtgg

SEQ ID NO: 436849 - DNA, 56 bp, Artificial
  Synthetic oligonucleotide
gtcacgtataataaactgtttgcgtgttttatttgggcgtggttagtaggcatata

SEQ ID NO: 436850 - DNA, 55 bp, Artificial
  Synthetic oligonucleotide
gtcacgtatagtgacaataacacttccagttgcgttgtatggcacttggttacga

SEQ ID NO: 436851 - DNA, 55 bp, Artificial
  Synthetic oligonucleotide
gtcacgtatagtgaccactactgttcccttggcgttaaaggggacttgatccctg

SEQ ID NO: 436852 - DNA, 55 bp, Artificial
  Synthetic oligonucleotide
gtcacgtatggtgactataactgatccagtggcgttaaacgggacttggttacgg

SEQ ID NO: 436853 - DNA, 55 bp, Artificial
  Synthetic oligonucleotide
gtcacgtcgttgtgtatgctcattggaaatgcaacagttatacccagcccgcaga

SEQ ID NO: 436854 - DNA, 60 bp, Artificial
  Synthetic oligonucleotide
gtcacgtctaatctcactggacgaacatccactttggaggcagatgttggaagcttacgg

SEQ ID NO: 436855 - DNA, 56 bp, Artificial
  Synthetic oligonucleotide
gtcacgtctctccccattgattatgcgatctgttatcttcatgccgtggcttgtgt

SEQ ID NO: 436856 - DNA, 54 bp, Artificial
  Synthetic oligonucleotide
gtcacgtgaaataccatgggaccccttttcgtcacacacgtctttccgcttacc

SEQ ID NO: 436857 - DNA, 59 bp, Artificial
  Synthetic oligonucleotide
gtcacgtgaccccttctagagcacgtgcacgtgcattgaagtaccccgtgtcccgtaga

SEQ ID NO: 436858 - DNA, 58 bp, Artificial
  Synthetic oligonucleotide
gtcacgtgggggcagctgctgtaaacccggaagtagctgacccgcgtgactggtcacg

SEQ ID NO: 436859 - DNA, 60 bp, Artificial
  Synthetic oligonucleotide
gtcactaaggctctagacaaattaactgagttgcataattcagtaataatgtcaggggca

SEQ ID NO: 436860 - DNA, 55 bp, Artificial
  Synthetic oligonucleotide
gtcactacactccgttttgaagtccaaggccatttcggctgaggatcagagtgcc

SEQ ID NO: 436861 - DNA, 60 bp, Artificial
  Synthetic oligonucleotide
gtcactacagaaatctgagtttgcagatgagccttggacattagtggacacaagtataga

SEQ ID NO: 436862 - DNA, 60 bp, Artificial
  Synthetic oligonucleotide
gtcactacttaagaaagcacgacgtcaagatgttcttagaatgccagtatctgaacatgc

SEQ ID NO: 436863 - DNA, 60 bp, Artificial
  Synthetic oligonucleotide
gtcactagagaatgacataaaagatgagtatgaggtggaagactttgacttgtctgacat

SEQ ID NO: 436864 - DNA, 51 bp, Artificial
  Synthetic oligonucleotide
gtcactagtttgactagtgaattagcatcattgactttgagagtgactact

SEQ ID NO: 436865 - DNA, 55 bp, Artificial
  Synthetic oligonucleotide
gtcactatatattgtgcccataaggatatctcccacttgtggaaaaggatccatt

SEQ ID NO: 436866 - DNA, 58 bp, Artificial
  Synthetic oligonucleotide
gtcactatatgaaagtgtttagagctccatttcatttttggctggtgtacgacaagtc

SEQ ID NO: 436867 - DNA, 58 bp, Artificial
  Synthetic oligonucleotide
gtcactatcaaccaatcaaattgcatcctcaaacgttaaataatcgttcatttgtctt

SEQ ID NO: 436868 - DNA, 60 bp, Artificial
  Synthetic oligonucleotide
gtcactatggggctgaccagacgtatgaggctcttcgcgtcagttccatgttcatccgtg

SEQ ID NO: 436869 - DNA, 60 bp, Artificial
  Synthetic oligonucleotide
gtcactattggtccctctggcttgatcgagtatttcaattgtacttctcatgatgagaac

SEQ ID NO: 436870 - DNA, 55 bp, Artificial
  Synthetic oligonucleotide
gtcactattgtgtctgccgcaccaatagaggaaattggccagtccacagctttct

SEQ ID NO: 436871 - DNA, 55 bp, Artificial
  Synthetic oligonucleotide
gtcactcaactggctgtgagtagcccagttatcactagatgctttcatggtgggc

SEQ ID NO: 436872 - DNA, 53 bp, Artificial
  Synthetic oligonucleotide
gtcactcaagtcgtggacttcagcttagaccccactttcactataaccacaca

SEQ ID NO: 436873 - DNA, 56 bp, Artificial
  Synthetic oligonucleotide
gtcactcactaacctgttgtcctccaatctgtcctggttatcgctggatgtgtctg

SEQ ID NO: 436874 - DNA, 60 bp, Artificial
  Synthetic oligonucleotide
gtcactcagaatggaggaagtaatgcctgcaaaagagggcctgctagtggtttcttcagc

SEQ ID NO: 436875 - DNA, 60 bp, Artificial
  Synthetic oligonucleotide
gtcactcagccgtcacattttcgttctggtgtgttcactgagctaacacatgttcgaatg

SEQ ID NO: 436876 - DNA, 60 bp, Artificial
  Synthetic oligonucleotide
gtcactcctattagtgccatggttataggtgaatcaagtgaggtgtacacactagatgat

SEQ ID NO: 436877 - DNA, 55 bp, Artificial
  Synthetic oligonucleotide
gtcactcgacattcaactagaatagctgatacacctgggcccaagattaccaacc

SEQ ID NO: 436878 - DNA, 53 bp, Artificial
  Synthetic oligonucleotide
gtcactcgattgttttctttactcattacagctggagtccaagaagttgtgta

SEQ ID NO: 436879 - DNA, 54 bp, Artificial
  Synthetic oligonucleotide
gtcactcgcggtacggggttaacacatagagttggtaagcggttttgtgtcaag

SEQ ID NO: 436880 - DNA, 58 bp, Artificial
  Synthetic oligonucleotide
gtcactcgttatatattaactagtgacgtcactcgttatacattaacccattacgtca

SEQ ID NO: 436881 - DNA, 55 bp, Artificial
  Synthetic oligonucleotide
gtcactctaaaatgtggaaatgttagcagtaatggtactggtacctacaatgaga

SEQ ID NO: 436882 - DNA, 50 bp, Artificial
  Synthetic oligonucleotide
gtcactctcactccacattataaggctctgctcactgggtgcctctggtg

SEQ ID NO: 436883 - DNA, 52 bp, Artificial
  Synthetic oligonucleotide
gtcactctcaggttttcatcaaggtaatgttctgttaattatgatgccgtca

SEQ ID NO: 436884 - DNA, 60 bp, Artificial
  Synthetic oligonucleotide
gtcactctttcgctgaggcccagcagttgttagttcaaagggagctagcgtatgcttgag

SEQ ID NO: 436885 - DNA, 59 bp, Artificial
  Synthetic oligonucleotide
gtcactgaaaccagtcgcctatcgtccagtattgcggagggtatcagtcggtggctaat

SEQ ID NO: 436886 - DNA, 55 bp, Artificial
  Synthetic oligonucleotide
gtcactgaattgtgacaggatagagaacaaaggcatgcagttcgtctctgatgca

SEQ ID NO: 436887 - DNA, 60 bp, Artificial
  Synthetic oligonucleotide
gtcactgagactggcagtgctgtgcggagacacagacataagacgtctacaggagcttct

SEQ ID NO: 436888 - DNA, 58 bp, Artificial
  Synthetic oligonucleotide
gtcactgcccaggaattagtggaatcgcaacatctaccggaattgtgtcctagtcccc

SEQ ID NO: 436889 - DNA, 55 bp, Artificial
  Synthetic oligonucleotide
gtcactggactgcacacaggatctgcggggcccaaaactcctagcgcaaagctgg

SEQ ID NO: 436890 - DNA, 55 bp, Artificial
  Synthetic oligonucleotide
gtcactgggcaactagttgaaggccaatgctttaatccctcacacacgctaacac

SEQ ID NO: 436891 - DNA, 55 bp, Artificial
  Synthetic oligonucleotide
gtcactggtgcatatgtctattttacaaactcgttcttcggaacgacaatagctg

SEQ ID NO: 436892 - DNA, 56 bp, Artificial
  Synthetic oligonucleotide
gtcacttaaagcaggtatttcgcaaattgcacaatcttttggagatttaacatcta

SEQ ID NO: 436893 - DNA, 59 bp, Artificial
  Synthetic oligonucleotide
gtcacttcattcaaccccacccgaggtttcattcgcgcgtcactgactcaccctcagaa

SEQ ID NO: 436894 - DNA, 55 bp, Artificial
  Synthetic oligonucleotide
gtcacttccaacgggtggtacgcgattgatgacgaagacttctacccgtggacgc

SEQ ID NO: 436895 - DNA, 60 bp, Artificial
  Synthetic oligonucleotide
gtcacttccaactttgccggaccgaacgagcgggctgcgcgttccattggtgcgctgcgc

SEQ ID NO: 436896 - DNA, 59 bp, Artificial
  Synthetic oligonucleotide
gtcacttcgttgatatggggtatttgaacgagtctaggatcttcctgttgtgtctacca

SEQ ID NO: 436897 - DNA, 59 bp, Artificial
  Synthetic oligonucleotide
gtcacttggtgtaccagacatagactcatctgcttatatagaatcgcgtgtttacaacc

SEQ ID NO: 436898 - DNA, 56 bp, Artificial
  Synthetic oligonucleotide
gtcacttgtgggaaagacctactggtgtgtgacaccatgggccggacgagggtcgt

SEQ ID NO: 436899 - DNA, 60 bp, Artificial
  Synthetic oligonucleotide
gtcactttcagagtggttccattccattcagtacctgacaagctagggtttgcacgcaca

SEQ ID NO: 436900 - DNA, 51 bp, Artificial
  Synthetic oligonucleotide
gtcacttttgacccaattcctatacgttactgtactccagctggatttgcg

SEQ ID NO: 436901 - DNA, 60 bp, Artificial
  Synthetic oligonucleotide
gtcacttttggctgcaaccgttatctgattgcaaggtagccatgttagacgatgccactc

SEQ ID NO: 436902 - DNA, 54 bp, Artificial
  Synthetic oligonucleotide
gtcacttttgggaatcgactaatccgttctgtggcgaggggaccctttacacta

SEQ ID NO: 436903 - DNA, 58 bp, Artificial
  Synthetic oligonucleotide
gtcagaaaacgaagcggatatgccaacagcgatccttattgacggggctttcttcatc

SEQ ID NO: 436904 - DNA, 55 bp, Artificial
  Synthetic oligonucleotide
gtcagaaaataactagattaggtaagcgagccttttagcaatactggcagttcga

SEQ ID NO: 436905 - DNA, 55 bp, Artificial
  Synthetic oligonucleotide
gtcagaacataactgaggagttttaccaatcgacatgtagtgcagttagcagagg

SEQ ID NO: 436906 - DNA, 60 bp, Artificial
  Synthetic oligonucleotide
gtcagaaccttttaacatgtggaacaataacatggtagaacaaatgcatgaggatataat

SEQ ID NO: 436907 - DNA, 51 bp, Artificial
  Synthetic oligonucleotide
gtcagaagaactgcagtacaatttacctatagtcaatatactgcctcatta

SEQ ID NO: 436908 - DNA, 55 bp, Artificial
  Synthetic oligonucleotide
gtcagaagaatgctaaaggacaatgccaaagatgaggggaacggatgcttcacct

SEQ ID NO: 436909 - DNA, 52 bp, Artificial
  Synthetic oligonucleotide
gtcagaagcatttctccccccgttcggaatctcaggaaaagtcctgttcaga

SEQ ID NO: 436910 - DNA, 55 bp, Artificial
  Synthetic oligonucleotide
gtcagaaggattctagtatatggagatcaagatgatgctctagctgcagtgaagg

SEQ ID NO: 436911 - DNA, 60 bp, Artificial
  Synthetic oligonucleotide
gtcagaaggggattgggagccatatggcaagatgctcggagaactgtattaaaatggttg

SEQ ID NO: 436912 - DNA, 57 bp, Artificial
  Synthetic oligonucleotide
gtcagaatactcatcggatgatgaatctcttgcgccaggtctcccatcaaagcgaaa

SEQ ID NO: 436913 - DNA, 56 bp, Artificial
  Synthetic oligonucleotide
gtcagaatgggtggacgtcttcgagacttcagatgcattgaccgtctccattcgag

SEQ ID NO: 436914 - DNA, 56 bp, Artificial
  Synthetic oligonucleotide
gtcagaattctgtggcacgccgcatgctagggttgcaaacccagactgtcgactct

SEQ ID NO: 436915 - DNA, 55 bp, Artificial
  Synthetic oligonucleotide
gtcagacaagctctacggctgaagatagtagtagtgtgagcgacactaccatcgc

SEQ ID NO: 436916 - DNA, 55 bp, Artificial
  Synthetic oligonucleotide
gtcagacaagtatggggtagagcttttcattacatcctgttagaaggattggtcg

SEQ ID NO: 436917 - DNA, 58 bp, Artificial
  Synthetic oligonucleotide
gtcagacacgaaataacactcatcttcttgatctggtctaggttttccagacaaaaag

SEQ ID NO: 436918 - DNA, 55 bp, Artificial
  Synthetic oligonucleotide
gtcagacagtcaccatcctggcttcttgccactacgattgtaccttacctctggc

SEQ ID NO: 436919 - DNA, 57 bp, Artificial
  Synthetic oligonucleotide
gtcagacatgttacttgactaccaagctcctgcaggcactggttctctacctttcgg

SEQ ID NO: 436920 - DNA, 60 bp, Artificial
  Synthetic oligonucleotide
gtcagacccacgactctcttataccatgctaggagaaatcttgaattactacacacattg

SEQ ID NO: 436921 - DNA, 60 bp, Artificial
  Synthetic oligonucleotide
gtcagaccccccagcacaggtctcagtcccgttcatgtcacctgcgagcgcctaccaatg

SEQ ID NO: 436922 - DNA, 55 bp, Artificial
  Synthetic oligonucleotide
gtcagaccgaataggtccatgaggtcctggagacggttctcggcatcggagccgg

SEQ ID NO: 436923 - DNA, 53 bp, Artificial
  Synthetic oligonucleotide
gtcagaccgcaggtacctttgagaccaatgacttataaagcggccgttgatct

SEQ ID NO: 436924 - DNA, 55 bp, Artificial
  Synthetic oligonucleotide
gtcagaccgtaccaccgatagtgggtttgcggtcagttttccgagcgtcgcctcc

SEQ ID NO: 436925 - DNA, 55 bp, Artificial
  Synthetic oligonucleotide
gtcagaccgtcggaggttgtggctgaggaaatagtggaagaggtggtggtggaat

SEQ ID NO: 436926 - DNA, 55 bp, Artificial
  Synthetic oligonucleotide
gtcagacctgccaaacaactgtgtaacttcgacctgttaaagttggccggagacg

SEQ ID NO: 436927 - DNA, 55 bp, Artificial
  Synthetic oligonucleotide
gtcagacctgtgttccgttagtctggtgcaacttaacctgaccgcagcagacttg

SEQ ID NO: 436928 - DNA, 60 bp, Artificial
  Synthetic oligonucleotide
gtcagacgatattcgtccctatgtgattctatgtaattaaaagaactaggagcttgagct

SEQ ID NO: 436929 - DNA, 60 bp, Artificial
  Synthetic oligonucleotide
gtcagacgcagcatcatcagcatcaagaagcgtttctattagatcgaatatatccacaat

SEQ ID NO: 436930 - DNA, 55 bp, Artificial
  Synthetic oligonucleotide
gtcagacggaaatctacaagataataatccctcgagtcaaaatcaagggcaatct

SEQ ID NO: 436931 - DNA, 59 bp, Artificial
  Synthetic oligonucleotide
gtcagactatcctaccccagtgtccatcgttgggtgtggctgggaggcgtcatacgcta

SEQ ID NO: 436932 - DNA, 55 bp, Artificial
  Synthetic oligonucleotide
gtcagactcattcaagccaagacaggatgtagcagaaggtgaggcatcatctctg

SEQ ID NO: 436933 - DNA, 56 bp, Artificial
  Synthetic oligonucleotide
gtcagactccattgtttattacatgtattgggaagaggttttggtcgttaatgaaa

SEQ ID NO: 436934 - DNA, 55 bp, Artificial
  Synthetic oligonucleotide
gtcagacttgtacgaggtcacctcccactaccttcccaaggaaaaccctgtcaca

SEQ ID NO: 436935 - DNA, 55 bp, Artificial
  Synthetic oligonucleotide
gtcagagaccagcaagggaacgtgctattgtctcccgaagaagtcagtgaaacac

SEQ ID NO: 436936 - DNA, 51 bp, Artificial
  Synthetic oligonucleotide
gtcagagagttgtcatggaggagtccgtgtcgtctgtgtatggatacacag

SEQ ID NO: 436937 - DNA, 56 bp, Artificial
  Synthetic oligonucleotide
gtcagagataccttacttccaggctatggaacaagggcccggtgattggttggcgg

SEQ ID NO: 436938 - DNA, 60 bp, Artificial
  Synthetic oligonucleotide
gtcagagattgacgacattggctgggctaagacacaggcgtatttggtcactgatagcaa

SEQ ID NO: 436939 - DNA, 55 bp, Artificial
  Synthetic oligonucleotide
gtcagagcgtattcaacgcgatttgactgtatatagcctccaacgcccatcacca

SEQ ID NO: 436940 - DNA, 50 bp, Artificial
  Synthetic oligonucleotide
gtcagagctcgcagatttgatactgaatgaatggttgtgcaacccaatgg

SEQ ID NO: 436941 - DNA, 50 bp, Artificial
  Synthetic oligonucleotide
gtcagaggaagaggttagaagaaggctaaccgcaagaggccttcttaaca

SEQ ID NO: 436942 - DNA, 59 bp, Artificial
  Synthetic oligonucleotide
gtcagaggacccgattgaactatcttgcaactctcccctgtatatcgggtccctatata

SEQ ID NO: 436943 - DNA, 60 bp, Artificial
  Synthetic oligonucleotide
gtcagaggagcagtagactggagcgttgatgcgattttggtcagtttcaggaaacatttt

SEQ ID NO: 436944 - DNA, 55 bp, Artificial
  Synthetic oligonucleotide
gtcagaggtgctgcggtgtcctcggcttgtcttagtgacatatccattccgtaga

SEQ ID NO: 436945 - DNA, 55 bp, Artificial
  Synthetic oligonucleotide
gtcagagtagttcaataaggacctatcaagtttgggcaatttttcgtccccgaca

SEQ ID NO: 436946 - DNA, 60 bp, Artificial
  Synthetic oligonucleotide
gtcagagtatggtagtgattctgtgtactataaaagtactagcactactaagctggcacc

SEQ ID NO: 436947 - DNA, 55 bp, Artificial
  Synthetic oligonucleotide
gtcagagtccacaatagaatcattcttcgcacgcggggcgtgcgtcgctattatt

SEQ ID NO: 436948 - DNA, 60 bp, Artificial
  Synthetic oligonucleotide
gtcagagtgcgtttgcatcaatggaacttgcacagtagtaatgactgatggaagtgcatc

SEQ ID NO: 436949 - DNA, 60 bp, Artificial
  Synthetic oligonucleotide
gtcagatactatgtctaaggcatctacttttgtatcgtttgaccttgattatgtcggatg

SEQ ID NO: 436950 - DNA, 59 bp, Artificial
  Synthetic oligonucleotide
gtcagatagattagtccttgcgaaggggctcaggaatgtcccacaaagagaaacaagag

SEQ ID NO: 436951 - DNA, 59 bp, Artificial
  Synthetic oligonucleotide
gtcagatcactaatgatgaataaagctttgtcacttatgtcaaccagaaacctatttgg

SEQ ID NO: 436952 - DNA, 54 bp, Artificial
  Synthetic oligonucleotide
gtcagatccgaaaaccttgagagatttcgtaaatcaaaataacccaataattag

SEQ ID NO: 436953 - DNA, 60 bp, Artificial
  Synthetic oligonucleotide
gtcagatctaagaggatatgtctaccaaggcctcaaatccggaaatgtatcaatcataca

SEQ ID NO: 436954 - DNA, 55 bp, Artificial
  Synthetic oligonucleotide
gtcagatctacgcagggatcaaagtaaagcacttatgtaaactccttaggggaac

SEQ ID NO: 436955 - DNA, 55 bp, Artificial
  Synthetic oligonucleotide
gtcagatgcaatagtcatcactaccaatgccccagggcccgcccctgtggacttc

SEQ ID NO: 436956 - DNA, 55 bp, Artificial
  Synthetic oligonucleotide
gtcagatgctaaagcatatgagagggaggtgcataatgtttgggctacacatgcc

SEQ ID NO: 436957 - DNA, 53 bp, Artificial
  Synthetic oligonucleotide
gtcagatggatcaatctttcgctgctaaccagatcgcacgtgctcaagataag

SEQ ID NO: 436958 - DNA, 55 bp, Artificial
  Synthetic oligonucleotide
gtcagatggatcgatatataaccatagaaccactgggttatatgcgtggtcggac

SEQ ID NO: 436959 - DNA, 55 bp, Artificial
  Synthetic oligonucleotide
gtcagatggcttgccttcacagattacattaccgggacaggtcttgagattaagt

SEQ ID NO: 436960 - DNA, 55 bp, Artificial
  Synthetic oligonucleotide
gtcagatgtcctttaaagatgatcgcattaatttgccatgtggaacaagtgtaca

SEQ ID NO: 436961 - DNA, 59 bp, Artificial
  Synthetic oligonucleotide
gtcagattagttttacttcaaagtttatggcattctattcacattaatggtggagatgt

SEQ ID NO: 436962 - DNA, 55 bp, Artificial
  Synthetic oligonucleotide
gtcagattcgatgacgaggcccggaagtacggaacaacaggacagtgggcagtga

SEQ ID NO: 436963 - DNA, 60 bp, Artificial
  Synthetic oligonucleotide
gtcagattcttggttgaagaaatttactgagatgtgcaatgcagctagaggcctagaatg

SEQ ID NO: 436964 - DNA, 60 bp, Artificial
  Synthetic oligonucleotide
gtcagattgagaaagaccatatgatacctcaaggcatggtaagaactgtgcatgtctttt

SEQ ID NO: 436965 - DNA, 55 bp, Artificial
  Synthetic oligonucleotide
gtcagattgcgtattacttttacaacccggatgcagctgatgattggatagatcc

SEQ ID NO: 436966 - DNA, 60 bp, Artificial
  Synthetic oligonucleotide
gtcagattggccggagatcctgacatcaacgggtcaaagttaaccggcgtgatgatcagc

SEQ ID NO: 436967 - DNA, 53 bp, Artificial
  Synthetic oligonucleotide
gtcagatttacccagggattaaggtaaagcaactttgtaaactccttagagga

SEQ ID NO: 436968 - DNA, 50 bp, Artificial
  Synthetic oligonucleotide
gtcagatttacccagggattagagtaagacacttgtgtaaactacttagg

SEQ ID NO: 436969 - DNA, 50 bp, Artificial
  Synthetic oligonucleotide
gtcagatttacccagggattagggtaaagtacctttgtaaactccttagg

SEQ ID NO: 436970 - DNA, 54 bp, Artificial
  Synthetic oligonucleotide
gtcagcaaataatagaacaattgcaaccagctatccagacaggaacagaagaac

SEQ ID NO: 436971 - DNA, 60 bp, Artificial
  Synthetic oligonucleotide
gtcagcaacctacgacacctctagagttgagcatgccattgtgtactatatctatagcac

SEQ ID NO: 436972 - DNA, 54 bp, Artificial
  Synthetic oligonucleotide
gtcagcaagatagcgtacacactgagcactgatttgtacgcaatacctaggact

SEQ ID NO: 436973 - DNA, 60 bp, Artificial
  Synthetic oligonucleotide
gtcagcaataacgcgccatcgcggctcaagttgccaaatacgtttgatcaataatccctc

SEQ ID NO: 436974 - DNA, 53 bp, Artificial
  Synthetic oligonucleotide
gtcagcaattaatggaacagttccaatcaactcttagtacaggatcagaagaa

SEQ ID NO: 436975 - DNA, 55 bp, Artificial
  Synthetic oligonucleotide
gtcagcacagtgcaatgcacacatgggatcaagccagtagtatcaactcaaatgc

SEQ ID NO: 436976 - DNA, 55 bp, Artificial
  Synthetic oligonucleotide
gtcagcacatggagtgactatgactgttgacttttgagtctgttgtgctactggc

SEQ ID NO: 436977 - DNA, 55 bp, Artificial
  Synthetic oligonucleotide
gtcagcagaaaacaacatcatgcccaactctcaagcttttgtcaaagcttccact

SEQ ID NO: 436978 - DNA, 55 bp, Artificial
  Synthetic oligonucleotide
gtcagcataaacgaacagatgattgcagaaggttacgcttggagttatgatggtg

SEQ ID NO: 436979 - DNA, 55 bp, Artificial
  Synthetic oligonucleotide
gtcagcataggagatatgtggggaccaaccattctagtccatgcaggcggtcaca

SEQ ID NO: 436980 - DNA, 55 bp, Artificial
  Synthetic oligonucleotide
gtcagcattaaatggtgaagtcacaattaagcaggagaagtggaatggcaattgg

SEQ ID NO: 436981 - DNA, 60 bp, Artificial
  Synthetic oligonucleotide
gtcagcattacagtaacagtactggtcctcagtaacaatgtgacaggtccgaattgcaac

SEQ ID NO: 436982 - DNA, 50 bp, Artificial
  Synthetic oligonucleotide
gtcagcattaccgtggccctattttcatacgtctgcttattcaacggcac

SEQ ID NO: 436983 - DNA, 55 bp, Artificial
  Synthetic oligonucleotide
gtcagcatttcgtcccgaagtggttttgaaatcctactaatagaagatggttggg

SEQ ID NO: 436984 - DNA, 60 bp, Artificial
  Synthetic oligonucleotide
gtcagccagcaaccatgtcttttcgtattccacgtgaagcctgtcaaacgctgttctgct

SEQ ID NO: 436985 - DNA, 55 bp, Artificial
  Synthetic oligonucleotide
gtcagccatatattaggggagtactggcggattatctaaacaagcgatttagagg

SEQ ID NO: 436986 - DNA, 60 bp, Artificial
  Synthetic oligonucleotide
gtcagcccactcttgcatctcgtcaggaacattagtgaatgaggaaagttgaaacggaga

SEQ ID NO: 436987 - DNA, 56 bp, Artificial
  Synthetic oligonucleotide
gtcagcccgacactacaaatgcgtggtttaagctcttttggttgtacgccaattac

SEQ ID NO: 436988 - DNA, 55 bp, Artificial
  Synthetic oligonucleotide
gtcagcccgacagtgttcatcacaaccacacatgtagtgccaactggtgtgaaag

SEQ ID NO: 436989 - DNA, 59 bp, Artificial
  Synthetic oligonucleotide
gtcagccgactaacacaactcccgttgcgccctgagtatggtaatatctgggttggcga

SEQ ID NO: 436990 - DNA, 60 bp, Artificial
  Synthetic oligonucleotide
gtcagccgtcttctctctggagcttgatgcaggtataggtgtaccatatatcgcctatgg

SEQ ID NO: 436991 - DNA, 59 bp, Artificial
  Synthetic oligonucleotide
gtcagcctaaaactccttgtactaagtgctattgtaaatactgtagttatcattgtcta

SEQ ID NO: 436992 - DNA, 55 bp, Artificial
  Synthetic oligonucleotide
gtcagcctgtagaagtactattggacacaggggctgacgactcaatagtggcggg

SEQ ID NO: 436993 - DNA, 55 bp, Artificial
  Synthetic oligonucleotide
gtcagccttacggtaagcttgtgcgctcggaagaagctagggtgataatggggca

SEQ ID NO: 436994 - DNA, 55 bp, Artificial
  Synthetic oligonucleotide
gtcagcctttgacaccatttacatctactccacttctgatccatctagtagagca

SEQ ID NO: 436995 - DNA, 60 bp, Artificial
  Synthetic oligonucleotide
gtcagcgaactatgtcactagactttgtgactaccaactacatgtcgctaatttcaggta

SEQ ID NO: 436996 - DNA, 50 bp, Artificial
  Synthetic oligonucleotide
gtcagcgatcaggaaagccatcttagggcagagagtactgaccaagtgtg

SEQ ID NO: 436997 - DNA, 60 bp, Artificial
  Synthetic oligonucleotide
gtcagcgatttgagacagtatgacagcgatgagcctgaaccaagatcactagcaagttgg

SEQ ID NO: 436998 - DNA, 59 bp, Artificial
  Synthetic oligonucleotide
gtcagcgcaaggcagtcctgtcgactcttgtcggcaggtacggccgccgtacgaagttg

SEQ ID NO: 436999 - DNA, 55 bp, Artificial
  Synthetic oligonucleotide
gtcagcgggtatatggccgaggtgaggctatagtcacagaacgtgtaacggggta

SEQ ID NO: 437000 - DNA, 60 bp, Artificial
  Synthetic oligonucleotide
gtcagctatgctatctaaaacattcaaagcagacacaaacatgtggtgtgatcgatgtgc

SEQ ID NO: 437001 - DNA, 60 bp, Artificial
  Synthetic oligonucleotide
gtcagctcctagtggtgctgtagaaaactgtattgttcaagttacatgtgggtctatgac

SEQ ID NO: 437002 - DNA, 55 bp, Artificial
  Synthetic oligonucleotide
gtcagctgataatgacgcaagtgctaaggttggtgttacgtgtagtgaagcgtgg

SEQ ID NO: 437003 - DNA, 55 bp, Artificial
  Synthetic oligonucleotide
gtcagctgcgatacttcttgcacccggtgacgtgatcatgcgttcatccgaggag

SEQ ID NO: 437004 - DNA, 60 bp, Artificial
  Synthetic oligonucleotide
gtcagctgcgatatcaatcccagcttgaatgggtgtatcctcatctatggatagccgaca

SEQ ID NO: 437005 - DNA, 55 bp, Artificial
  Synthetic oligonucleotide
gtcagcttccctctgacatggtgatctacgttatgaatgggtcgcccgatgctgc

SEQ ID NO: 437006 - DNA, 55 bp, Artificial
  Synthetic oligonucleotide
gtcagcttgtagcaaatacatacgacccggatacggtgggatacgatctcatacg

SEQ ID NO: 437007 - DNA, 58 bp, Artificial
  Synthetic oligonucleotide
gtcagctttaatggaggacatattgaagagtgttcttgctaccctaacgatgggaaag

SEQ ID NO: 437008 - DNA, 57 bp, Artificial
  Synthetic oligonucleotide
gtcaggaaatagggaccacaccctataaaatgaatatgttggcacaagctttgcaga

SEQ ID NO: 437009 - DNA, 52 bp, Artificial
  Synthetic oligonucleotide
gtcaggaaattgtgacacttacggttcgaacacctggtctgccgccttggcg

SEQ ID NO: 437010 - DNA, 51 bp, Artificial
  Synthetic oligonucleotide
gtcaggaacgacgacaatcttcgcaggacacctgaaatgcagactaaaaat

SEQ ID NO: 437011 - DNA, 60 bp, Artificial
  Synthetic oligonucleotide
gtcaggaagacatgttgagagcggacgttgaagcttagcggcagacttgccgcactctcc

SEQ ID NO: 437012 - DNA, 60 bp, Artificial
  Synthetic oligonucleotide
gtcaggaaggcagcctacgcccatatctccacctctaagggacactcatcctcaggccat

SEQ ID NO: 437013 - DNA, 60 bp, Artificial
  Synthetic oligonucleotide
gtcaggaagtgcatacccagtgttgaacgtgactatgccaaacaatgacaattttgacaa

SEQ ID NO: 437014 - DNA, 55 bp, Artificial
  Synthetic oligonucleotide
gtcaggaagtttctggatcttgaggactttcacgcccaaacttttggagttagta

SEQ ID NO: 437015 - DNA, 51 bp, Artificial
  Synthetic oligonucleotide
gtcaggaatgtggtgtaccgagcgacgcaattcgtgcggtagaagcagtga

SEQ ID NO: 437016 - DNA, 53 bp, Artificial
  Synthetic oligonucleotide
gtcaggaccggttttacgtaccacagaggccggattcacggacaccaacgtcc

SEQ ID NO: 437017 - DNA, 56 bp, Artificial
  Synthetic oligonucleotide
gtcaggacctaacacttcaggtcttgagacccgtgttcaacaggcagaacggttct

SEQ ID NO: 437018 - DNA, 57 bp, Artificial
  Synthetic oligonucleotide
gtcaggactaggggggccccgcgcgtagaccttcggcctcgctgctaccgctctcgc

SEQ ID NO: 437019 - DNA, 55 bp, Artificial
  Synthetic oligonucleotide
gtcaggagagcaacagtatcagcagacccattggcttcactcctggaaatgtgcc

SEQ ID NO: 437020 - DNA, 60 bp, Artificial
  Synthetic oligonucleotide
gtcaggagatacagccctaacactaccactgagggccaggtgaaagacaggctaaatctc

SEQ ID NO: 437021 - DNA, 55 bp, Artificial
  Synthetic oligonucleotide
gtcaggagccatgcttgaatatgctctttccagaagacccttagagaaggtcttc

SEQ ID NO: 437022 - DNA, 55 bp, Artificial
  Synthetic oligonucleotide
gtcaggagctacgtgggtggatgtggtgctggagcatggaagttgcgtcaccacc

SEQ ID NO: 437023 - DNA, 55 bp, Artificial
  Synthetic oligonucleotide
gtcaggaggtaaaattggatatagccactcagcatcaattaaacagactggggtc

SEQ ID NO: 437024 - DNA, 55 bp, Artificial
  Synthetic oligonucleotide
gtcaggagtacaaaattgaggatggttacaggactaaggaacatcccatccattc

SEQ ID NO: 437025 - DNA, 54 bp, Artificial
  Synthetic oligonucleotide
gtcaggagtcgcggtgtgtacggggtctggggggtttttcagagtctggacatt

SEQ ID NO: 437026 - DNA, 60 bp, Artificial
  Synthetic oligonucleotide
gtcaggatagagtccatgtaatcccctgtagaccttgtggtgtttgcctcaaacaccaca

SEQ ID NO: 437027 - DNA, 55 bp, Artificial
  Synthetic oligonucleotide
gtcaggatatagcgggagttttgtccagcatccggaactgacaggattagattgc

SEQ ID NO: 437028 - DNA, 55 bp, Artificial
  Synthetic oligonucleotide
gtcaggatgagttttgctacactctaattacagacggaccatccgatgcacaggc

SEQ ID NO: 437029 - DNA, 55 bp, Artificial
  Synthetic oligonucleotide
gtcaggatgccaatgaactattgggttgtaattcaagtgtatgtgaactattggt

SEQ ID NO: 437030 - DNA, 55 bp, Artificial
  Synthetic oligonucleotide
gtcaggcaatgtcaactatgtcaactggcgagtgctgggaagtatctaagaatgg

SEQ ID NO: 437031 - DNA, 55 bp, Artificial
  Synthetic oligonucleotide
gtcaggccaagcatgtgaaagattgctctgttatggtcaggcattatagaagagc

SEQ ID NO: 437032 - DNA, 55 bp, Artificial
  Synthetic oligonucleotide
gtcaggcctcggacttaatgctgtagcatattaccggggtctcgacgtgtctgtc

SEQ ID NO: 437033 - DNA, 57 bp, Artificial
  Synthetic oligonucleotide
gtcaggcgctacgatcgtttctgtccaagtcggatcgaacccgcagcaatataactg

SEQ ID NO: 437034 - DNA, 55 bp, Artificial
  Synthetic oligonucleotide
gtcaggcgtcgaggcgtctgtttgccgaaaagccacgcgagaaactctcacgccg

SEQ ID NO: 437035 - DNA, 55 bp, Artificial
  Synthetic oligonucleotide
gtcaggctactcaggtagcttcatcgtccaaactggtggatgtttccaaccgtgc

SEQ ID NO: 437036 - DNA, 60 bp, Artificial
  Synthetic oligonucleotide
gtcaggctagacaaatggtgcaagcgatgagaaccattggaactcatcctagctccagtg

SEQ ID NO: 437037 - DNA, 55 bp, Artificial
  Synthetic oligonucleotide
gtcaggctggtaatgaatattggctacatgcgggcaggatcgatagttcccgttg

SEQ ID NO: 437038 - DNA, 55 bp, Artificial
  Synthetic oligonucleotide
gtcaggctttgataagtgtgaatatgtaactgatgcgcaagccatattcaaggca

SEQ ID NO: 437039 - DNA, 60 bp, Artificial
  Synthetic oligonucleotide
gtcagggaattcagaggtgatgttgttcacgtctggattaagtgatttctcatcacatct

SEQ ID NO: 437040 - DNA, 60 bp, Artificial
  Synthetic oligonucleotide
gtcagggacaagctgtgcatgtgaatcttgaaatttgttatggttgtaatggtacactaa

SEQ ID NO: 437041 - DNA, 58 bp, Artificial
  Synthetic oligonucleotide
gtcagggacatcagttgggcgttccggagcttctggtattaagtcgacttctggatac

SEQ ID NO: 437042 - DNA, 56 bp, Artificial
  Synthetic oligonucleotide
gtcaggggaaagaactgctccaagagtttatctcgatgttgccctttgaattcaag

SEQ ID NO: 437043 - DNA, 55 bp, Artificial
  Synthetic oligonucleotide
gtcaggggtcctatacaggatctggcatcgagaagagtctacgatgacgcggtca

SEQ ID NO: 437044 - DNA, 60 bp, Artificial
  Synthetic oligonucleotide
gtcaggggtgtacagctgcagtgtgcgttgtcgcggcaagtcgagcgaatgtcgtctcag

SEQ ID NO: 437045 - DNA, 58 bp, Artificial
  Synthetic oligonucleotide
gtcaggggttggttactgaaagctgctctgtaagtcctgggggtgccatagttctgag

SEQ ID NO: 437046 - DNA, 53 bp, Artificial
  Synthetic oligonucleotide
gtcagggtgaaattccttacactttcttaaataggctttcctcattaagggaa

SEQ ID NO: 437047 - DNA, 56 bp, Artificial
  Synthetic oligonucleotide
gtcagggtggtctgatacagcacatggtgtaggtatagtccctatgagaacagatc

SEQ ID NO: 437048 - DNA, 59 bp, Artificial
  Synthetic oligonucleotide
gtcaggtacctggaatctccgattcattcgtcaactggattacgtcgcgagaatggacg

SEQ ID NO: 437049 - DNA, 56 bp, Artificial
  Synthetic oligonucleotide
gtcaggtacgtcggagcaactactgcttcgatacgcagtcatgtggacctattagt

SEQ ID NO: 437050 - DNA, 50 bp, Artificial
  Synthetic oligonucleotide
gtcaggtactacgccagaatggatacagcgattaacagtaatacagcatg

SEQ ID NO: 437051 - DNA, 50 bp, Artificial
  Synthetic oligonucleotide
gtcaggtcagtcaaaattatcctatagtgcagaacatacaggggcaaatg

SEQ ID NO: 437052 - DNA, 55 bp, Artificial
  Synthetic oligonucleotide
gtcaggtctgctggtaggggctctaatgtggttcctgaagcgcaagcccaggtac

SEQ ID NO: 437053 - DNA, 57 bp, Artificial
  Synthetic oligonucleotide
gtcaggtgcgggaaacactaaattggcgataccagttgtggaaaagtacactgagga

SEQ ID NO: 437054 - DNA, 55 bp, Artificial
  Synthetic oligonucleotide
gtcaggtggtggtagaaaatggtacagacgtatgtagctcacagaactcgagcac

SEQ ID NO: 437055 - DNA, 51 bp, Artificial
  Synthetic oligonucleotide
gtcaggtggttggccattcaatccaggcgcttcgcaccactttacgctaca

SEQ ID NO: 437056 - DNA, 54 bp, Artificial
  Synthetic oligonucleotide
gtcaggttagacgaactacccgccaatcaacatgtggtaaccgttaactcggtg

SEQ ID NO: 437057 - DNA, 58 bp, Artificial
  Synthetic oligonucleotide
gtcaggttcggcggtgtattgcgtactgtccgcgttaagttttatgatgcgcgaccac

SEQ ID NO: 437058 - DNA, 60 bp, Artificial
  Synthetic oligonucleotide
gtcagtaagcttcttggagttgatggccaaatgtacaaaacctgattggatctcggagag

SEQ ID NO: 437059 - DNA, 59 bp, Artificial
  Synthetic oligonucleotide
gtcagtaatggttcctacttgaatgagagtgattttagaaatgagtggatcttggaaag

SEQ ID NO: 437060 - DNA, 55 bp, Artificial
  Synthetic oligonucleotide
gtcagtacatggatgacttgtatgtaggatcagatttacccctgacagagcacag

SEQ ID NO: 437061 - DNA, 55 bp, Artificial
  Synthetic oligonucleotide
gtcagtaccggcggccccatgttccgagatcgggaagtcaaactgcctccggaag

SEQ ID NO: 437062 - DNA, 59 bp, Artificial
  Synthetic oligonucleotide
gtcagtacgccataaccgaccaaccagtcttcgtctcaggtgatgattccgttattgct

SEQ ID NO: 437063 - DNA, 55 bp, Artificial
  Synthetic oligonucleotide
gtcagtacggcagagtgtgcggcagtgcggtgtaccttccatgtcaactaggctc

SEQ ID NO: 437064 - DNA, 60 bp, Artificial
  Synthetic oligonucleotide
gtcagtacgtaagtgtcaactttgagagagtggattgtgcatcccgaatgcaccatgccc

SEQ ID NO: 437065 - DNA, 54 bp, Artificial
  Synthetic oligonucleotide
gtcagtagaagagattggaataacactttacaacaggtagctacaaaattaagg

SEQ ID NO: 437066 - DNA, 58 bp, Artificial
  Synthetic oligonucleotide
gtcagtagaccggatgctatgagtgaatccgatagtaacttgtataaagaggtgattg

SEQ ID NO: 437067 - DNA, 60 bp, Artificial
  Synthetic oligonucleotide
gtcagtagcccacaaatcgtgtctacctgcctgtgtgtatgcccttgcagtggccagtgg

SEQ ID NO: 437068 - DNA, 55 bp, Artificial
  Synthetic oligonucleotide
gtcagtagttcgacgtgagcactagcccacctcgagatgctacgtggacgagggc

SEQ ID NO: 437069 - DNA, 59 bp, Artificial
  Synthetic oligonucleotide
gtcagtagttggtgacactaacaactggtatgatacagtgactaccaaagtacgtgaat

SEQ ID NO: 437070 - DNA, 58 bp, Artificial
  Synthetic oligonucleotide
gtcagtatgcgagcaacgaacaagccttggttaggcgtttctggaaggtcaacaacca

SEQ ID NO: 437071 - DNA, 60 bp, Artificial
  Synthetic oligonucleotide
gtcagtattcaatagtttgtatgcatctccacaattagaaggattttcagctgaatcaag

SEQ ID NO: 437072 - DNA, 60 bp, Artificial
  Synthetic oligonucleotide
gtcagtcaaaattatcctatagtgcagaacctccaagggcaaatggtacaccaggccata

SEQ ID NO: 437073 - DNA, 55 bp, Artificial
  Synthetic oligonucleotide
gtcagtcaaataatagagcagctaataaacaaggaaagggtctacctgtcatggg

SEQ ID NO: 437074 - DNA, 60 bp, Artificial
  Synthetic oligonucleotide
gtcagtcaaataatcagtcaacatctcccgccattagtgtgtcaatcccagatcaaccat

SEQ ID NO: 437075 - DNA, 55 bp, Artificial
  Synthetic oligonucleotide
gtcagtcacaagaccgcacatcgttatatgattcaattagaaaccaaaggacaca

SEQ ID NO: 437076 - DNA, 55 bp, Artificial
  Synthetic oligonucleotide
gtcagtcaggcaagcctatgacatggtaatgcctagaagtaaagaaaggttagtc

SEQ ID NO: 437077 - DNA, 55 bp, Artificial
  Synthetic oligonucleotide
gtcagtcataggtgtgagtatcaagcaggacatagcaaggtaggatccttacagt

SEQ ID NO: 437078 - DNA, 59 bp, Artificial
  Synthetic oligonucleotide
gtcagtctaagggccggtccgacggctcagacgtgtcgaccgaagcacagctagcggcc

SEQ ID NO: 437079 - DNA, 58 bp, Artificial
  Synthetic oligonucleotide
gtcagtctcacatcagtcacaggggttaggagaaggtgggggttttgttgtggctgga

SEQ ID NO: 437080 - DNA, 60 bp, Artificial
  Synthetic oligonucleotide
gtcagtctcgttaaaagtgaccagatttgcattggttaccatgcaaacaactcgacagag

SEQ ID NO: 437081 - DNA, 54 bp, Artificial
  Synthetic oligonucleotide
gtcagtgaagaaggaccacttaatccaggaataaacccctttagacaaccagga

SEQ ID NO: 437082 - DNA, 60 bp, Artificial
  Synthetic oligonucleotide
gtcagtgacgaggcacatgtatgagttattcgggtgtaacggtatcgagtatcgttaggc

SEQ ID NO: 437083 - DNA, 60 bp, Artificial
  Synthetic oligonucleotide
gtcagtgatcatagagtctggtgatccaaatgctctcttgaagcacagatttgagataat

SEQ ID NO: 437084 - DNA, 53 bp, Artificial
  Synthetic oligonucleotide
gtcagtgcaagaaggatattaccatagcactgtcacgaggggaacgcagtacc

SEQ ID NO: 437085 - DNA, 60 bp, Artificial
  Synthetic oligonucleotide
gtcagtgcctgcaggagacaagcccatttactcgggaagtgcaccacacctgcgtacaat

SEQ ID NO: 437086 - DNA, 55 bp, Artificial
  Synthetic oligonucleotide
gtcagtgcggtggcgtccttatgtccaccggtaaggtactggggatccacgtcgg

SEQ ID NO: 437087 - DNA, 60 bp, Artificial
  Synthetic oligonucleotide
gtcagttagatcatgagacagctgatattcgtctctatgagactcaatgtaattaaacgc

SEQ ID NO: 437088 - DNA, 54 bp, Artificial
  Synthetic oligonucleotide
gtcagttagcaccgacctagggaaatacgccgccctaggtttcaaagtcgagga

SEQ ID NO: 437089 - DNA, 55 bp, Artificial
  Synthetic oligonucleotide
gtcagttaggcaaactgccgtctccgtccgacatgtctaagcaaaccggctgccc

SEQ ID NO: 437090 - DNA, 55 bp, Artificial
  Synthetic oligonucleotide
gtcagttagttttagacgactgagtcatttcagaaagcttgtcccgggttttgga

SEQ ID NO: 437091 - DNA, 55 bp, Artificial
  Synthetic oligonucleotide
gtcagttcacccttccttgggcaactgaattcattggtgtcttccatgttacaac

SEQ ID NO: 437092 - DNA, 54 bp, Artificial
  Synthetic oligonucleotide
gtcagttctagtaccacttcttagtttagcaccaccgtaaatttcagtttccca

SEQ ID NO: 437093 - DNA, 56 bp, Artificial
  Synthetic oligonucleotide
gtcagttctcagatcctgtttctgaggggttgtcattctggagggaaatttggcta

SEQ ID NO: 437094 - DNA, 55 bp, Artificial
  Synthetic oligonucleotide
gtcagttggaactcttccaaacggtcatccagactatcgtatccagaagtttcac

SEQ ID NO: 437095 - DNA, 55 bp, Artificial
  Synthetic oligonucleotide
gtcagtttctccaagtcagacaggtttgggtatttcactgtatacacaagcccca

SEQ ID NO: 437096 - DNA, 55 bp, Artificial
  Synthetic oligonucleotide
gtcagttttggagtctcatcctttctctgtaggtaacagagggtctagtccgcct

SEQ ID NO: 437097 - DNA, 54 bp, Artificial
  Synthetic oligonucleotide
gtcataaagttgagtgggataacgactactgttatacctacgggactgactgtc

SEQ ID NO: 437098 - DNA, 57 bp, Artificial
  Synthetic oligonucleotide
gtcataaatgggagtccgccaacccgttttgcggggagagcacactctatacccgca

SEQ ID NO: 437099 - DNA, 60 bp, Artificial
  Synthetic oligonucleotide
gtcataaatgtatatcaatccagaccaaatgaagatatattaatctctaagacgtcattg

SEQ ID NO: 437100 - DNA, 55 bp, Artificial
  Synthetic oligonucleotide
gtcataacagcaaagatgttacaacaaccaggaggaggatataccacactagaac

SEQ ID NO: 437101 - DNA, 55 bp, Artificial
  Synthetic oligonucleotide
gtcataaccggcgtgacagtcgtcgctcaactgaccatctggtttgcgtcggacg

SEQ ID NO: 437102 - DNA, 55 bp, Artificial
  Synthetic oligonucleotide
gtcataatacccatgcttgggacatggcccacaatgcatgaccttgcaacagcgg

SEQ ID NO: 437103 - DNA, 55 bp, Artificial
  Synthetic oligonucleotide
gtcataatcacgggacagcgcgatcctgtggctgaattcacttatcgaggagaca

SEQ ID NO: 437104 - DNA, 55 bp, Artificial
  Synthetic oligonucleotide
gtcataatgataactcagcgtctggaagaaggaaaggttctcaatcatgaggaga

SEQ ID NO: 437105 - DNA, 60 bp, Artificial
  Synthetic oligonucleotide
gtcatacaacacagtatcagtgctgggtgtgtccaagtcagaaggagcaacaggaccaag

SEQ ID NO: 437106 - DNA, 60 bp, Artificial
  Synthetic oligonucleotide
gtcatacaacgaaggaagcgattactgtaaccgcaattcagatccagaggtcaatcagag

SEQ ID NO: 437107 - DNA, 55 bp, Artificial
  Synthetic oligonucleotide
gtcatacaatcccacattacaggactgagggcctctttatggagttcacacgcgc

SEQ ID NO: 437108 - DNA, 57 bp, Artificial
  Synthetic oligonucleotide
gtcatacaatggaaccctcctagccgtaggacctgcctcatagaggggttctggccg

SEQ ID NO: 437109 - DNA, 55 bp, Artificial
  Synthetic oligonucleotide
gtcatacacaggagcggtacgttgaaacccaaatcccaaaatcggtttgatctac

SEQ ID NO: 437110 - DNA, 51 bp, Artificial
  Synthetic oligonucleotide
gtcatacacttgttggccctacgggtgaggctgacttgtatgacacgtact

SEQ ID NO: 437111 - DNA, 59 bp, Artificial
  Synthetic oligonucleotide
gtcatacagactgttgacttcagtttggaccctaccttctcaatagagaccacaactgt

SEQ ID NO: 437112 - DNA, 60 bp, Artificial
  Synthetic oligonucleotide
gtcatacatagtagagaggccaaaagagatggaaggaatttgctatccaggatcaattga

SEQ ID NO: 437113 - DNA, 58 bp, Artificial
  Synthetic oligonucleotide
gtcatacatttccgactaattttgaacgactgagatcaaaataggaattccatcaaat

SEQ ID NO: 437114 - DNA, 60 bp, Artificial
  Synthetic oligonucleotide
gtcataccacaggcatctcaggttaacccttctcaacaaattagaagggatgatcaagga

SEQ ID NO: 437115 - DNA, 60 bp, Artificial
  Synthetic oligonucleotide
gtcataccagattcgcaacaagagatatgtacagaatacataaggggaggattaccagct

SEQ ID NO: 437116 - DNA, 53 bp, Artificial
  Synthetic oligonucleotide
gtcatacccgccaggtatgtcctggggtcccgaagcagcgtcccattgcgctg

SEQ ID NO: 437117 - DNA, 60 bp, Artificial
  Synthetic oligonucleotide
gtcatacctgatcaaccgtgatgacttgatagatctggatggaatatcaatgttcgagtg

SEQ ID NO: 437118 - DNA, 60 bp, Artificial
  Synthetic oligonucleotide
gtcatacgagcaacgccatgatatctcacatgtcgggaaggtcatgtgcatctctgacgt

SEQ ID NO: 437119 - DNA, 55 bp, Artificial
  Synthetic oligonucleotide
gtcatactcctctttacttagaaagtacttacttttcctctcgaatgtctccgat

SEQ ID NO: 437120 - DNA, 55 bp, Artificial
  Synthetic oligonucleotide
gtcatacttccaaggagttgaattactaacacccgaggcgaaatcattattaacg

SEQ ID NO: 437121 - DNA, 60 bp, Artificial
  Synthetic oligonucleotide
gtcatagaccccgcctcatggttcgacggactgctccgctcacccatctaccccgatgag

SEQ ID NO: 437122 - DNA, 60 bp, Artificial
  Synthetic oligonucleotide
gtcatagagtatttggtgtcttttggagtgtggattcgcactcctccagcttatagacca

SEQ ID NO: 437123 - DNA, 55 bp, Artificial
  Synthetic oligonucleotide
gtcatagatgccgctccatgtgaatatgttgctaacatgttctcgtattggcgtg

SEQ ID NO: 437124 - DNA, 58 bp, Artificial
  Synthetic oligonucleotide
gtcatagatggcacccatgacaccctgtaccgaagttggtacctgtcctatacctacg

SEQ ID NO: 437125 - DNA, 55 bp, Artificial
  Synthetic oligonucleotide
gtcatagcacacaaattggtgggataagaatggtagacatcctcagacagaatcc

SEQ ID NO: 437126 - DNA, 52 bp, Artificial
  Synthetic oligonucleotide
gtcatagtgacatacccctttcagttggatgcatcgatagttgcagaggaag

SEQ ID NO: 437127 - DNA, 59 bp, Artificial
  Synthetic oligonucleotide
gtcatatattgtggagtcctggagtcccttatatacataaagcctctaggactctaaag

SEQ ID NO: 437128 - DNA, 55 bp, Artificial
  Synthetic oligonucleotide
gtcatatcactgatagcaaaacttgacgctacagtgttcgcccaaatagttaagc

SEQ ID NO: 437129 - DNA, 60 bp, Artificial
  Synthetic oligonucleotide
gtcatatcattgtgtcattaacgaaagtagacaacgcagtatattgctatgaatattggg

SEQ ID NO: 437130 - DNA, 60 bp, Artificial
  Synthetic oligonucleotide
gtcatatcgcacactcgggggctgcggcatgatttcatccccatattgtagtttatgttt

SEQ ID NO: 437131 - DNA, 57 bp, Artificial
  Synthetic oligonucleotide
gtcatatctgatatggttagttgaggctttgggcgtaccagcctcttaaaccctctg

SEQ ID NO: 437132 - DNA, 55 bp, Artificial
  Synthetic oligonucleotide
gtcatatctgccacatgtgaccgtcaagtcatccgccggcctaccttacataggc

SEQ ID NO: 437133 - DNA, 55 bp, Artificial
  Synthetic oligonucleotide
gtcatatgcaaaacatactagggaatatgcagagttctactcacagtcgaatcag

SEQ ID NO: 437134 - DNA, 60 bp, Artificial
  Synthetic oligonucleotide
gtcatatgggatattgaggagacttgtcaactatgatctgttgcagtacgagacactgac

SEQ ID NO: 437135 - DNA, 50 bp, Artificial
  Synthetic oligonucleotide
gtcatattacattaacggtgctccaccagacacgctctcgctgttagagg

SEQ ID NO: 437136 - DNA, 60 bp, Artificial
  Synthetic oligonucleotide
gtcatattcacccagagagcaggactacatcaggcgtgtagctggtaaggttcctgcaga

SEQ ID NO: 437137 - DNA, 55 bp, Artificial
  Synthetic oligonucleotide
gtcatattgaccattctcaccatcattggtctaatagcagccaacgagatggggc

SEQ ID NO: 437138 - DNA, 55 bp, Artificial
  Synthetic oligonucleotide
gtcatatttggagtgtgtccacgttacgttcttatgggagattcaatacctgact

SEQ ID NO: 437139 - DNA, 56 bp, Artificial
  Synthetic oligonucleotide
gtcatcaaaatacaaccggagattcacaccggaaatagcggctagacctaaggtaa

SEQ ID NO: 437140 - DNA, 60 bp, Artificial
  Synthetic oligonucleotide
gtcatcaaagagtcatgtgataagcactattgggatactatgaggtttagatactgtgca

SEQ ID NO: 437141 - DNA, 58 bp, Artificial
  Synthetic oligonucleotide
gtcatcaatgacgttataccaagcgtcgttactgtacacctttgggctaaggtccaga

SEQ ID NO: 437142 - DNA, 60 bp, Artificial
  Synthetic oligonucleotide
gtcatcaatgacgttatactccacttcgttcgaatagactcttgggttgaagtccagatg

SEQ ID NO: 437143 - DNA, 55 bp, Artificial
  Synthetic oligonucleotide
gtcatcaattggacacgagactcaatgactgaggtatggtcgtataatgccgagc

SEQ ID NO: 437144 - DNA, 57 bp, Artificial
  Synthetic oligonucleotide
gtcatcaatttgcgacacgcgcggcggtgtgtacccctgggagggtaggtaccacta

SEQ ID NO: 437145 - DNA, 60 bp, Artificial
  Synthetic oligonucleotide
gtcatcacaacgcatccatgaaaatcaatatggtccagaatttgtcatggcgcataatac

SEQ ID NO: 437146 - DNA, 57 bp, Artificial
  Synthetic oligonucleotide
gtcatcactggcttgctcatttcttggatactgttattcctcttgattcaaaaaatc

SEQ ID NO: 437147 - DNA, 60 bp, Artificial
  Synthetic oligonucleotide
gtcatcagatcttgccgtccattgctacagagtatacggggcgcagatgtcatgttgtag

SEQ ID NO: 437148 - DNA, 55 bp, Artificial
  Synthetic oligonucleotide
gtcatcagcctagggcaacctccattgccatacactctacctatgacattcctct

SEQ ID NO: 437149 - DNA, 60 bp, Artificial
  Synthetic oligonucleotide
gtcatcaggagtgactatgatatggtcacattgacggcaacacttgccctgattgggtgc

SEQ ID NO: 437150 - DNA, 59 bp, Artificial
  Synthetic oligonucleotide
gtcatcagggggtgagacgttagatgtaatatctggtttagtcttcagggattggaggc

SEQ ID NO: 437151 - DNA, 55 bp, Artificial
  Synthetic oligonucleotide
gtcatcataagctaactgggaaagtcgagagaaagttaattacctggagatcccc

SEQ ID NO: 437152 - DNA, 50 bp, Artificial
  Synthetic oligonucleotide
gtcatcatcgagacttttgacaaagtccctcttagcctcgatgtcgtcaa

SEQ ID NO: 437153 - DNA, 60 bp, Artificial
  Synthetic oligonucleotide
gtcatcattccgcacgtgctcacttgcgcgtttaggggtggtggcacaccgtctgatccg

SEQ ID NO: 437154 - DNA, 60 bp, Artificial
  Synthetic oligonucleotide
gtcatccacgggtgcgggggttcaggcaagtcacacgctatccaaacttggatgcgcact

SEQ ID NO: 437155 - DNA, 55 bp, Artificial
  Synthetic oligonucleotide
gtcatccagagtttcaccggggacgaaacagccacttcgcatacgaccccgcccg

SEQ ID NO: 437156 - DNA, 60 bp, Artificial
  Synthetic oligonucleotide
gtcatccagttagtagcctctgtgtaagtagcatcatctgtaggctcatatgcttcaatg

SEQ ID NO: 437157 - DNA, 55 bp, Artificial
  Synthetic oligonucleotide
gtcatccataggattgacactgagaccatccataggctatcgcgtgtgtgcgctc

SEQ ID NO: 437158 - DNA, 60 bp, Artificial
  Synthetic oligonucleotide
gtcatcccaacattagtcagctaagtacgcaagtatcggacgtgcaaattaatgagtcgt

SEQ ID NO: 437159 - DNA, 59 bp, Artificial
  Synthetic oligonucleotide
gtcatcccgtctccgtacgtgaaatgctgcggtacagcagagtgcaaggacaagagcct

SEQ ID NO: 437160 - DNA, 57 bp, Artificial
  Synthetic oligonucleotide
gtcatccctctttccgcctcaccttttgtcttactacagcgcctgcttcgacctctt

SEQ ID NO: 437161 - DNA, 55 bp, Artificial
  Synthetic oligonucleotide
gtcatcccttacagtcaatcacactcaacagccctttatgatcattagaggaagg

SEQ ID NO: 437162 - DNA, 57 bp, Artificial
  Synthetic oligonucleotide
gtcatcctcttgtcgtggatctccactatcaccgtccccgtggcgttaatcggtact

SEQ ID NO: 437163 - DNA, 60 bp, Artificial
  Synthetic oligonucleotide
gtcatcctgggtcagaacatggacgctaaactgcttcaggcggaggagcgaaacctgtca

SEQ ID NO: 437164 - DNA, 60 bp, Artificial
  Synthetic oligonucleotide
gtcatccttcgtcttacagaaggtatccgagctagtcttgagtctgatgatttatcacgt

SEQ ID NO: 437165 - DNA, 60 bp, Artificial
  Synthetic oligonucleotide
gtcatcgaaaaggtatgagttgcagtgtgtaggtgcgtgtgagcgtgttgcttttgtctc

SEQ ID NO: 437166 - DNA, 53 bp, Artificial
  Synthetic oligonucleotide
gtcatcgactcatcgaagcaaggataggctcatggccggtcacatcggactca

SEQ ID NO: 437167 - DNA, 55 bp, Artificial
  Synthetic oligonucleotide
gtcatcgactcgttaatgtcataacgaagtttgtacgcttgatcgtatgtaaagt

SEQ ID NO: 437168 - DNA, 58 bp, Artificial
  Synthetic oligonucleotide
gtcatcgactcttttgggtctctgaacacaggataccatgttttgaaggccggaacag

SEQ ID NO: 437169 - DNA, 55 bp, Artificial
  Synthetic oligonucleotide
gtcatcgataccataacatgcggctttgccgacctcatggggtacatccccgtcg

SEQ ID NO: 437170 - DNA, 55 bp, Artificial
  Synthetic oligonucleotide
gtcatcgatgacgttataccacgcatcattactgtaaactttggggcttagatct

SEQ ID NO: 437171 - DNA, 54 bp, Artificial
  Synthetic oligonucleotide
gtcatcgatgacgttgtaccaagcattattactgtagacctttggacttaagtc

SEQ ID NO: 437172 - DNA, 55 bp, Artificial
  Synthetic oligonucleotide
gtcatcgatgacgttgtaccatgcctcggtagagtatgtttggccgtttagatcc

SEQ ID NO: 437173 - DNA, 55 bp, Artificial
  Synthetic oligonucleotide
gtcatcgcccgccagaagcttaaggatgcagagaaaacagtggaggccgacccgg

SEQ ID NO: 437174 - DNA, 57 bp, Artificial
  Synthetic oligonucleotide
gtcatcgcttcgtggtgaaacggcgatggttgtttaacatggagaccgacggtcgaa

SEQ ID NO: 437175 - DNA, 55 bp, Artificial
  Synthetic oligonucleotide
gtcatcggacccttgagtggtcacaaccatgtccggaggcagcaagccaatcacg

SEQ ID NO: 437176 - DNA, 59 bp, Artificial
  Synthetic oligonucleotide
gtcatcggtaccttcgagctgcaaggtccggagaagtccaccgctccgctgaaactcac

SEQ ID NO: 437177 - DNA, 60 bp, Artificial
  Synthetic oligonucleotide
gtcatcgtggttgatcggaaaccacatgttagtcaatctggccgtctacatacgtttgat

SEQ ID NO: 437178 - DNA, 60 bp, Artificial
  Synthetic oligonucleotide
gtcatcgtttgagagtataccactacgctacgcagcagccttagctacgccggagcttag

SEQ ID NO: 437179 - DNA, 50 bp, Artificial
  Synthetic oligonucleotide
gtcatctagggcgtgatccacttcagtgagacccctgagaaacaggggat

SEQ ID NO: 437180 - DNA, 60 bp, Artificial
  Synthetic oligonucleotide
gtcatctatttgcacactatcaatgagcttttttaatgagtcgagtagtccaatcgtcat

SEQ ID NO: 437181 - DNA, 60 bp, Artificial
  Synthetic oligonucleotide
gtcatctctcttgtccttccgcataattctctgtacattgctgacttcggagaagtcaag

SEQ ID NO: 437182 - DNA, 55 bp, Artificial
  Synthetic oligonucleotide
gtcatctgaaagtcgggaagaatgtctagaggcacatgcggagatcatcgctacc

SEQ ID NO: 437183 - DNA, 55 bp, Artificial
  Synthetic oligonucleotide
gtcatctgggcattttgctcatggatggttcggatcataacaacacacaccatgc

SEQ ID NO: 437184 - DNA, 60 bp, Artificial
  Synthetic oligonucleotide
gtcatcttgaggtagctgtgagcgaccagtggcatgcgattcgcgaccctacggggatgt

SEQ ID NO: 437185 - DNA, 55 bp, Artificial
  Synthetic oligonucleotide
gtcatcttgctgggtcaggtgacagtttccatgttgacataaacccagacggtag

SEQ ID NO: 437186 - DNA, 60 bp, Artificial
  Synthetic oligonucleotide
gtcatcttggatgatcgtgactactgataccatgacaggattagatgaatctaattatga

SEQ ID NO: 437187 - DNA, 53 bp, Artificial
  Synthetic oligonucleotide
gtcatgaaaaggattgcaccaatgctgtacaagtcgtcaaaatctagagtagt

SEQ ID NO: 437188 - DNA, 55 bp, Artificial
  Synthetic oligonucleotide
gtcatgaacgcggctagtgcctctgtcggtctgatgagtggttccagtgcgctgc

SEQ ID NO: 437189 - DNA, 55 bp, Artificial
  Synthetic oligonucleotide
gtcatgaatttccacaattaccgagccagttgcgttaatcggaacttgttgtctg

SEQ ID NO: 437190 - DNA, 55 bp, Artificial
  Synthetic oligonucleotide
gtcatgacgatggataaggctagagttatcatgtctatcaattcacttattggtg

SEQ ID NO: 437191 - DNA, 60 bp, Artificial
  Synthetic oligonucleotide
gtcatgacgttgactgatcgttacttgtgtgtcagttgagatatatatggcgagtcatat

SEQ ID NO: 437192 - DNA, 54 bp, Artificial
  Synthetic oligonucleotide
gtcatgactagcggatttgcgctacactacttcgccaataatcgctctcaatta

SEQ ID NO: 437193 - DNA, 57 bp, Artificial
  Synthetic oligonucleotide
gtcatgactagttgagtggtactttaaccacgagtcgtcgttgagacgccagtttcc

SEQ ID NO: 437194 - DNA, 55 bp, Artificial
  Synthetic oligonucleotide
gtcatgactcaaagtcgtggccttcatgattaaccctgaataaacactactggag

SEQ ID NO: 437195 - DNA, 60 bp, Artificial
  Synthetic oligonucleotide
gtcatgactcagcattgccacagctttattttgtacatctaattttgtatatctattact

SEQ ID NO: 437196 - DNA, 50 bp, Artificial
  Synthetic oligonucleotide
gtcatgactttcacttatcgagaggtatttaagatgaggcgtctgaaaca

SEQ ID NO: 437197 - DNA, 50 bp, Artificial
  Synthetic oligonucleotide
gtcatgagaagatacagcgccctttccgagagtgaaggagttctgtaatt

SEQ ID NO: 437198 - DNA, 60 bp, Artificial
  Synthetic oligonucleotide
gtcatgagacgggtgaatgtatatcttgtttacgataatgccggggagagatttgtgaat

SEQ ID NO: 437199 - DNA, 55 bp, Artificial
  Synthetic oligonucleotide
gtcatgagggtggcctaccgggtaatgaaccccggtgccgagattccaccgaaca

SEQ ID NO: 437200 - DNA, 60 bp, Artificial
  Synthetic oligonucleotide
gtcatgagtcaaaagaagctcttgagcatgataggtggcgtggagagaaagatggctcca

SEQ ID NO: 437201 - DNA, 55 bp, Artificial
  Synthetic oligonucleotide
gtcatgagtcaggctatcactcccactgatggggacaacaacatagggtgtctta

SEQ ID NO: 437202 - DNA, 55 bp, Artificial
  Synthetic oligonucleotide
gtcatgagtggtctgatggtctggtgcattgaaaatggttgctcaccaaacataa

SEQ ID NO: 437203 - DNA, 55 bp, Artificial
  Synthetic oligonucleotide
gtcatgataagaataggtactttggttggagatcggcgaaatgtagtgtgtctga

SEQ ID NO: 437204 - DNA, 53 bp, Artificial
  Synthetic oligonucleotide
gtcatgatatgatgtgtttctgtctacgcttgattgctagcaactccgcacgc

SEQ ID NO: 437205 - DNA, 52 bp, Artificial
  Synthetic oligonucleotide
gtcatgcaactagggatgccgtaggtacaaacctaccactccagttagggtt

SEQ ID NO: 437206 - DNA, 54 bp, Artificial
  Synthetic oligonucleotide
gtcatgcaagcatcaattgttcaagtattcaccaccgacttgattaatcatgcc

SEQ ID NO: 437207 - DNA, 55 bp, Artificial
  Synthetic oligonucleotide
gtcatgcacaggttctccgcgaaagtaacaggtggccagtatgccagcaacgagc

SEQ ID NO: 437208 - DNA, 60 bp, Artificial
  Synthetic oligonucleotide
gtcatgcagaattatctcgacaaacagagtcgtaaaatgaggagatgattagcgttatca

SEQ ID NO: 437209 - DNA, 55 bp, Artificial
  Synthetic oligonucleotide
gtcatgcaggccatggtaaggctgggcattgttccaaagtgattgttaaggagtg

SEQ ID NO: 437210 - DNA, 57 bp, Artificial
  Synthetic oligonucleotide
gtcatgcaggttgttatacggttgttcttgacaagctggtagcatgtgaccgcgata

SEQ ID NO: 437211 - DNA, 60 bp, Artificial
  Synthetic oligonucleotide
gtcatgcagtatagagatagatgtttctgtcaaagggagcttttttaaacctagatcaat

SEQ ID NO: 437212 - DNA, 60 bp, Artificial
  Synthetic oligonucleotide
gtcatgcatgcaactactgaaatgttcagtagaaacctcttaaaaacaacatcagatgac

SEQ ID NO: 437213 - DNA, 52 bp, Artificial
  Synthetic oligonucleotide
gtcatgcgaccgtcagacggtgcgtatatacaatccggttattacgaaccac

SEQ ID NO: 437214 - DNA, 60 bp, Artificial
  Synthetic oligonucleotide
gtcatgcgcgtgacggtagcgcacatgtgggacctgaaatagcacttacttcgacgtaag

SEQ ID NO: 437215 - DNA, 60 bp, Artificial
  Synthetic oligonucleotide
gtcatgcgttacatctgtatggcttttatgccgcacccgtaacctttgcataacacccta

SEQ ID NO: 437216 - DNA, 55 bp, Artificial
  Synthetic oligonucleotide
gtcatgctactttgtcctaagggagtgtacttcattgtgggtggcgatccgtgtc

SEQ ID NO: 437217 - DNA, 60 bp, Artificial
  Synthetic oligonucleotide
gtcatgctagtaatcctgtgtatcagaccctgcgttgcagggcttatttctatgactcgc

SEQ ID NO: 437218 - DNA, 55 bp, Artificial
  Synthetic oligonucleotide
gtcatgctccacggacatagccacggctcatataaggcacctggtggacgaatcc

SEQ ID NO: 437219 - DNA, 55 bp, Artificial
  Synthetic oligonucleotide
gtcatggaagtcacattctctggaacaaaaccctgtaggatcccagtcagggcag

SEQ ID NO: 437220 - DNA, 60 bp, Artificial
  Synthetic oligonucleotide
gtcatggacgttatacatgagatggccccaccgctcaagtctccaagcgctgaggcatgc

SEQ ID NO: 437221 - DNA, 55 bp, Artificial
  Synthetic oligonucleotide
gtcatggagattacccgaaacccagcaattctgaaattacacaaggttggcaact

SEQ ID NO: 437222 - DNA, 55 bp, Artificial
  Synthetic oligonucleotide
gtcatggatcccagacacagaacatgtgtctacgcctttccttgctagggaatgg

SEQ ID NO: 437223 - DNA, 59 bp, Artificial
  Synthetic oligonucleotide
gtcatggatgattctggagttaaaaacaatttattgggtaaagcggcaactattgatca

SEQ ID NO: 437224 - DNA, 55 bp, Artificial
  Synthetic oligonucleotide
gtcatggatgatttgtgccaaaatcctgatggaaaggatatttcacttttctgcc

SEQ ID NO: 437225 - DNA, 60 bp, Artificial
  Synthetic oligonucleotide
gtcatggcaatctcagcattgtcccttcactgaaagaccgttattatattcgccacgtgt

SEQ ID NO: 437226 - DNA, 60 bp, Artificial
  Synthetic oligonucleotide
gtcatggctgtacttttcatactatgagaatttagtacatgatgtgttggacaatttgca

SEQ ID NO: 437227 - DNA, 60 bp, Artificial
  Synthetic oligonucleotide
gtcatggctgtccatcggctacctagtaaagatgccgcacattcacctggcggtgacccg

SEQ ID NO: 437228 - DNA, 60 bp, Artificial
  Synthetic oligonucleotide
gtcatgggaaagaatgttcatcaactggccttcaagccagtgcaccacatctggataagg

SEQ ID NO: 437229 - DNA, 55 bp, Artificial
  Synthetic oligonucleotide
gtcatgggagccagtgtgataggatggggacaactgaaccaaagcggaccaggcg

SEQ ID NO: 437230 - DNA, 55 bp, Artificial
  Synthetic oligonucleotide
gtcatgggctgtctaggtgggcctacatttgtacatgaggtagtgaggatggcaa

SEQ ID NO: 437231 - DNA, 59 bp, Artificial
  Synthetic oligonucleotide
gtcatggggaatgagtcagggaaagaagagagagtaattgcaaaaaggtgcaccaatgt

SEQ ID NO: 437232 - DNA, 60 bp, Artificial
  Synthetic oligonucleotide
gtcatggggatgatcggaatattacctgatatgactccaagcacagagatatcactgagg

SEQ ID NO: 437233 - DNA, 60 bp, Artificial
  Synthetic oligonucleotide
gtcatggtcattggttgacacaagcctagagacttttagaagccctccacagcagtgttt

SEQ ID NO: 437234 - DNA, 58 bp, Artificial
  Synthetic oligonucleotide
gtcatggtggggcaataggcacccgagagagtacctacgcgcaataaaaagcaaacta

SEQ ID NO: 437235 - DNA, 60 bp, Artificial
  Synthetic oligonucleotide
gtcatgtaacagctgacagtctcagctgatgcttatttgtgctgatgcttgtgctgacac

SEQ ID NO: 437236 - DNA, 60 bp, Artificial
  Synthetic oligonucleotide
gtcatgtataatttggctcgtgaccgaatagtcatattcgcactgaataaattgtacaca

SEQ ID NO: 437237 - DNA, 50 bp, Artificial
  Synthetic oligonucleotide
gtcatgtatttcaagacaagacgggaacttcgtgtatccttgctgttgtg

SEQ ID NO: 437238 - DNA, 55 bp, Artificial
  Synthetic oligonucleotide
gtcatgtccggctaagttagtcagtctaggttcagggaaagagtgaggtaaccgt

SEQ ID NO: 437239 - DNA, 57 bp, Artificial
  Synthetic oligonucleotide
gtcatgtccgttaaatgtagaatccgttgctaaacattacgaagataacaatccaag

SEQ ID NO: 437240 - DNA, 55 bp, Artificial
  Synthetic oligonucleotide
gtcatgtcggacggtgtgaatgagacaccattatggcctcaagagagatacgtcc

SEQ ID NO: 437241 - DNA, 60 bp, Artificial
  Synthetic oligonucleotide
gtcatgtctctaagacgatgaagggtgtcaacagaggagcgaatggtggtgtcaagtatg

SEQ ID NO: 437242 - DNA, 59 bp, Artificial
  Synthetic oligonucleotide
gtcatgtgcattagtgatgttacacgtggtactgggttaacccatagagttggtaagcg

SEQ ID NO: 437243 - DNA, 60 bp, Artificial
  Synthetic oligonucleotide
gtcatgtgcatttcggacgtgacacgtggtaatggtatcactcatcgtgtagggaagcgt

SEQ ID NO: 437244 - DNA, 55 bp, Artificial
  Synthetic oligonucleotide
gtcatgtggcaagatgttgtggacagttttcaagtcagggagccttgccttggtg

SEQ ID NO: 437245 - DNA, 55 bp, Artificial
  Synthetic oligonucleotide
gtcatgtgtactgttgtgtgtgctgtatgctatgtatgtaataaacaggcgtgtc

SEQ ID NO: 437246 - DNA, 60 bp, Artificial
  Synthetic oligonucleotide
gtcatgtgtatcagtgatgtcactcgtggtactgggctgacccatcgagttggtaagcgt

SEQ ID NO: 437247 - DNA, 60 bp, Artificial
  Synthetic oligonucleotide
gtcatgtgtatgtatgaatgggaactgctattgggtaatgacggatggtcctgcgaacaa

SEQ ID NO: 437248 - DNA, 60 bp, Artificial
  Synthetic oligonucleotide
gtcatgtgtgttagtgatgttactcgtggtactggtctgacccacagagtaggtaagcgt

SEQ ID NO: 437249 - DNA, 60 bp, Artificial
  Synthetic oligonucleotide
gtcatgtgtgttagtgatgttactcgtggtattgggcttacccacagggtaggcaagaga

SEQ ID NO: 437250 - DNA, 53 bp, Artificial
  Synthetic oligonucleotide
gtcatgtgttggatgcatctgctatggcttttaggagtttaatccatgcatat

SEQ ID NO: 437251 - DNA, 60 bp, Artificial
  Synthetic oligonucleotide
gtcatgttatatgccttggacagtatctctatctttggggatttgaactgtatttcggag

SEQ ID NO: 437252 - DNA, 59 bp, Artificial
  Synthetic oligonucleotide
gtcatgttcatgaaacccagcaagttcagcaaacttgcccaggtgaactcaaactttcg

SEQ ID NO: 437253 - DNA, 55 bp, Artificial
  Synthetic oligonucleotide
gtcatgttgttaattgcatagagttggatgttagtggtccttacgagatggagtc

SEQ ID NO: 437254 - DNA, 55 bp, Artificial
  Synthetic oligonucleotide
gtcatgtttcacgtatgcattcaaggagaagatcttgtacgagcagccgtggtac

SEQ ID NO: 437255 - DNA, 55 bp, Artificial
  Synthetic oligonucleotide
gtcatgttttatgctgtggattgtacatgagtcttgccttcttaaataatgccag

SEQ ID NO: 437256 - DNA, 55 bp, Artificial
  Synthetic oligonucleotide
gtcattaaaccgcatgaaaagggcataaaccccaattaccttctagcttggaagc

SEQ ID NO: 437257 - DNA, 53 bp, Artificial
  Synthetic oligonucleotide
gtcattaataggcgtacgtacccgtgggaaggtacattaaattattatcttct

SEQ ID NO: 437258 - DNA, 52 bp, Artificial
  Synthetic oligonucleotide
gtcattacacccatagtttcacgtgtcaaaacactgctactgacgatgatat

SEQ ID NO: 437259 - DNA, 60 bp, Artificial
  Synthetic oligonucleotide
gtcattacagatgacccatttgacgtctgggatggcgtcaaggcaacctacatcccgatt

SEQ ID NO: 437260 - DNA, 56 bp, Artificial
  Synthetic oligonucleotide
gtcattagattttgtaactacgaattatatgtcacttatatctggtatgtggctat

SEQ ID NO: 437261 - DNA, 60 bp, Artificial
  Synthetic oligonucleotide
gtcattagctgcaaatctaaacgatgtagtatgcagtggaggttcttacagttttgcgtt

SEQ ID NO: 437262 - DNA, 59 bp, Artificial
  Synthetic oligonucleotide
gtcattagggaatacaatgagaccgtgaggattgaaagggtaacacaatggcacaatac

SEQ ID NO: 437263 - DNA, 60 bp, Artificial
  Synthetic oligonucleotide
gtcattagtcgcatgtcaactagctatagtaaacacaataatctatccagcatttggaat

SEQ ID NO: 437264 - DNA, 55 bp, Artificial
  Synthetic oligonucleotide
gtcattagtcgtctaaccagtatgtatccgagtaaataccaccgtcgctggtcgt

SEQ ID NO: 437265 - DNA, 60 bp, Artificial
  Synthetic oligonucleotide
gtcattatcttacgagatattcagctccgtgatcaatgtttggacgtcctgcgtgagtac

SEQ ID NO: 437266 - DNA, 60 bp, Artificial
  Synthetic oligonucleotide
gtcattatgtgccaaattgtctaagttccagaagatgtcacctggtgggagagtgcactg

SEQ ID NO: 437267 - DNA, 58 bp, Artificial
  Synthetic oligonucleotide
gtcattattccttcatctagtcggaatacccacccatcgacacctcaaaggcgaagct

SEQ ID NO: 437268 - DNA, 55 bp, Artificial
  Synthetic oligonucleotide
gtcattcaactgcttacctgaagcccatgcgcgacgtgtcgtgcgcttggttgtc

SEQ ID NO: 437269 - DNA, 57 bp, Artificial
  Synthetic oligonucleotide
gtcattcaaggatctggagtcgagtagtactgggggtaattataagaatgttaacaa

SEQ ID NO: 437270 - DNA, 55 bp, Artificial
  Synthetic oligonucleotide
gtcattcacttacctggctgggttgtcatctctttatgctcagtaccgtggaagt

SEQ ID NO: 437271 - DNA, 60 bp, Artificial
  Synthetic oligonucleotide
gtcattcccgtatgctgatgttcaatctggaggaattcctttaggattcaacattaacag

SEQ ID NO: 437272 - DNA, 60 bp, Artificial
  Synthetic oligonucleotide
gtcattccttggataagtgggtctcacttccgcatgttcaatagtgatgcaaaatccata

SEQ ID NO: 437273 - DNA, 55 bp, Artificial
  Synthetic oligonucleotide
gtcattcttaattacaatgacaagaggtcaagagccaacatcatcagcttgctgc

SEQ ID NO: 437274 - DNA, 55 bp, Artificial
  Synthetic oligonucleotide
gtcattcttaccaaacgttgagatggcattaagctggcctctaggatatccaagc

SEQ ID NO: 437275 - DNA, 60 bp, Artificial
  Synthetic oligonucleotide
gtcattcttatcgaatataggcatgttgttttcattagcaactattactaagcccgcctg

SEQ ID NO: 437276 - DNA, 60 bp, Artificial
  Synthetic oligonucleotide
gtcattcttcgcgttcgagcataaaaccggatcgcactggcacacgtacactcattacac

SEQ ID NO: 437277 - DNA, 59 bp, Artificial
  Synthetic oligonucleotide
gtcattcttgtaattgtgaagtatacatcagtgtagtcgtcttaaatagtggccatata

SEQ ID NO: 437278 - DNA, 57 bp, Artificial
  Synthetic oligonucleotide
gtcattcttttgtcatggatttccactatgaccgacccagttgcgtttatcggaact

SEQ ID NO: 437279 - DNA, 55 bp, Artificial
  Synthetic oligonucleotide
gtcattgaaccccgatctgcccttgtgcgcagccttgtgccttatgttagggaca

SEQ ID NO: 437280 - DNA, 55 bp, Artificial
  Synthetic oligonucleotide
gtcattgacgtggcggggtttgggcatgcaatagttggccggatgttatttggtc

SEQ ID NO: 437281 - DNA, 50 bp, Artificial
  Synthetic oligonucleotide
gtcattgatgaggctttccccttgacccgtcccaactgggattttgctac

SEQ ID NO: 437282 - DNA, 55 bp, Artificial
  Synthetic oligonucleotide
gtcattggtttgatggccgccttaatcttaagacatcctttcactgttacggtgc

SEQ ID NO: 437283 - DNA, 56 bp, Artificial
  Synthetic oligonucleotide
gtcattgtggatattgaggtacctgattatggtatgacaaaagaagatgaatgtga

SEQ ID NO: 437284 - DNA, 60 bp, Artificial
  Synthetic oligonucleotide
gtcatttaagttagcaatgtttcctgcatatatatgactatcaggtccgtgagctattag

SEQ ID NO: 437285 - DNA, 51 bp, Artificial
  Synthetic oligonucleotide
gtcatttacgcggctccaacacagcctatcggaatgcgcgacctcatatca

SEQ ID NO: 437286 - DNA, 54 bp, Artificial
  Synthetic oligonucleotide
gtcatttatgccgaaacgtgtcgtgtcggatttcaagaataaacccgacgttat

SEQ ID NO: 437287 - DNA, 60 bp, Artificial
  Synthetic oligonucleotide
gtcatttatgctatggatgagcactacggcgtgcagataagcaaccgtgagtttgctaat

SEQ ID NO: 437288 - DNA, 59 bp, Artificial
  Synthetic oligonucleotide
gtcatttcagggggtttcttctcctatgacccggcagctgttcacataggagggcaaga

SEQ ID NO: 437289 - DNA, 60 bp, Artificial
  Synthetic oligonucleotide
gtcatttcctcagataagccacctctcagtgcacgttatgttaagtacgtggattctagt

SEQ ID NO: 437290 - DNA, 56 bp, Artificial
  Synthetic oligonucleotide
gtcatttcgatttttacccagtgtgtacacactgtgtacaattggtaaataattgg

SEQ ID NO: 437291 - DNA, 60 bp, Artificial
  Synthetic oligonucleotide
gtcatttggtggaccttcgatgtcaatccatgttgtgtcgctaacaagcagggattccac

SEQ ID NO: 437292 - DNA, 56 bp, Artificial
  Synthetic oligonucleotide
gtcatttgtagtcactctctgcgatctatcactagtcacttttgtggtaaaacttg

SEQ ID NO: 437293 - DNA, 55 bp, Artificial
  Synthetic oligonucleotide
gtcattttcgcgagggtcaactccttgaacgggacgctacaattagcttccacgt

SEQ ID NO: 437294 - DNA, 55 bp, Artificial
  Synthetic oligonucleotide
gtcattttctgatgcctgtcaatccctcgacaagaccaccagttccggacacccc

SEQ ID NO: 437295 - DNA, 55 bp, Artificial
  Synthetic oligonucleotide
gtcattttgcgtttcaaagttggatgcagataattgctttaacacctttctgtgc

SEQ ID NO: 437296 - DNA, 58 bp, Artificial
  Synthetic oligonucleotide
gtccaaaaaccacactaacaatgtgatgttcttcttggtccgtgatcgacggcctgtg

SEQ ID NO: 437297 - DNA, 58 bp, Artificial
  Synthetic oligonucleotide
gtccaaaaaggcccagaaatggtattatagacatcattatgaaaccagaaatccaaga

SEQ ID NO: 437298 - DNA, 55 bp, Artificial
  Synthetic oligonucleotide
gtccaaaacgccacctccacagattggacagtggaggaagcaagggaaaagtccc

SEQ ID NO: 437299 - DNA, 53 bp, Artificial
  Synthetic oligonucleotide
gtccaaaatcgaaagtagacagtgagttaagtccccggttagcagctatttca

SEQ ID NO: 437300 - DNA, 55 bp, Artificial
  Synthetic oligonucleotide
gtccaaaatgccctaaacggaaatggagacccaaacaacatggacagggcagtca

SEQ ID NO: 437301 - DNA, 55 bp, Artificial
  Synthetic oligonucleotide
gtccaaaatgccctaaatggaaatggggacccgaataatatggatagagcagtca

SEQ ID NO: 437302 - DNA, 55 bp, Artificial
  Synthetic oligonucleotide
gtccaaaatgcccttaatgggaatggggatccaaataacatggacaaagcagtca

SEQ ID NO: 437303 - DNA, 52 bp, Artificial
  Synthetic oligonucleotide
gtccaaacacaaggtctcccagttcgcatgcctagtggtgcacaacagttta

SEQ ID NO: 437304 - DNA, 60 bp, Artificial
  Synthetic oligonucleotide
gtccaaacagagatgaatctactgagcactcttacaagtaaaagggccctggatctacca

SEQ ID NO: 437305 - DNA, 55 bp, Artificial
  Synthetic oligonucleotide
gtccaaacattataatttccatgcaaagcagttatctctcatggacccgtatgac

SEQ ID NO: 437306 - DNA, 56 bp, Artificial
  Synthetic oligonucleotide
gtccaaactcagaggtatggggctcaacgctgtagcgtactataggggtctcgatg

SEQ ID NO: 437307 - DNA, 55 bp, Artificial
  Synthetic oligonucleotide
gtccaaagaccccatacctcctattgtgggaaacagcgggaacctcgccatagct

SEQ ID NO: 437308 - DNA, 53 bp, Artificial
  Synthetic oligonucleotide
gtccaaagaccgaaggagtattctctcttgtggtcgtcgtggaccgtaaaccc

SEQ ID NO: 437309 - DNA, 54 bp, Artificial
  Synthetic oligonucleotide
gtccaaagcatcctgtaccaagtgtgtacccaaaagcttagcctcgcccgcctc

SEQ ID NO: 437310 - DNA, 60 bp, Artificial
  Synthetic oligonucleotide
gtccaaaggtcacttttgatccgattcctgtgcattattgtgctccagctggttatgcga

SEQ ID NO: 437311 - DNA, 54 bp, Artificial
  Synthetic oligonucleotide
gtccaaagttttaagtacggaccgctatgtccagcgtaccaacctgtactatta

SEQ ID NO: 437312 - DNA, 57 bp, Artificial
  Synthetic oligonucleotide
gtccaaatcctcgtcatgacttacgagttttattattagcagcgattaaacataaag

SEQ ID NO: 437313 - DNA, 55 bp, Artificial
  Synthetic oligonucleotide
gtccaaatgcagtaatgggtaaaattgcgggtgaacgtctagttaacttgcgacc

SEQ ID NO: 437314 - DNA, 60 bp, Artificial
  Synthetic oligonucleotide
gtccaaattcgacgggctgtgcacagagtctgactatgaagccttcgacgctagtcaaga

SEQ ID NO: 437315 - DNA, 59 bp, Artificial
  Synthetic oligonucleotide
gtccaacaccaaagtcggtcactccggtgctggctacttctatggcaagactctcgttg

SEQ ID NO: 437316 - DNA, 55 bp, Artificial
  Synthetic oligonucleotide
gtccaacaccaactcttgcgattcctccggatttaaaccgtgctactgatcgtgt

SEQ ID NO: 437317 - DNA, 60 bp, Artificial
  Synthetic oligonucleotide
gtccaacattgttgtacccagtctgttcagctccctgtatggatgcgatgtctctactat

SEQ ID NO: 437318 - DNA, 50 bp, Artificial
  Synthetic oligonucleotide
gtccaaccccacccccgagaggtccccccaggaatggcgggaccccactc

SEQ ID NO: 437319 - DNA, 55 bp, Artificial
  Synthetic oligonucleotide
gtccaaccgaagaatagagtgtctggatacattcagatctccggcagatgcgacg

SEQ ID NO: 437320 - DNA, 60 bp, Artificial
  Synthetic oligonucleotide
gtccaacgctactaatgcgaaattcatcccacttcggttcaactccaattagcatcatga

SEQ ID NO: 437321 - DNA, 60 bp, Artificial
  Synthetic oligonucleotide
gtccaacggttagcccattgggcaacgtgcagtgcagcatagagggggaattgagtccca

SEQ ID NO: 437322 - DNA, 51 bp, Artificial
  Synthetic oligonucleotide
gtccaactaaagccagggaaggagctacctaaattaaaacagtggcctctg

SEQ ID NO: 437323 - DNA, 55 bp, Artificial
  Synthetic oligonucleotide
gtccaactatgccaccaagaaacccgttgtgagacaagtgcaaacccagggtccc

SEQ ID NO: 437324 - DNA, 56 bp, Artificial
  Synthetic oligonucleotide
gtccaactattagtacacacacctatgaagaaatccctatggatacatttgttacc

SEQ ID NO: 437325 - DNA, 58 bp, Artificial
  Synthetic oligonucleotide
gtccaactgatgatatctatctaggatcaggtgacccaaaggagccaaagatgcatga

SEQ ID NO: 437326 - DNA, 57 bp, Artificial
  Synthetic oligonucleotide
gtccaacttgaggtttctttgttagatcaacacttgtgttgtcccaagatctcccaa

SEQ ID NO: 437327 - DNA, 56 bp, Artificial
  Synthetic oligonucleotide
gtccaacttgataaacctgtagaaattgagtgtataagacacggcaacaatacaag

SEQ ID NO: 437328 - DNA, 55 bp, Artificial
  Synthetic oligonucleotide
gtccaagaaacacaggcacacaaagaggctgcacagcatctaaaacgaaagtttt

SEQ ID NO: 437329 - DNA, 52 bp, Artificial
  Synthetic oligonucleotide
gtccaagaactccttataactggcaccctcaccaggattgcaaagcacgata

SEQ ID NO: 437330 - DNA, 58 bp, Artificial
  Synthetic oligonucleotide
gtccaagaatttaacggactagaattaataagcagtgctccagtagttaatgctggta

SEQ ID NO: 437331 - DNA, 55 bp, Artificial
  Synthetic oligonucleotide
gtccaagacaaaatgcaccaattggaatgttcggcttggataacacagccggtcc

SEQ ID NO: 437332 - DNA, 57 bp, Artificial
  Synthetic oligonucleotide
gtccaagacagttcatttgttggcattacccctacacctgatcagcggtgtccgggg

SEQ ID NO: 437333 - DNA, 60 bp, Artificial
  Synthetic oligonucleotide
gtccaagacgcactgtcaatcctccgcgcacgtaacagtgtgacgaagttgaggcaggga

SEQ ID NO: 437334 - DNA, 59 bp, Artificial
  Synthetic oligonucleotide
gtccaagacgcttgggagtgcgaaaacaatctagcttatccaaacaaggtcacgtgtca

SEQ ID NO: 437335 - DNA, 55 bp, Artificial
  Synthetic oligonucleotide
gtccaagaggaagcgggccgatgaggcgccctggaataagcggtccaccaagaag

SEQ ID NO: 437336 - DNA, 60 bp, Artificial
  Synthetic oligonucleotide
gtccaagatgtggtcagtcaatctcgatgtgcacataatgactatgtgggctctatccga

SEQ ID NO: 437337 - DNA, 59 bp, Artificial
  Synthetic oligonucleotide
gtccaagcctattgtctggttcgacaacgatctctggatgtgttagattcccctcactt

SEQ ID NO: 437338 - DNA, 51 bp, Artificial
  Synthetic oligonucleotide
gtccaagctggacggtgacaggacccctgacgaagaggttgaggtctacac

SEQ ID NO: 437339 - DNA, 52 bp, Artificial
  Synthetic oligonucleotide
gtccaagctggtcaacccgggactgttaagaagaatagtagaaccgtaacct

SEQ ID NO: 437340 - DNA, 55 bp, Artificial
  Synthetic oligonucleotide
gtccaagctttatcacttccattaaagcatgtgaccttgcaatgtgctatgggtc

SEQ ID NO: 437341 - DNA, 53 bp, Artificial
  Synthetic oligonucleotide
gtccaaggacgttaaaagaagaagtcaggcccaaaagccacggtttgagcaaa

SEQ ID NO: 437342 - DNA, 55 bp, Artificial
  Synthetic oligonucleotide
gtccaaggcatcgacatttgtatcgtttgacctcgattatgttgggtaaattgga

SEQ ID NO: 437343 - DNA, 58 bp, Artificial
  Synthetic oligonucleotide
gtccaaggccttactaatagattgtatcacgcatcatttatcggtcacgacatttagt

SEQ ID NO: 437344 - DNA, 57 bp, Artificial
  Synthetic oligonucleotide
gtccaagggaaccgacacgagactcgtaccgcagatgtgtgtggggggtttgtcgca

SEQ ID NO: 437345 - DNA, 59 bp, Artificial
  Synthetic oligonucleotide
gtccaaggtagttccaagctcgctttccaagctagatgatggacaagtggtggatttac

SEQ ID NO: 437346 - DNA, 53 bp, Artificial
  Synthetic oligonucleotide
gtccaaggtcaggtaagaacaagaacgaatcaaaagaagaaataaaagaagaa

SEQ ID NO: 437347 - DNA, 55 bp, Artificial
  Synthetic oligonucleotide
gtccaagtatatctcacgcagaccgagcccatcaggtaccttttctcgttctcta

SEQ ID NO: 437348 - DNA, 55 bp, Artificial
  Synthetic oligonucleotide
gtccaagtctgccgcgacaattgagaatcacaacataaggtcctgcagagattgg

SEQ ID NO: 437349 - DNA, 59 bp, Artificial
  Synthetic oligonucleotide
gtccaagtggagtctctagttgagatcaacaacgttgagggccaaagcggcgttgcacg

SEQ ID NO: 437350 - DNA, 58 bp, Artificial
  Synthetic oligonucleotide
gtccaagtggcgaacccttgaggccttttgggcgaacgacatgtggaatttcatcagc

SEQ ID NO: 437351 - DNA, 55 bp, Artificial
  Synthetic oligonucleotide
gtccaagttagccagccaagctcatctcatatgaactcttatagttgaacatttt

SEQ ID NO: 437352 - DNA, 56 bp, Artificial
  Synthetic oligonucleotide
gtccaagttcaccgaacccattaaggacgtcctcattaagaccgctcccatgctaa

SEQ ID NO: 437353 - DNA, 55 bp, Artificial
  Synthetic oligonucleotide
gtccaagtttcacctggttgtaataatatgggcctgttaattgggccatcgtgcc

SEQ ID NO: 437354 - DNA, 52 bp, Artificial
  Synthetic oligonucleotide
gtccaatacatttcaaggcctgcctccgcaacacagccctggactactttct

SEQ ID NO: 437355 - DNA, 52 bp, Artificial
  Synthetic oligonucleotide
gtccaatataagtgagacatatggagatacaccagaatggatagtacgacaa

SEQ ID NO: 437356 - DNA, 58 bp, Artificial
  Synthetic oligonucleotide
gtccaatcaattcctaacaacagacaactttcaatcaccgtgcatagtccccaactac

SEQ ID NO: 437357 - DNA, 55 bp, Artificial
  Synthetic oligonucleotide
gtccaatcactgacgagatgttcctttcttactatgatggtccccagttgaccac

SEQ ID NO: 437358 - DNA, 57 bp, Artificial
  Synthetic oligonucleotide
gtccaatcccatccatcctgacaagtctcggtgcctttaacttggtcgttaaggatg

SEQ ID NO: 437359 - DNA, 55 bp, Artificial
  Synthetic oligonucleotide
gtccaatcctttgaacagagacatgacataacacatactgggaaggccctttgtg

SEQ ID NO: 437360 - DNA, 56 bp, Artificial
  Synthetic oligonucleotide
gtccaatctaatatatcgttgtaacgtctaattagactttctggcaaataccgaat

SEQ ID NO: 437361 - DNA, 55 bp, Artificial
  Synthetic oligonucleotide
gtccaatctagcttatttgttcaaaatatctacgtcgaatcggaataatgggggg

SEQ ID NO: 437362 - DNA, 51 bp, Artificial
  Synthetic oligonucleotide
gtccaatgatcctgtcattgttgaacctcaagttatgggtcaaaacattac

SEQ ID NO: 437363 - DNA, 52 bp, Artificial
  Synthetic oligonucleotide
gtccaatggagtacccaataattgcctttcctaaaatacccccgcttttatg

SEQ ID NO: 437364 - DNA, 54 bp, Artificial
  Synthetic oligonucleotide
gtccaatgtcttttgtggtattttactaagagacgtacacctaacaccaacttc

SEQ ID NO: 437365 - DNA, 55 bp, Artificial
  Synthetic oligonucleotide
gtccaattaatggatcttgcttctggttctcagggtgattctaaaagtctaacag

SEQ ID NO: 437366 - DNA, 55 bp, Artificial
  Synthetic oligonucleotide
gtccaattgggcagtgcgcagttagcagtacagatgtacaatacgatttcaaata

SEQ ID NO: 437367 - DNA, 57 bp, Artificial
  Synthetic oligonucleotide
gtccaatttctaagtgatgcgttttcctctttgtcgaggaagtctttatagctggac

SEQ ID NO: 437368 - DNA, 50 bp, Artificial
  Synthetic oligonucleotide
gtccaattttgagagcaaccttgcggatggaaacgactaaaatgcattct

SEQ ID NO: 437369 - DNA, 55 bp, Artificial
  Synthetic oligonucleotide
gtccacaaagataattatggggtcccagtgaacgagcccacattgttttgccggt

SEQ ID NO: 437370 - DNA, 60 bp, Artificial
  Synthetic oligonucleotide
gtccacaaatgcgatatatgagcataatgaaaggttaagccaaacaaggtccagaagaaa

SEQ ID NO: 437371 - DNA, 60 bp, Artificial
  Synthetic oligonucleotide
gtccacaactggtgggcaatcaactgctttggttggtgagagagcattctatgatccccg

SEQ ID NO: 437372 - DNA, 54 bp, Artificial
  Synthetic oligonucleotide
gtccacaaggtcattaccaatggaacgtagtacctttcggtttaaagcaagcac

SEQ ID NO: 437373 - DNA, 55 bp, Artificial
  Synthetic oligonucleotide
gtccacaattgtggtcgcggagtggcacaaagcaggaaggccaactcccatgtcc

SEQ ID NO: 437374 - DNA, 55 bp, Artificial
  Synthetic oligonucleotide
gtccacacaagtagttgtgtgtacctaacgctcttgcccagcacgtttttcccgt

SEQ ID NO: 437375 - DNA, 55 bp, Artificial
  Synthetic oligonucleotide
gtccacacagatagttgtgtgggcctagagatcgtgcccacatcgtcttcccggt

SEQ ID NO: 437376 - DNA, 55 bp, Artificial
  Synthetic oligonucleotide
gtccacaccccaacctcccgccagtacaaggacatgcggcgctttattggtgctc

SEQ ID NO: 437377 - DNA, 60 bp, Artificial
  Synthetic oligonucleotide
gtccacacctatggtgatgactgtatttatagtgtttgtcctgccaccgcttctatcttt

SEQ ID NO: 437378 - DNA, 54 bp, Artificial
  Synthetic oligonucleotide
gtccacacttcggtatggtaaggttcaatccgctccaaggttcgatccctcccg

SEQ ID NO: 437379 - DNA, 59 bp, Artificial
  Synthetic oligonucleotide
gtccacagacttggcagcaaacagtgaacttccaacgtggaaagtggtatctggttaca

SEQ ID NO: 437380 - DNA, 55 bp, Artificial
  Synthetic oligonucleotide
gtccacagatgttgtttccttgtgctggtgggtctgtatactgagccccatcttc

SEQ ID NO: 437381 - DNA, 55 bp, Artificial
  Synthetic oligonucleotide
gtccacagcccgcagatagagataacgccgttaaggagggtaatcttccaccagc

SEQ ID NO: 437382 - DNA, 57 bp, Artificial
  Synthetic oligonucleotide
gtccacagccctggggtggtctcctctttgtcaacaggtaatgctgtctgcaaagta

SEQ ID NO: 437383 - DNA, 60 bp, Artificial
  Synthetic oligonucleotide
gtccacagcgatctgagctactggattgaaagcagaaacaatggtagctggaagcttgaa

SEQ ID NO: 437384 - DNA, 55 bp, Artificial
  Synthetic oligonucleotide
gtccacaggtgttggccctaccggtgtgaataagggcccgacgtcaggctcgtcg

SEQ ID NO: 437385 - DNA, 56 bp, Artificial
  Synthetic oligonucleotide
gtccacagttaaggccaaacttctatccgtagaagaagcctgtaagctgacgcccc

SEQ ID NO: 437386 - DNA, 58 bp, Artificial
  Synthetic oligonucleotide
gtccacatagatagttatgtgggcccagagatcgggcccacatcgtcttcccggttcg

SEQ ID NO: 437387 - DNA, 55 bp, Artificial
  Synthetic oligonucleotide
gtccacatcaccaactaggaaagaccccaatttgttacaacatacaggtctggag

SEQ ID NO: 437388 - DNA, 55 bp, Artificial
  Synthetic oligonucleotide
gtccacatcattatccgtgaactgtttggacaggatcttcaccgttggtgctctg

SEQ ID NO: 437389 - DNA, 53 bp, Artificial
  Synthetic oligonucleotide
gtccacatccggccaaaacgcgaaccaggaaagagaccccgccgcggtttcta

SEQ ID NO: 437390 - DNA, 60 bp, Artificial
  Synthetic oligonucleotide
gtccacattagcccactgtcaggaagtgctcagcatatagaggaatgttcctgttatccc

SEQ ID NO: 437391 - DNA, 55 bp, Artificial
  Synthetic oligonucleotide
gtccacattccgccagaaaacggtaaaggcctggtgttatgcggcagtaggatga

SEQ ID NO: 437392 - DNA, 56 bp, Artificial
  Synthetic oligonucleotide
gtccacattctatcctattcagcatctgactctgacctaagcccagccagtttgag

SEQ ID NO: 437393 - DNA, 56 bp, Artificial
  Synthetic oligonucleotide
gtccaccaaaagctcaagaatcttggatctataaatcaggccatggtaacaagatg

SEQ ID NO: 437394 - DNA, 55 bp, Artificial
  Synthetic oligonucleotide
gtccaccaaagggatcgacaggaaacgaatgatgttttcagaagtacccttgtca

SEQ ID NO: 437395 - DNA, 60 bp, Artificial
  Synthetic oligonucleotide
gtccacccacacgaaacagagttagtagaacacaatataacaatcctgcatttcaaatca

SEQ ID NO: 437396 - DNA, 60 bp, Artificial
  Synthetic oligonucleotide
gtccacccagtctagcatgggtgtccatagcaataagtcattggatgacctctctaacat

SEQ ID NO: 437397 - DNA, 60 bp, Artificial
  Synthetic oligonucleotide
gtccaccccagctacaaggcgaatcacgctccgtagccccctagatgtgcactgggagac

SEQ ID NO: 437398 - DNA, 51 bp, Artificial
  Synthetic oligonucleotide
gtccacccgagtgaggctagacacaaacagaaaatagtggcacctgcgaag

SEQ ID NO: 437399 - DNA, 60 bp, Artificial
  Synthetic oligonucleotide
gtccaccgcaagaaggccggagcactgcggacacgcatgctccgttcgcgcggttgggct

SEQ ID NO: 437400 - DNA, 56 bp, Artificial
  Synthetic oligonucleotide
gtccaccgggcattggtaaaactcggctggtggaggccctagccaagcaactggga

SEQ ID NO: 437401 - DNA, 51 bp, Artificial
  Synthetic oligonucleotide
gtccacctcactaacaccgggtttacgggcggggcccaaattatcacccag

SEQ ID NO: 437402 - DNA, 57 bp, Artificial
  Synthetic oligonucleotide
gtccaccttccggaaagaacgtgacgtacgaatgcaaatgtggagattacagcaccg

SEQ ID NO: 437403 - DNA, 60 bp, Artificial
  Synthetic oligonucleotide
gtccacgacgcctgtaatgattcgttatctgtcatcctcttgtcgtggatctccacaatt

SEQ ID NO: 437404 - DNA, 55 bp, Artificial
  Synthetic oligonucleotide
gtccacgattactggaatgtttggtgtgtcctgtcatgccgaactgtcaagatca

SEQ ID NO: 437405 - DNA, 56 bp, Artificial
  Synthetic oligonucleotide
gtccacgcatcgaagcagtgacccacaactacttgagtcgtccaccacgtgctctg

SEQ ID NO: 437406 - DNA, 58 bp, Artificial
  Synthetic oligonucleotide
gtccacgcctactccatcgccctccctcgcgccaaaaacctcgtctccaatctcaaga

SEQ ID NO: 437407 - DNA, 55 bp, Artificial
  Synthetic oligonucleotide
gtccacgggtatggaattcgtcgcttgttgcagcgtgatgggttcctctgtgcga

SEQ ID NO: 437408 - DNA, 56 bp, Artificial
  Synthetic oligonucleotide
gtccacgtgattggcaacacttggtcaacaattttagcagatggagaccgagagcc

SEQ ID NO: 437409 - DNA, 55 bp, Artificial
  Synthetic oligonucleotide
gtccactaaatacacaaactttaggaataggttgtaccaccacaaatacagcaac

SEQ ID NO: 437410 - DNA, 60 bp, Artificial
  Synthetic oligonucleotide
gtccactaagtcatcttcaccggacatcgtcggcaccattaatgccatactagctaggat

SEQ ID NO: 437411 - DNA, 60 bp, Artificial
  Synthetic oligonucleotide
gtccactagaatagctgaggcgacgtttgctatagtgtcgaaacatcctgcgcgtgttgg

SEQ ID NO: 437412 - DNA, 57 bp, Artificial
  Synthetic oligonucleotide
gtccactatcttctaacacctggccgctccactccgtggaattcctagcggatttta

SEQ ID NO: 437413 - DNA, 55 bp, Artificial
  Synthetic oligonucleotide
gtccactatggtcgggcaattatgcaggtactacacacagtggtcaggctccctg

SEQ ID NO: 437414 - DNA, 56 bp, Artificial
  Synthetic oligonucleotide
gtccactcaacactcaaactctcggaattggatgtttaactaccgatactacaact

SEQ ID NO: 437415 - DNA, 60 bp, Artificial
  Synthetic oligonucleotide
gtccactcaactaatggatagctaacaaataagaactatatttgtgaaacactcatacaa

SEQ ID NO: 437416 - DNA, 51 bp, Artificial
  Synthetic oligonucleotide
gtccactcaagccttgagtctgtgtcgaagagggcaataagagcattttca

SEQ ID NO: 437417 - DNA, 57 bp, Artificial
  Synthetic oligonucleotide
gtccactccacttccccagaagtcagactttcgacaatgcacttaccccccactcga

SEQ ID NO: 437418 - DNA, 60 bp, Artificial
  Synthetic oligonucleotide
gtccactcgctgtccttgcggagcagtgataaccggtcatgtgaagaacgggtccatgcg

SEQ ID NO: 437419 - DNA, 55 bp, Artificial
  Synthetic oligonucleotide
gtccactctcactaactgcaacaaatactgtgcagctgtaatggcactctgctgg

SEQ ID NO: 437420 - DNA, 56 bp, Artificial
  Synthetic oligonucleotide
gtccactctcaggtcatcagaaacccgtgcaaagacaaccaagtatccggtccccg

SEQ ID NO: 437421 - DNA, 58 bp, Artificial
  Synthetic oligonucleotide
gtccactgaatgcgcgaacattaggaatcgggtgtctaactactgatacaaacacgtt

SEQ ID NO: 437422 - DNA, 55 bp, Artificial
  Synthetic oligonucleotide
gtccactgacttatagtggtgagaacgctaactttatccggcgcttaccctgctc

SEQ ID NO: 437423 - DNA, 55 bp, Artificial
  Synthetic oligonucleotide
gtccactggatgataatatgcctcccgaatctgtttatgaagagggagagtgttc

SEQ ID NO: 437424 - DNA, 55 bp, Artificial
  Synthetic oligonucleotide
gtccactgggaccccctcctatcctaattcagggtccctctatcccagacctgct

SEQ ID NO: 437425 - DNA, 59 bp, Artificial
  Synthetic oligonucleotide
gtccactggttgcatatgggatcgggagaagttctcgagaccatatcctccgccaggtt

SEQ ID NO: 437426 - DNA, 57 bp, Artificial
  Synthetic oligonucleotide
gtccactgtttcacagggaggggcacccgcacctattgtctggtcagggtgtgtacc

SEQ ID NO: 437427 - DNA, 60 bp, Artificial
  Synthetic oligonucleotide
gtccacttaacgaaaaatcattttggaggatgtcctgaatctagcaaatcgaatgtcatg

SEQ ID NO: 437428 - DNA, 54 bp, Artificial
  Synthetic oligonucleotide
gtccacttcagaaatcaagttaagatacgtcgccgggttgacataaacccgggc

SEQ ID NO: 437429 - DNA, 57 bp, Artificial
  Synthetic oligonucleotide
gtccacttgaacaaggtgggttgatttttaagcaatggtgtactacaacatgtcaat

SEQ ID NO: 437430 - DNA, 58 bp, Artificial
  Synthetic oligonucleotide
gtccactttcctactggtaggtggttgtatagagttccagaaggaatatcatattcag

SEQ ID NO: 437431 - DNA, 53 bp, Artificial
  Synthetic oligonucleotide
gtccactttgttaccccctgaaattggcacgtccccacctaagaatattatta

SEQ ID NO: 437432 - DNA, 55 bp, Artificial
  Synthetic oligonucleotide
gtccacttttgttccatcagtccaactttctgcatcatgttcatcagcgtataac

SEQ ID NO: 437433 - DNA, 59 bp, Artificial
  Synthetic oligonucleotide
gtccagaaattccgtatatgaagacgttggtcctggattgcagaggaagattgttggga

SEQ ID NO: 437434 - DNA, 60 bp, Artificial
  Synthetic oligonucleotide
gtccagaaccctcagtgcagatacacccacagaggcaacgcaaagtgcacttctccgagg

SEQ ID NO: 437435 - DNA, 50 bp, Artificial
  Synthetic oligonucleotide
gtccagaactggctacactttgtcaatcataacacgtttaaccaggtcgt

SEQ ID NO: 437436 - DNA, 53 bp, Artificial
  Synthetic oligonucleotide
gtccagaaggggtactgtccgttttagtaggttgggacgcagggctacactcc

SEQ ID NO: 437437 - DNA, 55 bp, Artificial
  Synthetic oligonucleotide
gtccagaatgccctcaacgggaacggtgacccaaacaacatggacaaagcggtca

SEQ ID NO: 437438 - DNA, 55 bp, Artificial
  Synthetic oligonucleotide
gtccagaatgcccttaatgggaatggggaccccaacaacatggacagagccgtta

SEQ ID NO: 437439 - DNA, 60 bp, Artificial
  Synthetic oligonucleotide
gtccagacaagtctagctctaaatgataactgatgcgctgcattcgcacaaaggactgag

SEQ ID NO: 437440 - DNA, 57 bp, Artificial
  Synthetic oligonucleotide
gtccagacacggatgaagaaatagagttttacgatggtccatattaaatgtatacga

SEQ ID NO: 437441 - DNA, 53 bp, Artificial
  Synthetic oligonucleotide
gtccagaccagagcactccacccttaccccgaaatacccaaaccaaggagtcc

SEQ ID NO: 437442 - DNA, 56 bp, Artificial
  Synthetic oligonucleotide
gtccagaccataggaaaccccctaagactcatctaccatgtgtacggggtgtacta

SEQ ID NO: 437443 - DNA, 60 bp, Artificial
  Synthetic oligonucleotide
gtccagactggaacatggatgttaacttaattctaagctcgacattgacgggatgcctat

SEQ ID NO: 437444 - DNA, 55 bp, Artificial
  Synthetic oligonucleotide
gtccagacttggaaatttagtagaaacgccttgtggagacccaacgctttccgca

SEQ ID NO: 437445 - DNA, 55 bp, Artificial
  Synthetic oligonucleotide
gtccagagcaccactgtaaccatacaccaggacatcaacctccgctctctatgtg

SEQ ID NO: 437446 - DNA, 60 bp, Artificial
  Synthetic oligonucleotide
gtccagagcaccgatgaatatgttgaaaggacaaacatctattatcatgcctatagtgat

SEQ ID NO: 437447 - DNA, 58 bp, Artificial
  Synthetic oligonucleotide
gtccagagggttcaaagattcaccttctttgtcaagaagcgatgaatgacacgtgttg

SEQ ID NO: 437448 - DNA, 58 bp, Artificial
  Synthetic oligonucleotide
gtccagagtactacaaagattgctgacagagaagtttctaaccaggacttccgctggg

SEQ ID NO: 437449 - DNA, 60 bp, Artificial
  Synthetic oligonucleotide
gtccagagtcgtccaaatgcgagcaataccttcgatatttaatgcagtagtaatgtagaa

SEQ ID NO: 437450 - DNA, 55 bp, Artificial
  Synthetic oligonucleotide
gtccagagtttgttatgtcacaaaactccgccatatcaacctttatcagctatcc

SEQ ID NO: 437451 - DNA, 60 bp, Artificial
  Synthetic oligonucleotide
gtccagatataaacgccactctctgaatgagctgcagtgagtagttccccggtgcgtgaa

SEQ ID NO: 437452 - DNA, 60 bp, Artificial
  Synthetic oligonucleotide
gtccagatatatacgccattctctgcttgagctgcagtgataagttcccctgtgcgaaaa

SEQ ID NO: 437453 - DNA, 60 bp, Artificial
  Synthetic oligonucleotide
gtccagatggtccactgtccttcgtcacgaccaaatgtgaatacacgtagatcatgaaga

SEQ ID NO: 437454 - DNA, 59 bp, Artificial
  Synthetic oligonucleotide
gtccagatttggaagttgagataagccttgtggagacccaatactctcctcaagttgtg

SEQ ID NO: 437455 - DNA, 59 bp, Artificial
  Synthetic oligonucleotide
gtccagcaatgtaaatgacttctctatacattggattaggatatggaacaaactttcct

SEQ ID NO: 437456 - DNA, 56 bp, Artificial
  Synthetic oligonucleotide
gtccagcaccttacctgcgggtgtttatgcactgaatggcacattcaatgcagtct

SEQ ID NO: 437457 - DNA, 60 bp, Artificial
  Synthetic oligonucleotide
gtccagcagaatgaatgtgccaagactgttgagaagatattatccgacttagaggtgaat

SEQ ID NO: 437458 - DNA, 55 bp, Artificial
  Synthetic oligonucleotide
gtccagcatccagaattaaccggattggattgtattagaccttgcttctgggttg

SEQ ID NO: 437459 - DNA, 55 bp, Artificial
  Synthetic oligonucleotide
gtccagccaagagcatggaatatgatgctgtcgctaccacacactcatgggtccc

SEQ ID NO: 437460 - DNA, 55 bp, Artificial
  Synthetic oligonucleotide
gtccagccagaagatatggtcgagacacggtatgtaattactgatcagacccgtg

SEQ ID NO: 437461 - DNA, 55 bp, Artificial
  Synthetic oligonucleotide
gtccagcccaaccatactcgacaactacactcaatgtataaaaggctccccagag

SEQ ID NO: 437462 - DNA, 60 bp, Artificial
  Synthetic oligonucleotide
gtccagcccatccaactgccagaaaaggacagctggactgtcaatgacatacagaaatta

SEQ ID NO: 437463 - DNA, 60 bp, Artificial
  Synthetic oligonucleotide
gtccagccccttcatgcatctcagatttgcgtaaagctgatcggaagctatgaaagtaag

SEQ ID NO: 437464 - DNA, 55 bp, Artificial
  Synthetic oligonucleotide
gtccagcctggtatagcttctgagctggtcatcccaagtgagcgccttcactatc

SEQ ID NO: 437465 - DNA, 58 bp, Artificial
  Synthetic oligonucleotide
gtccagcctgtgaggtaagggacaggcttcacctttaagatgccgatgggtgggtatc

SEQ ID NO: 437466 - DNA, 55 bp, Artificial
  Synthetic oligonucleotide
gtccagcggaagctcgggatttctttggagtgagccatggtttgcgctgtgcgga

SEQ ID NO: 437467 - DNA, 55 bp, Artificial
  Synthetic oligonucleotide
gtccagctaaagctaaacgctttggtttccgatatgagcctggtgtaggcgttaa

SEQ ID NO: 437468 - DNA, 60 bp, Artificial
  Synthetic oligonucleotide
gtccagctaaggcgtgcgctaactacagctactataactttgttacctgatgcagagaga

SEQ ID NO: 437469 - DNA, 59 bp, Artificial
  Synthetic oligonucleotide
gtccagctggtattggcaaatcggaaatagtggaaactctagcctctgaattactgaaa

SEQ ID NO: 437470 - DNA, 60 bp, Artificial
  Synthetic oligonucleotide
gtccaggacagctcataagacacctgcgtcatacccgacaagtgcattggactgtggggt

SEQ ID NO: 437471 - DNA, 55 bp, Artificial
  Synthetic oligonucleotide
gtccaggactgcggtgagagggctgctagcatcactaacggggacggctctgatc

SEQ ID NO: 437472 - DNA, 54 bp, Artificial
  Synthetic oligonucleotide
gtccaggcaggggttaaaccaaaatatcctgacaatgtgatgcaacacgaatca

SEQ ID NO: 437473 - DNA, 60 bp, Artificial
  Synthetic oligonucleotide
gtccaggcaggggttaaagcgaaatatcctgacaacgtgatgcagcatgaggcaatagta

SEQ ID NO: 437474 - DNA, 55 bp, Artificial
  Synthetic oligonucleotide
gtccaggcggggcctgtcgcaccaggccaaatgagagaaccaaggggaagtgaca

SEQ ID NO: 437475 - DNA, 55 bp, Artificial
  Synthetic oligonucleotide
gtccaggctgcgttggcggcctacccatggctagcaccatgggacgctagttgtg

SEQ ID NO: 437476 - DNA, 57 bp, Artificial
  Synthetic oligonucleotide
gtccagggctagtccctttgtgcaccgcgaagtatagcaatatattgatccagtcga

SEQ ID NO: 437477 - DNA, 55 bp, Artificial
  Synthetic oligonucleotide
gtccaggtactgtaggcgctgctcccagcctgaaaacactgtcgataccaagctc

SEQ ID NO: 437478 - DNA, 60 bp, Artificial
  Synthetic oligonucleotide
gtccaggtgacaagataaccatctgcaatggttcaactgttgtggatcagagattgggca

SEQ ID NO: 437479 - DNA, 55 bp, Artificial
  Synthetic oligonucleotide
gtccaggtgactcctcaccatgtgctggttgatgaatacacaggagaatgggttg

SEQ ID NO: 437480 - DNA, 53 bp, Artificial
  Synthetic oligonucleotide
gtccaggttaaaatccaaaacccgaccgcttgttctgcaaacggttcttgtga

SEQ ID NO: 437481 - DNA, 55 bp, Artificial
  Synthetic oligonucleotide
gtccaggttgttcccacctggatctcctacatggagttgtactctattatcccgg

SEQ ID NO: 437482 - DNA, 55 bp, Artificial
  Synthetic oligonucleotide
gtccagtaaactgcgcacgctctggattcgataagataggattagcctatgactc

SEQ ID NO: 437483 - DNA, 54 bp, Artificial
  Synthetic oligonucleotide
gtccagtacatgtatgttccacccggggctcctgtccccaccggtagggacacg

SEQ ID NO: 437484 - DNA, 55 bp, Artificial
  Synthetic oligonucleotide
gtccagtaccagttgccatgacggtattggacggatgaccatttgtgtgcagggg

SEQ ID NO: 437485 - DNA, 55 bp, Artificial
  Synthetic oligonucleotide
gtccagtacctctacggcattggatctacggttgtatcctgggcactcaagtggg

SEQ ID NO: 437486 - DNA, 60 bp, Artificial
  Synthetic oligonucleotide
gtccagtagccaacagccctcacccagtcaccagcagaccatcatcccctcccataacag

SEQ ID NO: 437487 - DNA, 60 bp, Artificial
  Synthetic oligonucleotide
gtccagtatccaattatagaggaatggaagtccctgttcaccacctgagacaatcatttg

SEQ ID NO: 437488 - DNA, 60 bp, Artificial
  Synthetic oligonucleotide
gtccagtatgaaaagtggataactgcaggattagtcatgcctactttcaagatagttatt

SEQ ID NO: 437489 - DNA, 58 bp, Artificial
  Synthetic oligonucleotide
gtccagtattatactggcaagaaggtagtgtcaccaattagtccaactgtgtataaac

SEQ ID NO: 437490 - DNA, 58 bp, Artificial
  Synthetic oligonucleotide
gtccagtcaaactccggtgacgacccaataccgtgaattcgatccaagccatgtgtaa

SEQ ID NO: 437491 - DNA, 55 bp, Artificial
  Synthetic oligonucleotide
gtccagtcatacgagtgcgacaggatcctactgaagcagccacacatcattgatg

SEQ ID NO: 437492 - DNA, 60 bp, Artificial
  Synthetic oligonucleotide
gtccagtcatatgagtctcgtcatgacgtttcccatgttgggaaagtgatatgtgtatcc

SEQ ID NO: 437493 - DNA, 55 bp, Artificial
  Synthetic oligonucleotide
gtccagtccctccccggtccgagcaaagggggactccgggactccttgcatgctg

SEQ ID NO: 437494 - DNA, 60 bp, Artificial
  Synthetic oligonucleotide
gtccagtcccttgagctagacgctggtgtaggcattccctatatcgcgtatggcctcccc

SEQ ID NO: 437495 - DNA, 55 bp, Artificial
  Synthetic oligonucleotide
gtccagtggatccaaatccttgagcgtctctttcagtaccatctagagattgcac

SEQ ID NO: 437496 - DNA, 59 bp, Artificial
  Synthetic oligonucleotide
gtccagttcctgagtgatgcgttttcctctttgtcgaggaaatctttatagcttgcacc

SEQ ID NO: 437497 - DNA, 55 bp, Artificial
  Synthetic oligonucleotide
gtccagtttggagttggtgagaagaatggatgtgttagatgggtcatgaatgcct

SEQ ID NO: 437498 - DNA, 55 bp, Artificial
  Synthetic oligonucleotide
gtccataaaacaataccccatgtcacaagaagccagactggggatcaagccccac

SEQ ID NO: 437499 - DNA, 60 bp, Artificial
  Synthetic oligonucleotide
gtccataactgcatggagatacctgttaggaactttggagtctcaatgctgcataaagag

SEQ ID NO: 437500 - DNA, 55 bp, Artificial
  Synthetic oligonucleotide
gtccatacaaaggtttagggcgttgggattggtgatcgaagcacgaagcttgttt

SEQ ID NO: 437501 - DNA, 55 bp, Artificial
  Synthetic oligonucleotide
gtccatacaggcttcagtttgcaaaactgatcactattcagtaccaatctccagc

SEQ ID NO: 437502 - DNA, 51 bp, Artificial
  Synthetic oligonucleotide
gtccataccggagcgcttgtcgatagtagtcttcagggactcacagagtct

SEQ ID NO: 437503 - DNA, 59 bp, Artificial
  Synthetic oligonucleotide
gtccatactccggcagctttactggactcgtgggcctaaccatgatgacccgagcgaaa

SEQ ID NO: 437504 - DNA, 57 bp, Artificial
  Synthetic oligonucleotide
gtccatagcaacgtcaacgcgttgtggtatgtctgaaacgcccgttttaacattgcg

SEQ ID NO: 437505 - DNA, 55 bp, Artificial
  Synthetic oligonucleotide
gtccatagcaatgcttcccttagcattgggattgcaagaactaagtatcttggca

SEQ ID NO: 437506 - DNA, 60 bp, Artificial
  Synthetic oligonucleotide
gtccatagggctgctttccaggcaatcttgattagcaatacaatcattaggtccttcaat

SEQ ID NO: 437507 - DNA, 56 bp, Artificial
  Synthetic oligonucleotide
gtccataggggatgatggcataatgagtgcctttgaaggagtgtgggactgcccag

SEQ ID NO: 437508 - DNA, 55 bp, Artificial
  Synthetic oligonucleotide
gtccatataggcaaggtcatgtgtattagtgatgtcactcgtggaaccgggctga

SEQ ID NO: 437509 - DNA, 54 bp, Artificial
  Synthetic oligonucleotide
gtccatatcgaaccccgcggcgtaaagagattgacgcctttactcgataaaact

SEQ ID NO: 437510 - DNA, 54 bp, Artificial
  Synthetic oligonucleotide
gtccatatctggatttgttatagcaatacatggtctccctcctgggattatgag

SEQ ID NO: 437511 - DNA, 52 bp, Artificial
  Synthetic oligonucleotide
gtccatattagccaattatcaggaagtgctcagcacatagaggaatgctctt

SEQ ID NO: 437512 - DNA, 58 bp, Artificial
  Synthetic oligonucleotide
gtccatcatcaaggactttgagcagaggctcttgggatgaacctagctgaaagcaagg

SEQ ID NO: 437513 - DNA, 60 bp, Artificial
  Synthetic oligonucleotide
gtccatccaatagaaatacgcatgcgcatcattaccgatcatcttatccagtgcgcaatt

SEQ ID NO: 437514 - DNA, 58 bp, Artificial
  Synthetic oligonucleotide
gtccatccagcttacggctaaaatggttcagtcgtggagaaatccacgccagtagact

SEQ ID NO: 437515 - DNA, 57 bp, Artificial
  Synthetic oligonucleotide
gtccatccccgtgtctggtgaatggagactccggaacacctagcatcctagggacaa

SEQ ID NO: 437516 - DNA, 56 bp, Artificial
  Synthetic oligonucleotide
gtccatcgggcatgaaagagcaggctttggtgaaaaggttttacaggttgaatcat

SEQ ID NO: 437517 - DNA, 55 bp, Artificial
  Synthetic oligonucleotide
gtccatgaaatccaaggtgaaactttcgacgaggtgtcactcgtaagagccactg

SEQ ID NO: 437518 - DNA, 60 bp, Artificial
  Synthetic oligonucleotide
gtccatgaagcagaatgcactgacagtatagatacgttggatgatttatgcgacgaaagt

SEQ ID NO: 437519 - DNA, 55 bp, Artificial
  Synthetic oligonucleotide
gtccatgactgtcagctttatatatcgcacgtgagcaactcaagcgagggatctc

SEQ ID NO: 437520 - DNA, 55 bp, Artificial
  Synthetic oligonucleotide
gtccatgagagtgcttagagtcctgcttaaactgctttagatctgttggctcacg

SEQ ID NO: 437521 - DNA, 55 bp, Artificial
  Synthetic oligonucleotide
gtccatgaggaacggggcgtacttctttccacagtccagacatgccccaccggct

SEQ ID NO: 437522 - DNA, 57 bp, Artificial
  Synthetic oligonucleotide
gtccatgagggggtcatcgccccggtccgttacttgctgaaatgttttcagcctggc

SEQ ID NO: 437523 - DNA, 58 bp, Artificial
  Synthetic oligonucleotide
gtccatgagggggtcatctcccaagtccacctgcccttgaaaggttttcagcctggca

SEQ ID NO: 437524 - DNA, 60 bp, Artificial
  Synthetic oligonucleotide
gtccatgatgatattaccgtgtgcaccaatctgcacccagctagacgagtcaacgctgaa

SEQ ID NO: 437525 - DNA, 55 bp, Artificial
  Synthetic oligonucleotide
gtccatgcctacagcacagtccacaatgaaagctgaagagttaacaccaggccgg

SEQ ID NO: 437526 - DNA, 55 bp, Artificial
  Synthetic oligonucleotide
gtccatgggactgccatataatgacaatgtgttcaacatagagacagttcacacg

SEQ ID NO: 437527 - DNA, 60 bp, Artificial
  Synthetic oligonucleotide
gtccatggggaaaacctgccaagcagtgaaccaaattagcacatgcgctgggaatctgaa

SEQ ID NO: 437528 - DNA, 60 bp, Artificial
  Synthetic oligonucleotide
gtccatggtgcaggtatacagaaaaagtcctcacggcaaatttgcctgacaactattaca

SEQ ID NO: 437529 - DNA, 55 bp, Artificial
  Synthetic oligonucleotide
gtccatggttgttccctgggttagtgctagtcattttagaaataccacaccagat

SEQ ID NO: 437530 - DNA, 58 bp, Artificial
  Synthetic oligonucleotide
gtccatgtcatacttttctttctatggtgatgatgaaatagtttccactgacatagag

SEQ ID NO: 437531 - DNA, 55 bp, Artificial
  Synthetic oligonucleotide
gtccatgtgttgaggctgactttaattagttggatctttggacccctcctcgggt

SEQ ID NO: 437532 - DNA, 60 bp, Artificial
  Synthetic oligonucleotide
gtccatgttacatgtggccaccaaacaatgaatgttcatgcatgttttagacagcacaaa

SEQ ID NO: 437533 - DNA, 55 bp, Artificial
  Synthetic oligonucleotide
gtccattaaatacgcagacactgggaattggatgtcttacaaccgatacgaccac

SEQ ID NO: 437534 - DNA, 55 bp, Artificial
  Synthetic oligonucleotide
gtccattaaatacgcagacacttggaattggatgcttaacaactgacccgagcac

SEQ ID NO: 437535 - DNA, 53 bp, Artificial
  Synthetic oligonucleotide
gtccattatccgaaggtttacaaaacgtacttcgagaaggttgaaaggctgaa

SEQ ID NO: 437536 - DNA, 60 bp, Artificial
  Synthetic oligonucleotide
gtccattccggacgacaccctagagaagcacactctcaggtcagagacctcgacctacaa

SEQ ID NO: 437537 - DNA, 52 bp, Artificial
  Synthetic oligonucleotide
gtccattcttctgaatatacccaactatctcgaacttagtgtccatgcattt

SEQ ID NO: 437538 - DNA, 55 bp, Artificial
  Synthetic oligonucleotide
gtccattcttggcgccgaacctgaagaataccacgcctttctagccggcattggt

SEQ ID NO: 437539 - DNA, 55 bp, Artificial
  Synthetic oligonucleotide
gtccattgaatacgcagactttaggaataggttgtattaccacaaatacagcgac

SEQ ID NO: 437540 - DNA, 55 bp, Artificial
  Synthetic oligonucleotide
gtccattgccaacgtggacgggtacagaactaaactaacggcgataatagcctcg

SEQ ID NO: 437541 - DNA, 55 bp, Artificial
  Synthetic oligonucleotide
gtccattgctggactcttggtgataatctgtgcggacctgacaccacaggtagcg

SEQ ID NO: 437542 - DNA, 60 bp, Artificial
  Synthetic oligonucleotide
gtccattgtgctccctgggactggcaagaagttctcgaccacttctactgcttgaactgt

SEQ ID NO: 437543 - DNA, 55 bp, Artificial
  Synthetic oligonucleotide
gtccattgtgctcgtgccctaatgcatatacccaaatacctagacgaatgaaaac

SEQ ID NO: 437544 - DNA, 55 bp, Artificial
  Synthetic oligonucleotide
gtccatttatgattagagaagcaggtagaatcatgagtgaactatctggaactcc

SEQ ID NO: 437545 - DNA, 57 bp, Artificial
  Synthetic oligonucleotide
gtccatttatgtggctatggactttaatcaagtgggttagacgggtgataaggtcca

SEQ ID NO: 437546 - DNA, 60 bp, Artificial
  Synthetic oligonucleotide
gtccatttgcacagactagatatgctccagtcaactggggtcatggagagataaatgatt

SEQ ID NO: 437547 - DNA, 55 bp, Artificial
  Synthetic oligonucleotide
gtccatttgcagttagtgcgtttttaggttgtgtaccaggttcagttgttacgca

SEQ ID NO: 437548 - DNA, 60 bp, Artificial
  Synthetic oligonucleotide
gtccatttgctcaaacaagatatgctccagtcaattgggggcatggagaaataaatgatt

SEQ ID NO: 437549 - DNA, 55 bp, Artificial
  Synthetic oligonucleotide
gtcccaaaacattgacttactcgctttaataggtgttgatcgttgttccttcgcc

SEQ ID NO: 437550 - DNA, 54 bp, Artificial
  Synthetic oligonucleotide
gtcccaaaaggaccctcctctcctagacgctttgtcctcgccgcctcacaaccc

SEQ ID NO: 437551 - DNA, 55 bp, Artificial
  Synthetic oligonucleotide
gtcccaaaccagcacactataaaacgtgctgtcctttgttgtgtggcaaggcagt

SEQ ID NO: 437552 - DNA, 58 bp, Artificial
  Synthetic oligonucleotide
gtcccaaacttggaaagagacccaaaccatgctcactgacaacgccgagatccacacc

SEQ ID NO: 437553 - DNA, 55 bp, Artificial
  Synthetic oligonucleotide
gtcccaaatatgtcaaatcaaataaactggtccttgcaacaggaccgaggaacgt

SEQ ID NO: 437554 - DNA, 55 bp, Artificial
  Synthetic oligonucleotide
gtcccaaatgcggagacagataatcagtcaggtccagttgcgcaccaggtgatag

SEQ ID NO: 437555 - DNA, 59 bp, Artificial
  Synthetic oligonucleotide
gtcccaacacaaggtcaatgatggttccatcttcggctcctggaaggcctgccaaacat

SEQ ID NO: 437556 - DNA, 55 bp, Artificial
  Synthetic oligonucleotide
gtcccaacagagaaataaattcaatccgtcatttcccaagtcaagacaatcacga

SEQ ID NO: 437557 - DNA, 57 bp, Artificial
  Synthetic oligonucleotide
gtcccaacccagaggtaggcgtcagcccataccaaaggcgcgccagtctcagggccg

SEQ ID NO: 437558 - DNA, 51 bp, Artificial
  Synthetic oligonucleotide
gtcccaaccgcaccagttgtcatccggcggtgcggaaagggtttcctaggg

SEQ ID NO: 437559 - DNA, 53 bp, Artificial
  Synthetic oligonucleotide
gtcccaaccgtaaccgtgttctcgatgaccggaggggcttcgcggtcttgacc

SEQ ID NO: 437560 - DNA, 55 bp, Artificial
  Synthetic oligonucleotide
gtcccaactgctcagcaagtggggtcacgccatcgatcagttggcagaggacatc

SEQ ID NO: 437561 - DNA, 58 bp, Artificial
  Synthetic oligonucleotide
gtcccaagtcctacaactctctgattttcgatcagattcaaatcctccgttacaaatg

SEQ ID NO: 437562 - DNA, 60 bp, Artificial
  Synthetic oligonucleotide
gtcccaagtctgtgtagttgtctgtatggatgagtcgcgttctctatgtcagattccgca

SEQ ID NO: 437563 - DNA, 55 bp, Artificial
  Synthetic oligonucleotide
gtcccaatcttgtaacgaaacatgtagtccgcgggaaatgtcaacactttagccg

SEQ ID NO: 437564 - DNA, 60 bp, Artificial
  Synthetic oligonucleotide
gtcccaatgatctagcccacattgtcttacccgtacgactatcaccttctatcacaatac

SEQ ID NO: 437565 - DNA, 55 bp, Artificial
  Synthetic oligonucleotide
gtcccaattacctaggggtagacaaccaatatctgacccatttgctggagcaaat

SEQ ID NO: 437566 - DNA, 56 bp, Artificial
  Synthetic oligonucleotide
gtcccacaaagcctttgaccattgcttggtgcttggcctcatacatctggccggac

SEQ ID NO: 437567 - DNA, 50 bp, Artificial
  Synthetic oligonucleotide
gtcccacagcatgtcgaggagtgaaattatcagccatgttcatcacaatc

SEQ ID NO: 437568 - DNA, 59 bp, Artificial
  Synthetic oligonucleotide
gtcccacatctgaaattgggtcataaatgggccaaaatgtgtaactgggtatgcaattg

SEQ ID NO: 437569 - DNA, 59 bp, Artificial
  Synthetic oligonucleotide
gtcccaccgccacccactaccagtttagtagatacatatcgctttgtacagtctgttgc

SEQ ID NO: 437570 - DNA, 55 bp, Artificial
  Synthetic oligonucleotide
gtcccacctggaacaggcctggaaagaacgtgtgtgggccggaatgattgggccg

SEQ ID NO: 437571 - DNA, 55 bp, Artificial
  Synthetic oligonucleotide
gtcccacctggtgcctgttatttccagctgtgatgaggtcaagccacttcatggc

SEQ ID NO: 437572 - DNA, 59 bp, Artificial
  Synthetic oligonucleotide
gtcccacctgtcgagaagacattcgcaatggcggacgataaaggtactgatcctaaaga

SEQ ID NO: 437573 - DNA, 58 bp, Artificial
  Synthetic oligonucleotide
gtcccactatgttggttataacatgtgtaacgttcgaggtcgggttctagtgctgcca

SEQ ID NO: 437574 - DNA, 55 bp, Artificial
  Synthetic oligonucleotide
gtcccactcgtcctcctgtaattattgaacctgtaggccctactgacccttccat

SEQ ID NO: 437575 - DNA, 51 bp, Artificial
  Synthetic oligonucleotide
gtcccactcttaaccacccaaccttcgtgggtagtgaaagctgtaaacccg

SEQ ID NO: 437576 - DNA, 57 bp, Artificial
  Synthetic oligonucleotide
gtcccactgcccgaggccccggttagtaagcctgctaactcacctattcttgctaca

SEQ ID NO: 437577 - DNA, 52 bp, Artificial
  Synthetic oligonucleotide
gtcccactttagtcaaagtggaagacgttcaattttgggcctaattgggcct

SEQ ID NO: 437578 - DNA, 54 bp, Artificial
  Synthetic oligonucleotide
gtcccactttgctataggccttgcggcgtactttagtaacgctcgtgttgtttt

SEQ ID NO: 437579 - DNA, 60 bp, Artificial
  Synthetic oligonucleotide
gtcccagaaactggcagtgattctgacagaacgcgaagtgcttgaacagtccatggaaca

SEQ ID NO: 437580 - DNA, 55 bp, Artificial
  Synthetic oligonucleotide
gtcccagaaacttttactcgagaatggaatattcttacaaacaaggggacaatca

SEQ ID NO: 437581 - DNA, 60 bp, Artificial
  Synthetic oligonucleotide
gtcccagaagctcgaactgatgtcgtccagatttggtagttgaggtacgctttgtgtaga

SEQ ID NO: 437582 - DNA, 55 bp, Artificial
  Synthetic oligonucleotide
gtcccaggatcaagtctatatacacatggtttattcgcatatggacgaatgttgt

SEQ ID NO: 437583 - DNA, 58 bp, Artificial
  Synthetic oligonucleotide
gtcccaggcaaaaaggtcgactggttgtcagaccagcctgaggctacctttagagctc

SEQ ID NO: 437584 - DNA, 60 bp, Artificial
  Synthetic oligonucleotide
gtcccaggggaaacatcagcagtagaatgtttagatttattggatagattgtatgcagtg

SEQ ID NO: 437585 - DNA, 55 bp, Artificial
  Synthetic oligonucleotide
gtcccaggggcgcccttgggcttatcgcacgccggcttttcggtcaatacggagc

SEQ ID NO: 437586 - DNA, 55 bp, Artificial
  Synthetic oligonucleotide
gtcccaggtgttcctgaagagtataagactgggtacaggccaccccaccttgggc

SEQ ID NO: 437587 - DNA, 55 bp, Artificial
  Synthetic oligonucleotide
gtcccagtagacacacgtttctctggctacggaagaatcgttgcctaagtccgcg

SEQ ID NO: 437588 - DNA, 52 bp, Artificial
  Synthetic oligonucleotide
gtcccagtcggacgttgtttgaccctccccgcgttttcaaccctacgcagga

SEQ ID NO: 437589 - DNA, 55 bp, Artificial
  Synthetic oligonucleotide
gtcccagtgagctttaagcaccagaagtcgcagcatagcaccacaatatttcaca

SEQ ID NO: 437590 - DNA, 55 bp, Artificial
  Synthetic oligonucleotide
gtcccagttggtgctgtgactgaacagggatatcttaatctcagtggacgccaaa

SEQ ID NO: 437591 - DNA, 55 bp, Artificial
  Synthetic oligonucleotide
gtcccagttgtgtagcagtgcaaggcaaatactacgtgtcgctagatatacctga

SEQ ID NO: 437592 - DNA, 54 bp, Artificial
  Synthetic oligonucleotide
gtcccataccactagatttcctcgtcctatggaacgagaaggttaacagagagg

SEQ ID NO: 437593 - DNA, 60 bp, Artificial
  Synthetic oligonucleotide
gtcccatagcccaacagaagcacaagtttggacctgtctgcctgtgcaatcgtgcttaca

SEQ ID NO: 437594 - DNA, 57 bp, Artificial
  Synthetic oligonucleotide
gtcccatagttgacgaagacttgaattggacctctctagtaattgggccttactgat

SEQ ID NO: 437595 - DNA, 56 bp, Artificial
  Synthetic oligonucleotide
gtcccatatatactacaagtctctttaggcccttttaggacaccatgggcaaaatc

SEQ ID NO: 437596 - DNA, 54 bp, Artificial
  Synthetic oligonucleotide
gtcccatatataggagtctcctaaaaccctctaacgggtcctcagaataatatt

SEQ ID NO: 437597 - DNA, 58 bp, Artificial
  Synthetic oligonucleotide
gtcccatatgtgtgtaatcctgtaacgttagagcgtgtggagaaggttccagtgatgg

SEQ ID NO: 437598 - DNA, 55 bp, Artificial
  Synthetic oligonucleotide
gtcccatcaaaagtaagcctcagaagtttaaacaaagggccagagcaagctcccg

SEQ ID NO: 437599 - DNA, 60 bp, Artificial
  Synthetic oligonucleotide
gtcccatcatacatctgtacggcggtcctaaatagatgcaggattacactacatctaaag

SEQ ID NO: 437600 - DNA, 53 bp, Artificial
  Synthetic oligonucleotide
gtcccatgagctggctttattcggacccgtgacagtcttcgagctcgaacagc

SEQ ID NO: 437601 - DNA, 55 bp, Artificial
  Synthetic oligonucleotide
gtcccatgatcaaggtagatctgagctcttccaatgcaggtttagctaccatgcc

SEQ ID NO: 437602 - DNA, 55 bp, Artificial
  Synthetic oligonucleotide
gtcccatgctctgcctttaatctgtgaccgtgaagcaatgtaaggccatccttca

SEQ ID NO: 437603 - DNA, 55 bp, Artificial
  Synthetic oligonucleotide
gtcccatgggttagtgctagccattataggaatactacaccagatacatactccc

SEQ ID NO: 437604 - DNA, 57 bp, Artificial
  Synthetic oligonucleotide
gtcccatgtgtgcagagttttctggagcacgtgccaaaaaccagggtctaccagttt

SEQ ID NO: 437605 - DNA, 55 bp, Artificial
  Synthetic oligonucleotide
gtcccatttgaatcgagctcatcagccggctacggctatgacggtaagaagggtg

SEQ ID NO: 437606 - DNA, 53 bp, Artificial
  Synthetic oligonucleotide
gtccccaattgaccaccctctctaaaactcagggaattggggacactggggac

SEQ ID NO: 437607 - DNA, 51 bp, Artificial
  Synthetic oligonucleotide
gtccccacagcacaaggaatgatggccgtagcaaccaatgtctctgttcaa

SEQ ID NO: 437608 - DNA, 53 bp, Artificial
  Synthetic oligonucleotide
gtccccacatagcagcgcccggagccccttctaaaagggaccgagggggtggc

SEQ ID NO: 437609 - DNA, 57 bp, Artificial
  Synthetic oligonucleotide
gtccccacatagcagctcccgagccccctcctaaaatgaccggaggtggagcttgga

SEQ ID NO: 437610 - DNA, 60 bp, Artificial
  Synthetic oligonucleotide
gtccccactgagcgcgttgcaggtgtcatactgaaagtggtgatcatgtgtgcaagcgtg

SEQ ID NO: 437611 - DNA, 60 bp, Artificial
  Synthetic oligonucleotide
gtccccactggccgcacgacctggagcattcatgccagtggtgcttggatgaccacagag

SEQ ID NO: 437612 - DNA, 58 bp, Artificial
  Synthetic oligonucleotide
gtccccagtggggctaacactgcaattcgtatgcggtgtttcagggcctatggtgacg

SEQ ID NO: 437613 - DNA, 60 bp, Artificial
  Synthetic oligonucleotide
gtccccagttaatgtcctgtgcgatccagtgatcgtcaaatctatccagcacttgtgaag

SEQ ID NO: 437614 - DNA, 57 bp, Artificial
  Synthetic oligonucleotide
gtccccattggccgcgtcacaaaaggaaaggcctggacaaacaggccgatgaccaga

SEQ ID NO: 437615 - DNA, 54 bp, Artificial
  Synthetic oligonucleotide
gtcccccactcagaacgctccctgaaagcctgtatagctgtggtccctctttaa

SEQ ID NO: 437616 - DNA, 59 bp, Artificial
  Synthetic oligonucleotide
gtcccccactcagaacgctcgctcaaagcttgggatgccacgtatgtgttatttgtact

SEQ ID NO: 437617 - DNA, 57 bp, Artificial
  Synthetic oligonucleotide
gtcccccactcagaacgctcgctcaaagcttgtatatgtgtggtccccctttaagta

SEQ ID NO: 437618 - DNA, 52 bp, Artificial
  Synthetic oligonucleotide
gtcccccactcaggacgctccctcacagcttatttagtgcgtggtccccttt

SEQ ID NO: 437619 - DNA, 52 bp, Artificial
  Synthetic oligonucleotide
gtccccccagacgcaccattccgcttccggccccccgggactcacccaattc

SEQ ID NO: 437620 - DNA, 50 bp, Artificial
  Synthetic oligonucleotide
gtccccccggggttctcgtccctcttggggtcccaatgacccccggcata

SEQ ID NO: 437621 - DNA, 58 bp, Artificial
  Synthetic oligonucleotide
gtcccccgattgagctctctctaaaactctatatgaatcggtggaacggtggacaata

SEQ ID NO: 437622 - DNA, 52 bp, Artificial
  Synthetic oligonucleotide
gtcccccggtcgcaggttgcgtgggggtctttgtcttgaagaagccttttcc

SEQ ID NO: 437623 - DNA, 55 bp, Artificial
  Synthetic oligonucleotide
gtccccctctcctaccgcgagtgccctcccccactgtggagccactgctacctct

SEQ ID NO: 437624 - DNA, 50 bp, Artificial
  Synthetic oligonucleotide
gtccccctttaaaggaggttgggggcctttccttaccaatgtgggatcca

SEQ ID NO: 437625 - DNA, 55 bp, Artificial
  Synthetic oligonucleotide
gtccccgatttgggtcaaagctgccttctctttagctggtggcgcccctgtgttc

SEQ ID NO: 437626 - DNA, 55 bp, Artificial
  Synthetic oligonucleotide
gtccccggagatgagcacgttcccgctggcgtttacgtagcccactatctcagac

SEQ ID NO: 437627 - DNA, 54 bp, Artificial
  Synthetic oligonucleotide
gtccccggatgttttacccccggtgcgatttctttagctgcgtgttctttagca

SEQ ID NO: 437628 - DNA, 53 bp, Artificial
  Synthetic oligonucleotide
gtccccggatttttagtgggtgatgtctggatattacggtgttactgtttacc

SEQ ID NO: 437629 - DNA, 55 bp, Artificial
  Synthetic oligonucleotide
gtccccggctactacgcgtaaattgccgttgatacgaaagaaacattggcgcgga

SEQ ID NO: 437630 - DNA, 59 bp, Artificial
  Synthetic oligonucleotide
gtccccggtgcgaaaatccatagttgcgacagtttatgtgaatgtaatagctacaccca

SEQ ID NO: 437631 - DNA, 55 bp, Artificial
  Synthetic oligonucleotide
gtccccgtctatgagaggttactactcttttcgggtgtttcttagtagcgatgtc

SEQ ID NO: 437632 - DNA, 55 bp, Artificial
  Synthetic oligonucleotide
gtccccgtctttctcgacgtaggatttgacatcggagctcgatttagctccctga

SEQ ID NO: 437633 - DNA, 58 bp, Artificial
  Synthetic oligonucleotide
gtccccgtgtaatcgtgttgtgttttcttatattatcatctgataatgtacccgtcta

SEQ ID NO: 437634 - DNA, 55 bp, Artificial
  Synthetic oligonucleotide
gtcccctctatgtggaacacctcatatgggacctaaatattatggacctacagtg

SEQ ID NO: 437635 - DNA, 55 bp, Artificial
  Synthetic oligonucleotide
gtcccctgcactatataaagtcatcatgatacattgtagtgcgttctctgctgtc

SEQ ID NO: 437636 - DNA, 57 bp, Artificial
  Synthetic oligonucleotide
gtcccctgcggcacgcgtcatagacttcgtaggcgcgttatgaaacgagtagacccc

SEQ ID NO: 437637 - DNA, 55 bp, Artificial
  Synthetic oligonucleotide
gtcccctggaaaagccatagcttttacggcaccaaggaggtcacttgctgagtcc

SEQ ID NO: 437638 - DNA, 52 bp, Artificial
  Synthetic oligonucleotide
gtccccttacttgaaagtagtggtgggagtacaactttagacgtcccacctg

SEQ ID NO: 437639 - DNA, 55 bp, Artificial
  Synthetic oligonucleotide
gtccccttcttccaatccttggcctctaccaatggcccttttgactggataggcg

SEQ ID NO: 437640 - DNA, 55 bp, Artificial
  Synthetic oligonucleotide
gtcccgacgctgtcgctcattttaatcatcttgcttctgtgcttcgtgccccgca

SEQ ID NO: 437641 - DNA, 57 bp, Artificial
  Synthetic oligonucleotide
gtcccgacgtgccaaggggatgcgaaggtccttgtaaggtgcagtcctttgaatcta

SEQ ID NO: 437642 - DNA, 55 bp, Artificial
  Synthetic oligonucleotide
gtcccgacgtgccaaggggctgtgaaggcccttgtaaagttcaatcgtttgaatc

SEQ ID NO: 437643 - DNA, 52 bp, Artificial
  Synthetic oligonucleotide
gtcccgacgttaaagggaggtaaccacaagcatactgccgccttccccggcg

SEQ ID NO: 437644 - DNA, 59 bp, Artificial
  Synthetic oligonucleotide
gtcccgataaagtgtgggagggaccagagacttttggatcagtgcagacaagagtttga

SEQ ID NO: 437645 - DNA, 50 bp, Artificial
  Synthetic oligonucleotide
gtcccgatcatgtcctcttgcttgaattccccaactgtagaatccttgta

SEQ ID NO: 437646 - DNA, 55 bp, Artificial
  Synthetic oligonucleotide
gtcccgatgatgcgatactatatatacgtccagtattggaagcgatttctcagac

SEQ ID NO: 437647 - DNA, 55 bp, Artificial
  Synthetic oligonucleotide
gtcccgcaatctgggtaaggtcatcgataccctgacatgcggcttcgccgacctc

SEQ ID NO: 437648 - DNA, 60 bp, Artificial
  Synthetic oligonucleotide
gtcccgcagccagtcctcatcttcgttggcgaggattacagcaggaatggagcgtttagc

SEQ ID NO: 437649 - DNA, 59 bp, Artificial
  Synthetic oligonucleotide
gtcccgccccccaagcccgagcatgagccaatgtcacgagcgaagagttcgcaggggga

SEQ ID NO: 437650 - DNA, 59 bp, Artificial
  Synthetic oligonucleotide
gtcccgcccgaaaccccatctgactgtgtggtattatgtttcgtgtccgcgtgcaatga

SEQ ID NO: 437651 - DNA, 51 bp, Artificial
  Synthetic oligonucleotide
gtcccgccctcacgtccagaaggggtactgtccgttttagtaggttgggac

SEQ ID NO: 437652 - DNA, 60 bp, Artificial
  Synthetic oligonucleotide
gtcccgccctcagtgagctagctgcactcaccgataaggtgacaaacgccctgacaaacg

SEQ ID NO: 437653 - DNA, 60 bp, Artificial
  Synthetic oligonucleotide
gtcccgccttgggttcatgttatgcagaaccactatcacagaatagcctgtgcacttggg

SEQ ID NO: 437654 - DNA, 50 bp, Artificial
  Synthetic oligonucleotide
gtcccgctattcgaagtacagggtgaggtatgcacacttcacctgggaac

SEQ ID NO: 437655 - DNA, 55 bp, Artificial
  Synthetic oligonucleotide
gtcccggaagactttcgtggaactcatgaggaggggtgacctcccagtttggcta

SEQ ID NO: 437656 - DNA, 60 bp, Artificial
  Synthetic oligonucleotide
gtcccggattgtctcattgcagtggaggtcaagctctgtggcaggatgaggattggtgta

SEQ ID NO: 437657 - DNA, 53 bp, Artificial
  Synthetic oligonucleotide
gtcccggcatgtaaagccggtaccttacgagtcttgttggaatcgaaaccaac

SEQ ID NO: 437658 - DNA, 59 bp, Artificial
  Synthetic oligonucleotide
gtcccggcccctgaattcttcacggaggtggatggggtgcgactgcacaggtatgctcc

SEQ ID NO: 437659 - DNA, 55 bp, Artificial
  Synthetic oligonucleotide
gtcccggctcattttgactcaccctgtttttatcagacccttgcgacccagttac

SEQ ID NO: 437660 - DNA, 56 bp, Artificial
  Synthetic oligonucleotide
gtcccggctgggagcactgagtacatcccacgatactaccccacacacaagcccga

SEQ ID NO: 437661 - DNA, 54 bp, Artificial
  Synthetic oligonucleotide
gtcccggtaagtgtttcccgtcgacgttttacagacgaattaatgcaggtgatc

SEQ ID NO: 437662 - DNA, 55 bp, Artificial
  Synthetic oligonucleotide
gtcccggtatctacgggaaggttgataatctggcttctaccttgcaccgcgaggg

SEQ ID NO: 437663 - DNA, 56 bp, Artificial
  Synthetic oligonucleotide
gtcccggtatttacgggaaagttgataatctcgcgtctaccatgcaccgcgaggga

SEQ ID NO: 437664 - DNA, 53 bp, Artificial
  Synthetic oligonucleotide
gtcccgtaacaatagcttcagatcgcaggtggttaacggtctttaggggaggg

SEQ ID NO: 437665 - DNA, 56 bp, Artificial
  Synthetic oligonucleotide
gtcccgtaacaatagcttcagatcgcaggtggttaacggtctttgcgctttgttac

SEQ ID NO: 437666 - DNA, 55 bp, Artificial
  Synthetic oligonucleotide
gtcccgtagccctactgttgaacgcttcattttaagctccacggaattaacgctg

SEQ ID NO: 437667 - DNA, 55 bp, Artificial
  Synthetic oligonucleotide
gtcccgtagcgaatgtaactcaatcagcgtttacgcaatcatctaatattctcgc

SEQ ID NO: 437668 - DNA, 60 bp, Artificial
  Synthetic oligonucleotide
gtcccgtcactaagcctggcgctagtgcaccaacagtgagtaaaggtgctgatcagccag

SEQ ID NO: 437669 - DNA, 60 bp, Artificial
  Synthetic oligonucleotide
gtcccgtcagctgttctagttgctgaacgtccaggatgtaagatcgatcaggcgctgttt

SEQ ID NO: 437670 - DNA, 55 bp, Artificial
  Synthetic oligonucleotide
gtcccgtcaggcttggtcctggcataggttcggttgtagacgagttctccggttg

SEQ ID NO: 437671 - DNA, 55 bp, Artificial
  Synthetic oligonucleotide
gtcccgtctattcaatctagaggcctgtttggggccattgccggctttattgagg

SEQ ID NO: 437672 - DNA, 60 bp, Artificial
  Synthetic oligonucleotide
gtcccgtggagcacagttgtagcgtaattgataaggaactagcgagcatgtcgcgagcac

SEQ ID NO: 437673 - DNA, 60 bp, Artificial
  Synthetic oligonucleotide
gtcccgtgtctatggagtcagccccgggttggtacataaccttatcggcatgctgcagac

SEQ ID NO: 437674 - DNA, 55 bp, Artificial
  Synthetic oligonucleotide
gtcccgtgtggattgggcccatattcgtatgccttcccgaagctgaatcctcctg

SEQ ID NO: 437675 - DNA, 55 bp, Artificial
  Synthetic oligonucleotide
gtcccgttgaagtcgaatggtagaaccatatgggcgtatgtgtatggtatgtcgc

SEQ ID NO: 437676 - DNA, 58 bp, Artificial
  Synthetic oligonucleotide
gtcccgttgctgtgacaaatatcaacaatggtacaactatgggttcttgtagaattaa

SEQ ID NO: 437677 - DNA, 53 bp, Artificial
  Synthetic oligonucleotide
gtcccgttggagtacggcaacatgggccacaaagtcctaatcttaaacccgtc

SEQ ID NO: 437678 - DNA, 60 bp, Artificial
  Synthetic oligonucleotide
gtccctaaccttgacaggtttgtgtttcagatggccagtgccacagacgatgcacaaaag

SEQ ID NO: 437679 - DNA, 58 bp, Artificial
  Synthetic oligonucleotide
gtccctaagtttatcaagatcagtgtctcctcgtttagacttgcgtaggagtctttga

SEQ ID NO: 437680 - DNA, 52 bp, Artificial
  Synthetic oligonucleotide
gtccctaccctgattggatggcacatcaaactattgttggccatcaaagtac

SEQ ID NO: 437681 - DNA, 55 bp, Artificial
  Synthetic oligonucleotide
gtccctactagtccggattggaacatggatgttaatcttattttgagttccaccc

SEQ ID NO: 437682 - DNA, 55 bp, Artificial
  Synthetic oligonucleotide
gtccctacttcaatgggcttcgcaaccgctacacggccgggacggacgaagaaca

SEQ ID NO: 437683 - DNA, 60 bp, Artificial
  Synthetic oligonucleotide
gtccctagaataaatattcagagttcaatggaatagccataaaatcactatgacatagaa

SEQ ID NO: 437684 - DNA, 52 bp, Artificial
  Synthetic oligonucleotide
gtccctagtggtggttacagattgggatgtgaaggggggtggcaaccccctt

SEQ ID NO: 437685 - DNA, 55 bp, Artificial
  Synthetic oligonucleotide
gtccctagttgcctcatcaggtacattggagttcataactgagggtttcacctgg

SEQ ID NO: 437686 - DNA, 55 bp, Artificial
  Synthetic oligonucleotide
gtccctatacgttatttagcggtttgtacaatatcgagcaatgattgacggctgg

SEQ ID NO: 437687 - DNA, 55 bp, Artificial
  Synthetic oligonucleotide
gtccctataggatcaaaggacaaaactgcagaagattgtttccaacggaggaggc

SEQ ID NO: 437688 - DNA, 51 bp, Artificial
  Synthetic oligonucleotide
gtccctattcgctacgcagcaattaatctcatgcagttaccacgctgtctt

SEQ ID NO: 437689 - DNA, 60 bp, Artificial
  Synthetic oligonucleotide
gtccctcaacttctgtcatatattgtggagtcctggagtcccttatatacataaagcctc

SEQ ID NO: 437690 - DNA, 60 bp, Artificial
  Synthetic oligonucleotide
gtccctcacacgtcgctatcatccaatcaaattgatgactgtaacgttagataattgttt

SEQ ID NO: 437691 - DNA, 55 bp, Artificial
  Synthetic oligonucleotide
gtccctccaggtccacgtcataatcacttagcaaaccgaaagtgataagacattg

SEQ ID NO: 437692 - DNA, 55 bp, Artificial
  Synthetic oligonucleotide
gtccctcctcgttagtgcctgtgatcgtgctgagaacagccttatctgaacaagg

SEQ ID NO: 437693 - DNA, 58 bp, Artificial
  Synthetic oligonucleotide
gtccctcctgatggattgggccgtaaatttgataagtcgtctgcctgggctaacaggc

SEQ ID NO: 437694 - DNA, 50 bp, Artificial
  Synthetic oligonucleotide
gtccctcgacccaacccgcagcgaaaccgtcccccccctgcgggaacaac

SEQ ID NO: 437695 - DNA, 58 bp, Artificial
  Synthetic oligonucleotide
gtccctcgcggtatgcgtcgtagacttcgccgacgcgtgatgaaccgagtgaacccaa

SEQ ID NO: 437696 - DNA, 53 bp, Artificial
  Synthetic oligonucleotide
gtccctcggtgttgttatgtctgacaaggacgttacaacgatgttctactaca

SEQ ID NO: 437697 - DNA, 55 bp, Artificial
  Synthetic oligonucleotide
gtccctcgtgggtgtgaaggcccatgtaaggtccagtcttttgaacagcgtcatg

SEQ ID NO: 437698 - DNA, 55 bp, Artificial
  Synthetic oligonucleotide
gtccctcgtggttgtgagggtccgtgtaaggttcagtcgtacgaacagagggatg

SEQ ID NO: 437699 - DNA, 55 bp, Artificial
  Synthetic oligonucleotide
gtccctctctccaagctcacttacaggccctccaagcagtacaacgagaggtctg

SEQ ID NO: 437700 - DNA, 60 bp, Artificial
  Synthetic oligonucleotide
gtccctctctggacagataatgctcatggcgttgggagcgttcctatgcataggaatact

SEQ ID NO: 437701 - DNA, 60 bp, Artificial
  Synthetic oligonucleotide
gtccctcttcttgccattggatgctattcacaggtgaatcccataaccctcacagcagcg

SEQ ID NO: 437702 - DNA, 55 bp, Artificial
  Synthetic oligonucleotide
gtccctgaataaatcccgagcacttgtagccattactcgggcgagacacgggttg

SEQ ID NO: 437703 - DNA, 59 bp, Artificial
  Synthetic oligonucleotide
gtccctgagcttctgcgccacagatgtgttagtgccatggatgttttctacacactgat

SEQ ID NO: 437704 - DNA, 55 bp, Artificial
  Synthetic oligonucleotide
gtccctgatgtaattagagttggcaatgcgtattgttgctctcaatgttgtggtg

SEQ ID NO: 437705 - DNA, 55 bp, Artificial
  Synthetic oligonucleotide
gtccctggagtgttggaatgacaaagttctacagaggctgggacgaactccttgg

SEQ ID NO: 437706 - DNA, 55 bp, Artificial
  Synthetic oligonucleotide
gtccctgggactgccccaccttctcaacaacctgggacgggagacaggctgctaa

SEQ ID NO: 437707 - DNA, 55 bp, Artificial
  Synthetic oligonucleotide
gtccctggtagctatgcttctgttctgtagacgcgcgtggagctagtaaggtgtc

SEQ ID NO: 437708 - DNA, 55 bp, Artificial
  Synthetic oligonucleotide
gtccctgtcacctgataaacatggagaatgtaggtgatagagtgttcagggagcc

SEQ ID NO: 437709 - DNA, 55 bp, Artificial
  Synthetic oligonucleotide
gtccctgtcttgaagccatgttacaccgtcactagggtcaacatgaactactagt

SEQ ID NO: 437710 - DNA, 55 bp, Artificial
  Synthetic oligonucleotide
gtccctgtgacccgtataatggcccaatccactgatgacgccatctctctgtacg

SEQ ID NO: 437711 - DNA, 57 bp, Artificial
  Synthetic oligonucleotide
gtcccttactgcaattacacaaaattttggtatgtcaaccacacactttcaggacaa

SEQ ID NO: 437712 - DNA, 51 bp, Artificial
  Synthetic oligonucleotide
gtcccttcttattgttattactgtacttcatgtcagttcactgctttgcct

SEQ ID NO: 437713 - DNA, 53 bp, Artificial
  Synthetic oligonucleotide
gtcccttgacaaaagaaagagactagaagtcaagggaattgacgtcaccgggt

SEQ ID NO: 437714 - DNA, 60 bp, Artificial
  Synthetic oligonucleotide
gtcccttgtcatcatatctccgagcgttgcagatttggacccgtacgataaatcccttca

SEQ ID NO: 437715 - DNA, 55 bp, Artificial
  Synthetic oligonucleotide
gtccctttatacctctattaccaatttcctgttgtctttgggcatacatttgaac

SEQ ID NO: 437716 - DNA, 53 bp, Artificial
  Synthetic oligonucleotide
gtccctttcctctcatgccaacgcgggtacaagggagtctggcggggggacgg

SEQ ID NO: 437717 - DNA, 55 bp, Artificial
  Synthetic oligonucleotide
gtccctttctgtgtaggccttgctcagaatttctattttgggagaccggaactgt

SEQ ID NO: 437718 - DNA, 55 bp, Artificial
  Synthetic oligonucleotide
gtccctttgggcccccatgaattccttaaagtgctttagatagtgcggatctacg

SEQ ID NO: 437719 - DNA, 54 bp, Artificial
  Synthetic oligonucleotide
gtccctttttaaccctgacaaggagcgtctggtctggggtattcgtgggattga

SEQ ID NO: 437720 - DNA, 58 bp, Artificial
  Synthetic oligonucleotide
gtccgaaaaaccagatttctaccgatagcaggcggaacaagcagtgtatatattgaag

SEQ ID NO: 437721 - DNA, 55 bp, Artificial
  Synthetic oligonucleotide
gtccgaaaatgtagagatcaacgttttagggcacaatcctgggtccctaaatata

SEQ ID NO: 437722 - DNA, 59 bp, Artificial
  Synthetic oligonucleotide
gtccgaaatagtgcgctacctaacatgcactaattatcggaatgaagcacaaaacgccc

SEQ ID NO: 437723 - DNA, 58 bp, Artificial
  Synthetic oligonucleotide
gtccgaacatatatgaaagcggatttcaccccaccaaacggcaaactgcctgcccgca

SEQ ID NO: 437724 - DNA, 57 bp, Artificial
  Synthetic oligonucleotide
gtccgaaccatcgatggggagatattaggtttctacgtctagtgtggtccgctccca

SEQ ID NO: 437725 - DNA, 56 bp, Artificial
  Synthetic oligonucleotide
gtccgaattgaagttctatagggttggtggagatcagaactttgggaatcgagttc

SEQ ID NO: 437726 - DNA, 51 bp, Artificial
  Synthetic oligonucleotide
gtccgacaagtactttcgaagcaccacggttacctaaccgaagaaccgctt

SEQ ID NO: 437727 - DNA, 55 bp, Artificial
  Synthetic oligonucleotide
gtccgacacaccagtcgggctttccttctgtggtttcacagttggaccagatcta

SEQ ID NO: 437728 - DNA, 54 bp, Artificial
  Synthetic oligonucleotide
gtccgacatcagttgctggagtccacgtcctgaatgggcgacccacgtagcgtg

SEQ ID NO: 437729 - DNA, 59 bp, Artificial
  Synthetic oligonucleotide
gtccgaccaattatagtgcgcctgaggagcctagatatttgcgaaagacttgggcccta

SEQ ID NO: 437730 - DNA, 60 bp, Artificial
  Synthetic oligonucleotide
gtccgacccacagacatggggttggtgccgaattctagtgctctcgtagtctgagcatga

SEQ ID NO: 437731 - DNA, 55 bp, Artificial
  Synthetic oligonucleotide
gtccgaccctctcaaaatcaggggatctaacttcatccagtattttcctggagcc

SEQ ID NO: 437732 - DNA, 51 bp, Artificial
  Synthetic oligonucleotide
gtccgaccgtcaccttttggcactctcgcaccagttcgttgcacgccgaac

SEQ ID NO: 437733 - DNA, 54 bp, Artificial
  Synthetic oligonucleotide
gtccgacggggaagaggaacaacccgagaggggacccagcgataaagatgcgag

SEQ ID NO: 437734 - DNA, 55 bp, Artificial
  Synthetic oligonucleotide
gtccgacggtgtgtgcaaggaacatcctaacttgttcacttctgaggagctgggc

SEQ ID NO: 437735 - DNA, 53 bp, Artificial
  Synthetic oligonucleotide
gtccgacgttaacgggctgtaaacacatgctcgtaccgcctttcccggcgtta

SEQ ID NO: 437736 - DNA, 54 bp, Artificial
  Synthetic oligonucleotide
gtccgactacagcttaaggacaacgcgagggaactgggaaatggttgtttcgag

SEQ ID NO: 437737 - DNA, 55 bp, Artificial
  Synthetic oligonucleotide
gtccgactggcaggttcacattaagggttcgccgtggctaattgacgattcgtcc

SEQ ID NO: 437738 - DNA, 51 bp, Artificial
  Synthetic oligonucleotide
gtccgactggtgatatgggtatgtattcactactgacaatacttaagccat

SEQ ID NO: 437739 - DNA, 50 bp, Artificial
  Synthetic oligonucleotide
gtccgactttgccccagaaaccgcgagtgtcatctacttggttctacatt

SEQ ID NO: 437740 - DNA, 51 bp, Artificial
  Synthetic oligonucleotide
gtccgagaaccacatcttacacctcccggggtgcgtaccctgtgtgaggac

SEQ ID NO: 437741 - DNA, 56 bp, Artificial
  Synthetic oligonucleotide
gtccgagaccttcgtccctagcgtccgcgtttatgcggacgggcaggtcgaagata

SEQ ID NO: 437742 - DNA, 56 bp, Artificial
  Synthetic oligonucleotide
gtccgagaccttggtcacaatttacaaattttgtgtcatagaagtgatttaggaaa

SEQ ID NO: 437743 - DNA, 60 bp, Artificial
  Synthetic oligonucleotide
gtccgagattgaaaagcgtgcttgtcatggtggaggacgttgtgttgcttctcagggtat

SEQ ID NO: 437744 - DNA, 53 bp, Artificial
  Synthetic oligonucleotide
gtccgagcaggaaatggacattaaacaattgctgcgtttacgggaactaaccc

SEQ ID NO: 437745 - DNA, 51 bp, Artificial
  Synthetic oligonucleotide
gtccgagcatgcggcggtctagtgagaccacgggactctaacctgagagcc

SEQ ID NO: 437746 - DNA, 55 bp, Artificial
  Synthetic oligonucleotide
gtccgagccaattctggcgagctgcgattaaggtttcaccagaaccgattagagc

SEQ ID NO: 437747 - DNA, 57 bp, Artificial
  Synthetic oligonucleotide
gtccgagccgatgacacctacgagtgagcctgtgcttacgcccgcgttgcaacgtgt

SEQ ID NO: 437748 - DNA, 60 bp, Artificial
  Synthetic oligonucleotide
gtccgaggagactcctcaatctcattcatgatgagggagcgccttaaggccacaatggga

SEQ ID NO: 437749 - DNA, 55 bp, Artificial
  Synthetic oligonucleotide
gtccgagtgatctggcccacatggtcttgcccgttctactatcaccctctatcac

SEQ ID NO: 437750 - DNA, 60 bp, Artificial
  Synthetic oligonucleotide
gtccgagttggactgagtggaggatacataacgatgagacggattcgaataaagataatc

SEQ ID NO: 437751 - DNA, 56 bp, Artificial
  Synthetic oligonucleotide
gtccgatatacccttggaactcattaacactgttagtaagtacccagactggatcc

SEQ ID NO: 437752 - DNA, 57 bp, Artificial
  Synthetic oligonucleotide
gtccgatatcggtcagacctatcctcactatagcctgttcgcctaccggacaaaaac

SEQ ID NO: 437753 - DNA, 54 bp, Artificial
  Synthetic oligonucleotide
gtccgatcaatctttggcccgggtggaaccccctcattgtttccaacctcgtgc

SEQ ID NO: 437754 - DNA, 60 bp, Artificial
  Synthetic oligonucleotide
gtccgatcaccgtgatgacgcctccactctactcgccacccccatgatcaacaacgctat

SEQ ID NO: 437755 - DNA, 60 bp, Artificial
  Synthetic oligonucleotide
gtccgatctctgatctgcttgcccatgattcgttcggacctattgtcaaatatggtacac

SEQ ID NO: 437756 - DNA, 57 bp, Artificial
  Synthetic oligonucleotide
gtccgatctgattccgaaggcagatggtggtaattatttgaagcctgttttaactac

SEQ ID NO: 437757 - DNA, 53 bp, Artificial
  Synthetic oligonucleotide
gtccgatgggcattcggaaacaatacatggaattgggtttggtcccgtaatta

SEQ ID NO: 437758 - DNA, 56 bp, Artificial
  Synthetic oligonucleotide
gtccgattaatcttgaaccatccaccaaacgtcttgtctgtggtttcgaacccaca

SEQ ID NO: 437759 - DNA, 60 bp, Artificial
  Synthetic oligonucleotide
gtccgattcaatatcagccatcgtagagagcactactaattccattagtcccgccgctgc

SEQ ID NO: 437760 - DNA, 58 bp, Artificial
  Synthetic oligonucleotide
gtccgcaaaacgaggttccttccagtggctggtggaacaagcagtgtctatattgagg

SEQ ID NO: 437761 - DNA, 55 bp, Artificial
  Synthetic oligonucleotide
gtccgcaaccagtccagttcgcaaaacttccggcaagagatctgcggaagacgac

SEQ ID NO: 437762 - DNA, 54 bp, Artificial
  Synthetic oligonucleotide
gtccgcaaccgcgctgatatcatcactgtgacggccactctgtccctgctcggg

SEQ ID NO: 437763 - DNA, 55 bp, Artificial
  Synthetic oligonucleotide
gtccgcaagggcgcgcacgtagatgtaaacaaacgcagctcagaaggcggcgcag

SEQ ID NO: 437764 - DNA, 59 bp, Artificial
  Synthetic oligonucleotide
gtccgcaatctgaacatgaggactatttggaaagacaccggtggtgggaagtatgaaga

SEQ ID NO: 437765 - DNA, 58 bp, Artificial
  Synthetic oligonucleotide
gtccgcaccatgaaggggcgcgaagtccagaggttatctccattgccggacgaccgtc

SEQ ID NO: 437766 - DNA, 57 bp, Artificial
  Synthetic oligonucleotide
gtccgcaggagtaagatccgtctacaataatgttaccgctacacagtccgttcaaac

SEQ ID NO: 437767 - DNA, 50 bp, Artificial
  Synthetic oligonucleotide
gtccgcagtcaataagctagtgacgttaactcataagataggccacgtct

SEQ ID NO: 437768 - DNA, 59 bp, Artificial
  Synthetic oligonucleotide
gtccgcatttaacgacaacgaccgtgattcatgtaacggtgtttacgctaacatcagca

SEQ ID NO: 437769 - DNA, 56 bp, Artificial
  Synthetic oligonucleotide
gtccgccaaactattgctgcgatagacacgcgtctcacgacactggagaccgatgc

SEQ ID NO: 437770 - DNA, 59 bp, Artificial
  Synthetic oligonucleotide
gtccgccaggttgtgaacaacggctgaggatgagacatggcaaacgaaatcggaaccgc

SEQ ID NO: 437771 - DNA, 58 bp, Artificial
  Synthetic oligonucleotide
gtccgcccgaattgatacgtcattgcatttggttcacatccttgaaagattatgttgg

SEQ ID NO: 437772 - DNA, 57 bp, Artificial
  Synthetic oligonucleotide
gtccgccctgtcaataacgcccctatgatttttcttcgtatagagtgtatgttattc

SEQ ID NO: 437773 - DNA, 55 bp, Artificial
  Synthetic oligonucleotide
gtccgcccttggacggcttattcaactcggagagtaccactgggactcccttggc

SEQ ID NO: 437774 - DNA, 55 bp, Artificial
  Synthetic oligonucleotide
gtccgcgactggctctatcctccaaatgccaatatcgaaccgttcaccactggtc

SEQ ID NO: 437775 - DNA, 60 bp, Artificial
  Synthetic oligonucleotide
gtccgcgagacggcctgcctttcaaaagcctacgggcagatgtggctgctgagctacttc

SEQ ID NO: 437776 - DNA, 60 bp, Artificial
  Synthetic oligonucleotide
gtccgcgctcgagactaactcatgggagcccctcttcgctgtgacaatgactggctgtgg

SEQ ID NO: 437777 - DNA, 51 bp, Artificial
  Synthetic oligonucleotide
gtccgcgcttcgcgcgtccgaccttcggcctcggggggggcgggaacttta

SEQ ID NO: 437778 - DNA, 60 bp, Artificial
  Synthetic oligonucleotide
gtccgcggttatcggcagtgcatataacgcctgagagagcatctaagcggagactgttta

SEQ ID NO: 437779 - DNA, 55 bp, Artificial
  Synthetic oligonucleotide
gtccgcgtattatcttaaggaccagaaagatttactgcgtgacatgaagttaggc

SEQ ID NO: 437780 - DNA, 60 bp, Artificial
  Synthetic oligonucleotide
gtccgctcacctgcatgcgcttaactggagagcccggcacttatgatgacaacacggact

SEQ ID NO: 437781 - DNA, 55 bp, Artificial
  Synthetic oligonucleotide
gtccgctcttcacctatttaaaactacggtaaactcactgatatctgaccagctg

SEQ ID NO: 437782 - DNA, 55 bp, Artificial
  Synthetic oligonucleotide
gtccgctgctctaccgactgagctaacgacccaattagatgattttaaagtaaat

SEQ ID NO: 437783 - DNA, 55 bp, Artificial
  Synthetic oligonucleotide
gtccgctggtaaagctagagcgaactaatggcgaactatatgcgaactaagtgcg

SEQ ID NO: 437784 - DNA, 57 bp, Artificial
  Synthetic oligonucleotide
gtccgctttgcttgagaccgtccgaggtaacaataccttggtcaacgatcttgcaaa

SEQ ID NO: 437785 - DNA, 60 bp, Artificial
  Synthetic oligonucleotide
gtccggaactacatcacaatccaccaccatactagcttcaacaacaccaagtgctgagtc

SEQ ID NO: 437786 - DNA, 55 bp, Artificial
  Synthetic oligonucleotide
gtccggaagattagtgaatggattcttaccactcatctgggacgatctgaggagt

SEQ ID NO: 437787 - DNA, 58 bp, Artificial
  Synthetic oligonucleotide
gtccggaatcattatgtgtggattccactaaaccgtacaaaccattgacggttatgca

SEQ ID NO: 437788 - DNA, 55 bp, Artificial
  Synthetic oligonucleotide
gtccggactttgttatggcccataattcagccatttcaacgttcatcagttaccc

SEQ ID NO: 437789 - DNA, 52 bp, Artificial
  Synthetic oligonucleotide
gtccggagtgaacttcgaggtaatggttcctgaacaaggtggaaaagtggtt

SEQ ID NO: 437790 - DNA, 56 bp, Artificial
  Synthetic oligonucleotide
gtccggagtgccgagaaaccactcgtgaggaaacaagacagagggacctgaaccgc

SEQ ID NO: 437791 - DNA, 57 bp, Artificial
  Synthetic oligonucleotide
gtccggagttgagttccgtctgtggaattcctctatataaggacgacctatcctatg

SEQ ID NO: 437792 - DNA, 55 bp, Artificial
  Synthetic oligonucleotide
gtccggatagtggtgttaaggatcgatataatgtattgtcccgacagcgggatcg

SEQ ID NO: 437793 - DNA, 55 bp, Artificial
  Synthetic oligonucleotide
gtccggatctaatgaaggtagagggaaacactttagtgaacgtgaatcctgaaac

SEQ ID NO: 437794 - DNA, 54 bp, Artificial
  Synthetic oligonucleotide
gtccggatgaagagaaggaggggtgaccgcatcccgaagggttgtgtgggtccc

SEQ ID NO: 437795 - DNA, 55 bp, Artificial
  Synthetic oligonucleotide
gtccggatgttgcgagacactcccatgatacaacaccccgggtcaaccttgcaga

SEQ ID NO: 437796 - DNA, 60 bp, Artificial
  Synthetic oligonucleotide
gtccggcacgatcgcacgcagtcactcaaaatcgtgtgggacgccgtcgctaagggctgg

SEQ ID NO: 437797 - DNA, 53 bp, Artificial
  Synthetic oligonucleotide
gtccggccaaggtgtaagttgtataaagaacgtttctaacgttagttatatga

SEQ ID NO: 437798 - DNA, 56 bp, Artificial
  Synthetic oligonucleotide
gtccggcgacgaggggtttggccgttatcaccctagacgctgtagtcatcaggtac

SEQ ID NO: 437799 - DNA, 55 bp, Artificial
  Synthetic oligonucleotide
gtccggcgcttatgtcacagatttgttctggtggtttaagatgattctcgattgg

SEQ ID NO: 437800 - DNA, 60 bp, Artificial
  Synthetic oligonucleotide
gtccgggctgtgatcatttgaatggtgcagaatgggacgtcttcatagagcgacccactg

SEQ ID NO: 437801 - DNA, 57 bp, Artificial
  Synthetic oligonucleotide
gtccggggaaccgtgcgacgtgacaccgctgccgctctggcgccttctgaactaccc

SEQ ID NO: 437802 - DNA, 54 bp, Artificial
  Synthetic oligonucleotide
gtccgggtcttcgagttttagtcgcttccgaggttggggaaatgatagcagaat

SEQ ID NO: 437803 - DNA, 55 bp, Artificial
  Synthetic oligonucleotide
gtccgggtgttcaaacaccaccagttattggcatcgcctcttgaaagtgtgtggt

SEQ ID NO: 437804 - DNA, 56 bp, Artificial
  Synthetic oligonucleotide
gtccggtaacgcttacatggttgttgactggtctattgccccttttgagtacacag

SEQ ID NO: 437805 - DNA, 60 bp, Artificial
  Synthetic oligonucleotide
gtccggtacgcactcatgaggtaacaagtctggagaaaccagtgatgcttgatgttggca

SEQ ID NO: 437806 - DNA, 52 bp, Artificial
  Synthetic oligonucleotide
gtccggtatggactccgaacggacaaacaccggagtcccgtccggaatccaa

SEQ ID NO: 437807 - DNA, 55 bp, Artificial
  Synthetic oligonucleotide
gtccggtcgtctgagttgcgggaccgtctctttcctccaaagcgtctcatagcgg

SEQ ID NO: 437808 - DNA, 60 bp, Artificial
  Synthetic oligonucleotide
gtccggtcttctggagcataggctgctacatttcggatctcttggtactagctgtcgtga

SEQ ID NO: 437809 - DNA, 58 bp, Artificial
  Synthetic oligonucleotide
gtccggtgtcccactgaggctcacgccgccccctgactacaccaagacacttctccca

SEQ ID NO: 437810 - DNA, 51 bp, Artificial
  Synthetic oligonucleotide
gtccggtgtttgcgtaattgactacctctttaaacgcgtcaacgttaaagt

SEQ ID NO: 437811 - DNA, 60 bp, Artificial
  Synthetic oligonucleotide
gtccggttactctggtatcttctctgttgagagcaaaagctgcgtcaataggtgtttcta

SEQ ID NO: 437812 - DNA, 55 bp, Artificial
  Synthetic oligonucleotide
gtccggttgctattggatttgatatgaaacggttcgatcagcatgtatccaccga

SEQ ID NO: 437813 - DNA, 55 bp, Artificial
  Synthetic oligonucleotide
gtccggttggtgcaggtggtaagattgcacagattggtcgtgtggctcgaatggc

SEQ ID NO: 437814 - DNA, 60 bp, Artificial
  Synthetic oligonucleotide
gtccgtaacgcttcattgagtgccaaactacaagatatgtcctccacagatggtactagc

SEQ ID NO: 437815 - DNA, 55 bp, Artificial
  Synthetic oligonucleotide
gtccgtaattcgataaaacgtgtcgtactgtacgcgttccattcaaacattcaac

SEQ ID NO: 437816 - DNA, 55 bp, Artificial
  Synthetic oligonucleotide
gtccgtacacacatcgccgcagtggggtcggttgcttccgggacaccactggctg

SEQ ID NO: 437817 - DNA, 49 bp, Artificial
  Synthetic oligonucleotide
gtccgtaggcacgtaaaaaaagcgagggattcgaattcccccggaaccc

SEQ ID NO: 437818 - DNA, 51 bp, Artificial
  Synthetic oligonucleotide
gtccgtagttaaccgcgattcccgcatacgtgctcacgccgcctggagtgg

SEQ ID NO: 437819 - DNA, 56 bp, Artificial
  Synthetic oligonucleotide
gtccgtataaatgtacatttatacggttacattcttgtatacatggtattcgtcgt

SEQ ID NO: 437820 - DNA, 57 bp, Artificial
  Synthetic oligonucleotide
gtccgtatgagtaggttggcacgaatacctggcatgcacactagaagtggactggag

SEQ ID NO: 437821 - DNA, 55 bp, Artificial
  Synthetic oligonucleotide
gtccgtattttccaacaaatgcttgccacgtaccggatttctggtattcctcaga

SEQ ID NO: 437822 - DNA, 56 bp, Artificial
  Synthetic oligonucleotide
gtccgtcaaacaagtgtcagagagagacatatatgcaaaattccgacagatcatct

SEQ ID NO: 437823 - DNA, 54 bp, Artificial
  Synthetic oligonucleotide
gtccgtcaataattctagggtagaattcaaataatcccaccactaacgacttaa

SEQ ID NO: 437824 - DNA, 60 bp, Artificial
  Synthetic oligonucleotide
gtccgtcctctgtgagtgctatgacgcgggctgtgcttggtatgagctcacacccgccga

SEQ ID NO: 437825 - DNA, 51 bp, Artificial
  Synthetic oligonucleotide
gtccgtcggttcccggttagacgtcctcccgtccgacgtcagctctcgttt

SEQ ID NO: 437826 - DNA, 57 bp, Artificial
  Synthetic oligonucleotide
gtccgtcgttaccaacgactaatacgtaaagggcgctatatgactgaggagcaagta

SEQ ID NO: 437827 - DNA, 55 bp, Artificial
  Synthetic oligonucleotide
gtccgtctcactatgaccgagtgccggtcacgttttatattaacgctttgggtac

SEQ ID NO: 437828 - DNA, 55 bp, Artificial
  Synthetic oligonucleotide
gtccgtctcctataggccagacaccgtctacgtcatacacttcctgggcatggtc

SEQ ID NO: 437829 - DNA, 52 bp, Artificial
  Synthetic oligonucleotide
gtccgtctcgggggttgccataggcttcgggctcggttttaggccttccgga

SEQ ID NO: 437830 - DNA, 50 bp, Artificial
  Synthetic oligonucleotide
gtccgtgagcgcgcgtggaccggtggtgataccttactgacccccaacga

SEQ ID NO: 437831 - DNA, 55 bp, Artificial
  Synthetic oligonucleotide
gtccgtgagggattggatcatccggatcggtgggaatggcttattgattacatgg

SEQ ID NO: 437832 - DNA, 55 bp, Artificial
  Synthetic oligonucleotide
gtccgtgataggaggccctatggaaacagcccaatggattttggacaggttttta

SEQ ID NO: 437833 - DNA, 55 bp, Artificial
  Synthetic oligonucleotide
gtccgtgccccactacgtaaacgtctgcgcgccaaactacgctcgcagcgcaaaa

SEQ ID NO: 437834 - DNA, 50 bp, Artificial
  Synthetic oligonucleotide
gtccgtggagaaggatacgactatgattgatcttgatgggacgacaacat

SEQ ID NO: 437835 - DNA, 55 bp, Artificial
  Synthetic oligonucleotide
gtccgtggatgtcaggataccgcgtgaagtgacaaagaacatagacgtcaaagca

SEQ ID NO: 437836 - DNA, 55 bp, Artificial
  Synthetic oligonucleotide
gtccgtgggccgtagtggttgttgttttgagggaactgacagtggccactggagg

SEQ ID NO: 437837 - DNA, 57 bp, Artificial
  Synthetic oligonucleotide
gtccgtggtttacgtataattcgtttggcatacaatttgctgaatattctattagac

SEQ ID NO: 437838 - DNA, 55 bp, Artificial
  Synthetic oligonucleotide
gtccgtgtaccgggttcagtggcagcatttgtcgaacaattcggcgagcatagtg

SEQ ID NO: 437839 - DNA, 52 bp, Artificial
  Synthetic oligonucleotide
gtccgtgtgggtaccgaacagccaacgtctgtatctcccccctacccccgtg

SEQ ID NO: 437840 - DNA, 55 bp, Artificial
  Synthetic oligonucleotide
gtccgtgtgtacttggccgcggcttccactcctaactacgctcacgccctgctag

SEQ ID NO: 437841 - DNA, 55 bp, Artificial
  Synthetic oligonucleotide
gtccgtgttttgattttaacgcacttcgtgagtcttgcgcagagaaaacattctc

SEQ ID NO: 437842 - DNA, 55 bp, Artificial
  Synthetic oligonucleotide
gtccgttacaacaagcaaccgcttattgcgtcatccacgctcaacacgcacaaac

SEQ ID NO: 437843 - DNA, 52 bp, Artificial
  Synthetic oligonucleotide
gtccgttataacctggctagttcaaatggttatatacgttttcccgaagtgg

SEQ ID NO: 437844 - DNA, 59 bp, Artificial
  Synthetic oligonucleotide
gtccgtttgcccaaactaggtatgctccagtcaattggggtcatggagagacaaatgat

SEQ ID NO: 437845 - DNA, 58 bp, Artificial
  Synthetic oligonucleotide
gtcctaaaatagacaaggcctcttcatgggtgaacaggcccatgtacaggaagcccaa

SEQ ID NO: 437846 - DNA, 58 bp, Artificial
  Synthetic oligonucleotide
gtcctaaagacactaatatcgaacactaattgcaatacagtcgaaagaacaaagacca

SEQ ID NO: 437847 - DNA, 55 bp, Artificial
  Synthetic oligonucleotide
gtcctaaatagtaagagcagccgcacggaagatcaattctccgcctgcgtattgg

SEQ ID NO: 437848 - DNA, 59 bp, Artificial
  Synthetic oligonucleotide
gtcctaaccagctcgtttaattgggccatactcatagttatgttggactgggctctctg

SEQ ID NO: 437849 - DNA, 58 bp, Artificial
  Synthetic oligonucleotide
gtcctaacgtattcgcaatcgtggccgcaatgttccttggtctctcgttcctaacatg

SEQ ID NO: 437850 - DNA, 55 bp, Artificial
  Synthetic oligonucleotide
gtcctaagttacaagcttctaaacgttctgcatctgctaccacaagtgccacacc

SEQ ID NO: 437851 - DNA, 55 bp, Artificial
  Synthetic oligonucleotide
gtcctacaatagagttgatggctgagataaatcgctatcttgactacaactatga

SEQ ID NO: 437852 - DNA, 55 bp, Artificial
  Synthetic oligonucleotide
gtcctacactgctttgtctccggtgcgatttctttagctgcgagttctttagcag

SEQ ID NO: 437853 - DNA, 58 bp, Artificial
  Synthetic oligonucleotide
gtcctacataaacaggacaggaacatttgaatttacaagcttcttctatcgctatggg

SEQ ID NO: 437854 - DNA, 55 bp, Artificial
  Synthetic oligonucleotide
gtcctacataaatagaaccggtacattcgaattcacaagctttttctaccgctac

SEQ ID NO: 437855 - DNA, 53 bp, Artificial
  Synthetic oligonucleotide
gtcctaccaagagtgtctagcaagcgacctagccaggagaatccttagatggg

SEQ ID NO: 437856 - DNA, 55 bp, Artificial
  Synthetic oligonucleotide
gtcctaccaccgttacaagatcacaagtatccgtgttgagtttaagtcacacgcg

SEQ ID NO: 437857 - DNA, 53 bp, Artificial
  Synthetic oligonucleotide
gtcctaccagcattctagatataaaacaagggccaaaggaaccttttagagat

SEQ ID NO: 437858 - DNA, 52 bp, Artificial
  Synthetic oligonucleotide
gtcctaccggtgtaataaggacccggcgctaggcacgccgttaaaccgagcc

SEQ ID NO: 437859 - DNA, 54 bp, Artificial
  Synthetic oligonucleotide
gtcctacctaaatcgaacagggacatttgagttcacaagttttttctaccgcta

SEQ ID NO: 437860 - DNA, 55 bp, Artificial
  Synthetic oligonucleotide
gtcctacgaaaattgatttacgtaacgccacaaatgaaatttgatagttatcgta

SEQ ID NO: 437861 - DNA, 55 bp, Artificial
  Synthetic oligonucleotide
gtcctacgtgctcagcgtacaaaggacatctattctctccgacagctcacgtctg

SEQ ID NO: 437862 - DNA, 59 bp, Artificial
  Synthetic oligonucleotide
gtcctactacttggccgctcccacaggaactatctgggcttgtagtactggactcactc

SEQ ID NO: 437863 - DNA, 55 bp, Artificial
  Synthetic oligonucleotide
gtcctactatcaccctcaattacaatacttatgggtctccatggccgcgcagcgg

SEQ ID NO: 437864 - DNA, 55 bp, Artificial
  Synthetic oligonucleotide
gtcctactcatctgatttagtcatctaccgaacaaacactataggtgatgactac

SEQ ID NO: 437865 - DNA, 53 bp, Artificial
  Synthetic oligonucleotide
gtcctactcctaaaaccggaaccatttctgacttacaggagtattacgatagg

SEQ ID NO: 437866 - DNA, 55 bp, Artificial
  Synthetic oligonucleotide
gtcctactcgcaagcatgtgcctcactggacaaaaccacttctagtggtagcccc

SEQ ID NO: 437867 - DNA, 55 bp, Artificial
  Synthetic oligonucleotide
gtcctactggaatagcctccaagttgtgccttgggtggctttagggcaaggacct

SEQ ID NO: 437868 - DNA, 57 bp, Artificial
  Synthetic oligonucleotide
gtcctactgggtatcattcggagttgaccctaagatacaacaaattgtcgagcggta

SEQ ID NO: 437869 - DNA, 58 bp, Artificial
  Synthetic oligonucleotide
gtcctactttggaatgaagcaactcacgcttaccttcggtgaatctactgggctgaat

SEQ ID NO: 437870 - DNA, 55 bp, Artificial
  Synthetic oligonucleotide
gtcctagaagatatactaatcaggctagagcaagtctaatagatggattagacga

SEQ ID NO: 437871 - DNA, 54 bp, Artificial
  Synthetic oligonucleotide
gtcctagaggagcacgtaagtcattgatattcgaaaatagtgatacaggtctaa

SEQ ID NO: 437872 - DNA, 60 bp, Artificial
  Synthetic oligonucleotide
gtcctagatgtgattattgggataatgtataccgtagacacttagctcatgtctcttcac

SEQ ID NO: 437873 - DNA, 55 bp, Artificial
  Synthetic oligonucleotide
gtcctagccatgttgtgtacgagggtatttactataaccaccctgactacggaag

SEQ ID NO: 437874 - DNA, 59 bp, Artificial
  Synthetic oligonucleotide
gtcctagcctgcgtggcggccaacccagcttctgctgggacgcctttttatggacatgg

SEQ ID NO: 437875 - DNA, 55 bp, Artificial
  Synthetic oligonucleotide
gtcctagtgacaacagtagctgcccatgggaaacatcaaattgcgcgatgtaggt

SEQ ID NO: 437876 - DNA, 54 bp, Artificial
  Synthetic oligonucleotide
gtcctagtgggtctcatagacgccggcaaagggaaagtgtaattcggagtccgg

SEQ ID NO: 437877 - DNA, 55 bp, Artificial
  Synthetic oligonucleotide
gtcctagttctgctaggggatcctttacaaagcacgtaccacagtaaaagggaca

SEQ ID NO: 437878 - DNA, 54 bp, Artificial
  Synthetic oligonucleotide
gtcctatactctcccaacgtctctgttccatcctcttcttctacccccctcctt

SEQ ID NO: 437879 - DNA, 51 bp, Artificial
  Synthetic oligonucleotide
gtcctatagatgtacaactcttggcagatgcgtatgagtagagagcactat

SEQ ID NO: 437880 - DNA, 58 bp, Artificial
  Synthetic oligonucleotide
gtcctatataaataggacaggaacattcgaattcacaagctttttctaccgctatgga

SEQ ID NO: 437881 - DNA, 55 bp, Artificial
  Synthetic oligonucleotide
gtcctatataatggagaaagaaaacccgagagacggtttgtgttatccaggcagc

SEQ ID NO: 437882 - DNA, 50 bp, Artificial
  Synthetic oligonucleotide
gtcctatatcgctggcgcaaagacttccgtactcggtggcttagtcacta

SEQ ID NO: 437883 - DNA, 54 bp, Artificial
  Synthetic oligonucleotide
gtcctatccttgattgagaagggcaagttgttagtgcgtgatacacgcaaagaa

SEQ ID NO: 437884 - DNA, 55 bp, Artificial
  Synthetic oligonucleotide
gtcctatgatgggtacattacgctgtggtaccaaactgctgttgtcaccccaccc

SEQ ID NO: 437885 - DNA, 60 bp, Artificial
  Synthetic oligonucleotide
gtcctatgcatcctgtggtgcagtctgacgacaatcggggtgtgcatttcgcgaacgggt

SEQ ID NO: 437886 - DNA, 54 bp, Artificial
  Synthetic oligonucleotide
gtcctatggatcttttatcctatggcagcacttgtaatggtggaactacttcta

SEQ ID NO: 437887 - DNA, 56 bp, Artificial
  Synthetic oligonucleotide
gtcctattcttgatgtggaaaggcgctctgggaaaagacggttataaactcagtta

SEQ ID NO: 437888 - DNA, 55 bp, Artificial
  Synthetic oligonucleotide
gtcctattgagagtatcgacattactaacgcaggaacgcagtatacttacgaacc

SEQ ID NO: 437889 - DNA, 55 bp, Artificial
  Synthetic oligonucleotide
gtcctattggaaatgcgtgcaaccccaaagaaacacggactaagtcctcatgaga

SEQ ID NO: 437890 - DNA, 59 bp, Artificial
  Synthetic oligonucleotide
gtcctcaaatgggactttcagcgttggcgcgttaagacccactgtgagtacatccgcga

SEQ ID NO: 437891 - DNA, 52 bp, Artificial
  Synthetic oligonucleotide
gtcctcaacaccggtagtgggtcgaagagacttgggactactaaggaagtct

SEQ ID NO: 437892 - DNA, 60 bp, Artificial
  Synthetic oligonucleotide
gtcctcaagagccagactcctcgagcggagttggcaagaaaggcaaacagcctgccagaa

SEQ ID NO: 437893 - DNA, 60 bp, Artificial
  Synthetic oligonucleotide
gtcctcaagggttaagcaggtaggagtaagcagcatgtaggcttctggactaacctgata

SEQ ID NO: 437894 - DNA, 59 bp, Artificial
  Synthetic oligonucleotide
gtcctcacatcccttacaagattgtagctccgtgctgcttttgtggttctaaactacga

SEQ ID NO: 437895 - DNA, 54 bp, Artificial
  Synthetic oligonucleotide
gtcctcagacggtgacagcggctctttacacttttaaccctttaacctacgcgc

SEQ ID NO: 437896 - DNA, 60 bp, Artificial
  Synthetic oligonucleotide
gtcctcagttgtgatacatgtgtgataacattattggggacttcagaacacctaggaaga

SEQ ID NO: 437897 - DNA, 60 bp, Artificial
  Synthetic oligonucleotide
gtcctcatcgtagtcacacacaaacggacagctgtcaaacatccaagggttcacgtacat

SEQ ID NO: 437898 - DNA, 57 bp, Artificial
  Synthetic oligonucleotide
gtcctccaaatactgggaagtcagcatttaccatgtctttaattcgtgtgttaagag

SEQ ID NO: 437899 - DNA, 60 bp, Artificial
  Synthetic oligonucleotide
gtcctccaaattgttgaagtcgaacggaggtatgatcccatcatggccgtatgggatcat

SEQ ID NO: 437900 - DNA, 58 bp, Artificial
  Synthetic oligonucleotide
gtcctccaagataccgtacgtgataacatcccctacatcccgagtcactatggccaag

SEQ ID NO: 437901 - DNA, 59 bp, Artificial
  Synthetic oligonucleotide
gtcctccctaaccctgactcagggggcactgaaaagtgcaatgtcgaatcggtatgcaa

SEQ ID NO: 437902 - DNA, 60 bp, Artificial
  Synthetic oligonucleotide
gtcctccgagagcttgtcaagcttcggcttcgtgtttgttagcacgatcactttggtgcc

SEQ ID NO: 437903 - DNA, 57 bp, Artificial
  Synthetic oligonucleotide
gtcctccgcggcgtcgtctgatgatttacacaacatattattcagcccggagccatt

SEQ ID NO: 437904 - DNA, 55 bp, Artificial
  Synthetic oligonucleotide
gtcctccggcccctgaatgcggctaaccttaaacctgcagccatggctcataagc

SEQ ID NO: 437905 - DNA, 60 bp, Artificial
  Synthetic oligonucleotide
gtcctccggcccctgaatgcggctaatcctaactgcggagcacatgccttcaacccagag

SEQ ID NO: 437906 - DNA, 55 bp, Artificial
  Synthetic oligonucleotide
gtcctcctcactcaagatagtatgctagttgatgaacgaagatgggtggttgcgc

SEQ ID NO: 437907 - DNA, 55 bp, Artificial
  Synthetic oligonucleotide
gtcctcctgggaggggatagctcgtaaagagcaactcccagtgcttgcagcggac

SEQ ID NO: 437908 - DNA, 55 bp, Artificial
  Synthetic oligonucleotide
gtcctcctggggctcacaaatggacttgattgattcattggataacccagaggag

SEQ ID NO: 437909 - DNA, 55 bp, Artificial
  Synthetic oligonucleotide
gtcctccttggactccttgcaacagggtagattcgagaatgttgagacctccctt

SEQ ID NO: 437910 - DNA, 60 bp, Artificial
  Synthetic oligonucleotide
gtcctcgagaacgagcgactaattgcatcagctgcctacccaaagggtctcgagaacaag

SEQ ID NO: 437911 - DNA, 60 bp, Artificial
  Synthetic oligonucleotide
gtcctcgagataggagacatgctcctacggactgcagtaggccaagtatcaaggcccatg

SEQ ID NO: 437912 - DNA, 56 bp, Artificial
  Synthetic oligonucleotide
gtcctcgatcaattcgagcttgttcaaggtgaatcaaacgataaccacaaacccct

SEQ ID NO: 437913 - DNA, 60 bp, Artificial
  Synthetic oligonucleotide
gtcctcgatgtccaaccaaatagtgttggaggggtcaagttcactaatagcagctctgac

SEQ ID NO: 437914 - DNA, 57 bp, Artificial
  Synthetic oligonucleotide
gtcctcggcccttcaatgatcagggtaagaagaaaccacggcgaaggccaattcata

SEQ ID NO: 437915 - DNA, 60 bp, Artificial
  Synthetic oligonucleotide
gtcctcgtcacaaacagaaggagatcatgggctcaacggcccatgtatcggaagcccaga

SEQ ID NO: 437916 - DNA, 57 bp, Artificial
  Synthetic oligonucleotide
gtcctctaagattttcttgccataggagtttgaatgagagtggggtttcaatagaat

SEQ ID NO: 437917 - DNA, 60 bp, Artificial
  Synthetic oligonucleotide
gtcctctacatgacccggcgggataacatccatcacagggtctattactttcgatgcgag

SEQ ID NO: 437918 - DNA, 60 bp, Artificial
  Synthetic oligonucleotide
gtcctctaggaggcaaataatgacctagatactctggatcagattggccaacatcaccct

SEQ ID NO: 437919 - DNA, 57 bp, Artificial
  Synthetic oligonucleotide
gtcctctcctagacttcttcggaaggtggtagtcttagactaccaccgtgcatgtta

SEQ ID NO: 437920 - DNA, 60 bp, Artificial
  Synthetic oligonucleotide
gtcctctctcaggtatgggaatgttctagacgtgaactccattgaccttgaagagcccag

SEQ ID NO: 437921 - DNA, 60 bp, Artificial
  Synthetic oligonucleotide
gtcctctgacacatttactacccaatgtcctacagaggccaacaaagccagacgctatac

SEQ ID NO: 437922 - DNA, 54 bp, Artificial
  Synthetic oligonucleotide
gtcctctggacagtatatcacggggccggtaataagaccttggccggccctaag

SEQ ID NO: 437923 - DNA, 60 bp, Artificial
  Synthetic oligonucleotide
gtcctcttcgtataggaatcccgaccactctgatacaaaggcgcgtgtccaggctagcac

SEQ ID NO: 437924 - DNA, 52 bp, Artificial
  Synthetic oligonucleotide
gtcctcttggcttacgagtggagagtataagcgacttggctacatagcagag

SEQ ID NO: 437925 - DNA, 58 bp, Artificial
  Synthetic oligonucleotide
gtcctgaaggtaaatcccttgactctgcaccagtgccttttacatcctcaaatacaac

SEQ ID NO: 437926 - DNA, 60 bp, Artificial
  Synthetic oligonucleotide
gtcctgaaggtaccccgcgtgcgggatctgatcaggagaccaattggcagtgctttacgc

SEQ ID NO: 437927 - DNA, 59 bp, Artificial
  Synthetic oligonucleotide
gtcctgaaggtaccccgcgtgcgggatctgatcaggagaccgaatggtaatgctttaca

SEQ ID NO: 437928 - DNA, 55 bp, Artificial
  Synthetic oligonucleotide
gtcctgaaggtcaatgtccttactgcatgacaatgactgagtcaacagagagtgc

SEQ ID NO: 437929 - DNA, 59 bp, Artificial
  Synthetic oligonucleotide
gtcctgactctatgtgcagtaccagtgacggatcggtacccactactgaacttactacc

SEQ ID NO: 437930 - DNA, 58 bp, Artificial
  Synthetic oligonucleotide
gtcctgagatacctctaacgttccatcccgcggacgtcggccgagtgagagctcactg

SEQ ID NO: 437931 - DNA, 55 bp, Artificial
  Synthetic oligonucleotide
gtcctgagtcagtattagtcaacacttatcagtggatcatcaggaactgggagac

SEQ ID NO: 437932 - DNA, 60 bp, Artificial
  Synthetic oligonucleotide
gtcctgataaagacagctccaatgctaaactcaccaaacatagaggcctgcgggtatagc

SEQ ID NO: 437933 - DNA, 59 bp, Artificial
  Synthetic oligonucleotide
gtcctgatccccctgagggcggcagcagaatcagtataccaatacatgagacagaaaca

SEQ ID NO: 437934 - DNA, 54 bp, Artificial
  Synthetic oligonucleotide
gtcctgatgtatacgtccaactgtccgggagactcagagtgcctctgagcatgg

SEQ ID NO: 437935 - DNA, 54 bp, Artificial
  Synthetic oligonucleotide
gtcctgatgtccctaagggatgtgagggtccatgtaaagtgcaatctttcgatg

SEQ ID NO: 437936 - DNA, 59 bp, Artificial
  Synthetic oligonucleotide
gtcctgatgtgcctaaggggtgtgaaggtccatgtaaggtccagtcgtatgagaagaaa

SEQ ID NO: 437937 - DNA, 57 bp, Artificial
  Synthetic oligonucleotide
gtcctgatgttcccaaggggtgtgaaggtccgtgtaaggtacagtcatttgagacga

SEQ ID NO: 437938 - DNA, 60 bp, Artificial
  Synthetic oligonucleotide
gtcctgatttataccaggactccggcgggctgttggaggtgataatgattctcttcgcca

SEQ ID NO: 437939 - DNA, 55 bp, Artificial
  Synthetic oligonucleotide
gtcctgcaagcgcttcgtcgcctccgatcgcaccgtcctcccttttcgcgacgtc

SEQ ID NO: 437940 - DNA, 60 bp, Artificial
  Synthetic oligonucleotide
gtcctgcacaagttgacttgtcaaacacacgagctccacaatcctgcttccagacttggt

SEQ ID NO: 437941 - DNA, 51 bp, Artificial
  Synthetic oligonucleotide
gtcctgcactgtgggtttcgaatacaattcgagatgtagcaaaacatttcg

SEQ ID NO: 437942 - DNA, 55 bp, Artificial
  Synthetic oligonucleotide
gtcctgccaacgcgggtataggggagcctggcgaggggatggcattatgcacact

SEQ ID NO: 437943 - DNA, 55 bp, Artificial
  Synthetic oligonucleotide
gtcctgcgaagtagcttcgtgtacccattcatctgattttggaggtgccgcagtc

SEQ ID NO: 437944 - DNA, 52 bp, Artificial
  Synthetic oligonucleotide
gtcctgcgaccctcccggtactacggtgcacaggggagccgcaacgcatacc

SEQ ID NO: 437945 - DNA, 55 bp, Artificial
  Synthetic oligonucleotide
gtcctgcgattgttatgcgctaccgtcgctatgtcccgggtaggccccgtttgcc

SEQ ID NO: 437946 - DNA, 60 bp, Artificial
  Synthetic oligonucleotide
gtcctgcgcatgtcttgcattggcttagccgccctcacgccttgggccattgttcccgcc

SEQ ID NO: 437947 - DNA, 60 bp, Artificial
  Synthetic oligonucleotide
gtcctgctaggtactctagtctatccccctgagatctttgtaggggcatcttattcgctg

SEQ ID NO: 437948 - DNA, 58 bp, Artificial
  Synthetic oligonucleotide
gtcctgctcagcctttctcttgcgtcccgtaagcctcttgtcgcacggtacagtaccg

SEQ ID NO: 437949 - DNA, 50 bp, Artificial
  Synthetic oligonucleotide
gtcctgctgctcttctctcttatcctgttgagcattttgtgtcctgttag

SEQ ID NO: 437950 - DNA, 55 bp, Artificial
  Synthetic oligonucleotide
gtcctgctgctgttcctcactttcttgttggttctcctggattggaaaggtttgc

SEQ ID NO: 437951 - DNA, 55 bp, Artificial
  Synthetic oligonucleotide
gtcctggaggtgagggtgatattctaaactatggagtacagattaaccatttgct

SEQ ID NO: 437952 - DNA, 55 bp, Artificial
  Synthetic oligonucleotide
gtcctggatcctgtgcatccatggcgtgcccttttccatagagtccttgtcggcc

SEQ ID NO: 437953 - DNA, 57 bp, Artificial
  Synthetic oligonucleotide
gtcctggattgcagagaaagatagtgggtattccgcctttaatttgaactggctttc

SEQ ID NO: 437954 - DNA, 54 bp, Artificial
  Synthetic oligonucleotide
gtcctggattgcagaggaagatagtgggaattccacctttaatttgaacgggtt

SEQ ID NO: 437955 - DNA, 59 bp, Artificial
  Synthetic oligonucleotide
gtcctggccgttaaacccgttatgataggtggtcaatgcgaaccagcctatgatcaggc

SEQ ID NO: 437956 - DNA, 55 bp, Artificial
  Synthetic oligonucleotide
gtcctggcttctaccaactctcactcaatagcaccacccacagtagctcatagtg

SEQ ID NO: 437957 - DNA, 55 bp, Artificial
  Synthetic oligonucleotide
gtcctggggttgttttggatcctgtaggaccatctgatattgtacccattgatcc

SEQ ID NO: 437958 - DNA, 58 bp, Artificial
  Synthetic oligonucleotide
gtcctggtaggagctcccatctcctgggttgcataatataatacttggaataccacct

SEQ ID NO: 437959 - DNA, 56 bp, Artificial
  Synthetic oligonucleotide
gtcctggtcgtatttactgttttcgaacgcagtgccgaggcctacgtggtctacat

SEQ ID NO: 437960 - DNA, 60 bp, Artificial
  Synthetic oligonucleotide
gtcctggtggaagttgctgacatggagctgcacactaaaaagattgagatatcaggtttg

SEQ ID NO: 437961 - DNA, 59 bp, Artificial
  Synthetic oligonucleotide
gtcctggttagcaattctgaattatgccagaggacatatcaaaaatttgggaagaacac

SEQ ID NO: 437962 - DNA, 55 bp, Artificial
  Synthetic oligonucleotide
gtcctgtaacctgtcctgtaacctgtcctgaaacctcctgtcctgtaacctcctg

SEQ ID NO: 437963 - DNA, 58 bp, Artificial
  Synthetic oligonucleotide
gtcctgtacgtaccgaatctcctacaggcagttctacagtcttgtactttacttctgc

SEQ ID NO: 437964 - DNA, 55 bp, Artificial
  Synthetic oligonucleotide
gtcctgtatgggtggtccgcgtcggaatgggcctcttctgaaatgtcgttgccca

SEQ ID NO: 437965 - DNA, 60 bp, Artificial
  Synthetic oligonucleotide
gtcctgtgcgagtgctatgacgcgggctgtgcatggtacgagcttacgcccgccgagacc

SEQ ID NO: 437966 - DNA, 55 bp, Artificial
  Synthetic oligonucleotide
gtcctgtgtgatccagttatcgtcaaatcgacccagcacttgtgtaggttgagcg

SEQ ID NO: 437967 - DNA, 58 bp, Artificial
  Synthetic oligonucleotide
gtccttaatattctcctacatatagttagcattacaataacagtgttggttctccctg

SEQ ID NO: 437968 - DNA, 55 bp, Artificial
  Synthetic oligonucleotide
gtccttaatgaagttgacttcgactcattcacattagctgttgattcagtgaaac

SEQ ID NO: 437969 - DNA, 52 bp, Artificial
  Synthetic oligonucleotide
gtccttaccgcgctgaagaaacggaacgctgacgtacctgagttagctgatt

SEQ ID NO: 437970 - DNA, 60 bp, Artificial
  Synthetic oligonucleotide
gtccttacgagtggaagtgtgttcagtgcaaatcaagtctgtaacgcagtcaatctaata

SEQ ID NO: 437971 - DNA, 55 bp, Artificial
  Synthetic oligonucleotide
gtccttactagttcgtttaattgggccaccgacatcgtaatgttggactctgccc

SEQ ID NO: 437972 - DNA, 55 bp, Artificial
  Synthetic oligonucleotide
gtccttagaaaacgatctaaaagaagagtacgactttgaggattttgactactca

SEQ ID NO: 437973 - DNA, 55 bp, Artificial
  Synthetic oligonucleotide
gtccttagaagtagctgggtctttcattaggtttattacggtgttcagaatagga

SEQ ID NO: 437974 - DNA, 54 bp, Artificial
  Synthetic oligonucleotide
gtccttagactgtctgcaccgcgctatgacctttcggagtctggccatgtacgg

SEQ ID NO: 437975 - DNA, 55 bp, Artificial
  Synthetic oligonucleotide
gtccttagattttatcccagtggaaaacatggagacgactatgcgctctccttca

SEQ ID NO: 437976 - DNA, 60 bp, Artificial
  Synthetic oligonucleotide
gtccttatgcgcctagcgtaaatagattgatgccgtatcggatctccaacgccgagcgac

SEQ ID NO: 437977 - DNA, 55 bp, Artificial
  Synthetic oligonucleotide
gtccttcacatcggcatcagcatttaacaagaaggggtctaaaggaaagtttgcg

SEQ ID NO: 437978 - DNA, 60 bp, Artificial
  Synthetic oligonucleotide
gtccttcacgttctatgacactgtatcacgcacatatgatgtgtcggaggctagcatgaa

SEQ ID NO: 437979 - DNA, 60 bp, Artificial
  Synthetic oligonucleotide
gtccttcactaagcgctgtcctggtgccatgtgtggtgccttacttgtcaggtcggaacc

SEQ ID NO: 437980 - DNA, 54 bp, Artificial
  Synthetic oligonucleotide
gtccttcagatcactcatcactgtgataggacccaggtcagtggatcttggagc

SEQ ID NO: 437981 - DNA, 58 bp, Artificial
  Synthetic oligonucleotide
gtccttcagccgcttaaataaaaggctgccgcactcccggttagatgcctgcccagtg

SEQ ID NO: 437982 - DNA, 54 bp, Artificial
  Synthetic oligonucleotide
gtccttcatagagttggtgaagggtcttaaaccctattatcacccattaggtta

SEQ ID NO: 437983 - DNA, 55 bp, Artificial
  Synthetic oligonucleotide
gtccttcatcacactcagatgctattcaacatcttagtttccagcacccaagtgc

SEQ ID NO: 437984 - DNA, 55 bp, Artificial
  Synthetic oligonucleotide
gtccttcccagcccggcattacagtgcacaacaattggcggcggctggaggcgtt

SEQ ID NO: 437985 - DNA, 51 bp, Artificial
  Synthetic oligonucleotide
gtccttcgaccccaattatgccgcatttagttaacaggttacgtggattag

SEQ ID NO: 437986 - DNA, 50 bp, Artificial
  Synthetic oligonucleotide
gtccttcgagggtgacgaagatcgcatttttgagagcccaattctttaat

SEQ ID NO: 437987 - DNA, 52 bp, Artificial
  Synthetic oligonucleotide
gtccttcgcaagaggtggacagccaagatcagcatgccagctatactgattg

SEQ ID NO: 437988 - DNA, 50 bp, Artificial
  Synthetic oligonucleotide
gtccttcggtctactcttcggtttatctttcgccctacctttcttcggtt

SEQ ID NO: 437989 - DNA, 59 bp, Artificial
  Synthetic oligonucleotide
gtccttcgtacatgtaatgtacgtgggcgtttgcgtgcaggtactccacttgtgcaggt

SEQ ID NO: 437990 - DNA, 55 bp, Artificial
  Synthetic oligonucleotide
gtccttcgtgctaatgatgtgctctggctctcgcttaccgctgccgagtatgatc

SEQ ID NO: 437991 - DNA, 55 bp, Artificial
  Synthetic oligonucleotide
gtccttctcggagaacagaatccacggatccttcatgagccgacatcctggggtg

SEQ ID NO: 437992 - DNA, 60 bp, Artificial
  Synthetic oligonucleotide
gtccttgaaataggggacatgctcctgcgaactgcaataggccaagtatcgagacccatg

SEQ ID NO: 437993 - DNA, 57 bp, Artificial
  Synthetic oligonucleotide
gtccttgaatacatcatccgtaggagaccctccacggcaacaacggttgtgtgggga

SEQ ID NO: 437994 - DNA, 55 bp, Artificial
  Synthetic oligonucleotide
gtccttgtagaagtgggcatccgagaggacctcctcctccagggatggtctaacc

SEQ ID NO: 437995 - DNA, 55 bp, Artificial
  Synthetic oligonucleotide
gtccttgtagttcctgacaccaaaccctctggtccacaacacactactaaaccca

SEQ ID NO: 437996 - DNA, 56 bp, Artificial
  Synthetic oligonucleotide
gtccttgtcgtgtgtagtgcggtctggctacccgtaacggcgtatcggcttgggtc

SEQ ID NO: 437997 - DNA, 55 bp, Artificial
  Synthetic oligonucleotide
gtccttgtgctatggggtgttcatcacccacctaacatagggaaccaaagggccc

SEQ ID NO: 437998 - DNA, 55 bp, Artificial
  Synthetic oligonucleotide
gtccttgtggggtaaattggtttccctgcgcatattgtgtgaaaatgctcccagc

SEQ ID NO: 437999 - DNA, 55 bp, Artificial
  Synthetic oligonucleotide
gtcctttaaatactcagactcttgggataggatgcttaactacagacaccaactc

SEQ ID NO: 438000 - DNA, 58 bp, Artificial
  Synthetic oligonucleotide
gtcctttaagattagtagatgggcaaacttgtgacatcgtcaatggtgccctggggag

SEQ ID NO: 438001 - DNA, 50 bp, Artificial
  Synthetic oligonucleotide
gtcctttaccgtccggaagttgtccatcaacccacggtttaacccgtcca

SEQ ID NO: 438002 - DNA, 56 bp, Artificial
  Synthetic oligonucleotide
gtcctttacctcgattcgcctcgtcttcttgttcattcacccgcgccaacttcggc

SEQ ID NO: 438003 - DNA, 55 bp, Artificial
  Synthetic oligonucleotide
gtcctttagtgaagggtcctaggcttaacatgattgaagatgatcttctccgctt

SEQ ID NO: 438004 - DNA, 58 bp, Artificial
  Synthetic oligonucleotide
gtcctttattgcagaggaagatggtgggaattccacctttaatcatgactggctttcc

SEQ ID NO: 438005 - DNA, 55 bp, Artificial
  Synthetic oligonucleotide
gtcctttcatactgctttattgtagagttaaccttatcttccaggttcctaaaga

SEQ ID NO: 438006 - DNA, 53 bp, Artificial
  Synthetic oligonucleotide
gtcctttctgcgtaaaatcggaaccactggagtttcaactaggaccccctgaa

SEQ ID NO: 438007 - DNA, 60 bp, Artificial
  Synthetic oligonucleotide
gtcctttttatgaatcattcactgatgcagtagtcgcagagttcggagaattatatttat

SEQ ID NO: 438008 - DNA, 58 bp, Artificial
  Synthetic oligonucleotide
gtcgaaaaaacgcaaactcatgcgaaacaagggtgttatataccacaagatcgtatga

SEQ ID NO: 438009 - DNA, 55 bp, Artificial
  Synthetic oligonucleotide
gtcgaaaaaccgataccattaggaaggagagatgtaccaggaagacggactagaa

SEQ ID NO: 438010 - DNA, 55 bp, Artificial
  Synthetic oligonucleotide
gtcgaaaaagggaggattagctagtacactttccccttgagcctgccgactttca

SEQ ID NO: 438011 - DNA, 55 bp, Artificial
  Synthetic oligonucleotide
gtcgaaaacgtatccgttattcctgtgtatgaccgaaacgaatatatcgtgacgt

SEQ ID NO: 438012 - DNA, 50 bp, Artificial
  Synthetic oligonucleotide
gtcgaaaacgtatttggcaaactgtcccggacctccgcatagatccaaaa

SEQ ID NO: 438013 - DNA, 55 bp, Artificial
  Synthetic oligonucleotide
gtcgaaagaggggatcgtaccggttgcgtgtgcacacggttatggcggtttggta

SEQ ID NO: 438014 - DNA, 55 bp, Artificial
  Synthetic oligonucleotide
gtcgaaaggcttccaaaccgattggatacacggaatctcaccatatcattccaga

SEQ ID NO: 438015 - DNA, 54 bp, Artificial
  Synthetic oligonucleotide
gtcgaaaggggtatgtgatggaaatcacctaccggatcaccgattaagcagact

SEQ ID NO: 438016 - DNA, 60 bp, Artificial
  Synthetic oligonucleotide
gtcgaaagtacgccggcgtctgaacttcggcagcccttacaccagccgtgctgctgctcc

SEQ ID NO: 438017 - DNA, 55 bp, Artificial
  Synthetic oligonucleotide
gtcgaaagtactggctggtcttacgactggagatttcggtattactttagcaggc

SEQ ID NO: 438018 - DNA, 60 bp, Artificial
  Synthetic oligonucleotide
gtcgaaatagaatgggaattagaaccactcaacactcacagatggaacatgagaagtatg

SEQ ID NO: 438019 - DNA, 55 bp, Artificial
  Synthetic oligonucleotide
gtcgaaatctaaagttagaggactttctttgtaccgagtttctaacaaatgcagc

SEQ ID NO: 438020 - DNA, 55 bp, Artificial
  Synthetic oligonucleotide
gtcgaacaagatgcaccttttccgcgtatcgatttcacaaatatctttcgaacac

SEQ ID NO: 438021 - DNA, 51 bp, Artificial
  Synthetic oligonucleotide
gtcgaacacgactttcacggccggtcttgccggatggcgggatgaccttga

SEQ ID NO: 438022 - DNA, 55 bp, Artificial
  Synthetic oligonucleotide
gtcgaacagcattagaagaggaaacaaggcagcggttacttaaattggcatatgc

SEQ ID NO: 438023 - DNA, 53 bp, Artificial
  Synthetic oligonucleotide
gtcgaacataagttttcctccccgggatccgacggaaaggtatattgagtcta

SEQ ID NO: 438024 - DNA, 60 bp, Artificial
  Synthetic oligonucleotide
gtcgaaccagaaaattatagcatgattcgctttgttgatccattaaccgggcacacgatg

SEQ ID NO: 438025 - DNA, 60 bp, Artificial
  Synthetic oligonucleotide
gtcgaaccattgaataatgatataatattcaactacattcctgaaaggataaggaatgac

SEQ ID NO: 438026 - DNA, 56 bp, Artificial
  Synthetic oligonucleotide
gtcgaaccggcgtcgaatttgatctgactagattaaacgcgttggacgctggaact

SEQ ID NO: 438027 - DNA, 55 bp, Artificial
  Synthetic oligonucleotide
gtcgaaccggctaacacagaagatatccgcaataggttcaaaaggaaattgcagg

SEQ ID NO: 438028 - DNA, 60 bp, Artificial
  Synthetic oligonucleotide
gtcgaacctgagaactatagtatgatccgttttgttgatccactcaccggtgcaactctg

SEQ ID NO: 438029 - DNA, 55 bp, Artificial
  Synthetic oligonucleotide
gtcgaacgaacattcgtcggacgcttctacgatgggacgatcgtcaaggcatccc

SEQ ID NO: 438030 - DNA, 60 bp, Artificial
  Synthetic oligonucleotide
gtcgaactcatgctcgtgaggaccggtataagcgaactggcttaatggggcaggatgaat

SEQ ID NO: 438031 - DNA, 60 bp, Artificial
  Synthetic oligonucleotide
gtcgaactctgtacaaacgatatcagttccaagggtctgcatgaaacgtctaactgtcca

SEQ ID NO: 438032 - DNA, 59 bp, Artificial
  Synthetic oligonucleotide
gtcgaagaagaatatgtctacaaacccgacttctatcattacgatgtttatgattacga

SEQ ID NO: 438033 - DNA, 60 bp, Artificial
  Synthetic oligonucleotide
gtcgaagaatctgttattcgtgcagttgtatttgccttcgaattgcataagcacgtggag

SEQ ID NO: 438034 - DNA, 60 bp, Artificial
  Synthetic oligonucleotide
gtcgaagaatttagcactcttggtgcgaacatatttcttgcattgtaccagacaatgcaa

SEQ ID NO: 438035 - DNA, 55 bp, Artificial
  Synthetic oligonucleotide
gtcgaagactcgcctagtacgtaccgggaaacgatcgcgtccctgtagtgctccc

SEQ ID NO: 438036 - DNA, 59 bp, Artificial
  Synthetic oligonucleotide
gtcgaagactgaacttcgacagcccatacaggaaccgtgctactgcccccactgcccac

SEQ ID NO: 438037 - DNA, 59 bp, Artificial
  Synthetic oligonucleotide
gtcgaagactttctctgagctagggtataacgtgctcgattctgatacttatggaaagg

SEQ ID NO: 438038 - DNA, 55 bp, Artificial
  Synthetic oligonucleotide
gtcgaagagtgccgtgggtcgctcgaagagaaagcccagcgtggctttgcgattg

SEQ ID NO: 438039 - DNA, 55 bp, Artificial
  Synthetic oligonucleotide
gtcgaagatgtgcgcgcagcgttaattttagcggcagagttacacctcccagctg

SEQ ID NO: 438040 - DNA, 58 bp, Artificial
  Synthetic oligonucleotide
gtcgaagcagagttaggatgacagttatttgtgtttcgggatggaccttatctcctac

SEQ ID NO: 438041 - DNA, 60 bp, Artificial
  Synthetic oligonucleotide
gtcgaagcatctgacaactccagggtggccatggaagagaagaagccacagactaaacaa

SEQ ID NO: 438042 - DNA, 58 bp, Artificial
  Synthetic oligonucleotide
gtcgaagctttcaactattcctagaacgcgatcgcaggtcgttggattgacttccaaa

SEQ ID NO: 438043 - DNA, 55 bp, Artificial
  Synthetic oligonucleotide
gtcgaaggctgttggccgagtacaccagatgttagggatggttgctgccaaggac

SEQ ID NO: 438044 - DNA, 60 bp, Artificial
  Synthetic oligonucleotide
gtcgaagggctcatctattggatgtttgactttgtttgaaacgagccccatcagtctatc

SEQ ID NO: 438045 - DNA, 56 bp, Artificial
  Synthetic oligonucleotide
gtcgaaggtgggactactcgccaataccaaggcgaatgagctggtttactcccgcc

SEQ ID NO: 438046 - DNA, 60 bp, Artificial
  Synthetic oligonucleotide
gtcgaaggtgggattactcgccaacactaaggcaaatgagctggtgtactctcgattgtg

SEQ ID NO: 438047 - DNA, 55 bp, Artificial
  Synthetic oligonucleotide
gtcgaaggttcggaggaggttgaacttcgacagtccacgtgccatgcccactgcc

SEQ ID NO: 438048 - DNA, 60 bp, Artificial
  Synthetic oligonucleotide
gtcgaagtataataaagatctaaatttagcattaatgtcattccaccatgcatttagagg

SEQ ID NO: 438049 - DNA, 55 bp, Artificial
  Synthetic oligonucleotide
gtcgaagtgggtcaatcacccaatgtataccaagccaggtttgaagctgtagcgt

SEQ ID NO: 438050 - DNA, 55 bp, Artificial
  Synthetic oligonucleotide
gtcgaataccagaagactatgggatcaatggtgtgtgatgtatgtcatcacgagt

SEQ ID NO: 438051 - DNA, 55 bp, Artificial
  Synthetic oligonucleotide
gtcgaatacggctccgttgaggtccagatgtccgctgagatagttgtgacggccc

SEQ ID NO: 438052 - DNA, 60 bp, Artificial
  Synthetic oligonucleotide
gtcgaatattctgaacggtagaacaatatcgggtgtaacatctcctgatactgtagagct

SEQ ID NO: 438053 - DNA, 57 bp, Artificial
  Synthetic oligonucleotide
gtcgaatattttgaagatgctcaagacaacagacacccttatcacgaaggggatata

SEQ ID NO: 438054 - DNA, 51 bp, Artificial
  Synthetic oligonucleotide
gtcgaatccttgtgcactccttcaccacttgcccgcgctttgagctcacca

SEQ ID NO: 438055 - DNA, 60 bp, Artificial
  Synthetic oligonucleotide
gtcgaatgagtgaaatgggtgcatgctttggggttattcctgttgcaagcccagaagatg

SEQ ID NO: 438056 - DNA, 55 bp, Artificial
  Synthetic oligonucleotide
gtcgaatggctcgggtggtttgatgacaatcaacgcaaacctactgcggacatgc

SEQ ID NO: 438057 - DNA, 55 bp, Artificial
  Synthetic oligonucleotide
gtcgaatgtttcgcggttgataattttaatctcgccataatctgggcgaacatcg

SEQ ID NO: 438058 - DNA, 60 bp, Artificial
  Synthetic oligonucleotide
gtcgaattacatagggtcggggacgtgttatgacttggaggatcatatacagctgagaac

SEQ ID NO: 438059 - DNA, 55 bp, Artificial
  Synthetic oligonucleotide
gtcgaattaccagtgtgaatgcctccaagataagttacacacttagcactgatcc

SEQ ID NO: 438060 - DNA, 53 bp, Artificial
  Synthetic oligonucleotide
gtcgaattccccaccaatgcccgcggaaaccgtgaacttttggcggcctggcg

SEQ ID NO: 438061 - DNA, 55 bp, Artificial
  Synthetic oligonucleotide
gtcgaatttaatacgtagtttgataatgagtcagtggtgcacttgctcgctatcc

SEQ ID NO: 438062 - DNA, 55 bp, Artificial
  Synthetic oligonucleotide
gtcgacaaaattggtagggttgacccgtcccagcaattcaggccctcgcaaggta

SEQ ID NO: 438063 - DNA, 60 bp, Artificial
  Synthetic oligonucleotide
gtcgacaacaaattcctaagccagtttgacgcagtgtttctcgacgaatctcacctcatc

SEQ ID NO: 438064 - DNA, 55 bp, Artificial
  Synthetic oligonucleotide
gtcgacaatagagccataatttataaacgtgtcagcatttcgtatggcgagcgta

SEQ ID NO: 438065 - DNA, 55 bp, Artificial
  Synthetic oligonucleotide
gtcgacacaattctagagcggaatgtcactgtgactcatgccaaggacatccttg

SEQ ID NO: 438066 - DNA, 55 bp, Artificial
  Synthetic oligonucleotide
gtcgacacgaagtaagacagcatcttgcagcaatcgcaaagggttcctttgtacc

SEQ ID NO: 438067 - DNA, 55 bp, Artificial
  Synthetic oligonucleotide
gtcgacacgcctacgcctgattggtttcttcttggctatcttgtgctggaccttg

SEQ ID NO: 438068 - DNA, 55 bp, Artificial
  Synthetic oligonucleotide
gtcgacagcgatggaacacgccagatttccctttctcgcttcaagttgtctgctg

SEQ ID NO: 438069 - DNA, 54 bp, Artificial
  Synthetic oligonucleotide
gtcgacagttttagtttccctttgaacttggcgaaatgtgttcgttggtgtatg

SEQ ID NO: 438070 - DNA, 55 bp, Artificial
  Synthetic oligonucleotide
gtcgacataggatttgacgtcggacgatgacttagctctctgaatgttcggatgg

SEQ ID NO: 438071 - DNA, 59 bp, Artificial
  Synthetic oligonucleotide
gtcgacatgcaaatgggactatacatgacagaagcccgtttagggcattaataagttgg

SEQ ID NO: 438072 - DNA, 59 bp, Artificial
  Synthetic oligonucleotide
gtcgacatgggagaagtccacgtctttgtcggtgaactgtttggacaggatcttgactg

SEQ ID NO: 438073 - DNA, 58 bp, Artificial
  Synthetic oligonucleotide
gtcgaccggacctgttggcatacccttgatacgaaacaagggcttctgagagccacta

SEQ ID NO: 438074 - DNA, 55 bp, Artificial
  Synthetic oligonucleotide
gtcgaccggttgggtttcgatacacacgttacgtatggtactgaccagatctagc

SEQ ID NO: 438075 - DNA, 60 bp, Artificial
  Synthetic oligonucleotide
gtcgacctgactatctcattaatctgggctacagacaacgttatatttgattgggcccta

SEQ ID NO: 438076 - DNA, 55 bp, Artificial
  Synthetic oligonucleotide
gtcgacgcaaaaggacgtctgggcgttgaacccgaatatgatcgctagataggtg

SEQ ID NO: 438077 - DNA, 60 bp, Artificial
  Synthetic oligonucleotide
gtcgacggaaattgcagaattatctcagttaggtcatgcgacaactgatactcgtctcga

SEQ ID NO: 438078 - DNA, 60 bp, Artificial
  Synthetic oligonucleotide
gtcgacggaaattgcagaattatctcagttaggtcatgtgaaagctgatattcgtcccgg

SEQ ID NO: 438079 - DNA, 55 bp, Artificial
  Synthetic oligonucleotide
gtcgacgggtacagagtgcatttctggtctgtgcttggaatcagatcctagttac

SEQ ID NO: 438080 - DNA, 55 bp, Artificial
  Synthetic oligonucleotide
gtcgacggtagtatgggcgggcatatcttcttctaatctgaaatatagcgcatgc

SEQ ID NO: 438081 - DNA, 55 bp, Artificial
  Synthetic oligonucleotide
gtcgacggttggaggcgagcactgacgggccgtggggcggtgacacccagggagg

SEQ ID NO: 438082 - DNA, 58 bp, Artificial
  Synthetic oligonucleotide
gtcgacgtaccaacagaccagttacacaggctaatctacagactcttgtctcgaaacc

SEQ ID NO: 438083 - DNA, 55 bp, Artificial
  Synthetic oligonucleotide
gtcgacgtccaagaggaagcgtgccgatgaggcgcaatggaataagcggtccacc

SEQ ID NO: 438084 - DNA, 56 bp, Artificial
  Synthetic oligonucleotide
gtcgactatggtgagaagatcaattttgaggccccggtctccatttggtcccgtgt

SEQ ID NO: 438085 - DNA, 55 bp, Artificial
  Synthetic oligonucleotide
gtcgactatgtgaatcagattgtgcaagcgatgtccaaaagatcgagatcactaa

SEQ ID NO: 438086 - DNA, 55 bp, Artificial
  Synthetic oligonucleotide
gtcgactcacgcggcgctattttgcgtcggcagtataatctgtccacgtccccgc

SEQ ID NO: 438087 - DNA, 58 bp, Artificial
  Synthetic oligonucleotide
gtcgactcatggggattttaaggtggtcaacactaaggaactcaagattcatcccatc

SEQ ID NO: 438088 - DNA, 55 bp, Artificial
  Synthetic oligonucleotide
gtcgactcggtcatgtctttatacggaccctactcgatcttaggcagaagtctag

SEQ ID NO: 438089 - DNA, 59 bp, Artificial
  Synthetic oligonucleotide
gtcgactctggttctggaagaaagacgcctcgcaaggtacttcttcgatctatcgaagc

SEQ ID NO: 438090 - DNA, 55 bp, Artificial
  Synthetic oligonucleotide
gtcgactgtaccctgaggcggctgctgcgtcgatcgccaaacgtaacggtgggat

SEQ ID NO: 438091 - DNA, 60 bp, Artificial
  Synthetic oligonucleotide
gtcgacttacacattctatctgcatgatttgctaatggaggcgcttgttagaacgggtca

SEQ ID NO: 438092 - DNA, 60 bp, Artificial
  Synthetic oligonucleotide
gtcgacttccaagttggctgctgcaatcaccaaacacatcgaagttcctccccatgagac

SEQ ID NO: 438093 - DNA, 55 bp, Artificial
  Synthetic oligonucleotide
gtcgagaaagaggggttacaggaggaggcaatccaagaaattgccggtatgagcg

SEQ ID NO: 438094 - DNA, 60 bp, Artificial
  Synthetic oligonucleotide
gtcgagaaatgtgccaggtgtgactcgtttggcccatgacggatccaaaatccctctgag

SEQ ID NO: 438095 - DNA, 59 bp, Artificial
  Synthetic oligonucleotide
gtcgagaagtgacgaggagaccaagatggtgcgggaatatcgttcgaaaatcgatgcgt

SEQ ID NO: 438096 - DNA, 55 bp, Artificial
  Synthetic oligonucleotide
gtcgagaagttattgccgtcccgaaccctgctaaactcctcattcgcatgggccg

SEQ ID NO: 438097 - DNA, 60 bp, Artificial
  Synthetic oligonucleotide
gtcgagaagttcaagccagacttggaaagtggatgatatcatttgctgatcagaaaggta

SEQ ID NO: 438098 - DNA, 60 bp, Artificial
  Synthetic oligonucleotide
gtcgagaatacaggacattgtggatttaatacaagcagcagaggcaagttcagctacact

SEQ ID NO: 438099 - DNA, 55 bp, Artificial
  Synthetic oligonucleotide
gtcgagaatccggacatcatacgtgtttaccataagttgggtgaaaccgttcgta

SEQ ID NO: 438100 - DNA, 52 bp, Artificial
  Synthetic oligonucleotide
gtcgagaatgacggtcataaaaacggtcgtgtaatttaacgtgccaagagtt

SEQ ID NO: 438101 - DNA, 56 bp, Artificial
  Synthetic oligonucleotide
gtcgagactacggcaactgtcacgggagagaggagcccgttttcgggcacttgtct

SEQ ID NO: 438102 - DNA, 54 bp, Artificial
  Synthetic oligonucleotide
gtcgagagaaattgccctaagaaggtccaagagaaagtccaagaaagaggacct

SEQ ID NO: 438103 - DNA, 57 bp, Artificial
  Synthetic oligonucleotide
gtcgagagaacataataaggcttgaagccaacgcggaaatgggtcgtggtcgcggag

SEQ ID NO: 438104 - DNA, 55 bp, Artificial
  Synthetic oligonucleotide
gtcgagagcctctctcgcagtagttgcattaacagcgttgtgatacacgtcgtct

SEQ ID NO: 438105 - DNA, 60 bp, Artificial
  Synthetic oligonucleotide
gtcgagagggtaatgactgtcatgttgaacttgctaaggaggacttagatgttgttctag

SEQ ID NO: 438106 - DNA, 52 bp, Artificial
  Synthetic oligonucleotide
gtcgagcatcaacgaattcctatctcacggatgctcccgacttagtccgtgt

SEQ ID NO: 438107 - DNA, 56 bp, Artificial
  Synthetic oligonucleotide
gtcgagcattctccacgtccttcaacaatatcccatggcagtacttgctctgatct

SEQ ID NO: 438108 - DNA, 55 bp, Artificial
  Synthetic oligonucleotide
gtcgagccgtctgatgagtagcacctcagggtcacgaaacgctggtcgtaacggc

SEQ ID NO: 438109 - DNA, 56 bp, Artificial
  Synthetic oligonucleotide
gtcgagcgcggttgcacacccagcagtgactaaagggtctttaaaaccacccaggc

SEQ ID NO: 438110 - DNA, 60 bp, Artificial
  Synthetic oligonucleotide
gtcgagctatagagcctactaatcgtacggtcctgtcagctcttcattcctcattcgaca

SEQ ID NO: 438111 - DNA, 59 bp, Artificial
  Synthetic oligonucleotide
gtcgaggaagtctttataactagccccctctcctggattgcaaagcacgattgatggga

SEQ ID NO: 438112 - DNA, 54 bp, Artificial
  Synthetic oligonucleotide
gtcgaggacggtggaagggagtgtttctggtcgtgacggatcctacgggcccaa

SEQ ID NO: 438113 - DNA, 53 bp, Artificial
  Synthetic oligonucleotide
gtcgaggagcgttggctaacgcttatctcggtgttaaacctttaatttgaagt

SEQ ID NO: 438114 - DNA, 59 bp, Artificial
  Synthetic oligonucleotide
gtcgaggatagcttgacaggggggtggcttaagttcggatttacatgcattgccgagaa

SEQ ID NO: 438115 - DNA, 53 bp, Artificial
  Synthetic oligonucleotide
gtcgaggatattctcctctacagacccctttccagaaggaggatctcgagctt

SEQ ID NO: 438116 - DNA, 57 bp, Artificial
  Synthetic oligonucleotide
gtcgaggcccctttgacaatacaggcattggcaggtgcgtttaacggggatcttcac

SEQ ID NO: 438117 - DNA, 60 bp, Artificial
  Synthetic oligonucleotide
gtcgaggctcttcagctctggtgcgctgtcagatgggtccgctaccagcgccctgaaggc

SEQ ID NO: 438118 - DNA, 55 bp, Artificial
  Synthetic oligonucleotide
gtcgaggtggacccagatgatgttaacaagaatacattgcaagcaaggaggcaga

SEQ ID NO: 438119 - DNA, 55 bp, Artificial
  Synthetic oligonucleotide
gtcgaggttctcatcggtagactttgcttgatagtgcttccagcttccgacccgc

SEQ ID NO: 438120 - DNA, 60 bp, Artificial
  Synthetic oligonucleotide
gtcgaggttgcctcacagctagaattttgctcacacgtctttgagcgggaggacctcgcc

SEQ ID NO: 438121 - DNA, 55 bp, Artificial
  Synthetic oligonucleotide
gtcgaggttggggtattgggaatactgctatgcgagcttatctcattggtggtgc

SEQ ID NO: 438122 - DNA, 60 bp, Artificial
  Synthetic oligonucleotide
gtcgagtaactagggtaagctctagcagcaccaaagcagcatacacaacatctacctgct

SEQ ID NO: 438123 - DNA, 56 bp, Artificial
  Synthetic oligonucleotide
gtcgagtagtagataggaaccttgggatggacgaggtactgaggcaaaggttgcgg

SEQ ID NO: 438124 - DNA, 55 bp, Artificial
  Synthetic oligonucleotide
gtcgagtccggcccattagtaataagaagctcagatccgaccattatagaagacc

SEQ ID NO: 438125 - DNA, 55 bp, Artificial
  Synthetic oligonucleotide
gtcgagtcctcacgaggccatcccctgattttgattttatattcttggtgccacc

SEQ ID NO: 438126 - DNA, 60 bp, Artificial
  Synthetic oligonucleotide
gtcgagtctacgtattctccagatacgataggatacgatctcatacgtgatcttattgca

SEQ ID NO: 438127 - DNA, 56 bp, Artificial
  Synthetic oligonucleotide
gtcgagtcttccagtaaatcgttaccattacatcaactcagcccctttcaactaca

SEQ ID NO: 438128 - DNA, 54 bp, Artificial
  Synthetic oligonucleotide
gtcgagtgtaccgcgtgccggatagacccgaaattgaaataaaattcgaacaag

SEQ ID NO: 438129 - DNA, 54 bp, Artificial
  Synthetic oligonucleotide
gtcgagttccggcttcctgaaacgctagagctcgacgttccgggtacctatacg

SEQ ID NO: 438130 - DNA, 56 bp, Artificial
  Synthetic oligonucleotide
gtcgataaacacggtttgttttgtgatagtgacgaagccggtaagaacagatacgc

SEQ ID NO: 438131 - DNA, 49 bp, Artificial
  Synthetic oligonucleotide
gtcgataaaccttttgggttcaattccctttggtcaatttcgggttcct

SEQ ID NO: 438132 - DNA, 55 bp, Artificial
  Synthetic oligonucleotide
gtcgataacttaaattggtcaggatacagtggttctttcacactaccggtggagt

SEQ ID NO: 438133 - DNA, 55 bp, Artificial
  Synthetic oligonucleotide
gtcgataagagtcgtaggaatgataaactcacgttcaacagtccgtgcttcacgg

SEQ ID NO: 438134 - DNA, 55 bp, Artificial
  Synthetic oligonucleotide
gtcgatacagagttcaaaactcgtttcatccggtcagatgagcatcaggttgctc

SEQ ID NO: 438135 - DNA, 60 bp, Artificial
  Synthetic oligonucleotide
gtcgatacagttcgagatgtgaaagattgtgggtacgattgtgccctggcaattgatgtg

SEQ ID NO: 438136 - DNA, 54 bp, Artificial
  Synthetic oligonucleotide
gtcgatactgctgtacggcgctaaccagtggacgtgcatagcggaggacccccg

SEQ ID NO: 438137 - DNA, 55 bp, Artificial
  Synthetic oligonucleotide
gtcgatagtcacgtaaccgaacgcgattatctcggtctagggtatacgtcacgag

SEQ ID NO: 438138 - DNA, 55 bp, Artificial
  Synthetic oligonucleotide
gtcgatatggtaatcagagtcatcgaaatatttgacaggctactagctcggttgg

SEQ ID NO: 438139 - DNA, 59 bp, Artificial
  Synthetic oligonucleotide
gtcgatcaattaagcaaacttctcattgaaaaaggacaccatgtcacaaaggttgatgg

SEQ ID NO: 438140 - DNA, 55 bp, Artificial
  Synthetic oligonucleotide
gtcgatcataccggtgactatgagtctgtggttaaatcatgcaaggctaaggcgg

SEQ ID NO: 438141 - DNA, 60 bp, Artificial
  Synthetic oligonucleotide
gtcgatcctgctttataattcgttatctggcacaagaagtttaatttaatctactgcgca

SEQ ID NO: 438142 - DNA, 54 bp, Artificial
  Synthetic oligonucleotide
gtcgatctgagggaaggtcctgggctcaacccgggtacccatggcctctttacg

SEQ ID NO: 438143 - DNA, 57 bp, Artificial
  Synthetic oligonucleotide
gtcgatcttcatacagctgcgactcagcctcgcactcagttgagacgccgtagacgg

SEQ ID NO: 438144 - DNA, 56 bp, Artificial
  Synthetic oligonucleotide
gtcgatgaaacattatatatttatgtaccttataataacttgaattggaaatccgt

SEQ ID NO: 438145 - DNA, 60 bp, Artificial
  Synthetic oligonucleotide
gtcgatgaacctttcttcgactgggtctatggatcgcctgagaacctcactctcgaggca

SEQ ID NO: 438146 - DNA, 60 bp, Artificial
  Synthetic oligonucleotide
gtcgatgaatgctagggtggacatgctcactggtgtccacaatattgaagacaaatacgt

SEQ ID NO: 438147 - DNA, 55 bp, Artificial
  Synthetic oligonucleotide
gtcgatgaggcgcacatgagcttgccaagtcgaggcttggccgcgccgattctag

SEQ ID NO: 438148 - DNA, 59 bp, Artificial
  Synthetic oligonucleotide
gtcgatgaggctaggatttccccacgggcgaccgtgtcctagcctgcgtggcggccagc

SEQ ID NO: 438149 - DNA, 55 bp, Artificial
  Synthetic oligonucleotide
gtcgatgagtatacattaactcaaagtgctgaaatcttgctcttgcaaaggaaac

SEQ ID NO: 438150 - DNA, 55 bp, Artificial
  Synthetic oligonucleotide
gtcgatgcccactgcacagtcaacaatgaaggctgatgaaataacacctggaagg

SEQ ID NO: 438151 - DNA, 55 bp, Artificial
  Synthetic oligonucleotide
gtcgatgccttagcggcatcaattgctagtgttatcgctatgagtggtgacacta

SEQ ID NO: 438152 - DNA, 55 bp, Artificial
  Synthetic oligonucleotide
gtcgatggaaaggagtacacgataaatgagctgtctatcttacataatgtaccgg

SEQ ID NO: 438153 - DNA, 55 bp, Artificial
  Synthetic oligonucleotide
gtcgatggaataacagttgggttgaagaagcaggtacgcttgtggactgacctgg

SEQ ID NO: 438154 - DNA, 60 bp, Artificial
  Synthetic oligonucleotide
gtcgatggagccacgcactatggctacgtcaggagaaatcagttgcggttaggtatgagg

SEQ ID NO: 438155 - DNA, 50 bp, Artificial
  Synthetic oligonucleotide
gtcgatgggctcttcattgttatggggagatgcgctcatgggcgaatcca

SEQ ID NO: 438156 - DNA, 57 bp, Artificial
  Synthetic oligonucleotide
gtcgatgggtgacgtccctcccggagagctatatgtcaaaagttctaccgtccagac

SEQ ID NO: 438157 - DNA, 55 bp, Artificial
  Synthetic oligonucleotide
gtcgatggtcgcaccatgaaggttggaagtgttgaaataccaacaagtggcacac

SEQ ID NO: 438158 - DNA, 59 bp, Artificial
  Synthetic oligonucleotide
gtcgatggttaaagcattcatactatgtgcttctgcctagtaaacgccgtttggttgat

SEQ ID NO: 438159 - DNA, 54 bp, Artificial
  Synthetic oligonucleotide
gtcgatgtaacctttcctaacttatatccgttacagaaacacgtcgttgcggag

SEQ ID NO: 438160 - DNA, 55 bp, Artificial
  Synthetic oligonucleotide
gtcgatgtatgctttaacatctgaacttgatttaactccctgtatgttcggatgg

SEQ ID NO: 438161 - DNA, 58 bp, Artificial
  Synthetic oligonucleotide
gtcgatgtatgttttgacgtccgaacttgatttagctccctgaatgttcggatggaaa

SEQ ID NO: 438162 - DNA, 55 bp, Artificial
  Synthetic oligonucleotide
gtcgatgtcccaaaagaacagttacatctactgatctacagactcttatccagaa

SEQ ID NO: 438163 - DNA, 60 bp, Artificial
  Synthetic oligonucleotide
gtcgatgtggtcacccgatgcagtcggagccacatgcgatacagtgtgttttgacagtac

SEQ ID NO: 438164 - DNA, 56 bp, Artificial
  Synthetic oligonucleotide
gtcgattacttccaagtgatgggaggtgagagattaccaaaaaggccggttgtcag

SEQ ID NO: 438165 - DNA, 59 bp, Artificial
  Synthetic oligonucleotide
gtcgattcaaggttcagccggacttcgctgctcaaccgtacactgaagtgcgcggagcc

SEQ ID NO: 438166 - DNA, 60 bp, Artificial
  Synthetic oligonucleotide
gtcgattctacaagtctatttcttataacatattcagcatattgaataccaaataattca

SEQ ID NO: 438167 - DNA, 60 bp, Artificial
  Synthetic oligonucleotide
gtcgattctgggtcctaatcagctaaagctctgcactcaattggtgctgtctaatggagc

SEQ ID NO: 438168 - DNA, 55 bp, Artificial
  Synthetic oligonucleotide
gtcgattgactggcgtttctgttcagcacgcggagctgccagcgatatcaccagc

SEQ ID NO: 438169 - DNA, 60 bp, Artificial
  Synthetic oligonucleotide
gtcgatttacagctgcattgcaagcagtgttgttctggtaggactcatactcgcatttat

SEQ ID NO: 438170 - DNA, 59 bp, Artificial
  Synthetic oligonucleotide
gtcgatttacgattttgggccacctaatcagtcataggctggcccactaagtcacaatg

SEQ ID NO: 438171 - DNA, 55 bp, Artificial
  Synthetic oligonucleotide
gtcgatttatagctgcattgcaagcagtattgtgctggtaggtctcatacttgcg

SEQ ID NO: 438172 - DNA, 56 bp, Artificial
  Synthetic oligonucleotide
gtcgatttgaaattctccccattcgagggtatctccatctttgtcgatatatgatt

SEQ ID NO: 438173 - DNA, 51 bp, Artificial
  Synthetic oligonucleotide
gtcgatttgaacgctgagtgggatgtcgtgaccgctgcagcatatacagct

SEQ ID NO: 438174 - DNA, 55 bp, Artificial
  Synthetic oligonucleotide
gtcgcaaaattcctcgttgtgatctttgttgcattttgccattacagtgttgtcg

SEQ ID NO: 438175 - DNA, 50 bp, Artificial
  Synthetic oligonucleotide
gtcgcaaagccaaaaggaacgttcccggtgacccaaagggagttcaaaaa

SEQ ID NO: 438176 - DNA, 60 bp, Artificial
  Synthetic oligonucleotide
gtcgcaaagcgaacagctcgaattacattgtttatgcctatggcccctagtctatgtaaa

SEQ ID NO: 438177 - DNA, 58 bp, Artificial
  Synthetic oligonucleotide
gtcgcaaatgcaagaattttatagacgttattaccccgctttacagagagagatagac

SEQ ID NO: 438178 - DNA, 55 bp, Artificial
  Synthetic oligonucleotide
gtcgcaaccgcggtgaggcaaatgctcagcttctctaggataacacctaccggag

SEQ ID NO: 438179 - DNA, 60 bp, Artificial
  Synthetic oligonucleotide
gtcgcaactgtgaacatctcaactgtaagatctcacggcagctagcgcgattcaagaatc

SEQ ID NO: 438180 - DNA, 50 bp, Artificial
  Synthetic oligonucleotide
gtcgcaagacaatgcgacttaactccagcgatgcctctcaatgtttcatt

SEQ ID NO: 438181 - DNA, 55 bp, Artificial
  Synthetic oligonucleotide
gtcgcaaggcacacagcccaacaggactcaatcatgaactattctgcaaagctcg

SEQ ID NO: 438182 - DNA, 55 bp, Artificial
  Synthetic oligonucleotide
gtcgcaatggacccagcctctatcgagtggactgccttttgggccattgacggcc

SEQ ID NO: 438183 - DNA, 59 bp, Artificial
  Synthetic oligonucleotide
gtcgcacaacccaagcgatgacccataagacctttcgtggatttaggactatatcacga

SEQ ID NO: 438184 - DNA, 55 bp, Artificial
  Synthetic oligonucleotide
gtcgcacatgtcgctctgtagaccgtcccaatctgtagtgatgtattcgtgaccg

SEQ ID NO: 438185 - DNA, 55 bp, Artificial
  Synthetic oligonucleotide
gtcgcaccgtgggatcatgacggatggcttgtacataccgaaacttgaaccggag

SEQ ID NO: 438186 - DNA, 60 bp, Artificial
  Synthetic oligonucleotide
gtcgcactctctgcaactgaatgactgtgtcgtgccactagttggtccggcgctagattc

SEQ ID NO: 438187 - DNA, 57 bp, Artificial
  Synthetic oligonucleotide
gtcgcacttcctcgacctccctttccagtggaaggtcacggacttcacaggatacgc

SEQ ID NO: 438188 - DNA, 52 bp, Artificial
  Synthetic oligonucleotide
gtcgcacttgattgacgccacgagtcgttgccaaaggatcgcccccgttagc

SEQ ID NO: 438189 - DNA, 57 bp, Artificial
  Synthetic oligonucleotide
gtcgcacttttgacaccttcaaagcacgtagtaaaatggaggaagatttcttgtcta

SEQ ID NO: 438190 - DNA, 55 bp, Artificial
  Synthetic oligonucleotide
gtcgcagaaggcgcgtgttttgtcgctccggggttcacattcacgttcaagaaac

SEQ ID NO: 438191 - DNA, 55 bp, Artificial
  Synthetic oligonucleotide
gtcgcagaatttaatttagacgatgttagagattgggagcaatcagaagatcagc

SEQ ID NO: 438192 - DNA, 55 bp, Artificial
  Synthetic oligonucleotide
gtcgcagcagtacaagttcggcacagctacatacgcgctaaaggagccggtaatg

SEQ ID NO: 438193 - DNA, 55 bp, Artificial
  Synthetic oligonucleotide
gtcgcagctactggctggcattatggtgaggtggatctctgcatctcctggccaa

SEQ ID NO: 438194 - DNA, 54 bp, Artificial
  Synthetic oligonucleotide
gtcgcagcttcgcgcggggaggaaaataatccgatccgacccccggggcgagag

SEQ ID NO: 438195 - DNA, 60 bp, Artificial
  Synthetic oligonucleotide
gtcgcaggaaatagcgatgtctcaactaatcgatctagcactacttccattagacatgtt

SEQ ID NO: 438196 - DNA, 60 bp, Artificial
  Synthetic oligonucleotide
gtcgcagtcagatcctaatggcgctaccgttgctcgtcgtgacatttctactgtcgcaga

SEQ ID NO: 438197 - DNA, 55 bp, Artificial
  Synthetic oligonucleotide
gtcgcagtctgacttaccgtgaaacacatcgtgtctgttccccatcgtcggcctg

SEQ ID NO: 438198 - DNA, 54 bp, Artificial
  Synthetic oligonucleotide
gtcgcagtgggtcacaaaggtggaaaaactaggtctacccaagattaagccagg

SEQ ID NO: 438199 - DNA, 55 bp, Artificial
  Synthetic oligonucleotide
gtcgcagttgttagacgccgtccagatgagtttatgcctgccgagccctgactaa

SEQ ID NO: 438200 - DNA, 57 bp, Artificial
  Synthetic oligonucleotide
gtcgcatcattggtgggggtgagatgcggagctggtatacggattccaggatgtata

SEQ ID NO: 438201 - DNA, 60 bp, Artificial
  Synthetic oligonucleotide
gtcgcatggagaccaccgtgaacacccacatgatcttgcccaaggtcttgcataagagga

SEQ ID NO: 438202 - DNA, 55 bp, Artificial
  Synthetic oligonucleotide
gtcgcattagatacaacgcccgataccgtggcagcaacagaaggtttccactcgg

SEQ ID NO: 438203 - DNA, 55 bp, Artificial
  Synthetic oligonucleotide
gtcgccaacgacaagaaaccaagcgacagaattgcgaggatcgccgacactttcg

SEQ ID NO: 438204 - DNA, 54 bp, Artificial
  Synthetic oligonucleotide
gtcgccaataaaatatgttaactaatctggtatgtgaagtattttttaaccgtc

SEQ ID NO: 438205 - DNA, 55 bp, Artificial
  Synthetic oligonucleotide
gtcgccactccagtggcgcaacctaaactgtacacagtgcagtttggaagccttg

SEQ ID NO: 438206 - DNA, 55 bp, Artificial
  Synthetic oligonucleotide
gtcgccactgtggaacctacggtctaccatcagactctcaacgacatagaggatg

SEQ ID NO: 438207 - DNA, 56 bp, Artificial
  Synthetic oligonucleotide
gtcgccagagctctagcacacggtgttagggtcctggaagatggggtaaattacgc

SEQ ID NO: 438208 - DNA, 60 bp, Artificial
  Synthetic oligonucleotide
gtcgccagcacacgttgacgactacgaggagtgcactcaccaacccgcttcgcttggagc

SEQ ID NO: 438209 - DNA, 54 bp, Artificial
  Synthetic oligonucleotide
gtcgccagcccacagtgcctctggtcttgcgtccctcttttcaaccgggtcatc

SEQ ID NO: 438210 - DNA, 55 bp, Artificial
  Synthetic oligonucleotide
gtcgccaggttcaggtctcctcgtcagcagtggttcttcgcgcactggatgaacc

SEQ ID NO: 438211 - DNA, 55 bp, Artificial
  Synthetic oligonucleotide
gtcgccatcgttcatctctcgacaatgacaggaggcatgttgtccgcccgaacac

SEQ ID NO: 438212 - DNA, 59 bp, Artificial
  Synthetic oligonucleotide
gtcgccatgctgaggacaagcgtagagacgtcaccgatgttatcatctactacggagct

SEQ ID NO: 438213 - DNA, 59 bp, Artificial
  Synthetic oligonucleotide
gtcgcccaactctacgctggcgacgattgcgccattgccgaagtgtgtcaggaaaaacc

SEQ ID NO: 438214 - DNA, 51 bp, Artificial
  Synthetic oligonucleotide
gtcgcccactcactacgtgcctgagactgacacctctcggcaggtcatggc

SEQ ID NO: 438215 - DNA, 55 bp, Artificial
  Synthetic oligonucleotide
gtcgcccattcatgagggaactgatccctaatcattctcaaatactcctccttag

SEQ ID NO: 438216 - DNA, 59 bp, Artificial
  Synthetic oligonucleotide
gtcgcccctactcactacgtgacggagtcggatgcgtcgcagcgtgtgacccaactact

SEQ ID NO: 438217 - DNA, 58 bp, Artificial
  Synthetic oligonucleotide
gtcgcccgacgtgcgagactcatatgccctaacaggagacgaccacaaggtttgggga

SEQ ID NO: 438218 - DNA, 55 bp, Artificial
  Synthetic oligonucleotide
gtcgcccgcactacagctggatttgctggtctcttctcaccaggcgcccagcaga

SEQ ID NO: 438219 - DNA, 58 bp, Artificial
  Synthetic oligonucleotide
gtcgccgccaccttaggatttggggcgtacatgtctaaggcacatggtgtcgacccca

SEQ ID NO: 438220 - DNA, 57 bp, Artificial
  Synthetic oligonucleotide
gtcgccgcctggtcatctcggtactcgaacataaagaagaccctggtctgttaggac

SEQ ID NO: 438221 - DNA, 56 bp, Artificial
  Synthetic oligonucleotide
gtcgccggtcaagtagtactccagggtacgcctagggatagcggttagtcgcgcga

SEQ ID NO: 438222 - DNA, 55 bp, Artificial
  Synthetic oligonucleotide
gtcgccgtctcagatgggacgtttgggatggttgatggagtaacaggcgatgtca

SEQ ID NO: 438223 - DNA, 55 bp, Artificial
  Synthetic oligonucleotide
gtcgcctacacccgaggacgatcgcgatttagtggtagtacgtggacgtctccga

SEQ ID NO: 438224 - DNA, 58 bp, Artificial
  Synthetic oligonucleotide
gtcgcctcccactccacttgctcactgaaccggctgccccttccgaagtcctcctctc

SEQ ID NO: 438225 - DNA, 55 bp, Artificial
  Synthetic oligonucleotide
gtcgcctcggtacaaaacttagcatgcacactcgcagtggcaagggtataggagc

SEQ ID NO: 438226 - DNA, 59 bp, Artificial
  Synthetic oligonucleotide
gtcgcctcttgcgtgcgaaaccgtgttggacgatttgatcgagcacaaatgatgaacgg

SEQ ID NO: 438227 - DNA, 60 bp, Artificial
  Synthetic oligonucleotide
gtcgccttgcagtgttaacttggctctcatgaatctctttgatcttccacaaggggtagg

SEQ ID NO: 438228 - DNA, 55 bp, Artificial
  Synthetic oligonucleotide
gtcgcgaagatttcgcgcagtttggcccggttgtccgaagccggtctcatcgtgc

SEQ ID NO: 438229 - DNA, 58 bp, Artificial
  Synthetic oligonucleotide
gtcgcgaatggttatactgcaccaagaggtccttttgactctgtattacttagtctta

SEQ ID NO: 438230 - DNA, 60 bp, Artificial
  Synthetic oligonucleotide
gtcgcgagcttaacatggagtcctatttgcgcacacatggacccaagtatgacaagttta

SEQ ID NO: 438231 - DNA, 55 bp, Artificial
  Synthetic oligonucleotide
gtcgcgcaacagcgtttgaatcctgtgtaagaatggatggtggttgcgtagcgac

SEQ ID NO: 438232 - DNA, 55 bp, Artificial
  Synthetic oligonucleotide
gtcgcgcatacccacgggggagcgggtttgggaccgagggaatgtcacactcttg

SEQ ID NO: 438233 - DNA, 55 bp, Artificial
  Synthetic oligonucleotide
gtcgcgcgagacttcagtgagatctacgtcaagtatgggcgtggcttgcgcgacc

SEQ ID NO: 438234 - DNA, 56 bp, Artificial
  Synthetic oligonucleotide
gtcgcgcggtccagcgaacgttatacttactgacggtaaactggtacccgatggca

SEQ ID NO: 438235 - DNA, 50 bp, Artificial
  Synthetic oligonucleotide
gtcgcgctcactctattacttatgtatacaagcctaaccttacttgattg

SEQ ID NO: 438236 - DNA, 55 bp, Artificial
  Synthetic oligonucleotide
gtcgcggaacttcggtatatgtagccgacttcgttagtccaatgcttcccccggc

SEQ ID NO: 438237 - DNA, 50 bp, Artificial
  Synthetic oligonucleotide
gtcgcggacacgttgaagaccatcgttgttaccgaagacacaatcccgtc

SEQ ID NO: 438238 - DNA, 52 bp, Artificial
  Synthetic oligonucleotide
gtcgcggacatcaacctagactctcagctccacgacattgcaatgaacggtt

SEQ ID NO: 438239 - DNA, 56 bp, Artificial
  Synthetic oligonucleotide
gtcgcggagtgaaagcacgattgaatcctttttcgcacgcggggcctgtgtaacaa

SEQ ID NO: 438240 - DNA, 55 bp, Artificial
  Synthetic oligonucleotide
gtcgcggcaacaatttccaacaatgccagttgactataagagatcaatccagcgc

SEQ ID NO: 438241 - DNA, 60 bp, Artificial
  Synthetic oligonucleotide
gtcgcggcaattgaaatcgtgaatgacggattcgcttcagtgaattcggatgttacgctt

SEQ ID NO: 438242 - DNA, 60 bp, Artificial
  Synthetic oligonucleotide
gtcgcggcttgcatttggcttcggtgtctaattttcctaagagaagcgtgagcgctgatg

SEQ ID NO: 438243 - DNA, 55 bp, Artificial
  Synthetic oligonucleotide
gtcgcgggtaattacacatccgtaataacccgctttattggccttgcgcctgtta

SEQ ID NO: 438244 - DNA, 55 bp, Artificial
  Synthetic oligonucleotide
gtcgcggtactgtcggggctgagtatatacgggatctaataggggttgtacggtg

SEQ ID NO: 438245 - DNA, 60 bp, Artificial
  Synthetic oligonucleotide
gtcgcgtagctatgagccgaggtccgcgtgagtactgagcagaggtacgtagccagtttg

SEQ ID NO: 438246 - DNA, 60 bp, Artificial
  Synthetic oligonucleotide
gtcgcgtagttatgagccgaggtccgcgtgagtacgtctgctcctaagcatcggagtgtg

SEQ ID NO: 438247 - DNA, 52 bp, Artificial
  Synthetic oligonucleotide
gtcgcgtcatcaacgtctaggaacatcccacgaatgaagtaaacgcctttcg

SEQ ID NO: 438248 - DNA, 55 bp, Artificial
  Synthetic oligonucleotide
gtcgcgtccatcgcagacaccaagagatttgtgaagtgccaactgctcgttcctc

SEQ ID NO: 438249 - DNA, 55 bp, Artificial
  Synthetic oligonucleotide
gtcgcgtccgggacggcagattgatcgccactaaacgcaaacggtacgtcgaaaa

SEQ ID NO: 438250 - DNA, 59 bp, Artificial
  Synthetic oligonucleotide
gtcgcgtgtttatggggtgagccctgggcttgtacataaccttatcggcatgctacaaa

SEQ ID NO: 438251 - DNA, 51 bp, Artificial
  Synthetic oligonucleotide
gtcgcgttgggcacctacgagtgccttccactgtggacagtacttgaaagg

SEQ ID NO: 438252 - DNA, 60 bp, Artificial
  Synthetic oligonucleotide
gtcgcgtttatcggcacctgctgtctatattcaataacgcaatggtcgattttcatacag

SEQ ID NO: 438253 - DNA, 55 bp, Artificial
  Synthetic oligonucleotide
gtcgctaacagggcttttgaggctgattactgttttgtgtgcgatcaactctttt

SEQ ID NO: 438254 - DNA, 60 bp, Artificial
  Synthetic oligonucleotide
gtcgctaacatcagcggcccatccgaagataggccttattgctggcactacccgcctaga

SEQ ID NO: 438255 - DNA, 60 bp, Artificial
  Synthetic oligonucleotide
gtcgctaatagggcgcgggatgacgtgcatattagatttgcaagtcatatgattaccgac

SEQ ID NO: 438256 - DNA, 56 bp, Artificial
  Synthetic oligonucleotide
gtcgctacagtacgggccatgggcccttacatggagcgattggcgggtaaacatcc

SEQ ID NO: 438257 - DNA, 57 bp, Artificial
  Synthetic oligonucleotide
gtcgctagagcacttaatagaattgggagcgggccagctttagtaaacatgattaat

SEQ ID NO: 438258 - DNA, 60 bp, Artificial
  Synthetic oligonucleotide
gtcgctagcactatattatctaatgtgtctccagttgcccaacaaaatttccagactaat

SEQ ID NO: 438259 - DNA, 56 bp, Artificial
  Synthetic oligonucleotide
gtcgctagtgatatatcaatctcatctgagcgcgactttttgattcgaggagctgt

SEQ ID NO: 438260 - DNA, 50 bp, Artificial
  Synthetic oligonucleotide
gtcgctatctccaattcggagagttagtttttgacggtaaacgtaccgtt

SEQ ID NO: 438261 - DNA, 55 bp, Artificial
  Synthetic oligonucleotide
gtcgctatgatatgatcttgtccataagcgataaaggacaccgtacttggcaaac

SEQ ID NO: 438262 - DNA, 55 bp, Artificial
  Synthetic oligonucleotide
gtcgctatgttgcagtcggtcaatcagagaatggtcgacgtgtcacgtcattcgg

SEQ ID NO: 438263 - DNA, 60 bp, Artificial
  Synthetic oligonucleotide
gtcgctcaaatgaacatttctccgtctgacattgcggatgccatctcacgttgttctcag

SEQ ID NO: 438264 - DNA, 50 bp, Artificial
  Synthetic oligonucleotide
gtcgctcacatacaggagcccattggaagagaatgttggtgcatatgact

SEQ ID NO: 438265 - DNA, 55 bp, Artificial
  Synthetic oligonucleotide
gtcgctcattcataacattggactggtcacgtttcgataaacgagcgtactttcc

SEQ ID NO: 438266 - DNA, 55 bp, Artificial
  Synthetic oligonucleotide
gtcgctccaactgcggaggataaacaaccacagcccttggatgaggaggagctcg

SEQ ID NO: 438267 - DNA, 55 bp, Artificial
  Synthetic oligonucleotide
gtcgctccattgacacgttcgctcaggggtggggtcccatcacctactccagcga

SEQ ID NO: 438268 - DNA, 60 bp, Artificial
  Synthetic oligonucleotide
gtcgctcctgctgctcctattcaagttccccctgcgccaaacgtgattgcacagcgtcag

SEQ ID NO: 438269 - DNA, 56 bp, Artificial
  Synthetic oligonucleotide
gtcgctcgcacctagcagggctagctcgagaattagcctagtttccaacccgccag

SEQ ID NO: 438270 - DNA, 50 bp, Artificial
  Synthetic oligonucleotide
gtcgctcgttatggccagccggcactccggtagtatctgcgtgtcctcga

SEQ ID NO: 438271 - DNA, 59 bp, Artificial
  Synthetic oligonucleotide
gtcgctctagaaaaccaacacactatagacgtgactgattcagaaatgaacaaactctt

SEQ ID NO: 438272 - DNA, 56 bp, Artificial
  Synthetic oligonucleotide
gtcgctctgtggcagatctagtctgtgcgcagtattactctggtgtcatggtacta

SEQ ID NO: 438273 - DNA, 59 bp, Artificial
  Synthetic oligonucleotide
gtcgctgacacgctgccaacaggaccgcgcaataccgagagtgtacctgccttgacggc

SEQ ID NO: 438274 - DNA, 51 bp, Artificial
  Synthetic oligonucleotide
gtcgctgcacttgcaggtgttgcgcacgtgccgcctggcggccttgcccac

SEQ ID NO: 438275 - DNA, 60 bp, Artificial
  Synthetic oligonucleotide
gtcgctggactgcgcgaacgcatcaaatgttcaggctgtgaaccattctgcaacaaaagg

SEQ ID NO: 438276 - DNA, 55 bp, Artificial
  Synthetic oligonucleotide
gtcgctggatatgacaggtacagatgtatccatgtgcaacaatttgagtagaagc

SEQ ID NO: 438277 - DNA, 60 bp, Artificial
  Synthetic oligonucleotide
gtcgctgggactcggagcggctctggcggtttttcatctgacgctggtgctgtctggggt

SEQ ID NO: 438278 - DNA, 60 bp, Artificial
  Synthetic oligonucleotide
gtcgctgggaggaagagcctggctctctcgtgcccggggatctgacgaagacaatgaaga

SEQ ID NO: 438279 - DNA, 53 bp, Artificial
  Synthetic oligonucleotide
gtcgctgtaaagccactgtccgaggcctgtcgcaacgctctcgatgttcttgt

SEQ ID NO: 438280 - DNA, 57 bp, Artificial
  Synthetic oligonucleotide
gtcgctgttaatatccctgaagactggaatttgactcattggaaacccgtacgtgtg

SEQ ID NO: 438281 - DNA, 57 bp, Artificial
  Synthetic oligonucleotide
gtcgctgttacctgtgttcggcgggatcatctctacaacaatggacaagtttgcaag

SEQ ID NO: 438282 - DNA, 58 bp, Artificial
  Synthetic oligonucleotide
gtcgctgtttgttccctggatcgaatctgccccgctgttagcgagtctaacgccaaac

SEQ ID NO: 438283 - DNA, 55 bp, Artificial
  Synthetic oligonucleotide
gtcgcttagcctaaaggcatcgaaattggtttaagggctcaacaacgaagcttga

SEQ ID NO: 438284 - DNA, 60 bp, Artificial
  Synthetic oligonucleotide
gtcgcttcacactccacactacgataaacatcattgaaagctacattcacaacatctgtg

SEQ ID NO: 438285 - DNA, 55 bp, Artificial
  Synthetic oligonucleotide
gtcgcttccatactatggtgagggcgccgtatttacggtacctagaaaggctttc

SEQ ID NO: 438286 - DNA, 59 bp, Artificial
  Synthetic oligonucleotide
gtcgcttgcgtttgtctacacgcagctcgtcaacgggacggagacgtggcacaggttcc

SEQ ID NO: 438287 - DNA, 52 bp, Artificial
  Synthetic oligonucleotide
gtcgcttggcgccctgtatgtcggccaagtagcagtttaccatgagttcgta

SEQ ID NO: 438288 - DNA, 55 bp, Artificial
  Synthetic oligonucleotide
gtcgctttaacgtttggactttcacttatatggatgacttcctcctctgtcaccc

SEQ ID NO: 438289 - DNA, 58 bp, Artificial
  Synthetic oligonucleotide
gtcgctttattttgacctgtgttagggaccaaaaacggtggcagcactgtctagctgc

SEQ ID NO: 438290 - DNA, 54 bp, Artificial
  Synthetic oligonucleotide
gtcgcttttaacgtgtttccttttacacgtgcgaccaggtcgtcacttatcgac

SEQ ID NO: 438291 - DNA, 55 bp, Artificial
  Synthetic oligonucleotide
gtcggaaaatgttaactacatgtctcctataccacgttttcctggattaaccagc

SEQ ID NO: 438292 - DNA, 55 bp, Artificial
  Synthetic oligonucleotide
gtcggaaactgattagtgactatggacgtgatatactcacttgtggagcaatcag

SEQ ID NO: 438293 - DNA, 54 bp, Artificial
  Synthetic oligonucleotide
gtcggaacaactgatcacctcggggttcccacttacacctggggggagaatgag

SEQ ID NO: 438294 - DNA, 51 bp, Artificial
  Synthetic oligonucleotide
gtcggaaccagtcattgtaggaaaccaatgcgttagtcctacagaagctat

SEQ ID NO: 438295 - DNA, 55 bp, Artificial
  Synthetic oligonucleotide
gtcggaacttgcggcgcggatgacaaccaagcacaggcgggacacctcgttgttg

SEQ ID NO: 438296 - DNA, 60 bp, Artificial
  Synthetic oligonucleotide
gtcggaagaatgattggtggaattggacgattctacatccaaatgtgcactgagcttaaa

SEQ ID NO: 438297 - DNA, 55 bp, Artificial
  Synthetic oligonucleotide
gtcggaagccggtacttatgccatgcaacgcgtcaacgatgatgcccgacagatt

SEQ ID NO: 438298 - DNA, 54 bp, Artificial
  Synthetic oligonucleotide
gtcggaaggacaggatgagctcagaagacaagactaggcacaagaagctcaaac

SEQ ID NO: 438299 - DNA, 55 bp, Artificial
  Synthetic oligonucleotide
gtcggaatgagtgcattctttcttacactcaagttcggtttgggtaacaggtgga

SEQ ID NO: 438300 - DNA, 60 bp, Artificial
  Synthetic oligonucleotide
gtcggacagttggtagttaatgcgccagcgatacttaactattctaatcctcaggatgca

SEQ ID NO: 438301 - DNA, 54 bp, Artificial
  Synthetic oligonucleotide
gtcggacctcagtgagatggccccggcgggagagagcaagtatcgggaggactt

SEQ ID NO: 438302 - DNA, 55 bp, Artificial
  Synthetic oligonucleotide
gtcggacctcttggtgactgacggggttccaaagaacctcctgaacgtcacacac

SEQ ID NO: 438303 - DNA, 60 bp, Artificial
  Synthetic oligonucleotide
gtcggacgatgatttagctctctgaatgttcggatggaaatgtgttgaccttgttgggga

SEQ ID NO: 438304 - DNA, 55 bp, Artificial
  Synthetic oligonucleotide
gtcggacgcaagtgtttctcctcgggaaccgacgtgctcggtccgacagcttcga

SEQ ID NO: 438305 - DNA, 55 bp, Artificial
  Synthetic oligonucleotide
gtcggacggtggcgaaatcgctgttggaattatacgtccaaagagtccacctggt

SEQ ID NO: 438306 - DNA, 55 bp, Artificial
  Synthetic oligonucleotide
gtcggacgtggccaattccgccatgactctgattacagccgcaatcctcccggcg

SEQ ID NO: 438307 - DNA, 57 bp, Artificial
  Synthetic oligonucleotide
gtcggactatatctccacgctgtctaagaagaaccttacgtcggctaagtcacaaat

SEQ ID NO: 438308 - DNA, 52 bp, Artificial
  Synthetic oligonucleotide
gtcggactggatcatcgctgacaccccatgacaagtttcgggcattttcttt

SEQ ID NO: 438309 - DNA, 55 bp, Artificial
  Synthetic oligonucleotide
gtcggagaccgggctagtatcgaaaaggctttaagacaagtaacagtacatcaag

SEQ ID NO: 438310 - DNA, 59 bp, Artificial
  Synthetic oligonucleotide
gtcggagagttgtctgtcgagtacaccatcaccctactcaatccatcccctgttgctag

SEQ ID NO: 438311 - DNA, 55 bp, Artificial
  Synthetic oligonucleotide
gtcggagatcaagtgatgcagtataggatcagcaaccgacagaaagcgagtccag

SEQ ID NO: 438312 - DNA, 55 bp, Artificial
  Synthetic oligonucleotide
gtcggagcgctgtgctataagatactactcgtcaaagcaagcaatctgtacacag

SEQ ID NO: 438313 - DNA, 56 bp, Artificial
  Synthetic oligonucleotide
gtcggagctgggctagccctttacgggggctacagaacgctcaagttcctgtggaa

SEQ ID NO: 438314 - DNA, 60 bp, Artificial
  Synthetic oligonucleotide
gtcggaggatgacctgcatgattcgtacttgccatgacaaacattggaatttcttggatg

SEQ ID NO: 438315 - DNA, 57 bp, Artificial
  Synthetic oligonucleotide
gtcggaggcagctttccgacaatattctaaaactaaggatccagagaccttagttca

SEQ ID NO: 438316 - DNA, 57 bp, Artificial
  Synthetic oligonucleotide
gtcggaggcgatttcgagtaggttcaatggcaattttctcgtcaattttatggccaa

SEQ ID NO: 438317 - DNA, 53 bp, Artificial
  Synthetic oligonucleotide
gtcggagtttctagggtttgtaattgggaaagtgcctcttctttggtaagaga

SEQ ID NO: 438318 - DNA, 60 bp, Artificial
  Synthetic oligonucleotide
gtcggatacttatgtgcaggtctccctagcgacaccccaagaggagaagatagtcagttc

SEQ ID NO: 438319 - DNA, 52 bp, Artificial
  Synthetic oligonucleotide
gtcggatggcacgtagacctctagcagcgccttacgggggccgctcgacaga

SEQ ID NO: 438320 - DNA, 54 bp, Artificial
  Synthetic oligonucleotide
gtcggatgttacccgtggtaatggtttgactcatcgagtcgggaagaggttttg

SEQ ID NO: 438321 - DNA, 55 bp, Artificial
  Synthetic oligonucleotide
gtcggattccttccgtctggccgggagcttgtctcccttgctcatgacacaactc

SEQ ID NO: 438322 - DNA, 55 bp, Artificial
  Synthetic oligonucleotide
gtcggattttaaacaaggccccactcgacttaggaggatgcaccatggagggttg

SEQ ID NO: 438323 - DNA, 60 bp, Artificial
  Synthetic oligonucleotide
gtcggcaagcgcttttgtgttaagtctgtatatattttaggcaagatatggatggacgaa

SEQ ID NO: 438324 - DNA, 55 bp, Artificial
  Synthetic oligonucleotide
gtcggcaatgcttaaaattggcaagtatgagtcagcctgtgaatgcaggagtagg

SEQ ID NO: 438325 - DNA, 55 bp, Artificial
  Synthetic oligonucleotide
gtcggcacaacggtagagaacacggaaaggcatacgaccgaggacgttaatcgga

SEQ ID NO: 438326 - DNA, 60 bp, Artificial
  Synthetic oligonucleotide
gtcggcagccgctctcagtggtaacttgcgggtctggatgcgtgatgtttagtggttgac

SEQ ID NO: 438327 - DNA, 52 bp, Artificial
  Synthetic oligonucleotide
gtcggcagtaaactcaccggatagtggagcatggtgcgatgaccaaccgctg

SEQ ID NO: 438328 - DNA, 50 bp, Artificial
  Synthetic oligonucleotide
gtcggcagtgactcccttgagattaaacagtagcacgaaggtgttggata

SEQ ID NO: 438329 - DNA, 55 bp, Artificial
  Synthetic oligonucleotide
gtcggcatatgcaggcccaggacgatatatagaacgtcagccccgatggcatgcc

SEQ ID NO: 438330 - DNA, 55 bp, Artificial
  Synthetic oligonucleotide
gtcggcatcgctagccaacctaggattaaacatggataatgctatccgtgaactg

SEQ ID NO: 438331 - DNA, 60 bp, Artificial
  Synthetic oligonucleotide
gtcggcccatggaatggagtcaaccatgcacgcaagtgggtaaatgccgtaggcttgtgt

SEQ ID NO: 438332 - DNA, 59 bp, Artificial
  Synthetic oligonucleotide
gtcggccctcggaatcaatgctgtggcgtactaccggggtcttgatgtgtccgtcatac

SEQ ID NO: 438333 - DNA, 60 bp, Artificial
  Synthetic oligonucleotide
gtcggccctgctgtcaagaagattgccaagtataattactgtatatcttacggtgcttgg

SEQ ID NO: 438334 - DNA, 55 bp, Artificial
  Synthetic oligonucleotide
gtcggcctggtgctagacattacaaggatcaatacagatgtagacgcttgtaact

SEQ ID NO: 438335 - DNA, 57 bp, Artificial
  Synthetic oligonucleotide
gtcggcgaggtagctattttgagctttgttggattgatttgcttttacttgctttac

SEQ ID NO: 438336 - DNA, 60 bp, Artificial
  Synthetic oligonucleotide
gtcggcgagtcgcgttgagcgatctcttgaattgtgtccaatcaatagtgcggttcaaat

SEQ ID NO: 438337 - DNA, 53 bp, Artificial
  Synthetic oligonucleotide
gtcggcgcctcagacaagtctgcactgttcatccgactttgcctggttctcac

SEQ ID NO: 438338 - DNA, 56 bp, Artificial
  Synthetic oligonucleotide
gtcggcgctgaatcctgcggacgacccgtctcggggccgcttgggactctaccgcc

SEQ ID NO: 438339 - DNA, 56 bp, Artificial
  Synthetic oligonucleotide
gtcggcgtcgaattaggatgcggaaaggttttggtgacgcactaaggagctacgct

SEQ ID NO: 438340 - DNA, 53 bp, Artificial
  Synthetic oligonucleotide
gtcggcgtcgggaaacgaaccaggcggagccgaccgcccaaacaaggcaagtc

SEQ ID NO: 438341 - DNA, 52 bp, Artificial
  Synthetic oligonucleotide
gtcggctaaaccgttttgcggggagagcacactttacacccgtacttggtcg

SEQ ID NO: 438342 - DNA, 54 bp, Artificial
  Synthetic oligonucleotide
gtcggctaagctagtctccactaagtttaactttgctcgtaaagcggaaagtaa

SEQ ID NO: 438343 - DNA, 52 bp, Artificial
  Synthetic oligonucleotide
gtcggctaatcccggtgagggattggcagacagcggctttagcactccttaa

SEQ ID NO: 438344 - DNA, 50 bp, Artificial
  Synthetic oligonucleotide
gtcggctcccactaccttaaacatagtggcggagatgtatgcgctatatc

SEQ ID NO: 438345 - DNA, 60 bp, Artificial
  Synthetic oligonucleotide
gtcggctgagaagtttaagccaacgaagcattatgatatgtgtttcgatgacatctatga

SEQ ID NO: 438346 - DNA, 55 bp, Artificial
  Synthetic oligonucleotide
gtcggctggaaacgcgttactagctctattcctagtagcgtggatcccaacgtcg

SEQ ID NO: 438347 - DNA, 55 bp, Artificial
  Synthetic oligonucleotide
gtcggcttgaattggcgtgtatgggcgtcccacgacttgttgatagtgattgtag

SEQ ID NO: 438348 - DNA, 55 bp, Artificial
  Synthetic oligonucleotide
gtcggcttgaccgagtgtatgggaccttcgacaaaatcgttacgagttgcatacc

SEQ ID NO: 438349 - DNA, 55 bp, Artificial
  Synthetic oligonucleotide
gtcggcttgttgaggcgacatggtttgtagccagtcttcatcctcgttcgcgagg

SEQ ID NO: 438350 - DNA, 60 bp, Artificial
  Synthetic oligonucleotide
gtcgggaatactatccttagggaagatttgctcgccaccttcttgcaggatagcaatgag

SEQ ID NO: 438351 - DNA, 53 bp, Artificial
  Synthetic oligonucleotide
gtcgggaatccactcgccgctctctactactggattgcacgcaagctaggtct

SEQ ID NO: 438352 - DNA, 55 bp, Artificial
  Synthetic oligonucleotide
gtcgggacctatgtatctgtaggaacatcgacattgaacaaaagatcagttccag

SEQ ID NO: 438353 - DNA, 55 bp, Artificial
  Synthetic oligonucleotide
gtcgggagaagagcaacggccattctcaggaaggcaaccagaagattgatccagc

SEQ ID NO: 438354 - DNA, 55 bp, Artificial
  Synthetic oligonucleotide
gtcgggataatgggcatgttgttttacagtatatgtatgtaccaccaggggcacc

SEQ ID NO: 438355 - DNA, 56 bp, Artificial
  Synthetic oligonucleotide
gtcgggatatatggaagtcgaagggtttcttgtctccgatccacaattcttcgttc

SEQ ID NO: 438356 - DNA, 55 bp, Artificial
  Synthetic oligonucleotide
gtcgggcacctatactgtccatgggcgactgctggtggacctatataaagcactc

SEQ ID NO: 438357 - DNA, 59 bp, Artificial
  Synthetic oligonucleotide
gtcgggcagagacaagtcgtttccgtcacgatagacggagccgctgggattgcggatta

SEQ ID NO: 438358 - DNA, 50 bp, Artificial
  Synthetic oligonucleotide
gtcgggcattgagtccgcgcacttgaaaaggttcatcgcgtacttttgcg

SEQ ID NO: 438359 - DNA, 59 bp, Artificial
  Synthetic oligonucleotide
gtcgggccgaatttcaacaaagtggcggagatggaaggtgataagcagctagccgaggc

SEQ ID NO: 438360 - DNA, 55 bp, Artificial
  Synthetic oligonucleotide
gtcgggccgtccaccttccttggtactcctggggttgtgtcgtactatctcacac

SEQ ID NO: 438361 - DNA, 55 bp, Artificial
  Synthetic oligonucleotide
gtcgggcgcgcctacctacagctggggtgaaaatgatacggacgtcttcgtcctc

SEQ ID NO: 438362 - DNA, 55 bp, Artificial
  Synthetic oligonucleotide
gtcgggcttaactcatttgtcgtcgggtctcagcttccttgtgaccctgaacccg

SEQ ID NO: 438363 - DNA, 54 bp, Artificial
  Synthetic oligonucleotide
gtcggggaagataaagtcgggcttcgccttattttcggtgacggctgtccgtgc

SEQ ID NO: 438364 - DNA, 57 bp, Artificial
  Synthetic oligonucleotide
gtcggggactccagccactcattgccattcggtggacattacaaagacggaaccaaa

SEQ ID NO: 438365 - DNA, 60 bp, Artificial
  Synthetic oligonucleotide
gtcggggagtggctaaccctcagatgctgcatataagcagctgcttctcgcttgtactgg

SEQ ID NO: 438366 - DNA, 54 bp, Artificial
  Synthetic oligonucleotide
gtcgggggagcgttcgcgagttcgtttggcatgagctgggtttcgacgatcctc

SEQ ID NO: 438367 - DNA, 52 bp, Artificial
  Synthetic oligonucleotide
gtcgggggggtcgggaactttattaaacagactccgaggtgctcttggacac

SEQ ID NO: 438368 - DNA, 52 bp, Artificial
  Synthetic oligonucleotide
gtcgggggtcaccataggcttcggcctccgttttaggccttccggactacaa

SEQ ID NO: 438369 - DNA, 53 bp, Artificial
  Synthetic oligonucleotide
gtcgggggttgccataggcttcgacctcagttttaggccttccggactacgaa

SEQ ID NO: 438370 - DNA, 60 bp, Artificial
  Synthetic oligonucleotide
gtcgggtacgacggtgcattaccgccggtggacagcgatcagaatccttggcatccagcc

SEQ ID NO: 438371 - DNA, 60 bp, Artificial
  Synthetic oligonucleotide
gtcgggtacttgtgtgcaggtctccccagcgacactccaagaggagaggacagtcagttc

SEQ ID NO: 438372 - DNA, 56 bp, Artificial
  Synthetic oligonucleotide
gtcgggtatatcataatcaggatacggactgttacggtagcgaaggctaaaagtct

SEQ ID NO: 438373 - DNA, 57 bp, Artificial
  Synthetic oligonucleotide
gtcgggtatcgcacgtgacaagatccggaaactccaagaggaccttatcgcgaggaa

SEQ ID NO: 438374 - DNA, 55 bp, Artificial
  Synthetic oligonucleotide
gtcgggtccgcagtggtgtcgtgggcactcaagtgggagtacgttgtgctcgcat

SEQ ID NO: 438375 - DNA, 55 bp, Artificial
  Synthetic oligonucleotide
gtcggtaaatttactgataaggtgcgtgggcgagtttttgtcgaacacgctgtta

SEQ ID NO: 438376 - DNA, 51 bp, Artificial
  Synthetic oligonucleotide
gtcggtaaccgtgcaggggctttcccgtctacgctttgcccctttactacg

SEQ ID NO: 438377 - DNA, 57 bp, Artificial
  Synthetic oligonucleotide
gtcggtaaggtattgtgtgtcagtgatgtaaccaggggaggtggtataacgcatagg

SEQ ID NO: 438378 - DNA, 59 bp, Artificial
  Synthetic oligonucleotide
gtcggtacaggaacgaagccggactgagtggtctcgtccttctagccacagcaagaagc

SEQ ID NO: 438379 - DNA, 58 bp, Artificial
  Synthetic oligonucleotide
gtcggtacgccaccttctgtggctactacgcctcccatgtcggctgtgtccgctcccc

SEQ ID NO: 438380 - DNA, 53 bp, Artificial
  Synthetic oligonucleotide
gtcggtactactgatcacgtcggggtccctacttacacctggggggagaacga

SEQ ID NO: 438381 - DNA, 54 bp, Artificial
  Synthetic oligonucleotide
gtcggtagtgtgggaggggggaaaggttctggtgtgggtatatccacaggcggc

SEQ ID NO: 438382 - DNA, 60 bp, Artificial
  Synthetic oligonucleotide
gtcggtataaccgctattggcacgaggggtgacatggtcccaacgatcgcaatagccagc

SEQ ID NO: 438383 - DNA, 55 bp, Artificial
  Synthetic oligonucleotide
gtcggtcactacacgacgaaaagtcgtctgacatactttcgcacacatgttcggc

SEQ ID NO: 438384 - DNA, 53 bp, Artificial
  Synthetic oligonucleotide
gtcggtcagttaccgcacggacctggtcgaaaacaacgagggataggagcccc

SEQ ID NO: 438385 - DNA, 55 bp, Artificial
  Synthetic oligonucleotide
gtcggtcggctacgaaagtagttcaacctgtaattgttgaatctcccgcgagtgg

SEQ ID NO: 438386 - DNA, 55 bp, Artificial
  Synthetic oligonucleotide
gtcggtcggtttgtgtggagagcgtataacaggggggattccagtcgttcaggag

SEQ ID NO: 438387 - DNA, 55 bp, Artificial
  Synthetic oligonucleotide
gtcggtgaactgagctctaaaggatatatgagcgttcctcaagtattgtgtgctg

SEQ ID NO: 438388 - DNA, 56 bp, Artificial
  Synthetic oligonucleotide
gtcggtgacgccttatcgtattacgtcgattacaaccgtagccatagagttgtact

SEQ ID NO: 438389 - DNA, 60 bp, Artificial
  Synthetic oligonucleotide
gtcggtgagacctatccggaggctaccatcatggcacatcatgacgtggcacctaaggct

SEQ ID NO: 438390 - DNA, 55 bp, Artificial
  Synthetic oligonucleotide
gtcggtgcaatgcggatctctcgtcgttcgtgtacgtccgatggtccaagtcggg

SEQ ID NO: 438391 - DNA, 57 bp, Artificial
  Synthetic oligonucleotide
gtcggtgcataggcagtgtaacaattcgttgtcactacaggtctagtagtcgttgtc

SEQ ID NO: 438392 - DNA, 50 bp, Artificial
  Synthetic oligonucleotide
gtcggtgctactacctgttctaggcagatgcgatactacatcgcccggta

SEQ ID NO: 438393 - DNA, 58 bp, Artificial
  Synthetic oligonucleotide
gtcggtgcttgatttagctccctgaacgttcggatggaaatgtgttgacctggttgag

SEQ ID NO: 438394 - DNA, 56 bp, Artificial
  Synthetic oligonucleotide
gtcggtggaattgggaggttctatgtgcagatgtgcaccgaactcaaactcaatga

SEQ ID NO: 438395 - DNA, 60 bp, Artificial
  Synthetic oligonucleotide
gtcggtggaattgggaggttttacatacagatgtgtactgaactcaagctcagtgactat

SEQ ID NO: 438396 - DNA, 53 bp, Artificial
  Synthetic oligonucleotide
gtcggtgggaaaatgtataaagttagaaccacgtcaaaatctgcatttgtcaa

SEQ ID NO: 438397 - DNA, 60 bp, Artificial
  Synthetic oligonucleotide
gtcggtgggattggaagattctacgtacagatgtgcactgaactcaaactcagcgactat

SEQ ID NO: 438398 - DNA, 55 bp, Artificial
  Synthetic oligonucleotide
gtcggtggtgggaagacagttggagtccactcccctcagatggccctctcagtcc

SEQ ID NO: 438399 - DNA, 55 bp, Artificial
  Synthetic oligonucleotide
gtcggtgtgcgttgtctagtcacgcacgatgacctttagtaactttgcaggattc

SEQ ID NO: 438400 - DNA, 50 bp, Artificial
  Synthetic oligonucleotide
gtcggtgttccattaagaatgttacagtcgctgtgcagacattcccgccc

SEQ ID NO: 438401 - DNA, 51 bp, Artificial
  Synthetic oligonucleotide
gtcggttaaacttgaacgacgctgtgttgggtgtttcaaacgacgcggaac

SEQ ID NO: 438402 - DNA, 52 bp, Artificial
  Synthetic oligonucleotide
gtcggttagttgtataacagtaacgccttcgcttccaatattcttgatagtc

SEQ ID NO: 438403 - DNA, 56 bp, Artificial
  Synthetic oligonucleotide
gtcggttcagctcctattagtggtttagctgttataccttgcattggttttccgga

SEQ ID NO: 438404 - DNA, 52 bp, Artificial
  Synthetic oligonucleotide
gtcggttcccgcccacgtgacttcaaaacggaggttgacgtaatctacgggc

SEQ ID NO: 438405 - DNA, 55 bp, Artificial
  Synthetic oligonucleotide
gtcggttccctgcggaagggttctttgtctggtcccgtgagtcgcgcattgctgc

SEQ ID NO: 438406 - DNA, 55 bp, Artificial
  Synthetic oligonucleotide
gtcggttgaccaagtgacacctgaggtggtccagaagcacgctatggataaggcg

SEQ ID NO: 438407 - DNA, 51 bp, Artificial
  Synthetic oligonucleotide
gtcggttgacgtaaagtttaagggaaattatttgccgaaggcttcggttga

SEQ ID NO: 438408 - DNA, 50 bp, Artificial
  Synthetic oligonucleotide
gtcggttgcatctttccgagagcgataagagtgcaaacagacaaagtttt

SEQ ID NO: 438409 - DNA, 56 bp, Artificial
  Synthetic oligonucleotide
gtcggttggtgctatcttgaacaagtagtatttaagacgtcgaagtataaaggtga

SEQ ID NO: 438410 - DNA, 50 bp, Artificial
  Synthetic oligonucleotide
gtcggttgtgacggtccacctggcgtgcgtgaaagtgttggcgagaggag

SEQ ID NO: 438411 - DNA, 50 bp, Artificial
  Synthetic oligonucleotide
gtcggttgttttcctagcgcttctactagcaattgggtccttactgcacg

SEQ ID NO: 438412 - DNA, 54 bp, Artificial
  Synthetic oligonucleotide
gtcggttttatcccccctacaagatgtccctttagttagcaattatgcgcgtcc

SEQ ID NO: 438413 - DNA, 60 bp, Artificial
  Synthetic oligonucleotide
gtcggttttcaacagcttgtatgcatctccacaactagaaggattctcagctgaatcaag

SEQ ID NO: 438414 - DNA, 60 bp, Artificial
  Synthetic oligonucleotide
gtcgtaaaatattcatcagttgcgaatcatgcagatagagtttacgctactttcaagagc

SEQ ID NO: 438415 - DNA, 54 bp, Artificial
  Synthetic oligonucleotide
gtcgtaaagagctatgaaacgtgaacgtaacaacgttaacaagctacctagtag

SEQ ID NO: 438416 - DNA, 52 bp, Artificial
  Synthetic oligonucleotide
gtcgtaaaggaccaggacgtgtttagcgaggcgcctggaacgacccccaaag

SEQ ID NO: 438417 - DNA, 54 bp, Artificial
  Synthetic oligonucleotide
gtcgtaaatatctaagtcggtagttcaatctatcgattttttttattttgtcca

SEQ ID NO: 438418 - DNA, 53 bp, Artificial
  Synthetic oligonucleotide
gtcgtaaccgaccgtggctcggcggcaatcctccattagaggttgaacgctct

SEQ ID NO: 438419 - DNA, 51 bp, Artificial
  Synthetic oligonucleotide
gtcgtaacgattttactgcgcggtaattaaaaaatactttcacctaggagg

SEQ ID NO: 438420 - DNA, 55 bp, Artificial
  Synthetic oligonucleotide
gtcgtaatgatcctatgatgatttacctagtttggaggcggatcgagaacttctc

SEQ ID NO: 438421 - DNA, 54 bp, Artificial
  Synthetic oligonucleotide
gtcgtaatgcgtaagtccgtggcggaaccgactactttgggtgtccgtgtttca

SEQ ID NO: 438422 - DNA, 55 bp, Artificial
  Synthetic oligonucleotide
gtcgtacaagcgaaggtcatggacttacaggcccatgtttcgcaagcccaagatg

SEQ ID NO: 438423 - DNA, 60 bp, Artificial
  Synthetic oligonucleotide
gtcgtaccagggatggtaattcaccggcggctcaagctgtcccagtggatttcactcgca

SEQ ID NO: 438424 - DNA, 55 bp, Artificial
  Synthetic oligonucleotide
gtcgtacctcggtgttactggcttacttggcatctatggagacgatataatcgtc

SEQ ID NO: 438425 - DNA, 52 bp, Artificial
  Synthetic oligonucleotide
gtcgtacgctgcccgagtccagccctccggcagcacgtggatgtattcatcc

SEQ ID NO: 438426 - DNA, 55 bp, Artificial
  Synthetic oligonucleotide
gtcgtacgttcatgattggaagaatataaaatcctttctaacggaccagacttac

SEQ ID NO: 438427 - DNA, 55 bp, Artificial
  Synthetic oligonucleotide
gtcgtactagcaggtatatggaaagggtccccgcgcgaagcgggaccgtctcagt

SEQ ID NO: 438428 - DNA, 60 bp, Artificial
  Synthetic oligonucleotide
gtcgtactgcatagagagtacataacaaaggttgagttctctagcaaggcgaagaaggtc

SEQ ID NO: 438429 - DNA, 55 bp, Artificial
  Synthetic oligonucleotide
gtcgtactgccggtaccgaatccattgaaactcctcatacgcttgggttcgaaga

SEQ ID NO: 438430 - DNA, 55 bp, Artificial
  Synthetic oligonucleotide
gtcgtactggattgagagtcgctacaacgacacatggaaacttgagagggcggtc

SEQ ID NO: 438431 - DNA, 59 bp, Artificial
  Synthetic oligonucleotide
gtcgtactggcgacgcgttcacgtattttggaaacacacttgtcactatggctctgttc

SEQ ID NO: 438432 - DNA, 59 bp, Artificial
  Synthetic oligonucleotide
gtcgtactttgccccatatctcaaaacatctgcgaggcggtaaatacagatcccaccaa

SEQ ID NO: 438433 - DNA, 55 bp, Artificial
  Synthetic oligonucleotide
gtcgtagcagtacgagagaccgccgttcggcagacgtacgacgttcgagcactgg

SEQ ID NO: 438434 - DNA, 60 bp, Artificial
  Synthetic oligonucleotide
gtcgtagcattccgagaatgtcatgattacgtagttcgtatagtcaaattattgactcaa

SEQ ID NO: 438435 - DNA, 55 bp, Artificial
  Synthetic oligonucleotide
gtcgtagcccatgtcccgtcttcacggaggaaccgcgtagtgccagcgacgatac

SEQ ID NO: 438436 - DNA, 51 bp, Artificial
  Synthetic oligonucleotide
gtcgtagctcccgcccataatgtccccaagagcgacgggtgttgcagtgtg

SEQ ID NO: 438437 - DNA, 55 bp, Artificial
  Synthetic oligonucleotide
gtcgtagggtcacacgttaaggattggaactcccggtctgtaggcgtctgccttg

SEQ ID NO: 438438 - DNA, 52 bp, Artificial
  Synthetic oligonucleotide
gtcgtagtttgcgctactgacgcacttatgacgggattcaccggagacttcg

SEQ ID NO: 438439 - DNA, 55 bp, Artificial
  Synthetic oligonucleotide
gtcgtataaactcgatggagttacttacacagagattgaaccaaaattggatggg

SEQ ID NO: 438440 - DNA, 55 bp, Artificial
  Synthetic oligonucleotide
gtcgtatcagacatgaagttagcgagtgattacgtcattatgagtggtgactacc

SEQ ID NO: 438441 - DNA, 59 bp, Artificial
  Synthetic oligonucleotide
gtcgtatcatagcgcctaactaccccattgtcgttaatagagaagatagttactagata

SEQ ID NO: 438442 - DNA, 58 bp, Artificial
  Synthetic oligonucleotide
gtcgtatgagttacgagtatctccaaattgtactaggaaactagcaattggaagattg

SEQ ID NO: 438443 - DNA, 57 bp, Artificial
  Synthetic oligonucleotide
gtcgtatggacgcttagcaaagtggcgcaaggggttgccaccaatcctaacccctgc

SEQ ID NO: 438444 - DNA, 58 bp, Artificial
  Synthetic oligonucleotide
gtcgtatggcttctcgaaagtgcggacagttgtgccaaatataccccccgcgtgagtc

SEQ ID NO: 438445 - DNA, 55 bp, Artificial
  Synthetic oligonucleotide
gtcgtattcgactgtccgcaggagcagtgaggtcacccgttgtgcgcggcagttg

SEQ ID NO: 438446 - DNA, 55 bp, Artificial
  Synthetic oligonucleotide
gtcgtattgctacattttggtcaactgtgtgctgtcatgtctaaactgaaagctg

SEQ ID NO: 438447 - DNA, 55 bp, Artificial
  Synthetic oligonucleotide
gtcgtcaacacccattcgtttaggaagtcgccactcgcctacgcccaatcacctc

SEQ ID NO: 438448 - DNA, 55 bp, Artificial
  Synthetic oligonucleotide
gtcgtcacaccagtggtacagcccaatttgtacacagtgcaatttggaagccttg

SEQ ID NO: 438449 - DNA, 55 bp, Artificial
  Synthetic oligonucleotide
gtcgtcacaccttaaagacgagtgatcaacaactacctcatgctgcatacccagg

SEQ ID NO: 438450 - DNA, 60 bp, Artificial
  Synthetic oligonucleotide
gtcgtcacaggtagcagactccattagttctggggtgtcgcatgctgttgaaaatggcgg

SEQ ID NO: 438451 - DNA, 60 bp, Artificial
  Synthetic oligonucleotide
gtcgtcactagtacctgggtgctagtaggcggagtccttgcagctctggccgcgtattgc

SEQ ID NO: 438452 - DNA, 55 bp, Artificial
  Synthetic oligonucleotide
gtcgtcacttttgcgggcgcaacgtgttttgaagggtaggttgccttgtggcgcg

SEQ ID NO: 438453 - DNA, 60 bp, Artificial
  Synthetic oligonucleotide
gtcgtcagaaccttgagttgtaatcaccatatcttgtggtagcaagcctatgacataact

SEQ ID NO: 438454 - DNA, 55 bp, Artificial
  Synthetic oligonucleotide
gtcgtcagaatcaaactgaccacgcactcacactagacactgcaaaagagattgc

SEQ ID NO: 438455 - DNA, 50 bp, Artificial
  Synthetic oligonucleotide
gtcgtcaggtacgtccaaacccacccccggcgtcctcacaaccatgcctc

SEQ ID NO: 438456 - DNA, 55 bp, Artificial
  Synthetic oligonucleotide
gtcgtcagttgagtggtatctaagatctatggaactaccagatgatgtaaagact

SEQ ID NO: 438457 - DNA, 52 bp, Artificial
  Synthetic oligonucleotide
gtcgtccaagggatggtactggaagttcccggatgtgttaactgaaaccggg

SEQ ID NO: 438458 - DNA, 55 bp, Artificial
  Synthetic oligonucleotide
gtcgtccagaaggtaagagggaggacttctggtccctgttgagacctctagaagg

SEQ ID NO: 438459 - DNA, 58 bp, Artificial
  Synthetic oligonucleotide
gtcgtccagacttggaagttcagatacgccttgtggagatccaacgctttccgcacgt

SEQ ID NO: 438460 - DNA, 60 bp, Artificial
  Synthetic oligonucleotide
gtcgtccagacttggaagttcagataggccttgtgtagagtcaatgccttcctcaggttg

SEQ ID NO: 438461 - DNA, 57 bp, Artificial
  Synthetic oligonucleotide
gtcgtccagatttggaaattcaggtaggccttgtgtagactcaacgccttcctcagg

SEQ ID NO: 438462 - DNA, 57 bp, Artificial
  Synthetic oligonucleotide
gtcgtccaggttgtaccagtggattgacagtaccatcggtttcgctaccaaaagtca

SEQ ID NO: 438463 - DNA, 57 bp, Artificial
  Synthetic oligonucleotide
gtcgtcccagaaacttgacgtaatgtcgtccagatttggaagttcaggtatgctttg

SEQ ID NO: 438464 - DNA, 60 bp, Artificial
  Synthetic oligonucleotide
gtcgtccgggctaagagctatgtccaagcgtccagcagatatgatcatttccgggcccgt

SEQ ID NO: 438465 - DNA, 55 bp, Artificial
  Synthetic oligonucleotide
gtcgtcctcagacattttgctatttgttagttaataaacgggaatctctgtgtcc

SEQ ID NO: 438466 - DNA, 53 bp, Artificial
  Synthetic oligonucleotide
gtcgtcctgtaaacggacgcccccgtgacccaccgccaacaggcggtgggtca

SEQ ID NO: 438467 - DNA, 56 bp, Artificial
  Synthetic oligonucleotide
gtcgtcctgtaaactcaaaaggtcttaaagatcttttcttaggagtactgatgata

SEQ ID NO: 438468 - DNA, 55 bp, Artificial
  Synthetic oligonucleotide
gtcgtcgatggaataacaggtgggttgaagaagcatgtaagcttctggactaacc

SEQ ID NO: 438469 - DNA, 55 bp, Artificial
  Synthetic oligonucleotide
gtcgtcgcaaaaggaggaactatttactacctagagcttactgaacagcgaggtg

SEQ ID NO: 438470 - DNA, 56 bp, Artificial
  Synthetic oligonucleotide
gtcgtcgctgtgttgccgaagcagaaagccctaggaaagggcctaaagcctgttgg

SEQ ID NO: 438471 - DNA, 55 bp, Artificial
  Synthetic oligonucleotide
gtcgtcggatccttgagtagtcacaaccatgtctggaggcagtaagccgatcacg

SEQ ID NO: 438472 - DNA, 60 bp, Artificial
  Synthetic oligonucleotide
gtcgtcgggagtgtcaagacacgacacttagtggctggcgtagactgctggtatgtgaac

SEQ ID NO: 438473 - DNA, 60 bp, Artificial
  Synthetic oligonucleotide
gtcgtcgggtggtacgcctcagtatatgagtaagaatctgtgggtggagcagtggcagga

SEQ ID NO: 438474 - DNA, 55 bp, Artificial
  Synthetic oligonucleotide
gtcgtcgtaaggacaacgagatggctgataaacgagctgtgcataactacggtcg

SEQ ID NO: 438475 - DNA, 60 bp, Artificial
  Synthetic oligonucleotide
gtcgtcgtatgcaaaacgctgtgaccttgcttcgcaagatcgagatgattgggacaaccg

SEQ ID NO: 438476 - DNA, 57 bp, Artificial
  Synthetic oligonucleotide
gtcgtcgttgcgacgccgagtgtcttacaagacattcgagctgcctttgggttttac

SEQ ID NO: 438477 - DNA, 51 bp, Artificial
  Synthetic oligonucleotide
gtcgtctactcggatggctttatattggagactccgatctatcacttaacg

SEQ ID NO: 438478 - DNA, 55 bp, Artificial
  Synthetic oligonucleotide
gtcgtctcagggagagctgtatgacatatatgcagatgtggacgggcaagaggac

SEQ ID NO: 438479 - DNA, 57 bp, Artificial
  Synthetic oligonucleotide
gtcgtctgaacttcgacagcccttactcaacccgtgtagctgtccccactgtccgcg

SEQ ID NO: 438480 - DNA, 55 bp, Artificial
  Synthetic oligonucleotide
gtcgtgaaggaacaagtttctggactagtcattactcacctcaatgtctaagctc

SEQ ID NO: 438481 - DNA, 55 bp, Artificial
  Synthetic oligonucleotide
gtcgtgaatcctcaggctgggaatactactgtggacgtttccgtacaaggctctc

SEQ ID NO: 438482 - DNA, 57 bp, Artificial
  Synthetic oligonucleotide
gtcgtgaattttctgtggattcaatctttgcttgaaggggcgatcgttatttattcc

SEQ ID NO: 438483 - DNA, 60 bp, Artificial
  Synthetic oligonucleotide
gtcgtgagaagatgtatcaatacgtggcgtacggtcgattcttcgaatattcatgcaagc

SEQ ID NO: 438484 - DNA, 59 bp, Artificial
  Synthetic oligonucleotide
gtcgtgagcattgaccgtttcttaagggtccgagatcagcaaggaaatgtactcctatc

SEQ ID NO: 438485 - DNA, 59 bp, Artificial
  Synthetic oligonucleotide
gtcgtgagccgtgcacgttaccactgtttcactgcctccctagctagttttagctagta

SEQ ID NO: 438486 - DNA, 52 bp, Artificial
  Synthetic oligonucleotide
gtcgtgatctcgcagcttccaaccatccatagccacatggtaggtcgagacc

SEQ ID NO: 438487 - DNA, 60 bp, Artificial
  Synthetic oligonucleotide
gtcgtgattgatgcactggaaattgctatcaatccttttggaatgccaggcaatccgact

SEQ ID NO: 438488 - DNA, 59 bp, Artificial
  Synthetic oligonucleotide
gtcgtgcaattcggcacgggatggggcttctgggttagcggccatgtgtttatcaccgc

SEQ ID NO: 438489 - DNA, 54 bp, Artificial
  Synthetic oligonucleotide
gtcgtgcacggtaaaatgttgcgacgtattttcggaacagagtacgtttcgacc

SEQ ID NO: 438490 - DNA, 58 bp, Artificial
  Synthetic oligonucleotide
gtcgtgcaggttatacttacacttcgttggatgttcgaccgactagaactgagaagga

SEQ ID NO: 438491 - DNA, 59 bp, Artificial
  Synthetic oligonucleotide
gtcgtgcatgagtccgacaggtcttgcaccgcacaatcttcgacagtcgtgcaattttt

SEQ ID NO: 438492 - DNA, 55 bp, Artificial
  Synthetic oligonucleotide
gtcgtgccgccatgtgaacgaggcggagttacccgagcctgaggcctctcgttta

SEQ ID NO: 438493 - DNA, 60 bp, Artificial
  Synthetic oligonucleotide
gtcgtgccgtctgatctagttggcgcttacactcctgaggctttatctgccgcgcttcct

SEQ ID NO: 438494 - DNA, 55 bp, Artificial
  Synthetic oligonucleotide
gtcgtgcgatggcacgaaaaaacacacgcaaacaatacaggggggtagtaggcgg

SEQ ID NO: 438495 - DNA, 58 bp, Artificial
  Synthetic oligonucleotide
gtcgtgcgattgcacgaaaacacactatcaatacaggggggaggtagccggcggctaa

SEQ ID NO: 438496 - DNA, 60 bp, Artificial
  Synthetic oligonucleotide
gtcgtgcgctcggtcttcagggctgtgcctttcaatctactgttgctgagttagagcgtc

SEQ ID NO: 438497 - DNA, 60 bp, Artificial
  Synthetic oligonucleotide
gtcgtgctagatgtgagctggatatcgctgtggtttgctttcaacagatcgtttgaacct

SEQ ID NO: 438498 - DNA, 60 bp, Artificial
  Synthetic oligonucleotide
gtcgtgctgctgtccccactgtccgcgtcaccagaagacaaatatggaccaacaggccca

SEQ ID NO: 438499 - DNA, 55 bp, Artificial
  Synthetic oligonucleotide
gtcgtgctgtccgcacatttatttcagtgagtgatagattacccgaggcatggct

SEQ ID NO: 438500 - DNA, 55 bp, Artificial
  Synthetic oligonucleotide
gtcgtgcttgggttagcggcccctatgattgcgaagtgggagggtgttaaacacc

SEQ ID NO: 438501 - DNA, 52 bp, Artificial
  Synthetic oligonucleotide
gtcgtggaattcttaaaatctaggggagtaaaagccctaaatgcgacgaaat

SEQ ID NO: 438502 - DNA, 55 bp, Artificial
  Synthetic oligonucleotide
gtcgtggaccccaacagtgagctggaacgctcactggctcaccgggcacgaacaa

SEQ ID NO: 438503 - DNA, 55 bp, Artificial
  Synthetic oligonucleotide
gtcgtggactacgtcaatcagataattcaggcaatgtccaaaagatctagatcgc

SEQ ID NO: 438504 - DNA, 60 bp, Artificial
  Synthetic oligonucleotide
gtcgtggcattatgtggtgacagcctgaaggttatactaatgcatccgcaatttatggcg

SEQ ID NO: 438505 - DNA, 55 bp, Artificial
  Synthetic oligonucleotide
gtcgtggcccgtctctgagcagcctgccgtctcgttagcgatgacaatggaacat

SEQ ID NO: 438506 - DNA, 58 bp, Artificial
  Synthetic oligonucleotide
gtcgtgggataagcattggttttgggaaccaagcaagatagcatggggctctttgaac

SEQ ID NO: 438507 - DNA, 57 bp, Artificial
  Synthetic oligonucleotide
gtcgtggggatacgacaagttaactcacgagatacgcaagttttacgcgtggatgat

SEQ ID NO: 438508 - DNA, 51 bp, Artificial
  Synthetic oligonucleotide
gtcgtggtactccgtgtgttgttgtaataacaggcgagtcagttagggtcc

SEQ ID NO: 438509 - DNA, 55 bp, Artificial
  Synthetic oligonucleotide
gtcgtggtaggccaccctaccagattggacgcaaccacgtacacgttggatcacg

SEQ ID NO: 438510 - DNA, 58 bp, Artificial
  Synthetic oligonucleotide
gtcgtggtcatttggcctggatgtgtttaggtaaggttgtgtattggttgttgcatct

SEQ ID NO: 438511 - DNA, 55 bp, Artificial
  Synthetic oligonucleotide
gtcgtggtcgacagtcagtagtgaggccgacgcggaggatgtcgtgtgctgctca

SEQ ID NO: 438512 - DNA, 55 bp, Artificial
  Synthetic oligonucleotide
gtcgtggtgcaggtaacttcatcatcgcttcccgtaacgtagttaacgtactggc

SEQ ID NO: 438513 - DNA, 55 bp, Artificial
  Synthetic oligonucleotide
gtcgtggtggatttcggacagaaagtagttcccatccttgatagtgagcaccgaa

SEQ ID NO: 438514 - DNA, 56 bp, Artificial
  Synthetic oligonucleotide
gtcgtggtgttgacaaaattttgtaagaacgagaaagacagatattgtccttattg

SEQ ID NO: 438515 - DNA, 53 bp, Artificial
  Synthetic oligonucleotide
gtcgtgtattatagcgtaaacgatacaatgattcaaaggattaaatagccgtg

SEQ ID NO: 438516 - DNA, 57 bp, Artificial
  Synthetic oligonucleotide
gtcgtgtcactaccactgtggcattgcggggaggggtggtccggagaatggttattg

SEQ ID NO: 438517 - DNA, 60 bp, Artificial
  Synthetic oligonucleotide
gtcgtgtcatgctgccgaatctgtatcccggcgcactcaggcctacccactatcggatct

SEQ ID NO: 438518 - DNA, 55 bp, Artificial
  Synthetic oligonucleotide
gtcgtgtccaaagtgttgatctgatgggcaaagatagttcacctgaacagcaagc

SEQ ID NO: 438519 - DNA, 54 bp, Artificial
  Synthetic oligonucleotide
gtcgtgtgttcggggtgtcatgggtgtaccagcgcaagacacaacagtggcacg

SEQ ID NO: 438520 - DNA, 55 bp, Artificial
  Synthetic oligonucleotide
gtcgtgttagtggtaccagcagaagtagattgactggaattagagctggtacctg

SEQ ID NO: 438521 - DNA, 50 bp, Artificial
  Synthetic oligonucleotide
gtcgtgttcttcgggcactatcccggcgtgtagttcgcaccactcggtgc

SEQ ID NO: 438522 - DNA, 55 bp, Artificial
  Synthetic oligonucleotide
gtcgtgttgccagggtgaagtagtaaagagaacacaaccctacaccttgcaaagg

SEQ ID NO: 438523 - DNA, 56 bp, Artificial
  Synthetic oligonucleotide
gtcgtgtttcgcctcgttcaacggaccagaagtctatgcagtcctccttgtaaccc

SEQ ID NO: 438524 - DNA, 51 bp, Artificial
  Synthetic oligonucleotide
gtcgttaagttcccgagacgtaaaccttactatcgctttctcgatgagaat

SEQ ID NO: 438525 - DNA, 55 bp, Artificial
  Synthetic oligonucleotide
gtcgttaccaggaagagagaccaccggaaaccaccgccattcctccaacatcgcc

SEQ ID NO: 438526 - DNA, 57 bp, Artificial
  Synthetic oligonucleotide
gtcgttagacaacacaagtgttaacgaaatacagatcttgtcaaacaaaggcacgct

SEQ ID NO: 438527 - DNA, 53 bp, Artificial
  Synthetic oligonucleotide
gtcgttagattgataacacttagggtccggttacgataactaaaatacgtgac

SEQ ID NO: 438528 - DNA, 60 bp, Artificial
  Synthetic oligonucleotide
gtcgttagcagtctgctgacctcctctagcagatctgccgtcgatctggaattcacccca

SEQ ID NO: 438529 - DNA, 58 bp, Artificial
  Synthetic oligonucleotide
gtcgttagcatttttgcaacctcctctggcacttcgaccatcaatctggaaagacccc

SEQ ID NO: 438530 - DNA, 60 bp, Artificial
  Synthetic oligonucleotide
gtcgttaggagattcattgccgacatgagacaaagagttaatgctgaacgcaatactgta

SEQ ID NO: 438531 - DNA, 56 bp, Artificial
  Synthetic oligonucleotide
gtcgttagtgtaatgaccctgacacacgcgatcaacgatttgatttacgaatacaa

SEQ ID NO: 438532 - DNA, 55 bp, Artificial
  Synthetic oligonucleotide
gtcgttatgcaagctttcatgctgactactgcagcgtttcttgctctgactacat

SEQ ID NO: 438533 - DNA, 58 bp, Artificial
  Synthetic oligonucleotide
gtcgttatgcgaggttttatcactgccaataccattctgaacgtaattgagaaactgg

SEQ ID NO: 438534 - DNA, 60 bp, Artificial
  Synthetic oligonucleotide
gtcgttatgggtgttccttgatcctcatcctcccaacgggtgctagagcatcgcgctcga

SEQ ID NO: 438535 - DNA, 54 bp, Artificial
  Synthetic oligonucleotide
gtcgttcaagatactatacaacttcgatgccgaaagaccagaagaggaccggct

SEQ ID NO: 438536 - DNA, 56 bp, Artificial
  Synthetic oligonucleotide
gtcgttcagttgtctaagaggggcccctatagccctctacggctaacctgaatgga

SEQ ID NO: 438537 - DNA, 55 bp, Artificial
  Synthetic oligonucleotide
gtcgttccaatcatcgcaaactcattagctgaagacaactgcaaccttatgcatg

SEQ ID NO: 438538 - DNA, 52 bp, Artificial
  Synthetic oligonucleotide
gtcgttccacctcccccgccaataattcaattcgcccgttaacctctcccgc

SEQ ID NO: 438539 - DNA, 50 bp, Artificial
  Synthetic oligonucleotide
gtcgttcgaacgagtaacaagagtacgcgtgtacgtagaaactggagata

SEQ ID NO: 438540 - DNA, 55 bp, Artificial
  Synthetic oligonucleotide
gtcgttcgtgacgcgtccggaaacattgtcgactcttgctacgctgagcttttcc

SEQ ID NO: 438541 - DNA, 55 bp, Artificial
  Synthetic oligonucleotide
gtcgttctcctctctcagagtaacataccaggaacagttttggaactaactgatg

SEQ ID NO: 438542 - DNA, 59 bp, Artificial
  Synthetic oligonucleotide
gtcgttgaagaagaaaaccgcagatgtgggaagtatctctgaagctattgttcaagtac

SEQ ID NO: 438543 - DNA, 55 bp, Artificial
  Synthetic oligonucleotide
gtcgttgaagttacttacgctcctgatacggtgggatacgatttaattcgtgaac

SEQ ID NO: 438544 - DNA, 55 bp, Artificial
  Synthetic oligonucleotide
gtcgttgcacacgcgcaagacatattgatagccgatgagaaagtgaggcggcgga

SEQ ID NO: 438545 - DNA, 55 bp, Artificial
  Synthetic oligonucleotide
gtcgttgcagacacagtcaattactttactggcggcgatagtgctgcgaagaacg

SEQ ID NO: 438546 - DNA, 55 bp, Artificial
  Synthetic oligonucleotide
gtcgttgcctgtacaatgtgggaccctttactaaacgagttccctgagtctgtcc

SEQ ID NO: 438547 - DNA, 59 bp, Artificial
  Synthetic oligonucleotide
gtcgttgcgatagttcgtctcaacggtccatcgcctcacatatttattcaattacggaa

SEQ ID NO: 438548 - DNA, 55 bp, Artificial
  Synthetic oligonucleotide
gtcgttggtttatgcgagctgcgcaggctgtaaccgctgtggtgtgtggcccgga

SEQ ID NO: 438549 - DNA, 55 bp, Artificial
  Synthetic oligonucleotide
gtcgttgtccgctggagtccgatccgtctatgacaacgtgaccgctgtgcagtcc

SEQ ID NO: 438550 - DNA, 55 bp, Artificial
  Synthetic oligonucleotide
gtcgtttaatcgttttattaagcttggagctggaattacccaaactcagcattta

SEQ ID NO: 438551 - DNA, 60 bp, Artificial
  Synthetic oligonucleotide
gtcgtttaattgatctatgtctctggagcatcgacataatctttgcgaaggtaagaccgc

SEQ ID NO: 438552 - DNA, 56 bp, Artificial
  Synthetic oligonucleotide
gtcgtttacaatcgtgtattgactaacgaaagacgtggatatttataagccataac

SEQ ID NO: 438553 - DNA, 58 bp, Artificial
  Synthetic oligonucleotide
gtcgtttactttgacgcttcctgcaacaacctctgacgctgaagggcctgggtcgaga

SEQ ID NO: 438554 - DNA, 55 bp, Artificial
  Synthetic oligonucleotide
gtcgtttattaattacgctaaattcaaatcccaacattttgtggactgcagttgg

SEQ ID NO: 438555 - DNA, 59 bp, Artificial
  Synthetic oligonucleotide
gtcgtttgtatggacggtgataccatgcctggactcttcgcctaccgcgcagggaccaa

SEQ ID NO: 438556 - DNA, 57 bp, Artificial
  Synthetic oligonucleotide
gtcgttttatatgacagtgtgggtccgaagacgtaaaactacatatagtaatgattg

SEQ ID NO: 438557 - DNA, 51 bp, Artificial
  Synthetic oligonucleotide
gtcgttttgaagctgtgtctttttcaggacttttggatctctcaccactca

SEQ ID NO: 438558 - DNA, 59 bp, Artificial
  Synthetic oligonucleotide
gtcgttttgagtctgtagcttggtctgccactgcatgcagcgatggacccggctggttg

SEQ ID NO: 438559 - DNA, 55 bp, Artificial
  Synthetic oligonucleotide
gtcgttttgattcggcgtccctcaacttatctatatgattggtgtctggagtcct

SEQ ID NO: 438560 - DNA, 55 bp, Artificial
  Synthetic oligonucleotide
gtcgttttgcttgaagcggggagaaaagccaccgaaacgtcagtcggatctctcc

SEQ ID NO: 438561 - DNA, 57 bp, Artificial
  Synthetic oligonucleotide
gtcgttttttttccactgacgcgtgcgcacaactacgatacgatgccggcgtgaaaa

SEQ ID NO: 438562 - DNA, 55 bp, Artificial
  Synthetic oligonucleotide
gtctaaaacatctctcccgcgactggaaaatcttccaacagtctgactccgaccc

SEQ ID NO: 438563 - DNA, 53 bp, Artificial
  Synthetic oligonucleotide
gtctaaaaccgtgaactgtaatatgacgtaaatccggttgtggctcttttaag

SEQ ID NO: 438564 - DNA, 55 bp, Artificial
  Synthetic oligonucleotide
gtctaaaactttagacgagcaagctttatctaactaccgtgttagtggttagatc

SEQ ID NO: 438565 - DNA, 55 bp, Artificial
  Synthetic oligonucleotide
gtctaaaaggtccagatcactagactctgcagcattctactatagagtgtaggta

SEQ ID NO: 438566 - DNA, 56 bp, Artificial
  Synthetic oligonucleotide
gtctaaaattctagaatcgcaatatgtttgcgagtagtaaataaaatcgaacgtgg

SEQ ID NO: 438567 - DNA, 55 bp, Artificial
  Synthetic oligonucleotide
gtctaaacagaattatttcaacgctcccttcacatgtattccctctcagaggaac

SEQ ID NO: 438568 - DNA, 51 bp, Artificial
  Synthetic oligonucleotide
gtctaaacagccccctccgagggaaacaccacaaagacccccacgaccacc

SEQ ID NO: 438569 - DNA, 53 bp, Artificial
  Synthetic oligonucleotide
gtctaaagaagaatcttgtcgtcttacgacttggggaaggtgtatatttccgg

SEQ ID NO: 438570 - DNA, 60 bp, Artificial
  Synthetic oligonucleotide
gtctaaagcgcgatccttactagctgctggatatgaattagactatcaaaagtcaattaa

SEQ ID NO: 438571 - DNA, 54 bp, Artificial
  Synthetic oligonucleotide
gtctaaagtctaaaggagtgagcgccttaggtcaagtggggtgtaagctttcgg

SEQ ID NO: 438572 - DNA, 58 bp, Artificial
  Synthetic oligonucleotide
gtctaaagtgctttcagatctacttaggtgagaagttcacgggaagaatcgaagagtc

SEQ ID NO: 438573 - DNA, 55 bp, Artificial
  Synthetic oligonucleotide
gtctaaatcctccattttgtactgcgcgaccgctttcggtcgcggttggcacaca

SEQ ID NO: 438574 - DNA, 59 bp, Artificial
  Synthetic oligonucleotide
gtctaaatctgaacaagtatattctgttcagtctgtgccctcttcggttcctgggcaac

SEQ ID NO: 438575 - DNA, 60 bp, Artificial
  Synthetic oligonucleotide
gtctaaatgatctatggcttgaaaacggaaaatatgcgacagatgtatacgcatacggag

SEQ ID NO: 438576 - DNA, 55 bp, Artificial
  Synthetic oligonucleotide
gtctaaattcctacgggaagttcccgagtcccaggtgtggcgagtgtggcagcca

SEQ ID NO: 438577 - DNA, 57 bp, Artificial
  Synthetic oligonucleotide
gtctaacataccacaaagtttctagcaactgctatagcccagttaagattaaaataa

SEQ ID NO: 438578 - DNA, 59 bp, Artificial
  Synthetic oligonucleotide
gtctaacgccggtcccaaagtataaaagaagatttgcatctgacatgagtccatcaggt

SEQ ID NO: 438579 - DNA, 53 bp, Artificial
  Synthetic oligonucleotide
gtctaactacgcccagtatcgggttgttcgggccacaatccgttatcgccctt

SEQ ID NO: 438580 - DNA, 55 bp, Artificial
  Synthetic oligonucleotide
gtctaactcttctttcacgtacctcagcaggactatgtcaccattctggaaagag

SEQ ID NO: 438581 - DNA, 55 bp, Artificial
  Synthetic oligonucleotide
gtctaactggctgggcaagtggtctgatctcatggttgggaggttcttggatggc

SEQ ID NO: 438582 - DNA, 55 bp, Artificial
  Synthetic oligonucleotide
gtctaactttgggttatatcaaatggtggggaccatggtggacatacacattcca

SEQ ID NO: 438583 - DNA, 60 bp, Artificial
  Synthetic oligonucleotide
gtctaagatatcacagtttggctacgatgttgcgaacggaagcatcatggatgcaactct

SEQ ID NO: 438584 - DNA, 57 bp, Artificial
  Synthetic oligonucleotide
gtctaagcacgtgtgcttggttccgaaagagtggtctaataagtactactcccaaga

SEQ ID NO: 438585 - DNA, 60 bp, Artificial
  Synthetic oligonucleotide
gtctaagcatgtgggcgactcactgcaactgccatggggcattcgatgggcctcatataa

SEQ ID NO: 438586 - DNA, 55 bp, Artificial
  Synthetic oligonucleotide
gtctaagcgtggaacttttgttagacgcactgatgggaaacgtcgtaaaggccca

SEQ ID NO: 438587 - DNA, 55 bp, Artificial
  Synthetic oligonucleotide
gtctaaggcacatggtgttgaccccaatattagaactggggcaaggactatcacc

SEQ ID NO: 438588 - DNA, 59 bp, Artificial
  Synthetic oligonucleotide
gtctaagggtaacatctcattgattagggctaacggttcattcttgggagtcatgcgta

SEQ ID NO: 438589 - DNA, 56 bp, Artificial
  Synthetic oligonucleotide
gtctaagtacaaagatgaaccctggaccttgcaggatgtcagtcgagagaactata

SEQ ID NO: 438590 - DNA, 59 bp, Artificial
  Synthetic oligonucleotide
gtctaagtttgataaatctcagggtgaattccatttgctaattcaggaacatattttga

SEQ ID NO: 438591 - DNA, 55 bp, Artificial
  Synthetic oligonucleotide
gtctaataccagtaattggcagaataacttccagtctggtaatacgactacgcag

SEQ ID NO: 438592 - DNA, 59 bp, Artificial
  Synthetic oligonucleotide
gtctaatacgctgcctcctaatcgattaaggtctcgatatgggtgtattgcgttttcca

SEQ ID NO: 438593 - DNA, 55 bp, Artificial
  Synthetic oligonucleotide
gtctaatagggagccgcgtgattggtataagtgtgagtgtgatgtgtccgcattg

SEQ ID NO: 438594 - DNA, 55 bp, Artificial
  Synthetic oligonucleotide
gtctaatgggttggcctcgagaaaacaaggtgattttgacggagccatcacggtt

SEQ ID NO: 438595 - DNA, 55 bp, Artificial
  Synthetic oligonucleotide
gtctaatgtcgttccaactagccttggacgctctctcccatactactcaccggga

SEQ ID NO: 438596 - DNA, 55 bp, Artificial
  Synthetic oligonucleotide
gtctaattattgctgctaggaatatagtgagaagggctgcggtatcagcagatcc

SEQ ID NO: 438597 - DNA, 60 bp, Artificial
  Synthetic oligonucleotide
gtctaattcaacctcatcaacatttggcagaatatgcatttgatgtgtacaataacaagc

SEQ ID NO: 438598 - DNA, 55 bp, Artificial
  Synthetic oligonucleotide
gtctaattgccctgtgtggaagcccattctcagttgggtccggttccttccccga

SEQ ID NO: 438599 - DNA, 60 bp, Artificial
  Synthetic oligonucleotide
gtctaattggctcattgatgatgctttcgacatcatgtttgattcatttgatgagacaca

SEQ ID NO: 438600 - DNA, 49 bp, Artificial
  Synthetic oligonucleotide
gtctacaaaacttattttgaaaaggtcgaaaggttaaaacatggaacct

SEQ ID NO: 438601 - DNA, 60 bp, Artificial
  Synthetic oligonucleotide
gtctacaatatcacctttcagagaaggaggagttataatgtctgaatcggcagcgttgaa

SEQ ID NO: 438602 - DNA, 55 bp, Artificial
  Synthetic oligonucleotide
gtctacacactctaatgaagaccctgtgtggtctcaaagataattgccccatctg

SEQ ID NO: 438603 - DNA, 52 bp, Artificial
  Synthetic oligonucleotide
gtctacacatggtgatatgagattggtgctgagaaccaaattgatgagttct

SEQ ID NO: 438604 - DNA, 60 bp, Artificial
  Synthetic oligonucleotide
gtctacagtctacaatttctatgattgtaccatgggttagtgctagtcactttagaaata

SEQ ID NO: 438605 - DNA, 59 bp, Artificial
  Synthetic oligonucleotide
gtctacatacccaggtatggcctgcagcgcggattagtagacagaaacctggcaccgtt

SEQ ID NO: 438606 - DNA, 55 bp, Artificial
  Synthetic oligonucleotide
gtctacatagagtaagagggtgccatagttttaagttatggttccttaagcgtct

SEQ ID NO: 438607 - DNA, 60 bp, Artificial
  Synthetic oligonucleotide
gtctacatatacaatgtggtgtaatacattccataatacatgatcaacagctctaattac

SEQ ID NO: 438608 - DNA, 60 bp, Artificial
  Synthetic oligonucleotide
gtctacattaactgactcactgtcagatccagcgtcgtctgtatcaagaagttcatcagt

SEQ ID NO: 438609 - DNA, 60 bp, Artificial
  Synthetic oligonucleotide
gtctacattgctgttgtcagctttgactgtacctttggtatgtaccattgtttatgattc

SEQ ID NO: 438610 - DNA, 54 bp, Artificial
  Synthetic oligonucleotide
gtctaccaacgatgttacttatcggtcggtgtctggtgaacttaaccgaaacaa

SEQ ID NO: 438611 - DNA, 56 bp, Artificial
  Synthetic oligonucleotide
gtctaccacatcggaaacttgttaaaaggagacaaggtaaacgggcatctgattca

SEQ ID NO: 438612 - DNA, 55 bp, Artificial
  Synthetic oligonucleotide
gtctaccagaacaagataaggcgctatattgtttatgcgcatgaagcaaagaagt

SEQ ID NO: 438613 - DNA, 57 bp, Artificial
  Synthetic oligonucleotide
gtctaccatggtgcggggtcaaagacgctagctggcccgaaaggaccggtgtgtcaa

SEQ ID NO: 438614 - DNA, 59 bp, Artificial
  Synthetic oligonucleotide
gtctaccatgtcctatgttcatgattgggagaatataaaatcgtttttgacggaccaga

SEQ ID NO: 438615 - DNA, 60 bp, Artificial
  Synthetic oligonucleotide
gtctaccattgctactggcactaatcttgtgttgtatgctgcccctctcagccctctgct

SEQ ID NO: 438616 - DNA, 60 bp, Artificial
  Synthetic oligonucleotide
gtctaccatttgtgatgcattcagccttttcatggtgcagttctctagaactatcaaccc

SEQ ID NO: 438617 - DNA, 52 bp, Artificial
  Synthetic oligonucleotide
gtctacccacgggaattgctggtttccccttacgtccagtccacttcccgtc

SEQ ID NO: 438618 - DNA, 58 bp, Artificial
  Synthetic oligonucleotide
gtctacccagactgataaaatgggattcgtcgggattcatactcctgagggcaagttg

SEQ ID NO: 438619 - DNA, 60 bp, Artificial
  Synthetic oligonucleotide
gtctaccccattgaagttcagtctattaagtatctcttgtatagcttccactgtaatatc

SEQ ID NO: 438620 - DNA, 53 bp, Artificial
  Synthetic oligonucleotide
gtctaccccgtctacgtagttagggttgccataatacttagtagcagaaccgg

SEQ ID NO: 438621 - DNA, 55 bp, Artificial
  Synthetic oligonucleotide
gtctacccggaaccaccacactctcgcaacatatttggttgttggtccggctaca

SEQ ID NO: 438622 - DNA, 56 bp, Artificial
  Synthetic oligonucleotide
gtctacccggatccactgaagctgatacagaaactaggtaacaaatctttaacttc

SEQ ID NO: 438623 - DNA, 51 bp, Artificial
  Synthetic oligonucleotide
gtctaccgtggtctagtgtctaagaaccaatctcagacactgactcggtgg

SEQ ID NO: 438624 - DNA, 60 bp, Artificial
  Synthetic oligonucleotide
gtctacctatgcacaaagtctgcatttgatcttgcagaatctagctatcttacaatgctc

SEQ ID NO: 438625 - DNA, 60 bp, Artificial
  Synthetic oligonucleotide
gtctacctccaattcaagagtccagatatatagttccagtgaatagatctgtcataaatg

SEQ ID NO: 438626 - DNA, 52 bp, Artificial
  Synthetic oligonucleotide
gtctaccttcgtccgtcagctcctcttagagtggggcagaggcggtaagcgt

SEQ ID NO: 438627 - DNA, 59 bp, Artificial
  Synthetic oligonucleotide
gtctacgaacactcacatctccgacagtccaggcgtttcatttgttggaaaagacggca

SEQ ID NO: 438628 - DNA, 57 bp, Artificial
  Synthetic oligonucleotide
gtctacgacatttgccgcggtccaatttctaaataacggtcaacgcattgatgcgtt

SEQ ID NO: 438629 - DNA, 55 bp, Artificial
  Synthetic oligonucleotide
gtctacgatgaccctgttgatccgattgagtcagaggctgagcctagaggaacct

SEQ ID NO: 438630 - DNA, 52 bp, Artificial
  Synthetic oligonucleotide
gtctacgattggggcaactccctactggagcacattataagattaggagcat

SEQ ID NO: 438631 - DNA, 55 bp, Artificial
  Synthetic oligonucleotide
gtctacggagtcagtcccgggctggtacataaccttattggtatgctgcagacca

SEQ ID NO: 438632 - DNA, 55 bp, Artificial
  Synthetic oligonucleotide
gtctacggggataccctgcctggtacatatgtcgctttatctggcggcccggatg

SEQ ID NO: 438633 - DNA, 55 bp, Artificial
  Synthetic oligonucleotide
gtctacgggtactgattatggtggaaaacagacgtataaggcgccttctatgccc

SEQ ID NO: 438634 - DNA, 55 bp, Artificial
  Synthetic oligonucleotide
gtctacggtcagcagtggggccgacgcggaggatgtcgtgtgctgctcaatgtct

SEQ ID NO: 438635 - DNA, 60 bp, Artificial
  Synthetic oligonucleotide
gtctacgtacctctattgaggagcgtgctattggaggtataacgcgtagtgatcaagcgc

SEQ ID NO: 438636 - DNA, 56 bp, Artificial
  Synthetic oligonucleotide
gtctacgttaacattgcaccaaccaatgtgtacgtggccggtgagaaacccgccaa

SEQ ID NO: 438637 - DNA, 60 bp, Artificial
  Synthetic oligonucleotide
gtctacgtttattaacacttgcaatagagctaccaatgatgagctgaagttcgattgttt

SEQ ID NO: 438638 - DNA, 55 bp, Artificial
  Synthetic oligonucleotide
gtctactaccttacccgtgaccctacaactcccctcgcaagagctgcgtgggaaa

SEQ ID NO: 438639 - DNA, 55 bp, Artificial
  Synthetic oligonucleotide
gtctactactaacaagagatggtggtcagaacagtagtgctaatgagaccttcag

SEQ ID NO: 438640 - DNA, 60 bp, Artificial
  Synthetic oligonucleotide
gtctactccaaaacagccaagtcttcagtcttatcagaccaaacgaaaatccagcacaca

SEQ ID NO: 438641 - DNA, 54 bp, Artificial
  Synthetic oligonucleotide
gtctactgcaatattagcgatgcctatgtggatgcgttacacatctggtaatcc

SEQ ID NO: 438642 - DNA, 58 bp, Artificial
  Synthetic oligonucleotide
gtctactgcttcacacctagccccgtggtagtgggaactaccgatcagagaggtatcc

SEQ ID NO: 438643 - DNA, 55 bp, Artificial
  Synthetic oligonucleotide
gtctactggagcagcttatggtagcaaggatatttacaagggtccttctatgcct

SEQ ID NO: 438644 - DNA, 60 bp, Artificial
  Synthetic oligonucleotide
gtctactggtcgctccctgacatgatgcaagacccagtcaccttccgctccacaagacaa

SEQ ID NO: 438645 - DNA, 55 bp, Artificial
  Synthetic oligonucleotide
gtctacttcgactcaaataggtctaagtgtgggtttgaaaaagaggatcacgttc

SEQ ID NO: 438646 - DNA, 55 bp, Artificial
  Synthetic oligonucleotide
gtctacttgcccaagtttgagtataactgtatgcagtagtggagtgataagggac

SEQ ID NO: 438647 - DNA, 55 bp, Artificial
  Synthetic oligonucleotide
gtctactttaaagaatacacagatattgcttccttctcggttgatccgcagttgt

SEQ ID NO: 438648 - DNA, 54 bp, Artificial
  Synthetic oligonucleotide
gtctactttaagtcagtgggcaaccagtagcccatttgtaatgagcccatgggg

SEQ ID NO: 438649 - DNA, 54 bp, Artificial
  Synthetic oligonucleotide
gtctagaaactttgctcagtaccggggatcattggtttatacctttgtgttcac

SEQ ID NO: 438650 - DNA, 53 bp, Artificial
  Synthetic oligonucleotide
gtctagaaccgtggaaagactttaaagagtccacgtattgccaaacttaacca

SEQ ID NO: 438651 - DNA, 59 bp, Artificial
  Synthetic oligonucleotide
gtctagaagactcatacactacggaaccatttactcgaatactccaagtcatttgaaca

SEQ ID NO: 438652 - DNA, 60 bp, Artificial
  Synthetic oligonucleotide
gtctagaagatcgcgctcactgaatactagcgcttattactttagagtatagactcatat

SEQ ID NO: 438653 - DNA, 55 bp, Artificial
  Synthetic oligonucleotide
gtctagaagcacttgatctcaataccagtgcaggattcccctatgtatccatggg

SEQ ID NO: 438654 - DNA, 60 bp, Artificial
  Synthetic oligonucleotide
gtctagaaggctggtccccagcctgtttaggtgtctgtatggatggagctcgttctccat

SEQ ID NO: 438655 - DNA, 60 bp, Artificial
  Synthetic oligonucleotide
gtctagagagacaaacagatgtactgaaactgactccacgatcggtctactggcgggtgc

SEQ ID NO: 438656 - DNA, 53 bp, Artificial
  Synthetic oligonucleotide
gtctagagggaaggtattctgtctgcacgaaatactcaaatgccaacacagca

SEQ ID NO: 438657 - DNA, 55 bp, Artificial
  Synthetic oligonucleotide
gtctagatcgtgaaacattccttgatcttatagaccgcattattggtgagaggtc

SEQ ID NO: 438658 - DNA, 59 bp, Artificial
  Synthetic oligonucleotide
gtctagatgaccacacaaataattgtgtggacccaacgacctagcccacatggtcttcc

SEQ ID NO: 438659 - DNA, 55 bp, Artificial
  Synthetic oligonucleotide
gtctagcacgggtgtgattcatcacaccgtttagtccgaagacgttaaactacgt

SEQ ID NO: 438660 - DNA, 60 bp, Artificial
  Synthetic oligonucleotide
gtctagcagggcttgacttctagtctagttcagctagactgtagctaacgcaccgacctg

SEQ ID NO: 438661 - DNA, 55 bp, Artificial
  Synthetic oligonucleotide
gtctagccagacttacattcactctcccttgcaatgggttcctattttgctcgcg

SEQ ID NO: 438662 - DNA, 50 bp, Artificial
  Synthetic oligonucleotide
gtctagccatggctgagctagcatgcttatgttatcctcatttggagaag

SEQ ID NO: 438663 - DNA, 55 bp, Artificial
  Synthetic oligonucleotide
gtctagcccatgacttcactgctagatttgactataaacatagtgataagtcggt

SEQ ID NO: 438664 - DNA, 57 bp, Artificial
  Synthetic oligonucleotide
gtctagcccgtcttatctggtatagaccaaacgaatttacggtagagctcgctcgct

SEQ ID NO: 438665 - DNA, 55 bp, Artificial
  Synthetic oligonucleotide
gtctagcgcgatacgcttttgacttttatgaaattacatctcgtacatccgtccg

SEQ ID NO: 438666 - DNA, 60 bp, Artificial
  Synthetic oligonucleotide
gtctagctgcgtttgcacgggacgcgctagccatgcctgagtgtcagtcgtggggagtgt

SEQ ID NO: 438667 - DNA, 58 bp, Artificial
  Synthetic oligonucleotide
gtctaggacagctggcttcaataatggagcatggtggacccccgtaataatccaaaag

SEQ ID NO: 438668 - DNA, 60 bp, Artificial
  Synthetic oligonucleotide
gtctaggatgtccagctccgataactaagtggtggtgcgatttccatcgattctcttaca

SEQ ID NO: 438669 - DNA, 50 bp, Artificial
  Synthetic oligonucleotide
gtctaggcaagtcaactttacagtgactggagtgaccgagagtagggcaa

SEQ ID NO: 438670 - DNA, 56 bp, Artificial
  Synthetic oligonucleotide
gtctaggcgtcgttcagtgtccaagaaagatagggtctttcctggtggttacagtg

SEQ ID NO: 438671 - DNA, 55 bp, Artificial
  Synthetic oligonucleotide
gtctaggctatatagtttctattgtgacggtactttcttaacggggtactatatc

SEQ ID NO: 438672 - DNA, 53 bp, Artificial
  Synthetic oligonucleotide
gtctagggagatcctagagatgacgtcagtcagtgaagttatgagtttgaggg

SEQ ID NO: 438673 - DNA, 55 bp, Artificial
  Synthetic oligonucleotide
gtctaggggtatacctatagaacctggatcaagggaatcctatgccacttacccc

SEQ ID NO: 438674 - DNA, 54 bp, Artificial
  Synthetic oligonucleotide
gtctaggtaagtttagagctcaggtcgagaccgggcctttgtccggcgctccct

SEQ ID NO: 438675 - DNA, 57 bp, Artificial
  Synthetic oligonucleotide
gtctaggtcggagttcagcaaccgggtagactcatacataaagctgttaagtttgag

SEQ ID NO: 438676 - DNA, 54 bp, Artificial
  Synthetic oligonucleotide
gtctaggttaattgaagcgtctagtctgaatgattcagtggcaatgaggcagac

SEQ ID NO: 438677 - DNA, 60 bp, Artificial
  Synthetic oligonucleotide
gtctaggtttagggatttttataaggagcgctcagcttctctcagtgatgacgacgtcta

SEQ ID NO: 438678 - DNA, 55 bp, Artificial
  Synthetic oligonucleotide
gtctagtatcgtcgttagctacgcgtgtgcaataagcgtttgggtctgtgagcgc

SEQ ID NO: 438679 - DNA, 55 bp, Artificial
  Synthetic oligonucleotide
gtctagtatggaccgctgcgtcgtcgtctacctcgaagtgaggcgtggtcgctgc

SEQ ID NO: 438680 - DNA, 60 bp, Artificial
  Synthetic oligonucleotide
gtctagtcgctggttggtatggattccagcattcaaatgatcaaggggttggtatggctg

SEQ ID NO: 438681 - DNA, 51 bp, Artificial
  Synthetic oligonucleotide
gtctagtctagactttgacattgccataaccgtcagacgcattaatctttt

SEQ ID NO: 438682 - DNA, 60 bp, Artificial
  Synthetic oligonucleotide
gtctagtctgccatgcgtcccagtgtacttgtgaaagaaaaactcacgctgtctcatgta

SEQ ID NO: 438683 - DNA, 60 bp, Artificial
  Synthetic oligonucleotide
gtctagtgccgacgggcgaaagaacaagcagccatgttacgtctataatgctagagtgcc

SEQ ID NO: 438684 - DNA, 50 bp, Artificial
  Synthetic oligonucleotide
gtctagttagaaaccagattaaaaccctgtttagcgaaaaccctttagaa

SEQ ID NO: 438685 - DNA, 55 bp, Artificial
  Synthetic oligonucleotide
gtctagttatttatggatatgtctgacacatctctgatattgtacgactcgacca

SEQ ID NO: 438686 - DNA, 57 bp, Artificial
  Synthetic oligonucleotide
gtctagttcaaaggtatattcctggtggttctattaaaccgcatgccgataatgaac

SEQ ID NO: 438687 - DNA, 55 bp, Artificial
  Synthetic oligonucleotide
gtctagttgattccaacattaacacccttctttgtgctgctactctgtcacaggc

SEQ ID NO: 438688 - DNA, 59 bp, Artificial
  Synthetic oligonucleotide
gtctagtttactatgttaaacagacttacaactcacttactgcaactgcatgggaaata

SEQ ID NO: 438689 - DNA, 55 bp, Artificial
  Synthetic oligonucleotide
gtctataattatgacttccctgaatacggcgcaatgaaacctggagtgttcggag

SEQ ID NO: 438690 - DNA, 60 bp, Artificial
  Synthetic oligonucleotide
gtctatacacgtgcaatgtaatgccacgaagtttcatcagggcacattactagtggtagc

SEQ ID NO: 438691 - DNA, 50 bp, Artificial
  Synthetic oligonucleotide
gtctataccgtctcaaggccatactttcactgagcgcgctagcagttgct

SEQ ID NO: 438692 - DNA, 56 bp, Artificial
  Synthetic oligonucleotide
gtctataccttaccaacatgtgaatgtcccaaaggtcgatcgtaaggttgtcagtt

SEQ ID NO: 438693 - DNA, 56 bp, Artificial
  Synthetic oligonucleotide
gtctatacttaggggcaaaatgaagcctggtacttgccagaactccaaaaaggtca

SEQ ID NO: 438694 - DNA, 55 bp, Artificial
  Synthetic oligonucleotide
gtctatagctaagtgttgggtagaaccagaccttaatgtcggaccacacgaattt

SEQ ID NO: 438695 - DNA, 59 bp, Artificial
  Synthetic oligonucleotide
gtctatatcgattactgggatgattcacaagcatttcgtaacgtgatgtatgtccgatc

SEQ ID NO: 438696 - DNA, 59 bp, Artificial
  Synthetic oligonucleotide
gtctatatcttttgtcagaccacgctctttcttcttaccctctggcatggtcttcttgg

SEQ ID NO: 438697 - DNA, 60 bp, Artificial
  Synthetic oligonucleotide
gtctatatgcgtctccacaacttgaggggttttcggctgaatctagaaaattgcttctca

SEQ ID NO: 438698 - DNA, 60 bp, Artificial
  Synthetic oligonucleotide
gtctatatgtcaccgctagccctgaacaatttggcctcccgattgttgagaaagatatct

SEQ ID NO: 438699 - DNA, 55 bp, Artificial
  Synthetic oligonucleotide
gtctatcacaatatgacatacgtgtcacacatctagcggccctcagtataatatt

SEQ ID NO: 438700 - DNA, 59 bp, Artificial
  Synthetic oligonucleotide
gtctatcacgagccgtggaccaaatacacttcattaacacaggtcccaactcgcaagcg

SEQ ID NO: 438701 - DNA, 60 bp, Artificial
  Synthetic oligonucleotide
gtctatcagattctggcgatctactcaactgtcgccagttcactggtgcttctggtctcc

SEQ ID NO: 438702 - DNA, 50 bp, Artificial
  Synthetic oligonucleotide
gtctatcagtaaggggtagtcttttgttgagacttatctgattagtaaca

SEQ ID NO: 438703 - DNA, 51 bp, Artificial
  Synthetic oligonucleotide
gtctatcatatcagccatggaagtggacctagctgaaggcaatcagctaat

SEQ ID NO: 438704 - DNA, 60 bp, Artificial
  Synthetic oligonucleotide
gtctatcatggtgctgtgactatgttgcaacgaatggttaagctacgaggatctaccatc

SEQ ID NO: 438705 - DNA, 57 bp, Artificial
  Synthetic oligonucleotide
gtctatcccccgggggtacatgtgatgttagagtaacgcgtaatgccgcattcctaa

SEQ ID NO: 438706 - DNA, 50 bp, Artificial
  Synthetic oligonucleotide
gtctatcctagtagttacccgacaagacacttatcctatttgcgtcacgt

SEQ ID NO: 438707 - DNA, 60 bp, Artificial
  Synthetic oligonucleotide
gtctatcgactcgcggggtgacggctgagacttgtgagatgtaccgggtctatagcactg

SEQ ID NO: 438708 - DNA, 55 bp, Artificial
  Synthetic oligonucleotide
gtctatcgccagggaaatgtctaatctgtctacttagtagcctggaaacgaacgg

SEQ ID NO: 438709 - DNA, 58 bp, Artificial
  Synthetic oligonucleotide
gtctatcgtagcacaaatacgcctcatcgctatagaccgtcggaaaaagtcactagtg

SEQ ID NO: 438710 - DNA, 55 bp, Artificial
  Synthetic oligonucleotide
gtctatctaatgccagtatagtaacaggagaaacacctgaatggatagcaaggca

SEQ ID NO: 438711 - DNA, 60 bp, Artificial
  Synthetic oligonucleotide
gtctatctgagactcattcagaagaaaatttcacacatcctaagtgtagatgaaagcaac

SEQ ID NO: 438712 - DNA, 56 bp, Artificial
  Synthetic oligonucleotide
gtctatctggaactctccccattcggaggtatctccgtctttctccatgtatgcct

SEQ ID NO: 438713 - DNA, 60 bp, Artificial
  Synthetic oligonucleotide
gtctatctgggttacaggaaagatctggatggatgagaacatcaagacaaagaatcacac

SEQ ID NO: 438714 - DNA, 58 bp, Artificial
  Synthetic oligonucleotide
gtctatgaaagaacctactgcatgacagggtttctgatagaaggaaaatgttttgtcc

SEQ ID NO: 438715 - DNA, 55 bp, Artificial
  Synthetic oligonucleotide
gtctatgaagcattctgttatggcttggtatctcaaatctacccagcagagaatc

SEQ ID NO: 438716 - DNA, 60 bp, Artificial
  Synthetic oligonucleotide
gtctatgaatgtcagccgacagattcaggcgtgcctaatcccgtgggcgaagttagacca

SEQ ID NO: 438717 - DNA, 60 bp, Artificial
  Synthetic oligonucleotide
gtctatgccaacggcgggtccgccaacactcctctcatcaccgtcatggtgcgaggagtt

SEQ ID NO: 438718 - DNA, 60 bp, Artificial
  Synthetic oligonucleotide
gtctatgccctggatacaagagtttgagagctgccagagttatgtgcaagtcaaaggggc

SEQ ID NO: 438719 - DNA, 55 bp, Artificial
  Synthetic oligonucleotide
gtctatgctaattcatggaatggtcgaacttatggaaagaagccagctaaagctc

SEQ ID NO: 438720 - DNA, 53 bp, Artificial
  Synthetic oligonucleotide
gtctatggagaccactatgcggtccccggtctttacagacaactcatctccac

SEQ ID NO: 438721 - DNA, 55 bp, Artificial
  Synthetic oligonucleotide
gtctatggcgatgacaatttgctgtcggtgagtgaggttatcaagccctacttcg

SEQ ID NO: 438722 - DNA, 55 bp, Artificial
  Synthetic oligonucleotide
gtctatgggatcagagcctaaagccatgtgtagaattaacccctctctgcgttac

SEQ ID NO: 438723 - DNA, 55 bp, Artificial
  Synthetic oligonucleotide
gtctatgggtctcagtgagattactggccgactacccagagtgtctacactaatg

SEQ ID NO: 438724 - DNA, 60 bp, Artificial
  Synthetic oligonucleotide
gtctatggtccttatggtaatgagggtaaatgaacatatgcgaagtcactaatcaagaag

SEQ ID NO: 438725 - DNA, 55 bp, Artificial
  Synthetic oligonucleotide
gtctatgtccgctaaggttaagcgcgttaatacgtggcttaaaaactttgatcgc

SEQ ID NO: 438726 - DNA, 55 bp, Artificial
  Synthetic oligonucleotide
gtctatgtctagacccatgcaagagtacatcatcaagagggcgaacttgaccaag

SEQ ID NO: 438727 - DNA, 60 bp, Artificial
  Synthetic oligonucleotide
gtctatgtgacatatatggctcacaataagtattgtgaacatcctgtgtcagtacataac

SEQ ID NO: 438728 - DNA, 58 bp, Artificial
  Synthetic oligonucleotide
gtctatgtgcctatgggttctaccgcgctttccgccttgttttcaagatcaaggttga

SEQ ID NO: 438729 - DNA, 59 bp, Artificial
  Synthetic oligonucleotide
gtctatgttgcatgggtcccagcccataaaggcataggaggaaaccaggaagtagacca

SEQ ID NO: 438730 - DNA, 60 bp, Artificial
  Synthetic oligonucleotide
gtctattatggagttgggatctggagaggcttcatggatggatatcaggtccatcttgag

SEQ ID NO: 438731 - DNA, 60 bp, Artificial
  Synthetic oligonucleotide
gtctattcaattagatatgaccgcaggcaatccaccgctactcatcattgagtgctttcc

SEQ ID NO: 438732 - DNA, 57 bp, Artificial
  Synthetic oligonucleotide
gtctattcgatatggtcggatcgtcgccgctaagaataacacgccggaaactgaact

SEQ ID NO: 438733 - DNA, 55 bp, Artificial
  Synthetic oligonucleotide
gtctattgaactatgcaaggagttacattcctcatatgggccgcctactcagccc

SEQ ID NO: 438734 - DNA, 55 bp, Artificial
  Synthetic oligonucleotide
gtctattgaaggcatcaaagaagcagatataaccccagcacatggtcctgtgaag

SEQ ID NO: 438735 - DNA, 51 bp, Artificial
  Synthetic oligonucleotide
gtctattgattcacgtttgtgaccataacagttggaccagagtcttaacca

SEQ ID NO: 438736 - DNA, 60 bp, Artificial
  Synthetic oligonucleotide
gtctattgccatgaatgtgacatgtatcatgaaaagacgagcctgaaatacaatggtgat

SEQ ID NO: 438737 - DNA, 51 bp, Artificial
  Synthetic oligonucleotide
gtctattgccgacgattcggaggagatcttctttggagacactggggtttc

SEQ ID NO: 438738 - DNA, 60 bp, Artificial
  Synthetic oligonucleotide
gtctattggaggaaggactctcatagctttcgactttgagaacgagtctaccatgtccta

SEQ ID NO: 438739 - DNA, 57 bp, Artificial
  Synthetic oligonucleotide
gtctatttacagtgagacatgtatgtagagaaggactgttgattcatgaaataccat

SEQ ID NO: 438740 - DNA, 55 bp, Artificial
  Synthetic oligonucleotide
gtctcaaacaatgggtacttcactgtctttgtcatgaaccctctcgtcactcctg

SEQ ID NO: 438741 - DNA, 58 bp, Artificial
  Synthetic oligonucleotide
gtctcaaactggcagtcggtccgaggaatgtaccagctaaatcaagtagaggactatt

SEQ ID NO: 438742 - DNA, 60 bp, Artificial
  Synthetic oligonucleotide
gtctcaaactggcagtcggtctgaggaatgtgcctgctgcatcaaatagagggctatttg

SEQ ID NO: 438743 - DNA, 60 bp, Artificial
  Synthetic oligonucleotide
gtctcaaactggcagttggtctgaggaatttgcctgctagatcaagtagaggactatttg

SEQ ID NO: 438744 - DNA, 60 bp, Artificial
  Synthetic oligonucleotide
gtctcaaagaaatggagtagctccacaatctgaagcgttaaggaagttagcaggcattaa

SEQ ID NO: 438745 - DNA, 60 bp, Artificial
  Synthetic oligonucleotide
gtctcaaatcctaaatcggtgctccaggctggcgtgcccgttctagcttccgctggtgtc

SEQ ID NO: 438746 - DNA, 51 bp, Artificial
  Synthetic oligonucleotide
gtctcaacggtttcgttacatagaggacgagaacatgaactggacgaacct

SEQ ID NO: 438747 - DNA, 60 bp, Artificial
  Synthetic oligonucleotide
gtctcaactctcgttctcactgctcttgggatgtatgcatctaggtttagacccaaatca

SEQ ID NO: 438748 - DNA, 55 bp, Artificial
  Synthetic oligonucleotide
gtctcaagaccccacaatgttgtacaataaaatggagtttgaaccgttccaatcc

SEQ ID NO: 438749 - DNA, 55 bp, Artificial
  Synthetic oligonucleotide
gtctcaagccctatgataatttggcttgttacttaaacggctatatgacgaaaga

SEQ ID NO: 438750 - DNA, 60 bp, Artificial
  Synthetic oligonucleotide
gtctcaagcctacatcttagtatcagaggaaactcaaattacaaggcagtgtcttgtgat

SEQ ID NO: 438751 - DNA, 55 bp, Artificial
  Synthetic oligonucleotide
gtctcaagctactgattgcatacacaccacctggagtgccaaaacctgaaaccag

SEQ ID NO: 438752 - DNA, 60 bp, Artificial
  Synthetic oligonucleotide
gtctcaaggcaccaaacgatcttatgaacagatggagactggtggggaacgccagaatgc

SEQ ID NO: 438753 - DNA, 60 bp, Artificial
  Synthetic oligonucleotide
gtctcaagtccaaagtcgggatcgagcaggcatacaaggtagtcaggtatgaggcgttga

SEQ ID NO: 438754 - DNA, 51 bp, Artificial
  Synthetic oligonucleotide
gtctcaatacaatgcctcgaactatcgaccctccaggttccttgagcatct

SEQ ID NO: 438755 - DNA, 50 bp, Artificial
  Synthetic oligonucleotide
gtctcaatactatggaattcccatggccgagagacaaaacaatagttggc

SEQ ID NO: 438756 - DNA, 54 bp, Artificial
  Synthetic oligonucleotide
gtctcaatcctgaacctcgggcaaaagaggtacactaaaaccacctactggtgg

SEQ ID NO: 438757 - DNA, 54 bp, Artificial
  Synthetic oligonucleotide
gtctcaatgaccaggccacaccccccgatgtactccgtgcttacgggttttacg

SEQ ID NO: 438758 - DNA, 54 bp, Artificial
  Synthetic oligonucleotide
gtctcaattctacaagaaaggcccccccttgaaaatcgggtcctcacaggctgg

SEQ ID NO: 438759 - DNA, 55 bp, Artificial
  Synthetic oligonucleotide
gtctcaattgttcttgactaaagggtggccaactggatcagtttactttaaggag

SEQ ID NO: 438760 - DNA, 55 bp, Artificial
  Synthetic oligonucleotide
gtctcaattttgaacggttgagatcgaaattaatatgttcagaacatcgcaaccg

SEQ ID NO: 438761 - DNA, 54 bp, Artificial
  Synthetic oligonucleotide
gtctcacaacagattcaagcaggccatttgcactggtttagtgtaaatacagag

SEQ ID NO: 438762 - DNA, 55 bp, Artificial
  Synthetic oligonucleotide
gtctcacacctgaattatttgcattcaccacatcccttgcaagtgctgcagagtc

SEQ ID NO: 438763 - DNA, 60 bp, Artificial
  Synthetic oligonucleotide
gtctcacagacagatggtgaccaccaccaacccactaatcaggcacgagaacagaatggt

SEQ ID NO: 438764 - DNA, 54 bp, Artificial
  Synthetic oligonucleotide
gtctcaccaagcaatgttagttgacggaatgtatattccaaaactcgagaagga

SEQ ID NO: 438765 - DNA, 58 bp, Artificial
  Synthetic oligonucleotide
gtctcacccatatagacggtcatttcctatcccagaccaaacaggcgggtgacaacta

SEQ ID NO: 438766 - DNA, 60 bp, Artificial
  Synthetic oligonucleotide
gtctcacccatatcgatgctcacttcttatcccagacaaagcagagtggggagaaccttc

SEQ ID NO: 438767 - DNA, 60 bp, Artificial
  Synthetic oligonucleotide
gtctcaccgagcagagactgtaaacttgcccaaacaggcgaaggaaaatgccttagatca

SEQ ID NO: 438768 - DNA, 55 bp, Artificial
  Synthetic oligonucleotide
gtctcacctaagagagcttacaatctagaagtggagccagtctggattggcctac

SEQ ID NO: 438769 - DNA, 55 bp, Artificial
  Synthetic oligonucleotide
gtctcacctacgagtgcttgcattctaggagtgaagccagtttgggttgacctgc

SEQ ID NO: 438770 - DNA, 55 bp, Artificial
  Synthetic oligonucleotide
gtctcacgtaccaagagggtatgtacgccagttcctttcatcggaacttttagtg

SEQ ID NO: 438771 - DNA, 55 bp, Artificial
  Synthetic oligonucleotide
gtctcacgtagccagcgccggggtcgcacgggtaggggaagactgggcatttata

SEQ ID NO: 438772 - DNA, 60 bp, Artificial
  Synthetic oligonucleotide
gtctcactatggatgcaataacgtcatgttccagtctcagtatatccaatctttttaaac

SEQ ID NO: 438773 - DNA, 60 bp, Artificial
  Synthetic oligonucleotide
gtctcactcacatagatgcccacttcctatcccagacaaagcagggcggggagaactttc

SEQ ID NO: 438774 - DNA, 56 bp, Artificial
  Synthetic oligonucleotide
gtctcagacgaagcaagggggtgagaacttcgcgtacctcgtagcataccaggcta

SEQ ID NO: 438775 - DNA, 55 bp, Artificial
  Synthetic oligonucleotide
gtctcagagtatcagcgtggcgttctagacggtctatagcttccgctaagatgct

SEQ ID NO: 438776 - DNA, 55 bp, Artificial
  Synthetic oligonucleotide
gtctcagccaatggcgagccgactgttaagttgtacacatcagttgagaacgcac

SEQ ID NO: 438777 - DNA, 55 bp, Artificial
  Synthetic oligonucleotide
gtctcagcctgcgtggcggccaacccagcttctgctgggacgccaattcattgac

SEQ ID NO: 438778 - DNA, 55 bp, Artificial
  Synthetic oligonucleotide
gtctcagcctgcgtggcggccaacccgactcatgtcgggacgcctactaatagac

SEQ ID NO: 438779 - DNA, 55 bp, Artificial
  Synthetic oligonucleotide
gtctcagcgtaatggaattgcaccacagtctgatgctctaaggaagttgtctggg

SEQ ID NO: 438780 - DNA, 53 bp, Artificial
  Synthetic oligonucleotide
gtctcagctacgaccgaccgcctaggaccggatgggtttaggaccggagtgga

SEQ ID NO: 438781 - DNA, 55 bp, Artificial
  Synthetic oligonucleotide
gtctcagctagtcgttggcacacgccgcagtacaaatacattaacagtgccacgc

SEQ ID NO: 438782 - DNA, 59 bp, Artificial
  Synthetic oligonucleotide
gtctcagctcgaaccaattttacagtggagtcttaacgagtccaagtggtgaactgagc

SEQ ID NO: 438783 - DNA, 60 bp, Artificial
  Synthetic oligonucleotide
gtctcaggcaacttcgtgctttatcaaagagatgcagtctcaagcgccttggaaggagag

SEQ ID NO: 438784 - DNA, 60 bp, Artificial
  Synthetic oligonucleotide
gtctcaggtattatctgacttatcgattttgcttggggaaaatgttgcagactggcttga

SEQ ID NO: 438785 - DNA, 51 bp, Artificial
  Synthetic oligonucleotide
gtctcagtcacagctcccatcaccaagactaatggaaacataggcttacaa

SEQ ID NO: 438786 - DNA, 57 bp, Artificial
  Synthetic oligonucleotide
gtctcagtccctgccgattacaaatgcaagcagaggatgttcatgagatcagtttgt

SEQ ID NO: 438787 - DNA, 55 bp, Artificial
  Synthetic oligonucleotide
gtctcagtgggtgtgtacaacgacatacacgccgcgtatcgaggttggtgttcgt

SEQ ID NO: 438788 - DNA, 60 bp, Artificial
  Synthetic oligonucleotide
gtctcagttagcggacatatgcagtacatactcattggttcagttctagggttaccttat

SEQ ID NO: 438789 - DNA, 55 bp, Artificial
  Synthetic oligonucleotide
gtctcatacagtcgtcccgggcccacgccatagttgcactcactcgccacacgga

SEQ ID NO: 438790 - DNA, 57 bp, Artificial
  Synthetic oligonucleotide
gtctcatacggctaaagcctacgctacacgggccaacacccctgttgtacaggctag

SEQ ID NO: 438791 - DNA, 59 bp, Artificial
  Synthetic oligonucleotide
gtctcatagaggtcttgaaattgaaggcatgtacattccaaaattggaagaggaacgtg

SEQ ID NO: 438792 - DNA, 58 bp, Artificial
  Synthetic oligonucleotide
gtctcatatatactataactcataaagggtcttataggggtaaaatcggccatccaca

SEQ ID NO: 438793 - DNA, 56 bp, Artificial
  Synthetic oligonucleotide
gtctcatatatactataagtctataaggttcttaaaggggtaaaatcggccatcca

SEQ ID NO: 438794 - DNA, 55 bp, Artificial
  Synthetic oligonucleotide
gtctcatattggggataagttccgtacaggtggtgaaatgactaaaatacccctc

SEQ ID NO: 438795 - DNA, 60 bp, Artificial
  Synthetic oligonucleotide
gtctcatggacacagcggacggctgtgccaagttactaaatcaattagaaccagctctca

SEQ ID NO: 438796 - DNA, 55 bp, Artificial
  Synthetic oligonucleotide
gtctcattctaggcaatcccaaatgtgatctttatctgaatggcagggaatggtc

SEQ ID NO: 438797 - DNA, 58 bp, Artificial
  Synthetic oligonucleotide
gtctccaaaattacatgttctaccaattccaaataacatagattttatctcctctcaa

SEQ ID NO: 438798 - DNA, 52 bp, Artificial
  Synthetic oligonucleotide
gtctccaaatattaggttatcttgaagggaccaggactctattggcctccaa

SEQ ID NO: 438799 - DNA, 59 bp, Artificial
  Synthetic oligonucleotide
gtctccaacacatctgatctttccactaatcacatccacactaacctaatcccttcgga

SEQ ID NO: 438800 - DNA, 58 bp, Artificial
  Synthetic oligonucleotide
gtctccaagcattcttcatacagaatggatcagctaatgcattaagagttgatttaac

SEQ ID NO: 438801 - DNA, 60 bp, Artificial
  Synthetic oligonucleotide
gtctccaatgacgatgccacagtggattttgttgcagaacctgtgaaatttccagacaat

SEQ ID NO: 438802 - DNA, 58 bp, Artificial
  Synthetic oligonucleotide
gtctccactttttctcggtacaactgaaggtacttagacatgtcctcatgcacgattt

SEQ ID NO: 438803 - DNA, 55 bp, Artificial
  Synthetic oligonucleotide
gtctccagaaactcgcggacacttgtgacgaacaccttacgtttggagtcatcgt

SEQ ID NO: 438804 - DNA, 53 bp, Artificial
  Synthetic oligonucleotide
gtctccagggaccctactcgggaattcacacaaactatcaaaaggtcaaaccc

SEQ ID NO: 438805 - DNA, 53 bp, Artificial
  Synthetic oligonucleotide
gtctccaggtgactggaagatactccaggagtccaggccttatccttatggac

SEQ ID NO: 438806 - DNA, 60 bp, Artificial
  Synthetic oligonucleotide
gtctccagtcaatgtcctgtgtgatccagttatcgtcaaatcgacccagcacttgtgtag

SEQ ID NO: 438807 - DNA, 58 bp, Artificial
  Synthetic oligonucleotide
gtctccatactccgtgcgtggatccgtacgactaaaatagttggtgatcatcccttgg

SEQ ID NO: 438808 - DNA, 58 bp, Artificial
  Synthetic oligonucleotide
gtctccatacttcgtgcgtggattcgtacgactaagatagttggggatcacccgctgg

SEQ ID NO: 438809 - DNA, 60 bp, Artificial
  Synthetic oligonucleotide
gtctccatcgacgctgtcagacgcagcggtcgcgctcgaaagttcagaacagctttcatc

SEQ ID NO: 438810 - DNA, 55 bp, Artificial
  Synthetic oligonucleotide
gtctcccaaacaaccaaagctgttctcgtgggagtctaagcgagacttatcgaac

SEQ ID NO: 438811 - DNA, 56 bp, Artificial
  Synthetic oligonucleotide
gtctcccaaagcgatgtgcccggttatactttcgaaccagggcaacactcatccgg

SEQ ID NO: 438812 - DNA, 59 bp, Artificial
  Synthetic oligonucleotide
gtctcccaagcagcccccgggagcccccagtttatgcagaccattcggcttgcagtaca

SEQ ID NO: 438813 - DNA, 58 bp, Artificial
  Synthetic oligonucleotide
gtctcccaatctaaggttcagagatccgtgtcctctaaagcggttgctagtgttacga

SEQ ID NO: 438814 - DNA, 57 bp, Artificial
  Synthetic oligonucleotide
gtctcccaccagctgtccggacacagttcctgggcggccacgtacacgccgcgggta

SEQ ID NO: 438815 - DNA, 58 bp, Artificial
  Synthetic oligonucleotide
gtctccccatcgctgattacggcgatgctcctcccctgagtacaaaaaccatgttttg

SEQ ID NO: 438816 - DNA, 52 bp, Artificial
  Synthetic oligonucleotide
gtctccccgctgggtaaaaagggcccggccttgggaggcatggtggttacta

SEQ ID NO: 438817 - DNA, 60 bp, Artificial
  Synthetic oligonucleotide
gtctcccgttcagtaatgcaagatgtattctgtgtacagacgtgggtataagacgccgta

SEQ ID NO: 438818 - DNA, 55 bp, Artificial
  Synthetic oligonucleotide
gtctccctcagcactaccatggtttcatccctctaaggagatattcatcccaggt

SEQ ID NO: 438819 - DNA, 56 bp, Artificial
  Synthetic oligonucleotide
gtctccgaagcctcttcccaaaactccggttccatcgcttacgagctggacccaca

SEQ ID NO: 438820 - DNA, 52 bp, Artificial
  Synthetic oligonucleotide
gtctccgaatccggcaaacttcctattacgcacaatatcacactagcgatta

SEQ ID NO: 438821 - DNA, 57 bp, Artificial
  Synthetic oligonucleotide
gtctccgacgacgaaacgtcgccaccttcaaggctatttgcaattgaagggtcagag

SEQ ID NO: 438822 - DNA, 53 bp, Artificial
  Synthetic oligonucleotide
gtctccgacgtgcactgcgatgtgcacacaaacgtgtaccccttgttgtgggg

SEQ ID NO: 438823 - DNA, 55 bp, Artificial
  Synthetic oligonucleotide
gtctccgagtttgtaacagacagcggactttaacctatacatgataccgtttagc

SEQ ID NO: 438824 - DNA, 56 bp, Artificial
  Synthetic oligonucleotide
gtctccggcctttctcacccgtttgaatctttacctacacattactcaggcattgc

SEQ ID NO: 438825 - DNA, 60 bp, Artificial
  Synthetic oligonucleotide
gtctccgggtggatgcctcatggtgctatggatgcctataactgaaatgttatagatgcc

SEQ ID NO: 438826 - DNA, 58 bp, Artificial
  Synthetic oligonucleotide
gtctccggttggttgcccgcctacgacgataatatagactccgcggtctcgcgcgata

SEQ ID NO: 438827 - DNA, 60 bp, Artificial
  Synthetic oligonucleotide
gtctccgtatcagtaccaagacgaacagcaggcacaaaactcatacgtccaaattgcgtc

SEQ ID NO: 438828 - DNA, 60 bp, Artificial
  Synthetic oligonucleotide
gtctccgtcagccgcatggggaagtagaccatgtccccggagatgagcacgttcccgcta

SEQ ID NO: 438829 - DNA, 58 bp, Artificial
  Synthetic oligonucleotide
gtctccgtctttcttaatgtaggttttgacatcgcttgagcttttagctccctgaatg

SEQ ID NO: 438830 - DNA, 60 bp, Artificial
  Synthetic oligonucleotide
gtctccgtctttgtcgatgtatgctttgacgtccgatgctgatttagctccctgaatatt

SEQ ID NO: 438831 - DNA, 60 bp, Artificial
  Synthetic oligonucleotide
gtctccgtggctgcagaaatcctgcggaagtctcggagattcaccccggccctgcctatc

SEQ ID NO: 438832 - DNA, 58 bp, Artificial
  Synthetic oligonucleotide
gtctcctacttgaaaggctcttcgggtggtccattgctctgcccctcggggcacgctg

SEQ ID NO: 438833 - DNA, 51 bp, Artificial
  Synthetic oligonucleotide
gtctcctatgctcttgacaaactctattggtctcatgacttatcagatggg

SEQ ID NO: 438834 - DNA, 55 bp, Artificial
  Synthetic oligonucleotide
gtctcctcatacctgtgagtgttcaatcagctgtagaccaactgtgcgctagttt

SEQ ID NO: 438835 - DNA, 60 bp, Artificial
  Synthetic oligonucleotide
gtctcctctaagacatagcagcacagcacccgacaaaactcacttaagagagagatgccc

SEQ ID NO: 438836 - DNA, 55 bp, Artificial
  Synthetic oligonucleotide
gtctcctgcgttggactggcttactcatcatcttggacaaagaaatctgctgaca

SEQ ID NO: 438837 - DNA, 55 bp, Artificial
  Synthetic oligonucleotide
gtctcctgtaacaatgtatgtatctttgtgattccggttggtagatagcaaactc

SEQ ID NO: 438838 - DNA, 60 bp, Artificial
  Synthetic oligonucleotide
gtctccttgctatccatggcttatgctaacccagaattatacctaacatcaaatggtaat

SEQ ID NO: 438839 - DNA, 55 bp, Artificial
  Synthetic oligonucleotide
gtctccttgtccgttgtcaagtctccgcgatcaacaaagttggtcgctctagccc

SEQ ID NO: 438840 - DNA, 60 bp, Artificial
  Synthetic oligonucleotide
gtctcctttgcaaatctgtgcaatagtaggactgatagtagcattaattctagcaatagt

SEQ ID NO: 438841 - DNA, 57 bp, Artificial
  Synthetic oligonucleotide
gtctcgaaagagaatgtttttacaggataaactcaaaaagaatgtcccatggacatg

SEQ ID NO: 438842 - DNA, 50 bp, Artificial
  Synthetic oligonucleotide
gtctcgaaccttgtttactgactttgcactctgaatgtttgggtggaagc

SEQ ID NO: 438843 - DNA, 60 bp, Artificial
  Synthetic oligonucleotide
gtctcgaatgggctgtctgcaaccaagcgatggaggactactgcgagcaggacgttcgcg

SEQ ID NO: 438844 - DNA, 53 bp, Artificial
  Synthetic oligonucleotide
gtctcgacagatttgtcatcatgattgtgtatacaaccactcttgtctgcact

SEQ ID NO: 438845 - DNA, 60 bp, Artificial
  Synthetic oligonucleotide
gtctcgatgacagcatagctgtaaaaagactaagacgacaacaatgtcgtagtcgagggt

SEQ ID NO: 438846 - DNA, 60 bp, Artificial
  Synthetic oligonucleotide
gtctcgatggttctaagagcagtgagaactttgaaatcatacattctccttttgtgcgtc

SEQ ID NO: 438847 - DNA, 60 bp, Artificial
  Synthetic oligonucleotide
gtctcgcaatggtgactattggatcatgatgaactaccgtttttcaacgcgtatttcact

SEQ ID NO: 438848 - DNA, 60 bp, Artificial
  Synthetic oligonucleotide
gtctcgccttccggttggtgtgccttgcttgtgacacaagcatgacatacggcgcgacac

SEQ ID NO: 438849 - DNA, 55 bp, Artificial
  Synthetic oligonucleotide
gtctcgcgactgcgtctaggcaggctgagactagggctcacgcgttccaaaaggc

SEQ ID NO: 438850 - DNA, 55 bp, Artificial
  Synthetic oligonucleotide
gtctcgcgagctcatcaaacatcagtacggagagttattttcttggcgcgaacgt

SEQ ID NO: 438851 - DNA, 60 bp, Artificial
  Synthetic oligonucleotide
gtctcgcggatgcggtattctaaacgctcgaggtatagtcgtagcgatatgcgacgttat

SEQ ID NO: 438852 - DNA, 55 bp, Artificial
  Synthetic oligonucleotide
gtctcgcgttagccaagtactcgcatccatctccgacccctctctcaaggcggtc

SEQ ID NO: 438853 - DNA, 60 bp, Artificial
  Synthetic oligonucleotide
gtctcgctctcgcaggtgtccagtcctatggctctgactacctcacccagacggctacta

SEQ ID NO: 438854 - DNA, 60 bp, Artificial
  Synthetic oligonucleotide
gtctcgcttctcatagccggcgatgactgtttgatcatatgcgaacggccagtgtgcgac

SEQ ID NO: 438855 - DNA, 55 bp, Artificial
  Synthetic oligonucleotide
gtctcggaagaagactgcagagagttgcttcacggatcatcaagccaggtgattc

SEQ ID NO: 438856 - DNA, 55 bp, Artificial
  Synthetic oligonucleotide
gtctcggaccctgcttttcttagcaggccaggcacactcgtgcagtttggctttg

SEQ ID NO: 438857 - DNA, 55 bp, Artificial
  Synthetic oligonucleotide
gtctcggagattcgctccggccctgcccatttgggcacggccggactacaacccc

SEQ ID NO: 438858 - DNA, 55 bp, Artificial
  Synthetic oligonucleotide
gtctcggagatttaccccagccctgcccatatgggctcggccggattacaacccc

SEQ ID NO: 438859 - DNA, 60 bp, Artificial
  Synthetic oligonucleotide
gtctcggagtctgaatgatcttgtcgtgggtgtcgctcacattcaatctcgccacgtaat

SEQ ID NO: 438860 - DNA, 60 bp, Artificial
  Synthetic oligonucleotide
gtctcggatacgttacacctcgaacgagctgttgctgcaacaataacatttcatggtaaa

SEQ ID NO: 438861 - DNA, 58 bp, Artificial
  Synthetic oligonucleotide
gtctcggcaactgtatggtggctttgggggagctcaaactcgcagccctttgtcacgg

SEQ ID NO: 438862 - DNA, 60 bp, Artificial
  Synthetic oligonucleotide
gtctcggcgttagaatcggccaatgcgtcgttgaatgagatcataaaaggcgtgttagat

SEQ ID NO: 438863 - DNA, 56 bp, Artificial
  Synthetic oligonucleotide
gtctcggtatggttcaaatttaaacttgcatggacacgccaagttcccgcccaata

SEQ ID NO: 438864 - DNA, 55 bp, Artificial
  Synthetic oligonucleotide
gtctcggtcctctcgagggagcatgatgtgtcagtctatgaaccagaagaccttg

SEQ ID NO: 438865 - DNA, 56 bp, Artificial
  Synthetic oligonucleotide
gtctcgtataacattcttccagaaggattgtaataagtttacaacgggcgagacaa

SEQ ID NO: 438866 - DNA, 54 bp, Artificial
  Synthetic oligonucleotide
gtctcgtccagttcccaccttcgtgggtcaagccctggaccccaaatccttcga

SEQ ID NO: 438867 - DNA, 60 bp, Artificial
  Synthetic oligonucleotide
gtctcgtctcatagaagcaagcagtctaaatgattcagtgtacttgagaatgacatttgg

SEQ ID NO: 438868 - DNA, 60 bp, Artificial
  Synthetic oligonucleotide
gtctcgtggatgccgacctgcttcgccaatgctcgccggctaccaagcagcctagccacc

SEQ ID NO: 438869 - DNA, 50 bp, Artificial
  Synthetic oligonucleotide
gtctcgttaactgggaaggaaagagaattaagtgtaggtaggatgtttgc

SEQ ID NO: 438870 - DNA, 55 bp, Artificial
  Synthetic oligonucleotide
gtctcgttcctccataattggtgggcccaacaggttacgctcctgaatcctccga

SEQ ID NO: 438871 - DNA, 55 bp, Artificial
  Synthetic oligonucleotide
gtctcgttctcttgcaaggatattacccgtctgctctcaggcactcaccgggttc

SEQ ID NO: 438872 - DNA, 58 bp, Artificial
  Synthetic oligonucleotide
gtctcgttctgcgttgggcttaattcatttgtcgtcgggtctcagcttccttgtgacc

SEQ ID NO: 438873 - DNA, 55 bp, Artificial
  Synthetic oligonucleotide
gtctcgttttgtcattgggataatgtcaggtagcggcagtgagcagaccccgagg

SEQ ID NO: 438874 - DNA, 55 bp, Artificial
  Synthetic oligonucleotide
gtctctaacgcagaaactgatacaaactatgcacagttcaatactgatgcactgg

SEQ ID NO: 438875 - DNA, 55 bp, Artificial
  Synthetic oligonucleotide
gtctctaaggcgtgctgtcccgttgaatgagaccggtttaacactgtcggtaagc

SEQ ID NO: 438876 - DNA, 52 bp, Artificial
  Synthetic oligonucleotide
gtctctaaggggtctctaaggggtctctaaggggtctctaaggggtctctaa

SEQ ID NO: 438877 - DNA, 50 bp, Artificial
  Synthetic oligonucleotide
gtctctaatgaacacgtgctactaccgtgcacgtcgggaaattactgtga

SEQ ID NO: 438878 - DNA, 55 bp, Artificial
  Synthetic oligonucleotide
gtctctagacatcaacacagaacaaatgtgcttggaggatgccatgtacggcacc

SEQ ID NO: 438879 - DNA, 52 bp, Artificial
  Synthetic oligonucleotide
gtctctagaggtctttacgagtgtgctgaatgtaaagagcatgtacctccaa

SEQ ID NO: 438880 - DNA, 58 bp, Artificial
  Synthetic oligonucleotide
gtctctagagttccggatgaccaaatgtatagattaagggatagattgcgtttactac

SEQ ID NO: 438881 - DNA, 59 bp, Artificial
  Synthetic oligonucleotide
gtctctagcataagttttcacggcgataacgatataatcgcaacgaaactgccggagta

SEQ ID NO: 438882 - DNA, 60 bp, Artificial
  Synthetic oligonucleotide
gtctctaggctctgagtcagcagcagaggagaagaggctcctggtgtccatactggatta

SEQ ID NO: 438883 - DNA, 60 bp, Artificial
  Synthetic oligonucleotide
gtctctatcatcgcaagagtactaccgaagaatatatatcagtagatgggaaaacatggt

SEQ ID NO: 438884 - DNA, 60 bp, Artificial
  Synthetic oligonucleotide
gtctctattatgaaatgagtctagacgagcaggatcaactctttgagagtacaaagaaga

SEQ ID NO: 438885 - DNA, 59 bp, Artificial
  Synthetic oligonucleotide
gtctctcaactttctctatgtaattggtgtctggggtcctatatataggtaagacacca

SEQ ID NO: 438886 - DNA, 60 bp, Artificial
  Synthetic oligonucleotide
gtctctcaggggatggatggccttacattgcatcaaggacttcgattgtgggaagagcat

SEQ ID NO: 438887 - DNA, 57 bp, Artificial
  Synthetic oligonucleotide
gtctctcccactcctcaataaacctccgggtgcgtgtactctgtggtcgcggtctcg

SEQ ID NO: 438888 - DNA, 55 bp, Artificial
  Synthetic oligonucleotide
gtctctcccagagactacttgagggggctcgcaagaggagtcttgatagggtcct

SEQ ID NO: 438889 - DNA, 57 bp, Artificial
  Synthetic oligonucleotide
gtctctccttgtcggtgaagtctcccgcacgagtcctcttcctaggtccggtatcga

SEQ ID NO: 438890 - DNA, 60 bp, Artificial
  Synthetic oligonucleotide
gtctctcgaagtcagccattgcatggagtgattcacttgataattaagaagtaattcggg

SEQ ID NO: 438891 - DNA, 57 bp, Artificial
  Synthetic oligonucleotide
gtctctcgctaatggtcggttcccgtccacgtgatttcaagactgaggttgacgtaa

SEQ ID NO: 438892 - DNA, 60 bp, Artificial
  Synthetic oligonucleotide
gtctctcggccactacaccgggcggcagttgatcctctactggaaggaagcgcaggccgc

SEQ ID NO: 438893 - DNA, 55 bp, Artificial
  Synthetic oligonucleotide
gtctctcggtcctttggagcctgctggaacaattgggacaacaggtcctgagagg

SEQ ID NO: 438894 - DNA, 60 bp, Artificial
  Synthetic oligonucleotide
gtctctctaactattgcaacagtgtgtttcctcatgcagattgccatcctagcaacgact

SEQ ID NO: 438895 - DNA, 60 bp, Artificial
  Synthetic oligonucleotide
gtctctctctagaattgatatgcgatagtttctctctctagcgaatcggtgtacaccgat

SEQ ID NO: 438896 - DNA, 60 bp, Artificial
  Synthetic oligonucleotide
gtctctctgagccccgacgaagcacttccagttaggtgtgaacttgaatgggatgtcgtc

SEQ ID NO: 438897 - DNA, 60 bp, Artificial
  Synthetic oligonucleotide
gtctctcttatacgtttacaactataaggtgtgctaatggctatgatcatacatgatccg

SEQ ID NO: 438898 - DNA, 55 bp, Artificial
  Synthetic oligonucleotide
gtctctctttcacgtgaggtatctgagaaaattgttcgtgatgcatacactgact

SEQ ID NO: 438899 - DNA, 60 bp, Artificial
  Synthetic oligonucleotide
gtctctctttgatgagttcttatctttactgaggactctcaatgagaagtaccgtgtctt

SEQ ID NO: 438900 - DNA, 54 bp, Artificial
  Synthetic oligonucleotide
gtctctgacatcacaggatgtacaatggtagatccaacaaatggaccattaccc

SEQ ID NO: 438901 - DNA, 57 bp, Artificial
  Synthetic oligonucleotide
gtctctgacgcagatgatgagacccccactacaaagtccacttcgtcacccccagaa

SEQ ID NO: 438902 - DNA, 60 bp, Artificial
  Synthetic oligonucleotide
gtctctgagactagcacaataatgccagtggaaaacagtcagttttggaaacactggatt

SEQ ID NO: 438903 - DNA, 59 bp, Artificial
  Synthetic oligonucleotide
gtctctgatggcatcctagtggccctttcaacggtgattggtcggccgatcaagaacct

SEQ ID NO: 438904 - DNA, 60 bp, Artificial
  Synthetic oligonucleotide
gtctctgctaaatcatttagctaccatagacttatccgcagccagtgattcgataagctt

SEQ ID NO: 438905 - DNA, 55 bp, Artificial
  Synthetic oligonucleotide
gtctctgctcgagactcatcctctttaccagaatccggagccagccgtgcctgtg

SEQ ID NO: 438906 - DNA, 60 bp, Artificial
  Synthetic oligonucleotide
gtctctggaactatgtacaaaatcgggatcatgacaagaagctgctatgttcaattgata

SEQ ID NO: 438907 - DNA, 56 bp, Artificial
  Synthetic oligonucleotide
gtctctggagagtattggtagcgaggggcccggtcatttacactactcggagcccg

SEQ ID NO: 438908 - DNA, 59 bp, Artificial
  Synthetic oligonucleotide
gtctctggagttacaagtagcaaacctaatacagtctctgccttcgttagatatcgtcc

SEQ ID NO: 438909 - DNA, 60 bp, Artificial
  Synthetic oligonucleotide
gtctctgtcatggacttgtcacagatgtattcccccgtctttgagtacctgtcaggtgat

SEQ ID NO: 438910 - DNA, 55 bp, Artificial
  Synthetic oligonucleotide
gtctctgtctttctccacataggctttgacatctgacgcgctcttagctccctga

SEQ ID NO: 438911 - DNA, 59 bp, Artificial
  Synthetic oligonucleotide
gtctctgtgcctgcagaaatcctgcgtcgctccaagaggttccccaaaccgctaccaat

SEQ ID NO: 438912 - DNA, 55 bp, Artificial
  Synthetic oligonucleotide
gtctctgtggggagattcatcaggttagtttgaacgccattttgacacactacga

SEQ ID NO: 438913 - DNA, 53 bp, Artificial
  Synthetic oligonucleotide
gtctcttaaggataaaagggtttgtgtatgtggaatagatccgtatcctaggg

SEQ ID NO: 438914 - DNA, 60 bp, Artificial
  Synthetic oligonucleotide
gtctcttacaatatagggtcacaggagtggtacaccacagtaccgcgatatgtggcaacc

SEQ ID NO: 438915 - DNA, 60 bp, Artificial
  Synthetic oligonucleotide
gtctcttccacacttgctctttctgcaaaagtagagttttatcttgaagcacagagtgtg

SEQ ID NO: 438916 - DNA, 60 bp, Artificial
  Synthetic oligonucleotide
gtctcttgcactcggcgcgtggtttcaggtttatatgcagggaataagtacgatctattg

SEQ ID NO: 438917 - DNA, 60 bp, Artificial
  Synthetic oligonucleotide
gtctcttgcagattttgtatgcgtcattcgaattgaggtggatggtccgtcctaatcaag

SEQ ID NO: 438918 - DNA, 56 bp, Artificial
  Synthetic oligonucleotide
gtctcttgcattcggtgcgtaccacccaccaataccgggggaaccacaccgcagag

SEQ ID NO: 438919 - DNA, 57 bp, Artificial
  Synthetic oligonucleotide
gtctcttgtacttctcggtcacaataccctgttccgtcaggtgcgtggcaatccggg

SEQ ID NO: 438920 - DNA, 56 bp, Artificial
  Synthetic oligonucleotide
gtctcttgtcccactctatgtaatagtcgaacgaagatgtcatatgcattgacgac

SEQ ID NO: 438921 - DNA, 53 bp, Artificial
  Synthetic oligonucleotide
gtctctttcacaggattcatcaaacaaataaatttgacggctagggaggctat

SEQ ID NO: 438922 - DNA, 57 bp, Artificial
  Synthetic oligonucleotide
gtctctttgtaaaacaagagccacataaacagagtaagcttgatgagggacgttacc

SEQ ID NO: 438923 - DNA, 60 bp, Artificial
  Synthetic oligonucleotide
gtctcttttccttggtttcatgagcatctcttaagaggcagaatatacagctgcaaagct

SEQ ID NO: 438924 - DNA, 54 bp, Artificial
  Synthetic oligonucleotide
gtctgaaaactatctacaatgaatatgagatagacacaccacgtatcacctaca

SEQ ID NO: 438925 - DNA, 60 bp, Artificial
  Synthetic oligonucleotide
gtctgaaaatatgggccagactgttgtcactcccttaagtctgaccctagatcactggaa

SEQ ID NO: 438926 - DNA, 60 bp, Artificial
  Synthetic oligonucleotide
gtctgaaagaagtcacaccacgtgacctctatgcaaaaatgaggcagctcctaccagaca

SEQ ID NO: 438927 - DNA, 58 bp, Artificial
  Synthetic oligonucleotide
gtctgaaagatttaattgtgcaaagagacagtgcgaagaattgtttgaaacagtgttc

SEQ ID NO: 438928 - DNA, 55 bp, Artificial
  Synthetic oligonucleotide
gtctgaaagtttattacgcagccaccaagtgttaagactatataagttctccagg

SEQ ID NO: 438929 - DNA, 55 bp, Artificial
  Synthetic oligonucleotide
gtctgaaatgttgttaaccaaattagcaataccatatcagtttgttgggcagtgg

SEQ ID NO: 438930 - DNA, 60 bp, Artificial
  Synthetic oligonucleotide
gtctgaacttcgacacccccgtgatgagccgtgttgctgcccccactgtcctcgtcacca

SEQ ID NO: 438931 - DNA, 55 bp, Artificial
  Synthetic oligonucleotide
gtctgaagatggtgatgtgtttgtggcacctatggttcggtttccagttaccctc

SEQ ID NO: 438932 - DNA, 55 bp, Artificial
  Synthetic oligonucleotide
gtctgaagggcgtcttgtggacctagggaggggactagttcgactcattcatttc

SEQ ID NO: 438933 - DNA, 55 bp, Artificial
  Synthetic oligonucleotide
gtctgaagtgccactggatatttcccagagtatctgtaagtatcctgactatgtg

SEQ ID NO: 438934 - DNA, 55 bp, Artificial
  Synthetic oligonucleotide
gtctgaattacaacatgcaatctcaggaaccagagatagggcagatgagaggagc

SEQ ID NO: 438935 - DNA, 60 bp, Artificial
  Synthetic oligonucleotide
gtctgaattgtgggtaacagtgtactatggggtacctgtctggagagatgcagagacagt

SEQ ID NO: 438936 - DNA, 55 bp, Artificial
  Synthetic oligonucleotide
gtctgacaagattgtgttcaaggtgaataatcaagttgtgtctttgaagcctgag

SEQ ID NO: 438937 - DNA, 56 bp, Artificial
  Synthetic oligonucleotide
gtctgaccttgcgtaatcgtcggcgtacgtgccgaattgcgcgtcgttttcgcctt

SEQ ID NO: 438938 - DNA, 55 bp, Artificial
  Synthetic oligonucleotide
gtctgacgaaaccttatgaagccgtcatatcaggtaatgattggatgacgttggg

SEQ ID NO: 438939 - DNA, 60 bp, Artificial
  Synthetic oligonucleotide
gtctgacgcgctttcctccatatcgtccgatctgtctgaggtcttatccgccctcggtga

SEQ ID NO: 438940 - DNA, 55 bp, Artificial
  Synthetic oligonucleotide
gtctgactcatcgtacatcaattccagtgtatccctgactagctcctctgtcccg

SEQ ID NO: 438941 - DNA, 55 bp, Artificial
  Synthetic oligonucleotide
gtctgagaataggttaatccagctgacatgccctgtgcctgtgcaaccctggtag

SEQ ID NO: 438942 - DNA, 55 bp, Artificial
  Synthetic oligonucleotide
gtctgagaccaacttaccgtaggaagtttgagaaggacatgaacgtgaaatgggg

SEQ ID NO: 438943 - DNA, 59 bp, Artificial
  Synthetic oligonucleotide
gtctgagacgatcgcaccccttactgtcttctctggacccaaggctctcacccctggcg

SEQ ID NO: 438944 - DNA, 58 bp, Artificial
  Synthetic oligonucleotide
gtctgagcttcatcgggttttaatggcagaaccagacgacagaacgataatctgggtt

SEQ ID NO: 438945 - DNA, 58 bp, Artificial
  Synthetic oligonucleotide
gtctgaggacttaacatggcgtatcaagaaagctcgtacaagaaccttgtgttcggtg

SEQ ID NO: 438946 - DNA, 60 bp, Artificial
  Synthetic oligonucleotide
gtctgaggcagatggtcccgggtctagtgtctggtcttgcagccggtgcagtcctctgta

SEQ ID NO: 438947 - DNA, 60 bp, Artificial
  Synthetic oligonucleotide
gtctgaggtgtgccgattcagcttctaccaggcattcggcattacgccagaccagcaaat

SEQ ID NO: 438948 - DNA, 57 bp, Artificial
  Synthetic oligonucleotide
gtctgaggtttgccaagtaggggtgtatcgaaaagtggcagggggtccagtgcaagc

SEQ ID NO: 438949 - DNA, 55 bp, Artificial
  Synthetic oligonucleotide
gtctgagtaaaatcgacaacatttacagctacccttgttgttgtgtgaccacaga

SEQ ID NO: 438950 - DNA, 53 bp, Artificial
  Synthetic oligonucleotide
gtctgagttcataggggagtatcggctcgaataccaatctaacgcgtcttatg

SEQ ID NO: 438951 - DNA, 56 bp, Artificial
  Synthetic oligonucleotide
gtctgatacacttagggatctgatacccaacgtcccaggttactccaacctattcc

SEQ ID NO: 438952 - DNA, 55 bp, Artificial
  Synthetic oligonucleotide
gtctgatagacaaacgtatgcaacgtcataacgaagctactttaggttcgtacac

SEQ ID NO: 438953 - DNA, 55 bp, Artificial
  Synthetic oligonucleotide
gtctgatcaaggcatcgttacagaagtgacacccatacagcccatgtacatcaat

SEQ ID NO: 438954 - DNA, 58 bp, Artificial
  Synthetic oligonucleotide
gtctgatcttattcttgcgcttaggaaagatatcggattccctgaaactactacgaaa

SEQ ID NO: 438955 - DNA, 60 bp, Artificial
  Synthetic oligonucleotide
gtctgatgacataagaaagctccttgaatcacaaggaaggaaggatatcaagttgatcga

SEQ ID NO: 438956 - DNA, 55 bp, Artificial
  Synthetic oligonucleotide
gtctgatgacgttaccatctccggcactcgtcggtcagtgaagctggagactgct

SEQ ID NO: 438957 - DNA, 60 bp, Artificial
  Synthetic oligonucleotide
gtctgatgagtgccggtttagcttctaccaggctttcggcatcacgccagaccagcagat

SEQ ID NO: 438958 - DNA, 60 bp, Artificial
  Synthetic oligonucleotide
gtctgatgctatttgtgatcgctctgactggtgtctcgatcaatgataatatccgatgtt

SEQ ID NO: 438959 - DNA, 55 bp, Artificial
  Synthetic oligonucleotide
gtctgatgctcaggttcacaattgtactacaaagtgccaaacccctcatggggcc

SEQ ID NO: 438960 - DNA, 60 bp, Artificial
  Synthetic oligonucleotide
gtctgatgctggagattatgtcaataccgataaagatggtcttgtctccggtaatcttga

SEQ ID NO: 438961 - DNA, 57 bp, Artificial
  Synthetic oligonucleotide
gtctgatggttcccggccccctcgtcaacttattcgagaatatcactgcctttcgtc

SEQ ID NO: 438962 - DNA, 51 bp, Artificial
  Synthetic oligonucleotide
gtctgatgtccctttagatgttgttcaagcaacatgcaaatatcctgatta

SEQ ID NO: 438963 - DNA, 55 bp, Artificial
  Synthetic oligonucleotide
gtctgatgtgcctctggatataaatactacaaccaccaaatatccagacttccta

SEQ ID NO: 438964 - DNA, 55 bp, Artificial
  Synthetic oligonucleotide
gtctgatgtgggagtgccaatagacatacctggcgaggatggcatcaacaggtgc

SEQ ID NO: 438965 - DNA, 60 bp, Artificial
  Synthetic oligonucleotide
gtctgattcgagattgcgcctaattgcaatgctgtatacacctcttagggcaaataattc

SEQ ID NO: 438966 - DNA, 58 bp, Artificial
  Synthetic oligonucleotide
gtctgcaagaagatacgtcttttgggggcaacctcgggcgagcagtcttccaggccaa

SEQ ID NO: 438967 - DNA, 60 bp, Artificial
  Synthetic oligonucleotide
gtctgcaatgagctttgcatcattgaggacacttgatttggttggttctgtgaacacccc

SEQ ID NO: 438968 - DNA, 57 bp, Artificial
  Synthetic oligonucleotide
gtctgcaattccattggtctggactggtcgaattgatattcccggttactatgaggc

SEQ ID NO: 438969 - DNA, 54 bp, Artificial
  Synthetic oligonucleotide
gtctgcacaccaactttgcctgcctctactataatacgagagtcgatcaaaagt

SEQ ID NO: 438970 - DNA, 60 bp, Artificial
  Synthetic oligonucleotide
gtctgcactcatcctgagaggatccgtagcccataagtcctgcttgcctgcttgtgtgta

SEQ ID NO: 438971 - DNA, 57 bp, Artificial
  Synthetic oligonucleotide
gtctgcagcgagtaccccgcaagtagtgctgagcgatataagcgggtgtctgtgccc

SEQ ID NO: 438972 - DNA, 55 bp, Artificial
  Synthetic oligonucleotide
gtctgcaggaccttgttggcaaaatccgtgttcaacagcctatacgcatccccgc

SEQ ID NO: 438973 - DNA, 60 bp, Artificial
  Synthetic oligonucleotide
gtctgcaggatacagggttggacccagtgtcttctggtgtagcacgtactagcgtcgagc

SEQ ID NO: 438974 - DNA, 57 bp, Artificial
  Synthetic oligonucleotide
gtctgcagggtatcctttatatcattcaggttacagatctcattaatttcaatggtg

SEQ ID NO: 438975 - DNA, 60 bp, Artificial
  Synthetic oligonucleotide
gtctgcaggtgttacacaagttccaggctactgtcactggtggacagtatgcgtccaagg

SEQ ID NO: 438976 - DNA, 51 bp, Artificial
  Synthetic oligonucleotide
gtctgccaacgtcccagtcaaagtgccccagccctccgtcccagcccccgc

SEQ ID NO: 438977 - DNA, 55 bp, Artificial
  Synthetic oligonucleotide
gtctgccaatgcatcggactacatccacgcaaattatgtgcgcagtttgagaagg

SEQ ID NO: 438978 - DNA, 60 bp, Artificial
  Synthetic oligonucleotide
gtctgccactgcatgcagcgatggacccggttggctaacactaggaatcactggcccaga

SEQ ID NO: 438979 - DNA, 60 bp, Artificial
  Synthetic oligonucleotide
gtctgcccattttgtggtatgttgcacaagaggcatgatttgaagatgtcaggagatatg

SEQ ID NO: 438980 - DNA, 55 bp, Artificial
  Synthetic oligonucleotide
gtctgcccctacatctgtgtgcggttttaacccgatgagctcgtttacataaccc

SEQ ID NO: 438981 - DNA, 60 bp, Artificial
  Synthetic oligonucleotide
gtctgccgatatgtgtgccacatgattgagaggagctttcacgaggaacgaaataatgaa

SEQ ID NO: 438982 - DNA, 56 bp, Artificial
  Synthetic oligonucleotide
gtctgccgctgatgcttatcgtccaggtggcaagctgcccctagatgagcttatgc

SEQ ID NO: 438983 - DNA, 54 bp, Artificial
  Synthetic oligonucleotide
gtctgccggaaaggatgaaggtcctttagtttcacttgctaaacataatggcaa

SEQ ID NO: 438984 - DNA, 55 bp, Artificial
  Synthetic oligonucleotide
gtctgccttgaaagatggatctaaaatcaagcacgcagtatctagagggtccagt

SEQ ID NO: 438985 - DNA, 50 bp, Artificial
  Synthetic oligonucleotide
gtctgcgaccctttgccgcagagtgtcacatgtaaagcatcgttcggtca

SEQ ID NO: 438986 - DNA, 54 bp, Artificial
  Synthetic oligonucleotide
gtctgcgactagcacatacgttcgggtgtcgaagagcgatgaagggttcgtcaa

SEQ ID NO: 438987 - DNA, 53 bp, Artificial
  Synthetic oligonucleotide
gtctgcgatctgcagacgaaggttcatccagcgagcgagatgtgcgtcctccc

SEQ ID NO: 438988 - DNA, 57 bp, Artificial
  Synthetic oligonucleotide
gtctgcgcacattagtattctattttcgatgcgggtaaattgttattcggtgcacgt

SEQ ID NO: 438989 - DNA, 55 bp, Artificial
  Synthetic oligonucleotide
gtctgcggaagctaggggcatgatggaagaaatgagacaaggattctacgctcag

SEQ ID NO: 438990 - DNA, 58 bp, Artificial
  Synthetic oligonucleotide
gtctgcggatgtttcagaaaaaactgctgataagtttcgttctttgtctggtggatcc

SEQ ID NO: 438991 - DNA, 60 bp, Artificial
  Synthetic oligonucleotide
gtctgcggatttggaggttatcaccagcacatgggtcctcgtgggtggagtcctagccgc

SEQ ID NO: 438992 - DNA, 55 bp, Artificial
  Synthetic oligonucleotide
gtctgcgtcctcacagactgaatatgaggcttatcccctagcaccgttggagaac

SEQ ID NO: 438993 - DNA, 59 bp, Artificial
  Synthetic oligonucleotide
gtctgcgtttgctcggaccctgtctcgtgtgtcaccattacgcattaatcccaccctaa

SEQ ID NO: 438994 - DNA, 51 bp, Artificial
  Synthetic oligonucleotide
gtctgctaaccccttttgcggggagagtaccctttatacccgtacctggtc

SEQ ID NO: 438995 - DNA, 55 bp, Artificial
  Synthetic oligonucleotide
gtctgctacacagttatatcaaacctgcaaagcttctggtacatgtcctcctgat

SEQ ID NO: 438996 - DNA, 60 bp, Artificial
  Synthetic oligonucleotide
gtctgctagctatctccagaatgaccaagtcgaggcaactccatacttcctaatacctag

SEQ ID NO: 438997 - DNA, 60 bp, Artificial
  Synthetic oligonucleotide
gtctgctcgatcgaactgggaaactgaagggttataggagtggcgtctgtagtgagcgta

SEQ ID NO: 438998 - DNA, 60 bp, Artificial
  Synthetic oligonucleotide
gtctgctctcttgagaatgcaggcgaatcgctctatcagctgatcgtttagcaaaatctc

SEQ ID NO: 438999 - DNA, 50 bp, Artificial
  Synthetic oligonucleotide
gtctgctgaaaatgactatgtgcagatggtttgttttgaccacaatatgc

SEQ ID NO: 439000 - DNA, 55 bp, Artificial
  Synthetic oligonucleotide
gtctgctgccatgggtggagacattgggatttatgtttctcacaccagtgattct

SEQ ID NO: 439001 - DNA, 55 bp, Artificial
  Synthetic oligonucleotide
gtctgctgcttgatacgtggtactcctggttgtggtaaatcacttgtgacttctg

SEQ ID NO: 439002 - DNA, 55 bp, Artificial
  Synthetic oligonucleotide
gtctgctggatggtatccgtaactcagtattaccggtcagagcagttggaactga

SEQ ID NO: 439003 - DNA, 60 bp, Artificial
  Synthetic oligonucleotide
gtctgcttcaaaacagccaggtcttcagtctcattagaccaaatgagaatccagcacaca

SEQ ID NO: 439004 - DNA, 60 bp, Artificial
  Synthetic oligonucleotide
gtctgcttcagaacagtcaagtcttcagcctcattaggccgaatgaaaatccagcacaca

SEQ ID NO: 439005 - DNA, 60 bp, Artificial
  Synthetic oligonucleotide
gtctgcttctagttcacgccaactcttcgactgcggcagtcttgactggccaaataagag

SEQ ID NO: 439006 - DNA, 55 bp, Artificial
  Synthetic oligonucleotide
gtctggaaaaaactggacgaacaattggctgcaaggaacgaggccataaaggacc

SEQ ID NO: 439007 - DNA, 55 bp, Artificial
  Synthetic oligonucleotide
gtctggaaagttacgatcatttggaggaatttaggatttctctgatggacgtagc

SEQ ID NO: 439008 - DNA, 58 bp, Artificial
  Synthetic oligonucleotide
gtctggaatctatttgagacatcaataaaaccatgtgtcaaactaacacctctatgtg

SEQ ID NO: 439009 - DNA, 60 bp, Artificial
  Synthetic oligonucleotide
gtctggacatgttcaacttcagacgatgccagaaagtggaatcagggtcattttgtaact

SEQ ID NO: 439010 - DNA, 55 bp, Artificial
  Synthetic oligonucleotide
gtctggacggattaagaaagaagagttctctgagatcataaggatctgttccacc

SEQ ID NO: 439011 - DNA, 55 bp, Artificial
  Synthetic oligonucleotide
gtctggacttaccgttgtcaagactgcctcaaacagggtatgtcttgctggcagt

SEQ ID NO: 439012 - DNA, 58 bp, Artificial
  Synthetic oligonucleotide
gtctggagacgtcggagaactactagatatgctagacgacgcagagtaaggagactga

SEQ ID NO: 439013 - DNA, 60 bp, Artificial
  Synthetic oligonucleotide
gtctggagatatgacagaaacctggcaacaagacacatagctcgagagctacatccggag

SEQ ID NO: 439014 - DNA, 55 bp, Artificial
  Synthetic oligonucleotide
gtctggagcccgcagcaatgtcacatttactgtgaaccaaacatctcgcctcctg

SEQ ID NO: 439015 - DNA, 55 bp, Artificial
  Synthetic oligonucleotide
gtctggaggccttcctccgacaagtacggtcggattctcgcagacctgtcgaccg

SEQ ID NO: 439016 - DNA, 52 bp, Artificial
  Synthetic oligonucleotide
gtctggaggtgcggtgtcactacatccctctggagttacattatctacacaa

SEQ ID NO: 439017 - DNA, 56 bp, Artificial
  Synthetic oligonucleotide
gtctggataacaggaggttcataaggggatcctgtccgaacgggatcacgggagtg

SEQ ID NO: 439018 - DNA, 55 bp, Artificial
  Synthetic oligonucleotide
gtctggatcaaaacacgtagtgaaggtgtagtgtgtgtccccaatagtggcaccg

SEQ ID NO: 439019 - DNA, 60 bp, Artificial
  Synthetic oligonucleotide
gtctggatgccgcggtcactagaggccgcatcaccggaacaaccgctgcagaggctgtta

SEQ ID NO: 439020 - DNA, 56 bp, Artificial
  Synthetic oligonucleotide
gtctggattctccgccaattcaagttaataaggcgaacatcggcttaaccgaacaa

SEQ ID NO: 439021 - DNA, 58 bp, Artificial
  Synthetic oligonucleotide
gtctggatttcccttatgtttactggcattctggcgattatgatatgcacgactaccg

SEQ ID NO: 439022 - DNA, 58 bp, Artificial
  Synthetic oligonucleotide
gtctggcaaggtccgcagttggaacctacaaggtcataatacaggacgataggttgaa

SEQ ID NO: 439023 - DNA, 60 bp, Artificial
  Synthetic oligonucleotide
gtctggcaatgccatcgtgttaatgtcacgttcatggcgtggaatgagtccacctattac

SEQ ID NO: 439024 - DNA, 60 bp, Artificial
  Synthetic oligonucleotide
gtctggcagaggtcttgggcatattggcgtgaggaacagggcatgtcaactagctatgcc

SEQ ID NO: 439025 - DNA, 51 bp, Artificial
  Synthetic oligonucleotide
gtctggcagcccacatagtacaagattgaccggagtcttggtgattcctag

SEQ ID NO: 439026 - DNA, 57 bp, Artificial
  Synthetic oligonucleotide
gtctggccgacaagggagtacaccgactttcgtgagtacttcatggaggtggccgac

SEQ ID NO: 439027 - DNA, 55 bp, Artificial
  Synthetic oligonucleotide
gtctggccttctcattaatgaaatctttaggaggaggtaggagaggtacgggagc

SEQ ID NO: 439028 - DNA, 60 bp, Artificial
  Synthetic oligonucleotide
gtctggcgataccaaggggtgcatccactgctcctgcgactcccccgactgcgtccacac

SEQ ID NO: 439029 - DNA, 55 bp, Artificial
  Synthetic oligonucleotide
gtctggcgatgctgctattgtgccccgcccaaacatgggtgtcgagagtagggcc

SEQ ID NO: 439030 - DNA, 50 bp, Artificial
  Synthetic oligonucleotide
gtctggctcagtgtctcttgaagatgtcaaatgcctctatgatgagagtg

SEQ ID NO: 439031 - DNA, 55 bp, Artificial
  Synthetic oligonucleotide
gtctggctctaaattgcttgacttacagccgctgataagctgctgctacaacggg

SEQ ID NO: 439032 - DNA, 60 bp, Artificial
  Synthetic oligonucleotide
gtctggctgacaagaataggctactgaatcaaacgatgagaggaggaggttaatggggcc

SEQ ID NO: 439033 - DNA, 55 bp, Artificial
  Synthetic oligonucleotide
gtctggctggaagcgcaagaggaaggggatgtaggctttccagtcaggccacaag

SEQ ID NO: 439034 - DNA, 55 bp, Artificial
  Synthetic oligonucleotide
gtctggcttagatttagggatactatgctagcattggaatccatgtgggttctga

SEQ ID NO: 439035 - DNA, 55 bp, Artificial
  Synthetic oligonucleotide
gtctggcttcctgggtgggcaataatttggaggacccagcatctagagaacgagt

SEQ ID NO: 439036 - DNA, 55 bp, Artificial
  Synthetic oligonucleotide
gtctgggaacaatggtgggcagattattggcaggtaacatggataccagaatggg

SEQ ID NO: 439037 - DNA, 60 bp, Artificial
  Synthetic oligonucleotide
gtctgggaggatcataacagtgccggagctttcagagtggttataccacgcgtattgtcc

SEQ ID NO: 439038 - DNA, 54 bp, Artificial
  Synthetic oligonucleotide
gtctgggatcctggcatgtcctcttcgacaggatctaaccaatgagtgtttagt

SEQ ID NO: 439039 - DNA, 60 bp, Artificial
  Synthetic oligonucleotide
gtctgggattgtcacatactttacatgcttcaggtgcagttgtaaattctaaatataatg

SEQ ID NO: 439040 - DNA, 55 bp, Artificial
  Synthetic oligonucleotide
gtctgggcatctgtacgtgtcactggttacggacaaatacgtggcggatttgcgc

SEQ ID NO: 439041 - DNA, 55 bp, Artificial
  Synthetic oligonucleotide
gtctgggcatgtgtaggccttgaaataggtaggggacagccattgggtgttggcg

SEQ ID NO: 439042 - DNA, 52 bp, Artificial
  Synthetic oligonucleotide
gtctgggcgggacgtgggagtggtcaccctcagatgctgcatataagcagct

SEQ ID NO: 439043 - DNA, 55 bp, Artificial
  Synthetic oligonucleotide
gtctgggctattagaggcttagaattttgcagaggtcaacccctaggaatagggg

SEQ ID NO: 439044 - DNA, 60 bp, Artificial
  Synthetic oligonucleotide
gtctggggaaatagccattataacagaaagcgatccaatatctgatgttaccactactgg

SEQ ID NO: 439045 - DNA, 55 bp, Artificial
  Synthetic oligonucleotide
gtctggggaagagtgaatgtctatcgcaatactatcaattgaattgcaaagtgag

SEQ ID NO: 439046 - DNA, 55 bp, Artificial
  Synthetic oligonucleotide
gtctggggagactccgatggggtggtctcgggtttattccctatcaacgtcacag

SEQ ID NO: 439047 - DNA, 51 bp, Artificial
  Synthetic oligonucleotide
gtctggggccgcaatggtgatcgcacattcagccactacgtcgtgccccag

SEQ ID NO: 439048 - DNA, 53 bp, Artificial
  Synthetic oligonucleotide
gtctggggtccgccagacgacggctcatagtatttgataccgtggatcccgaa

SEQ ID NO: 439049 - DNA, 54 bp, Artificial
  Synthetic oligonucleotide
gtctggggtgctcccagtttgaatccgtgttttcccagaatcctccctccggtc

SEQ ID NO: 439050 - DNA, 55 bp, Artificial
  Synthetic oligonucleotide
gtctgggtattctggtatattctctgttgaaggcaaaagctgcatcaacaggtgt

SEQ ID NO: 439051 - DNA, 60 bp, Artificial
  Synthetic oligonucleotide
gtctgggttccaatctctcgggatgggtactcagctcgctgtcgtgagtggcgcggctgc

SEQ ID NO: 439052 - DNA, 60 bp, Artificial
  Synthetic oligonucleotide
gtctggtaattcaattaagcccagtgatgagccgaagatgtcatcccaacggctgcacga

SEQ ID NO: 439053 - DNA, 55 bp, Artificial
  Synthetic oligonucleotide
gtctggtacggtaacggcccacattataccgtacacgcaaacatcggattatcga

SEQ ID NO: 439054 - DNA, 54 bp, Artificial
  Synthetic oligonucleotide
gtctggtattacgtgctggagtgtcgtagccgcatcagtaggctcgagtctgca

SEQ ID NO: 439055 - DNA, 58 bp, Artificial
  Synthetic oligonucleotide
gtctggtcctcggtacagacttccgccgctaccgctatgtcgtcggtagccgctacga

SEQ ID NO: 439056 - DNA, 55 bp, Artificial
  Synthetic oligonucleotide
gtctggtcgatgaggctagaagtaccccacaggtaactgtgttctagcctgcgtg

SEQ ID NO: 439057 - DNA, 58 bp, Artificial
  Synthetic oligonucleotide
gtctggtctgtttagacgccgtcaggcgtcgaggcgtctgtttgccgaaaagccacgc

SEQ ID NO: 439058 - DNA, 60 bp, Artificial
  Synthetic oligonucleotide
gtctggtgactcagtcaatgctgtcatctcccagagagctaagaatcgtgacaggtttga

SEQ ID NO: 439059 - DNA, 60 bp, Artificial
  Synthetic oligonucleotide
gtctggtgagtgcctcccatttaagaacacaatgaatacttatgaaggttgtgtcccaca

SEQ ID NO: 439060 - DNA, 55 bp, Artificial
  Synthetic oligonucleotide
gtctggtgataatatacataagtttgccaacggcggtagttacgccgacggttcc

SEQ ID NO: 439061 - DNA, 58 bp, Artificial
  Synthetic oligonucleotide
gtctggtgtgccgctgactcgggccacgccggctaaacctccagtggtgaggccggta

SEQ ID NO: 439062 - DNA, 55 bp, Artificial
  Synthetic oligonucleotide
gtctggtgtgcgtatcaaggaaggtttctctccgctcacgctggagattgcctcc

SEQ ID NO: 439063 - DNA, 55 bp, Artificial
  Synthetic oligonucleotide
gtctggtgttcaactctgtgcctactcctctgatgtacatagtcatccttgttgt

SEQ ID NO: 439064 - DNA, 60 bp, Artificial
  Synthetic oligonucleotide
gtctggttacagcggaagtttcagcattagaggagagacaacaggcaggaattgcactgt

SEQ ID NO: 439065 - DNA, 60 bp, Artificial
  Synthetic oligonucleotide
gtctggttattctggcatcttctctgttgaaaccaaaagctgcatcaataggtgttttta

SEQ ID NO: 439066 - DNA, 58 bp, Artificial
  Synthetic oligonucleotide
gtctggttgtcctcttggcgattcggtgttgtaccttgataggaacttgagtagagtg

SEQ ID NO: 439067 - DNA, 57 bp, Artificial
  Synthetic oligonucleotide
gtctgtaaatactcgttttagctttcctagtgtaagctcctgtttagcaggtcgtgc

SEQ ID NO: 439068 - DNA, 56 bp, Artificial
  Synthetic oligonucleotide
gtctgtaatcacgggggagtcttatggtgaaactgtcaaacaagcggtattattaa

SEQ ID NO: 439069 - DNA, 60 bp, Artificial
  Synthetic oligonucleotide
gtctgtaatgatagttggcaacaatcattacttatagctatatataaccggaagagatac

SEQ ID NO: 439070 - DNA, 55 bp, Artificial
  Synthetic oligonucleotide
gtctgtaattactcctcaagatttgttacaatttcctcaacctaaaagaattcca

SEQ ID NO: 439071 - DNA, 53 bp, Artificial
  Synthetic oligonucleotide
gtctgtacacccactaaggaggaagcatgacgccgcaagaacgattccagata

SEQ ID NO: 439072 - DNA, 55 bp, Artificial
  Synthetic oligonucleotide
gtctgtacatcaatcgtctgttccaatacattatccaatacatgatacacagctc

SEQ ID NO: 439073 - DNA, 60 bp, Artificial
  Synthetic oligonucleotide
gtctgtaccgcatttgcccggactttaagcaaatggatggtagtgttgatgagaccacta

SEQ ID NO: 439074 - DNA, 59 bp, Artificial
  Synthetic oligonucleotide
gtctgtagcgtgcataaacagatagatcgcctttttaggtaaccgcggattgatcaccg

SEQ ID NO: 439075 - DNA, 55 bp, Artificial
  Synthetic oligonucleotide
gtctgtataaacatcccggtgttccagtaaaatggaagagataagaggacccacc

SEQ ID NO: 439076 - DNA, 60 bp, Artificial
  Synthetic oligonucleotide
gtctgtatacggccgagctccaaaaactactcaaaccagcaagggcggcacactcatcga

SEQ ID NO: 439077 - DNA, 55 bp, Artificial
  Synthetic oligonucleotide
gtctgtatcgatcgtgccagcctatccacttggcacgtcctatactctcccaacg

SEQ ID NO: 439078 - DNA, 57 bp, Artificial
  Synthetic oligonucleotide
gtctgtatcgtcgtctccggttggttgcccgcctacgacgataatatagactccgcg

SEQ ID NO: 439079 - DNA, 53 bp, Artificial
  Synthetic oligonucleotide
gtctgtatgggcccgcatccgtctatcccccgaacgcatactaacgtgcctcg

SEQ ID NO: 439080 - DNA, 54 bp, Artificial
  Synthetic oligonucleotide
gtctgtattcccgactggttatttctacttttcgtatttagtacgattcttcag

SEQ ID NO: 439081 - DNA, 55 bp, Artificial
  Synthetic oligonucleotide
gtctgtattctatgacgcaatggtctattttcatacagctacgactgagccgtgc

SEQ ID NO: 439082 - DNA, 52 bp, Artificial
  Synthetic oligonucleotide
gtctgtcaacaggtgtggtacagacttcacacccagtgactcaattttacca

SEQ ID NO: 439083 - DNA, 58 bp, Artificial
  Synthetic oligonucleotide
gtctgtcaataatcgtaagccgttgctttgtcctgaaggtcactaggtcctcttgtag

SEQ ID NO: 439084 - DNA, 55 bp, Artificial
  Synthetic oligonucleotide
gtctgtcacgtctcgcgccatagctagcgtgacattggttgatttggacccttcc

SEQ ID NO: 439085 - DNA, 60 bp, Artificial
  Synthetic oligonucleotide
gtctgtcaggtgagccttacagaatgtggaacattcttgacagcaataaaggcatgcgac

SEQ ID NO: 439086 - DNA, 57 bp, Artificial
  Synthetic oligonucleotide
gtctgtcataacagacggcacttgactaaagtcggttggcttgtaaaacgacgtgta

SEQ ID NO: 439087 - DNA, 55 bp, Artificial
  Synthetic oligonucleotide
gtctgtccattagatactacaagtaatggaatcggatgttcaccagctagtacag

SEQ ID NO: 439088 - DNA, 55 bp, Artificial
  Synthetic oligonucleotide
gtctgtccatttggtatagctaacgctccatgtgcatttcaaagatttatgcagg

SEQ ID NO: 439089 - DNA, 54 bp, Artificial
  Synthetic oligonucleotide
gtctgtccccacacgacagataatcgggtgcaactcccgccccttttccgaggg

SEQ ID NO: 439090 - DNA, 53 bp, Artificial
  Synthetic oligonucleotide
gtctgtcccttccggtggtgtttgtgaactgctgggctcctatgctcgaggcg

SEQ ID NO: 439091 - DNA, 55 bp, Artificial
  Synthetic oligonucleotide
gtctgtcgattcacttttagacttttcgccttccggaggagaagtggatttagat

SEQ ID NO: 439092 - DNA, 60 bp, Artificial
  Synthetic oligonucleotide
gtctgtctatccaagtggaataatcctcctaaaggagagtgcaagatgtctcatgctctc

SEQ ID NO: 439093 - DNA, 55 bp, Artificial
  Synthetic oligonucleotide
gtctgtctccgaacatagcgaaacggaggttcaggccaggtttcggtttgttcag

SEQ ID NO: 439094 - DNA, 60 bp, Artificial
  Synthetic oligonucleotide
gtctgtctccgttgactgccttatccgcagatcggactgtccgccacgttaacgtatcta

SEQ ID NO: 439095 - DNA, 60 bp, Artificial
  Synthetic oligonucleotide
gtctgtctgaggttgagagcctgtcctacaacagcctgatgtctctgacaacgaaccccc

SEQ ID NO: 439096 - DNA, 60 bp, Artificial
  Synthetic oligonucleotide
gtctgtctggccgcgcagcgggatctctcacatttctttcagcccatgaagaaatgtagc

SEQ ID NO: 439097 - DNA, 60 bp, Artificial
  Synthetic oligonucleotide
gtctgtcttccggccctacgtgcacgtgcagagcacccctcaggcagtgaccacgatcaa

SEQ ID NO: 439098 - DNA, 60 bp, Artificial
  Synthetic oligonucleotide
gtctgtctttttggtacatctatatcagacaatgttctaaatcttattcgcggtaatcac

SEQ ID NO: 439099 - DNA, 60 bp, Artificial
  Synthetic oligonucleotide
gtctgtgaactgtttagataagatcttaaccgtcggtgctcggaaagcaatatccacaga

SEQ ID NO: 439100 - DNA, 60 bp, Artificial
  Synthetic oligonucleotide
gtctgtgaccagtcaaatcatcgctcaggcagtttctaagctctcttttggccgccaatc

SEQ ID NO: 439101 - DNA, 55 bp, Artificial
  Synthetic oligonucleotide
gtctgtgacctgcctttatgcactccttatgcagtcgttagcgtcccgaaacgtg

SEQ ID NO: 439102 - DNA, 55 bp, Artificial
  Synthetic oligonucleotide
gtctgtgactctgatggattgcttcttcggtccgtcggattttgttcacaccaca

SEQ ID NO: 439103 - DNA, 55 bp, Artificial
  Synthetic oligonucleotide
gtctgtgagataatattacaggtgccactcccagcacgtttactcggtcttcgag

SEQ ID NO: 439104 - DNA, 59 bp, Artificial
  Synthetic oligonucleotide
gtctgtgagggattttgtgtataaacaaacgaaatgtgaaggatcatatccggttgtgc

SEQ ID NO: 439105 - DNA, 55 bp, Artificial
  Synthetic oligonucleotide
gtctgtgatgcaagaaaacagtatgtgtgtgctctcttaagtcttatttattggc

SEQ ID NO: 439106 - DNA, 55 bp, Artificial
  Synthetic oligonucleotide
gtctgtgatttgtaaagcaactctcaatgccatatatgccaacacttgacttatc

SEQ ID NO: 439107 - DNA, 54 bp, Artificial
  Synthetic oligonucleotide
gtctgtgccatcgcgaacattttaccggaagtttcgagtttaactttcgtggac

SEQ ID NO: 439108 - DNA, 60 bp, Artificial
  Synthetic oligonucleotide
gtctgtgccgctatataacgttctctctaaatatactgcggagagatcaagagggcagac

SEQ ID NO: 439109 - DNA, 53 bp, Artificial
  Synthetic oligonucleotide
gtctgtgcctcctccgcttggaagccaactggttacgttcccgaatctggaga

SEQ ID NO: 439110 - DNA, 55 bp, Artificial
  Synthetic oligonucleotide
gtctgtgcgtgaaagactagaggaaatcatcaggcacagctacccctccgtacag

SEQ ID NO: 439111 - DNA, 60 bp, Artificial
  Synthetic oligonucleotide
gtctgtggctccaaatttgaaacatcggacagaatgaggatgcaccgagaatcagggtta

SEQ ID NO: 439112 - DNA, 55 bp, Artificial
  Synthetic oligonucleotide
gtctgtggttgtagagcttgatagaaacatcttggtaaaagcattgggtccgaac

SEQ ID NO: 439113 - DNA, 55 bp, Artificial
  Synthetic oligonucleotide
gtctgtggttttgaaccgaacggtgcccgcagttacggaggcatcggctgtagga

SEQ ID NO: 439114 - DNA, 55 bp, Artificial
  Synthetic oligonucleotide
gtctgtgtctcggattttataaggggtactgggcttacccatcgcctgggtaagc

SEQ ID NO: 439115 - DNA, 60 bp, Artificial
  Synthetic oligonucleotide
gtctgtgtggatgattttaacaatcaattctactcgaagcacacacttgctccgtggagt

SEQ ID NO: 439116 - DNA, 55 bp, Artificial
  Synthetic oligonucleotide
gtctgtgtggtgatggatgcaactcttcaaatggctagtggggagcgcaggctta

SEQ ID NO: 439117 - DNA, 60 bp, Artificial
  Synthetic oligonucleotide
gtctgtgttaatagtatcactgttacaacgattaagatctccaccagaacatatttgtaa

SEQ ID NO: 439118 - DNA, 57 bp, Artificial
  Synthetic oligonucleotide
gtctgttaatactttaactagctttatattgttaagcaaagtagcaactagttgcac

SEQ ID NO: 439119 - DNA, 59 bp, Artificial
  Synthetic oligonucleotide
gtctgttaccgctgttggatttatgcgaagtgaaggatgagttggttgccgcaacgaat

SEQ ID NO: 439120 - DNA, 60 bp, Artificial
  Synthetic oligonucleotide
gtctgttagaataatgaagattcgtgagcccagttacgctgatttacgagagatggacga

SEQ ID NO: 439121 - DNA, 58 bp, Artificial
  Synthetic oligonucleotide
gtctgttaggcaggaatacgcgataccagttggaccagtttttccaccaggcatgaac

SEQ ID NO: 439122 - DNA, 57 bp, Artificial
  Synthetic oligonucleotide
gtctgttagtaaacctacgcttagccagttagcccataatctaagtattgttagaga

SEQ ID NO: 439123 - DNA, 60 bp, Artificial
  Synthetic oligonucleotide
gtctgttcaatgcatatgtggtccccatatttattgtcgtactgtttgataatgcgcatg

SEQ ID NO: 439124 - DNA, 58 bp, Artificial
  Synthetic oligonucleotide
gtctgttgcccaagatacagctcgtataacgttattgagacaaataactcctaaccta

SEQ ID NO: 439125 - DNA, 54 bp, Artificial
  Synthetic oligonucleotide
gtctgttgctataacctgtcaaaaggatactactcccgctgagaaaaaggatcc

SEQ ID NO: 439126 - DNA, 60 bp, Artificial
  Synthetic oligonucleotide
gtctgttggacacattaccatggctggcataattaacttgagcaacacacccactgccag

SEQ ID NO: 439127 - DNA, 53 bp, Artificial
  Synthetic oligonucleotide
gtctgttgggaagctgagatcaattgtggagatgtcaggtcttccattcagtt

SEQ ID NO: 439128 - DNA, 55 bp, Artificial
  Synthetic oligonucleotide
gtctgttggtgttgtcgatgggtccattctcatggactgtgaacgaaagtgttcc

SEQ ID NO: 439129 - DNA, 55 bp, Artificial
  Synthetic oligonucleotide
gtctgtttaacgtggaatactgtaaagcggcgtcttattcttgggatcctaagcc

SEQ ID NO: 439130 - DNA, 55 bp, Artificial
  Synthetic oligonucleotide
gtctgtttacattctgtgaaacagtctggctttacatttgtagccacctaggagg

SEQ ID NO: 439131 - DNA, 56 bp, Artificial
  Synthetic oligonucleotide
gtctgtttactggtaaggacccgttgatgggtccttgtcatagtttggtagctctg

SEQ ID NO: 439132 - DNA, 57 bp, Artificial
  Synthetic oligonucleotide
gtctgtttccaattgtcactagatgttcctatcataaatacgggcctagcggtaagg

SEQ ID NO: 439133 - DNA, 58 bp, Artificial
  Synthetic oligonucleotide
gtctgtttgcttgctaataaggaactgaaaggtgactttgcaggtgtaccctcagtat

SEQ ID NO: 439134 - DNA, 51 bp, Artificial
  Synthetic oligonucleotide
gtctgttttcaccttttgtaggtttgaatagttttattgaccctaaattgt

SEQ ID NO: 439135 - DNA, 56 bp, Artificial
  Synthetic oligonucleotide
gtcttaaataccctcaagaaacgaccagtcggaggctgtgaggtcatccaaattcg

SEQ ID NO: 439136 - DNA, 55 bp, Artificial
  Synthetic oligonucleotide
gtcttaacccaattggaaggtgaagagtgggtaagtgccactattgctttacgaa

SEQ ID NO: 439137 - DNA, 60 bp, Artificial
  Synthetic oligonucleotide
gtcttaaggcactaccgcgacatatgagaccaacagccacatggagatttggcatgtgag

SEQ ID NO: 439138 - DNA, 51 bp, Artificial
  Synthetic oligonucleotide
gtcttaagtaaatcagatcctaggcttgaagaacctgtcgagtgcctaatt

SEQ ID NO: 439139 - DNA, 60 bp, Artificial
  Synthetic oligonucleotide
gtcttaatgaaggacattcaaagccaattcgagcagctgaaactgcgatgggagtcttat

SEQ ID NO: 439140 - DNA, 54 bp, Artificial
  Synthetic oligonucleotide
gtcttaattacctcaatatgagtaggctctttgtcaggaatatcggggatcccg

SEQ ID NO: 439141 - DNA, 58 bp, Artificial
  Synthetic oligonucleotide
gtcttacaagatgtcgaggtacccattgaaatcatctcctagatttcttcggaagggc

SEQ ID NO: 439142 - DNA, 55 bp, Artificial
  Synthetic oligonucleotide
gtcttacaatgcagaacttctggtggccttggaaaaccagcatacaattgatctg

SEQ ID NO: 439143 - DNA, 55 bp, Artificial
  Synthetic oligonucleotide
gtcttacaatgcggacgttcttgtcgctctagaaaaccaacatacaattgacctg

SEQ ID NO: 439144 - DNA, 55 bp, Artificial
  Synthetic oligonucleotide
gtcttacagaaagtatggtgctcgaaagagtacatcctacaagggaaagcctcat

SEQ ID NO: 439145 - DNA, 60 bp, Artificial
  Synthetic oligonucleotide
gtcttacagagtcggatacttgtgtgcaggtctccccagtgacaccccaagaggagaaga

SEQ ID NO: 439146 - DNA, 60 bp, Artificial
  Synthetic oligonucleotide
gtcttacagggtatcaggcaggtcatacgcttactcatcacaaaacacaagtgtggaaca

SEQ ID NO: 439147 - DNA, 52 bp, Artificial
  Synthetic oligonucleotide
gtcttacatgaactatttaaccctagcttaaaagtgacccaaattacgaccc

SEQ ID NO: 439148 - DNA, 50 bp, Artificial
  Synthetic oligonucleotide
gtcttaccattatcaatacaatactcatcgtgagagcaatgaatgcgtgt

SEQ ID NO: 439149 - DNA, 57 bp, Artificial
  Synthetic oligonucleotide
gtcttacccagttgggtgatagagtgggattgcttgaaggaggacttacaggattac

SEQ ID NO: 439150 - DNA, 60 bp, Artificial
  Synthetic oligonucleotide
gtcttacgaacagcgtcatgatatttctcatgttgggaaggttatgtgcatttctgacgt

SEQ ID NO: 439151 - DNA, 60 bp, Artificial
  Synthetic oligonucleotide
gtcttactcatatcatgatttggcattccaatctgaatgatgccacgtaccagagaacaa

SEQ ID NO: 439152 - DNA, 54 bp, Artificial
  Synthetic oligonucleotide
gtcttactgcagatgtattaggtgaatgtactcaggcttcctgctcaaattctg

SEQ ID NO: 439153 - DNA, 55 bp, Artificial
  Synthetic oligonucleotide
gtcttactgtatatggcttctacataaggtcggtacccctgaaatagggatcctg

SEQ ID NO: 439154 - DNA, 60 bp, Artificial
  Synthetic oligonucleotide
gtcttagatgtagtcagaggcaacttgtatgttgaacatctggaccccactaggctggca

SEQ ID NO: 439155 - DNA, 50 bp, Artificial
  Synthetic oligonucleotide
gtcttagccgtgatggggttgcctaaagcttgtttcgcaaaccagcgggt

SEQ ID NO: 439156 - DNA, 60 bp, Artificial
  Synthetic oligonucleotide
gtcttagctgacactctgtccaggttagttaacactttgcaggatttgccatggctagat

SEQ ID NO: 439157 - DNA, 57 bp, Artificial
  Synthetic oligonucleotide
gtcttaggaactgttttcgatttgggtaatatgagaccaatccctgacgtgccagcc

SEQ ID NO: 439158 - DNA, 60 bp, Artificial
  Synthetic oligonucleotide
gtcttaggaattctaggattcctcgggctggcaggatctgcaatgggcacagtatcaaca

SEQ ID NO: 439159 - DNA, 55 bp, Artificial
  Synthetic oligonucleotide
gtcttaggcgtgacatttccccacccttagactgtatcatttatgtcgaacaact

SEQ ID NO: 439160 - DNA, 54 bp, Artificial
  Synthetic oligonucleotide
gtcttagggtacgggtgcccccttgcttctgcaggggtcttccaaaggagacca

SEQ ID NO: 439161 - DNA, 56 bp, Artificial
  Synthetic oligonucleotide
gtcttagtaattttgggtctagatggcagcctatgaccccgtcaagaggacgttta

SEQ ID NO: 439162 - DNA, 55 bp, Artificial
  Synthetic oligonucleotide
gtcttagtaggtgtgcttactggtcttacaattaagttaaacgctgtatgaacgg

SEQ ID NO: 439163 - DNA, 57 bp, Artificial
  Synthetic oligonucleotide
gtcttatagggcctggttctcggggcgagccaatccacaggtggctcgcgggagcaa

SEQ ID NO: 439164 - DNA, 60 bp, Artificial
  Synthetic oligonucleotide
gtcttatagtcagaggcacaggctcccattcaggcccgatcctctcaaaatcaagggact

SEQ ID NO: 439165 - DNA, 60 bp, Artificial
  Synthetic oligonucleotide
gtcttatatccactcaattgggcactccaccgacggtaagtaacagtgatttcatatgtg

SEQ ID NO: 439166 - DNA, 58 bp, Artificial
  Synthetic oligonucleotide
gtcttatcatttaacatgaatatagtccctccccctcctaaaagagattgttctatca

SEQ ID NO: 439167 - DNA, 57 bp, Artificial
  Synthetic oligonucleotide
gtcttatgccgcactgtgttatattcattgtttgacttcaaacgtgttagcgtacac

SEQ ID NO: 439168 - DNA, 60 bp, Artificial
  Synthetic oligonucleotide
gtcttatgctgcacactggttgtgtgaatttcttagtttcgatgtcactgtgcgacgttg

SEQ ID NO: 439169 - DNA, 55 bp, Artificial
  Synthetic oligonucleotide
gtcttatggtgaaactgtcaaacaagcggtattattaaatgtgttgggagcgggg

SEQ ID NO: 439170 - DNA, 60 bp, Artificial
  Synthetic oligonucleotide
gtcttatgttcatgattgggagaatataaagtcttttcttacagatcagacctactcata

SEQ ID NO: 439171 - DNA, 58 bp, Artificial
  Synthetic oligonucleotide
gtcttattcttgggatcctaagccttcgtcttccatatcttcgtctgcggtagtaggc

SEQ ID NO: 439172 - DNA, 55 bp, Artificial
  Synthetic oligonucleotide
gtcttatttctcccctaatacaacaataatatttaactcatcctcaggaggggac

SEQ ID NO: 439173 - DNA, 58 bp, Artificial
  Synthetic oligonucleotide
gtcttcaacgtggctctttccgtactaaaagccttgtttccacagagcgatgccacaa

SEQ ID NO: 439174 - DNA, 59 bp, Artificial
  Synthetic oligonucleotide
gtcttcaactataaaagattgaatgacaacactgaaaaagatcagtatagcctccctgg

SEQ ID NO: 439175 - DNA, 60 bp, Artificial
  Synthetic oligonucleotide
gtcttcaagtctggacgcgtagacagcgcgggatgacgggtgaagtgtgccagccggtcg

SEQ ID NO: 439176 - DNA, 55 bp, Artificial
  Synthetic oligonucleotide
gtcttcaagtgtgtccatctaagcaaacgcatgtcgtgctaagacgtaccgcgta

SEQ ID NO: 439177 - DNA, 56 bp, Artificial
  Synthetic oligonucleotide
gtcttcaattataaaaggcttaatgacaatactgaaaaggatcagtattccttacc

SEQ ID NO: 439178 - DNA, 52 bp, Artificial
  Synthetic oligonucleotide
gtcttcacagccgtctttcccggcccccaccgccgttgcagcctccacggtc

SEQ ID NO: 439179 - DNA, 55 bp, Artificial
  Synthetic oligonucleotide
gtcttcactattcactagacccatcaaagacataatagggaagctaagacccctt

SEQ ID NO: 439180 - DNA, 57 bp, Artificial
  Synthetic oligonucleotide
gtcttcagctacaggagttatcactgccgtgtaacttttgcggtaatttcctctcgg

SEQ ID NO: 439181 - DNA, 55 bp, Artificial
  Synthetic oligonucleotide
gtcttcaggaatgtgacccacgcttcatagccaatttggaggaggctatattctc

SEQ ID NO: 439182 - DNA, 55 bp, Artificial
  Synthetic oligonucleotide
gtcttcaggaggagatccagaggttacctctctgcactttaattgtcatggggaa

SEQ ID NO: 439183 - DNA, 59 bp, Artificial
  Synthetic oligonucleotide
gtcttcattgacagccaagggatccgaaagttttctcaatccgactggatcagacggga

SEQ ID NO: 439184 - DNA, 53 bp, Artificial
  Synthetic oligonucleotide
gtcttccacaaaagtatctctagacggtgcacccaggatatcacggccatcgt

SEQ ID NO: 439185 - DNA, 60 bp, Artificial
  Synthetic oligonucleotide
gtcttccactggacactagtacaaccaggcgataatatcaccttctcacacaatggaggt

SEQ ID NO: 439186 - DNA, 53 bp, Artificial
  Synthetic oligonucleotide
gtcttccagagcagtgttataggacttaatctggttattcagattagtgttag

SEQ ID NO: 439187 - DNA, 50 bp, Artificial
  Synthetic oligonucleotide
gtcttccaggaggaagaatgtcccactactaagaaacgccatatccaggg

SEQ ID NO: 439188 - DNA, 58 bp, Artificial
  Synthetic oligonucleotide
gtcttccatacttatttggagatgcaatcacggaaatgcggccggataacagacttaa

SEQ ID NO: 439189 - DNA, 51 bp, Artificial
  Synthetic oligonucleotide
gtcttcccaattgagcaaccatctgttactcaggtgacacttggtggtaaa

SEQ ID NO: 439190 - DNA, 55 bp, Artificial
  Synthetic oligonucleotide
gtcttcccagagacctaattgaggattacaagtatatcaagacacatttgggctc

SEQ ID NO: 439191 - DNA, 55 bp, Artificial
  Synthetic oligonucleotide
gtcttcccctggaggcatggttgagttgttcacttacttgcttgagaaacctgag

SEQ ID NO: 439192 - DNA, 55 bp, Artificial
  Synthetic oligonucleotide
gtcttccgtcataaccggaaactttgggtcctctggaccaactaatgctcactac

SEQ ID NO: 439193 - DNA, 55 bp, Artificial
  Synthetic oligonucleotide
gtcttccgtgacaacagatggtctggagaccagtctatcttcgcacaaatggaga

SEQ ID NO: 439194 - DNA, 55 bp, Artificial
  Synthetic oligonucleotide
gtcttccttccgcagaacacgtggagagtgcggacgagggaaattgcaaggcgga

SEQ ID NO: 439195 - DNA, 52 bp, Artificial
  Synthetic oligonucleotide
gtcttccttttaaatggtttgtacaacattgtacactgtttgcgtcattctc

SEQ ID NO: 439196 - DNA, 55 bp, Artificial
  Synthetic oligonucleotide
gtcttcgaaaacctgggatgatgatttcgttcgccaggtcccgtctttccaatgg

SEQ ID NO: 439197 - DNA, 55 bp, Artificial
  Synthetic oligonucleotide
gtcttcgaaattcagtgcgtgtgggtttgggacggcttgtaggaagtcgtccaac

SEQ ID NO: 439198 - DNA, 60 bp, Artificial
  Synthetic oligonucleotide
gtcttcgatcttggacccagcttaggatctacatccctcgctatggtacatgtgccacaa

SEQ ID NO: 439199 - DNA, 57 bp, Artificial
  Synthetic oligonucleotide
gtcttcgcactgagtcttactgtcgaaccgtctgctagtatggtccggtatctggac

SEQ ID NO: 439200 - DNA, 55 bp, Artificial
  Synthetic oligonucleotide
gtcttcgcatatatctacacgcttgataagacttactccatctaatacaacgagt

SEQ ID NO: 439201 - DNA, 55 bp, Artificial
  Synthetic oligonucleotide
gtcttcggaacattggtgttggccctctgggcccagacatacgccattccagccc

SEQ ID NO: 439202 - DNA, 56 bp, Artificial
  Synthetic oligonucleotide
gtcttcggacccttcgcctataggttaataggaatacagtgttactgttgtgtgta

SEQ ID NO: 439203 - DNA, 60 bp, Artificial
  Synthetic oligonucleotide
gtcttcggacgcgattacagcgaaagccaccaatgccatgagtatcactctgccccatga

SEQ ID NO: 439204 - DNA, 53 bp, Artificial
  Synthetic oligonucleotide
gtcttcggccccttacgcctccgcgtaggcaccctttttgagtaaggctgtac

SEQ ID NO: 439205 - DNA, 60 bp, Artificial
  Synthetic oligonucleotide
gtcttcgtgagtgtcagattgtatcgtcgttcgtgaaatatattgccttgaacttgccta

SEQ ID NO: 439206 - DNA, 55 bp, Artificial
  Synthetic oligonucleotide
gtcttcgttgtgaaacggattaccggtagtagcatcttagactaccaaggttata

SEQ ID NO: 439207 - DNA, 60 bp, Artificial
  Synthetic oligonucleotide
gtcttctatcttctggggaccgtctgggatccgagcaccccagccgagctagtcgctcca

SEQ ID NO: 439208 - DNA, 60 bp, Artificial
  Synthetic oligonucleotide
gtcttctcacctcgccggcatgagacaacacaagactgcaactgctcaatctatcccggc

SEQ ID NO: 439209 - DNA, 55 bp, Artificial
  Synthetic oligonucleotide
gtcttctcagaacttggcaatgtccaagagagatcattttgcgagattccctcgt

SEQ ID NO: 439210 - DNA, 56 bp, Artificial
  Synthetic oligonucleotide
gtcttctccctttagcactcctattcaaggggtcctggccgttcaacaacttgaca

SEQ ID NO: 439211 - DNA, 57 bp, Artificial
  Synthetic oligonucleotide
gtcttctcttgcgaaggcccttggattaagaggcgtttggaacaaatcactcattgt

SEQ ID NO: 439212 - DNA, 55 bp, Artificial
  Synthetic oligonucleotide
gtcttctgacaaaactggatctgtttcagtctcctcaggcaacaaggtgggctcc

SEQ ID NO: 439213 - DNA, 54 bp, Artificial
  Synthetic oligonucleotide
gtcttctggactcgagcgttcactaaccgaatcgttctttaactccgttacgag

SEQ ID NO: 439214 - DNA, 54 bp, Artificial
  Synthetic oligonucleotide
gtcttctgtctagagagctattcggtaagatagctaagtacgtctttaataagt

SEQ ID NO: 439215 - DNA, 52 bp, Artificial
  Synthetic oligonucleotide
gtcttcttacttgcccggtctgctgtcacgtctttcctctataccgttcgtg

SEQ ID NO: 439216 - DNA, 55 bp, Artificial
  Synthetic oligonucleotide
gtcttcttaggaagacaaccgtgttgagggagaatctaacagaagtggattactt

SEQ ID NO: 439217 - DNA, 57 bp, Artificial
  Synthetic oligonucleotide
gtcttcttcggttccgactaccctctcgactgcctatgatgtttatcctttgaatgg

SEQ ID NO: 439218 - DNA, 57 bp, Artificial
  Synthetic oligonucleotide
gtcttctttacatactgccctggctgcagctactaacacaaccggggccaagttatt

SEQ ID NO: 439219 - DNA, 55 bp, Artificial
  Synthetic oligonucleotide
gtcttgaaacgatggaaattattcaacaaaccagagtggataaactgacccaagg

SEQ ID NO: 439220 - DNA, 59 bp, Artificial
  Synthetic oligonucleotide
gtcttgaacgcgaatactatttggataacatcaaacatccacccaagagattggtatcc

SEQ ID NO: 439221 - DNA, 55 bp, Artificial
  Synthetic oligonucleotide
gtcttgaacgcgctctcgccccaagaatttcgaaccgcctgtaacaattcccgct

SEQ ID NO: 439222 - DNA, 55 bp, Artificial
  Synthetic oligonucleotide
gtcttgaaggctctacaagtttacgaaagaggttgccgctggtaccccattgttg

SEQ ID NO: 439223 - DNA, 53 bp, Artificial
  Synthetic oligonucleotide
gtcttgaatacttatacaagcaatggaaatcacataactgtatatggactgct

SEQ ID NO: 439224 - DNA, 60 bp, Artificial
  Synthetic oligonucleotide
gtcttgacatttttatacacgatgaaattcatcattggtctaaagctcaacttatctcat

SEQ ID NO: 439225 - DNA, 52 bp, Artificial
  Synthetic oligonucleotide
gtcttgaccttccatattccacctatgtcaaagacgagcttcgctcgataga

SEQ ID NO: 439226 - DNA, 60 bp, Artificial
  Synthetic oligonucleotide
gtcttgacggaaatgttgccacaaatagcgaagacactgagcggcacactgcacgtgatg

SEQ ID NO: 439227 - DNA, 60 bp, Artificial
  Synthetic oligonucleotide
gtcttgagaagactgtcgaagatcaagtttgctttgcaaaatgatcgcgacatgattcca

SEQ ID NO: 439228 - DNA, 60 bp, Artificial
  Synthetic oligonucleotide
gtcttgagcggatcactctctgtacggtatgcctcagcacgctgggccaagacaacatcg

SEQ ID NO: 439229 - DNA, 60 bp, Artificial
  Synthetic oligonucleotide
gtcttgatcgtgatagagtacccacgatggttggagttacacgtcagtccagagatacta

SEQ ID NO: 439230 - DNA, 55 bp, Artificial
  Synthetic oligonucleotide
gtcttgattagagtaatctgatcatcactagaggtgtatgacacagggatcacgt

SEQ ID NO: 439231 - DNA, 55 bp, Artificial
  Synthetic oligonucleotide
gtcttgattgtaacgaggacggtggaacttctgacacgcagcagcctacagggat

SEQ ID NO: 439232 - DNA, 55 bp, Artificial
  Synthetic oligonucleotide
gtcttgattgtgacgaggactgtggaacttctgggacggagggggtgggaagccc

SEQ ID NO: 439233 - DNA, 52 bp, Artificial
  Synthetic oligonucleotide
gtcttgattgtggcgaggactgtgcaaattctgggacaaagggggtggcagg

SEQ ID NO: 439234 - DNA, 60 bp, Artificial
  Synthetic oligonucleotide
gtcttgcacagtattagggtcaggaactaaaaaagagtgctgttagcctgcttgatacca

SEQ ID NO: 439235 - DNA, 55 bp, Artificial
  Synthetic oligonucleotide
gtcttgcagaatatttaacgcaagataaaacgaaattcgatgtacagcggctggc

SEQ ID NO: 439236 - DNA, 57 bp, Artificial
  Synthetic oligonucleotide
gtcttgccaataatgttattggacctacaggtactggtacaacagctgtaaatcgtt

SEQ ID NO: 439237 - DNA, 54 bp, Artificial
  Synthetic oligonucleotide
gtcttgccggtctgactgtctccctcaatgtccaaactttgaggtctcagaggc

SEQ ID NO: 439238 - DNA, 50 bp, Artificial
  Synthetic oligonucleotide
gtcttgcgaataaggaagtcctaccagtgcatgctcgagttgagattact

SEQ ID NO: 439239 - DNA, 56 bp, Artificial
  Synthetic oligonucleotide
gtcttgcgcatcatcgacagtggtcggtaccagcctaattggaatcagtccattcg

SEQ ID NO: 439240 - DNA, 55 bp, Artificial
  Synthetic oligonucleotide
gtcttgctatacacatttacagccgcgaatgcagacacactgtgtataggttatc

SEQ ID NO: 439241 - DNA, 60 bp, Artificial
  Synthetic oligonucleotide
gtcttgctcctatgttacgcgctgagtacgatgagaaccctgaggcacttgctgggactc

SEQ ID NO: 439242 - DNA, 60 bp, Artificial
  Synthetic oligonucleotide
gtcttgcttgatcagatgtgagcttcacatctactagcttcaagtccttccgcccatgaa

SEQ ID NO: 439243 - DNA, 59 bp, Artificial
  Synthetic oligonucleotide
gtcttggacatgttcagaactgcttttggtggaaagtacatgaggagtggttggggctg

SEQ ID NO: 439244 - DNA, 60 bp, Artificial
  Synthetic oligonucleotide
gtcttggagtacgatggggagctgcacaactttaagcacggcatgctgtcggggcaggcc

SEQ ID NO: 439245 - DNA, 60 bp, Artificial
  Synthetic oligonucleotide
gtcttggataactgctgtgtggccgaatccctctgaagaaatggagtagtggccccatgt

SEQ ID NO: 439246 - DNA, 60 bp, Artificial
  Synthetic oligonucleotide
gtcttggatcatgtaatgtttaacttccataagagactcaagttggtagaacctgatcta

SEQ ID NO: 439247 - DNA, 57 bp, Artificial
  Synthetic oligonucleotide
gtcttggattacggccgtgtggccgtacccatgagaagtagtggaattgtagcccca

SEQ ID NO: 439248 - DNA, 56 bp, Artificial
  Synthetic oligonucleotide
gtcttggccgaagcgtgccaagaaccttgtgtccaacatgaagaacggtttcgacg

SEQ ID NO: 439249 - DNA, 55 bp, Artificial
  Synthetic oligonucleotide
gtcttggctattactaccacgccgaatcggaccgcttgttgacggtcgggcaccc

SEQ ID NO: 439250 - DNA, 57 bp, Artificial
  Synthetic oligonucleotide
gtcttgggtcctcaacccaagtgacattgctacgttccctcaattatccgtttctgc

SEQ ID NO: 439251 - DNA, 55 bp, Artificial
  Synthetic oligonucleotide
gtcttggtagtaagttgcaataagcactagcgccataaaggccgtaattcctact

SEQ ID NO: 439252 - DNA, 54 bp, Artificial
  Synthetic oligonucleotide
gtcttggtggaatagaattgtatctcggtggatacctctctgtgcggttcgagt

SEQ ID NO: 439253 - DNA, 60 bp, Artificial
  Synthetic oligonucleotide
gtcttgtaaaaagtgtcagctatgcggcctagtgtatcatccatttactgagtgcggcac

SEQ ID NO: 439254 - DNA, 57 bp, Artificial
  Synthetic oligonucleotide
gtcttgtaaattggaataagttgagtgtctgaatgggttagtgtttccttctcgtga

SEQ ID NO: 439255 - DNA, 55 bp, Artificial
  Synthetic oligonucleotide
gtcttgtagaatttgatgtcactgatgacgaagactcggatacaaaggagaatcc

SEQ ID NO: 439256 - DNA, 54 bp, Artificial
  Synthetic oligonucleotide
gtcttgtcggcgagccgcgagtctgtagtggaaaatgctgttctgcggcgatta

SEQ ID NO: 439257 - DNA, 57 bp, Artificial
  Synthetic oligonucleotide
gtcttgtcggtttgggaccatacagagttcaagttgtttatgagaggacctattgta

SEQ ID NO: 439258 - DNA, 55 bp, Artificial
  Synthetic oligonucleotide
gtcttgtcgtgtctcctattaaaactagtattgaagatcttcgagagaaccttcc

SEQ ID NO: 439259 - DNA, 54 bp, Artificial
  Synthetic oligonucleotide
gtcttgtctctcgaagttaccgtagagtgtatcatagctctgggcttctacttc

SEQ ID NO: 439260 - DNA, 57 bp, Artificial
  Synthetic oligonucleotide
gtcttgtgattcgacggcaatagtatacttgcggtcccgtaaacttcagtgggagac

SEQ ID NO: 439261 - DNA, 60 bp, Artificial
  Synthetic oligonucleotide
gtcttgtgatttcaataacggcatcaccattcaatacaacttaacattctcagatgcaca

SEQ ID NO: 439262 - DNA, 60 bp, Artificial
  Synthetic oligonucleotide
gtcttgtgccagataatatcgttccgtagaatccagccggaatcttgcagcgcgaacgcc

SEQ ID NO: 439263 - DNA, 55 bp, Artificial
  Synthetic oligonucleotide
gtcttgtgccattgaggctctttcctcccctgcagagggctatgtcaatgatatc

SEQ ID NO: 439264 - DNA, 55 bp, Artificial
  Synthetic oligonucleotide
gtcttgtggaccgaacttccaatgttaggtacagtctagaccagctagtcacagc

SEQ ID NO: 439265 - DNA, 59 bp, Artificial
  Synthetic oligonucleotide
gtcttgtgggatgtatggtcttgatggacctgacatttacaaaggggtttatcaattca

SEQ ID NO: 439266 - DNA, 55 bp, Artificial
  Synthetic oligonucleotide
gtcttgtgtcacgtatagtgaccactactgttcccttggcgttaaaggggacttg

SEQ ID NO: 439267 - DNA, 55 bp, Artificial
  Synthetic oligonucleotide
gtcttgtgtcaggttcctgcatagaaccatactacctggttccatggctaactct

SEQ ID NO: 439268 - DNA, 55 bp, Artificial
  Synthetic oligonucleotide
gtctttaaaggactgagccatatcaacaacagtggaagacagtaatgattggtaa

SEQ ID NO: 439269 - DNA, 54 bp, Artificial
  Synthetic oligonucleotide
gtctttaaccctaactggcaaactccttcttttccggacattcacttgcgtcag

SEQ ID NO: 439270 - DNA, 55 bp, Artificial
  Synthetic oligonucleotide
gtctttaatgctagttgggttacagcatctacattctcgcctcataaggcttccc

SEQ ID NO: 439271 - DNA, 60 bp, Artificial
  Synthetic oligonucleotide
gtctttacagtagcctctatcagaagcatgctgattaagtgaggaccagactaaccatct

SEQ ID NO: 439272 - DNA, 53 bp, Artificial
  Synthetic oligonucleotide
gtctttactacactatttgtcatttgttttacccctgaggtaatgggaggaac

SEQ ID NO: 439273 - DNA, 55 bp, Artificial
  Synthetic oligonucleotide
gtctttactcgtacttcatgaagaaggttagacatggcttagaaactaatgatgg

SEQ ID NO: 439274 - DNA, 55 bp, Artificial
  Synthetic oligonucleotide
gtctttagaggctccttcagcccttcatggctttaaactgagttaatagggttag

SEQ ID NO: 439275 - DNA, 59 bp, Artificial
  Synthetic oligonucleotide
gtctttagagtcgtatgctctatagtctcaagtaaggacgagtttaggttgctctttga

SEQ ID NO: 439276 - DNA, 60 bp, Artificial
  Synthetic oligonucleotide
gtctttagcactttggtgcgtattagtatataagtatttgtgtgtctgtacataatacta

SEQ ID NO: 439277 - DNA, 55 bp, Artificial
  Synthetic oligonucleotide
gtctttagcatccatattaaatgtaccaactgaacaaatgcttgtgcagcctcca

SEQ ID NO: 439278 - DNA, 58 bp, Artificial
  Synthetic oligonucleotide
gtctttaggagctaactccttaattactctaagagcctcagacttactgccgctgtta

SEQ ID NO: 439279 - DNA, 60 bp, Artificial
  Synthetic oligonucleotide
gtctttaggattatggctagagggatacttggaaaatatcaagctggagtaggagtgatg

SEQ ID NO: 439280 - DNA, 55 bp, Artificial
  Synthetic oligonucleotide
gtctttaggggctaattccctaattacgttgagagcctctgtcttacttccgctg

SEQ ID NO: 439281 - DNA, 53 bp, Artificial
  Synthetic oligonucleotide
gtctttaggttcggcaggtaataggtggactacggtgtacgcgaccaccggta

SEQ ID NO: 439282 - DNA, 55 bp, Artificial
  Synthetic oligonucleotide
gtctttatcacccgctagtgatcagaggttgcaatacaccttgttaggggaagtg

SEQ ID NO: 439283 - DNA, 55 bp, Artificial
  Synthetic oligonucleotide
gtctttcaagatgaaacatgggacctctttgtagagcggagcaatgctttcagca

SEQ ID NO: 439284 - DNA, 59 bp, Artificial
  Synthetic oligonucleotide
gtctttcacatcccagactctcacgacaccattgttcccctgttggggtctcctcatcc

SEQ ID NO: 439285 - DNA, 54 bp, Artificial
  Synthetic oligonucleotide
gtctttcaccctgccagtggaattgtccggaaaggactgcttagttccttgttt

SEQ ID NO: 439286 - DNA, 57 bp, Artificial
  Synthetic oligonucleotide
gtctttccacggtctcagtgttctcttcagggttgtctcggtgacagtaaatgggtg

SEQ ID NO: 439287 - DNA, 53 bp, Artificial
  Synthetic oligonucleotide
gtctttccagtactcttggatcgggaaaccgtccggctccgaacggtaagagc

SEQ ID NO: 439288 - DNA, 50 bp, Artificial
  Synthetic oligonucleotide
gtctttcccgtccgactatcgccttcgataactatacttatcggtcttaa

SEQ ID NO: 439289 - DNA, 57 bp, Artificial
  Synthetic oligonucleotide
gtctttccctaaagaaaggaacactcctaaacagtgcatgcagctcaatttaacaag

SEQ ID NO: 439290 - DNA, 51 bp, Artificial
  Synthetic oligonucleotide
gtctttccgacgttaaagggaagtaaccacaagcttagtgccgcctttccc

SEQ ID NO: 439291 - DNA, 54 bp, Artificial
  Synthetic oligonucleotide
gtctttcctacaggttcgacaataagtcttcctatagatgcgttccgtatcaag

SEQ ID NO: 439292 - DNA, 55 bp, Artificial
  Synthetic oligonucleotide
gtctttcgtaacgagcactgaccttgtctgtattaagaacttcacacctgctggc

SEQ ID NO: 439293 - DNA, 55 bp, Artificial
  Synthetic oligonucleotide
gtctttctcgagcagtgtcaagctcacatctggtcatctcaagtgtcgtgtcaag

SEQ ID NO: 439294 - DNA, 55 bp, Artificial
  Synthetic oligonucleotide
gtctttcttgttgggcagctgtttaccttctctcccaggcaccattggacgacgc

SEQ ID NO: 439295 - DNA, 60 bp, Artificial
  Synthetic oligonucleotide
gtctttgaacaactcatgatagatgagcctctcaccttgacattagcgcttgcatcaccg

SEQ ID NO: 439296 - DNA, 60 bp, Artificial
  Synthetic oligonucleotide
gtctttgaacttgagaaacttgtgtgaaatcaagggagtctgcaatgagctttgcatcat

SEQ ID NO: 439297 - DNA, 55 bp, Artificial
  Synthetic oligonucleotide
gtctttgacatgaagatacagtgccctcattcagtaaactttggggaaacaagtg

SEQ ID NO: 439298 - DNA, 60 bp, Artificial
  Synthetic oligonucleotide
gtctttgcaggcgctttgcatagagatggtcatccaggcgaacgacgtagactgccgcgt

SEQ ID NO: 439299 - DNA, 60 bp, Artificial
  Synthetic oligonucleotide
gtctttgctctcagacagtaactcctccatcaattagaaatgttctagtctttagacaac

SEQ ID NO: 439300 - DNA, 55 bp, Artificial
  Synthetic oligonucleotide
gtctttggacacaatgcgttcggctctatacgcccgtttcccaaatacctggtcg

SEQ ID NO: 439301 - DNA, 55 bp, Artificial
  Synthetic oligonucleotide
gtctttggacctttcgcctgttgtttccagttcgacaaataatcagactggtaaa

SEQ ID NO: 439302 - DNA, 57 bp, Artificial
  Synthetic oligonucleotide
gtctttggaggtacaactttccaaagtcatgcgttggaagtttatatcaattcgata

SEQ ID NO: 439303 - DNA, 55 bp, Artificial
  Synthetic oligonucleotide
gtctttggggttccgggatcaggcaagtctgctattattaagagcctcgtgacca

SEQ ID NO: 439304 - DNA, 54 bp, Artificial
  Synthetic oligonucleotide
gtctttggtcgtgccgacgtggctgagatgcccatactgactagcgcgcccgct

SEQ ID NO: 439305 - DNA, 53 bp, Artificial
  Synthetic oligonucleotide
gtctttggtgtgtcgtataatgagttaacaagaccttttaagagtaataaaac

SEQ ID NO: 439306 - DNA, 50 bp, Artificial
  Synthetic oligonucleotide
gtctttggtgttttacaccatcacagtgtttctccacttagttggaatac

SEQ ID NO: 439307 - DNA, 60 bp, Artificial
  Synthetic oligonucleotide
gtctttgtccatgtatgacttaacatctgatgcgcttttagctgcctgaacgttcggatg

SEQ ID NO: 439308 - DNA, 50 bp, Artificial
  Synthetic oligonucleotide
gtctttgtgggacactataactacgtcaaattacattttagctaggtcag

SEQ ID NO: 439309 - DNA, 59 bp, Artificial
  Synthetic oligonucleotide
gtcttttacaacagtgttaccgacattttattctggcattgaatcaacatctttgatcc

SEQ ID NO: 439310 - DNA, 60 bp, Artificial
  Synthetic oligonucleotide
gtcttttacgcacagttacataatcggattctatcgcgatgacgtaaattcatgcaagaa

SEQ ID NO: 439311 - DNA, 60 bp, Artificial
  Synthetic oligonucleotide
gtcttttgctctcgctcaaggggctctactggggactaaacacagcaatggaaccatcaa

SEQ ID NO: 439312 - DNA, 50 bp, Artificial
  Synthetic oligonucleotide
gtctttttagctgcgtccgagtagttggcggattttccgtacaccggcat

SEQ ID NO: 439313 - DNA, 60 bp, Artificial
  Synthetic oligonucleotide
gtctttttccactgacgcatgcgcacgactaccatacgacgcatgcgtgaagaaactaag

SEQ ID NO: 439314 - DNA, 55 bp, Artificial
  Synthetic oligonucleotide
gtgaaaaacccacaaacatttggattgaaggagggaactactaccccagcagata

SEQ ID NO: 439315 - DNA, 56 bp, Artificial
  Synthetic oligonucleotide
gtgaaaaagcgcttgttatggggagcagacttgggcacggtagttcgggccgcacg

SEQ ID NO: 439316 - DNA, 52 bp, Artificial
  Synthetic oligonucleotide
gtgaaaacccttgcaacagagggggtataaagggaggtaccctcgcacacct

SEQ ID NO: 439317 - DNA, 50 bp, Artificial
  Synthetic oligonucleotide
gtgaaaaccgagtatggtgaattcaccacgcttggtatttatgacagatg

SEQ ID NO: 439318 - DNA, 60 bp, Artificial
  Synthetic oligonucleotide
gtgaaaactatgtattgccacagtatggttatattactagaggtcgcgaaattgatcaac

SEQ ID NO: 439319 - DNA, 56 bp, Artificial
  Synthetic oligonucleotide
gtgaaaagagagtggctaatacgcccctttgatggcgttaaatgaaagcgtaggtc

SEQ ID NO: 439320 - DNA, 55 bp, Artificial
  Synthetic oligonucleotide
gtgaaaagtcgtttctagaattcctaactgcggagctgggtaactcagttacgag

SEQ ID NO: 439321 - DNA, 55 bp, Artificial
  Synthetic oligonucleotide
gtgaaaataagtataggttatctgtgtatcagtctcgtcaggtagagaaatcagc

SEQ ID NO: 439322 - DNA, 57 bp, Artificial
  Synthetic oligonucleotide
gtgaaaatcagattcatagtaatcatagggcaatgctgtcagcatccttaagacctg

SEQ ID NO: 439323 - DNA, 52 bp, Artificial
  Synthetic oligonucleotide
gtgaaaatggccaatacggttacttagtttgtcgtcaaggaaataccccgtg

SEQ ID NO: 439324 - DNA, 57 bp, Artificial
  Synthetic oligonucleotide
gtgaaaattaagcctcgtagagtgaaaaaatcccactcggatgccaggtcaagggca

SEQ ID NO: 439325 - DNA, 55 bp, Artificial
  Synthetic oligonucleotide
gtgaaaattctctctcctgttttggtctctaatgcaatttcccggtgatcggagt

SEQ ID NO: 439326 - DNA, 60 bp, Artificial
  Synthetic oligonucleotide
gtgaaaatttgctgatggcttgttgttctcgttacgccatttgcaaatccactgtttggc

SEQ ID NO: 439327 - DNA, 55 bp, Artificial
  Synthetic oligonucleotide
gtgaaaatttgtgcgtgagccttgtgccgcacttgcgtgagcctttggccgcttt

SEQ ID NO: 439328 - DNA, 51 bp, Artificial
  Synthetic oligonucleotide
gtgaaaattttggcgaaccagcagcccaaaattcaatttatgtggtttgtg

SEQ ID NO: 439329 - DNA, 59 bp, Artificial
  Synthetic oligonucleotide
gtgaaacacaacagggaacggaatatgttttgcagaacaacagatacatgacctcctac

SEQ ID NO: 439330 - DNA, 55 bp, Artificial
  Synthetic oligonucleotide
gtgaaacacaggagggatcggagtatgtcctccacaacaatcgttacatgacgtc

SEQ ID NO: 439331 - DNA, 55 bp, Artificial
  Synthetic oligonucleotide
gtgaaacacaggagggatctgattatctgctgcacaacaatcgtttcgtgacgtc

SEQ ID NO: 439332 - DNA, 55 bp, Artificial
  Synthetic oligonucleotide
gtgaaacacagggacaaattacaaagacaacaagtgtcagggagtgtggtctacc

SEQ ID NO: 439333 - DNA, 60 bp, Artificial
  Synthetic oligonucleotide
gtgaaacaccgtggcgcactcactcacaacctgcgaacacatgtcgacgtgatcgtaatg

SEQ ID NO: 439334 - DNA, 54 bp, Artificial
  Synthetic oligonucleotide
gtgaaacccgaaaattcagaagttgacgtgacaggtgtggttttattgccgggc

SEQ ID NO: 439335 - DNA, 60 bp, Artificial
  Synthetic oligonucleotide
gtgaaacgatagctggaaagccgtatatttatggcttcggatgtctgatgctgctatccc

SEQ ID NO: 439336 - DNA, 57 bp, Artificial
  Synthetic oligonucleotide
gtgaaacgcctgggaggagccatgttgacttggtcaatcggggatcaaccatctatc

SEQ ID NO: 439337 - DNA, 58 bp, Artificial
  Synthetic oligonucleotide
gtgaaacggattaccggtagtagcatctagtggttccagtccataacacgagtgtatg

SEQ ID NO: 439338 - DNA, 57 bp, Artificial
  Synthetic oligonucleotide
gtgaaacgtgaactcatccgaaaaggaccactgcgacctcgcggaaatgactactac

SEQ ID NO: 439339 - DNA, 55 bp, Artificial
  Synthetic oligonucleotide
gtgaaactctccctattccaccattgggatgtgtaacttggttggcatgggaaga

SEQ ID NO: 439340 - DNA, 50 bp, Artificial
  Synthetic oligonucleotide
gtgaaagactgcctcaaagaagggaagtacatccagagggacgtgtaagg

SEQ ID NO: 439341 - DNA, 55 bp, Artificial
  Synthetic oligonucleotide
gtgaaagacttacgtcattgtcatgatgcggttcgtcgattgcacaagcatgagg

SEQ ID NO: 439342 - DNA, 54 bp, Artificial
  Synthetic oligonucleotide
gtgaaagagagtttacaaggcgttagtcgtacgattacaaacgttgagaacaaa

SEQ ID NO: 439343 - DNA, 60 bp, Artificial
  Synthetic oligonucleotide
gtgaaagccatcagaactggtctcgacgaggccaaaccctggtacaagctcatcaaactc

SEQ ID NO: 439344 - DNA, 55 bp, Artificial
  Synthetic oligonucleotide
gtgaaagctaagaacttgattgtcactgaaagtggtgccccaccgacggacttgc

SEQ ID NO: 439345 - DNA, 60 bp, Artificial
  Synthetic oligonucleotide
gtgaaagctgaaaggtcagtcaagggctgtaagtgccaacctctcatggctagggccgcg

SEQ ID NO: 439346 - DNA, 55 bp, Artificial
  Synthetic oligonucleotide
gtgaaaggaaagtgcgcattgtttgaagtgtacttagccaacaaccaggaggcag

SEQ ID NO: 439347 - DNA, 55 bp, Artificial
  Synthetic oligonucleotide
gtgaaaggagttgggacaatggtaatggaactaattcggatgataaagcggggaa

SEQ ID NO: 439348 - DNA, 58 bp, Artificial
  Synthetic oligonucleotide
gtgaaagtactatattgcccctggatattattgtgtaaggttctgacacgtgttatgt

SEQ ID NO: 439349 - DNA, 50 bp, Artificial
  Synthetic oligonucleotide
gtgaaagttatggcggttttatcgcgccttactggcgagatgactgctat

SEQ ID NO: 439350 - DNA, 53 bp, Artificial
  Synthetic oligonucleotide
gtgaaataaaatgtgaggaatatttggaataatctgagatgtttaccgtataa

SEQ ID NO: 439351 - DNA, 59 bp, Artificial
  Synthetic oligonucleotide
gtgaaatacgcttttgcatggggagggggaaatgtagtgttatgcaatactcttatgta

SEQ ID NO: 439352 - DNA, 60 bp, Artificial
  Synthetic oligonucleotide
gtgaaatatatccgagcaaagacccctctcatgctgatgtacagctgctatacgaaagca

SEQ ID NO: 439353 - DNA, 60 bp, Artificial
  Synthetic oligonucleotide
gtgaaatcagatagattggtccttgcgactggactcaggaacgttcctcaaagagaaaca

SEQ ID NO: 439354 - DNA, 60 bp, Artificial
  Synthetic oligonucleotide
gtgaaatccctgtgcaggcttacgcaactgggcagggccatttaagctcccttatctctc

SEQ ID NO: 439355 - DNA, 60 bp, Artificial
  Synthetic oligonucleotide
gtgaaatcgtgtgtagagaaggaaatagcttctggacaagccattataccccatactgtc

SEQ ID NO: 439356 - DNA, 60 bp, Artificial
  Synthetic oligonucleotide
gtgaaatgaagatggcgtctaacgacgctaccactgcctcttgtggcgaaaacaccacta

SEQ ID NO: 439357 - DNA, 55 bp, Artificial
  Synthetic oligonucleotide
gtgaaatgattctgcgcacctctaagagaacagaaccagttggggtgctcttcca

SEQ ID NO: 439358 - DNA, 60 bp, Artificial
  Synthetic oligonucleotide
gtgaaatgatttgtcgtgaaggaacaagtttctggactagtcattactcacctcaatgtc

SEQ ID NO: 439359 - DNA, 55 bp, Artificial
  Synthetic oligonucleotide
gtgaaatgggtgagtttctacggcatgagtacttcagggacggtactgttagggg

SEQ ID NO: 439360 - DNA, 60 bp, Artificial
  Synthetic oligonucleotide
gtgaaatggtactatatgaataaaatagtcaaatgtatgactcatcatccgtcaaccgtc

SEQ ID NO: 439361 - DNA, 59 bp, Artificial
  Synthetic oligonucleotide
gtgaaatggtttacaaaatcaggagagctcttgatagcagaggttcgtacgctatttgg

SEQ ID NO: 439362 - DNA, 57 bp, Artificial
  Synthetic oligonucleotide
gtgaaatgtacacgccgaacacattcgattgtgtagtaggtcacacttgtattttac

SEQ ID NO: 439363 - DNA, 57 bp, Artificial
  Synthetic oligonucleotide
gtgaaatgtgagaaaggtgatttttcgcctaacgccgagtctccttagcgtgcaacg

SEQ ID NO: 439364 - DNA, 55 bp, Artificial
  Synthetic oligonucleotide
gtgaaatgttgcaggcgttgtgtaggagtagcaaccagggttgtgactgatacgc

SEQ ID NO: 439365 - DNA, 52 bp, Artificial
  Synthetic oligonucleotide
gtgaaattaaggacagtgcctcacaattcacatcaagagttacacacaaatc

SEQ ID NO: 439366 - DNA, 58 bp, Artificial
  Synthetic oligonucleotide
gtgaaattatggcggttgcgtcgcgcccttgcggcgtggcgacttcagtcttaccggc

SEQ ID NO: 439367 - DNA, 60 bp, Artificial
  Synthetic oligonucleotide
gtgaaattctcagagaattcatgaccctaatctcacacatctggtcacaaatcaaaggtg

SEQ ID NO: 439368 - DNA, 60 bp, Artificial
  Synthetic oligonucleotide
gtgaaattgagcaatatgggggtttaccaaatacttgctatatacgctacagttgcaggc

SEQ ID NO: 439369 - DNA, 60 bp, Artificial
  Synthetic oligonucleotide
gtgaaattgggtccgcggcaattgatggaatagttcaaggtagcgttcactcaatcatga

SEQ ID NO: 439370 - DNA, 55 bp, Artificial
  Synthetic oligonucleotide
gtgaaattttgcagtcactaatattgggctcatttgggagtggcatgtctggtgc

SEQ ID NO: 439371 - DNA, 60 bp, Artificial
  Synthetic oligonucleotide
gtgaacaaccatgtgacttataaccatcaagaggctgcgaagtatgataaccacaccgag

SEQ ID NO: 439372 - DNA, 55 bp, Artificial
  Synthetic oligonucleotide
gtgaacaagcttcacgaaggctccacatacacagctgctgttcaatacaatgtcc

SEQ ID NO: 439373 - DNA, 60 bp, Artificial
  Synthetic oligonucleotide
gtgaacaagttaccctcatttgccgagttatttggaccttattctgctgcatatgcgaat

SEQ ID NO: 439374 - DNA, 55 bp, Artificial
  Synthetic oligonucleotide
gtgaacaatcacggatgacccctggtacacaggtgtattttggtacacaaagtgg

SEQ ID NO: 439375 - DNA, 51 bp, Artificial
  Synthetic oligonucleotide
gtgaacaatttgtaggtcctctaacagtaaacgaaaaacgaagattaaaat

SEQ ID NO: 439376 - DNA, 54 bp, Artificial
  Synthetic oligonucleotide
gtgaacaatttttcttactcactaccagagaaaggccgcgagtggtttaccaaa

SEQ ID NO: 439377 - DNA, 56 bp, Artificial
  Synthetic oligonucleotide
gtgaacactagtaagtaccccaacatgtatgttcccgttggtgccgtgaccgaaca

SEQ ID NO: 439378 - DNA, 55 bp, Artificial
  Synthetic oligonucleotide
gtgaacactctcatagaacagaatgtgccagtcacccaaacaatggagctcgtgg

SEQ ID NO: 439379 - DNA, 60 bp, Artificial
  Synthetic oligonucleotide
gtgaacactgaacacgcctatgagaacaaacgcatcactgttgagggcgggatgccgtct

SEQ ID NO: 439380 - DNA, 60 bp, Artificial
  Synthetic oligonucleotide
gtgaacagcaaaataactttagcactgctgtttactatggggcgcccagtggatcgttga

SEQ ID NO: 439381 - DNA, 55 bp, Artificial
  Synthetic oligonucleotide
gtgaacatggagggtgcacccccaaagatcgaaggggtcttttcattagtcgttg

SEQ ID NO: 439382 - DNA, 59 bp, Artificial
  Synthetic oligonucleotide
gtgaacatggggtatttaagaagcctgatttggtgcttgaaaggttgcagatagccagg

SEQ ID NO: 439383 - DNA, 57 bp, Artificial
  Synthetic oligonucleotide
gtgaaccagcgttaggtgaacattgggatgtagctaaaccttgcagtgatgaggtta

SEQ ID NO: 439384 - DNA, 58 bp, Artificial
  Synthetic oligonucleotide
gtgaaccatcaaattccaagttatctagttttttccaagctgtcactaatcacaagtg

SEQ ID NO: 439385 - DNA, 59 bp, Artificial
  Synthetic oligonucleotide
gtgaaccccatgaatctatcggacccaatgcaagtgtatgacacggatctttttatagt

SEQ ID NO: 439386 - DNA, 55 bp, Artificial
  Synthetic oligonucleotide
gtgaaccccgcgaatggtataaatgtgaggtggattgtaccgccctctaccgtcg

SEQ ID NO: 439387 - DNA, 60 bp, Artificial
  Synthetic oligonucleotide
gtgaacccgtacatagggctaacgaaatgcaacggtcgatgcacactatcacatgcaaaa

SEQ ID NO: 439388 - DNA, 55 bp, Artificial
  Synthetic oligonucleotide
gtgaaccgaaatggtgaagtggtcgggctctatggcaatggaattctggtgggtg

SEQ ID NO: 439389 - DNA, 55 bp, Artificial
  Synthetic oligonucleotide
gtgaaccgtgttatgctctggatgggcctgttaccttcggtttcaggcacagtga

SEQ ID NO: 439390 - DNA, 55 bp, Artificial
  Synthetic oligonucleotide
gtgaacctacagaagctgcatttcaagcccattacaaagtatgccaagttaccca

SEQ ID NO: 439391 - DNA, 55 bp, Artificial
  Synthetic oligonucleotide
gtgaacctagacccttttcggtctagctgccctcagcatgcctgctaccgccggg

SEQ ID NO: 439392 - DNA, 59 bp, Artificial
  Synthetic oligonucleotide
gtgaacctcaatacacatttcctaactttgacgtcggaaatgaaggcatgggatcttca

SEQ ID NO: 439393 - DNA, 55 bp, Artificial
  Synthetic oligonucleotide
gtgaacctcccaaaggtcaccctgcaatgcgtggccctccccaagcccgggaaga

SEQ ID NO: 439394 - DNA, 52 bp, Artificial
  Synthetic oligonucleotide
gtgaacctcttgcgcgtaatgcttcaaagtgttcatactcaccaagttggaa

SEQ ID NO: 439395 - DNA, 60 bp, Artificial
  Synthetic oligonucleotide
gtgaacctgctagcgatcctcatggactggaccaatgacttgactgggtttgttaccaca

SEQ ID NO: 439396 - DNA, 60 bp, Artificial
  Synthetic oligonucleotide
gtgaacctggagactgtgggggcaaattactatgtaagcatggagtgattggaattatca

SEQ ID NO: 439397 - DNA, 60 bp, Artificial
  Synthetic oligonucleotide
gtgaaccttacgcgcctacgtgagtacagtgagatgcctcagtgcttccgctcgtacatc

SEQ ID NO: 439398 - DNA, 58 bp, Artificial
  Synthetic oligonucleotide
gtgaacgaaatgggcggcctgttaacgtttctgctagcctgtctgctgtcgatttatt

SEQ ID NO: 439399 - DNA, 60 bp, Artificial
  Synthetic oligonucleotide
gtgaacgattctgaattgcaggtgcatgtgttgcgaggcccaaagcactttcaaagacgt

SEQ ID NO: 439400 - DNA, 60 bp, Artificial
  Synthetic oligonucleotide
gtgaacgcaagaattgaaccatttctgaagatgacaccacgccctctcaaattaccagat

SEQ ID NO: 439401 - DNA, 60 bp, Artificial
  Synthetic oligonucleotide
gtgaacgcaagaattgagccgtttctgaagacaacaccacgtcctctcaggttgcctgat

SEQ ID NO: 439402 - DNA, 59 bp, Artificial
  Synthetic oligonucleotide
gtgaacgccagaattgagccatttttgaagacaacaccacgccctcttagattacctga

SEQ ID NO: 439403 - DNA, 52 bp, Artificial
  Synthetic oligonucleotide
gtgaacgccccttggaacttgccaacaaccttatataagaggactcttggac

SEQ ID NO: 439404 - DNA, 54 bp, Artificial
  Synthetic oligonucleotide
gtgaacgctaagagtgcgtgacaacataagcttaagaggaaaccgtactcatct

SEQ ID NO: 439405 - DNA, 57 bp, Artificial
  Synthetic oligonucleotide
gtgaacggctcttacgaacatacttgttgcgggtatgtctagtccctctgagttcga

SEQ ID NO: 439406 - DNA, 55 bp, Artificial
  Synthetic oligonucleotide
gtgaacgggtatgcagaagtgtcggcggtggtccacctactgtctccgtacacgc

SEQ ID NO: 439407 - DNA, 60 bp, Artificial
  Synthetic oligonucleotide
gtgaacgtatatagaacacccacaaggacagtctatgcgacgccgtctagtcgccctatg

SEQ ID NO: 439408 - DNA, 60 bp, Artificial
  Synthetic oligonucleotide
gtgaacgtcgattatattgccagaccgactgaaggatttatgtctctgtcgaccgccact

SEQ ID NO: 439409 - DNA, 58 bp, Artificial
  Synthetic oligonucleotide
gtgaactacttcgagttcacggccaccctcgactcccacacctgctttgaggacgtgc

SEQ ID NO: 439410 - DNA, 59 bp, Artificial
  Synthetic oligonucleotide
gtgaactattatggtgtcggaagtggtgttagtggactattcgcgggatcgtcatgccg

SEQ ID NO: 439411 - DNA, 55 bp, Artificial
  Synthetic oligonucleotide
gtgaactccgcctgtttcgagtctccttcgtgcagtcttgtgtcgtgcatctcta

SEQ ID NO: 439412 - DNA, 58 bp, Artificial
  Synthetic oligonucleotide
gtgaactcgcaggggtgtttttgattgtcgtggtattactaatcggacatcattccga

SEQ ID NO: 439413 - DNA, 55 bp, Artificial
  Synthetic oligonucleotide
gtgaactctatgttctacatcatgttttattcacatccccttccgaggtgatgtt

SEQ ID NO: 439414 - DNA, 57 bp, Artificial
  Synthetic oligonucleotide
gtgaactggaatacggtaactgtgataccaaatgtcaaaccccagtgggtgctataa

SEQ ID NO: 439415 - DNA, 55 bp, Artificial
  Synthetic oligonucleotide
gtgaactgggaagtgaggggactagtcatgcaaaacatggatgggaaagtaccaa

SEQ ID NO: 439416 - DNA, 57 bp, Artificial
  Synthetic oligonucleotide
gtgaactggggacccggtgaagtgaatgactcgactgtagtacaacctgtgttggac

SEQ ID NO: 439417 - DNA, 60 bp, Artificial
  Synthetic oligonucleotide
gtgaactgtaccgcgtagtaagcccagcgtctgctgagggtacggtagtgctcgccatgc

SEQ ID NO: 439418 - DNA, 59 bp, Artificial
  Synthetic oligonucleotide
gtgaactgtttggacaggatcttcaccgttggtgctctgaacggaatgtcaacggaatg

SEQ ID NO: 439419 - DNA, 60 bp, Artificial
  Synthetic oligonucleotide
gtgaacttcacgagcatcttgacacctcctgtaactcagcaaagtgtagatgttgacgaa

SEQ ID NO: 439420 - DNA, 58 bp, Artificial
  Synthetic oligonucleotide
gtgaactttgaagtcaatagttctcgctccgaggtcgcctctattattaaccgtgtgc

SEQ ID NO: 439421 - DNA, 51 bp, Artificial
  Synthetic oligonucleotide
gtgaagaaagacacaggacatctagattcaatagctgccttcttctagtgt

SEQ ID NO: 439422 - DNA, 60 bp, Artificial
  Synthetic oligonucleotide
gtgaagaacggcacatatgactatcctaagtattcagaggagtccaagctaaacagagaa

SEQ ID NO: 439423 - DNA, 55 bp, Artificial
  Synthetic oligonucleotide
gtgaagaactacttgcttcctaaactccccttaaatgactgcttctatgcatgga

SEQ ID NO: 439424 - DNA, 55 bp, Artificial
  Synthetic oligonucleotide
gtgaagaagagaatcgctttaataaatggaacgaactctctactgagatcactag

SEQ ID NO: 439425 - DNA, 60 bp, Artificial
  Synthetic oligonucleotide
gtgaagaaggcagatacatcctcatatcacatcgaggcgattggtgacacaggtaaggcg

SEQ ID NO: 439426 - DNA, 55 bp, Artificial
  Synthetic oligonucleotide
gtgaagaaggcattgtatgtcgagatttacaaaaggtacgttccagatgtctcaa

SEQ ID NO: 439427 - DNA, 55 bp, Artificial
  Synthetic oligonucleotide
gtgaagaagtgaggcaatactgcagggaaaagaaatggcttattccagaaatacc

SEQ ID NO: 439428 - DNA, 54 bp, Artificial
  Synthetic oligonucleotide
gtgaagacaataaatggaccattccagctgattgtaagattgagagggacttaa

SEQ ID NO: 439429 - DNA, 55 bp, Artificial
  Synthetic oligonucleotide
gtgaagactcgctgtcagatgacctctctattaaacggagacaatcagtcaatag

SEQ ID NO: 439430 - DNA, 55 bp, Artificial
  Synthetic oligonucleotide
gtgaagactcttacaaatgaacaggaagaggtgaccaatgctactgaaacagtgg

SEQ ID NO: 439431 - DNA, 60 bp, Artificial
  Synthetic oligonucleotide
gtgaagacttgcacattacatgcggtcataaaaccctcaatgtccatgcatgcttcaggc

SEQ ID NO: 439432 - DNA, 60 bp, Artificial
  Synthetic oligonucleotide
gtgaagactttgagttcgtgatgattcgagccccctccagcaagactgtagattcaattt

SEQ ID NO: 439433 - DNA, 55 bp, Artificial
  Synthetic oligonucleotide
gtgaagagatagagtgagagcatagctgtatgcagcgttgtgtgtggaagcgggg

SEQ ID NO: 439434 - DNA, 56 bp, Artificial
  Synthetic oligonucleotide
gtgaagagatgactaagaaaagtcattttgatacaattggctcttctgttactggg

SEQ ID NO: 439435 - DNA, 55 bp, Artificial
  Synthetic oligonucleotide
gtgaagaggatctaaggaaactgttggcagacaatttagacagttgggacggaaa

SEQ ID NO: 439436 - DNA, 55 bp, Artificial
  Synthetic oligonucleotide
gtgaagagtccagcctccttagccgttactgactctaccacacttccatgggcag

SEQ ID NO: 439437 - DNA, 60 bp, Artificial
  Synthetic oligonucleotide
gtgaagagtctcgtgtgctccacgtagaatccttccggcccctgaatgtggctaatccta

SEQ ID NO: 439438 - DNA, 59 bp, Artificial
  Synthetic oligonucleotide
gtgaagatacagactaatgggaacctgattgcacctgaatatggccacctaataaccgg

SEQ ID NO: 439439 - DNA, 60 bp, Artificial
  Synthetic oligonucleotide
gtgaagatgaggttccccattctcgtgaagctctctgcagattctaatgtattttttgtt

SEQ ID NO: 439440 - DNA, 59 bp, Artificial
  Synthetic oligonucleotide
gtgaagattcagtggtcccaagaccctacaatgttatacaataagatggagtttgagcc

SEQ ID NO: 439441 - DNA, 59 bp, Artificial
  Synthetic oligonucleotide
gtgaagattgaccatctcacaaaagctgttacgtgcttgtaacacactacacacccgtt

SEQ ID NO: 439442 - DNA, 60 bp, Artificial
  Synthetic oligonucleotide
gtgaagcaagattcgaaatcacaggaaccatgcgccggcttgccgaccatggtcctccaa

SEQ ID NO: 439443 - DNA, 50 bp, Artificial
  Synthetic oligonucleotide
gtgaagcagatggtatcattcagtctgtcaattggggaacaccgggtcta

SEQ ID NO: 439444 - DNA, 60 bp, Artificial
  Synthetic oligonucleotide
gtgaagcatattcagagaatgggatttttaatatcagctcccctacatgtctagtaaata

SEQ ID NO: 439445 - DNA, 55 bp, Artificial
  Synthetic oligonucleotide
gtgaagccacactagagggtggtggtcaaaataaaggccactatgctggacaccc

SEQ ID NO: 439446 - DNA, 59 bp, Artificial
  Synthetic oligonucleotide
gtgaagccatgttcaagttggaatggcttcaggatccggtggtcattcgatccccggac

SEQ ID NO: 439447 - DNA, 60 bp, Artificial
  Synthetic oligonucleotide
gtgaagcgaaggcggaacttatcgagtggagggatgagaaagcggatgagccttggcaca

SEQ ID NO: 439448 - DNA, 52 bp, Artificial
  Synthetic oligonucleotide
gtgaagcgctgagggttttacctcagaggaatgatggtcacgtgctaacacg

SEQ ID NO: 439449 - DNA, 55 bp, Artificial
  Synthetic oligonucleotide
gtgaagcggtatgcccacacgcgggtggagcggtatacactttccgtaaggtggc

SEQ ID NO: 439450 - DNA, 60 bp, Artificial
  Synthetic oligonucleotide
gtgaagctcctcagttggccgtggaacgcacgagaagatgtggtgcggatggcaatgaca

SEQ ID NO: 439451 - DNA, 55 bp, Artificial
  Synthetic oligonucleotide
gtgaagctcgaagtgtctcgtaaatctatccgtgatttgcgctcttcgggtatta

SEQ ID NO: 439452 - DNA, 60 bp, Artificial
  Synthetic oligonucleotide
gtgaagctgttagacattttcctagaccatggctacatagcttaggacaatatatctatg

SEQ ID NO: 439453 - DNA, 59 bp, Artificial
  Synthetic oligonucleotide
gtgaagcttaatcggtagttacctggttccattcctggtctatgatgtcaacgagctcc

SEQ ID NO: 439454 - DNA, 60 bp, Artificial
  Synthetic oligonucleotide
gtgaagcttgtagagtctactcccctgcctaatgatgagatttcacatgtcgcgtcattt

SEQ ID NO: 439455 - DNA, 52 bp, Artificial
  Synthetic oligonucleotide
gtgaagcttttggggcaggttttgtagataatattaaggaacaaattcagac

SEQ ID NO: 439456 - DNA, 58 bp, Artificial
  Synthetic oligonucleotide
gtgaaggagaatatctacgtttgatgcgcgactatacagcggttaaagttgaagaagt

SEQ ID NO: 439457 - DNA, 52 bp, Artificial
  Synthetic oligonucleotide
gtgaaggagcagttgtcatcaagacacaggcaggagacatcttcccggtacc

SEQ ID NO: 439458 - DNA, 60 bp, Artificial
  Synthetic oligonucleotide
gtgaaggatttgagcatgtggccaatacaattataccatctgatagctatattcctggag

SEQ ID NO: 439459 - DNA, 60 bp, Artificial
  Synthetic oligonucleotide
gtgaaggcccttgtaaagttcaatcgttcgaatctaggcacgatgtctctcatattggga

SEQ ID NO: 439460 - DNA, 55 bp, Artificial
  Synthetic oligonucleotide
gtgaaggcgttacaacgattaatgtagagccttatgaaaagattgaggttggcgg

SEQ ID NO: 439461 - DNA, 59 bp, Artificial
  Synthetic oligonucleotide
gtgaaggctcgccgagggcactcaacggaggagctgcgctttggccctaccgttcaagc

SEQ ID NO: 439462 - DNA, 59 bp, Artificial
  Synthetic oligonucleotide
gtgaagggcgacacgtactgctcaggttgtggaggaaataatttgttggctgaatattc

SEQ ID NO: 439463 - DNA, 60 bp, Artificial
  Synthetic oligonucleotide
gtgaaggggaccctgatcgccattgatccatttgatgacaggcgggaagcagggggagaa

SEQ ID NO: 439464 - DNA, 52 bp, Artificial
  Synthetic oligonucleotide
gtgaaggggcagtctcactcatcgagggaatcaaccacacgcatcatgtgta

SEQ ID NO: 439465 - DNA, 59 bp, Artificial
  Synthetic oligonucleotide
gtgaagggtcctccgggatgtgctcagcacctagcctaaactaagtccatatgcccacc

SEQ ID NO: 439466 - DNA, 52 bp, Artificial
  Synthetic oligonucleotide
gtgaaggtatatgcgtgttcactgccgtgttcacgggagtttcttcgagagc

SEQ ID NO: 439467 - DNA, 58 bp, Artificial
  Synthetic oligonucleotide
gtgaaggtatttcacagttatctaactctgttgcaatgttcttacaaggttcattggg

SEQ ID NO: 439468 - DNA, 58 bp, Artificial
  Synthetic oligonucleotide
gtgaaggtccctgtaaggttcaatcgtttgaacaacgacatgacgtctctcatgttgg

SEQ ID NO: 439469 - DNA, 55 bp, Artificial
  Synthetic oligonucleotide
gtgaaggtgcatcccacgagataatccttcgtggtcacatccctcaacgggacac

SEQ ID NO: 439470 - DNA, 52 bp, Artificial
  Synthetic oligonucleotide
gtgaaggttatgtctttgtcccttccgaaccaacgtccaattttgaacctcc

SEQ ID NO: 439471 - DNA, 55 bp, Artificial
  Synthetic oligonucleotide
gtgaaggttgattcttcaacttttattgtctcaagcatgttcccgccatcaacca

SEQ ID NO: 439472 - DNA, 54 bp, Artificial
  Synthetic oligonucleotide
gtgaagtaacgggagtggtaggagaagggttgggtgatggtatggcgggaggag

SEQ ID NO: 439473 - DNA, 55 bp, Artificial
  Synthetic oligonucleotide
gtgaagtactttcctaccgtaatcacaacggcctaccattccgcgatgagatcgc

SEQ ID NO: 439474 - DNA, 57 bp, Artificial
  Synthetic oligonucleotide
gtgaagtagccaattatgtaaactggacaagatttaaagataactgtacctggcaac

SEQ ID NO: 439475 - DNA, 51 bp, Artificial
  Synthetic oligonucleotide
gtgaagtatcgtaatttagtgtcatgcaagtggtatgtatctgctgcagct

SEQ ID NO: 439476 - DNA, 57 bp, Artificial
  Synthetic oligonucleotide
gtgaagtcagacataaaggtagggactcgccaccatccttacagttcctagccttaa

SEQ ID NO: 439477 - DNA, 55 bp, Artificial
  Synthetic oligonucleotide
gtgaagtcattgatttgcagggagaacatcaagactaagaaccatacgtacaccg

SEQ ID NO: 439478 - DNA, 55 bp, Artificial
  Synthetic oligonucleotide
gtgaagtccactcctccgttgaagtagttgtgcctcccgagagaccttgcccagg

SEQ ID NO: 439479 - DNA, 55 bp, Artificial
  Synthetic oligonucleotide
gtgaagtcctttgacattagtggtactctttacgttcagtctcctaccagttcaa

SEQ ID NO: 439480 - DNA, 57 bp, Artificial
  Synthetic oligonucleotide
gtgaagtgaccgttcgtcagggaatccttatgggactcccgacgacctggcctctgc

SEQ ID NO: 439481 - DNA, 57 bp, Artificial
  Synthetic oligonucleotide
gtgaagtgggattaatttcaagtatgtctcaaccaaacgtcaggtatttacaccaca

SEQ ID NO: 439482 - DNA, 60 bp, Artificial
  Synthetic oligonucleotide
gtgaagttggaatcaacaaggatttaccagattttggcgatctattcaactgtcgccagc

SEQ ID NO: 439483 - DNA, 60 bp, Artificial
  Synthetic oligonucleotide
gtgaagtttccgcaatagttgatcgatttttcgaatgttatactgacgcagctaaagctg

SEQ ID NO: 439484 - DNA, 55 bp, Artificial
  Synthetic oligonucleotide
gtgaagtttgggatccgagaaactatagactgagtttatttggtagacctcgcac

SEQ ID NO: 439485 - DNA, 60 bp, Artificial
  Synthetic oligonucleotide
gtgaataaacttagaatgatgctatcatctaagggaattgatcaaaaaatgagagtactt

SEQ ID NO: 439486 - DNA, 60 bp, Artificial
  Synthetic oligonucleotide
gtgaataccagccaccaacaggtatccgcgatccctgcattgatacaccagcctatcctg

SEQ ID NO: 439487 - DNA, 52 bp, Artificial
  Synthetic oligonucleotide
gtgaatacccgtactatgtagttacacatgctaacgctggaaacaaaagatc

SEQ ID NO: 439488 - DNA, 55 bp, Artificial
  Synthetic oligonucleotide
gtgaataccttacaatgaaaatgcaccatgggggacaaatggtccccttttcggc

SEQ ID NO: 439489 - DNA, 60 bp, Artificial
  Synthetic oligonucleotide
gtgaatacgatagtgtatccagcgtttggaatgcaacgaatgcattatagaaacggggac

SEQ ID NO: 439490 - DNA, 60 bp, Artificial
  Synthetic oligonucleotide
gtgaatagagttaggcagggttactcaccattatcgttgcagatccaccgcccagcaccg

SEQ ID NO: 439491 - DNA, 60 bp, Artificial
  Synthetic oligonucleotide
gtgaatagcactattctatgtcagtgccgtgaggatactgttacattgcacaaagatctt

SEQ ID NO: 439492 - DNA, 55 bp, Artificial
  Synthetic oligonucleotide
gtgaataggcacgaagtacgcgaccgacaagctccaagcctctgtccaatagccg

SEQ ID NO: 439493 - DNA, 60 bp, Artificial
  Synthetic oligonucleotide
gtgaataggttgcggatgcttctatcatctcaaaatataacacaagagactagagttttg

SEQ ID NO: 439494 - DNA, 55 bp, Artificial
  Synthetic oligonucleotide
gtgaatatcgagcaggacataacaaggttggatctctacaatacttggcactagc

SEQ ID NO: 439495 - DNA, 60 bp, Artificial
  Synthetic oligonucleotide
gtgaatattcataattacatcgtttatgttgattgctttgtgggcgtgtccgcaaggcag

SEQ ID NO: 439496 - DNA, 60 bp, Artificial
  Synthetic oligonucleotide
gtgaatattggcgtatttcccaagctgctgttggatcgtatcttgaaaggacgtctatat

SEQ ID NO: 439497 - DNA, 51 bp, Artificial
  Synthetic oligonucleotide
gtgaatcaaacattacaggactactattatcaagagatggtggtgtgggta

SEQ ID NO: 439498 - DNA, 60 bp, Artificial
  Synthetic oligonucleotide
gtgaatcagttctagcagacgccaatgaaacgatgcttgctaatgttacatcagtgagac

SEQ ID NO: 439499 - DNA, 58 bp, Artificial
  Synthetic oligonucleotide
gtgaatcattcccttcaggcacacctgcagaggtctcgctgacatcttgccctgcggg

SEQ ID NO: 439500 - DNA, 60 bp, Artificial
  Synthetic oligonucleotide
gtgaatccatggttggcgcagttaagtgcgctgaaataggaacaaccacagggaagatca

SEQ ID NO: 439501 - DNA, 60 bp, Artificial
  Synthetic oligonucleotide
gtgaatccatgtcccgcacagtttaagtggaagtatatggagcacccgcactgcagatca

SEQ ID NO: 439502 - DNA, 56 bp, Artificial
  Synthetic oligonucleotide
gtgaatcccaggtcgccaagcccagaacctcctcagagtgctttggttaacgaccc

SEQ ID NO: 439503 - DNA, 52 bp, Artificial
  Synthetic oligonucleotide
gtgaatccccaacgccttccgaaggttgtggttgaaccgtatctggagtgtg

SEQ ID NO: 439504 - DNA, 55 bp, Artificial
  Synthetic oligonucleotide
gtgaatccccagttccttccggaggttgtggttgaaccgtatctggatcgatatg

SEQ ID NO: 439505 - DNA, 60 bp, Artificial
  Synthetic oligonucleotide
gtgaatccccagttgcttcctgaggttgtggttgaatctgacttggacatggatgatgtc

SEQ ID NO: 439506 - DNA, 57 bp, Artificial
  Synthetic oligonucleotide
gtgaatcgtaagaccgctgttaaacagacgtctaaatctcgtgtatcgcgaaagttg

SEQ ID NO: 439507 - DNA, 55 bp, Artificial
  Synthetic oligonucleotide
gtgaatctacttccttattcaggtctcttagtccagtgagatcactatcgtctct

SEQ ID NO: 439508 - DNA, 59 bp, Artificial
  Synthetic oligonucleotide
gtgaatctagatagagacatggcgaggcaggtctccggggggaaacgggattatcctga

SEQ ID NO: 439509 - DNA, 53 bp, Artificial
  Synthetic oligonucleotide
gtgaatctaggagttttctgatgtcatcagaaccttgacaacttaggaccatc

SEQ ID NO: 439510 - DNA, 56 bp, Artificial
  Synthetic oligonucleotide
gtgaatctcttagtagaagtagattatagattaggagtaggagcactgatagtagc

SEQ ID NO: 439511 - DNA, 55 bp, Artificial
  Synthetic oligonucleotide
gtgaatgaagatcttgttgtttcaactgcagctgctatggtgcatggtaacactc

SEQ ID NO: 439512 - DNA, 51 bp, Artificial
  Synthetic oligonucleotide
gtgaatgaagatggcgtctaacgacgctgccactgcgaccgctggcaaaac

SEQ ID NO: 439513 - DNA, 55 bp, Artificial
  Synthetic oligonucleotide
gtgaatgatgactggacatgttttatagtaggggtgccatgttctctagaaggcg

SEQ ID NO: 439514 - DNA, 55 bp, Artificial
  Synthetic oligonucleotide
gtgaatgcaaattcgtaccgacctacccacgtgaaataaatttggaacttgcagc

SEQ ID NO: 439515 - DNA, 55 bp, Artificial
  Synthetic oligonucleotide
gtgaatgcaagggctttcaactacgatcgtatgagtctaggaagggagactctca

SEQ ID NO: 439516 - DNA, 55 bp, Artificial
  Synthetic oligonucleotide
gtgaatgcagcatcccctcgaacaatcaagtggtgccatgtgaaccgatagcagg

SEQ ID NO: 439517 - DNA, 59 bp, Artificial
  Synthetic oligonucleotide
gtgaatgcagtcaagcacgtgaaagcgccagagaagatccccgggagtggaaccctaga

SEQ ID NO: 439518 - DNA, 60 bp, Artificial
  Synthetic oligonucleotide
gtgaatgccagaattgagccattcttgaagacaacaccacgccctctcaagttaccggat

SEQ ID NO: 439519 - DNA, 59 bp, Artificial
  Synthetic oligonucleotide
gtgaatgctagaattgaaccatttctgagaacaacaccacgccctcttagattaccgga

SEQ ID NO: 439520 - DNA, 58 bp, Artificial
  Synthetic oligonucleotide
gtgaatggcaagataaggttagggccactggagtgatagcagcaagacagttggaagc

SEQ ID NO: 439521 - DNA, 55 bp, Artificial
  Synthetic oligonucleotide
gtgaatggtcttgtgatcgacgccggcgagagtggcgagttcgagctgcgacagg

SEQ ID NO: 439522 - DNA, 60 bp, Artificial
  Synthetic oligonucleotide
gtgaatggtgggatggatatgatggtgaagatatcgtcgttattgacgacttttatgggt

SEQ ID NO: 439523 - DNA, 55 bp, Artificial
  Synthetic oligonucleotide
gtgaatgtaaactgtccggaattgactataccacaacatccatttgattcaccag

SEQ ID NO: 439524 - DNA, 60 bp, Artificial
  Synthetic oligonucleotide
gtgaatgtgagaggatcagggatgagaatacttgtgagaggtaactcccctgtgttcaac

SEQ ID NO: 439525 - DNA, 55 bp, Artificial
  Synthetic oligonucleotide
gtgaatgtggcggaattgtccgagtctgaggcctcttgtttcgcgttgccagcgg

SEQ ID NO: 439526 - DNA, 59 bp, Artificial
  Synthetic oligonucleotide
gtgaatgtgtgagtagcctatttataggcgggagttcagtgcgggatgttagttaggcc

SEQ ID NO: 439527 - DNA, 55 bp, Artificial
  Synthetic oligonucleotide
gtgaatgttcaaatggtattggaatattttgacgtaaagcctgacgggttagcgc

SEQ ID NO: 439528 - DNA, 57 bp, Artificial
  Synthetic oligonucleotide
gtgaattcaacaaggcgtgcgaactaacggactccagttggattgaacttgacgaaa

SEQ ID NO: 439529 - DNA, 54 bp, Artificial
  Synthetic oligonucleotide
gtgaattcagacggctatgggcagagcgcgccaacttcaaaagatgatctcaat

SEQ ID NO: 439530 - DNA, 58 bp, Artificial
  Synthetic oligonucleotide
gtgaattcgatccaagccatgtgtaatcccagttgtttccgtaggttgtagttgaatc

SEQ ID NO: 439531 - DNA, 60 bp, Artificial
  Synthetic oligonucleotide
gtgaattgactgactctagttggatagaactcgatgaaataggggaggatgttgccccaa

SEQ ID NO: 439532 - DNA, 55 bp, Artificial
  Synthetic oligonucleotide
gtgaattgagcccgcggttgaacgcaataagcctagaccggggacacgaaagggc

SEQ ID NO: 439533 - DNA, 55 bp, Artificial
  Synthetic oligonucleotide
gtgaattgcctcctacttaagattggtttatctaaagctagattttcctttatat

SEQ ID NO: 439534 - DNA, 59 bp, Artificial
  Synthetic oligonucleotide
gtgaattggctcctgttggggacacttcctcttgtatccagaagggggtgtcgacatca

SEQ ID NO: 439535 - DNA, 59 bp, Artificial
  Synthetic oligonucleotide
gtgaattgtattagcaagacattttggtaatcgtgcgttgtttactgctcagcgtgagg

SEQ ID NO: 439536 - DNA, 60 bp, Artificial
  Synthetic oligonucleotide
gtgaattgtcaatcagcttgtaaccatcagggatgataagtggtagtcctggacacacaa

SEQ ID NO: 439537 - DNA, 55 bp, Artificial
  Synthetic oligonucleotide
gtgaatttacaacacagtatcctgtgaaattgagaatcgaagagcgggcgagctt

SEQ ID NO: 439538 - DNA, 55 bp, Artificial
  Synthetic oligonucleotide
gtgaatttccataattggttaacagcgcgcgattataataggatgggctgcacag

SEQ ID NO: 439539 - DNA, 55 bp, Artificial
  Synthetic oligonucleotide
gtgaatttcccattttacccttaaagatgtgtctggtaggcgcgtgggagtgccc

SEQ ID NO: 439540 - DNA, 60 bp, Artificial
  Synthetic oligonucleotide
gtgaatttcgtttattccgctatagcactcttgagaaggcgctactgagcaatgcaagtg

SEQ ID NO: 439541 - DNA, 50 bp, Artificial
  Synthetic oligonucleotide
gtgaatttgacattggacagtttaaaaactacatgaactttctcacatta

SEQ ID NO: 439542 - DNA, 55 bp, Artificial
  Synthetic oligonucleotide
gtgacaaacaacatcacccttgacgttggacacctagtcacatttgcgctctggc

SEQ ID NO: 439543 - DNA, 52 bp, Artificial
  Synthetic oligonucleotide
gtgacaaacaacccatgtacgtccactacggaaggtgcacaagaaccagaca

SEQ ID NO: 439544 - DNA, 55 bp, Artificial
  Synthetic oligonucleotide
gtgacaaacttattgaggggttctaacacagtcaaagttgtgggcaaaggtgggc

SEQ ID NO: 439545 - DNA, 60 bp, Artificial
  Synthetic oligonucleotide
gtgacaacaaatgttttgtatgtgctcagactaataccgaaacagctgaaaagtccagtg

SEQ ID NO: 439546 - DNA, 55 bp, Artificial
  Synthetic oligonucleotide
gtgacaacaacccggagctgtacgccacggggcagctggaccgcccgctagaagt

SEQ ID NO: 439547 - DNA, 55 bp, Artificial
  Synthetic oligonucleotide
gtgacaacaagggaacctactgcggtgcaccaatcttaggtccaggaagtgcccc

SEQ ID NO: 439548 - DNA, 58 bp, Artificial
  Synthetic oligonucleotide
gtgacaacagtttggacgcaattaggacgacgcttcctatacgacaaattgaaagcta

SEQ ID NO: 439549 - DNA, 57 bp, Artificial
  Synthetic oligonucleotide
gtgacaacctagcgggtaagactgacatacattttaccaacgcatttaacagttatg

SEQ ID NO: 439550 - DNA, 60 bp, Artificial
  Synthetic oligonucleotide
gtgacaacgcatgtatagagtcaatcagaaacgggacctatgatcacgacatataccgag

SEQ ID NO: 439551 - DNA, 60 bp, Artificial
  Synthetic oligonucleotide
gtgacaactcatgtatagaatcaatcaggaacgggacttatgatcatgacatatacagag

SEQ ID NO: 439552 - DNA, 55 bp, Artificial
  Synthetic oligonucleotide
gtgacaactgtaaagcttggctcacgacaaactaactgaaacaggacccccctgt

SEQ ID NO: 439553 - DNA, 55 bp, Artificial
  Synthetic oligonucleotide
gtgacaagagatttctggatatcactgcgtaactggttagtctttgcgtcctgag

SEQ ID NO: 439554 - DNA, 55 bp, Artificial
  Synthetic oligonucleotide
gtgacaagcagcactggcgcgtcaaacgtgcaaagggcgtcggcctgtgtctcga

SEQ ID NO: 439555 - DNA, 58 bp, Artificial
  Synthetic oligonucleotide
gtgacaaggatagcagaaatttaattgatcatattaaatattggggccttcttagacg

SEQ ID NO: 439556 - DNA, 58 bp, Artificial
  Synthetic oligonucleotide
gtgacaaggcaaaagtacactcacaacgcacgtgatgacatcgatttttacccaatgt

SEQ ID NO: 439557 - DNA, 55 bp, Artificial
  Synthetic oligonucleotide
gtgacaagtttgatgtcgatgttttttcccggatgtgtaacactttaggtgtaga

SEQ ID NO: 439558 - DNA, 60 bp, Artificial
  Synthetic oligonucleotide
gtgacaatacctgcataggatcaatcagaaatggaacttatgaccatgatgtatacagag

SEQ ID NO: 439559 - DNA, 59 bp, Artificial
  Synthetic oligonucleotide
gtgacaatgcctaacaataacaatttcgataaactatacatctgggggatccatcaccc

SEQ ID NO: 439560 - DNA, 60 bp, Artificial
  Synthetic oligonucleotide
gtgacaatgcttgcatagagtcaatcagaaatggaacttatgaccataacgaatacagag

SEQ ID NO: 439561 - DNA, 60 bp, Artificial
  Synthetic oligonucleotide
gtgacaatgcttgcatagattcaatcaggaatgggacctatgatcatgacatatataggg

SEQ ID NO: 439562 - DNA, 55 bp, Artificial
  Synthetic oligonucleotide
gtgacaatggctatgatggcttattgttgcgacatggacgccgtggattgtgcta

SEQ ID NO: 439563 - DNA, 57 bp, Artificial
  Synthetic oligonucleotide
gtgacaatgtaactagtagcacccctattcctaggtctcgccccacggcacgccttg

SEQ ID NO: 439564 - DNA, 60 bp, Artificial
  Synthetic oligonucleotide
gtgacaatgtcaattgcactgggacattttgcgctatcgacctttgcatcgatatatggc

SEQ ID NO: 439565 - DNA, 55 bp, Artificial
  Synthetic oligonucleotide
gtgacacaattgtttgaaagagatgtagaaaattttgaggagccacctgatagac

SEQ ID NO: 439566 - DNA, 59 bp, Artificial
  Synthetic oligonucleotide
gtgacacactcatcagggtgaactcattggattctattttagtatttcgtaatattaaa

SEQ ID NO: 439567 - DNA, 60 bp, Artificial
  Synthetic oligonucleotide
gtgacacaggatcatcagctatgattccagctgatattgatatggagggtgatctgccaa

SEQ ID NO: 439568 - DNA, 58 bp, Artificial
  Synthetic oligonucleotide
gtgacacccagggagggtatgctggtaaccctgggttagtcgtcttgagatactcatc

SEQ ID NO: 439569 - DNA, 58 bp, Artificial
  Synthetic oligonucleotide
gtgacacccgggttgtgctgcgcctagttaacacgagcacaggtcccaccctatagtg

SEQ ID NO: 439570 - DNA, 60 bp, Artificial
  Synthetic oligonucleotide
gtgacaccgaatcgccagggtctaagactggtgtgcttaatctatatagtccttgatatg

SEQ ID NO: 439571 - DNA, 56 bp, Artificial
  Synthetic oligonucleotide
gtgacacctgccccctcacgctaaactgtgacaggattgagaacaaaggaaaggtc

SEQ ID NO: 439572 - DNA, 56 bp, Artificial
  Synthetic oligonucleotide
gtgacacgaggtaacggtattactcaccgtgtcggtaagcgcttctgtgttaagtc

SEQ ID NO: 439573 - DNA, 56 bp, Artificial
  Synthetic oligonucleotide
gtgacacgggtagcgacatggtgtgttacgctagtggcacaccgcaagcacgacgg

SEQ ID NO: 439574 - DNA, 60 bp, Artificial
  Synthetic oligonucleotide
gtgacacgtggtaacggcatcactcatcgtgtaggcaagcgtttctgcgtcaagtctgca

SEQ ID NO: 439575 - DNA, 60 bp, Artificial
  Synthetic oligonucleotide
gtgacactatgatcactgtgccgtcaggaggcatctgcagtctgattggcacgtatgccc

SEQ ID NO: 439576 - DNA, 56 bp, Artificial
  Synthetic oligonucleotide
gtgacactctgcacttcttggatccgggctacatagtggagacattccaaaactgc

SEQ ID NO: 439577 - DNA, 56 bp, Artificial
  Synthetic oligonucleotide
gtgacagaaccgcatatcaccagtaaccgattagaatggattgaccctgacagtag

SEQ ID NO: 439578 - DNA, 51 bp, Artificial
  Synthetic oligonucleotide
gtgacagactaaggtgatggagtcgcttcgtgcgagccaatcgcctggtgt

SEQ ID NO: 439579 - DNA, 60 bp, Artificial
  Synthetic oligonucleotide
gtgacagaggctttcgatgcatgggataatacagtaacagaacaagcagtagaggatgtc

SEQ ID NO: 439580 - DNA, 55 bp, Artificial
  Synthetic oligonucleotide
gtgacagatggtggctatctgggcttcctacatgggagcgtacctaagctacccc

SEQ ID NO: 439581 - DNA, 60 bp, Artificial
  Synthetic oligonucleotide
gtgacagcgaggtccgaatgggatgtggacaaatctttgttacaatccttgtccatgacg

SEQ ID NO: 439582 - DNA, 57 bp, Artificial
  Synthetic oligonucleotide
gtgacaggcacaatggcgtgtatgacattcagttcatggcccaatttcctcctacgt

SEQ ID NO: 439583 - DNA, 55 bp, Artificial
  Synthetic oligonucleotide
gtgacaggcagtgcgtttgggtgtgaccctgacctgttttggagtaagatcccag

SEQ ID NO: 439584 - DNA, 54 bp, Artificial
  Synthetic oligonucleotide
gtgacaggggagttaacaacagggtgtgggttcagcctctaactaaacccacca

SEQ ID NO: 439585 - DNA, 55 bp, Artificial
  Synthetic oligonucleotide
gtgacagggttgaccgaatgtaccatgaactgatacagactaatatagcccagat

SEQ ID NO: 439586 - DNA, 60 bp, Artificial
  Synthetic oligonucleotide
gtgacaggtggtagaggctcgagtgcagtattagaggttgctgacccaagtcctcccact

SEQ ID NO: 439587 - DNA, 55 bp, Artificial
  Synthetic oligonucleotide
gtgacaggttttgaatttcccagaaaatttccaattgatcaagatggttctcctg

SEQ ID NO: 439588 - DNA, 55 bp, Artificial
  Synthetic oligonucleotide
gtgacagtcgaaagccactcgatggcggtctatgatagtgatggcgcccaacagt

SEQ ID NO: 439589 - DNA, 55 bp, Artificial
  Synthetic oligonucleotide
gtgacagtgacgccacctctgtggacaaaccgacagagccaggcgtatcagctga

SEQ ID NO: 439590 - DNA, 60 bp, Artificial
  Synthetic oligonucleotide
gtgacagttagcgtcggaggtgttgacatgagggcaggacgcataatcgcgtgggatggg

SEQ ID NO: 439591 - DNA, 53 bp, Artificial
  Synthetic oligonucleotide
gtgacagttctgcagaagattcaacagcctcacagataaacctcatatcatca

SEQ ID NO: 439592 - DNA, 55 bp, Artificial
  Synthetic oligonucleotide
gtgacagttgatagcatttcattgatggatcccctagctccaggtttgctacctg

SEQ ID NO: 439593 - DNA, 60 bp, Artificial
  Synthetic oligonucleotide
gtgacagttgctactctgagtgcttagatagtcacatacttgtcaggtctaccggattta

SEQ ID NO: 439594 - DNA, 60 bp, Artificial
  Synthetic oligonucleotide
gtgacatagcaggaaccactagtacccttcaggaacaaatagcatggatgacaaataacc

SEQ ID NO: 439595 - DNA, 55 bp, Artificial
  Synthetic oligonucleotide
gtgacatagcaggaaccactagtactcttcaggaacaagtagcatggatgaccgg

SEQ ID NO: 439596 - DNA, 60 bp, Artificial
  Synthetic oligonucleotide
gtgacataggaatacatctgtctcacacaggtgacacggctggagttcatatgattgtcc

SEQ ID NO: 439597 - DNA, 55 bp, Artificial
  Synthetic oligonucleotide
gtgacatatccgtctgcccactagatacaacaatgaatgggattggttgttcacc

SEQ ID NO: 439598 - DNA, 60 bp, Artificial
  Synthetic oligonucleotide
gtgacatcaaagagttcgtggcgtacgcgtctgggcgtcgcagcttcggagatgttctga

SEQ ID NO: 439599 - DNA, 51 bp, Artificial
  Synthetic oligonucleotide
gtgacatcaggatcatgggtgaactcgcccaggtggaaatcggccacgggg

SEQ ID NO: 439600 - DNA, 51 bp, Artificial
  Synthetic oligonucleotide
gtgacatcgaaccttttgatggtagcatttacgagtgttacgagcgtaaaa

SEQ ID NO: 439601 - DNA, 55 bp, Artificial
  Synthetic oligonucleotide
gtgacatcggattgacgagaaccagcatgcgttttgatgtcgcacgactcgaaca

SEQ ID NO: 439602 - DNA, 55 bp, Artificial
  Synthetic oligonucleotide
gtgacatgatagacccttcgctaatagctgcttacaccactggttgccagatata

SEQ ID NO: 439603 - DNA, 60 bp, Artificial
  Synthetic oligonucleotide
gtgacatgcagaagcaacttaaacagatgtttagctatcaaagaacccatagatgtgagc

SEQ ID NO: 439604 - DNA, 60 bp, Artificial
  Synthetic oligonucleotide
gtgacatggcaatttgttatggtgcagaaagtgtgacactctcacgaggacaaaatactg

SEQ ID NO: 439605 - DNA, 55 bp, Artificial
  Synthetic oligonucleotide
gtgacatggctatgtgttatggagcctcagtagtaaacctagttagaggctccaa

SEQ ID NO: 439606 - DNA, 55 bp, Artificial
  Synthetic oligonucleotide
gtgacatggttgacacagggtatggcgctatggattttagtgccttgcaggctaa

SEQ ID NO: 439607 - DNA, 60 bp, Artificial
  Synthetic oligonucleotide
gtgacatgtgaagaattactccagaaaatgaacgacgcatcaattaacggtaatacaatg

SEQ ID NO: 439608 - DNA, 60 bp, Artificial
  Synthetic oligonucleotide
gtgacatgttcatgccccgttccattggaggcccagtgagctcccataaccacattccag

SEQ ID NO: 439609 - DNA, 60 bp, Artificial
  Synthetic oligonucleotide
gtgacatgttgacttggtcaatcgggtcctctcaaactatggcaagcaattggggaatgg

SEQ ID NO: 439610 - DNA, 55 bp, Artificial
  Synthetic oligonucleotide
gtgacattaactgaggaagcagaactagagttggcagaaaacagggagattctga

SEQ ID NO: 439611 - DNA, 55 bp, Artificial
  Synthetic oligonucleotide
gtgacattagatgcgtctgaaaagtcaaatatagttgatagtgtcacgcttcgag

SEQ ID NO: 439612 - DNA, 60 bp, Artificial
  Synthetic oligonucleotide
gtgacattatatcttcggatacgtgttcatgacatctgatataagacccgttaaacaata

SEQ ID NO: 439613 - DNA, 60 bp, Artificial
  Synthetic oligonucleotide
gtgacattcacgagtaccatggcagccatttccctgcagttgtcgggcatattcaatgta

SEQ ID NO: 439614 - DNA, 53 bp, Artificial
  Synthetic oligonucleotide
gtgacattggggagagcagtccggatccagagaaggaaggggctcggagccga

SEQ ID NO: 439615 - DNA, 54 bp, Artificial
  Synthetic oligonucleotide
gtgacatttcctgggatctcggagtcagctttgtctctaggagactgagcgttc

SEQ ID NO: 439616 - DNA, 60 bp, Artificial
  Synthetic oligonucleotide
gtgacatttgttaatgtagctactggtgcacagggagtttcccgctctctcgactggtct

SEQ ID NO: 439617 - DNA, 55 bp, Artificial
  Synthetic oligonucleotide
gtgaccaaaacttgaccccttatctatgcgacgatgagtttattgtaagcgtcgc

SEQ ID NO: 439618 - DNA, 60 bp, Artificial
  Synthetic oligonucleotide
gtgaccaagattaggagtgttagcgctggtcgtgcactctatataccaccatacgaactc

SEQ ID NO: 439619 - DNA, 59 bp, Artificial
  Synthetic oligonucleotide
gtgaccaataccatatgcagttgcttgtaagtatggtggtttactagagaaaccataac

SEQ ID NO: 439620 - DNA, 60 bp, Artificial
  Synthetic oligonucleotide
gtgaccacacaggtgatattgagagaaagttagcacattccccgaaagttgagctcctta

SEQ ID NO: 439621 - DNA, 55 bp, Artificial
  Synthetic oligonucleotide
gtgaccacccagcgaagaacaactatcaagtttttgaaccctagatcatcgtgta

SEQ ID NO: 439622 - DNA, 55 bp, Artificial
  Synthetic oligonucleotide
gtgaccaccggctaatgtcagctgccatcaaggatagcaaagcagtccacgctga

SEQ ID NO: 439623 - DNA, 55 bp, Artificial
  Synthetic oligonucleotide
gtgaccactatcaggtggtctaacacgtagcgcatcactatagggcacgcgatgg

SEQ ID NO: 439624 - DNA, 60 bp, Artificial
  Synthetic oligonucleotide
gtgaccagatatgcattggataccactccaacaactccacagaaaaggttgacacaattc

SEQ ID NO: 439625 - DNA, 55 bp, Artificial
  Synthetic oligonucleotide
gtgaccaggcacggcaagaaagacttcgcagacgtagggaaacacaagtatagca

SEQ ID NO: 439626 - DNA, 60 bp, Artificial
  Synthetic oligonucleotide
gtgaccagggagatatgcatgtcaatgcgtgtccaaggttttgatctggacactctagac

SEQ ID NO: 439627 - DNA, 55 bp, Artificial
  Synthetic oligonucleotide
gtgaccagtgcagatagaatgaggtacacgaatgatttcgtgccatatggctcac

SEQ ID NO: 439628 - DNA, 54 bp, Artificial
  Synthetic oligonucleotide
gtgaccataccttataggagattcaaagggaaagcgaaggtctatttccaaaac

SEQ ID NO: 439629 - DNA, 55 bp, Artificial
  Synthetic oligonucleotide
gtgaccatccagttaacttctggcgctcttcctcgctttcttgctcatagcggct

SEQ ID NO: 439630 - DNA, 52 bp, Artificial
  Synthetic oligonucleotide
gtgaccatccgccacgcttcaactgtctcgtaggcatcgcttgcagtgctca

SEQ ID NO: 439631 - DNA, 60 bp, Artificial
  Synthetic oligonucleotide
gtgaccatgcttcttatgctgttgcccacagccctggcattccatttgaccacacgaggg

SEQ ID NO: 439632 - DNA, 60 bp, Artificial
  Synthetic oligonucleotide
gtgacccactctttcctggtgatacctgagtgtcctgctccccttctgggacgtgatctg

SEQ ID NO: 439633 - DNA, 60 bp, Artificial
  Synthetic oligonucleotide
gtgacccatattcgactatccaacttgacaggacattgctatcggacattagtgctgtca

SEQ ID NO: 439634 - DNA, 55 bp, Artificial
  Synthetic oligonucleotide
gtgaccccaaatacattgaccttccagcaactgactcagaccggatgtacattgc

SEQ ID NO: 439635 - DNA, 52 bp, Artificial
  Synthetic oligonucleotide
gtgaccccattcccgctatagggcttgacccaaaaatggtagctacatgcga

SEQ ID NO: 439636 - DNA, 56 bp, Artificial
  Synthetic oligonucleotide
gtgaccccgcgtatcgctctaaaaaaaacctatccagcagcaaagcgtaaacaata

SEQ ID NO: 439637 - DNA, 55 bp, Artificial
  Synthetic oligonucleotide
gtgacccctatgagcacgggtttgtcaagcgagatggtaagcttcgccattctcg

SEQ ID NO: 439638 - DNA, 55 bp, Artificial
  Synthetic oligonucleotide
gtgacccctcgcggcatccttgctcctaacgatgttttgcatcgtgacctggtgg

SEQ ID NO: 439639 - DNA, 59 bp, Artificial
  Synthetic oligonucleotide
gtgacccgaataatggactacattatatatagattcttgttaatttctgtagcattatt

SEQ ID NO: 439640 - DNA, 59 bp, Artificial
  Synthetic oligonucleotide
gtgacccggacttgacatcagactcttggtccactgttagcggatcggaggacgtcgtg

SEQ ID NO: 439641 - DNA, 55 bp, Artificial
  Synthetic oligonucleotide
gtgaccctaagtcctcaggtacgcagcatatgggcgtacgaactgggagactata

SEQ ID NO: 439642 - DNA, 58 bp, Artificial
  Synthetic oligonucleotide
gtgaccctcaacagctgcctgcaccacgtgttatgatttcacgtggtactttggaacc

SEQ ID NO: 439643 - DNA, 55 bp, Artificial
  Synthetic oligonucleotide
gtgaccctcaggacaaagaccaacttatatgcccaattacatgcatcaaatccgg

SEQ ID NO: 439644 - DNA, 58 bp, Artificial
  Synthetic oligonucleotide
gtgaccctgacttttgcagcgaggggttgttactgtttgctctgaagcgcagttttcg

SEQ ID NO: 439645 - DNA, 55 bp, Artificial
  Synthetic oligonucleotide
gtgaccctgaggaaaaggctagtgaagaacccctacccagtttcttctctgctta

SEQ ID NO: 439646 - DNA, 55 bp, Artificial
  Synthetic oligonucleotide
gtgacccttccattggagcgcgtgactgtaaaatggtgggacggttgggctttcg

SEQ ID NO: 439647 - DNA, 55 bp, Artificial
  Synthetic oligonucleotide
gtgaccgcgaaaccgctgtatcaggttgtttcggatatgttgcactggcacgaag

SEQ ID NO: 439648 - DNA, 55 bp, Artificial
  Synthetic oligonucleotide
gtgaccgcgcaattagagttgaatgcgacgatcacaccgatgaattggcctctgc

SEQ ID NO: 439649 - DNA, 55 bp, Artificial
  Synthetic oligonucleotide
gtgacctaaaacgattcaaaggcgctcacgggcttctatatgagcaagagctagg

SEQ ID NO: 439650 - DNA, 50 bp, Artificial
  Synthetic oligonucleotide
gtgacctactccatagctgtagcaacactggatccttaacccaccattcc

SEQ ID NO: 439651 - DNA, 55 bp, Artificial
  Synthetic oligonucleotide
gtgacctgaataagcgactaagatgcggaatctctccattacactgctatttagt

SEQ ID NO: 439652 - DNA, 60 bp, Artificial
  Synthetic oligonucleotide
gtgacctgactcgcgtagtaagtcaaaaatagcacggatacgctgttctggagcgtgtct

SEQ ID NO: 439653 - DNA, 52 bp, Artificial
  Synthetic oligonucleotide
gtgacctgggaagccttggcttttgacccccctccctgggtcaagccctttg

SEQ ID NO: 439654 - DNA, 60 bp, Artificial
  Synthetic oligonucleotide
gtgaccttccacgacagattagtgactgagtacaaggcctctgtggacatgcctgcgctt

SEQ ID NO: 439655 - DNA, 60 bp, Artificial
  Synthetic oligonucleotide
gtgaccttcggctggtgcttcaagctagtgcctgtagatccaacagatgtggaggaagca

SEQ ID NO: 439656 - DNA, 51 bp, Artificial
  Synthetic oligonucleotide
gtgaccttgatgatctcagatccatctgcaacaactatgagataaaagttg

SEQ ID NO: 439657 - DNA, 56 bp, Artificial
  Synthetic oligonucleotide
gtgaccttgcaatgtgctatgggtcaactgttgctaccctagcaaggggttccaac

SEQ ID NO: 439658 - DNA, 58 bp, Artificial
  Synthetic oligonucleotide
gtgacctttccctggagcgctaacccagaaatcaaacaaggaatctgcagaagtagag

SEQ ID NO: 439659 - DNA, 59 bp, Artificial
  Synthetic oligonucleotide
gtgaccttttgcaatcagttagaaccccagaggtgatcaagtattgtgaagacaataaa

SEQ ID NO: 439660 - DNA, 50 bp, Artificial
  Synthetic oligonucleotide
gtgacgaaaaagatacatcaccatatgctacgttgataaatagatctgaa

SEQ ID NO: 439661 - DNA, 59 bp, Artificial
  Synthetic oligonucleotide
gtgacgaagagacgtgaacagtatcgcactaattacgataaacgttggactgaaaatca

SEQ ID NO: 439662 - DNA, 52 bp, Artificial
  Synthetic oligonucleotide
gtgacgaagggaccttggttgaatccggtgacagcgcgcgggttagcgcctg

SEQ ID NO: 439663 - DNA, 55 bp, Artificial
  Synthetic oligonucleotide
gtgacgaatccccgtcgtcacaactcccgttgtcagtgagacccgtatatccccc

SEQ ID NO: 439664 - DNA, 55 bp, Artificial
  Synthetic oligonucleotide
gtgacgaatctgacttggacgagtcgttgcttagtgacacgcccggtcttcgtgg

SEQ ID NO: 439665 - DNA, 55 bp, Artificial
  Synthetic oligonucleotide
gtgacgaatgccactccactgattccacgacgatcctcggtataggcacggtctt

SEQ ID NO: 439666 - DNA, 59 bp, Artificial
  Synthetic oligonucleotide
gtgacgaatggcagagtttattctgccagtggtcgggtacggagcggagcggagaacac

SEQ ID NO: 439667 - DNA, 55 bp, Artificial
  Synthetic oligonucleotide
gtgacgacaacgggagggtggtcaggctctccactctaccacaaggacgcgatcg

SEQ ID NO: 439668 - DNA, 55 bp, Artificial
  Synthetic oligonucleotide
gtgacgaccatcgactctggtatctggactacgtcgcgaagatgtcggtgcacca

SEQ ID NO: 439669 - DNA, 54 bp, Artificial
  Synthetic oligonucleotide
gtgacgacctttaaagcccaggcctaaccagcctggtcagaaactcctggggtc

SEQ ID NO: 439670 - DNA, 60 bp, Artificial
  Synthetic oligonucleotide
gtgacgacgttcatagaccgctcaagcgtacccatgttcgccttgatctcattggtcatg

SEQ ID NO: 439671 - DNA, 60 bp, Artificial
  Synthetic oligonucleotide
gtgacgactggcaatgagaccaccactttattggtgggccatatgtcccgagttagtgcg

SEQ ID NO: 439672 - DNA, 60 bp, Artificial
  Synthetic oligonucleotide
gtgacgagcagtatgctacgttgttccgtgtttggttgatgtcactagcgaagatgcgtc

SEQ ID NO: 439673 - DNA, 60 bp, Artificial
  Synthetic oligonucleotide
gtgacgaggcagccagatttagtacaacagggcattactctgtaagagatcaggacagag

SEQ ID NO: 439674 - DNA, 58 bp, Artificial
  Synthetic oligonucleotide
gtgacgattcactattggtatacaggaataaaccgaacattcagtttgaagtgtacga

SEQ ID NO: 439675 - DNA, 57 bp, Artificial
  Synthetic oligonucleotide
gtgacgcaaccaccaaaccagattgggtcaccaaaggcattgaaatgcaagggaaaa

SEQ ID NO: 439676 - DNA, 55 bp, Artificial
  Synthetic oligonucleotide
gtgacgcaagaccttctggaggaaaagagggcacagagcaggtagggcagcctac

SEQ ID NO: 439677 - DNA, 59 bp, Artificial
  Synthetic oligonucleotide
gtgacgcacccccaataccacgcccagtcatttacagctgcggtatcaaaaaccgcatg

SEQ ID NO: 439678 - DNA, 55 bp, Artificial
  Synthetic oligonucleotide
gtgacgcagaatcccctgggtctaacacgctccctcccaaacgattaagctctct

SEQ ID NO: 439679 - DNA, 60 bp, Artificial
  Synthetic oligonucleotide
gtgacgcagcgcgcactgatggagtggagtttcccaccattgaggcattaacatcttttc

SEQ ID NO: 439680 - DNA, 60 bp, Artificial
  Synthetic oligonucleotide
gtgacgcagttacgcacctacattctgacccaacttcagggtggaggaattatcttatca

SEQ ID NO: 439681 - DNA, 51 bp, Artificial
  Synthetic oligonucleotide
gtgacgcataatccctcagacatcacaattggcagaaagattctgaggcga

SEQ ID NO: 439682 - DNA, 55 bp, Artificial
  Synthetic oligonucleotide
gtgacgccaaccgttgtggactacgttccgcgacgggagccttactccgtgcgag

SEQ ID NO: 439683 - DNA, 60 bp, Artificial
  Synthetic oligonucleotide
gtgacgccgaatcacctgggtctagcacgcttggtcccagacgattgagctctctatatg

SEQ ID NO: 439684 - DNA, 60 bp, Artificial
  Synthetic oligonucleotide
gtgacgccttcatgtgggcctggcgaacgctaggctttggtggtgcagcacccctccctg

SEQ ID NO: 439685 - DNA, 55 bp, Artificial
  Synthetic oligonucleotide
gtgacgcctttggggcagatcgcaccttgggtgctagggtgcaccatcgctttgg

SEQ ID NO: 439686 - DNA, 59 bp, Artificial
  Synthetic oligonucleotide
gtgacgcgatgaacatcatgtttgaggaggtgtttcgcacggagtacggtttccaccca

SEQ ID NO: 439687 - DNA, 52 bp, Artificial
  Synthetic oligonucleotide
gtgacgcgtgatcgaaaacgcgcctacctgtgctaacgtgattcttgcgcac

SEQ ID NO: 439688 - DNA, 55 bp, Artificial
  Synthetic oligonucleotide
gtgacgctccgtgcacctcgctgccttccactcggtaagatcccactgggttgag

SEQ ID NO: 439689 - DNA, 58 bp, Artificial
  Synthetic oligonucleotide
gtgacgctcgggtcatacacgccttcggcttccgtcacccagcttcggaagatgggcc

SEQ ID NO: 439690 - DNA, 58 bp, Artificial
  Synthetic oligonucleotide
gtgacgctgcctaagcccccctcccccctagtcccctcagccaatatggccatgtaca

SEQ ID NO: 439691 - DNA, 57 bp, Artificial
  Synthetic oligonucleotide
gtgacgcttggtataggttgaaacgaggagatctaaagaagacaaagctggaaggcg

SEQ ID NO: 439692 - DNA, 50 bp, Artificial
  Synthetic oligonucleotide
gtgacggaacgctctgtcttggagcagacgtggggttgcccggggacgca

SEQ ID NO: 439693 - DNA, 53 bp, Artificial
  Synthetic oligonucleotide
gtgacggacgggattgacaaaacaaaggtcggaattgagtttcggaggttgga

SEQ ID NO: 439694 - DNA, 55 bp, Artificial
  Synthetic oligonucleotide
gtgacggagtcggatgcgtcgcagcgcgtgacccaactgcttggctcccttacta

SEQ ID NO: 439695 - DNA, 55 bp, Artificial
  Synthetic oligonucleotide
gtgacggcaatcaacccaggaccttcaggctaccctgtcatcgaagggatcagcc

SEQ ID NO: 439696 - DNA, 60 bp, Artificial
  Synthetic oligonucleotide
gtgacggcatgatgttgggcgtcgctaaaccatcgaatgtgcaagcagtaccgaacgcaa

SEQ ID NO: 439697 - DNA, 55 bp, Artificial
  Synthetic oligonucleotide
gtgacggccagtcacaggcagatactcctcaaccacttccgtggcttgacaggtg

SEQ ID NO: 439698 - DNA, 55 bp, Artificial
  Synthetic oligonucleotide
gtgacgggatcggctcccggcgtggagtgtaggcgttgtggcttcccatggctgg

SEQ ID NO: 439699 - DNA, 58 bp, Artificial
  Synthetic oligonucleotide
gtgacgggcatgaccacagacaacctgaagtgcccatgccaggttccgacccccgaat

SEQ ID NO: 439700 - DNA, 57 bp, Artificial
  Synthetic oligonucleotide
gtgacggttttgatcgtaataacccatggcgtagaccaagaatgatttcgtatagtg

SEQ ID NO: 439701 - DNA, 55 bp, Artificial
  Synthetic oligonucleotide
gtgacgtaatcgaaggccgatggaatataagtgcatgcgctaagttagatccaaa

SEQ ID NO: 439702 - DNA, 57 bp, Artificial
  Synthetic oligonucleotide
gtgacgtacccgttgtccgtttcaactcgctcgctacggagtgacctccaagctatg

SEQ ID NO: 439703 - DNA, 55 bp, Artificial
  Synthetic oligonucleotide
gtgacgtatcctgctagctgtgcgcggatgccagcgacgtcgaactccgaggtct

SEQ ID NO: 439704 - DNA, 54 bp, Artificial
  Synthetic oligonucleotide
gtgacgtcccctccacggaggacctggtcaatctactgcctgctatcctctcgc

SEQ ID NO: 439705 - DNA, 51 bp, Artificial
  Synthetic oligonucleotide
gtgacgtgccgtctatttcagatttagcacatcaattgcgtcagacagatc

SEQ ID NO: 439706 - DNA, 56 bp, Artificial
  Synthetic oligonucleotide
gtgacgtggaaaaattacgacacatcttggagaaagcaagattcattaagttaaac

SEQ ID NO: 439707 - DNA, 50 bp, Artificial
  Synthetic oligonucleotide
gtgacgtggaacgagaaaggggttacggtcaaatatacccctgagaacag

SEQ ID NO: 439708 - DNA, 60 bp, Artificial
  Synthetic oligonucleotide
gtgacgtgtgacgctgattaccgtgagtgtgggtttgtttcgtactcatctggttctcag

SEQ ID NO: 439709 - DNA, 53 bp, Artificial
  Synthetic oligonucleotide
gtgacgttatgctaaggtcactgtctcctagtgacccggtctattacgctaaa

SEQ ID NO: 439710 - DNA, 59 bp, Artificial
  Synthetic oligonucleotide
gtgacgttccccagaatatgaaatcagacacgttgcagtacaccattgacaaaccaccg

SEQ ID NO: 439711 - DNA, 51 bp, Artificial
  Synthetic oligonucleotide
gtgacgttgaccctttaccacccggcctccctggtgagtcgaaaccgtcca

SEQ ID NO: 439712 - DNA, 55 bp, Artificial
  Synthetic oligonucleotide
gtgacgttgtgaatgcgggagcgcgcgtccaccaagtcgagagcctcgtgttcgt

SEQ ID NO: 439713 - DNA, 57 bp, Artificial
  Synthetic oligonucleotide
gtgacgttgtttctaatggtgtggttaatgtgtaattaggaatatgtgtagttagac

SEQ ID NO: 439714 - DNA, 55 bp, Artificial
  Synthetic oligonucleotide
gtgacgtttgatgacgcggtttatccaagcgactatgacagcaacctcaagcctg

SEQ ID NO: 439715 - DNA, 57 bp, Artificial
  Synthetic oligonucleotide
gtgacgtttgtcaatgtggccaccggtgcccagggggtttcgcgctctctggactgg

SEQ ID NO: 439716 - DNA, 55 bp, Artificial
  Synthetic oligonucleotide
gtgactaaagttgacgggcgcaccatgaaaattggttcgactgacatagttacca

SEQ ID NO: 439717 - DNA, 51 bp, Artificial
  Synthetic oligonucleotide
gtgactaacatgaactttatacatgccaacgaccgcacccggtcttatatc

SEQ ID NO: 439718 - DNA, 58 bp, Artificial
  Synthetic oligonucleotide
gtgactaagttgacggatccttcgagtggatggttcgtggatggaatagagtttattg

SEQ ID NO: 439719 - DNA, 60 bp, Artificial
  Synthetic oligonucleotide
gtgactaatgctactgagctggttcagaattcctcaacaggtagaatatgcgacagtcct

SEQ ID NO: 439720 - DNA, 55 bp, Artificial
  Synthetic oligonucleotide
gtgactacaacgtagtgttgatgagatatgatactacatccgagttagatgcatc

SEQ ID NO: 439721 - DNA, 58 bp, Artificial
  Synthetic oligonucleotide
gtgactacatccatgcaaattggatcaagggttttgacggggcaagaaagttcatcgg

SEQ ID NO: 439722 - DNA, 55 bp, Artificial
  Synthetic oligonucleotide
gtgactacctcccgaacatccatcacagaagtccctagtcttagaccatcagtgg

SEQ ID NO: 439723 - DNA, 59 bp, Artificial
  Synthetic oligonucleotide
gtgactactatcatacgagtggttaacagacctatcgagactgtagtaatccataaggt

SEQ ID NO: 439724 - DNA, 57 bp, Artificial
  Synthetic oligonucleotide
gtgactagcaatctagtaactacatacttaagctaaagtaaagattactaatagaaa

SEQ ID NO: 439725 - DNA, 55 bp, Artificial
  Synthetic oligonucleotide
gtgactatagcagtttcgacggtttgttgtccaagcaagtcatggcagcgatggc

SEQ ID NO: 439726 - DNA, 56 bp, Artificial
  Synthetic oligonucleotide
gtgactatcattggttctctactcgaaaattgcgacagtagactagaaaacataag

SEQ ID NO: 439727 - DNA, 56 bp, Artificial
  Synthetic oligonucleotide
gtgactattcacttttaagtaatggttttgtgaatcacgatcatagtgttgcacgg

SEQ ID NO: 439728 - DNA, 60 bp, Artificial
  Synthetic oligonucleotide
gtgactcaacactcattcgctactcgtcggatttagtcatataccgcacaaacaccagag

SEQ ID NO: 439729 - DNA, 60 bp, Artificial
  Synthetic oligonucleotide
gtgactcaccttgactcttgacctggaagttcactgtgatggacatttgaacactcccgg

SEQ ID NO: 439730 - DNA, 60 bp, Artificial
  Synthetic oligonucleotide
gtgactcactcagtgaatctgctcgaagacaaccataatgggaaactctgcagcctgaac

SEQ ID NO: 439731 - DNA, 51 bp, Artificial
  Synthetic oligonucleotide
gtgactcagctcgtgagggacaaacagtctgcacgggcttatatggccatc

SEQ ID NO: 439732 - DNA, 55 bp, Artificial
  Synthetic oligonucleotide
gtgactcagctgttaaccacgtttaaatcgttagccttattattcgtctaattac

SEQ ID NO: 439733 - DNA, 60 bp, Artificial
  Synthetic oligonucleotide
gtgactccaggagagcggccctcgggcatgttcgattcttcggtcctgtgtgagtgctat

SEQ ID NO: 439734 - DNA, 55 bp, Artificial
  Synthetic oligonucleotide
gtgactccgctcttgatgcaaatggctttctcgacacctaagttggtgcaaaagc

SEQ ID NO: 439735 - DNA, 55 bp, Artificial
  Synthetic oligonucleotide
gtgactcgcaggggcccgtatagtcttccttcgacatggcttctgccacgtcgtg

SEQ ID NO: 439736 - DNA, 55 bp, Artificial
  Synthetic oligonucleotide
gtgactcggcggccggtagttacggcgtgtggatatgcggcgacggtgcgaaagt

SEQ ID NO: 439737 - DNA, 60 bp, Artificial
  Synthetic oligonucleotide
gtgactctcctcatgctaacgctcagaatgtaggcttcaaaggaccggctgcagaataca

SEQ ID NO: 439738 - DNA, 55 bp, Artificial
  Synthetic oligonucleotide
gtgactctggtgactagagatccctcagaaccttttggtagtgtggagaatctct

SEQ ID NO: 439739 - DNA, 60 bp, Artificial
  Synthetic oligonucleotide
gtgactgcaccttccgctctgacaagtcctaccacgcatcgcgctttatgacagaccaag

SEQ ID NO: 439740 - DNA, 60 bp, Artificial
  Synthetic oligonucleotide
gtgactgcagctgataagagtgaacagattgactggcgcgacatcactcagtgcacgttc

SEQ ID NO: 439741 - DNA, 55 bp, Artificial
  Synthetic oligonucleotide
gtgactgcagctgctctgctcttttgccactatgcttacatggtgccaggctggc

SEQ ID NO: 439742 - DNA, 60 bp, Artificial
  Synthetic oligonucleotide
gtgactgccgtggctcatggtgatgctgtgggcaagttcgacatcacacacagcaagaca

SEQ ID NO: 439743 - DNA, 50 bp, Artificial
  Synthetic oligonucleotide
gtgactgctgctggtgtgcccaggaaaacctctgcagattttacaatgtg

SEQ ID NO: 439744 - DNA, 57 bp, Artificial
  Synthetic oligonucleotide
gtgactggaagtactagcgggatgacgtgtccgggaagcagccttgtccccgattcc

SEQ ID NO: 439745 - DNA, 55 bp, Artificial
  Synthetic oligonucleotide
gtgactggcagatctcacattcaacaatcgacaaaatttcggtgcaagagctagc

SEQ ID NO: 439746 - DNA, 56 bp, Artificial
  Synthetic oligonucleotide
gtgactggtgtacaatatatagttgtcaccaaatggcattctcgtaaatcctcata

SEQ ID NO: 439747 - DNA, 55 bp, Artificial
  Synthetic oligonucleotide
gtgactgtcccaaatatataaagtctggccaactcaagctagccactggactcag

SEQ ID NO: 439748 - DNA, 55 bp, Artificial
  Synthetic oligonucleotide
gtgactgtcctgggtagcctattacaactggatttccagaaccctagaccctaca

SEQ ID NO: 439749 - DNA, 56 bp, Artificial
  Synthetic oligonucleotide
gtgactgttagcgttggcggagtagacatgcgggcgggacgtatcatagcgtggga

SEQ ID NO: 439750 - DNA, 59 bp, Artificial
  Synthetic oligonucleotide
gtgactgttgaacgttgtatgaaacactcgtcttcgcacagtcgaaaaaagtgcgacaa

SEQ ID NO: 439751 - DNA, 59 bp, Artificial
  Synthetic oligonucleotide
gtgacttaggctacaggcctaatcgtgctggtttgactctcacctttggagactcaccg

SEQ ID NO: 439752 - DNA, 55 bp, Artificial
  Synthetic oligonucleotide
gtgacttcaacaacgctagccggcaattcctctctttgcccaataagtgggtggg

SEQ ID NO: 439753 - DNA, 57 bp, Artificial
  Synthetic oligonucleotide
gtgacttcaagagacagatctcgaagttccatacaacggttcgcttaccttctaacg

SEQ ID NO: 439754 - DNA, 54 bp, Artificial
  Synthetic oligonucleotide
gtgacttgaagggtaagtatgtccaaatacctaccacatgcactaatgaccccg

SEQ ID NO: 439755 - DNA, 56 bp, Artificial
  Synthetic oligonucleotide
gtgacttgagttggaaaggttttcttgaagactttagagaagctgtcagttccttg

SEQ ID NO: 439756 - DNA, 55 bp, Artificial
  Synthetic oligonucleotide
gtgacttgggctaattcgtccatagaaatgcttatgtcagtattttcacatgaag

SEQ ID NO: 439757 - DNA, 50 bp, Artificial
  Synthetic oligonucleotide
gtgacttgtatacgagtgttgtatttataaactatacaacacgctatgac

SEQ ID NO: 439758 - DNA, 55 bp, Artificial
  Synthetic oligonucleotide
gtgacttgtggttcatgtcacacagaggggttcagatagatggaatgtggattcc

SEQ ID NO: 439759 - DNA, 60 bp, Artificial
  Synthetic oligonucleotide
gtgacttgtgtctgcagagacaactggcagggtgcaaatagacctattatagagattgac

SEQ ID NO: 439760 - DNA, 51 bp, Artificial
  Synthetic oligonucleotide
gtgactttgatggatgaccttggacaaaacccagacggagaagacttcaga

SEQ ID NO: 439761 - DNA, 60 bp, Artificial
  Synthetic oligonucleotide
gtgactttgttgatgccagttcaatctttacaaggattgaagtgtcttcttgcaacttga

SEQ ID NO: 439762 - DNA, 60 bp, Artificial
  Synthetic oligonucleotide
gtgacttttgagtcttacgtggctcagatcgcatcatgttgctcgcttctcgggctcgca

SEQ ID NO: 439763 - DNA, 60 bp, Artificial
  Synthetic oligonucleotide
gtgagaaaaagcgtagatttaggcgctgtgtacaatatatcagctacgcatctaatatca

SEQ ID NO: 439764 - DNA, 58 bp, Artificial
  Synthetic oligonucleotide
gtgagaaaccacgatgacctaatcacggtaactgccacactagccctcattggatgta

SEQ ID NO: 439765 - DNA, 55 bp, Artificial
  Synthetic oligonucleotide
gtgagaaacttgaacaatctggccttccagttgggggtaacgagaagaaagctaa

SEQ ID NO: 439766 - DNA, 55 bp, Artificial
  Synthetic oligonucleotide
gtgagaaagtcgctagcacctgggcgaaagatggggcaacatactgactcttggg

SEQ ID NO: 439767 - DNA, 60 bp, Artificial
  Synthetic oligonucleotide
gtgagaaatcttctcactatcaacaacaacgagctaacccgccgcctcagggcgtgctgg

SEQ ID NO: 439768 - DNA, 58 bp, Artificial
  Synthetic oligonucleotide
gtgagaacgtttataactaatgtgaatagtttggtccttatcatattcgtctcttcat

SEQ ID NO: 439769 - DNA, 55 bp, Artificial
  Synthetic oligonucleotide
gtgagaactatactgggatttctaaggaagcagctaagcaaaagcagaagacgcc

SEQ ID NO: 439770 - DNA, 55 bp, Artificial
  Synthetic oligonucleotide
gtgagaagagcaacagtatcagcagacccattagcatccctattggagatgtgcc

SEQ ID NO: 439771 - DNA, 55 bp, Artificial
  Synthetic oligonucleotide
gtgagaagccaagtacatcagagtggaacgatccggtaagacaaagatttccaga

SEQ ID NO: 439772 - DNA, 59 bp, Artificial
  Synthetic oligonucleotide
gtgagaaggtgtaaaaaatttgggaggccacaatccatggaagcagtacgcatggcgta

SEQ ID NO: 439773 - DNA, 57 bp, Artificial
  Synthetic oligonucleotide
gtgagaataaatatgctcgtaaactgactttctaatctctataggactaccttcggg

SEQ ID NO: 439774 - DNA, 55 bp, Artificial
  Synthetic oligonucleotide
gtgagaatgatttcttggaatgggctaagagagttgagcgctatgcaggtgatac

SEQ ID NO: 439775 - DNA, 52 bp, Artificial
  Synthetic oligonucleotide
gtgagacaaaaccaggaatctaccgaatcatgactagaggaattctgggcac

SEQ ID NO: 439776 - DNA, 59 bp, Artificial
  Synthetic oligonucleotide
gtgagacacaagtccagagacgtcaccacacggacattggtttcatcatggacagattt

SEQ ID NO: 439777 - DNA, 60 bp, Artificial
  Synthetic oligonucleotide
gtgagacacatgagtcgccatcgttcatctctcgacaatgacaggaggcatgttgtccgc

SEQ ID NO: 439778 - DNA, 60 bp, Artificial
  Synthetic oligonucleotide
gtgagacaccgcggcgcacttacccgcaacctgcgaacacatgtcgacatgatcgtgatg

SEQ ID NO: 439779 - DNA, 60 bp, Artificial
  Synthetic oligonucleotide
gtgagacagtatcctcctggcgtctcatttccttcagagtcagagagtgtccaagtaaac

SEQ ID NO: 439780 - DNA, 55 bp, Artificial
  Synthetic oligonucleotide
gtgagacagtgtatgtatgcgataggctacggttcatatttaataactccggctc

SEQ ID NO: 439781 - DNA, 60 bp, Artificial
  Synthetic oligonucleotide
gtgagacatagaatccagatgaatactggtcattgtaagttgaaaaattgcgtcaaaggt

SEQ ID NO: 439782 - DNA, 60 bp, Artificial
  Synthetic oligonucleotide
gtgagacatcgcttcacgtctgtcagagatttgccactctgttgagttcgctactacgat

SEQ ID NO: 439783 - DNA, 57 bp, Artificial
  Synthetic oligonucleotide
gtgagacatgccgtcggtctttgatcgatgaggtgcctttgaaccctttatcccggg

SEQ ID NO: 439784 - DNA, 55 bp, Artificial
  Synthetic oligonucleotide
gtgagaccaagcccaagatggatcttagcacatacgacagttacaatgctccagc

SEQ ID NO: 439785 - DNA, 60 bp, Artificial
  Synthetic oligonucleotide
gtgagaccacgccagaagacatgtctgcctgggccttgaacaactggaatttcggcagac

SEQ ID NO: 439786 - DNA, 55 bp, Artificial
  Synthetic oligonucleotide
gtgagaccagaaggcatcccgtgtccggcccctttgggtttagctggactcatct

SEQ ID NO: 439787 - DNA, 55 bp, Artificial
  Synthetic oligonucleotide
gtgagaccatcgcccatggtaaggttggtcagggtatatcggcctggagtaagac

SEQ ID NO: 439788 - DNA, 48 bp, Artificial
  Synthetic oligonucleotide
gtgagaccctccggccggtagagggggaagccggccggggaaaaaacc

SEQ ID NO: 439789 - DNA, 55 bp, Artificial
  Synthetic oligonucleotide
gtgagacgagtattaagttgatgaattctagagatagataagtcgcttctcggac

SEQ ID NO: 439790 - DNA, 60 bp, Artificial
  Synthetic oligonucleotide
gtgagacttgcagactcgttatcatcacccactattgagacacggacacgtcaatatacc

SEQ ID NO: 439791 - DNA, 60 bp, Artificial
  Synthetic oligonucleotide
gtgagacttgggcaagacaattgctgggtgattatggacccactcagggaacaatcttga

SEQ ID NO: 439792 - DNA, 52 bp, Artificial
  Synthetic oligonucleotide
gtgagacttttaagccctctgatctgagatgatcggttctatgatatatgaa

SEQ ID NO: 439793 - DNA, 56 bp, Artificial
  Synthetic oligonucleotide
gtgagagaaacatatgcacgaatgaatgctaaagttaaagccttagtgtccacagt

SEQ ID NO: 439794 - DNA, 52 bp, Artificial
  Synthetic oligonucleotide
gtgagagaatacagcgacttgggagagtgggaaggtccaaacctgggactgc

SEQ ID NO: 439795 - DNA, 59 bp, Artificial
  Synthetic oligonucleotide
gtgagagagagaggtaccacgccgaggaacgtcgtaagtccggccagcttagctgggca

SEQ ID NO: 439796 - DNA, 55 bp, Artificial
  Synthetic oligonucleotide
gtgagagcaatctccgaccaaactgtcgattatggcctgggcttgggtagcccag

SEQ ID NO: 439797 - DNA, 55 bp, Artificial
  Synthetic oligonucleotide
gtgagagcatgataaaagttcagccacacctggattctgtaattggcacctaacc

SEQ ID NO: 439798 - DNA, 60 bp, Artificial
  Synthetic oligonucleotide
gtgagagcgtactctacgcgatccgattctatgtatcctccaactccaatacccatgtta

SEQ ID NO: 439799 - DNA, 53 bp, Artificial
  Synthetic oligonucleotide
gtgagagcttacacatatggggtgataaatatgccgaagaattataatcagtt

SEQ ID NO: 439800 - DNA, 60 bp, Artificial
  Synthetic oligonucleotide
gtgagaggacaaagcggcagagttagtttctactggactattgtagagcctggagacttg

SEQ ID NO: 439801 - DNA, 59 bp, Artificial
  Synthetic oligonucleotide
gtgagaggacgggagttaccgaaatcagcatgagcgccgagttcttagaaggaatccca

SEQ ID NO: 439802 - DNA, 59 bp, Artificial
  Synthetic oligonucleotide
gtgagagggttagcacccgatgaaaaatgcagggctcttacagatgcaatcttgcatat

SEQ ID NO: 439803 - DNA, 59 bp, Artificial
  Synthetic oligonucleotide
gtgagaggtacacttgagatgttagactactcgaggccagtggtgatactgtgccactc

SEQ ID NO: 439804 - DNA, 60 bp, Artificial
  Synthetic oligonucleotide
gtgagagtcttcggagcacggctgagtgaaggcagtaagggcggcaggaatcaaccacga

SEQ ID NO: 439805 - DNA, 50 bp, Artificial
  Synthetic oligonucleotide
gtgagagttctctcggggtgagccacattgggaagcccgtctgggttgga

SEQ ID NO: 439806 - DNA, 59 bp, Artificial
  Synthetic oligonucleotide
gtgagatagacgttccggtcgtcacatctaagttagatacacttaagttgcacgtagct

SEQ ID NO: 439807 - DNA, 60 bp, Artificial
  Synthetic oligonucleotide
gtgagatatatgaactagagttcatcctacagcttgccactgtggctttgaccccagagg

SEQ ID NO: 439808 - DNA, 53 bp, Artificial
  Synthetic oligonucleotide
gtgagatatgccgtcggtctttttagtccgaagacgttaaactacgttcgaac

SEQ ID NO: 439809 - DNA, 55 bp, Artificial
  Synthetic oligonucleotide
gtgagatattggtgactgatacacggtactaatgtcatctagcataaggaaacgg

SEQ ID NO: 439810 - DNA, 59 bp, Artificial
  Synthetic oligonucleotide
gtgagatccaatgggtgaagtctaacaaagaaaccggtagactgaacatcaatggacca

SEQ ID NO: 439811 - DNA, 60 bp, Artificial
  Synthetic oligonucleotide
gtgagatccactctatggcaggggcttatccgaatgccctctataagattcgaacacagg

SEQ ID NO: 439812 - DNA, 52 bp, Artificial
  Synthetic oligonucleotide
gtgagatccatctttatgtgcctcttgtgccacgtagatatacgtgggacag

SEQ ID NO: 439813 - DNA, 59 bp, Artificial
  Synthetic oligonucleotide
gtgagatcgttagctgcaaatttaaactctgtaatgtgtacgggaggtgattacagctt

SEQ ID NO: 439814 - DNA, 55 bp, Artificial
  Synthetic oligonucleotide
gtgagatctagcgaggatagcgtggaaaccctggacgacaattgttattccgccc

SEQ ID NO: 439815 - DNA, 60 bp, Artificial
  Synthetic oligonucleotide
gtgagatgatgactggcttaatgaatgctcaccgagagatgattcctaacgacccaatct

SEQ ID NO: 439816 - DNA, 55 bp, Artificial
  Synthetic oligonucleotide
gtgagatggaagtaccccaagttcgagacagagacgttaatgttggaacctcggg

SEQ ID NO: 439817 - DNA, 60 bp, Artificial
  Synthetic oligonucleotide
gtgagatgggttatgaatgccttaggagtgaaggatgattggttattagtaccttctcat

SEQ ID NO: 439818 - DNA, 56 bp, Artificial
  Synthetic oligonucleotide
gtgagattcgtgcgtgtactaccgccgacagctaagtgatcccagacacctaggcc

SEQ ID NO: 439819 - DNA, 55 bp, Artificial
  Synthetic oligonucleotide
gtgagatttgtggacccactcacaggagcgacattagatgaaagtcctttcacag

SEQ ID NO: 439820 - DNA, 56 bp, Artificial
  Synthetic oligonucleotide
gtgagatttttcaaaagcaatcctagaggacaaacttctaaaggtctctccaagaa

SEQ ID NO: 439821 - DNA, 53 bp, Artificial
  Synthetic oligonucleotide
gtgagcaaatgtttgttagacacttttttaatagggccggtaccttaggtgac

SEQ ID NO: 439822 - DNA, 60 bp, Artificial
  Synthetic oligonucleotide
gtgagcaaattgctgactcccagcatcggtctcacaggcagatggtgacaacgaccaacc

SEQ ID NO: 439823 - DNA, 55 bp, Artificial
  Synthetic oligonucleotide
gtgagcaacactgttcttgcagtttcatctaatcctggtctgatagttgctcctt

SEQ ID NO: 439824 - DNA, 53 bp, Artificial
  Synthetic oligonucleotide
gtgagcaagttgcaggtgcttctgtggggctgtacacgaaagatagatgcaac

SEQ ID NO: 439825 - DNA, 58 bp, Artificial
  Synthetic oligonucleotide
gtgagcaattttccacagggtgccaacgataattgtcgtcacaccaacaagaccgtgt

SEQ ID NO: 439826 - DNA, 54 bp, Artificial
  Synthetic oligonucleotide
gtgagcacggagttattggcattgtgaccatgggaggtgagggcgtcgttggct

SEQ ID NO: 439827 - DNA, 51 bp, Artificial
  Synthetic oligonucleotide
gtgagcacgggtgctcacggttcagagaccgtcccacaatgtaattgtatg

SEQ ID NO: 439828 - DNA, 55 bp, Artificial
  Synthetic oligonucleotide
gtgagcagattaccacccatcccttcgtgttgctcaattggattagggtccagtt

SEQ ID NO: 439829 - DNA, 55 bp, Artificial
  Synthetic oligonucleotide
gtgagcattttagctagttctctcttaaagaatgacatccccatgacaggaccac

SEQ ID NO: 439830 - DNA, 58 bp, Artificial
  Synthetic oligonucleotide
gtgagccaccattcctgataggaaccggcggctttcttggtgagacatcaaactcaat

SEQ ID NO: 439831 - DNA, 60 bp, Artificial
  Synthetic oligonucleotide
gtgagccatggtagcttacaaccaaaggatttgagataaagctcagtagaagagttagac

SEQ ID NO: 439832 - DNA, 55 bp, Artificial
  Synthetic oligonucleotide
gtgagcccatccctggatgttgatggccgtcgcataatgtatagtaaggtgtgca

SEQ ID NO: 439833 - DNA, 58 bp, Artificial
  Synthetic oligonucleotide
gtgagccccgtccaaggacgttaaaagaagtcaggccactataagtgccatagcttga

SEQ ID NO: 439834 - DNA, 59 bp, Artificial
  Synthetic oligonucleotide
gtgagcccgcttctgaccagcccagagagccggaagctcccaccactcattttcccctc

SEQ ID NO: 439835 - DNA, 55 bp, Artificial
  Synthetic oligonucleotide
gtgagcctatactttgagcgggatttggaaggcctcagggcagcgccattgcagg

SEQ ID NO: 439836 - DNA, 50 bp, Artificial
  Synthetic oligonucleotide
gtgagcctcacatccacaagtttaatgtctttccttccatggacatccaa

SEQ ID NO: 439837 - DNA, 60 bp, Artificial
  Synthetic oligonucleotide
gtgagcctggtactggaaaatccatgacaacaaatttcttagctagaatgataacaaatg

SEQ ID NO: 439838 - DNA, 55 bp, Artificial
  Synthetic oligonucleotide
gtgagcgatcaggacatggaagttctattgagtggtttaatggtttggtgtcttg

SEQ ID NO: 439839 - DNA, 60 bp, Artificial
  Synthetic oligonucleotide
gtgagcgatgacgtgaactccgagcccaccaaacctgtggaagagcaaccacaagccgaa

SEQ ID NO: 439840 - DNA, 55 bp, Artificial
  Synthetic oligonucleotide
gtgagcgcatattctacgcgatccgattctatgtaccctccaacaccaagaccca

SEQ ID NO: 439841 - DNA, 55 bp, Artificial
  Synthetic oligonucleotide
gtgagcgcgtgcttcatgaatgctcagtcacacctcagaaacgctcgcatttctc

SEQ ID NO: 439842 - DNA, 60 bp, Artificial
  Synthetic oligonucleotide
gtgagcggcatgttccaggagcagggcgttgacatcgaaagcgacgctgtcaaaaacggt

SEQ ID NO: 439843 - DNA, 60 bp, Artificial
  Synthetic oligonucleotide
gtgagcgtaagactcctgcaacttttctaccagcgaagctgtaactattacatccaaagc

SEQ ID NO: 439844 - DNA, 55 bp, Artificial
  Synthetic oligonucleotide
gtgagcgtatgccgcctaaattgacaggcgtgctcgtagctactgagcttggccg

SEQ ID NO: 439845 - DNA, 60 bp, Artificial
  Synthetic oligonucleotide
gtgagcgtcatagtttgcggtgttatactgtcagtcataggttttttgcgtcacaggcgt

SEQ ID NO: 439846 - DNA, 58 bp, Artificial
  Synthetic oligonucleotide
gtgagcgtgttgagaaaaagacagcttaggagaacaagagctggggatggccgggaag

SEQ ID NO: 439847 - DNA, 54 bp, Artificial
  Synthetic oligonucleotide
gtgagctactaacggtcgaccattatgttcaacgcaaaacactcgttttaactc

SEQ ID NO: 439848 - DNA, 55 bp, Artificial
  Synthetic oligonucleotide
gtgagctagcctatgaatatgcacaactgggaaatgaggatgcaaatgctgctgc

SEQ ID NO: 439849 - DNA, 55 bp, Artificial
  Synthetic oligonucleotide
gtgagctcgcgttgtctttgggtcaacctcttcttcaggcgttctgtctgcgtgt

SEQ ID NO: 439850 - DNA, 60 bp, Artificial
  Synthetic oligonucleotide
gtgagctgatgaagggccctccggggtgtgctcagcacttaacctaagtcaagttcatat

SEQ ID NO: 439851 - DNA, 60 bp, Artificial
  Synthetic oligonucleotide
gtgagctgatgctgcaggctctccaacatgactcggataaacgctatctcatgtcgatgt

SEQ ID NO: 439852 - DNA, 58 bp, Artificial
  Synthetic oligonucleotide
gtgagcttatacgaggggcgtaccctaagattcagaccaccagccgtgtgctaaggtc

SEQ ID NO: 439853 - DNA, 59 bp, Artificial
  Synthetic oligonucleotide
gtgaggaaaaataatggagatcatgaagtgttagttcccaaggtgtcaggtaatcagta

SEQ ID NO: 439854 - DNA, 54 bp, Artificial
  Synthetic oligonucleotide
gtgaggaaatagtttttagcgtttatttgaaaacgctttgtgagagagttatta

SEQ ID NO: 439855 - DNA, 51 bp, Artificial
  Synthetic oligonucleotide
gtgaggaaccacgatgacctaatcacggtgaccgctacgctagctctcatt

SEQ ID NO: 439856 - DNA, 54 bp, Artificial
  Synthetic oligonucleotide
gtgaggaaccgtacaaagagttcataaacaaaattagaaagacagaggtgggtc

SEQ ID NO: 439857 - DNA, 60 bp, Artificial
  Synthetic oligonucleotide
gtgaggaaggttcaactccgcagggtaacatatctggaaggtcactgacaaatatggaca

SEQ ID NO: 439858 - DNA, 55 bp, Artificial
  Synthetic oligonucleotide
gtgaggaatcaccaggacttggtcacagtcggagcaactttggcgctccttgggt

SEQ ID NO: 439859 - DNA, 60 bp, Artificial
  Synthetic oligonucleotide
gtgaggacaatacttactcgtacaaagttcgctacacactggctgtgggcgacaacagag

SEQ ID NO: 439860 - DNA, 59 bp, Artificial
  Synthetic oligonucleotide
gtgaggacaatttgataaggggctacatcaactttggtactgctggctacttacgtaga

SEQ ID NO: 439861 - DNA, 55 bp, Artificial
  Synthetic oligonucleotide
gtgaggacactattccaacaaatgcgtgatatactgggaacatttgataccgttc

SEQ ID NO: 439862 - DNA, 55 bp, Artificial
  Synthetic oligonucleotide
gtgaggaccagaccaaacatctggtatccaatctaagttagcatgtagctacatc

SEQ ID NO: 439863 - DNA, 60 bp, Artificial
  Synthetic oligonucleotide
gtgaggaccagactaaccatctggtatccaatcttagttaacatgtagctatgtcaagtc

SEQ ID NO: 439864 - DNA, 54 bp, Artificial
  Synthetic oligonucleotide
gtgaggagacccgtcttcatgttgttcttgacaaacccttatgaattttttgtt

SEQ ID NO: 439865 - DNA, 51 bp, Artificial
  Synthetic oligonucleotide
gtgaggagactccagttgtcatgaatgtgccggcaacaaatactgcggcca

SEQ ID NO: 439866 - DNA, 60 bp, Artificial
  Synthetic oligonucleotide
gtgaggaggtacgtcctctgtgctatgcgggggggttgcccacgtatggcgcatggctaa

SEQ ID NO: 439867 - DNA, 60 bp, Artificial
  Synthetic oligonucleotide
gtgaggagtcacgcgcgaatgtggggatacgtggagcagcaatgactgtagcccatactg

SEQ ID NO: 439868 - DNA, 55 bp, Artificial
  Synthetic oligonucleotide
gtgaggagtcttataacggttctcccgtgtacaacgtgcctggtaggacggtcaa

SEQ ID NO: 439869 - DNA, 60 bp, Artificial
  Synthetic oligonucleotide
gtgaggagttgcactcacgctttcaacccaaagcaacccatgcactggatagtgcttacc

SEQ ID NO: 439870 - DNA, 52 bp, Artificial
  Synthetic oligonucleotide
gtgaggataaggacaccatactagagcagagctgtcgtcgcttgtacgaagg

SEQ ID NO: 439871 - DNA, 55 bp, Artificial
  Synthetic oligonucleotide
gtgaggatagcaagaacaggaatacggggcacaatcaccacacgcagtggtgtgc

SEQ ID NO: 439872 - DNA, 60 bp, Artificial
  Synthetic oligonucleotide
gtgaggatcatcaaaatcctgtatcagagcagtaagtatatgtaatggtgaagttactag

SEQ ID NO: 439873 - DNA, 60 bp, Artificial
  Synthetic oligonucleotide
gtgaggatcatcagaatcttatatcaaagcagtaagtaccacatagtagatgtaatggta

SEQ ID NO: 439874 - DNA, 60 bp, Artificial
  Synthetic oligonucleotide
gtgaggatgacaagtacatatatggacgtgtgaacttatttgatctagatgcgtcacccg

SEQ ID NO: 439875 - DNA, 55 bp, Artificial
  Synthetic oligonucleotide
gtgaggatgatactgttgacccatttctttagcgtcctcatagccagggatcagc

SEQ ID NO: 439876 - DNA, 60 bp, Artificial
  Synthetic oligonucleotide
gtgaggatgcacgttcatgcagacatgtgttcgaactgtgaacacgcctcttgcccgtgc

SEQ ID NO: 439877 - DNA, 55 bp, Artificial
  Synthetic oligonucleotide
gtgaggcattgggacagtaataaaagtgtccaccccattgaccactgtcgatctg

SEQ ID NO: 439878 - DNA, 54 bp, Artificial
  Synthetic oligonucleotide
gtgaggcccccatttcggagaagctaactgatctcaaacgatacctcttagttg

SEQ ID NO: 439879 - DNA, 58 bp, Artificial
  Synthetic oligonucleotide
gtgaggccgaaggcccaggatcgattgcggaatcgtccagtccgcttaagttcttgta

SEQ ID NO: 439880 - DNA, 60 bp, Artificial
  Synthetic oligonucleotide
gtgaggcctatatcatgcaatacatcctgcgcttgtacatccagagcaacttcaatccca

SEQ ID NO: 439881 - DNA, 60 bp, Artificial
  Synthetic oligonucleotide
gtgaggcctatcatggactgcatcatgttttggatggatgtgggccgcatgtgtttagga

SEQ ID NO: 439882 - DNA, 57 bp, Artificial
  Synthetic oligonucleotide
gtgaggcgatcaggtttgctgggaagtacgctggctattattctgagcttggtcgtt

SEQ ID NO: 439883 - DNA, 53 bp, Artificial
  Synthetic oligonucleotide
gtgaggcgggttaaaatgggggtgtcgtcaccaatagctgtcgcgtatacacc

SEQ ID NO: 439884 - DNA, 55 bp, Artificial
  Synthetic oligonucleotide
gtgaggcgtataaggagttcttcttacttgcctctaacgtcgcaggacaaacagc

SEQ ID NO: 439885 - DNA, 55 bp, Artificial
  Synthetic oligonucleotide
gtgaggcgtcccgtgttccacgacgactggtgtagtcagccggtagatcgcctag

SEQ ID NO: 439886 - DNA, 55 bp, Artificial
  Synthetic oligonucleotide
gtgaggcgttcagcaggcattcacaaaatatgtcagctctgacgcctacactaag

SEQ ID NO: 439887 - DNA, 59 bp, Artificial
  Synthetic oligonucleotide
gtgaggctcaagcacacggtgcttttcttgcccccgatgccgacacggccaaccacctc

SEQ ID NO: 439888 - DNA, 59 bp, Artificial
  Synthetic oligonucleotide
gtgaggctggtcccacttgcaggtaaagctaacattctcggttcagtcgtattcttaga

SEQ ID NO: 439889 - DNA, 58 bp, Artificial
  Synthetic oligonucleotide
gtgaggctgttagggagtactgcaaggataagggctggctagtaccggaggtcaactc

SEQ ID NO: 439890 - DNA, 55 bp, Artificial
  Synthetic oligonucleotide
gtgagggctcacgtattgattaagatctgtagcttggtccgcggggtagcttgtg

SEQ ID NO: 439891 - DNA, 58 bp, Artificial
  Synthetic oligonucleotide
gtgaggggacccctgtcagttaattcggccattacaagtgacctgccgcttgctagtg

SEQ ID NO: 439892 - DNA, 51 bp, Artificial
  Synthetic oligonucleotide
gtgaggggggtagcacatttcatccagattgaggggcttttgccccacccc

SEQ ID NO: 439893 - DNA, 58 bp, Artificial
  Synthetic oligonucleotide
gtgagggtactaatctcggactgggcattccctcctacaactgggacgtctaatggca

SEQ ID NO: 439894 - DNA, 60 bp, Artificial
  Synthetic oligonucleotide
gtgagggtcttgcagcatacactttgaccccgcgccccattatccatgcagtggcccccg

SEQ ID NO: 439895 - DNA, 55 bp, Artificial
  Synthetic oligonucleotide
gtgaggtaaatttaagaggattatgcctgataccaacattagtggttgaaacagc

SEQ ID NO: 439896 - DNA, 55 bp, Artificial
  Synthetic oligonucleotide
gtgaggtaaggcatggcgattgcgactgcacaggacgtagagaatcgctgggtcc

SEQ ID NO: 439897 - DNA, 50 bp, Artificial
  Synthetic oligonucleotide
gtgaggtaccaagcgatcgggcaatgttgcgtgctatgtaaacggatggc

SEQ ID NO: 439898 - DNA, 53 bp, Artificial
  Synthetic oligonucleotide
gtgaggtccctaacttggacttaaacaagttcacttcattaaaattacgcgga

SEQ ID NO: 439899 - DNA, 55 bp, Artificial
  Synthetic oligonucleotide
gtgaggttacatagactgtccccgcggttgaaagtaaccgatccgttatccgctc

SEQ ID NO: 439900 - DNA, 55 bp, Artificial
  Synthetic oligonucleotide
gtgaggttatacctccacatgtgttagtcttttattgtcgaacacaggcccttgt

SEQ ID NO: 439901 - DNA, 55 bp, Artificial
  Synthetic oligonucleotide
gtgaggttcaacctccatatgtgctagtctgttattgtcaaacacaggcccttgt

SEQ ID NO: 439902 - DNA, 55 bp, Artificial
  Synthetic oligonucleotide
gtgaggttcctgagaagtcatgggcgtcagttgctgaggacgaaagcgacgatag

SEQ ID NO: 439903 - DNA, 55 bp, Artificial
  Synthetic oligonucleotide
gtgaggttcttttatgtctgcgagcaaactgatgaataataaattgcggattccg

SEQ ID NO: 439904 - DNA, 60 bp, Artificial
  Synthetic oligonucleotide
gtgaggttgagagacaagttaacacatgtccttatactggatacaaaggtagagtgcttc

SEQ ID NO: 439905 - DNA, 60 bp, Artificial
  Synthetic oligonucleotide
gtgaggttggagaggcgcgaatgatcatatatcaaatccagaacgcgactggggaacggc

SEQ ID NO: 439906 - DNA, 56 bp, Artificial
  Synthetic oligonucleotide
gtgagtacggcttgaaagcggaaccctggcgaggtggagtagtaactccctacata

SEQ ID NO: 439907 - DNA, 55 bp, Artificial
  Synthetic oligonucleotide
gtgagtacggtacttcatacagtggttacacaggaaaacattcggaatatgtgac

SEQ ID NO: 439908 - DNA, 52 bp, Artificial
  Synthetic oligonucleotide
gtgagtacgtgacaattcttttgaatcggctagcgtcgcgtgccggtgaata

SEQ ID NO: 439909 - DNA, 60 bp, Artificial
  Synthetic oligonucleotide
gtgagtactgcatgttagatttcactgatttcaattctcagcattccatcgaaaacatga

SEQ ID NO: 439910 - DNA, 55 bp, Artificial
  Synthetic oligonucleotide
gtgagtataataccactaattgggtagaggccttaaaacagacagctgaaaggta

SEQ ID NO: 439911 - DNA, 60 bp, Artificial
  Synthetic oligonucleotide
gtgagtatatgcataagttagtgacttaaattgaggaggagtagtaaggtctatagttga

SEQ ID NO: 439912 - DNA, 59 bp, Artificial
  Synthetic oligonucleotide
gtgagtatatgcctaagattctgggtttaacatcaattgagaaatgtagtattctaacg

SEQ ID NO: 439913 - DNA, 55 bp, Artificial
  Synthetic oligonucleotide
gtgagtatgatctggtcacagtcacagcaacacttgtactgattggttgtacagg

SEQ ID NO: 439914 - DNA, 57 bp, Artificial
  Synthetic oligonucleotide
gtgagtattaccccgctaggtaccagtcgcacctgatgcttgctgcgggtcactctg

SEQ ID NO: 439915 - DNA, 58 bp, Artificial
  Synthetic oligonucleotide
gtgagtattatcctgccaggtatcagtcgcacctcatgcttgcgaagggacattctga

SEQ ID NO: 439916 - DNA, 60 bp, Artificial
  Synthetic oligonucleotide
gtgagtcagtgcttgcggatgctaatgagactttgttggcgaatgtgaccgcagtacgtc

SEQ ID NO: 439917 - DNA, 60 bp, Artificial
  Synthetic oligonucleotide
gtgagtcatctctcgtctgactgcagtgacgaggtacagctatggagtgcgacagcccgg

SEQ ID NO: 439918 - DNA, 56 bp, Artificial
  Synthetic oligonucleotide
gtgagtcctccggcccctgaatgcggctaacctcaaccccggagccttgtggtgta

SEQ ID NO: 439919 - DNA, 58 bp, Artificial
  Synthetic oligonucleotide
gtgagtcctcctccgaccgagcccctcgcatctcgccccgccagtgatccgggccgac

SEQ ID NO: 439920 - DNA, 50 bp, Artificial
  Synthetic oligonucleotide
gtgagtctaccttcggcggaaggcaagtcacgggggagggcgggtcaaaa

SEQ ID NO: 439921 - DNA, 58 bp, Artificial
  Synthetic oligonucleotide
gtgagtctcgtagtgctgcaaaacgtagagcggtaaggtatggtaggtgttattgttg

SEQ ID NO: 439922 - DNA, 60 bp, Artificial
  Synthetic oligonucleotide
gtgagtgataaaatattgaacgacccactacttgagcaagggatctcaagttccgatgaa

SEQ ID NO: 439923 - DNA, 55 bp, Artificial
  Synthetic oligonucleotide
gtgagtgcgattacacgtgtatctgtactatttgtctccgaagctaaacttcggc

SEQ ID NO: 439924 - DNA, 55 bp, Artificial
  Synthetic oligonucleotide
gtgagtgcgtgcttttcgaaagcacaatcacacctaagagaaagaagagattcac

SEQ ID NO: 439925 - DNA, 57 bp, Artificial
  Synthetic oligonucleotide
gtgagtgctagcaaagtataaacgctggtgtttagcgcatattaaatactaacgatg

SEQ ID NO: 439926 - DNA, 55 bp, Artificial
  Synthetic oligonucleotide
gtgagtggaagggacgaacagtcaatagccgaagcaataatcgtggccatggtgt

SEQ ID NO: 439927 - DNA, 55 bp, Artificial
  Synthetic oligonucleotide
gtgagtggacgttggatatggtcttctccgacgcaggaatctataccatgcaggc

SEQ ID NO: 439928 - DNA, 52 bp, Artificial
  Synthetic oligonucleotide
gtgagtgggagccctcaaccggattcgctagctgggaagaggtccccttttg

SEQ ID NO: 439929 - DNA, 54 bp, Artificial
  Synthetic oligonucleotide
gtgagtggggccagacttcgccataaggcctttaacttccgggtgcgtatgggg

SEQ ID NO: 439930 - DNA, 56 bp, Artificial
  Synthetic oligonucleotide
gtgagtgggttggacccacattcctggcacttgactatgtatcaggccgataaggc

SEQ ID NO: 439931 - DNA, 60 bp, Artificial
  Synthetic oligonucleotide
gtgagtggtgtggggagacgcgtcgttggtggcgtgtgtggggtgaggatagccgcgcgc

SEQ ID NO: 439932 - DNA, 60 bp, Artificial
  Synthetic oligonucleotide
gtgagtgtcaggcaactactggctttgacgtgcagtacacgctccctgaccaagctactc

SEQ ID NO: 439933 - DNA, 55 bp, Artificial
  Synthetic oligonucleotide
gtgagtgtgaatgccgacacactaactactagcaatagaccatctctaggtgtta

SEQ ID NO: 439934 - DNA, 55 bp, Artificial
  Synthetic oligonucleotide
gtgagtgttcccgtctttcacacagtgttgaggtgagtgtgtgttttgaggaccc

SEQ ID NO: 439935 - DNA, 59 bp, Artificial
  Synthetic oligonucleotide
gtgagttaatgggcaccacccaactcttaccgagccaaatatgtgctttcaggggcaca

SEQ ID NO: 439936 - DNA, 50 bp, Artificial
  Synthetic oligonucleotide
gtgagttacagctcgtggctggggaggttgttgtagcttgtttcgatctt

SEQ ID NO: 439937 - DNA, 56 bp, Artificial
  Synthetic oligonucleotide
gtgagttagaatacccgaggcatggctttccaaggtaccagcaggactttaaccca

SEQ ID NO: 439938 - DNA, 55 bp, Artificial
  Synthetic oligonucleotide
gtgagttcaacaaagcttgtgaattgactgactcaatttggatagaactcgatga

SEQ ID NO: 439939 - DNA, 55 bp, Artificial
  Synthetic oligonucleotide
gtgagttcactatgctgggcatttatgacaggtgggccgttttgccacgtcatgc

SEQ ID NO: 439940 - DNA, 60 bp, Artificial
  Synthetic oligonucleotide
gtgagttcattgtcaatgaatacgaacaattctatggcactgaatacacagttgaaacgt

SEQ ID NO: 439941 - DNA, 52 bp, Artificial
  Synthetic oligonucleotide
gtgagttgcaaatttaccaaacggacgacgtaccgcgtacctcccgcgcagc

SEQ ID NO: 439942 - DNA, 55 bp, Artificial
  Synthetic oligonucleotide
gtgagtttccagcctcaataccagcttacagaacaactaattaccactttgacac

SEQ ID NO: 439943 - DNA, 58 bp, Artificial
  Synthetic oligonucleotide
gtgagtttctcccagagaaactcgaataaatcatctcttggagatgagcacttagggt

SEQ ID NO: 439944 - DNA, 55 bp, Artificial
  Synthetic oligonucleotide
gtgagtttcttaaaagaataccattgaggggcaatctggaccctatcctctttgc

SEQ ID NO: 439945 - DNA, 53 bp, Artificial
  Synthetic oligonucleotide
gtgagtttgattactaagatactgtctgatcttgagttaaatataagtgagcc

SEQ ID NO: 439946 - DNA, 55 bp, Artificial
  Synthetic oligonucleotide
gtgagtttgcaccaggcaactatcctgccctctggagttatgcgatgggtgtagc

SEQ ID NO: 439947 - DNA, 55 bp, Artificial
  Synthetic oligonucleotide
gtgagtttgtcatggaacaaagacgaggaaggaaatttcgttggcgataagcccg

SEQ ID NO: 439948 - DNA, 55 bp, Artificial
  Synthetic oligonucleotide
gtgataaaacacagtgtcaggactgggtatgtgcagtgtttggggtagcgccatc

SEQ ID NO: 439949 - DNA, 60 bp, Artificial
  Synthetic oligonucleotide
gtgataaaacatattgggatactttaagagtaagatactgtgcaccagcagggtatgctt

SEQ ID NO: 439950 - DNA, 55 bp, Artificial
  Synthetic oligonucleotide
gtgataaaacttagatcctcatatgcctcttatggcttatgccgcgctcagagag

SEQ ID NO: 439951 - DNA, 55 bp, Artificial
  Synthetic oligonucleotide
gtgataaaagatggtcgattcccttggttgacctagttagaaataacttggacaa

SEQ ID NO: 439952 - DNA, 57 bp, Artificial
  Synthetic oligonucleotide
gtgataaaatagatgagaatgaaccggctaaattttatgaaaccgtcatcaagaaag

SEQ ID NO: 439953 - DNA, 55 bp, Artificial
  Synthetic oligonucleotide
gtgataaacttcctcaaatccggtgtcaataaattaccaggacagattgggctga

SEQ ID NO: 439954 - DNA, 55 bp, Artificial
  Synthetic oligonucleotide
gtgataaagttacaggggaatttgtcgacggttatcgcgtagttgtttatcctca

SEQ ID NO: 439955 - DNA, 60 bp, Artificial
  Synthetic oligonucleotide
gtgataaagttatgaccataacctatattgtaggatatgcattaactaatagtcatcata

SEQ ID NO: 439956 - DNA, 55 bp, Artificial
  Synthetic oligonucleotide
gtgataaagttgaccgacagtgcaatcaaatgccacatccctatgtgctccagcc

SEQ ID NO: 439957 - DNA, 55 bp, Artificial
  Synthetic oligonucleotide
gtgataaagttgagtttacccaaaactttaatttttgatggtgatagtcgtgaga

SEQ ID NO: 439958 - DNA, 60 bp, Artificial
  Synthetic oligonucleotide
gtgataaatgccagctaaaaggggaggccacacatggacaagtagactgtagtccaggga

SEQ ID NO: 439959 - DNA, 60 bp, Artificial
  Synthetic oligonucleotide
gtgataaatgtcagctaaaaggagaagccatacatggacaaatagactgtagtccagggg

SEQ ID NO: 439960 - DNA, 60 bp, Artificial
  Synthetic oligonucleotide
gtgataaatgtcagttaaaaggggaagccatgcatggacaagtagactgtagcccaggca

SEQ ID NO: 439961 - DNA, 56 bp, Artificial
  Synthetic oligonucleotide
gtgataacaatgcactccctttaatctggaggggcctaattgacttaacgggatac

SEQ ID NO: 439962 - DNA, 55 bp, Artificial
  Synthetic oligonucleotide
gtgataacaatgtgtttacaggcctacaggcaagttcgggagatccgatatacac

SEQ ID NO: 439963 - DNA, 60 bp, Artificial
  Synthetic oligonucleotide
gtgataacacaaggcgctattaatcagtcgttaccacgtaatgtagtcaataataatgag

SEQ ID NO: 439964 - DNA, 52 bp, Artificial
  Synthetic oligonucleotide
gtgataacagctaaggagttgcaggatctccgagacaaggtggtgtctttga

SEQ ID NO: 439965 - DNA, 58 bp, Artificial
  Synthetic oligonucleotide
gtgataacgttgtagacaacgggttaaagcacatacaggcgcatgtacaggtagggac

SEQ ID NO: 439966 - DNA, 60 bp, Artificial
  Synthetic oligonucleotide
gtgataactcctcacctgcttggaaatcgcaaatggacgcctttagcaacaatggaccca

SEQ ID NO: 439967 - DNA, 60 bp, Artificial
  Synthetic oligonucleotide
gtgataacttagactataagtaaggatgattgcgaagcatatggatggagatttcccagt

SEQ ID NO: 439968 - DNA, 55 bp, Artificial
  Synthetic oligonucleotide
gtgataagacgtgctgcaagaactgggttgtagtcatctttggtttgtgtgagcc

SEQ ID NO: 439969 - DNA, 60 bp, Artificial
  Synthetic oligonucleotide
gtgataaggatgcagccgttgaaaacgcatctaagtacatattgctcgtatatgtcggaa

SEQ ID NO: 439970 - DNA, 60 bp, Artificial
  Synthetic oligonucleotide
gtgataagtgccaggtaaaaggagaagccatgcatggacaagtagattgtagtccaggga

SEQ ID NO: 439971 - DNA, 60 bp, Artificial
  Synthetic oligonucleotide
gtgataatagtgaccagcaacagtgcccccgatgcctggtacagcgaggaaaagtgctgt

SEQ ID NO: 439972 - DNA, 56 bp, Artificial
  Synthetic oligonucleotide
gtgataatcctaagtcgcaacttaactcaagttcactcttaatatggtcaagagtg

SEQ ID NO: 439973 - DNA, 55 bp, Artificial
  Synthetic oligonucleotide
gtgataattgataagaacacccagtatgtcttctacctgacatttgagctggtcc

SEQ ID NO: 439974 - DNA, 51 bp, Artificial
  Synthetic oligonucleotide
gtgataattgtgattgattctatcaatctatttaaataattgagtaacatg

SEQ ID NO: 439975 - DNA, 60 bp, Artificial
  Synthetic oligonucleotide
gtgatacacgtagatgtggagcaccagcgaatcccttccgccacagctctcccggtctag

SEQ ID NO: 439976 - DNA, 57 bp, Artificial
  Synthetic oligonucleotide
gtgatacacgtcgtccttattcgactttgtacccccagacactgtgtattgtccgga

SEQ ID NO: 439977 - DNA, 58 bp, Artificial
  Synthetic oligonucleotide
gtgatacagcctcgaaaccctaggtacaatgtggaacttgggagatatctacggcata

SEQ ID NO: 439978 - DNA, 55 bp, Artificial
  Synthetic oligonucleotide
gtgatacaggtatacatgaatgcagtgctgcgccaggaagaattgaatccggagg

SEQ ID NO: 439979 - DNA, 56 bp, Artificial
  Synthetic oligonucleotide
gtgataccaagtgaaggatatacgaaatacgtggtgcgaaactttccaaatggtac

SEQ ID NO: 439980 - DNA, 56 bp, Artificial
  Synthetic oligonucleotide
gtgatacctaacagtaatctaacagtgatacctaacagatacctaacagtgatacc

SEQ ID NO: 439981 - DNA, 58 bp, Artificial
  Synthetic oligonucleotide
gtgatacctgtggaggacccagtgacagtgactgtgacaattggggttccaaacggcc

SEQ ID NO: 439982 - DNA, 60 bp, Artificial
  Synthetic oligonucleotide
gtgatacgagaggcatcctgggaagatttgctgtacgagaacgttcatactgcagagtta

SEQ ID NO: 439983 - DNA, 56 bp, Artificial
  Synthetic oligonucleotide
gtgatacgtaaccaaaccttctctagcttttagcatcctaaaggcaacttcaggac

SEQ ID NO: 439984 - DNA, 55 bp, Artificial
  Synthetic oligonucleotide
gtgatacgtatctggtcacaagaaacggtgatgtcatacctgctaggcgtagggg

SEQ ID NO: 439985 - DNA, 60 bp, Artificial
  Synthetic oligonucleotide
gtgatactatagcaagatgccagtgtaccaccggcgtatacttctgtgcttctagaaaca

SEQ ID NO: 439986 - DNA, 58 bp, Artificial
  Synthetic oligonucleotide
gtgatactctattgttcttgggccctatggaaggaggcgggatcatctttaaacattg

SEQ ID NO: 439987 - DNA, 58 bp, Artificial
  Synthetic oligonucleotide
gtgatactggaaatgcccatgtggaccaaatcgagcagggatgtcgttaccaacgttt

SEQ ID NO: 439988 - DNA, 55 bp, Artificial
  Synthetic oligonucleotide
gtgatagacaagtcttaccaggagtgtttggcaagcgacctggccagaaggatcc

SEQ ID NO: 439989 - DNA, 51 bp, Artificial
  Synthetic oligonucleotide
gtgatagagaagttattttgtgttgggagacaggtaaagttaaaccaccac

SEQ ID NO: 439990 - DNA, 58 bp, Artificial
  Synthetic oligonucleotide
gtgatagatgggtcgccccctctgtggggtcttttcctagtaatgcagtcagaattac

SEQ ID NO: 439991 - DNA, 60 bp, Artificial
  Synthetic oligonucleotide
gtgatagccattgacgaggagtctgagacaacactgtccaggcatggtgttgagtttgtt

SEQ ID NO: 439992 - DNA, 60 bp, Artificial
  Synthetic oligonucleotide
gtgataggagcgatgctttccatagatttgtcgttcatgatacgcagtctgaagccattg

SEQ ID NO: 439993 - DNA, 51 bp, Artificial
  Synthetic oligonucleotide
gtgatagtacaataacaagacattacggtgtcacgcaacgtagatttcccc

SEQ ID NO: 439994 - DNA, 52 bp, Artificial
  Synthetic oligonucleotide
gtgatagtatacatttaagtgatcatattgatcactggaaacacgtgcgact

SEQ ID NO: 439995 - DNA, 60 bp, Artificial
  Synthetic oligonucleotide
gtgatagtcaaaggtcaaacaatttgaccgttaccaggcacttgaagatggatatggcgc

SEQ ID NO: 439996 - DNA, 60 bp, Artificial
  Synthetic oligonucleotide
gtgatagtgtggtgtcattaatggcgaatccaggtttagacggattatgtgccataccat

SEQ ID NO: 439997 - DNA, 59 bp, Artificial
  Synthetic oligonucleotide
gtgatagttgtcgtgctcacaacgttaccattggaccgcacaaattgcgaaaaatggac

SEQ ID NO: 439998 - DNA, 55 bp, Artificial
  Synthetic oligonucleotide
gtgatagttgttaggagtgattatgacctagtcaccttgactgcaactcttgcct

SEQ ID NO: 439999 - DNA, 60 bp, Artificial
  Synthetic oligonucleotide
gtgatatagcattttcatatgctatgttggcagattgtaatagtaatgctgcagcgtttt

SEQ ID NO: 440000 - DNA, 55 bp, Artificial
  Synthetic oligonucleotide
gtgatatatacctagacttccaaggttctttggacctgtcgaaatttaacgatgt

SEQ ID NO: 440001 - DNA, 60 bp, Artificial
  Synthetic oligonucleotide
gtgatatcagactatgtggatgcaggaaattacacttatgctcagttgccacctacaaca

SEQ ID NO: 440002 - DNA, 60 bp, Artificial
  Synthetic oligonucleotide
gtgatatctgttgagaaggattctacgatgattgaccttgaaggaacgacatcttttact

SEQ ID NO: 440003 - DNA, 60 bp, Artificial
  Synthetic oligonucleotide
gtgatatggttttacataaacgatgcacgtttggcatggttgtcgtctctaggtatcttg

SEQ ID NO: 440004 - DNA, 54 bp, Artificial
  Synthetic oligonucleotide
gtgatatgtaccagccagggctcagatgtatgcgtacttctgagttaaaatgat

SEQ ID NO: 440005 - DNA, 60 bp, Artificial
  Synthetic oligonucleotide
gtgatatgtgaagttaacccagcgtttgtagccggatcaggagtgactatggagtgtggt

SEQ ID NO: 440006 - DNA, 59 bp, Artificial
  Synthetic oligonucleotide
gtgatattagcaatagtaggactgatagtagcttttatcttagcagtaattgtgtggac

SEQ ID NO: 440007 - DNA, 55 bp, Artificial
  Synthetic oligonucleotide
gtgatattatttagattgtaagcgtgagataggatgagaccgtgggagagaaaac

SEQ ID NO: 440008 - DNA, 51 bp, Artificial
  Synthetic oligonucleotide
gtgatattcggccatttggcccaaccgcgtcagtataccggctatgtaaag

SEQ ID NO: 440009 - DNA, 58 bp, Artificial
  Synthetic oligonucleotide
gtgatattgcacctgcagaaaacctcgaattaacccccataggcaacatgtctttggg

SEQ ID NO: 440010 - DNA, 55 bp, Artificial
  Synthetic oligonucleotide
gtgatattttgttatccaaaatggatgggaagctcaacttgacttcagtggagtc

SEQ ID NO: 440011 - DNA, 59 bp, Artificial
  Synthetic oligonucleotide
gtgatcaagcctatgagatcataccagagaaagaggggtttggttgtcttgtttactaa

SEQ ID NO: 440012 - DNA, 59 bp, Artificial
  Synthetic oligonucleotide
gtgatcaaggctcaggacacgggggccgttgaggcccacgtcacctgctcggtcgctgc

SEQ ID NO: 440013 - DNA, 55 bp, Artificial
  Synthetic oligonucleotide
gtgatcaattcctcgagttcacagccgatttgataatcgagaggcgagaggggaa

SEQ ID NO: 440014 - DNA, 58 bp, Artificial
  Synthetic oligonucleotide
gtgatcacaagcaaccccattcctatacaggaacaaatggtctattataaccaattaa

SEQ ID NO: 440015 - DNA, 58 bp, Artificial
  Synthetic oligonucleotide
gtgatcagaaagattctctcagacctacccaacgctagagcttacaccttaggtaaac

SEQ ID NO: 440016 - DNA, 55 bp, Artificial
  Synthetic oligonucleotide
gtgatcagcgcatgagacttgttgctatgctttacacccctcttagatctaatgg

SEQ ID NO: 440017 - DNA, 55 bp, Artificial
  Synthetic oligonucleotide
gtgatcagtttgtcacctgacaggtcaatggttgtgttctcccaagctcttccaa

SEQ ID NO: 440018 - DNA, 50 bp, Artificial
  Synthetic oligonucleotide
gtgatcatgaagttctgagaactggtgagagctcagaattcacatttaac

SEQ ID NO: 440019 - DNA, 60 bp, Artificial
  Synthetic oligonucleotide
gtgatcatgcatacataagtgatcgttacttctggctgagggaagctgaatgcaaggccg

SEQ ID NO: 440020 - DNA, 60 bp, Artificial
  Synthetic oligonucleotide
gtgatcatggagcgttctatgcgtgtcggtgtctcgagaaacgctgcgggtactgggtct

SEQ ID NO: 440021 - DNA, 60 bp, Artificial
  Synthetic oligonucleotide
gtgatcatgggcgctcaggtatcaagacaaaatgttggtacacactcaactcagaattca

SEQ ID NO: 440022 - DNA, 55 bp, Artificial
  Synthetic oligonucleotide
gtgatccaaatgctcttttgaagcacagatttgaaatcattgaagggagagatcg

SEQ ID NO: 440023 - DNA, 55 bp, Artificial
  Synthetic oligonucleotide
gtgatccattgtccagtacacccgttcctggtacgtctggacggcccaggttggg

SEQ ID NO: 440024 - DNA, 55 bp, Artificial
  Synthetic oligonucleotide
gtgatcccaaacatcggaccgggaccctgggtaaggggcttgtctagtagaatga

SEQ ID NO: 440025 - DNA, 55 bp, Artificial
  Synthetic oligonucleotide
gtgatcccgaaggggcactctggtaagccaacccattcacacaatcaaacaaggc

SEQ ID NO: 440026 - DNA, 55 bp, Artificial
  Synthetic oligonucleotide
gtgatcccgtatatttccatatcatctcgccggtttgcgaacacaacaggcacca

SEQ ID NO: 440027 - DNA, 55 bp, Artificial
  Synthetic oligonucleotide
gtgatccgcaccttttaagtagtattcggtgccaggatacagaatgactaagctc

SEQ ID NO: 440028 - DNA, 60 bp, Artificial
  Synthetic oligonucleotide
gtgatcctaaaatcacgttcgtcattgcctcgggagctgattcactccttggctctgttg

SEQ ID NO: 440029 - DNA, 57 bp, Artificial
  Synthetic oligonucleotide
gtgatcctatctccagacaatatacgcgtaaggaaatttgtgaaacgcaacagggtt

SEQ ID NO: 440030 - DNA, 55 bp, Artificial
  Synthetic oligonucleotide
gtgatcctattcttaagaaacttctcaagtggcaactcagaaatgaggttgtcct

SEQ ID NO: 440031 - DNA, 55 bp, Artificial
  Synthetic oligonucleotide
gtgatccttatatccaaggggacttcaataagcaccttaaagctctaacccctat

SEQ ID NO: 440032 - DNA, 53 bp, Artificial
  Synthetic oligonucleotide
gtgatccttccggcagtctaccaaacgttcccagatacagcttgacagagcta

SEQ ID NO: 440033 - DNA, 60 bp, Artificial
  Synthetic oligonucleotide
gtgatccttgactcctttgagccgcttaaggcggatgacgacgacagagagatctctgtg

SEQ ID NO: 440034 - DNA, 50 bp, Artificial
  Synthetic oligonucleotide
gtgatcgaaaatcgtcaatttgacgaatagatactacatctccctcttca

SEQ ID NO: 440035 - DNA, 58 bp, Artificial
  Synthetic oligonucleotide
gtgatcgactggtggtggtcttggcttttgacggcggttggttgtagtggcatttatc

SEQ ID NO: 440036 - DNA, 55 bp, Artificial
  Synthetic oligonucleotide
gtgatcgatacgtcgaaaccgtaggggcagtcgtgatagatacgtccccacggtc

SEQ ID NO: 440037 - DNA, 60 bp, Artificial
  Synthetic oligonucleotide
gtgatcgatttcaagtgctgcacaggttttatgccaaagtaacaggtggtcagtatgcca

SEQ ID NO: 440038 - DNA, 55 bp, Artificial
  Synthetic oligonucleotide
gtgatcgcacctcactgatgcggagaccgcacctacctagcagtgttacaagtgc

SEQ ID NO: 440039 - DNA, 58 bp, Artificial
  Synthetic oligonucleotide
gtgatcgcgacgcctttcgcccggcgtaagggcggcgctgggattcaatacaccgcgc

SEQ ID NO: 440040 - DNA, 55 bp, Artificial
  Synthetic oligonucleotide
gtgatcggattcctggctttggcaaaagattggagtgaccgcattgagcagtggt

SEQ ID NO: 440041 - DNA, 58 bp, Artificial
  Synthetic oligonucleotide
gtgatcggcctcttactcggatcgcccttcatcgcaaaccgtccctgatctgatacac

SEQ ID NO: 440042 - DNA, 58 bp, Artificial
  Synthetic oligonucleotide
gtgatcgggaccagtgcggcccacactacgccaataactgccgcacccccgtccctga

SEQ ID NO: 440043 - DNA, 57 bp, Artificial
  Synthetic oligonucleotide
gtgatcggggagcagggccagaattcaaccttaacctttcttatcctgtagtattca

SEQ ID NO: 440044 - DNA, 57 bp, Artificial
  Synthetic oligonucleotide
gtgatcggtgttttgaagcccaggacaataacctatagatgtcctagggatgttacc

SEQ ID NO: 440045 - DNA, 57 bp, Artificial
  Synthetic oligonucleotide
gtgatcgtcgacgttttcgtcggaggtcactggggggtgatcgcaggtatactgtac

SEQ ID NO: 440046 - DNA, 52 bp, Artificial
  Synthetic oligonucleotide
gtgatcgtgatggctaattgccgtccgttacctattgggcatctgcccaaca

SEQ ID NO: 440047 - DNA, 59 bp, Artificial
  Synthetic oligonucleotide
gtgatcgtgctatgccaaacatactgcgtattgttagtagtttggtgttagcccgtaaa

SEQ ID NO: 440048 - DNA, 60 bp, Artificial
  Synthetic oligonucleotide
gtgatcgtgttgagcttagttcgacctgaacaaggaaggaagtgtctgcttccaatttga

SEQ ID NO: 440049 - DNA, 60 bp, Artificial
  Synthetic oligonucleotide
gtgatcgttatcaagtcttgcgaaagtttagtgccactgttactggtggccaatatgctt

SEQ ID NO: 440050 - DNA, 55 bp, Artificial
  Synthetic oligonucleotide
gtgatctagagcctatgtaaggccaaccatcacctgacagacagagcttgtagag

SEQ ID NO: 440051 - DNA, 55 bp, Artificial
  Synthetic oligonucleotide
gtgatctagaggtcgtccagaacaagcctaaaaggaatttattgtggacgggaga

SEQ ID NO: 440052 - DNA, 56 bp, Artificial
  Synthetic oligonucleotide
gtgatctataggacgtggtgtaaggggtaccaggcaatacgccaacgggtggtgcg

SEQ ID NO: 440053 - DNA, 50 bp, Artificial
  Synthetic oligonucleotide
gtgatctccagttacagtcgtaccgatggaaacagtctgtactgtaggtt

SEQ ID NO: 440054 - DNA, 60 bp, Artificial
  Synthetic oligonucleotide
gtgatctcccaagagtgtccaccctcccctcactagaccagaaggacgcaacctgtctga

SEQ ID NO: 440055 - DNA, 60 bp, Artificial
  Synthetic oligonucleotide
gtgatctgaagacgtcgccatatatgttccctgatcagaatttatcgccacagttttata

SEQ ID NO: 440056 - DNA, 56 bp, Artificial
  Synthetic oligonucleotide
gtgatctgctgatggcctcccttccaggtctacagtggtgttctcccatgctcttc

SEQ ID NO: 440057 - DNA, 55 bp, Artificial
  Synthetic oligonucleotide
gtgatctgtctaaacagcaagacttttgacaaggattatggcagagtccatgagg

SEQ ID NO: 440058 - DNA, 55 bp, Artificial
  Synthetic oligonucleotide
gtgatcttagcaccattagaggctcgtcagtttccaagactgactgcggttacgg

SEQ ID NO: 440059 - DNA, 53 bp, Artificial
  Synthetic oligonucleotide
gtgatcttatgccaacttgcaagagccgccctggttgcagagtgcaacctgag

SEQ ID NO: 440060 - DNA, 58 bp, Artificial
  Synthetic oligonucleotide
gtgatcttcctagcaaagtggtaacacggacaatagtgtagctacgacctacaagacg

SEQ ID NO: 440061 - DNA, 60 bp, Artificial
  Synthetic oligonucleotide
gtgatcttgaagcaacgggttcgcgcgtaatggatgctgcagactgttttcgaaactcag

SEQ ID NO: 440062 - DNA, 57 bp, Artificial
  Synthetic oligonucleotide
gtgatcttgcatcttctatcggacgtagaagaagttattctagttatcataggtatg

SEQ ID NO: 440063 - DNA, 60 bp, Artificial
  Synthetic oligonucleotide
gtgatcttgctgagattaagcacaacgaattaggttcgcatcttgaagtacacacaccaa

SEQ ID NO: 440064 - DNA, 55 bp, Artificial
  Synthetic oligonucleotide
gtgatcttgttgttcatactggggcagctgtatctccacctaatgacgtggtggg

SEQ ID NO: 440065 - DNA, 60 bp, Artificial
  Synthetic oligonucleotide
gtgatctttcccgggttcgtgaggctgctcttgagatatacaccgccgagggagtgtcga

SEQ ID NO: 440066 - DNA, 53 bp, Artificial
  Synthetic oligonucleotide
gtgatgaaacatggcataaggtgcctggtaagattagccatgcagggtgttac

SEQ ID NO: 440067 - DNA, 60 bp, Artificial
  Synthetic oligonucleotide
gtgatgaaacgcgtattatccgtcgagaaagacacgttgatggttgatatacatgggaca

SEQ ID NO: 440068 - DNA, 52 bp, Artificial
  Synthetic oligonucleotide
gtgatgaacaaaccctctttcccaggggattccgaaacccaacaggagggga

SEQ ID NO: 440069 - DNA, 60 bp, Artificial
  Synthetic oligonucleotide
gtgatgaacacttgtgcatgctccgcactgataaggactatatttgtgaacataccactc

SEQ ID NO: 440070 - DNA, 55 bp, Artificial
  Synthetic oligonucleotide
gtgatgaagagtgctgcccagttaactttaagaagtgttgtccccttgtgtgcgg

SEQ ID NO: 440071 - DNA, 54 bp, Artificial
  Synthetic oligonucleotide
gtgatgaatctcattaaggggcaggattcaattgcctctctgcttaatgtcgat

SEQ ID NO: 440072 - DNA, 60 bp, Artificial
  Synthetic oligonucleotide
gtgatgaattcattggtgtgaatacctttggacttagtctattcgcaacctcgaaatcag

SEQ ID NO: 440073 - DNA, 55 bp, Artificial
  Synthetic oligonucleotide
gtgatgacaagagaaactccctcgaaggtaatttgaagtttgttttcgatacgta

SEQ ID NO: 440074 - DNA, 59 bp, Artificial
  Synthetic oligonucleotide
gtgatgacaattggcttaattttgatggtacattattaggtaatatcacaatttaccca

SEQ ID NO: 440075 - DNA, 54 bp, Artificial
  Synthetic oligonucleotide
gtgatgacacatgcatggagagcatcaaaaatgggacttacgattaccccaaat

SEQ ID NO: 440076 - DNA, 60 bp, Artificial
  Synthetic oligonucleotide
gtgatgaccaaatgtaccatgcacgtaggtggacgcagaggaatgttaatgccataccag

SEQ ID NO: 440077 - DNA, 57 bp, Artificial
  Synthetic oligonucleotide
gtgatgaccctcttcgttttcggtataactataaccacaccaatcttcatattttca

SEQ ID NO: 440078 - DNA, 55 bp, Artificial
  Synthetic oligonucleotide
gtgatgaccttcttataaggccctatgtcaaccaatcatggacgatggtaagtcc

SEQ ID NO: 440079 - DNA, 59 bp, Artificial
  Synthetic oligonucleotide
gtgatgacgaacaggattgacaacgagattggtttaggtgtaaacgtgtattcgtatga

SEQ ID NO: 440080 - DNA, 60 bp, Artificial
  Synthetic oligonucleotide
gtgatgacggataataggctagtgatcgtgggtgaaactacaacaccaataagtagcacg

SEQ ID NO: 440081 - DNA, 55 bp, Artificial
  Synthetic oligonucleotide
gtgatgacgtcatcttgtcacttgacagagaaatagacccagagaaactgcaggg

SEQ ID NO: 440082 - DNA, 59 bp, Artificial
  Synthetic oligonucleotide
gtgatgactcggtggtcctttgtagtgactaccggcagagtcgtaatgcggcaacccta

SEQ ID NO: 440083 - DNA, 55 bp, Artificial
  Synthetic oligonucleotide
gtgatgactgttccttatggtgtgtctcgggattcggctcgtgcctacattcgcg

SEQ ID NO: 440084 - DNA, 55 bp, Artificial
  Synthetic oligonucleotide
gtgatgagatcttcatggttcattgtggtgaatggttcgcttgtttaaacctgat

SEQ ID NO: 440085 - DNA, 60 bp, Artificial
  Synthetic oligonucleotide
gtgatgagcgactccacaaccccttcagccaaccatggcatagatgcaaagggttatttt

SEQ ID NO: 440086 - DNA, 55 bp, Artificial
  Synthetic oligonucleotide
gtgatgaggagtgttgtccagtcaactttaagaagtgttgcccgctagtgtgtgg

SEQ ID NO: 440087 - DNA, 60 bp, Artificial
  Synthetic oligonucleotide
gtgatgatatcgtagctacctatcccttccagttggatgctgccgctttggctgaggccg

SEQ ID NO: 440088 - DNA, 55 bp, Artificial
  Synthetic oligonucleotide
gtgatgatctctctggctctgccactctcaccaaagtcatggccaactaccgaca

SEQ ID NO: 440089 - DNA, 55 bp, Artificial
  Synthetic oligonucleotide
gtgatgatgagatagttagagaagcatctagaaatggaatgcaaccccagtctcc

SEQ ID NO: 440090 - DNA, 55 bp, Artificial
  Synthetic oligonucleotide
gtgatgatgagattgtgagtacagacataaagttggatccagagaaactgacggg

SEQ ID NO: 440091 - DNA, 55 bp, Artificial
  Synthetic oligonucleotide
gtgatgatgtccttccttgtcaggaatacattcacgtcgtggcggacgatcttga

SEQ ID NO: 440092 - DNA, 60 bp, Artificial
  Synthetic oligonucleotide
gtgatgattcggtggtcctctgcaccgactaccgacagagtcgtaatgcggcaaccttaa

SEQ ID NO: 440093 - DNA, 55 bp, Artificial
  Synthetic oligonucleotide
gtgatgcacaacttgcaatctccagattggaaaactctgtcggagccctccaagc

SEQ ID NO: 440094 - DNA, 58 bp, Artificial
  Synthetic oligonucleotide
gtgatgcacgacgtatgctcgaaacgtcgatcaccgactattaaatttacgggttata

SEQ ID NO: 440095 - DNA, 60 bp, Artificial
  Synthetic oligonucleotide
gtgatgcacggtaccctttccttgtacatccggtcatggacatgtcgaacatccatgagt

SEQ ID NO: 440096 - DNA, 55 bp, Artificial
  Synthetic oligonucleotide
gtgatgcagctgaagcgtatatagaataccgaaactctacagagcgatatatgcc

SEQ ID NO: 440097 - DNA, 60 bp, Artificial
  Synthetic oligonucleotide
gtgatgcatctgactccccttgaagcttacgcagataatatattggagaaggaaggtgac

SEQ ID NO: 440098 - DNA, 55 bp, Artificial
  Synthetic oligonucleotide
gtgatgcatttgaactttgggcatccagcattcaggcatacaacgagaacttcac

SEQ ID NO: 440099 - DNA, 60 bp, Artificial
  Synthetic oligonucleotide
gtgatgccataagaattctttgttatggggatgatgttctgattgtcttttcaaggcaag

SEQ ID NO: 440100 - DNA, 55 bp, Artificial
  Synthetic oligonucleotide
gtgatgccgatggttcccagtttgatagttctttatcgccctatctcataaacgc

SEQ ID NO: 440101 - DNA, 57 bp, Artificial
  Synthetic oligonucleotide
gtgatgcgaaatattgtccaccggccaaccggtgtaattgaaatgcactatttttcg

SEQ ID NO: 440102 - DNA, 59 bp, Artificial
  Synthetic oligonucleotide
gtgatgcgcatatcgaaagaagcgtacgatcaacttccggccataaggaaagaagtacc

SEQ ID NO: 440103 - DNA, 60 bp, Artificial
  Synthetic oligonucleotide
gtgatgcgtcgagcaaagtaagagatgatctttgcgctgtgtaccatctcaagaagttta

SEQ ID NO: 440104 - DNA, 55 bp, Artificial
  Synthetic oligonucleotide
gtgatgcgttttcctctttgtcgaggaagtctttatagctggacccttcccctgg

SEQ ID NO: 440105 - DNA, 55 bp, Artificial
  Synthetic oligonucleotide
gtgatgctaaaatatttagggaacaacatacagggtcaaccacgcacagacctat

SEQ ID NO: 440106 - DNA, 60 bp, Artificial
  Synthetic oligonucleotide
gtgatgctagaggactaccaccctcatggttccccatgaagtgtggcagcgtagcatctt

SEQ ID NO: 440107 - DNA, 60 bp, Artificial
  Synthetic oligonucleotide
gtgatgctagtgggccactggttggccccgtgtccatgcagcaattaacatcactgctgc

SEQ ID NO: 440108 - DNA, 60 bp, Artificial
  Synthetic oligonucleotide
gtgatgctatggacgatgcattaaataagagctttgacactattgattcagacggtgcta

SEQ ID NO: 440109 - DNA, 54 bp, Artificial
  Synthetic oligonucleotide
gtgatgctcatatctagagtctaatcccgatagagctatgtgtcaatacctaga

SEQ ID NO: 440110 - DNA, 58 bp, Artificial
  Synthetic oligonucleotide
gtgatgctggattcagtaaactgaatgtagtcaatgcatgcaagatagcatacactct

SEQ ID NO: 440111 - DNA, 60 bp, Artificial
  Synthetic oligonucleotide
gtgatgctggtattaaatctgccattcaaggctctaatgttcctaactctgatgaggccg

SEQ ID NO: 440112 - DNA, 60 bp, Artificial
  Synthetic oligonucleotide
gtgatggaactcatcagaatgatcaaacgtgggataaacgatcggaatttctggagaggt

SEQ ID NO: 440113 - DNA, 54 bp, Artificial
  Synthetic oligonucleotide
gtgatggaattcaacccggctcagttgaggctctttcatcgcaaccccccctaa

SEQ ID NO: 440114 - DNA, 60 bp, Artificial
  Synthetic oligonucleotide
gtgatggacgttgtagggattacatcaagttactcaaacttgatgtctctggtgtgataa

SEQ ID NO: 440115 - DNA, 53 bp, Artificial
  Synthetic oligonucleotide
gtgatggaggaaacaggaatggcagtgagaatggcactgagaccttcagacct

SEQ ID NO: 440116 - DNA, 60 bp, Artificial
  Synthetic oligonucleotide
gtgatggaggaaattttgtctatagttgctcgtgcgtcactcatgaagatgggagcgctt

SEQ ID NO: 440117 - DNA, 55 bp, Artificial
  Synthetic oligonucleotide
gtgatggaggcaaggataatacaggtacaaatgagacattcagacctcaaggagg

SEQ ID NO: 440118 - DNA, 55 bp, Artificial
  Synthetic oligonucleotide
gtgatggaggcggcaccccaaataacaaatcagagggtaacgaaacattcagacc

SEQ ID NO: 440119 - DNA, 60 bp, Artificial
  Synthetic oligonucleotide
gtgatggaggtatagataactccacaaataccacagagacattcagacctggaggaggag

SEQ ID NO: 440120 - DNA, 58 bp, Artificial
  Synthetic oligonucleotide
gtgatggatataaccttctaaatgaatgtataatatggttgaacccaactttatcctc

SEQ ID NO: 440121 - DNA, 55 bp, Artificial
  Synthetic oligonucleotide
gtgatggatgagcttgcgattccgattattaatgggcatttccctaaagaagcac

SEQ ID NO: 440122 - DNA, 60 bp, Artificial
  Synthetic oligonucleotide
gtgatggattcccctgtgcgtgaatccatggttgtggcagttgatgtgtacgtagtatga

SEQ ID NO: 440123 - DNA, 60 bp, Artificial
  Synthetic oligonucleotide
gtgatggattcgacgatcagagtatcaccggtgatggacgctcgaaacgttcccacttta

SEQ ID NO: 440124 - DNA, 50 bp, Artificial
  Synthetic oligonucleotide
gtgatggcaacaattgactctttccaatccttcaatacaagcactatgca

SEQ ID NO: 440125 - DNA, 60 bp, Artificial
  Synthetic oligonucleotide
gtgatggcatccaactcattctcgggtgcaacttcatccgaagtatgtatggtggtgttc

SEQ ID NO: 440126 - DNA, 60 bp, Artificial
  Synthetic oligonucleotide
gtgatggcatggtctacacaagtgcacaacagtgtccctttgtctgaggatggttgcccg

SEQ ID NO: 440127 - DNA, 60 bp, Artificial
  Synthetic oligonucleotide
gtgatggcgtggtccacacaagtgcacaacagcgttcctctgtccgaagatggttgtcct

SEQ ID NO: 440128 - DNA, 55 bp, Artificial
  Synthetic oligonucleotide
gtgatggctatccaagtcattaacggtcaagcacttctgtttccccggtttaaat

SEQ ID NO: 440129 - DNA, 58 bp, Artificial
  Synthetic oligonucleotide
gtgatgggaagctcctacggattccagtactcaccagggcagcgggttgagttcctcg

SEQ ID NO: 440130 - DNA, 60 bp, Artificial
  Synthetic oligonucleotide
gtgatgggaatgatcggaatactgcctgacatgaccccaagtaccgagatgtcactgagg

SEQ ID NO: 440131 - DNA, 60 bp, Artificial
  Synthetic oligonucleotide
gtgatgggaatgatcggaatattacccgatatgaccccaagcacagaggtatcgctgaga

SEQ ID NO: 440132 - DNA, 60 bp, Artificial
  Synthetic oligonucleotide
gtgatgggaatgattgggatattgcccgacatgaccccgagcactgagatgtcactgaga

SEQ ID NO: 440133 - DNA, 55 bp, Artificial
  Synthetic oligonucleotide
gtgatggggatcaagaggaattgtcaacactggtggatatggggcaccttaggct

SEQ ID NO: 440134 - DNA, 55 bp, Artificial
  Synthetic oligonucleotide
gtgatggggttcgtgattcggcacactaaccacacgcacatcaccctcatcgcgt

SEQ ID NO: 440135 - DNA, 56 bp, Artificial
  Synthetic oligonucleotide
gtgatgggtgggcaatgggtttattgcactaatttagggttaagggccataattga

SEQ ID NO: 440136 - DNA, 60 bp, Artificial
  Synthetic oligonucleotide
gtgatggtctagaacgggttgtattacacatcagcaatcaactaacaggcaagcctaatt

SEQ ID NO: 440137 - DNA, 52 bp, Artificial
  Synthetic oligonucleotide
gtgatggtgccaggaagacgttttattggatacgctcacttctttcgcacca

SEQ ID NO: 440138 - DNA, 52 bp, Artificial
  Synthetic oligonucleotide
gtgatgtaaaagaagtgactaggatgctgattaggcttaacatgcttatgcg

SEQ ID NO: 440139 - DNA, 60 bp, Artificial
  Synthetic oligonucleotide
gtgatgtacagaccatataacagttatataggcgactcactggagttggatcagaccaat

SEQ ID NO: 440140 - DNA, 60 bp, Artificial
  Synthetic oligonucleotide
gtgatgtactcccctgtgcgtaaatccatggtttatgcagtctaaatgtatatagtatga

SEQ ID NO: 440141 - DNA, 60 bp, Artificial
  Synthetic oligonucleotide
gtgatgtatcacgacagcatacaaaggtatgttaacaaattttcgcgtcccagggcacaa

SEQ ID NO: 440142 - DNA, 60 bp, Artificial
  Synthetic oligonucleotide
gtgatgtcatttcttacggcaatatattgcttagtggcaaccaaacagcacgcatgctta

SEQ ID NO: 440143 - DNA, 50 bp, Artificial
  Synthetic oligonucleotide
gtgatgtgactgccttcgcggacaacgtattggtttacgttgcgagctac

SEQ ID NO: 440144 - DNA, 54 bp, Artificial
  Synthetic oligonucleotide
gtgatgtgccatgccacgctcacacagaaactgttgacaccgactcgggttccc

SEQ ID NO: 440145 - DNA, 51 bp, Artificial
  Synthetic oligonucleotide
gtgatgtgcgctagcgttagcagttctgtgtacctggaccccgacggtagc

SEQ ID NO: 440146 - DNA, 55 bp, Artificial
  Synthetic oligonucleotide
gtgatgtgctaccggctcaagttgggattaatccttactcacgagaatggacccg

SEQ ID NO: 440147 - DNA, 55 bp, Artificial
  Synthetic oligonucleotide
gtgatgtggatgctcaaattgcagcttttgctgtcaaccctggtggtgatggagt

SEQ ID NO: 440148 - DNA, 60 bp, Artificial
  Synthetic oligonucleotide
gtgatgtgtggagttgattatgaagtcgccgattggtcgtggcacgatggagctattctt

SEQ ID NO: 440149 - DNA, 55 bp, Artificial
  Synthetic oligonucleotide
gtgatgtgtggggtggaccatgaggttgccgattggtcatggcacgatggagcta

SEQ ID NO: 440150 - DNA, 55 bp, Artificial
  Synthetic oligonucleotide
gtgatgttactcgtggtactggtctgacccacagagtaggtaagcgtttctgtgt

SEQ ID NO: 440151 - DNA, 55 bp, Artificial
  Synthetic oligonucleotide
gtgatgttacttcgtttattagttacccagctctatctttaaacggagatggtcg

SEQ ID NO: 440152 - DNA, 60 bp, Artificial
  Synthetic oligonucleotide
gtgatgttagatggacatctcatagcatttgattactccgggtatgatgctagcttaagt

SEQ ID NO: 440153 - DNA, 60 bp, Artificial
  Synthetic oligonucleotide
gtgatgttagtttcatgaaactgaacctactcaagatgcgttcgaatggtcatatgccat

SEQ ID NO: 440154 - DNA, 58 bp, Artificial
  Synthetic oligonucleotide
gtgatgttatacattgtacgctggcgcggtatatgttgttttgtttcgaacaagattt

SEQ ID NO: 440155 - DNA, 56 bp, Artificial
  Synthetic oligonucleotide
gtgatgttcagcgctggtacactgctcccactcgcgggccggctgctaattgccgg

SEQ ID NO: 440156 - DNA, 55 bp, Artificial
  Synthetic oligonucleotide
gtgatgttcccttagactctagttgtggaggggattgctttcacagtggaggtac

SEQ ID NO: 440157 - DNA, 55 bp, Artificial
  Synthetic oligonucleotide
gtgatgttctggttagtcagggaccgtagaccctacggtactccaatggatttcg

SEQ ID NO: 440158 - DNA, 54 bp, Artificial
  Synthetic oligonucleotide
gtgatgttgagaccaaccctgggcccgatattgaattggtttataaaccccgtg

SEQ ID NO: 440159 - DNA, 52 bp, Artificial
  Synthetic oligonucleotide
gtgatgttgagtgcaaagcagatctcaaaactccaaatgttggagcagaagg

SEQ ID NO: 440160 - DNA, 55 bp, Artificial
  Synthetic oligonucleotide
gtgatgttgagtgtacaatacgccttacgaaagtgtggcatagcgatcgataaac

SEQ ID NO: 440161 - DNA, 55 bp, Artificial
  Synthetic oligonucleotide
gtgatgttgctctcagtgataaggtcggtcaaggcccggaggaaatgtatatacc

SEQ ID NO: 440162 - DNA, 50 bp, Artificial
  Synthetic oligonucleotide
gtgatgtttcaaagtcccttggcaattgcgcatattttgatttgctggat

SEQ ID NO: 440163 - DNA, 58 bp, Artificial
  Synthetic oligonucleotide
gtgatgtttcttcgtgtcaacgcctagctccgttcctactccgcatgtttagtctagt

SEQ ID NO: 440164 - DNA, 53 bp, Artificial
  Synthetic oligonucleotide
gtgatgttttcttgacatccgagggcgttatgagtatactggatccagcaccc

SEQ ID NO: 440165 - DNA, 60 bp, Artificial
  Synthetic oligonucleotide
gtgattacaatcctattgcacaaacaatatgcatgcttacagtcgacactgaaactggga

SEQ ID NO: 440166 - DNA, 57 bp, Artificial
  Synthetic oligonucleotide
gtgattaccgacgttgtggatggagtcaatcataaactgagcgtgacaacaaacact

SEQ ID NO: 440167 - DNA, 59 bp, Artificial
  Synthetic oligonucleotide
gtgattacgcatggcagacttccactaaccctagtatcttttggaccgaaggtaatgca

SEQ ID NO: 440168 - DNA, 54 bp, Artificial
  Synthetic oligonucleotide
gtgattagttacgtcttgctcgaataacgtgttactagtatcttggaacgggcg

SEQ ID NO: 440169 - DNA, 60 bp, Artificial
  Synthetic oligonucleotide
gtgattattaatgtcctatgatcgttgagatagggaagacaaaatattacgaatgaataa

SEQ ID NO: 440170 - DNA, 55 bp, Artificial
  Synthetic oligonucleotide
gtgattcaagacctaagttctgattctccatgtttgacaagctgtgtactaaccg

SEQ ID NO: 440171 - DNA, 60 bp, Artificial
  Synthetic oligonucleotide
gtgattcacccaacaataacgacccctgcaataccgaactgcagtgacactataataaca

SEQ ID NO: 440172 - DNA, 55 bp, Artificial
  Synthetic oligonucleotide
gtgattcatccgcgagtgatgatgaggtttaaaattcctagaacgcagcagccgc

SEQ ID NO: 440173 - DNA, 55 bp, Artificial
  Synthetic oligonucleotide
gtgattcatttggttgattccaactacattgggatgaatcggttcaattagtttt

SEQ ID NO: 440174 - DNA, 60 bp, Artificial
  Synthetic oligonucleotide
gtgattcattttccgtcattcttctgtcatgaatctccactataactgaacctacggcgt

SEQ ID NO: 440175 - DNA, 55 bp, Artificial
  Synthetic oligonucleotide
gtgattccatttaagaaaattaggtcgcgcagcgagacaggactaactagatggg

SEQ ID NO: 440176 - DNA, 55 bp, Artificial
  Synthetic oligonucleotide
gtgattccctggattagcaacacacatttcagaacaaatgcctcaggaacctact

SEQ ID NO: 440177 - DNA, 55 bp, Artificial
  Synthetic oligonucleotide
gtgattcctcttgtgttgaggaaggagctcctgagggagtctctgtggcgtctgc

SEQ ID NO: 440178 - DNA, 60 bp, Artificial
  Synthetic oligonucleotide
gtgattctatatcgctttgccacatgtctgttctcctcagtaaggtggttgaagtttcga

SEQ ID NO: 440179 - DNA, 60 bp, Artificial
  Synthetic oligonucleotide
gtgattctggattagtggccgacacaacgctcgcctttgcgaaaatgtatcaatgcaaaa

SEQ ID NO: 440180 - DNA, 57 bp, Artificial
  Synthetic oligonucleotide
gtgattctgggtttaaatgtgatctacctgttgcaaatagttgtgcaagatgtatag

SEQ ID NO: 440181 - DNA, 60 bp, Artificial
  Synthetic oligonucleotide
gtgattcttgctgaactactggttactgtatcacttgcaatcactcacgttccgcgatga

SEQ ID NO: 440182 - DNA, 50 bp, Artificial
  Synthetic oligonucleotide
gtgattgaattccaatcccccacacctagtcataacttaaacaggatatc

SEQ ID NO: 440183 - DNA, 59 bp, Artificial
  Synthetic oligonucleotide
gtgattgactgcccagcctgggggtctttcagtatgtaatacgggctgtattgaaagac

SEQ ID NO: 440184 - DNA, 55 bp, Artificial
  Synthetic oligonucleotide
gtgattgcttcacatgtatatttggggtggatcggtcagaaatttttatgtccgg

SEQ ID NO: 440185 - DNA, 57 bp, Artificial
  Synthetic oligonucleotide
gtgattggaaaaccaatgtacacttcattgtggggccacctgggtgtggtaaaagca

SEQ ID NO: 440186 - DNA, 57 bp, Artificial
  Synthetic oligonucleotide
gtgattggatgagtgtatttcgtagaagtctaataaaacaacgacatcagagacatc

SEQ ID NO: 440187 - DNA, 55 bp, Artificial
  Synthetic oligonucleotide
gtgattgggttctggttgaagctgactgtagcgatgtagaggagcctctagaaga

SEQ ID NO: 440188 - DNA, 55 bp, Artificial
  Synthetic oligonucleotide
gtgattggtaacagcggcgatccaaagtacatagatctccctgagatcgaggaga

SEQ ID NO: 440189 - DNA, 59 bp, Artificial
  Synthetic oligonucleotide
gtgattggtaagttgaagcctaggaccatgacttacaggtgtcctagagatgttaccgc

SEQ ID NO: 440190 - DNA, 58 bp, Artificial
  Synthetic oligonucleotide
gtgattggttaagatttggtgtaaggttcatgtgccaacgccctgtgcgggatgaaac

SEQ ID NO: 440191 - DNA, 60 bp, Artificial
  Synthetic oligonucleotide
gtgattgtagccagaatttcatgttcactgcacctaggaaaaagatcataggacaagttc

SEQ ID NO: 440192 - DNA, 56 bp, Artificial
  Synthetic oligonucleotide
gtgattgtggattaaagagttaagatatgatggagatgtattacttgtgcggtgac

SEQ ID NO: 440193 - DNA, 58 bp, Artificial
  Synthetic oligonucleotide
gtgattgtggcttatgacggtcaagctcccgtgaatgtaaacaatccgggagcgggac

SEQ ID NO: 440194 - DNA, 55 bp, Artificial
  Synthetic oligonucleotide
gtgattgtggtggcatactcaggtgtgttcatggaccaattggactgttgacagc

SEQ ID NO: 440195 - DNA, 59 bp, Artificial
  Synthetic oligonucleotide
gtgatttactgactcatggggtcgttatttagatgttcactcccctaggtatatattga

SEQ ID NO: 440196 - DNA, 55 bp, Artificial
  Synthetic oligonucleotide
gtgatttatgaaccctgcgcctctgtatctagtacccaggacgccgtgcgagaag

SEQ ID NO: 440197 - DNA, 55 bp, Artificial
  Synthetic oligonucleotide
gtgatttcacaccatggctggcatggcatgttgcagccaatgtgcccaacgtgac

SEQ ID NO: 440198 - DNA, 56 bp, Artificial
  Synthetic oligonucleotide
gtgatttcacggtgttcgatgagaagattgtttaacggtgtcacgttgtgtacctt

SEQ ID NO: 440199 - DNA, 55 bp, Artificial
  Synthetic oligonucleotide
gtgatttcccaacgcgcgaccgtaacatcgtggaagcgcgtgtgaaaaggtcggg

SEQ ID NO: 440200 - DNA, 55 bp, Artificial
  Synthetic oligonucleotide
gtgatttccgctggtacggaccgaagtatataacacattccatccgatccttcac

SEQ ID NO: 440201 - DNA, 57 bp, Artificial
  Synthetic oligonucleotide
gtgatttcgagttacaaggacctgaggaccttgcagtggagctcgtccctgtagtaa

SEQ ID NO: 440202 - DNA, 60 bp, Artificial
  Synthetic oligonucleotide
gtgatttcgtcagatttgtcttacaaagtcggatatttgtgcgcaggtatccccagtgac

SEQ ID NO: 440203 - DNA, 59 bp, Artificial
  Synthetic oligonucleotide
gtgatttcgtgcaaattacgagttgtgaagtgacttttttgaacactacatatacgatg

SEQ ID NO: 440204 - DNA, 55 bp, Artificial
  Synthetic oligonucleotide
gtgatttctgttcatagatatggagtatggacaaaccttgacttaagtgaggagc

SEQ ID NO: 440205 - DNA, 60 bp, Artificial
  Synthetic oligonucleotide
gtgatttgcaatgtctgttacgacagacatggcagttcaaggagtcgcacgcgatgcctt

SEQ ID NO: 440206 - DNA, 54 bp, Artificial
  Synthetic oligonucleotide
gtgatttggagaatataacgttggaagcactaacagttccctggcgtttgcaat

SEQ ID NO: 440207 - DNA, 51 bp, Artificial
  Synthetic oligonucleotide
gtgatttgtgttatatctctcaagatgcatagatttcagagggtttagggc

SEQ ID NO: 440208 - DNA, 55 bp, Artificial
  Synthetic oligonucleotide
gtgattttacagccaaagtgtttactgtcctgttgttggtctgggattggttaaa

SEQ ID NO: 440209 - DNA, 55 bp, Artificial
  Synthetic oligonucleotide
gtgattttctcaggtaggcctttggtctaaaatctatttgccttacaaatctggc

SEQ ID NO: 440210 - DNA, 54 bp, Artificial
  Synthetic oligonucleotide
gtgatttttaataggcgtcagaaattccgatttcccactacctaattaactgtg

SEQ ID NO: 440211 - DNA, 59 bp, Artificial
  Synthetic oligonucleotide
gtgatttttgcaacgtcaatcatatttgtagatcttgtaaggaaaacagaattgatctt

SEQ ID NO: 440212 - DNA, 51 bp, Artificial
  Synthetic oligonucleotide
gtgcaaaaaggtagtcacgacattgcagacaagaggcgttataccagcaac

SEQ ID NO: 440213 - DNA, 60 bp, Artificial
  Synthetic oligonucleotide
gtgcaaaaccattatgtctgctggctcccgtcgtggagctatgatggccaccatgcggtg

SEQ ID NO: 440214 - DNA, 59 bp, Artificial
  Synthetic oligonucleotide
gtgcaaaacttggatgtgcagagtgagggatgaagggttacaggttatattagagccgt

SEQ ID NO: 440215 - DNA, 55 bp, Artificial
  Synthetic oligonucleotide
gtgcaaaataaaactacacatcgcgacatccttgcgtcgtcccttccagcggttg

SEQ ID NO: 440216 - DNA, 60 bp, Artificial
  Synthetic oligonucleotide
gtgcaaacaaccagcgatcaatttagatgcgaggaatgacgttgggctgacagcctatca

SEQ ID NO: 440217 - DNA, 60 bp, Artificial
  Synthetic oligonucleotide
gtgcaaacaatgagctaggtgatgtgtcactgaaggtcaatattgtcttggtgcctctta

SEQ ID NO: 440218 - DNA, 55 bp, Artificial
  Synthetic oligonucleotide
gtgcaaacaatggaggagataaacactctccaaaatcaaggagcatggccggaag

SEQ ID NO: 440219 - DNA, 55 bp, Artificial
  Synthetic oligonucleotide
gtgcaaacactcgttgagagagcagttagcgaagatggagatatggagttgtcgc

SEQ ID NO: 440220 - DNA, 60 bp, Artificial
  Synthetic oligonucleotide
gtgcaaacatcattgggactgacaactctgttgtattgtcccggaaatatacatcgtttc

SEQ ID NO: 440221 - DNA, 51 bp, Artificial
  Synthetic oligonucleotide
gtgcaaacgtagacaacccgggttatgatttgctactggagtccgtgctga

SEQ ID NO: 440222 - DNA, 60 bp, Artificial
  Synthetic oligonucleotide
gtgcaaacgtttaagtgcgtgtcaggacgcaatcctagaactgtatgaacgtgatagtat

SEQ ID NO: 440223 - DNA, 60 bp, Artificial
  Synthetic oligonucleotide
gtgcaaagctgcagggatcatggaccccactatgctggtgtgtggagacgacctggtcgt

SEQ ID NO: 440224 - DNA, 60 bp, Artificial
  Synthetic oligonucleotide
gtgcaaaggcatattcgatattgtgatttagattcacgtgagataatcgatccacgcact

SEQ ID NO: 440225 - DNA, 55 bp, Artificial
  Synthetic oligonucleotide
gtgcaaaggggcttaagctcccaaaaggtgctccctcatagcccgataccatgcc

SEQ ID NO: 440226 - DNA, 60 bp, Artificial
  Synthetic oligonucleotide
gtgcaaagtacacaggagactctgccattatttacaatgccagagtactcataagatgcc

SEQ ID NO: 440227 - DNA, 57 bp, Artificial
  Synthetic oligonucleotide
gtgcaaatacaggttgtgttctatatatctatggataaaactttaaatcagtacccc

SEQ ID NO: 440228 - DNA, 60 bp, Artificial
  Synthetic oligonucleotide
gtgcaaatcttatatccaggaatacagaacgaaatatacagagacatattgaaagacaat

SEQ ID NO: 440229 - DNA, 55 bp, Artificial
  Synthetic oligonucleotide
gtgcaaattaaaccctgaagaaatgataagtgaaccaggcgactcgaaactaagg

SEQ ID NO: 440230 - DNA, 55 bp, Artificial
  Synthetic oligonucleotide
gtgcaacaaccattatttgtgtctcaattgccttacccttctcttgagtgtcagc

SEQ ID NO: 440231 - DNA, 58 bp, Artificial
  Synthetic oligonucleotide
gtgcaacaccaggtgcctctgtatggctccctttcctttcagtgtatcgactgcactg

SEQ ID NO: 440232 - DNA, 60 bp, Artificial
  Synthetic oligonucleotide
gtgcaacaccgtgtccgcccaacacttctctgtggtatgacctagatacaggcacatgga

SEQ ID NO: 440233 - DNA, 59 bp, Artificial
  Synthetic oligonucleotide
gtgcaacacttcctgctccgaaggtgtaaggattggggggttgtcacatcccagtgcca

SEQ ID NO: 440234 - DNA, 55 bp, Artificial
  Synthetic oligonucleotide
gtgcaacagaccgaagtggggagggctacccgttaccggttatgacgagacagga

SEQ ID NO: 440235 - DNA, 55 bp, Artificial
  Synthetic oligonucleotide
gtgcaacagatgtataacagcatcacagcgcctgtctgggctggttttgatggag

SEQ ID NO: 440236 - DNA, 55 bp, Artificial
  Synthetic oligonucleotide
gtgcaacagggccacgtcgagtgtattctgtgactgtctgctgtggaaactgcgg

SEQ ID NO: 440237 - DNA, 60 bp, Artificial
  Synthetic oligonucleotide
gtgcaacagtgctccactcgtcgccatctggcggatatttcatggactgcacatatcggc

SEQ ID NO: 440238 - DNA, 57 bp, Artificial
  Synthetic oligonucleotide
gtgcaacataagttcagagtatcttcgactattgtcacccctgccaacagccgggaa

SEQ ID NO: 440239 - DNA, 55 bp, Artificial
  Synthetic oligonucleotide
gtgcaacatccagatggaacaaccgcaaaatatacccgggttggtaagctaaaga

SEQ ID NO: 440240 - DNA, 54 bp, Artificial
  Synthetic oligonucleotide
gtgcaacatttgcatttgagtaaactgatagttaaaaacacccttgtttctact

SEQ ID NO: 440241 - DNA, 55 bp, Artificial
  Synthetic oligonucleotide
gtgcaacccaaggaaacgagggtgaggccatgctagaaggtggtgacaacaaggg

SEQ ID NO: 440242 - DNA, 55 bp, Artificial
  Synthetic oligonucleotide
gtgcaacccagactattgttatggtttaaggagcgaccctttaggtcgttcaagc

SEQ ID NO: 440243 - DNA, 55 bp, Artificial
  Synthetic oligonucleotide
gtgcaacccgcactaggccgttttgcatgggaacttcgtactgcgattaaatcat

SEQ ID NO: 440244 - DNA, 60 bp, Artificial
  Synthetic oligonucleotide
gtgcaacccttccaacagtaccatcagacaatgttgaaaccagaaccacatacatgcact

SEQ ID NO: 440245 - DNA, 55 bp, Artificial
  Synthetic oligonucleotide
gtgcaaccgctgagtatctacaggttcgattcaactatgcgtacctcgaagcgtc

SEQ ID NO: 440246 - DNA, 56 bp, Artificial
  Synthetic oligonucleotide
gtgcaaccggcgagtccactgcggcctttaaggaccgcgttacggctctcggtgtg

SEQ ID NO: 440247 - DNA, 55 bp, Artificial
  Synthetic oligonucleotide
gtgcaacctacgttttctgtacaaagaaacctcccatttgaaaagtcaactgtca

SEQ ID NO: 440248 - DNA, 60 bp, Artificial
  Synthetic oligonucleotide
gtgcaacgaacgagggaatgcgtactgcaaagagcctaatgactagatacattgatgtta

SEQ ID NO: 440249 - DNA, 55 bp, Artificial
  Synthetic oligonucleotide
gtgcaacgaagtgtagggttaggaagatattgcaggatggaggttcgatcatgca

SEQ ID NO: 440250 - DNA, 60 bp, Artificial
  Synthetic oligonucleotide
gtgcaacgttggtccttccatatgttaactcactggctattgattgtatggctagacaca

SEQ ID NO: 440251 - DNA, 60 bp, Artificial
  Synthetic oligonucleotide
gtgcaactcgttctcgatctctgagtcagcatccgatggtcctactcctattgtgcttct

SEQ ID NO: 440252 - DNA, 51 bp, Artificial
  Synthetic oligonucleotide
gtgcaagaagcactgaatgaacgtggatttcgtgccacaattttcccttcc

SEQ ID NO: 440253 - DNA, 60 bp, Artificial
  Synthetic oligonucleotide
gtgcaagaagccaaggtctaccagtactgctcacccccggatctggacaatttatgacaa

SEQ ID NO: 440254 - DNA, 60 bp, Artificial
  Synthetic oligonucleotide
gtgcaagaaggagagtactcacgtgttctcccacgctatctggaatacacggcgccaaca

SEQ ID NO: 440255 - DNA, 55 bp, Artificial
  Synthetic oligonucleotide
gtgcaagaccacagacactgtcaaaggagaaagagtctcattccctgtatgcacc

SEQ ID NO: 440256 - DNA, 54 bp, Artificial
  Synthetic oligonucleotide
gtgcaagacctaaaacgaaagtatttaggtagtccctatgttagtccattaggc

SEQ ID NO: 440257 - DNA, 60 bp, Artificial
  Synthetic oligonucleotide
gtgcaagagggcgtacgaccatgcgttcagggacatgtatgtcgctatgctttttatagg

SEQ ID NO: 440258 - DNA, 55 bp, Artificial
  Synthetic oligonucleotide
gtgcaagatcccttgccccatgtcaattattgagctgagatgtgatggtatcctg

SEQ ID NO: 440259 - DNA, 55 bp, Artificial
  Synthetic oligonucleotide
gtgcaagatgcaataggggactaaggctgtacgtgtgtactactagaccgggcat

SEQ ID NO: 440260 - DNA, 52 bp, Artificial
  Synthetic oligonucleotide
gtgcaagcataaccaccactgattatgaaggcggggtaccggcaaactcaca

SEQ ID NO: 440261 - DNA, 55 bp, Artificial
  Synthetic oligonucleotide
gtgcaagccccaccaatagttcatgaattgaactatattgaggaattggaacttg

SEQ ID NO: 440262 - DNA, 55 bp, Artificial
  Synthetic oligonucleotide
gtgcaagcctattggaatttgacaccagagaagggatggctatcctcttatgcag

SEQ ID NO: 440263 - DNA, 55 bp, Artificial
  Synthetic oligonucleotide
gtgcaagcctcccattggtgagcattggaccaagggcactccttgtgcaggctct

SEQ ID NO: 440264 - DNA, 50 bp, Artificial
  Synthetic oligonucleotide
gtgcaagcgaggtggctggcgtacgatacgtttgttccttacgtggtatg

SEQ ID NO: 440265 - DNA, 60 bp, Artificial
  Synthetic oligonucleotide
gtgcaagctactatctgagccatctccaacgtctttgaccaaaggcccatccaccaatcg

SEQ ID NO: 440266 - DNA, 60 bp, Artificial
  Synthetic oligonucleotide
gtgcaaggaacactgattttgacgttactgggacatcaagtctagagacaatggtgtctc

SEQ ID NO: 440267 - DNA, 60 bp, Artificial
  Synthetic oligonucleotide
gtgcaaggaatgatggtgtcgttcaatacatgagattggtacaggcagaaatcagttatg

SEQ ID NO: 440268 - DNA, 55 bp, Artificial
  Synthetic oligonucleotide
gtgcaaggatcaatagccatggtaatttagacattactccctctctgaaagaccg

SEQ ID NO: 440269 - DNA, 55 bp, Artificial
  Synthetic oligonucleotide
gtgcaaggatccacagccatggtaacctcaatataacaccatctctgaaggagcg

SEQ ID NO: 440270 - DNA, 57 bp, Artificial
  Synthetic oligonucleotide
gtgcaaggatccatagccatggtacgttggctgttactccgtctcttaaggaccgtt

SEQ ID NO: 440271 - DNA, 57 bp, Artificial
  Synthetic oligonucleotide
gtgcaaggattccgcactttcacgttcgagagagcactcctgaagagcacgcaattt

SEQ ID NO: 440272 - DNA, 60 bp, Artificial
  Synthetic oligonucleotide
gtgcaaggggagacgtacgagaagactgctattgtgcgcttgacatcaactccgttagag

SEQ ID NO: 440273 - DNA, 60 bp, Artificial
  Synthetic oligonucleotide
gtgcaagggtcaacagcagtacaggaccaggcatacagagatctagaacgcctacaatgt

SEQ ID NO: 440274 - DNA, 59 bp, Artificial
  Synthetic oligonucleotide
gtgcaaggtgcacagcttatcaagcgagtggttgaacggttttatccaggaatagaatt

SEQ ID NO: 440275 - DNA, 55 bp, Artificial
  Synthetic oligonucleotide
gtgcaagtacttttgattcatatccgcatctaattcacgagagtcagatcgtcct

SEQ ID NO: 440276 - DNA, 60 bp, Artificial
  Synthetic oligonucleotide
gtgcaagtatacacgcataactccaagcgctctaaaaaagagagggtgcgcgtataacac

SEQ ID NO: 440277 - DNA, 60 bp, Artificial
  Synthetic oligonucleotide
gtgcaagttacagtgtgttcggagatctgaggaggtcggttgcgctaggtgagccaacgc

SEQ ID NO: 440278 - DNA, 60 bp, Artificial
  Synthetic oligonucleotide
gtgcaagttatgagactggaatatctacactcattagctttaagtcaaactaaattcgta

SEQ ID NO: 440279 - DNA, 60 bp, Artificial
  Synthetic oligonucleotide
gtgcaataagtcatgccgtaagtcgcaatgcgctataagtcatgccgtaagtcgcgtcgc

SEQ ID NO: 440280 - DNA, 58 bp, Artificial
  Synthetic oligonucleotide
gtgcaataatgggtgcgattaaagtgggcgtaagcttaattggagaaattgacttgcc

SEQ ID NO: 440281 - DNA, 54 bp, Artificial
  Synthetic oligonucleotide
gtgcaataccggatcagttatacagtcaacatcaaattctagctgggccatgct

SEQ ID NO: 440282 - DNA, 60 bp, Artificial
  Synthetic oligonucleotide
gtgcaatataaagacgaggataaatgaatgtcagccatgcactatgactgcttgaaccct

SEQ ID NO: 440283 - DNA, 60 bp, Artificial
  Synthetic oligonucleotide
gtgcaatatggtacatgtggttgggagcacgttttctagagttcgaagctcttggtttca

SEQ ID NO: 440284 - DNA, 56 bp, Artificial
  Synthetic oligonucleotide
gtgcaatcaggtggactgtagagcaccttgggttgcctaaaggattcgaaggacac

SEQ ID NO: 440285 - DNA, 60 bp, Artificial
  Synthetic oligonucleotide
gtgcaatcctatgaacagcgacatgatatctctcatgtcggtaaggtaatgtgtatatct

SEQ ID NO: 440286 - DNA, 59 bp, Artificial
  Synthetic oligonucleotide
gtgcaatcgttcgatgccaaagacgatattgggcacatgggtaaggttatttgtttgtc

SEQ ID NO: 440287 - DNA, 60 bp, Artificial
  Synthetic oligonucleotide
gtgcaatctcgcaaccaaccgtcattggttgatggtgcggccaacacccgcactcttgta

SEQ ID NO: 440288 - DNA, 57 bp, Artificial
  Synthetic oligonucleotide
gtgcaatctctgatgtagtccacttctcacgtttactttcatccttgtggagatgct

SEQ ID NO: 440289 - DNA, 60 bp, Artificial
  Synthetic oligonucleotide
gtgcaatctgatgatcagcatagcagacaataaggaagcctcattcaatgatgtatcccg

SEQ ID NO: 440290 - DNA, 60 bp, Artificial
  Synthetic oligonucleotide
gtgcaatgacaaacgtcgaactccagctggctcacatgttggaggcgaagaagcggagac

SEQ ID NO: 440291 - DNA, 56 bp, Artificial
  Synthetic oligonucleotide
gtgcaatgatagcacaacgtataaaagctagcgcgcgatatcattcctcataacgc

SEQ ID NO: 440292 - DNA, 59 bp, Artificial
  Synthetic oligonucleotide
gtgcaatgcccagctggaatgagacgcaggtagacaaaagaaggttaaccaccataacg

SEQ ID NO: 440293 - DNA, 55 bp, Artificial
  Synthetic oligonucleotide
gtgcaatgccgaattatgaaccaaccccactaatacacatcccaggggaagttca

SEQ ID NO: 440294 - DNA, 60 bp, Artificial
  Synthetic oligonucleotide
gtgcaatggactaatattacttctctatcatgtgtcataggatctttcaccataggtgaa

SEQ ID NO: 440295 - DNA, 60 bp, Artificial
  Synthetic oligonucleotide
gtgcaatgggattaggcccacaccatccaggcttatgtgatgcccttgtgacccgctaac

SEQ ID NO: 440296 - DNA, 60 bp, Artificial
  Synthetic oligonucleotide
gtgcaatgggtatgatgagtacaactgctgtatttagtctaggtggagatttcttaggtg

SEQ ID NO: 440297 - DNA, 58 bp, Artificial
  Synthetic oligonucleotide
gtgcaatgtaagtgtattactactagagtctacgaaatattcataacttacttttcca

SEQ ID NO: 440298 - DNA, 56 bp, Artificial
  Synthetic oligonucleotide
gtgcaattctgaaatcgacaaggaactttagctggtgtgtaggtaaacaaattttc

SEQ ID NO: 440299 - DNA, 60 bp, Artificial
  Synthetic oligonucleotide
gtgcaattggactcgaggagagcgttgcaacttggaggacagggataggtcagagcttag

SEQ ID NO: 440300 - DNA, 60 bp, Artificial
  Synthetic oligonucleotide
gtgcaatttaggtatacagatccagatacttacactagtgcaggatttttatcatgttgg

SEQ ID NO: 440301 - DNA, 55 bp, Artificial
  Synthetic oligonucleotide
gtgcaatttcatgcagtattccttactcccatatatctatgtcgctttggtttgg

SEQ ID NO: 440302 - DNA, 55 bp, Artificial
  Synthetic oligonucleotide
gtgcacaaaggaagagtttattgccaaagtgcgctcccatgcagcactgggcgca

SEQ ID NO: 440303 - DNA, 55 bp, Artificial
  Synthetic oligonucleotide
gtgcacaacaaattccaacatggtactgaatgcgacccaccctcgtgctggcgca

SEQ ID NO: 440304 - DNA, 55 bp, Artificial
  Synthetic oligonucleotide
gtgcacaacaagtagcttcttgactatatggcagctggagagctgttgcatgcta

SEQ ID NO: 440305 - DNA, 58 bp, Artificial
  Synthetic oligonucleotide
gtgcacaacgctagttatgccaatctcagacggggtttgctggaaagggtcttctacg

SEQ ID NO: 440306 - DNA, 55 bp, Artificial
  Synthetic oligonucleotide
gtgcacaataaagaccccgcgcgggccggtttattggttgctccggcacaccgag

SEQ ID NO: 440307 - DNA, 55 bp, Artificial
  Synthetic oligonucleotide
gtgcacaatcgatatcataacatccatcatcacggggttttatgacaaattggcg

SEQ ID NO: 440308 - DNA, 50 bp, Artificial
  Synthetic oligonucleotide
gtgcacacaactgcgagcaaggctgctccattcgtgctccgggatgctga

SEQ ID NO: 440309 - DNA, 56 bp, Artificial
  Synthetic oligonucleotide
gtgcacacaaggagattcctttttcagttgacgacctcagttggaaggaaatcatg

SEQ ID NO: 440310 - DNA, 55 bp, Artificial
  Synthetic oligonucleotide
gtgcacacattgatacttaagtggtgttctgtcactgcttattgtggaagcaacg

SEQ ID NO: 440311 - DNA, 59 bp, Artificial
  Synthetic oligonucleotide
gtgcacacccaccggggaagttgtcccacaattgctccagtatatgtttgtgccacctg

SEQ ID NO: 440312 - DNA, 57 bp, Artificial
  Synthetic oligonucleotide
gtgcacaccgttcggtcacaacacgaaggtacgactccagttcgtaatcgcaacgta

SEQ ID NO: 440313 - DNA, 55 bp, Artificial
  Synthetic oligonucleotide
gtgcacactggaaagaagctaaaatgctcctagataacatcaacacacccgaagg

SEQ ID NO: 440314 - DNA, 55 bp, Artificial
  Synthetic oligonucleotide
gtgcacagtcaaggaagggaagctgcagtgtcgcatctgacaacccttgccacaa

SEQ ID NO: 440315 - DNA, 60 bp, Artificial
  Synthetic oligonucleotide
gtgcacagtcttctgtacattatctggcccgggggcagactgtgaagcctattcagatac

SEQ ID NO: 440316 - DNA, 55 bp, Artificial
  Synthetic oligonucleotide
gtgcacatatgggattgccattgggtggtgtcattacaggagtgttcaccacagc

SEQ ID NO: 440317 - DNA, 55 bp, Artificial
  Synthetic oligonucleotide
gtgcacatcccgctaggggatgctagactaatagtaagaacatattggggcctgc

SEQ ID NO: 440318 - DNA, 56 bp, Artificial
  Synthetic oligonucleotide
gtgcacattcacttcaacttttagtttgcccccactggtaactttaaatcagataa

SEQ ID NO: 440319 - DNA, 55 bp, Artificial
  Synthetic oligonucleotide
gtgcacattttggttccattttgctgacttctgatgcgcatgacaaaggagggtg

SEQ ID NO: 440320 - DNA, 55 bp, Artificial
  Synthetic oligonucleotide
gtgcaccaaggaggtgttgtacactgcactctctcgcgcagttgacagcatacac

SEQ ID NO: 440321 - DNA, 60 bp, Artificial
  Synthetic oligonucleotide
gtgcaccaataagatatggaaccatagtatcacggttcaaggactgtgcagcgttagcaa

SEQ ID NO: 440322 - DNA, 55 bp, Artificial
  Synthetic oligonucleotide
gtgcaccagatcgttgtccacccacagcattatatgtggcagggatgccagagct

SEQ ID NO: 440323 - DNA, 60 bp, Artificial
  Synthetic oligonucleotide
gtgcaccatcctcctgacaccaatgaacagaatactctgtatggctctggtgatagatac

SEQ ID NO: 440324 - DNA, 57 bp, Artificial
  Synthetic oligonucleotide
gtgcacccaaacggatggtggcttttcccaagccacctactaaaattgcatccaaga

SEQ ID NO: 440325 - DNA, 60 bp, Artificial
  Synthetic oligonucleotide
gtgcacccatatacgagtgtgcctgggttagctccactggcattgtgaagaagggactgg

SEQ ID NO: 440326 - DNA, 55 bp, Artificial
  Synthetic oligonucleotide
gtgcaccccaagtggttctctggtttctagcgacacccaggtgtttaatcggcca

SEQ ID NO: 440327 - DNA, 51 bp, Artificial
  Synthetic oligonucleotide
gtgcaccccccaccgttctttagtttgcaacaccccgcttttaaatgaaac

SEQ ID NO: 440328 - DNA, 55 bp, Artificial
  Synthetic oligonucleotide
gtgcacccgacagtagacctggcagatgaggctagaagtacccctctggcgacag

SEQ ID NO: 440329 - DNA, 58 bp, Artificial
  Synthetic oligonucleotide
gtgcaccctacacctagtataccctcaacagataccccagtgaccacaacttcaagtg

SEQ ID NO: 440330 - DNA, 55 bp, Artificial
  Synthetic oligonucleotide
gtgcaccctgcgtgcatagaaactatccatctcccagaggcatcgatttgacatg

SEQ ID NO: 440331 - DNA, 55 bp, Artificial
  Synthetic oligonucleotide
gtgcaccgaactcaaactcagtgattatgagggacggttgatccaaaacagctta

SEQ ID NO: 440332 - DNA, 60 bp, Artificial
  Synthetic oligonucleotide
gtgcaccgagcttaaactcaatgattatgagggacgactgatccagaacagcttaacaat

SEQ ID NO: 440333 - DNA, 51 bp, Artificial
  Synthetic oligonucleotide
gtgcaccgataacggtaagaactcttaattttcaaccgtaggcgttcattt

SEQ ID NO: 440334 - DNA, 56 bp, Artificial
  Synthetic oligonucleotide
gtgcaccgcgagtgattctatcacgaaggctggacatatgcttgtgagaacgaggc

SEQ ID NO: 440335 - DNA, 58 bp, Artificial
  Synthetic oligonucleotide
gtgcaccgtgacatgctatgcagtggtaggtaggttagtgcacgttacatagagtttc

SEQ ID NO: 440336 - DNA, 55 bp, Artificial
  Synthetic oligonucleotide
gtgcaccgttttcggtaagtatgtatagccagaggcgctttgcaaccgtttgtgg

SEQ ID NO: 440337 - DNA, 57 bp, Artificial
  Synthetic oligonucleotide
gtgcacctcgatacgcgtggtttcggtgaaaatcgcaccacagccaatcggcgtgtg

SEQ ID NO: 440338 - DNA, 51 bp, Artificial
  Synthetic oligonucleotide
gtgcacctcgtatcttataacgtcccgatatatatccaagcaggcagtcag

SEQ ID NO: 440339 - DNA, 55 bp, Artificial
  Synthetic oligonucleotide
gtgcacctctctatattggaaatgcttgaaacaaggtcttgacaggattctgcag

SEQ ID NO: 440340 - DNA, 55 bp, Artificial
  Synthetic oligonucleotide
gtgcacctggaagttgaacacgtcaggcctgtgcttgacgattatttcaccccac

SEQ ID NO: 440341 - DNA, 60 bp, Artificial
  Synthetic oligonucleotide
gtgcacctggacagggcaagagtgtgtgctctgagatgcttgctagaatgctttcctata

SEQ ID NO: 440342 - DNA, 56 bp, Artificial
  Synthetic oligonucleotide
gtgcaccttaataaatcagtagaaatcaattgtactagaccctccaacaacacaag

SEQ ID NO: 440343 - DNA, 55 bp, Artificial
  Synthetic oligonucleotide
gtgcacgaaatttgacaacagattccgaagtgccaaggccggacaaactttagct

SEQ ID NO: 440344 - DNA, 60 bp, Artificial
  Synthetic oligonucleotide
gtgcacgaatctcaaggcatttcggaagatcatgtgactctggttagattgaaaagtact

SEQ ID NO: 440345 - DNA, 55 bp, Artificial
  Synthetic oligonucleotide
gtgcacgacgtggaacagtttcgtgaggtaaatgttgctgcgttaaattgggcgg

SEQ ID NO: 440346 - DNA, 55 bp, Artificial
  Synthetic oligonucleotide
gtgcacgcagctgatagttctacgcctagccgtaagatcataggggagacgtcac

SEQ ID NO: 440347 - DNA, 59 bp, Artificial
  Synthetic oligonucleotide
gtgcacggacagaccggcatgctcttgactggctccaatgccaaggctcaagatcttgg

SEQ ID NO: 440348 - DNA, 55 bp, Artificial
  Synthetic oligonucleotide
gtgcacgtacttgggtaatactctagtaactttgagtgttctaagttacgtgtac

SEQ ID NO: 440349 - DNA, 55 bp, Artificial
  Synthetic oligonucleotide
gtgcacgtctgatatggatgttacaatgtgcggtgaagtggcggctctggcaacc

SEQ ID NO: 440350 - DNA, 55 bp, Artificial
  Synthetic oligonucleotide
gtgcactacggtgcaccaggcaagttcaattctgtggagttttcaagagattgct

SEQ ID NO: 440351 - DNA, 56 bp, Artificial
  Synthetic oligonucleotide
gtgcactcccagagctttccgtaggggtaaggtaaaatggatcctgagtgttatta

SEQ ID NO: 440352 - DNA, 53 bp, Artificial
  Synthetic oligonucleotide
gtgcactcgccggtgatagtggtcgcgatcggttcatactccaacaggaccgc

SEQ ID NO: 440353 - DNA, 55 bp, Artificial
  Synthetic oligonucleotide
gtgcactgaactcaaactaagtgacaacgaggggaggctgatccagaacagtatc

SEQ ID NO: 440354 - DNA, 60 bp, Artificial
  Synthetic oligonucleotide
gtgcactgaactcaaactcagcgactatgaagggaggctgatccagaacagcataacaat

SEQ ID NO: 440355 - DNA, 60 bp, Artificial
  Synthetic oligonucleotide
gtgcactgaactcaggctcagtgacaatgaagggagactgatccaaaacagcataacaat

SEQ ID NO: 440356 - DNA, 55 bp, Artificial
  Synthetic oligonucleotide
gtgcactggtatttgccttcgaactggagaagcacgtggatatgaggctcgccat

SEQ ID NO: 440357 - DNA, 55 bp, Artificial
  Synthetic oligonucleotide
gtgcactgtacctcgatggcgactagagtagcgagcgtattctcctccctcacgg

SEQ ID NO: 440358 - DNA, 60 bp, Artificial
  Synthetic oligonucleotide
gtgcacttcctgggcggagtctacgtcctgatataagtaagtgtacttccgaatggctga

SEQ ID NO: 440359 - DNA, 60 bp, Artificial
  Synthetic oligonucleotide
gtgcacttgacatatgtttggaatattttgcgcataaaggtgaagtggatgtgaacaatg

SEQ ID NO: 440360 - DNA, 60 bp, Artificial
  Synthetic oligonucleotide
gtgcacttgccagttgtatgggcctcatatacaacagaatggggactgtcaccactgagg

SEQ ID NO: 440361 - DNA, 55 bp, Artificial
  Synthetic oligonucleotide
gtgcacttgtatgagatgtgtgagaagatagaaaacaagcatccaagcgttgagg

SEQ ID NO: 440362 - DNA, 55 bp, Artificial
  Synthetic oligonucleotide
gtgcactttccgctacagatgcagacacaatatgtataggctaccatgcaaacaa

SEQ ID NO: 440363 - DNA, 52 bp, Artificial
  Synthetic oligonucleotide
gtgcacttttccgcctcgtggttttgtcgctccaaccaagccaccttatctg

SEQ ID NO: 440364 - DNA, 55 bp, Artificial
  Synthetic oligonucleotide
gtgcagaaaacatacgagattcttctcgagctgcacccagaacgggaagcccgct

SEQ ID NO: 440365 - DNA, 53 bp, Artificial
  Synthetic oligonucleotide
gtgcagaaaagttgggcctgtttttggatttgggccgtatttatattgggctt

SEQ ID NO: 440366 - DNA, 54 bp, Artificial
  Synthetic oligonucleotide
gtgcagaaagatgtgtgtaaacttgtagaatggtatcatggacgcgaaaagggc

SEQ ID NO: 440367 - DNA, 55 bp, Artificial
  Synthetic oligonucleotide
gtgcagaatatccaaggacaaatggtacatcaggccatatcacctaggactttga

SEQ ID NO: 440368 - DNA, 55 bp, Artificial
  Synthetic oligonucleotide
gtgcagaatcttcaagggcaaatggtacatcaacccatatcacctagaaccttga

SEQ ID NO: 440369 - DNA, 55 bp, Artificial
  Synthetic oligonucleotide
gtgcagaatgggacgttttcatagagaggcccaatgcagtagacacttgctatcc

SEQ ID NO: 440370 - DNA, 55 bp, Artificial
  Synthetic oligonucleotide
gtgcagaattaatgggacagcctggaatgagactctgagacaggtaaaggaggca

SEQ ID NO: 440371 - DNA, 60 bp, Artificial
  Synthetic oligonucleotide
gtgcagacacattatgtataggttatcatgcgaacaattcaacagacactgtagacacag

SEQ ID NO: 440372 - DNA, 60 bp, Artificial
  Synthetic oligonucleotide
gtgcagagagcgacctgaccgttggttcagtcgccactgaagatgtactacgtactctcg

SEQ ID NO: 440373 - DNA, 55 bp, Artificial
  Synthetic oligonucleotide
gtgcagagcagtctcaaataggtgggtggaagttccgttctctgcaagaacttgc

SEQ ID NO: 440374 - DNA, 60 bp, Artificial
  Synthetic oligonucleotide
gtgcagaggcggccacgatctatcatgccattaaatgtgccccagcagcaggtttcggcg

SEQ ID NO: 440375 - DNA, 55 bp, Artificial
  Synthetic oligonucleotide
gtgcagagtcatcgtttcaacaacgagaattttaggggccgattgccctgcgaga

SEQ ID NO: 440376 - DNA, 52 bp, Artificial
  Synthetic oligonucleotide
gtgcagataaggcctacggggtgccagtatacatgtccagcaagaagatggt

SEQ ID NO: 440377 - DNA, 60 bp, Artificial
  Synthetic oligonucleotide
gtgcagatctgccatctatctgaaagtctccccattcgattgaatcaccgtctttgtcca

SEQ ID NO: 440378 - DNA, 60 bp, Artificial
  Synthetic oligonucleotide
gtgcagcaatggatgattttcagttaatcccaatgataagcaaatgcagaacgaaagaag

SEQ ID NO: 440379 - DNA, 55 bp, Artificial
  Synthetic oligonucleotide
gtgcagcacaatggcgtggaagtgataggtggcacccccggaaatgttatctccg

SEQ ID NO: 440380 - DNA, 60 bp, Artificial
  Synthetic oligonucleotide
gtgcagcagaaatcccccttgtccctctctggacagataatgctcatggcgttgggagtg

SEQ ID NO: 440381 - DNA, 60 bp, Artificial
  Synthetic oligonucleotide
gtgcagcatcgttctttgggactgactctagggttagggcccatagaatgttggtgcgtc

SEQ ID NO: 440382 - DNA, 60 bp, Artificial
  Synthetic oligonucleotide
gtgcagccagacaagctaccaatatttgatcatacaaaacaggacttgggaaaaccattg

SEQ ID NO: 440383 - DNA, 55 bp, Artificial
  Synthetic oligonucleotide
gtgcagccatcttccaagactctggtagacaggaattctccatcttagacagctc

SEQ ID NO: 440384 - DNA, 58 bp, Artificial
  Synthetic oligonucleotide
gtgcagcctatgtaaagttccaagagagccatccaccctatccccctgaggactgggt

SEQ ID NO: 440385 - DNA, 60 bp, Artificial
  Synthetic oligonucleotide
gtgcagcctttgaaggtagatatgaaagaggatcatagtacggtgcaatatgacatgttt

SEQ ID NO: 440386 - DNA, 51 bp, Artificial
  Synthetic oligonucleotide
gtgcagctaatcgcatctgtagaaattaattgtacaagaccccgcaacaat

SEQ ID NO: 440387 - DNA, 55 bp, Artificial
  Synthetic oligonucleotide
gtgcagctattccaagacaagggagcatcaatgaggaatttatttcaccctcaga

SEQ ID NO: 440388 - DNA, 55 bp, Artificial
  Synthetic oligonucleotide
gtgcagctgcatgcacaaaccaaacaagggctgtcagttgtcctgcaactacacc

SEQ ID NO: 440389 - DNA, 60 bp, Artificial
  Synthetic oligonucleotide
gtgcaggaacggaaaacattgtgctgtctgtacatcttgcctggaaaatgggctgtacct

SEQ ID NO: 440390 - DNA, 50 bp, Artificial
  Synthetic oligonucleotide
gtgcaggaatttctagggctaataattgggaaagtgcctcttctttggtt

SEQ ID NO: 440391 - DNA, 60 bp, Artificial
  Synthetic oligonucleotide
gtgcaggacattggacaccacattgcatgacgttacaatagactgtgtctattgcagaag

SEQ ID NO: 440392 - DNA, 59 bp, Artificial
  Synthetic oligonucleotide
gtgcaggagaaaatactagatctttacgaagctgataaaactgatttaccatcacaaat

SEQ ID NO: 440393 - DNA, 55 bp, Artificial
  Synthetic oligonucleotide
gtgcaggagttaaaacgaaagtacatgagtccctatgtaagtcctatacactgtt

SEQ ID NO: 440394 - DNA, 60 bp, Artificial
  Synthetic oligonucleotide
gtgcaggatatggacccaaatataataaggccgctgagtgggtgaacaggcccatgtaca

SEQ ID NO: 440395 - DNA, 59 bp, Artificial
  Synthetic oligonucleotide
gtgcaggatgaaggtagctgaaggcgagcccatagtagttcactttcgtgggaaacaag

SEQ ID NO: 440396 - DNA, 54 bp, Artificial
  Synthetic oligonucleotide
gtgcaggattaggaggattcaggttcaacctgtataaagccattgcccagacac

SEQ ID NO: 440397 - DNA, 56 bp, Artificial
  Synthetic oligonucleotide
gtgcaggcaacttaagatgattggagcagacgagaagtttcacatggcaacgatta

SEQ ID NO: 440398 - DNA, 60 bp, Artificial
  Synthetic oligonucleotide
gtgcaggcaccccaggtgctacagagctgtatggtcgtggcgaacaaatattcgtcagtg

SEQ ID NO: 440399 - DNA, 55 bp, Artificial
  Synthetic oligonucleotide
gtgcaggcaccccgtgtgctgcaaagctgtatggttgtggcaaacaggtactcgt

SEQ ID NO: 440400 - DNA, 60 bp, Artificial
  Synthetic oligonucleotide
gtgcaggcctttgggcatccatcttggtcctacgtcatcaagctacgtcatggtcacgtg

SEQ ID NO: 440401 - DNA, 55 bp, Artificial
  Synthetic oligonucleotide
gtgcaggcggccacgtacccacgtctatgcatgttggtgatgacatcttgatgtc

SEQ ID NO: 440402 - DNA, 51 bp, Artificial
  Synthetic oligonucleotide
gtgcaggctcaagaggatttaccagttgggcgtgaagatgaacttagacca

SEQ ID NO: 440403 - DNA, 56 bp, Artificial
  Synthetic oligonucleotide
gtgcagggtatccctacaatgcactaggcattaagaagagggacattctgaacccc

SEQ ID NO: 440404 - DNA, 59 bp, Artificial
  Synthetic oligonucleotide
gtgcagggtccccctgttaatgacaaaatgacaacagtggtcacacttggacagattac

SEQ ID NO: 440405 - DNA, 55 bp, Artificial
  Synthetic oligonucleotide
gtgcaggtaaggtagcatatacactgcgcactgatccttgttcgttaccaagaac

SEQ ID NO: 440406 - DNA, 52 bp, Artificial
  Synthetic oligonucleotide
gtgcaggtaataggattctgtctattgatgcacttggcaatgttctgtggag

SEQ ID NO: 440407 - DNA, 55 bp, Artificial
  Synthetic oligonucleotide
gtgcaggtatcatatcgaaactcccatggaccatgaaaacaatgtacgagattgt

SEQ ID NO: 440408 - DNA, 55 bp, Artificial
  Synthetic oligonucleotide
gtgcaggtattcccagtgacactccaagaggagaagataatcagttcacagggtc

SEQ ID NO: 440409 - DNA, 55 bp, Artificial
  Synthetic oligonucleotide
gtgcaggtcctatctaccgccacgcagtccttcctgggtactgcgatcaacggcg

SEQ ID NO: 440410 - DNA, 59 bp, Artificial
  Synthetic oligonucleotide
gtgcaggttttgcacaaggaaatttaatatgtgtcttcgcgaaatgaaaaggagaagca

SEQ ID NO: 440411 - DNA, 60 bp, Artificial
  Synthetic oligonucleotide
gtgcagtacgtgagactccataataaacatcgaagaagcattgtgagcacgagtcagctt

SEQ ID NO: 440412 - DNA, 60 bp, Artificial
  Synthetic oligonucleotide
gtgcagtactggggtcaggagctaaaaaagagtactattagtctgtttgatcatatcaat

SEQ ID NO: 440413 - DNA, 55 bp, Artificial
  Synthetic oligonucleotide
gtgcagtacttgtacggggtggggtcaagcatcgtatcctgggccatcaagtggg

SEQ ID NO: 440414 - DNA, 55 bp, Artificial
  Synthetic oligonucleotide
gtgcagtagcggaatctacttaagccccttctcttacgtgcctcactcccatccc

SEQ ID NO: 440415 - DNA, 60 bp, Artificial
  Synthetic oligonucleotide
gtgcagtatagtttaattatgaatagtgtaaagtttgagaatcaggatgatgtctgcagg

SEQ ID NO: 440416 - DNA, 55 bp, Artificial
  Synthetic oligonucleotide
gtgcagtatattcgacgtagccagacgcgtatctacgacgcgtaatacgatacct

SEQ ID NO: 440417 - DNA, 60 bp, Artificial
  Synthetic oligonucleotide
gtgcagtatggcttcctaaaccttagtggtaagcctacccatcgcaccatgatgtacaat

SEQ ID NO: 440418 - DNA, 50 bp, Artificial
  Synthetic oligonucleotide
gtgcagtattgggggctagagctaaaaatgagtactattagtctgcttga

SEQ ID NO: 440419 - DNA, 57 bp, Artificial
  Synthetic oligonucleotide
gtgcagtcaaaccacggcaagttcgtcgttaggaattcaactacgttgaaaatcgca

SEQ ID NO: 440420 - DNA, 60 bp, Artificial
  Synthetic oligonucleotide
gtgcagtcagtataacaggtgtttcttagatgaagaacctcatttgctgagaatgcgaac

SEQ ID NO: 440421 - DNA, 51 bp, Artificial
  Synthetic oligonucleotide
gtgcagtcatctgataaggtgaaatgctctgtgtcagccacggtgacctta

SEQ ID NO: 440422 - DNA, 60 bp, Artificial
  Synthetic oligonucleotide
gtgcagtctaccttgagatttcgagttccctggattcctgacacacgttatagagtgaac

SEQ ID NO: 440423 - DNA, 50 bp, Artificial
  Synthetic oligonucleotide
gtgcagtctattgcacctattgtgagtgggttcgaccctaaccttcatgg

SEQ ID NO: 440424 - DNA, 55 bp, Artificial
  Synthetic oligonucleotide
gtgcagtgaccacaaattgcaccttcgtttatagcaaggcaacccagttcttcac

SEQ ID NO: 440425 - DNA, 60 bp, Artificial
  Synthetic oligonucleotide
gtgcagtgatgagtgcccctgtgcgtgaatccatgtcccgtgcagttcaggtgctgatat

SEQ ID NO: 440426 - DNA, 60 bp, Artificial
  Synthetic oligonucleotide
gtgcagtgatgagttcccctgtgcgtaaatccatgtcctctgcagcttatgtggaagtag

SEQ ID NO: 440427 - DNA, 60 bp, Artificial
  Synthetic oligonucleotide
gtgcagtgatgagttcccctgtgcgtgaatccatgtcccgcacagcctaagtggaagtag

SEQ ID NO: 440428 - DNA, 60 bp, Artificial
  Synthetic oligonucleotide
gtgcagtgcaacgcatccaagttccaccagggttgcttgctagtagtctgtgtccccgaa

SEQ ID NO: 440429 - DNA, 60 bp, Artificial
  Synthetic oligonucleotide
gtgcagtgcaatgctagtaaattccaccaaggagcactcctagtcgctgtcctaccagag

SEQ ID NO: 440430 - DNA, 55 bp, Artificial
  Synthetic oligonucleotide
gtgcagtggatgaaccggctaatagctttcgcctcccgagggaaccacgtttccc

SEQ ID NO: 440431 - DNA, 55 bp, Artificial
  Synthetic oligonucleotide
gtgcagtgggcatacgaccacgactttacagatgacagtgtgatagcgtacgagt

SEQ ID NO: 440432 - DNA, 55 bp, Artificial
  Synthetic oligonucleotide
gtgcagtggttgccggggtctttatggatgttgctgtaaagcgatacctaagatc

SEQ ID NO: 440433 - DNA, 60 bp, Artificial
  Synthetic oligonucleotide
gtgcagttgtatttgccctcgaactggataagcacatggagatgtggttccccattctca

SEQ ID NO: 440434 - DNA, 55 bp, Artificial
  Synthetic oligonucleotide
gtgcagtttaccacaggggtgggttttaagtccattaatatatcagagtacctta

SEQ ID NO: 440435 - DNA, 60 bp, Artificial
  Synthetic oligonucleotide
gtgcatacaagccagtatgttgctagtcgtaacgagcaattgcgggatgggaccaactac

SEQ ID NO: 440436 - DNA, 52 bp, Artificial
  Synthetic oligonucleotide
gtgcatacgttgcatatggtcgccattagaaaaactgacaggcatcatgtac

SEQ ID NO: 440437 - DNA, 55 bp, Artificial
  Synthetic oligonucleotide
gtgcatactgtgaataactttcagtatagctcgtaaaacctgaaatgtccgtatg

SEQ ID NO: 440438 - DNA, 59 bp, Artificial
  Synthetic oligonucleotide
gtgcatagcattaataacttcaagattagagacacaaagggatttttcggagtttgcta

SEQ ID NO: 440439 - DNA, 57 bp, Artificial
  Synthetic oligonucleotide
gtgcatagtgctttcccgttcacttaaatcgaacggtttgctcattggtttgcggaa

SEQ ID NO: 440440 - DNA, 52 bp, Artificial
  Synthetic oligonucleotide
gtgcatatacccaacctatcaatccgtggcttctcagatgctctaagacgat

SEQ ID NO: 440441 - DNA, 55 bp, Artificial
  Synthetic oligonucleotide
gtgcatatcagacgtcacacgtggcaacggaattacccaccgtgtcggtaagcgt

SEQ ID NO: 440442 - DNA, 60 bp, Artificial
  Synthetic oligonucleotide
gtgcatattagattcgcaagccatatgattaccgatttggacaatctaaccaaaagagag

SEQ ID NO: 440443 - DNA, 60 bp, Artificial
  Synthetic oligonucleotide
gtgcatcaacggcagttacaggatggtccgcaaacccgagagcatgtctaaagacgcgca

SEQ ID NO: 440444 - DNA, 60 bp, Artificial
  Synthetic oligonucleotide
gtgcatcagatgccaaagcacatgtgacagaagtgcacaatgtttgggctacacatgcct

SEQ ID NO: 440445 - DNA, 55 bp, Artificial
  Synthetic oligonucleotide
gtgcatcagatgcgaaaggatatgataaagaagtgcataatgtctgggctacaca

SEQ ID NO: 440446 - DNA, 55 bp, Artificial
  Synthetic oligonucleotide
gtgcatcagattcggctgaagcattaaattacatggcacttgctggttgggattc

SEQ ID NO: 440447 - DNA, 60 bp, Artificial
  Synthetic oligonucleotide
gtgcatcaggaaaggccgatactagaatattgttcatcaaagaggggaaaatcgtccaca

SEQ ID NO: 440448 - DNA, 55 bp, Artificial
  Synthetic oligonucleotide
gtgcatcagtaccgaaccaatgaatgcgtcaaggtaaacattagatacttgagcc

SEQ ID NO: 440449 - DNA, 58 bp, Artificial
  Synthetic oligonucleotide
gtgcatcatatacgacaagacgttttttacgtcaacaggctactaagaaaaagagtgc

SEQ ID NO: 440450 - DNA, 57 bp, Artificial
  Synthetic oligonucleotide
gtgcatcatcttgcatgtgcgccgaattgttcttggaatccctgatgagcttacata

SEQ ID NO: 440451 - DNA, 55 bp, Artificial
  Synthetic oligonucleotide
gtgcatcgaaaatggctgctcaccgaacatcaatggtgtctggaccatgatggac

SEQ ID NO: 440452 - DNA, 60 bp, Artificial
  Synthetic oligonucleotide
gtgcatcgcgcccatgggatcttccacgtgtttaacacaataggccgcacgtgcaagtat

SEQ ID NO: 440453 - DNA, 57 bp, Artificial
  Synthetic oligonucleotide
gtgcatcgctcactcccaggagcgatgctgtggaacgacgaggcggcaaagtgcaac

SEQ ID NO: 440454 - DNA, 59 bp, Artificial
  Synthetic oligonucleotide
gtgcatcgttccgttcggcaaagaggtgggtcgtgttcctcactctagattcaatgttg

SEQ ID NO: 440455 - DNA, 57 bp, Artificial
  Synthetic oligonucleotide
gtgcatctcacaaattataaacccaacaatgaggttaccacttttatcaaacctaga

SEQ ID NO: 440456 - DNA, 51 bp, Artificial
  Synthetic oligonucleotide
gtgcatgaacaaccgcgaaaacgtcgcccgcgccaacttcctccgctccag

SEQ ID NO: 440457 - DNA, 55 bp, Artificial
  Synthetic oligonucleotide
gtgcatgaagcagaatgcacagacagtatagacactttggaggatttgtgcgacg

SEQ ID NO: 440458 - DNA, 60 bp, Artificial
  Synthetic oligonucleotide
gtgcatgagacttgtcttaaatctgattttgagtacactggtcgacagtatttcagagct

SEQ ID NO: 440459 - DNA, 60 bp, Artificial
  Synthetic oligonucleotide
gtgcatgagtctcaaggcatctcggaggatcatgtgacccttgttagactaaagagtact

SEQ ID NO: 440460 - DNA, 60 bp, Artificial
  Synthetic oligonucleotide
gtgcatgatggacatagaagactctacggatgacatagaagagtccacggagaaagaata

SEQ ID NO: 440461 - DNA, 60 bp, Artificial
  Synthetic oligonucleotide
gtgcatgatggctcctcaggactctgagttctttgcgatgaagacccctgcccagcaagg

SEQ ID NO: 440462 - DNA, 55 bp, Artificial
  Synthetic oligonucleotide
gtgcatgattgcccctaatatatgaagaggtatgatacaaccctaacagtgaccc

SEQ ID NO: 440463 - DNA, 54 bp, Artificial
  Synthetic oligonucleotide
gtgcatgcactgaaataattgtggcaatgctactacttgctatccatattgtcc

SEQ ID NO: 440464 - DNA, 53 bp, Artificial
  Synthetic oligonucleotide
gtgcatgccaagttgctcagatccatcagtgttaggaaatgtccaacttttga

SEQ ID NO: 440465 - DNA, 58 bp, Artificial
  Synthetic oligonucleotide
gtgcatgccggttgattgattatcctttaggtgacgcattacccttaaacactttaga

SEQ ID NO: 440466 - DNA, 55 bp, Artificial
  Synthetic oligonucleotide
gtgcatgcgctaccacatagaccgtaacaccccgatctgctttgccggggatgac

SEQ ID NO: 440467 - DNA, 55 bp, Artificial
  Synthetic oligonucleotide
gtgcatgctatcataggtactagcctaaagacagttgcttgggcgattgtttcga

SEQ ID NO: 440468 - DNA, 55 bp, Artificial
  Synthetic oligonucleotide
gtgcatggatgagaggaattttgaagttctatgttgtggcacgagccagctctga

SEQ ID NO: 440469 - DNA, 60 bp, Artificial
  Synthetic oligonucleotide
gtgcatggcctatggctactgtgactgggtagtaaaatgtacaggagtgtccagtgcatg

SEQ ID NO: 440470 - DNA, 55 bp, Artificial
  Synthetic oligonucleotide
gtgcatggtgtccgcatgtaacgatttctcggtgcgcatgttacgcgatacccga

SEQ ID NO: 440471 - DNA, 57 bp, Artificial
  Synthetic oligonucleotide
gtgcatggttcattatccatacaggctttggcactacccctgcactgtcaactttac

SEQ ID NO: 440472 - DNA, 55 bp, Artificial
  Synthetic oligonucleotide
gtgcatgtaaaagatcaggaccttcattctatgcagaactgaaatggctcctgtc

SEQ ID NO: 440473 - DNA, 60 bp, Artificial
  Synthetic oligonucleotide
gtgcatgtacaaaatacgaatacccatggcatactgcaaagtgtcactatgaacgagatt

SEQ ID NO: 440474 - DNA, 60 bp, Artificial
  Synthetic oligonucleotide
gtgcatgtcccgattctgaacatgcttgggaggataccagggtccatattagcaagagta

SEQ ID NO: 440475 - DNA, 57 bp, Artificial
  Synthetic oligonucleotide
gtgcatgtcctgatttcaaacttagactcatgaaagatacacagtcaatacatcaag

SEQ ID NO: 440476 - DNA, 52 bp, Artificial
  Synthetic oligonucleotide
gtgcatgtcggaggcccgcgaaagtctcccgcccattcccagaattttgtgg

SEQ ID NO: 440477 - DNA, 55 bp, Artificial
  Synthetic oligonucleotide
gtgcatgttatctaaggcaagtaaatctgctagttacattcgttcttcagtgctt

SEQ ID NO: 440478 - DNA, 59 bp, Artificial
  Synthetic oligonucleotide
gtgcatgttggtgcggaaagccgctgggggtcattacgtccaaatggccctcatgaggt

SEQ ID NO: 440479 - DNA, 58 bp, Artificial
  Synthetic oligonucleotide
gtgcattaaatgtatgttttattaacaattctaatctcggttctggtgtgtgaagcgg

SEQ ID NO: 440480 - DNA, 59 bp, Artificial
  Synthetic oligonucleotide
gtgcattaacaagttagcgatgccccgacccgataacaacgctgtcgctatggcgcgcg

SEQ ID NO: 440481 - DNA, 60 bp, Artificial
  Synthetic oligonucleotide
gtgcattaagggcaacttgtaggcaacacgatgttctgccttaggctcgtgctgctaatc

SEQ ID NO: 440482 - DNA, 51 bp, Artificial
  Synthetic oligonucleotide
gtgcattagtatagatagttcatgtagttagtttcatgcatttgcttcgga

SEQ ID NO: 440483 - DNA, 52 bp, Artificial
  Synthetic oligonucleotide
gtgcattatttaaaacgaaagtttacgtgcagtccaacggttagcccgttgg

SEQ ID NO: 440484 - DNA, 55 bp, Artificial
  Synthetic oligonucleotide
gtgcattcacacctgttgtgttgtccggcttccgtagactcatgcccatgccgta

SEQ ID NO: 440485 - DNA, 52 bp, Artificial
  Synthetic oligonucleotide
gtgcattcacttgcaggcgggttgagatcattagaattggaatatctgatga

SEQ ID NO: 440486 - DNA, 57 bp, Artificial
  Synthetic oligonucleotide
gtgcattcagggtacccggtgtaaaaactgtttggaagagacgctgagcaacagcgc

SEQ ID NO: 440487 - DNA, 60 bp, Artificial
  Synthetic oligonucleotide
gtgcattgagtgttgtcaattaactggattgactttttgtcacggatgttcgctagctca

SEQ ID NO: 440488 - DNA, 60 bp, Artificial
  Synthetic oligonucleotide
gtgcattgataatggcacctcaccaaatattaatggcatgtgggtgatgatggacggaga

SEQ ID NO: 440489 - DNA, 55 bp, Artificial
  Synthetic oligonucleotide
gtgcattgcattatgctagattcagcaatcaaactctcagtacagcacagcccgg

SEQ ID NO: 440490 - DNA, 55 bp, Artificial
  Synthetic oligonucleotide
gtgcattggcactcactggtcaaccatttcaagccaatattgctgctaggcttgt

SEQ ID NO: 440491 - DNA, 55 bp, Artificial
  Synthetic oligonucleotide
gtgcattgttaaaggcactgtcaacctatggaagtgtggtattgtccaactgtgc

SEQ ID NO: 440492 - DNA, 57 bp, Artificial
  Synthetic oligonucleotide
gtgcatttcgccttatcttcaagataaaggtggaggtacacccagccacccgagccg

SEQ ID NO: 440493 - DNA, 53 bp, Artificial
  Synthetic oligonucleotide
gtgcatttcgttaaaacatccttccaaccttctgactggaaggggattaacgt

SEQ ID NO: 440494 - DNA, 54 bp, Artificial
  Synthetic oligonucleotide
gtgcatttctgatattacccgtggtaacggtattacccaccgcgttggtaagcg

SEQ ID NO: 440495 - DNA, 57 bp, Artificial
  Synthetic oligonucleotide
gtgcatttgctaaggttgtttatatacatcctagcaaggatgtggcatatttaagtt

SEQ ID NO: 440496 - DNA, 60 bp, Artificial
  Synthetic oligonucleotide
gtgcatttggagaatcaggcatagctgagagcgcacaatttgatgtagccatagatatag

SEQ ID NO: 440497 - DNA, 60 bp, Artificial
  Synthetic oligonucleotide
gtgcattttatatgtccattgctatcactgaaggtgtgaaggactattgtcaagttctac

SEQ ID NO: 440498 - DNA, 56 bp, Artificial
  Synthetic oligonucleotide
gtgcattttcgggtgacgactctttgattttttcgactagaccacctgataaaatc

SEQ ID NO: 440499 - DNA, 55 bp, Artificial
  Synthetic oligonucleotide
gtgccaaacactcacatctcgcgcgcatcgaattctgtgatgccggttcaagcag

SEQ ID NO: 440500 - DNA, 56 bp, Artificial
  Synthetic oligonucleotide
gtgccaaaccagaagacgtgtctttccaagggcggggagtcttcgagctctcggac

SEQ ID NO: 440501 - DNA, 59 bp, Artificial
  Synthetic oligonucleotide
gtgccaaatgtacaacaagtatattatacacttgctaatatagaaaatgttcaaactaa

SEQ ID NO: 440502 - DNA, 60 bp, Artificial
  Synthetic oligonucleotide
gtgccaactttgagcctccctcagcttctagccgcaatcccgatgatggtgggtcaactc

SEQ ID NO: 440503 - DNA, 55 bp, Artificial
  Synthetic oligonucleotide
gtgccaagcattggagacaactatacacaacattgaactacagtgcgtggaatgc

SEQ ID NO: 440504 - DNA, 50 bp, Artificial
  Synthetic oligonucleotide
gtgccaagggggtttccaagggcggggccgcagattgggccgtgagcgaa

SEQ ID NO: 440505 - DNA, 55 bp, Artificial
  Synthetic oligonucleotide
gtgccaaggttcctctccatggctacggaggttatcttatgggtggcagtggttc

SEQ ID NO: 440506 - DNA, 57 bp, Artificial
  Synthetic oligonucleotide
gtgccaagtccatatcctagtactttaacaggtggtggtactgtatttgtggcctta

SEQ ID NO: 440507 - DNA, 60 bp, Artificial
  Synthetic oligonucleotide
gtgccaagtgaatcagcattagtgccctataatgatgagccattggtagtggtgacggag

SEQ ID NO: 440508 - DNA, 55 bp, Artificial
  Synthetic oligonucleotide
gtgccaagttaacaaagtgctaacatgatctttcccggaacgcacatactggtca

SEQ ID NO: 440509 - DNA, 55 bp, Artificial
  Synthetic oligonucleotide
gtgccaatggccaatctcgaggccaaaggcactcattacacctcccgcgtgatcg

SEQ ID NO: 440510 - DNA, 60 bp, Artificial
  Synthetic oligonucleotide
gtgccaattgatctggcaaaagggacatctggcagccccattctcaactctcagggagtg

SEQ ID NO: 440511 - DNA, 55 bp, Artificial
  Synthetic oligonucleotide
gtgccaattgttctaaggacttactgcatgaactcatgagtgggttagggattca

SEQ ID NO: 440512 - DNA, 60 bp, Artificial
  Synthetic oligonucleotide
gtgccaatttttggcgcaggggctgcaaacgttgtcgcaacaacgcgcgcagttcaggga

SEQ ID NO: 440513 - DNA, 55 bp, Artificial
  Synthetic oligonucleotide
gtgccacacatgcatttacaacatgatggggaagcgtgagaagaagctcggagag

SEQ ID NO: 440514 - DNA, 55 bp, Artificial
  Synthetic oligonucleotide
gtgccacagcacacagattggcgggacaaggatggtggacattcttaggcagaac

SEQ ID NO: 440515 - DNA, 55 bp, Artificial
  Synthetic oligonucleotide
gtgccacccacagttgaatcaagaactaaaccattcactgtcccagtcttgactg

SEQ ID NO: 440516 - DNA, 57 bp, Artificial
  Synthetic oligonucleotide
gtgccacccccttagcgcgaaggcttggaggcgggcgattgacaacttgtgtggtct

SEQ ID NO: 440517 - DNA, 55 bp, Artificial
  Synthetic oligonucleotide
gtgccacctgtgagggtaattccttcaccgccccctgtaccaaggccttattcta

SEQ ID NO: 440518 - DNA, 52 bp, Artificial
  Synthetic oligonucleotide
gtgccacggttacaccgggaaatgtggttctaaagttcttcccgaactacag

SEQ ID NO: 440519 - DNA, 54 bp, Artificial
  Synthetic oligonucleotide
gtgccacgttgcagacccgcagtggcaagcgtataggcgccaaggtgcacttct

SEQ ID NO: 440520 - DNA, 55 bp, Artificial
  Synthetic oligonucleotide
gtgccactacactgcctctgcgtgctaagtattcaactttctggtctggcccagc

SEQ ID NO: 440521 - DNA, 60 bp, Artificial
  Synthetic oligonucleotide
gtgccactattacctatcataagaagggtatagtgatgcaggcctcacctcggtttttga

SEQ ID NO: 440522 - DNA, 60 bp, Artificial
  Synthetic oligonucleotide
gtgccactcaatcacaatttgagaagtggtatgagggagtgaggaatgattatggcctta

SEQ ID NO: 440523 - DNA, 60 bp, Artificial
  Synthetic oligonucleotide
gtgccactcaggcacctgtccccgtgcgccttgctggcgtccgcttcgagtccaagattg

SEQ ID NO: 440524 - DNA, 52 bp, Artificial
  Synthetic oligonucleotide
gtgccactctgataaatagtttatcagatgggcaatttatcgaccgaagaat

SEQ ID NO: 440525 - DNA, 55 bp, Artificial
  Synthetic oligonucleotide
gtgccactgacagctaataacgcggtcaacaccactattctgggtcaggctggac

SEQ ID NO: 440526 - DNA, 58 bp, Artificial
  Synthetic oligonucleotide
gtgccactgggaaatcaaagacatgcccctgtgggccctcctaaacggatatgtagac

SEQ ID NO: 440527 - DNA, 60 bp, Artificial
  Synthetic oligonucleotide
gtgccagactatgcatctctcagatctctggtggcctcatcaggaactctagagttcatc

SEQ ID NO: 440528 - DNA, 58 bp, Artificial
  Synthetic oligonucleotide
gtgccagagacctcagcttatgaccacgttcctttaaactgccagggggcgggctcga

SEQ ID NO: 440529 - DNA, 58 bp, Artificial
  Synthetic oligonucleotide
gtgccagatataataaggggggaaattacgcagcttaacaggataaggacagaatgga

SEQ ID NO: 440530 - DNA, 55 bp, Artificial
  Synthetic oligonucleotide
gtgccagatggtattatatagccacgagaacaatcatttccgtatcatgacttac

SEQ ID NO: 440531 - DNA, 60 bp, Artificial
  Synthetic oligonucleotide
gtgccagcacaaaatgctataagcactacgttcccttatactggagatccgccatacagt

SEQ ID NO: 440532 - DNA, 55 bp, Artificial
  Synthetic oligonucleotide
gtgccagcacggtagccggattggctgcggcgatgaattcagcattggcctgctg

SEQ ID NO: 440533 - DNA, 55 bp, Artificial
  Synthetic oligonucleotide
gtgccagcataccgcctggaagcaggtttattaccaggatggggacagctggacc

SEQ ID NO: 440534 - DNA, 60 bp, Artificial
  Synthetic oligonucleotide
gtgccagctcttacagcagtcgagacaggagctacgaatcctctggagcccagcgacact

SEQ ID NO: 440535 - DNA, 60 bp, Artificial
  Synthetic oligonucleotide
gtgccagcttgagaatcagctcacggctatgttgcgggaccgcaacgctggagctgagtt

SEQ ID NO: 440536 - DNA, 57 bp, Artificial
  Synthetic oligonucleotide
gtgccaggatccacagccatgggaacttgtccatcgtccccgcgttgaaagaccggt

SEQ ID NO: 440537 - DNA, 55 bp, Artificial
  Synthetic oligonucleotide
gtgccaggcaacaattgcacgtcacaattgcgtctatgtgcagatctgggatcgc

SEQ ID NO: 440538 - DNA, 55 bp, Artificial
  Synthetic oligonucleotide
gtgccaggcacgacaggtgaagatcgacccaactcgtttcctcgagttcctactg

SEQ ID NO: 440539 - DNA, 55 bp, Artificial
  Synthetic oligonucleotide
gtgccaggcagcaatcaattcttgtcatcagacaacttccaatctccctgtgctc

SEQ ID NO: 440540 - DNA, 59 bp, Artificial
  Synthetic oligonucleotide
gtgccagtaacacaaactaaaccgaccaatagaactcttgcaatcgtcaagatggtcat

SEQ ID NO: 440541 - DNA, 60 bp, Artificial
  Synthetic oligonucleotide
gtgccagtaagtatatcgtccagagagatcagacacacacgagcgcaaatgaatgaagat

SEQ ID NO: 440542 - DNA, 60 bp, Artificial
  Synthetic oligonucleotide
gtgccagtaatcttggtagaccacacaagaaagaccatgcacgtgccaacaccatacggt

SEQ ID NO: 440543 - DNA, 55 bp, Artificial
  Synthetic oligonucleotide
gtgccagtctttgatgccatgttgccgcatcacatgcacagtgtgcgcgaaacaa

SEQ ID NO: 440544 - DNA, 60 bp, Artificial
  Synthetic oligonucleotide
gtgccataatccacagccatggaaccttgtctatagttcccgcattgaaggatcgttact

SEQ ID NO: 440545 - DNA, 60 bp, Artificial
  Synthetic oligonucleotide
gtgccatacctttttgcgtagagcgtgaatcctttttgctgactgagttattccctgagc

SEQ ID NO: 440546 - DNA, 60 bp, Artificial
  Synthetic oligonucleotide
gtgccatactgcaattactcaaaattctggtacttggaacatgcaaagactggcgagact

SEQ ID NO: 440547 - DNA, 57 bp, Artificial
  Synthetic oligonucleotide
gtgccatatgtaccagaagatgggttagtgtcgaggggatataggaaagtgggttat

SEQ ID NO: 440548 - DNA, 55 bp, Artificial
  Synthetic oligonucleotide
gtgccatcacaccggcagcgataacaccccgtcgagcgagattgcgtttcacccg

SEQ ID NO: 440549 - DNA, 60 bp, Artificial
  Synthetic oligonucleotide
gtgccatcataaagatcaaagagtcacctatagtcttaggactaccatcttgcaatagga

SEQ ID NO: 440550 - DNA, 59 bp, Artificial
  Synthetic oligonucleotide
gtgccatccctcgatcatccaacctttgtttctagcaagaagtgtcgtcctgggtacac

SEQ ID NO: 440551 - DNA, 51 bp, Artificial
  Synthetic oligonucleotide
gtgccatccgtgaggttaataccggtggcactccttcttgaagtgggtatt

SEQ ID NO: 440552 - DNA, 60 bp, Artificial
  Synthetic oligonucleotide
gtgccatctctggttagtccaaggaagtacataccagccgccgcctctacgcacgcagat

SEQ ID NO: 440553 - DNA, 60 bp, Artificial
  Synthetic oligonucleotide
gtgccatctgctaaactcgtgaataacgctatagatgtggttccactggttgtccaaggt

SEQ ID NO: 440554 - DNA, 55 bp, Artificial
  Synthetic oligonucleotide
gtgccatgcctcaagcgagcggtggatttgatcgtatgattgttacgaagaagct

SEQ ID NO: 440555 - DNA, 59 bp, Artificial
  Synthetic oligonucleotide
gtgccatgccttatacctaattactatcggacctaattgaaataacgcgagtgtgcacg

SEQ ID NO: 440556 - DNA, 60 bp, Artificial
  Synthetic oligonucleotide
gtgccatggactttggtgccttgcaggttaacaaatccgatgttcctctggacatttgca

SEQ ID NO: 440557 - DNA, 57 bp, Artificial
  Synthetic oligonucleotide
gtgccatggatataattggaagccctagtaatacggctccgcaaacggcgtttcaaa

SEQ ID NO: 440558 - DNA, 60 bp, Artificial
  Synthetic oligonucleotide
gtgccatgtgaaccaactacagagaaagaggtctactcgaaaatagtagactacaggagc

SEQ ID NO: 440559 - DNA, 58 bp, Artificial
  Synthetic oligonucleotide
gtgccatgtgaaccgatagcaggatacaggaattggtcgaaaccacaatgtcaaatta

SEQ ID NO: 440560 - DNA, 59 bp, Artificial
  Synthetic oligonucleotide
gtgccatgttgaccagtcaatcggtactcaacaaacttctctattcaattggggaatgg

SEQ ID NO: 440561 - DNA, 60 bp, Artificial
  Synthetic oligonucleotide
gtgccattcgcggactcagtgcagattaatggtgcgctcaggtctgcgaggagggcacag

SEQ ID NO: 440562 - DNA, 55 bp, Artificial
  Synthetic oligonucleotide
gtgccatttactcaaagcaggaaacaatgtcttgggctattgaggctcttcaccg

SEQ ID NO: 440563 - DNA, 56 bp, Artificial
  Synthetic oligonucleotide
gtgcccaaaatacgtcaggagtacaaaattgaggatggttacaggactaaggaaca

SEQ ID NO: 440564 - DNA, 55 bp, Artificial
  Synthetic oligonucleotide
gtgcccaaggtgtcaggtttgcagtatagggtatttagggttcgtttaccagatc

SEQ ID NO: 440565 - DNA, 55 bp, Artificial
  Synthetic oligonucleotide
gtgcccaccactaatgataactactaatgtagatccactggcagatgagtcccta

SEQ ID NO: 440566 - DNA, 54 bp, Artificial
  Synthetic oligonucleotide
gtgcccactattaggacagcaaaggtgcaagggccagggtttgattacgcagtg

SEQ ID NO: 440567 - DNA, 60 bp, Artificial
  Synthetic oligonucleotide
gtgcccactgatatagttatgacgccctagggcacgagcccacattgtcttgccggttct

SEQ ID NO: 440568 - DNA, 55 bp, Artificial
  Synthetic oligonucleotide
gtgcccactgtgagcgacaggttatggtagagtggatacctagccaggggcaatg

SEQ ID NO: 440569 - DNA, 60 bp, Artificial
  Synthetic oligonucleotide
gtgcccagacaagagtcaatgtttaggtggatgaggttctcagatctaagcacatgggag

SEQ ID NO: 440570 - DNA, 56 bp, Artificial
  Synthetic oligonucleotide
gtgcccagatcagaatccaccacctgaaaaggaagacccttatgctaaatataact

SEQ ID NO: 440571 - DNA, 55 bp, Artificial
  Synthetic oligonucleotide
gtgcccaggggctgtgaaggcccttgtaaggttcaatccttcgaatctaggcacg

SEQ ID NO: 440572 - DNA, 60 bp, Artificial
  Synthetic oligonucleotide
gtgcccagttgttggtagccatctgcagtggtatccactggtttctcgtgttagagaacc

SEQ ID NO: 440573 - DNA, 60 bp, Artificial
  Synthetic oligonucleotide
gtgcccatatatggctggcatgaatcgccggagaccgttcttaccgagaatctgcgggga

SEQ ID NO: 440574 - DNA, 55 bp, Artificial
  Synthetic oligonucleotide
gtgcccatcatacctgcgctcttgttcgaccccagcacacaacctggatatgggg

SEQ ID NO: 440575 - DNA, 60 bp, Artificial
  Synthetic oligonucleotide
gtgccccaactgtgcagctacagagtgacaacaatggcagactctccaggtacagaggac

SEQ ID NO: 440576 - DNA, 53 bp, Artificial
  Synthetic oligonucleotide
gtgccccaaggacctgaaaatgaccctgtaccttatttgaactaaccaatcag

SEQ ID NO: 440577 - DNA, 55 bp, Artificial
  Synthetic oligonucleotide
gtgccccagtcgatgtaatctccgtccttctcgatgtaggacttaacatcagagc

SEQ ID NO: 440578 - DNA, 59 bp, Artificial
  Synthetic oligonucleotide
gtgcccccatgaattctttaaagtgtttcaggtaatgcggatctacgtcatcaatgacg

SEQ ID NO: 440579 - DNA, 60 bp, Artificial
  Synthetic oligonucleotide
gtgccccctccctcttcagtcagacagttcgggtacgatgttgccagaggtgcaatcgtc

SEQ ID NO: 440580 - DNA, 57 bp, Artificial
  Synthetic oligonucleotide
gtgccccgacttagtcgagctgcctaaagattttttcccaggtgccaataaagcaga

SEQ ID NO: 440581 - DNA, 52 bp, Artificial
  Synthetic oligonucleotide
gtgcccctgttgttacaccaagggtcccacctacaacaggttttacaattac

SEQ ID NO: 440582 - DNA, 52 bp, Artificial
  Synthetic oligonucleotide
gtgccccttcgaggaactaccgggtcgtcgaatccaccaataccgaccggcc

SEQ ID NO: 440583 - DNA, 57 bp, Artificial
  Synthetic oligonucleotide
gtgcccgaccccgctggttcatgttgtgcctactcctactttctgtaggggtaggca

SEQ ID NO: 440584 - DNA, 60 bp, Artificial
  Synthetic oligonucleotide
gtgcccgatgttgattctcgcggcgctatcttgcgccggcagtataatctttcaacatcc

SEQ ID NO: 440585 - DNA, 57 bp, Artificial
  Synthetic oligonucleotide
gtgcccgcagaacttctgcggaggtctcggagatttgccccggccctgcccatttgg

SEQ ID NO: 440586 - DNA, 55 bp, Artificial
  Synthetic oligonucleotide
gtgcccgcccatccaggtacccgctgccccgaactggtgagccccatgggacgcg

SEQ ID NO: 440587 - DNA, 58 bp, Artificial
  Synthetic oligonucleotide
gtgcccggagcttagggaacaaatcgcgaggctatcctctcaacccgcctccacttca

SEQ ID NO: 440588 - DNA, 60 bp, Artificial
  Synthetic oligonucleotide
gtgcccgttggaaggattgcgatgggccagtattcctactgtaccagagaacgtgtcatc

SEQ ID NO: 440589 - DNA, 57 bp, Artificial
  Synthetic oligonucleotide
gtgccctaggcactgacacagttgcctccgtgctccgctgggctccaactggtgccc

SEQ ID NO: 440590 - DNA, 56 bp, Artificial
  Synthetic oligonucleotide
gtgccctataatgtaacctaactaactaatgaggattaaatcatggaacgcaatgc

SEQ ID NO: 440591 - DNA, 55 bp, Artificial
  Synthetic oligonucleotide
gtgccctatgttaacatttgtcccacgtcttcatggacccagcacgctaactggg

SEQ ID NO: 440592 - DNA, 60 bp, Artificial
  Synthetic oligonucleotide
gtgccctccgcttgtgtgaaacacttgactgtctagacgccttcccccgcactggtctga

SEQ ID NO: 440593 - DNA, 59 bp, Artificial
  Synthetic oligonucleotide
gtgccctctaccgccaactgttcggaccttggttacgtgcgaaggcagactgcgagcaa

SEQ ID NO: 440594 - DNA, 51 bp, Artificial
  Synthetic oligonucleotide
gtgccctgattgtgagatttttgagatctgcaattcagagtacaggcgtgg

SEQ ID NO: 440595 - DNA, 55 bp, Artificial
  Synthetic oligonucleotide
gtgccctgggattttagttccttgcaaattgtttataatcaaggcattgaagggg

SEQ ID NO: 440596 - DNA, 53 bp, Artificial
  Synthetic oligonucleotide
gtgccctgtacgggatagttttttgtagtcgtagagctaaatgtcagctgcac

SEQ ID NO: 440597 - DNA, 60 bp, Artificial
  Synthetic oligonucleotide
gtgccctgtataacacttccggagactcattaatcatttctctccaatcctctgggatat

SEQ ID NO: 440598 - DNA, 55 bp, Artificial
  Synthetic oligonucleotide
gtgccctgtatattgtaattgcccctggcaatgggttagattttacggtgcatgg

SEQ ID NO: 440599 - DNA, 55 bp, Artificial
  Synthetic oligonucleotide
gtgcccttaggcataaaggatcctgtgtcatatgtgttgacgcatgatgtttgtc

SEQ ID NO: 440600 - DNA, 60 bp, Artificial
  Synthetic oligonucleotide
gtgcccttgccctcgagcatgtatggcgtgcggttgcacgctcgagtatgtgcgtttgcc

SEQ ID NO: 440601 - DNA, 57 bp, Artificial
  Synthetic oligonucleotide
gtgcccttgcttcaatggttaggaggaatttccctcattgcgtggtttttgcttata

SEQ ID NO: 440602 - DNA, 54 bp, Artificial
  Synthetic oligonucleotide
gtgcccttggattcggaattgggtatcgaacggcccttaatgtcttcgaccgaa

SEQ ID NO: 440603 - DNA, 55 bp, Artificial
  Synthetic oligonucleotide
gtgccgaaacacatcattgtgctgtcccacctgcgccgcgtcctaccgctttgac

SEQ ID NO: 440604 - DNA, 58 bp, Artificial
  Synthetic oligonucleotide
gtgccgaaaggtgtgggagcgaaaggagacagtggacgccccatactagataatcaag

SEQ ID NO: 440605 - DNA, 55 bp, Artificial
  Synthetic oligonucleotide
gtgccgaaatggttgcaaaatatgatcttctagttatgacaactggacgggctac

SEQ ID NO: 440606 - DNA, 55 bp, Artificial
  Synthetic oligonucleotide
gtgccgaagcattggtcagatgcaacccatcactcgcagcaagatcagggtccat

SEQ ID NO: 440607 - DNA, 55 bp, Artificial
  Synthetic oligonucleotide
gtgccgaaggtatgcctgcgctcgatagtactgaaactgtcagtaagctctcagt

SEQ ID NO: 440608 - DNA, 60 bp, Artificial
  Synthetic oligonucleotide
gtgccgacttaggaggtggtgctgaaatattgcaagccactaatgtcgttacacttagcc

SEQ ID NO: 440609 - DNA, 60 bp, Artificial
  Synthetic oligonucleotide
gtgccgacttgaagcgcatacgctctacctcggactctgttcccgatgtaaagatcagca

SEQ ID NO: 440610 - DNA, 55 bp, Artificial
  Synthetic oligonucleotide
gtgccgagcatgatggacacaattcaaccgtatctaccggacacaacatctccgc

SEQ ID NO: 440611 - DNA, 53 bp, Artificial
  Synthetic oligonucleotide
gtgccgagtgaggcttatcccggggggattgcctcggccccctccctaacacg

SEQ ID NO: 440612 - DNA, 60 bp, Artificial
  Synthetic oligonucleotide
gtgccgatctgcttgtgtgtattacgccacctacactaataattctgagaagggctacgc

SEQ ID NO: 440613 - DNA, 55 bp, Artificial
  Synthetic oligonucleotide
gtgccgatgacttagatcctgagttgattgcctcggcatacgcgtcggtggcaga

SEQ ID NO: 440614 - DNA, 60 bp, Artificial
  Synthetic oligonucleotide
gtgccgcaacgatcgacgctgattctcctggatctagtataactgtatccaatctgttta

SEQ ID NO: 440615 - DNA, 55 bp, Artificial
  Synthetic oligonucleotide
gtgccgccgtggaaggaaactgaagaataatctcagttagatcatgagacagctg

SEQ ID NO: 440616 - DNA, 55 bp, Artificial
  Synthetic oligonucleotide
gtgccgcgactgcccgcgcacatggaatctgaccgggcgtgttctgaaaatgacg

SEQ ID NO: 440617 - DNA, 60 bp, Artificial
  Synthetic oligonucleotide
gtgccgctcacaagagtgccgtcaaggatgctagtgctgacgggagacgtagatggggac

SEQ ID NO: 440618 - DNA, 55 bp, Artificial
  Synthetic oligonucleotide
gtgccggaaggcgattccatgtacgaagacggagaactggagttcgggtaatgga

SEQ ID NO: 440619 - DNA, 60 bp, Artificial
  Synthetic oligonucleotide
gtgccggagcggacattacaaacgtccttctcggtgcatgccactgttgccaatgacctg

SEQ ID NO: 440620 - DNA, 55 bp, Artificial
  Synthetic oligonucleotide
gtgccggagctttcagagtggttataccacgcgtattgtccgaggtttggttatg

SEQ ID NO: 440621 - DNA, 55 bp, Artificial
  Synthetic oligonucleotide
gtgccggaggaggcgacgatcccgggacttcacttaccgcagaggcagctatagt

SEQ ID NO: 440622 - DNA, 55 bp, Artificial
  Synthetic oligonucleotide
gtgccggaggcccagcgaagctaaggccggagtcaaggggccattcgggctcgag

SEQ ID NO: 440623 - DNA, 55 bp, Artificial
  Synthetic oligonucleotide
gtgccggagggtgtccgaaggatcgtggaggcctacctgtgggggtcaactcagg

SEQ ID NO: 440624 - DNA, 59 bp, Artificial
  Synthetic oligonucleotide
gtgccggatcctgtgaaaactgttacaaagttcggaaagaagtgtattagagatgtgca

SEQ ID NO: 440625 - DNA, 55 bp, Artificial
  Synthetic oligonucleotide
gtgccggatttcgttaaaggcggagtaacagtgagcgtgattgacaaacggcttg

SEQ ID NO: 440626 - DNA, 59 bp, Artificial
  Synthetic oligonucleotide
gtgccggccctacctcgatctctgcggtcggtgtactagctccacattcggccctcgcc

SEQ ID NO: 440627 - DNA, 55 bp, Artificial
  Synthetic oligonucleotide
gtgccggcgtgtactattgtgagtccagaagaaagtactacccagtctctttcat

SEQ ID NO: 440628 - DNA, 55 bp, Artificial
  Synthetic oligonucleotide
gtgccggctttgactcggtctctgcacgtcaattggctgggtcacgtgaagtgcg

SEQ ID NO: 440629 - DNA, 55 bp, Artificial
  Synthetic oligonucleotide
gtgccgggaaaaagctcgagcctagttagaggactaggaagggccgtagccataa

SEQ ID NO: 440630 - DNA, 53 bp, Artificial
  Synthetic oligonucleotide
gtgccgggccgcatagtcttgtgtatgagctcacccccagtgggctgcaggtt

SEQ ID NO: 440631 - DNA, 54 bp, Artificial
  Synthetic oligonucleotide
gtgccgggggatgcattacgatatgtagctgggcccgtcgagtcttgtaagtgg

SEQ ID NO: 440632 - DNA, 50 bp, Artificial
  Synthetic oligonucleotide
gtgccggtattgtgtctataatatgggctggtgtgaatactatgttgaat

SEQ ID NO: 440633 - DNA, 60 bp, Artificial
  Synthetic oligonucleotide
gtgccgtaaacgctccagcatgttttatcggttgcacaaagttgacgcatcattcggctc

SEQ ID NO: 440634 - DNA, 59 bp, Artificial
  Synthetic oligonucleotide
gtgccgtatactagtggtattgaacgtgttgccgatctcgtttcaggcgacagtccagg

SEQ ID NO: 440635 - DNA, 51 bp, Artificial
  Synthetic oligonucleotide
gtgccgtatggtgacatcaacctgagtggcaacccaactacaagactgctc

SEQ ID NO: 440636 - DNA, 51 bp, Artificial
  Synthetic oligonucleotide
gtgccgtcagaacccaggaggttatccagtgtctgccgccgcaactcgtgg

SEQ ID NO: 440637 - DNA, 55 bp, Artificial
  Synthetic oligonucleotide
gtgccgtcaggtggcatctgtagtctgcttggcacctatgcccgcgggtctgatg

SEQ ID NO: 440638 - DNA, 57 bp, Artificial
  Synthetic oligonucleotide
gtgccgtctagggtgcttcagtacatgtacgtccccccaggggcgcctaagccagac

SEQ ID NO: 440639 - DNA, 55 bp, Artificial
  Synthetic oligonucleotide
gtgccgtctcctagacaatgccactatgtctggtcgaggcaagcctccggaagcg

SEQ ID NO: 440640 - DNA, 53 bp, Artificial
  Synthetic oligonucleotide
gtgccgtgaagttcgcactttcgggtatgcccaagccgactattcctcgctta

SEQ ID NO: 440641 - DNA, 60 bp, Artificial
  Synthetic oligonucleotide
gtgccgtggaagcatcactaatcctatgatccagcgtctaaacggtatcgtcaccagata

SEQ ID NO: 440642 - DNA, 60 bp, Artificial
  Synthetic oligonucleotide
gtgccgttgtgatacaattgtgtcatgtgagggctacgtcgttaagaagataacgatgag

SEQ ID NO: 440643 - DNA, 55 bp, Artificial
  Synthetic oligonucleotide
gtgcctaaaggagtcgagtggattactgacgacaccatggaacctacgcaactgg

SEQ ID NO: 440644 - DNA, 55 bp, Artificial
  Synthetic oligonucleotide
gtgcctaaagtgtctggacatcaatacagagtgtttagagtacgcttgcccgacc

SEQ ID NO: 440645 - DNA, 55 bp, Artificial
  Synthetic oligonucleotide
gtgcctaaattcttgctgccagtatccaaagaaacatggagtcaatggtggactg

SEQ ID NO: 440646 - DNA, 55 bp, Artificial
  Synthetic oligonucleotide
gtgcctaagagtatgctcagagcaggagacatactacagatggcaacagggagag

SEQ ID NO: 440647 - DNA, 55 bp, Artificial
  Synthetic oligonucleotide
gtgcctaaggtccagcccaaaacgttggaagcgatcctagatactccaaagggga

SEQ ID NO: 440648 - DNA, 58 bp, Artificial
  Synthetic oligonucleotide
gtgcctaattgatcggatttaaaggaacaagtatccatcattaatcttgatgagaagg

SEQ ID NO: 440649 - DNA, 55 bp, Artificial
  Synthetic oligonucleotide
gtgcctaccaaggatgaggacattctgatagggattcaaaggtccatgcaagaga

SEQ ID NO: 440650 - DNA, 50 bp, Artificial
  Synthetic oligonucleotide
gtgcctacccccgatgcggcttatgggtggccccgtttcgaaacaaccaa

SEQ ID NO: 440651 - DNA, 55 bp, Artificial
  Synthetic oligonucleotide
gtgcctacgagaagtctagtagcactctgaaaacctatgactggtcgctccactg

SEQ ID NO: 440652 - DNA, 55 bp, Artificial
  Synthetic oligonucleotide
gtgcctactcacagtacgcggctggcgatactcttgcgtggccaaggtttgtcgg

SEQ ID NO: 440653 - DNA, 60 bp, Artificial
  Synthetic oligonucleotide
gtgcctactcggggatgcccaagacagcggtcaagaaaccagtactgagaactgctgtag

SEQ ID NO: 440654 - DNA, 55 bp, Artificial
  Synthetic oligonucleotide
gtgcctagactgttgccaacacaccgatttaacttactgtcgaggttgtaccatg

SEQ ID NO: 440655 - DNA, 58 bp, Artificial
  Synthetic oligonucleotide
gtgcctagctttatgctgaggaaagaactggggactctgagttttaaacaaggtgaga

SEQ ID NO: 440656 - DNA, 60 bp, Artificial
  Synthetic oligonucleotide
gtgcctatatagagtcagaaataccagcattagcagggacttctatcggatttaaaataa

SEQ ID NO: 440657 - DNA, 55 bp, Artificial
  Synthetic oligonucleotide
gtgcctatccttcgctcagcatggtactaaacgtcatgctgcacgcagctacgcg

SEQ ID NO: 440658 - DNA, 60 bp, Artificial
  Synthetic oligonucleotide
gtgcctatgcacacagatctggagcttgatttttctctgacatccagttctaagtacaca

SEQ ID NO: 440659 - DNA, 59 bp, Artificial
  Synthetic oligonucleotide
gtgcctatggtgcttgctccaattataaagaacggtgccctttattgtgagggtcagtg

SEQ ID NO: 440660 - DNA, 55 bp, Artificial
  Synthetic oligonucleotide
gtgcctcaacagatattgcctccaagagatatgaaaatcctgtgttatgctcgtc

SEQ ID NO: 440661 - DNA, 59 bp, Artificial
  Synthetic oligonucleotide
gtgcctcatacggctaaaacctacgctgcacggaccaacgcccctgctgtataggatgg

SEQ ID NO: 440662 - DNA, 55 bp, Artificial
  Synthetic oligonucleotide
gtgcctccagtctcggtatacagtccaccgtttccagtcgaagaatgtctcacag

SEQ ID NO: 440663 - DNA, 60 bp, Artificial
  Synthetic oligonucleotide
gtgcctccgtcaaagggcactcctcaaacgtctctgttaacatctgatggtgtaatcaag

SEQ ID NO: 440664 - DNA, 60 bp, Artificial
  Synthetic oligonucleotide
gtgcctccgtgcacttaagccctttgcagctatgagtagttcatcgcgaccagggttcct

SEQ ID NO: 440665 - DNA, 55 bp, Artificial
  Synthetic oligonucleotide
gtgcctcctattcgtgagggatttgaaataagcacctctgaaactactactccag

SEQ ID NO: 440666 - DNA, 53 bp, Artificial
  Synthetic oligonucleotide
gtgcctcctccgagaaaacccacaccgtttccggctcctccaacaaagtcgga

SEQ ID NO: 440667 - DNA, 60 bp, Artificial
  Synthetic oligonucleotide
gtgcctcgacttaatgagagttctgttgtctttagggacactatgaatgtatactctgga

SEQ ID NO: 440668 - DNA, 60 bp, Artificial
  Synthetic oligonucleotide
gtgcctcgagttatagagttgatacaggctaccattattgctatgggtcagactatcgtg

SEQ ID NO: 440669 - DNA, 56 bp, Artificial
  Synthetic oligonucleotide
gtgcctcgttcgttgatttagttagacaagtacggcctggtcgaccgtacgatgcc

SEQ ID NO: 440670 - DNA, 52 bp, Artificial
  Synthetic oligonucleotide
gtgcctctattgggtccttgaaagttaaattcccaaaatacccttatccctg

SEQ ID NO: 440671 - DNA, 60 bp, Artificial
  Synthetic oligonucleotide
gtgcctctcgggcacagacaatatacttgggtatccaacgaacaacgagctcccagatca

SEQ ID NO: 440672 - DNA, 55 bp, Artificial
  Synthetic oligonucleotide
gtgcctctctttgatatatctttggagactaacaagagaacccgcaaggaggtct

SEQ ID NO: 440673 - DNA, 55 bp, Artificial
  Synthetic oligonucleotide
gtgcctctgtttgtatttattgccgtgcacgtgtagagcatccagatgtagatgg

SEQ ID NO: 440674 - DNA, 60 bp, Artificial
  Synthetic oligonucleotide
gtgcctcttcagctaccgccacttgagagacttcatattaattgcagcgaggattgtgga

SEQ ID NO: 440675 - DNA, 52 bp, Artificial
  Synthetic oligonucleotide
gtgcctgaacttaactcgactctacaaattgagaagcacgtcagtagagctt

SEQ ID NO: 440676 - DNA, 59 bp, Artificial
  Synthetic oligonucleotide
gtgcctgaccccttatcgcttgactccaaatgcccgcatgcctctgtgcttagccgtct

SEQ ID NO: 440677 - DNA, 53 bp, Artificial
  Synthetic oligonucleotide
gtgcctgacttttgcagacaagacttattgcacaaatttgaatgctgttacac

SEQ ID NO: 440678 - DNA, 55 bp, Artificial
  Synthetic oligonucleotide
gtgcctgagacgactagaaattacacattatttggggaaacagcgagtatatcag

SEQ ID NO: 440679 - DNA, 55 bp, Artificial
  Synthetic oligonucleotide
gtgcctgcacaagatcaggttcttctttctatgcagagttgaagtggttgctgtc

SEQ ID NO: 440680 - DNA, 60 bp, Artificial
  Synthetic oligonucleotide
gtgcctggaatcacagaccagacaaagtatgaggcttacgtggtatgtggtcctttccga

SEQ ID NO: 440681 - DNA, 54 bp, Artificial
  Synthetic oligonucleotide
gtgcctggacttggacttacatgtgctggtcgcatgttggtctgtatgggtcag

SEQ ID NO: 440682 - DNA, 60 bp, Artificial
  Synthetic oligonucleotide
gtgcctgggacaccatgcagtgccaaacggaacgctagtgaaaacaatcacaaatgacca

SEQ ID NO: 440683 - DNA, 55 bp, Artificial
  Synthetic oligonucleotide
gtgcctgggttgtatgacgcttttggtagcgattcctttgacgaactctatactc

SEQ ID NO: 440684 - DNA, 54 bp, Artificial
  Synthetic oligonucleotide
gtgcctggtaaactacccttacagactttggcactacccttgtaccgtcaacta

SEQ ID NO: 440685 - DNA, 55 bp, Artificial
  Synthetic oligonucleotide
gtgcctggttgcggccatttcagaggtccgcacagccatacaatcgctgacgccc

SEQ ID NO: 440686 - DNA, 55 bp, Artificial
  Synthetic oligonucleotide
gtgcctgtaacaataggcgagctaaagcaatctgcacttgacctccggctggcac

SEQ ID NO: 440687 - DNA, 55 bp, Artificial
  Synthetic oligonucleotide
gtgcctgtacatgcctgtaacatgatgaagagctgcctgatagcactagggccct

SEQ ID NO: 440688 - DNA, 55 bp, Artificial
  Synthetic oligonucleotide
gtgcctgtcctcactgcccgaggcacacgaaaacagttatgggccaatcggccca

SEQ ID NO: 440689 - DNA, 60 bp, Artificial
  Synthetic oligonucleotide
gtgcctgtgcgactttccagaccaggcatgaatcccgcaacaatacggatgctggcactg

SEQ ID NO: 440690 - DNA, 60 bp, Artificial
  Synthetic oligonucleotide
gtgcctgttcgactgatgaggcattcaatgccttggcgtatgagtcgttagcactctggc

SEQ ID NO: 440691 - DNA, 55 bp, Artificial
  Synthetic oligonucleotide
gtgccttaagctctggactatgatctctattagcatcattcactgtgtctcggag

SEQ ID NO: 440692 - DNA, 59 bp, Artificial
  Synthetic oligonucleotide
gtgccttacatatatgacactgtagtacgcagaaatacggctagcgcctatttaccggt

SEQ ID NO: 440693 - DNA, 53 bp, Artificial
  Synthetic oligonucleotide
gtgccttacccccggtccaccgaggtctatgtccgatcaatcttcggcccggg

SEQ ID NO: 440694 - DNA, 58 bp, Artificial
  Synthetic oligonucleotide
gtgccttatgcggctccggcaggtctaggtttacgattgtgccgtattcctccgtgct

SEQ ID NO: 440695 - DNA, 60 bp, Artificial
  Synthetic oligonucleotide
gtgccttatgtagagtaatgttatgttctctacctcgtttgtgtgacatccctatcaatg

SEQ ID NO: 440696 - DNA, 51 bp, Artificial
  Synthetic oligonucleotide
gtgccttcacaactcctggtttagcccatggtcagctatcaacttgtgagg

SEQ ID NO: 440697 - DNA, 55 bp, Artificial
  Synthetic oligonucleotide
gtgccttcggtgtgtattatgcagtggcagagggtataaaacagctgatacagcc

SEQ ID NO: 440698 - DNA, 60 bp, Artificial
  Synthetic oligonucleotide
gtgccttcttgatagaggggggctgtgagggtgatgaagatcgcattcttgagagtccag

SEQ ID NO: 440699 - DNA, 55 bp, Artificial
  Synthetic oligonucleotide
gtgccttctttgaaggcgaagccttgaagacgctcctctaaagtgttaccggtag

SEQ ID NO: 440700 - DNA, 55 bp, Artificial
  Synthetic oligonucleotide
gtgccttggaatgatacctggagtaacaacctctcctatgatgctatttggggca

SEQ ID NO: 440701 - DNA, 60 bp, Artificial
  Synthetic oligonucleotide
gtgcctttccggcagagcatcccctggcatcgacactcacgcgatcgcaatcaactgact

SEQ ID NO: 440702 - DNA, 55 bp, Artificial
  Synthetic oligonucleotide
gtgcctttggtgatcctggcgatattatggctactactgcaggaatgcggtgtcc

SEQ ID NO: 440703 - DNA, 52 bp, Artificial
  Synthetic oligonucleotide
gtgccttttaccggagggttactatcatcgacgttactaaccccctggtgga

SEQ ID NO: 440704 - DNA, 56 bp, Artificial
  Synthetic oligonucleotide
gtgccttttatggtacccatctcaagtgatcacgacatctcctctgctcctgctgt

SEQ ID NO: 440705 - DNA, 57 bp, Artificial
  Synthetic oligonucleotide
gtgcgaaactaagtttatcgatgggaagcagttggagatcgagtacaatttcgatgc

SEQ ID NO: 440706 - DNA, 58 bp, Artificial
  Synthetic oligonucleotide
gtgcgaaagatgcggactattgtcacaattcgaacatttcccctatcctgtcgcctct

SEQ ID NO: 440707 - DNA, 55 bp, Artificial
  Synthetic oligonucleotide
gtgcgaaagctgacagtgccctcgtgacaaagcatgtggtgaaagggaaatgccc

SEQ ID NO: 440708 - DNA, 60 bp, Artificial
  Synthetic oligonucleotide
gtgcgaaccaaagttccaaaggataagctggccactttcaatagtatagctgtgcggatg

SEQ ID NO: 440709 - DNA, 55 bp, Artificial
  Synthetic oligonucleotide
gtgcgaaccccagattgatgcacgcccttggttatacaacgaacttcggtcggtt

SEQ ID NO: 440710 - DNA, 60 bp, Artificial
  Synthetic oligonucleotide
gtgcgaactgttgggtctgactggcccacgccgcatcaaggatctgtacctcctggtgcg

SEQ ID NO: 440711 - DNA, 60 bp, Artificial
  Synthetic oligonucleotide
gtgcgaagaatacaaagtggctattggaacgagctcatggcaacataaaggcagttgccc

SEQ ID NO: 440712 - DNA, 60 bp, Artificial
  Synthetic oligonucleotide
gtgcgaagcggcatctattagcgcgcgataacaatgtttggtttcgcgcgtgtgccatta

SEQ ID NO: 440713 - DNA, 58 bp, Artificial
  Synthetic oligonucleotide
gtgcgaaggctgccttgggtaggaataaaaggctgaggggcagaagtgccactggttc

SEQ ID NO: 440714 - DNA, 55 bp, Artificial
  Synthetic oligonucleotide
gtgcgaatactattctagcttggggtggtaaattagacggtaaaggtggatcacc

SEQ ID NO: 440715 - DNA, 59 bp, Artificial
  Synthetic oligonucleotide
gtgcgaattgatcaattcgtttagttgtgtagagttaaggattgagcgttcgagttcca

SEQ ID NO: 440716 - DNA, 57 bp, Artificial
  Synthetic oligonucleotide
gtgcgaattgatcaattcgtttagttgtgtagagttacgggttgagcgtttgattct

SEQ ID NO: 440717 - DNA, 55 bp, Artificial
  Synthetic oligonucleotide
gtgcgacaagcgcaatcagagtatgttgcagcaactaaagacgtcgatctaacgg

SEQ ID NO: 440718 - DNA, 56 bp, Artificial
  Synthetic oligonucleotide
gtgcgacaatatttccacatcaatggataaatctaagaaccaacaattcagcaacg

SEQ ID NO: 440719 - DNA, 55 bp, Artificial
  Synthetic oligonucleotide
gtgcgacacagtgccgtgtaattggaaaacccacgttgtttgtagcgcgtgtcgc

SEQ ID NO: 440720 - DNA, 59 bp, Artificial
  Synthetic oligonucleotide
gtgcgacacgagcactagcaaggtttgtctcaggtaattgggaaggtagcggtgttata

SEQ ID NO: 440721 - DNA, 55 bp, Artificial
  Synthetic oligonucleotide
gtgcgacattgctgacctgaaaatggccgttagcttcagtcaattcaacagaagg

SEQ ID NO: 440722 - DNA, 60 bp, Artificial
  Synthetic oligonucleotide
gtgcgacctccgtctcgctcctcctacagagactaatgtgcgcactttctcagctgtgct

SEQ ID NO: 440723 - DNA, 55 bp, Artificial
  Synthetic oligonucleotide
gtgcgaccttgtgccgttatgaagttagcgagcggcttacagcacagtccaaagt

SEQ ID NO: 440724 - DNA, 55 bp, Artificial
  Synthetic oligonucleotide
gtgcgacctttctcttcaggtgctttctctatctctggagtgatttcgccagccc

SEQ ID NO: 440725 - DNA, 52 bp, Artificial
  Synthetic oligonucleotide
gtgcgacgaaacgctacaaagattaaaagaaagatttccgggttacggaatg

SEQ ID NO: 440726 - DNA, 60 bp, Artificial
  Synthetic oligonucleotide
gtgcgacggaagctgaacttcaacagtccgttcaagagcgctgctgctgtccccactgtc

SEQ ID NO: 440727 - DNA, 55 bp, Artificial
  Synthetic oligonucleotide
gtgcgacgtcggcagattgacgctcacgaagttcaacgacggtttgttccagttg

SEQ ID NO: 440728 - DNA, 53 bp, Artificial
  Synthetic oligonucleotide
gtgcgacgtgctttatagtttgaattgttgtcgcgcgaatactggctatggac

SEQ ID NO: 440729 - DNA, 59 bp, Artificial
  Synthetic oligonucleotide
gtgcgactaggtcgtcactcaccgacctgtgcgaccggttttgtgcgccaaaaggcatg

SEQ ID NO: 440730 - DNA, 55 bp, Artificial
  Synthetic oligonucleotide
gtgcgagaaacaagcatcacattcacacagggctcatagcagagcagcgagatct

SEQ ID NO: 440731 - DNA, 55 bp, Artificial
  Synthetic oligonucleotide
gtgcgagactcccggtgtataccaggaagactttcgaacgtgaactcgctttgga

SEQ ID NO: 440732 - DNA, 57 bp, Artificial
  Synthetic oligonucleotide
gtgcgagagcgtcagtattaagcgggggagaattagatagatgggagaaaattcggt

SEQ ID NO: 440733 - DNA, 55 bp, Artificial
  Synthetic oligonucleotide
gtgcgagcttggccttaagtatcttcacgtacacgtcgtgatgggcggtgacggc

SEQ ID NO: 440734 - DNA, 60 bp, Artificial
  Synthetic oligonucleotide
gtgcgaggcggcgccagctatagtcatcagctatgggattacactggcgacactatctgt

SEQ ID NO: 440735 - DNA, 56 bp, Artificial
  Synthetic oligonucleotide
gtgcgagggaacttggcttcctcaggtgcatcgggtttgtccccacaacgaggttg

SEQ ID NO: 440736 - DNA, 56 bp, Artificial
  Synthetic oligonucleotide
gtgcgaggtgctacgtattgaacccagaagctgtaaacatatctggcacgaaaggt

SEQ ID NO: 440737 - DNA, 55 bp, Artificial
  Synthetic oligonucleotide
gtgcgagttccatttcatgcacgagacataccagataaattgcacaaggaagttt

SEQ ID NO: 440738 - DNA, 59 bp, Artificial
  Synthetic oligonucleotide
gtgcgataactgaaattcatcccgatttgactctatataattgaacgcatttgggggag

SEQ ID NO: 440739 - DNA, 55 bp, Artificial
  Synthetic oligonucleotide
gtgcgataactgaaattcgtccctctgcgattctatgtaattgaatgcgcttggg

SEQ ID NO: 440740 - DNA, 55 bp, Artificial
  Synthetic oligonucleotide
gtgcgatagtcggtgaccagtttggttggtacggtcgcctcgaccgcgccagcat

SEQ ID NO: 440741 - DNA, 55 bp, Artificial
  Synthetic oligonucleotide
gtgcgatcagtctataccgtacagggcctcgagtacttggctgtcagtgggtgag

SEQ ID NO: 440742 - DNA, 58 bp, Artificial
  Synthetic oligonucleotide
gtgcgatccccgcatcatccaaccacggactccaagattcgtaacgagattcgggcgt

SEQ ID NO: 440743 - DNA, 55 bp, Artificial
  Synthetic oligonucleotide
gtgcgatctttgtgcctattggcttggcacaatggagagcatgaatacggagagt

SEQ ID NO: 440744 - DNA, 60 bp, Artificial
  Synthetic oligonucleotide
gtgcgatgatgtttgacgaccaaggtgtgatacccgagcttaattgtcagtggaggaaga

SEQ ID NO: 440745 - DNA, 55 bp, Artificial
  Synthetic oligonucleotide
gtgcgatggccgaaatcgaacgcttgcgtgtcgagcgggctgcgaaggacggaaa

SEQ ID NO: 440746 - DNA, 55 bp, Artificial
  Synthetic oligonucleotide
gtgcgatgtgataaacaaaagtcgcccacgcacacgcttaagttcagtatgtgtg

SEQ ID NO: 440747 - DNA, 50 bp, Artificial
  Synthetic oligonucleotide
gtgcgattagtgaacggattcttggaacttatctgggacgatctgcggag

SEQ ID NO: 440748 - DNA, 60 bp, Artificial
  Synthetic oligonucleotide
gtgcgattcactcactaaggcagacatgaaatacacagaaggcagatccaagtacctcat

SEQ ID NO: 440749 - DNA, 60 bp, Artificial
  Synthetic oligonucleotide
gtgcgcaattagttcaataagggaatgcgcaatgtggcagcgacccggcagtatataatg

SEQ ID NO: 440750 - DNA, 55 bp, Artificial
  Synthetic oligonucleotide
gtgcgcacaggaatggatcccagaatgtgttctctcatgcagggctcaaccctcc

SEQ ID NO: 440751 - DNA, 55 bp, Artificial
  Synthetic oligonucleotide
gtgcgcacatgtttgcagaccaagcaatcatatttgaaccgcaatacgtgagcag

SEQ ID NO: 440752 - DNA, 60 bp, Artificial
  Synthetic oligonucleotide
gtgcgcagcaaggcaacaataataaacctctaaagattcagattgatggagttagcatac

SEQ ID NO: 440753 - DNA, 55 bp, Artificial
  Synthetic oligonucleotide
gtgcgcagggttcatcactaaaaggaaataaccgatgaatatgatgaccgtgccg

SEQ ID NO: 440754 - DNA, 56 bp, Artificial
  Synthetic oligonucleotide
gtgcgcatagatgccggttctccaaagggtcttggagttccgaaagggtttacata

SEQ ID NO: 440755 - DNA, 59 bp, Artificial
  Synthetic oligonucleotide
gtgcgccacatccagtggtgttttgtacaagcacttctgtttccccggagcgaggtata

SEQ ID NO: 440756 - DNA, 55 bp, Artificial
  Synthetic oligonucleotide
gtgcgccgagtacaacgggctacgcctggcctcgcatcaaggtttgccgacaatg

SEQ ID NO: 440757 - DNA, 59 bp, Artificial
  Synthetic oligonucleotide
gtgcgccgagtgggggacttccattatattacgggggccacagaagatgagctcaagtg

SEQ ID NO: 440758 - DNA, 55 bp, Artificial
  Synthetic oligonucleotide
gtgcgccgataattatgctcagatgagctctaccgaaatacggaaccacatcacg

SEQ ID NO: 440759 - DNA, 57 bp, Artificial
  Synthetic oligonucleotide
gtgcgccgtctatcacgtacccaccgggacgaaagtcgcgctaagagttgttgagtc

SEQ ID NO: 440760 - DNA, 55 bp, Artificial
  Synthetic oligonucleotide
gtgcgcctataaggtgcttccaatgcttcatctttaagtaattgggatctacgtc

SEQ ID NO: 440761 - DNA, 53 bp, Artificial
  Synthetic oligonucleotide
gtgcgcctcaagattttggcgaggtttttaatatgttcgacaacgaacctagc

SEQ ID NO: 440762 - DNA, 60 bp, Artificial
  Synthetic oligonucleotide
gtgcgcctgacaagcctatataattatgacttacccaccaagctgtggtccctataaata

SEQ ID NO: 440763 - DNA, 55 bp, Artificial
  Synthetic oligonucleotide
gtgcgcgactgcgttgccgctcgcttaatggaattgagacgacgtgtcgacagct

SEQ ID NO: 440764 - DNA, 57 bp, Artificial
  Synthetic oligonucleotide
gtgcgcgagcagtgtctcaagtctgggttcgcccccaatttccttccttactcctac

SEQ ID NO: 440765 - DNA, 50 bp, Artificial
  Synthetic oligonucleotide
gtgcgcgataatagagttcccagacgcaagcgtaagataaatcctcgaaa

SEQ ID NO: 440766 - DNA, 55 bp, Artificial
  Synthetic oligonucleotide
gtgcgcgcctacggcgcgacacttgacgatcaaacccatatccagacgaacgagg

SEQ ID NO: 440767 - DNA, 55 bp, Artificial
  Synthetic oligonucleotide
gtgcgcgctcaagggctcattcgtgcatgcatgttagtgcgaaaagtcgccgggg

SEQ ID NO: 440768 - DNA, 55 bp, Artificial
  Synthetic oligonucleotide
gtgcgcgcttcactgcgaaagttgtgtcctaaccttaattattctgagcgcgaat

SEQ ID NO: 440769 - DNA, 51 bp, Artificial
  Synthetic oligonucleotide
gtgcgcggttgagggtctggtgtcgtaatggggcgaggagggttccgaaga

SEQ ID NO: 440770 - DNA, 50 bp, Artificial
  Synthetic oligonucleotide
gtgcgcgtaacttctccatatatgggtgtacctcctacacgattgcgtgt

SEQ ID NO: 440771 - DNA, 55 bp, Artificial
  Synthetic oligonucleotide
gtgcgcgtacgacaagtgtactgcgtgcccctgtgcatagcggtgacggaaaagc

SEQ ID NO: 440772 - DNA, 50 bp, Artificial
  Synthetic oligonucleotide
gtgcgctagaacgatcagaacggttcaactgaacctagtaggacgttcgg

SEQ ID NO: 440773 - DNA, 58 bp, Artificial
  Synthetic oligonucleotide
gtgcgctatgttgctgccgggcttgatcatcgggcggtttttgcccccggtgtttcac

SEQ ID NO: 440774 - DNA, 55 bp, Artificial
  Synthetic oligonucleotide
gtgcgctcatcgacttcgagaacggcactgtcgggcccgaggttgaagctgccct

SEQ ID NO: 440775 - DNA, 55 bp, Artificial
  Synthetic oligonucleotide
gtgcgctcttctttgaaaccattggatcgctgacggttaaattcgctgttagcgc

SEQ ID NO: 440776 - DNA, 59 bp, Artificial
  Synthetic oligonucleotide
gtgcgctgcctttgcggccgtttcgcacacctcacccgactgtcttgggccattcccca

SEQ ID NO: 440777 - DNA, 55 bp, Artificial
  Synthetic oligonucleotide
gtgcgctgtacgcactcgttcgatgcagtaacctactatgcagtatggatccatg

SEQ ID NO: 440778 - DNA, 58 bp, Artificial
  Synthetic oligonucleotide
gtgcgctgttttgaccccggctaagataataagtggtcacggactacgcagtggttga

SEQ ID NO: 440779 - DNA, 50 bp, Artificial
  Synthetic oligonucleotide
gtgcgcttagtgagcggattcttagctctcttctgggacgatctacggag

SEQ ID NO: 440780 - DNA, 60 bp, Artificial
  Synthetic oligonucleotide
gtgcgcttgtctctgtgtgagacctctgctcgaggagagccctgttccaggtaggaacgt

SEQ ID NO: 440781 - DNA, 60 bp, Artificial
  Synthetic oligonucleotide
gtgcgctttatatagcgagtgtttggatggtaggaccaaggccttactaatagattgcat

SEQ ID NO: 440782 - DNA, 55 bp, Artificial
  Synthetic oligonucleotide
gtgcgctttgatcttgaggtgactatagtggctgtgaatttgactggaaatggag

SEQ ID NO: 440783 - DNA, 52 bp, Artificial
  Synthetic oligonucleotide
gtgcgctttgttttggtataaaatgagcttaagtcctcacacttacacctgt

SEQ ID NO: 440784 - DNA, 55 bp, Artificial
  Synthetic oligonucleotide
gtgcggaacagctactggctgtaattgcgccacagcctcggcccctcctcctcct

SEQ ID NO: 440785 - DNA, 55 bp, Artificial
  Synthetic oligonucleotide
gtgcggaagcatggagctgttataccaaaatttaccctcccacatgaagaaggca

SEQ ID NO: 440786 - DNA, 55 bp, Artificial
  Synthetic oligonucleotide
gtgcggaattgcgccggcacagtcccaatggcttgggagcggtccagaaagcgat

SEQ ID NO: 440787 - DNA, 59 bp, Artificial
  Synthetic oligonucleotide
gtgcggaccgagtggaagaacgctgaaggcggagacttcggcgacataaagagcggagc

SEQ ID NO: 440788 - DNA, 55 bp, Artificial
  Synthetic oligonucleotide
gtgcggaggactggtgatgtgaatgctggccctgggtccgccaatggcacacagt

SEQ ID NO: 440789 - DNA, 59 bp, Artificial
  Synthetic oligonucleotide
gtgcggatctacgccatcaatgacgttataccaagcgtcgttactgtacacctttggac

SEQ ID NO: 440790 - DNA, 60 bp, Artificial
  Synthetic oligonucleotide
gtgcggatctacgtcatcaatgacgttgtaccaggcttcattgctgtagacctttgggct

SEQ ID NO: 440791 - DNA, 58 bp, Artificial
  Synthetic oligonucleotide
gtgcggattcgccgacctcatggggtacatcccgctcgtcggcgctcccgtaggaggc

SEQ ID NO: 440792 - DNA, 55 bp, Artificial
  Synthetic oligonucleotide
gtgcggcaagcctaccggcagttactaccgggcattttgtgacgaccacctgggc

SEQ ID NO: 440793 - DNA, 60 bp, Artificial
  Synthetic oligonucleotide
gtgcggccatagcactggacggggggctgcatacaatgcgagactagctttccgatctga

SEQ ID NO: 440794 - DNA, 52 bp, Artificial
  Synthetic oligonucleotide
gtgcggcggtgtgtactcggggggtagccaaggcggtagacttcgtcccggt

SEQ ID NO: 440795 - DNA, 58 bp, Artificial
  Synthetic oligonucleotide
gtgcggcgttttgttccacggtcactagcaaccaataatcttgagcaaagcgttccta

SEQ ID NO: 440796 - DNA, 57 bp, Artificial
  Synthetic oligonucleotide
gtgcggctttacaggattcagtggaccggtgtttcaaattatgttcctaccaataca

SEQ ID NO: 440797 - DNA, 55 bp, Artificial
  Synthetic oligonucleotide
gtgcgggaaaggacccaaagaagactggaggcccaatctatcgaagaagagacgg

SEQ ID NO: 440798 - DNA, 56 bp, Artificial
  Synthetic oligonucleotide
gtgcgggaacccatcggaatgctcctctcgtgctacccggatgtagataggtttaa

SEQ ID NO: 440799 - DNA, 57 bp, Artificial
  Synthetic oligonucleotide
gtgcgggcttcgttagccaataacggcgacgactgtgtccttttctgtgagaaggga

SEQ ID NO: 440800 - DNA, 54 bp, Artificial
  Synthetic oligonucleotide
gtgcggggacgtatacggcggaaatgaaagggtcggacgcgtttgcgttagata

SEQ ID NO: 440801 - DNA, 58 bp, Artificial
  Synthetic oligonucleotide
gtgcggggcaagcaacgttcctcgctcgcgaggagggtactgacaatcctgtcgttac

SEQ ID NO: 440802 - DNA, 52 bp, Artificial
  Synthetic oligonucleotide
gtgcggggtacccatatgttgcattaggcattaagaagagggacatcctatc

SEQ ID NO: 440803 - DNA, 51 bp, Artificial
  Synthetic oligonucleotide
gtgcggggtatgtgcacaagcgcgaagtattgcaggattggataacgacaa

SEQ ID NO: 440804 - DNA, 57 bp, Artificial
  Synthetic oligonucleotide
gtgcggtagccatggtgtttacttaggaagcagcttactttgtggaagttgtttgaa

SEQ ID NO: 440805 - DNA, 56 bp, Artificial
  Synthetic oligonucleotide
gtgcggtagccgactttatccgagtgggagtagttgtgttattactactattctgg

SEQ ID NO: 440806 - DNA, 55 bp, Artificial
  Synthetic oligonucleotide
gtgcggtataaccggcacgtgcatgtcaaggacggtcggtacatggcgtgtcccg

SEQ ID NO: 440807 - DNA, 59 bp, Artificial
  Synthetic oligonucleotide
gtgcggtatcatacccgcgtcacaggtgtgtggtccagtgtattgtttcaccccaagcc

SEQ ID NO: 440808 - DNA, 55 bp, Artificial
  Synthetic oligonucleotide
gtgcggtcgcgtatccctccgctatccacagacgttttccggcctgattctgtcc

SEQ ID NO: 440809 - DNA, 55 bp, Artificial
  Synthetic oligonucleotide
gtgcggtgccagccgccaggcggcacttgagtattggagcgtcttaccgcaatct

SEQ ID NO: 440810 - DNA, 55 bp, Artificial
  Synthetic oligonucleotide
gtgcggttctccggcggagagagcatcttctggtacttagactctgtcagctcac

SEQ ID NO: 440811 - DNA, 55 bp, Artificial
  Synthetic oligonucleotide
gtgcgtaaatccatgtcctctgcagcctatgtggaagtagatggagcacccgcag

SEQ ID NO: 440812 - DNA, 59 bp, Artificial
  Synthetic oligonucleotide
gtgcgtaacacgctcgccaagttcttttctctcggttctggtctccagaatcgggctgc

SEQ ID NO: 440813 - DNA, 54 bp, Artificial
  Synthetic oligonucleotide
gtgcgtaacccgcatgtcagtttgtctaaggacttgtgttgtatcggcccttgg

SEQ ID NO: 440814 - DNA, 55 bp, Artificial
  Synthetic oligonucleotide
gtgcgtactcgaagacctgtaaaggatcgagacaacaagctgagtggcgtgaagg

SEQ ID NO: 440815 - DNA, 55 bp, Artificial
  Synthetic oligonucleotide
gtgcgtagaaataggtgggacttagtgatgcgcaaagtgcgacaaggtgtgctag

SEQ ID NO: 440816 - DNA, 55 bp, Artificial
  Synthetic oligonucleotide
gtgcgtagacataggaatcttttaccttattgtatgagaccctttctcatttgga

SEQ ID NO: 440817 - DNA, 57 bp, Artificial
  Synthetic oligonucleotide
gtgcgtagggttgcagggccccgcttgtacagtagggcaaatcagcaggtgcaagtc

SEQ ID NO: 440818 - DNA, 55 bp, Artificial
  Synthetic oligonucleotide
gtgcgtattcaagatgtaaagatagaagcaggttggcaaccgttggccctggaag

SEQ ID NO: 440819 - DNA, 57 bp, Artificial
  Synthetic oligonucleotide
gtgcgtcaccgaatgaacgggttggtattcagacctaatccacgaacaataacagat

SEQ ID NO: 440820 - DNA, 60 bp, Artificial
  Synthetic oligonucleotide
gtgcgtcacgtctttcgacaatatgtatatcaacaagactcattggaattccacactacc

SEQ ID NO: 440821 - DNA, 58 bp, Artificial
  Synthetic oligonucleotide
gtgcgtcattaataccgcacttccagaacatgtttttagatttgcgtataatgttagg

SEQ ID NO: 440822 - DNA, 55 bp, Artificial
  Synthetic oligonucleotide
gtgcgtcccccatggtgataaagtggcacaagctggtatttcgctgcacagcagt

SEQ ID NO: 440823 - DNA, 55 bp, Artificial
  Synthetic oligonucleotide
gtgcgtcgcttcaaaccgtctgctaccttaaagtctgcattccattcgggaccga

SEQ ID NO: 440824 - DNA, 55 bp, Artificial
  Synthetic oligonucleotide
gtgcgtcttacttgcaatcgccagctatgtttgggcaccccttacctggttgctc

SEQ ID NO: 440825 - DNA, 55 bp, Artificial
  Synthetic oligonucleotide
gtgcgtcttcttgaaaaggccgtcgctcttaccctcgaggctcaaaaggacaggg

SEQ ID NO: 440826 - DNA, 55 bp, Artificial
  Synthetic oligonucleotide
gtgcgtcttgttctggcttatctagccaggatttaaatgaggatccttcgcctgg

SEQ ID NO: 440827 - DNA, 60 bp, Artificial
  Synthetic oligonucleotide
gtgcgtgaatccatcctcacagtctatgcctccgtagtatgagcagccgcaggagaggtg

SEQ ID NO: 440828 - DNA, 55 bp, Artificial
  Synthetic oligonucleotide
gtgcgtgaatccatgatctgcgcacttgatatggtaaaatatggaacagccgcag

SEQ ID NO: 440829 - DNA, 60 bp, Artificial
  Synthetic oligonucleotide
gtgcgtgaatccatggtcgtggcaagctaaggatatgaagtatgaacacccacacgggag

SEQ ID NO: 440830 - DNA, 57 bp, Artificial
  Synthetic oligonucleotide
gtgcgtgaatggggatacccagtggctatcacttcccgttgacgttatccctccgtc

SEQ ID NO: 440831 - DNA, 60 bp, Artificial
  Synthetic oligonucleotide
gtgcgtgaattcacttgccacagttgtttgcaatacattgtacaaaacatgattgactgc

SEQ ID NO: 440832 - DNA, 59 bp, Artificial
  Synthetic oligonucleotide
gtgcgtgactaccctcaatacgacatcctattcacccattctacgcactcggaccaccc

SEQ ID NO: 440833 - DNA, 54 bp, Artificial
  Synthetic oligonucleotide
gtgcgtgacttcgcatctggcgtctgggatgcgatcaccagcaagtggggcgag

SEQ ID NO: 440834 - DNA, 60 bp, Artificial
  Synthetic oligonucleotide
gtgcgtgatggaactggtaaccttgtgaattcatgctatgtggagacattccagcacaga

SEQ ID NO: 440835 - DNA, 51 bp, Artificial
  Synthetic oligonucleotide
gtgcgtgattactggggatgtgcttaatgggcaactcaaagatccagttta

SEQ ID NO: 440836 - DNA, 53 bp, Artificial
  Synthetic oligonucleotide
gtgcgtgctacgagagacatctctatcaccacctagtcgcgtcgtgcctgggg

SEQ ID NO: 440837 - DNA, 55 bp, Artificial
  Synthetic oligonucleotide
gtgcgtgggaaggagtttgtcgagggttctgagggtcgccttgtccgctcagctg

SEQ ID NO: 440838 - DNA, 60 bp, Artificial
  Synthetic oligonucleotide
gtgcgtggtcgatatgaagtggtgggaggtcgcctcacattaccttgtatacgagcggag

SEQ ID NO: 440839 - DNA, 60 bp, Artificial
  Synthetic oligonucleotide
gtgcgtggtcgcgttttcgttgatcacgctgttgtacatcttatgtacattccagtgata

SEQ ID NO: 440840 - DNA, 55 bp, Artificial
  Synthetic oligonucleotide
gtgcgtggttattatttccgttgtcccaggggtggggggagttcatctgttgcaa

SEQ ID NO: 440841 - DNA, 60 bp, Artificial
  Synthetic oligonucleotide
gtgcgtgtccagacttcagtgtcagactgcttaaggacactccccatattagtcaatcga

SEQ ID NO: 440842 - DNA, 59 bp, Artificial
  Synthetic oligonucleotide
gtgcgtgtgcggtattcgcttccgtcagcctacaattgtccggtcattgttacttggga

SEQ ID NO: 440843 - DNA, 59 bp, Artificial
  Synthetic oligonucleotide
gtgcgtgttagtatccatactgcgtaacgtttccccactgtaagcataatatgtactta

SEQ ID NO: 440844 - DNA, 60 bp, Artificial
  Synthetic oligonucleotide
gtgcgttaacagaagacccaggtgaaggcacagctggagtggaatctgctgttttgagag

SEQ ID NO: 440845 - DNA, 55 bp, Artificial
  Synthetic oligonucleotide
gtgcgttcagtgcctttccggggtatttcgtgagcacgtatgatctgatcgacgg

SEQ ID NO: 440846 - DNA, 56 bp, Artificial
  Synthetic oligonucleotide
gtgcgttcccagaacctactgtgttttgaatccacaaaatccttttgtgttgaata

SEQ ID NO: 440847 - DNA, 59 bp, Artificial
  Synthetic oligonucleotide
gtgcgttctgcactgcaacgtgacgttacggtcgtacccgtagaggcactggtagatgg

SEQ ID NO: 440848 - DNA, 55 bp, Artificial
  Synthetic oligonucleotide
gtgcgttgctaggattgcgtctccacatctgaactacataaccttcaacatactc

SEQ ID NO: 440849 - DNA, 51 bp, Artificial
  Synthetic oligonucleotide
gtgcgttggggcggcgcgaggcacgacacagccagtgtttttcgagcgcga

SEQ ID NO: 440850 - DNA, 53 bp, Artificial
  Synthetic oligonucleotide
gtgcgttgtacggttgactaaggcgggcgtccccctagtccgagtgccggagg

SEQ ID NO: 440851 - DNA, 55 bp, Artificial
  Synthetic oligonucleotide
gtgcgtttagattgtcgcagctatgaagtccacatatctgttattcgcgttatcc

SEQ ID NO: 440852 - DNA, 55 bp, Artificial
  Synthetic oligonucleotide
gtgcgtttatggggatgataacattgtggctatcaagatggaggttttaccttgg

SEQ ID NO: 440853 - DNA, 55 bp, Artificial
  Synthetic oligonucleotide
gtgcgttttgctccacattcgcacacgtattgcgttttagggcgcatcgttgtgc

SEQ ID NO: 440854 - DNA, 60 bp, Artificial
  Synthetic oligonucleotide
gtgctaaacacaatggatttgaggctgtcatgacatctatggtacactctgatgattcca

SEQ ID NO: 440855 - DNA, 55 bp, Artificial
  Synthetic oligonucleotide
gtgctaaacacatcaaggatcgagagcacttagaggagttcagaagatctctatg

SEQ ID NO: 440856 - DNA, 60 bp, Artificial
  Synthetic oligonucleotide
gtgctaaaggatataagggtagcatatgtcataccaaaaaccactgtcgagactttgata

SEQ ID NO: 440857 - DNA, 60 bp, Artificial
  Synthetic oligonucleotide
gtgctaaattcattgtgtaacctgatgatgtgcatctatactacaaatttgattagccca

SEQ ID NO: 440858 - DNA, 60 bp, Artificial
  Synthetic oligonucleotide
gtgctaaattgggcagcacaaatttatccaggaataaagactaaacatctttgcagacta

SEQ ID NO: 440859 - DNA, 60 bp, Artificial
  Synthetic oligonucleotide
gtgctaacagatttactatcgcagtaccaatggagtcatcagtggaaatggcatcatcat

SEQ ID NO: 440860 - DNA, 55 bp, Artificial
  Synthetic oligonucleotide
gtgctaacagccataaagaaacgtaatgctgatgttcccgaattatcaggttcgg

SEQ ID NO: 440861 - DNA, 60 bp, Artificial
  Synthetic oligonucleotide
gtgctaaccagattgactatcacctgagtcatagtgaatgcagcgggaggccctatgggc

SEQ ID NO: 440862 - DNA, 59 bp, Artificial
  Synthetic oligonucleotide
gtgctaacggtttctctaatgtcatctgcgttagtaagtatcgtactagcgtgtataaa

SEQ ID NO: 440863 - DNA, 60 bp, Artificial
  Synthetic oligonucleotide
gtgctaactcttctcccgtctatgcaccctcaactactgatttcagatcaacagaagcac

SEQ ID NO: 440864 - DNA, 56 bp, Artificial
  Synthetic oligonucleotide
gtgctaagaccaaggcccgtaatgccagcaagcgccgtgctaaggtacgtgtggtg

SEQ ID NO: 440865 - DNA, 60 bp, Artificial
  Synthetic oligonucleotide
gtgctaagcagtgtgtgctcatctttacagcgactctggtagatagagatccctcagact

SEQ ID NO: 440866 - DNA, 55 bp, Artificial
  Synthetic oligonucleotide
gtgctaagggtacgtattactacaatatggatgctcccctgctagacgtaagaga

SEQ ID NO: 440867 - DNA, 55 bp, Artificial
  Synthetic oligonucleotide
gtgctaatcaagaaataccgatcacttagatgtcagattgcagaccctcaagttg

SEQ ID NO: 440868 - DNA, 54 bp, Artificial
  Synthetic oligonucleotide
gtgctaatgaattacaggtcaaagtaccctgatggtactataacccctaaaaac

SEQ ID NO: 440869 - DNA, 57 bp, Artificial
  Synthetic oligonucleotide
gtgctacaacgtttgaggcaacatcgaaaagtacaaatctacgtggaacttgtgtgt

SEQ ID NO: 440870 - DNA, 55 bp, Artificial
  Synthetic oligonucleotide
gtgctacaagaactgctgacactgaatttgctacaagggactttccgctggggac

SEQ ID NO: 440871 - DNA, 55 bp, Artificial
  Synthetic oligonucleotide
gtgctacaagcgcaatcgtgctacgcgcgttgagtgtacaactatagttaatggc

SEQ ID NO: 440872 - DNA, 60 bp, Artificial
  Synthetic oligonucleotide
gtgctacaagtgatgtggtaccagcggatttagtacaaacaagacacgtgatcaatgtga

SEQ ID NO: 440873 - DNA, 60 bp, Artificial
  Synthetic oligonucleotide
gtgctacaataggtgtagtggaattcaacctccgctgtgctagagtggtgggtgacatca

SEQ ID NO: 440874 - DNA, 55 bp, Artificial
  Synthetic oligonucleotide
gtgctacagcagcaacacgtatacaggttcctcttgctttcaacaaagctctagt

SEQ ID NO: 440875 - DNA, 60 bp, Artificial
  Synthetic oligonucleotide
gtgctacattcatcatatcatgggaaaggtgccagacgcttgcactgcctgcgatctggt

SEQ ID NO: 440876 - DNA, 55 bp, Artificial
  Synthetic oligonucleotide
gtgctaccagaccaacctattggaccatcatcatatccaatgaccccagactcac

SEQ ID NO: 440877 - DNA, 54 bp, Artificial
  Synthetic oligonucleotide
gtgctaccagtgttgcttttaagcatgccgccttgtcgcttgaggttaagccgg

SEQ ID NO: 440878 - DNA, 60 bp, Artificial
  Synthetic oligonucleotide
gtgctacccaggagacttcaacgattacgaagaactgaagcatttaataagcagcacaaa

SEQ ID NO: 440879 - DNA, 55 bp, Artificial
  Synthetic oligonucleotide
gtgctaccgcacaatgcggtatgatcttgaatagtggtgtacctgttctagatgc

SEQ ID NO: 440880 - DNA, 57 bp, Artificial
  Synthetic oligonucleotide
gtgctaccgtaaaggaccttatctctgtcagcgttaattggaacgttgttgaattca

SEQ ID NO: 440881 - DNA, 60 bp, Artificial
  Synthetic oligonucleotide
gtgctacctgacagggtcgcggctggccgtctgtactttgtatagtcagttgaaactcac

SEQ ID NO: 440882 - DNA, 50 bp, Artificial
  Synthetic oligonucleotide
gtgctacgagaacacagtctgaattgcaccagactatgtgtaatcattat

SEQ ID NO: 440883 - DNA, 57 bp, Artificial
  Synthetic oligonucleotide
gtgctacgcgggacgtaagaagaccatatacgccaaggcagtctcgtcactagctga

SEQ ID NO: 440884 - DNA, 55 bp, Artificial
  Synthetic oligonucleotide
gtgctacggcaccgcatcttgatagggtcacagggttcaaccagattgattcaga

SEQ ID NO: 440885 - DNA, 57 bp, Artificial
  Synthetic oligonucleotide
gtgctacggttaaggccgcctgttggtgggcggggatcaagcaagaatttggcatac

SEQ ID NO: 440886 - DNA, 56 bp, Artificial
  Synthetic oligonucleotide
gtgctacgtttagtgcgctgtccactatgtgggatccgcttctaaacccgtttccc

SEQ ID NO: 440887 - DNA, 55 bp, Artificial
  Synthetic oligonucleotide
gtgctactagcttgtttaataccatagccatagcagtagctaagaggacagatag

SEQ ID NO: 440888 - DNA, 60 bp, Artificial
  Synthetic oligonucleotide
gtgctactggctctattgatgtctgatgacgttaccatctccggcactcgtcggtcagtg

SEQ ID NO: 440889 - DNA, 55 bp, Artificial
  Synthetic oligonucleotide
gtgctagaacgaaactagaatgcatcattgataaagaccttagatcagcagtgtc

SEQ ID NO: 440890 - DNA, 54 bp, Artificial
  Synthetic oligonucleotide
gtgctagaaggaagataagaactaatgaaataaggaacatttggtagctggttt

SEQ ID NO: 440891 - DNA, 59 bp, Artificial
  Synthetic oligonucleotide
gtgctagagcaaacaatagaccccccacaaaagtggtcgtacgcacaagcgtgcgcgtc

SEQ ID NO: 440892 - DNA, 55 bp, Artificial
  Synthetic oligonucleotide
gtgctagagcacgaagggtattaaaacgcaaagaacacgctaagtatgtgtctgg

SEQ ID NO: 440893 - DNA, 60 bp, Artificial
  Synthetic oligonucleotide
gtgctagagccagctgaaattgacaatgacggcaaagtgcttaaatctgaggtggcacaa

SEQ ID NO: 440894 - DNA, 52 bp, Artificial
  Synthetic oligonucleotide
gtgctagattaataggttgagaggaagtggctttatatccacgactatctgt

SEQ ID NO: 440895 - DNA, 60 bp, Artificial
  Synthetic oligonucleotide
gtgctagcaacgccagagattcctttcacaacagaagctgcgaacgagattgcgcgtgta

SEQ ID NO: 440896 - DNA, 60 bp, Artificial
  Synthetic oligonucleotide
gtgctagccaaatcaggagatcctacaaaatggcttgcagtccttacatgatatacaggc

SEQ ID NO: 440897 - DNA, 60 bp, Artificial
  Synthetic oligonucleotide
gtgctagcgacgccagaaatccctttcacgacggaggctgcgaatgagatcgcacgtgta

SEQ ID NO: 440898 - DNA, 55 bp, Artificial
  Synthetic oligonucleotide
gtgctaggagtgacgttaatgccatcactgttttaaatggcagtgattttcttac

SEQ ID NO: 440899 - DNA, 60 bp, Artificial
  Synthetic oligonucleotide
gtgctaggcaccacacccggatgtggtgcgtagcaccattttcatagcattaacctataa

SEQ ID NO: 440900 - DNA, 60 bp, Artificial
  Synthetic oligonucleotide
gtgctagggtgcaccatcgctttggtgctttcggtgcggtgccctttgctttgtctataa

SEQ ID NO: 440901 - DNA, 60 bp, Artificial
  Synthetic oligonucleotide
gtgctagtatggaggtttgacagccgcctagcatttcatcacttggcccgagagctgcat

SEQ ID NO: 440902 - DNA, 55 bp, Artificial
  Synthetic oligonucleotide
gtgctagttgtagattacgaggatggacctcttcacgtgtctattcgtgttaggc

SEQ ID NO: 440903 - DNA, 50 bp, Artificial
  Synthetic oligonucleotide
gtgctagtttcagagtacgggtgtcccccacttttgtggggcctccaaaa

SEQ ID NO: 440904 - DNA, 51 bp, Artificial
  Synthetic oligonucleotide
gtgctagtttcagggtacgggtgcccccccactttcgtgggggcctccaaa

SEQ ID NO: 440905 - DNA, 58 bp, Artificial
  Synthetic oligonucleotide
gtgctataaacaccagcctcccatttcagaatgtacatccagtcacaattggtgaatg

SEQ ID NO: 440906 - DNA, 60 bp, Artificial
  Synthetic oligonucleotide
gtgctataaactctatagctacaagctatggacatctgcgtaacttcgcaggtagagttt

SEQ ID NO: 440907 - DNA, 55 bp, Artificial
  Synthetic oligonucleotide
gtgctataacgggagttgatgtttgcaaactcctacgtactattatggttaagtc

SEQ ID NO: 440908 - DNA, 60 bp, Artificial
  Synthetic oligonucleotide
gtgctataaggataccagttggtgaatcgtaccacatctgtgttactgccattaccaccc

SEQ ID NO: 440909 - DNA, 57 bp, Artificial
  Synthetic oligonucleotide
gtgctataagtggactaaatagcataagtgtaactattcctgattggattcctatgg

SEQ ID NO: 440910 - DNA, 60 bp, Artificial
  Synthetic oligonucleotide
gtgctatatacggacgtatcccagtgggattcatctcaacacaatacgcagccatttagg

SEQ ID NO: 440911 - DNA, 60 bp, Artificial
  Synthetic oligonucleotide
gtgctatatgctgccccgcttagccctctactcccacttcaggatggtactaacactcac

SEQ ID NO: 440912 - DNA, 60 bp, Artificial
  Synthetic oligonucleotide
gtgctatatgctgctccacttagtcctctgctaccgctccaggatggcactaatacccac

SEQ ID NO: 440913 - DNA, 60 bp, Artificial
  Synthetic oligonucleotide
gtgctatcatttgcaaattgtagaagcaccttttggatgcaaccattaattgatactaag

SEQ ID NO: 440914 - DNA, 50 bp, Artificial
  Synthetic oligonucleotide
gtgctatccgccataccctagcacgtaacttaacatgctcgatcatcaat

SEQ ID NO: 440915 - DNA, 55 bp, Artificial
  Synthetic oligonucleotide
gtgctatcctgggaaattcacaaatgaggagtcattaaggcagatccttcgaagg

SEQ ID NO: 440916 - DNA, 55 bp, Artificial
  Synthetic oligonucleotide
gtgctatcggaccttgcatccggtgccgttgtactccgcgtgtgttgaccgcgca

SEQ ID NO: 440917 - DNA, 55 bp, Artificial
  Synthetic oligonucleotide
gtgctatcggctgccattttgtgctgctcctcaccgcagcccctgaaccatcccc

SEQ ID NO: 440918 - DNA, 54 bp, Artificial
  Synthetic oligonucleotide
gtgctatcgttgtccaaaagaaatcgtagagacggtgtctaaacttgtctacga

SEQ ID NO: 440919 - DNA, 60 bp, Artificial
  Synthetic oligonucleotide
gtgctatcttggattatgcctctgatattattgtagaatcaaaagaccagacaaaaatga

SEQ ID NO: 440920 - DNA, 60 bp, Artificial
  Synthetic oligonucleotide
gtgctatgactgttgatatggccagaggggcacaactagtctacgccatcccagatctca

SEQ ID NO: 440921 - DNA, 57 bp, Artificial
  Synthetic oligonucleotide
gtgctatgccaaaggatgcagtgtttttggactaccgtgagaatgactatggtcaat

SEQ ID NO: 440922 - DNA, 60 bp, Artificial
  Synthetic oligonucleotide
gtgctatgcgacaggtggatccaacattagctgccctaccagcggagcaacccattattg

SEQ ID NO: 440923 - DNA, 55 bp, Artificial
  Synthetic oligonucleotide
gtgctatggttagattactccatgtgttgaagtcaaagtttactgtgcccacagg

SEQ ID NO: 440924 - DNA, 56 bp, Artificial
  Synthetic oligonucleotide
gtgctatgtctcaagtaatcaaaggttctgaccttacagccctactttccgacctt

SEQ ID NO: 440925 - DNA, 60 bp, Artificial
  Synthetic oligonucleotide
gtgctatgttagacattggacataaatccatgacctatgctggttgccaaggtttaacag

SEQ ID NO: 440926 - DNA, 55 bp, Artificial
  Synthetic oligonucleotide
gtgctattaatgcaccagctaatatacaacagttcgagcatattgtgccactccg

SEQ ID NO: 440927 - DNA, 60 bp, Artificial
  Synthetic oligonucleotide
gtgctattcagcacgttattaatatgactccaaaggatctctttgacctatcaaggtggg

SEQ ID NO: 440928 - DNA, 55 bp, Artificial
  Synthetic oligonucleotide
gtgctattgaagaagtaggtgccttacagggcttaatagctgtagcgcaatctga

SEQ ID NO: 440929 - DNA, 60 bp, Artificial
  Synthetic oligonucleotide
gtgctattgcaagctgtgtcagcggtaattgggtgtctgatcacgtcttggaccggcgag

SEQ ID NO: 440930 - DNA, 60 bp, Artificial
  Synthetic oligonucleotide
gtgctcaacacatagaggagtgttcctgttaccctcaataccctgatgtcaggtgtgtct

SEQ ID NO: 440931 - DNA, 55 bp, Artificial
  Synthetic oligonucleotide
gtgctcaagaatagccactatgcaaactctttggtgattgtgccaaggaaggctc

SEQ ID NO: 440932 - DNA, 55 bp, Artificial
  Synthetic oligonucleotide
gtgctcaagatgctgtatctcaaaatgaaacggtccaacgcatagttgaacagct

SEQ ID NO: 440933 - DNA, 60 bp, Artificial
  Synthetic oligonucleotide
gtgctcaaggatgtagggactgtgggtatacaaacgtcaacatataggaatgatgttgga

SEQ ID NO: 440934 - DNA, 60 bp, Artificial
  Synthetic oligonucleotide
gtgctcactgcaagagaacaggtactttagcaggatcggcttgccaaccgtggtgtcatt

SEQ ID NO: 440935 - DNA, 60 bp, Artificial
  Synthetic oligonucleotide
gtgctcactgggagattgccagaggaacagacgaagagaattcgaagtactgttccaaag

SEQ ID NO: 440936 - DNA, 60 bp, Artificial
  Synthetic oligonucleotide
gtgctcactttgaatcctccggctcctgaatgtggctaaccttaaacctgcagccagtgc

SEQ ID NO: 440937 - DNA, 55 bp, Artificial
  Synthetic oligonucleotide
gtgctcagagtgtgactaaggccatttatgctaagttaacaacgttcacaactcg

SEQ ID NO: 440938 - DNA, 55 bp, Artificial
  Synthetic oligonucleotide
gtgctcagcatgtggaagagtgttcctgttaccctcgataccctgatgtcaggtg

SEQ ID NO: 440939 - DNA, 55 bp, Artificial
  Synthetic oligonucleotide
gtgctcaggacttgttggcgacacaccaagaaatgacgatagctccagcagcagt

SEQ ID NO: 440940 - DNA, 55 bp, Artificial
  Synthetic oligonucleotide
gtgctcaggacttgttggtgacacaccaaggaacgatgatagctttagcaacagc

SEQ ID NO: 440941 - DNA, 53 bp, Artificial
  Synthetic oligonucleotide
gtgctcatgttggatgagcacacgtcttgttaaggctgaggctcctcctcagc

SEQ ID NO: 440942 - DNA, 60 bp, Artificial
  Synthetic oligonucleotide
gtgctcatttagaggtatgcttatcggacttcgtgctgtcacgtcgtgcgaagtgagaaa

SEQ ID NO: 440943 - DNA, 60 bp, Artificial
  Synthetic oligonucleotide
gtgctcatttcacttactgctgtcaagaagttaactgccatcaaacttacatatggttat

SEQ ID NO: 440944 - DNA, 60 bp, Artificial
  Synthetic oligonucleotide
gtgctccaagactggttatagaggagttgatggagaagaactggggccaatatcatgccc

SEQ ID NO: 440945 - DNA, 60 bp, Artificial
  Synthetic oligonucleotide
gtgctccactatgttcagttaagtgttggttcactaagtctggagaatggctgcttggga

SEQ ID NO: 440946 - DNA, 55 bp, Artificial
  Synthetic oligonucleotide
gtgctccagtaccctgacgagttttacactgtcgccgtcagcaagtatcccgctc

SEQ ID NO: 440947 - DNA, 60 bp, Artificial
  Synthetic oligonucleotide
gtgctccatgggattctgatgatgtgttcttctttcattgtatctcgcaccatcatgcaa

SEQ ID NO: 440948 - DNA, 55 bp, Artificial
  Synthetic oligonucleotide
gtgctcccacagggatggaaagggtcaccagcaatattccagtctagtatgacaa

SEQ ID NO: 440949 - DNA, 57 bp, Artificial
  Synthetic oligonucleotide
gtgctccccggtataatgtggaactgggtaggtatctgagaccggttgagcacccaa

SEQ ID NO: 440950 - DNA, 55 bp, Artificial
  Synthetic oligonucleotide
gtgctcccgggaggaattcattggaaaagtcaacagtaatgccgccctaggagcg

SEQ ID NO: 440951 - DNA, 50 bp, Artificial
  Synthetic oligonucleotide
gtgctcccgtctgaaccgcttgctgtctcaccgcttcggtgtcgtgtgcg

SEQ ID NO: 440952 - DNA, 52 bp, Artificial
  Synthetic oligonucleotide
gtgctccgtggttcaagggtgttaacccctgtgctgaaatcctcttgggtaa

SEQ ID NO: 440953 - DNA, 53 bp, Artificial
  Synthetic oligonucleotide
gtgctcgaacatcacagcttataaacggatataccacgacagttttgttgtaa

SEQ ID NO: 440954 - DNA, 55 bp, Artificial
  Synthetic oligonucleotide
gtgctcgaaggggcgaagtcacagttactcgagtttagaaacctgaacgctgatc

SEQ ID NO: 440955 - DNA, 55 bp, Artificial
  Synthetic oligonucleotide
gtgctcgaccaaagtcgttgtcagaaacggctcgatatacccatcggaacttttc

SEQ ID NO: 440956 - DNA, 55 bp, Artificial
  Synthetic oligonucleotide
gtgctcgcaaacgtgtcatacaacgtgaagcgtgtgaacgacgctgaatcatacg

SEQ ID NO: 440957 - DNA, 55 bp, Artificial
  Synthetic oligonucleotide
gtgctcgcaatctacttatcaagtcacgtttcacattcgtatagcgacggttggc

SEQ ID NO: 440958 - DNA, 50 bp, Artificial
  Synthetic oligonucleotide
gtgctcgcacttattcaggtcataacggttgataagctcccggcgatact

SEQ ID NO: 440959 - DNA, 52 bp, Artificial
  Synthetic oligonucleotide
gtgctcgcagtatcaccgcctaagtctgacggccaactaggcacaacccgcg

SEQ ID NO: 440960 - DNA, 58 bp, Artificial
  Synthetic oligonucleotide
gtgctcgggaggcgcttatgacataatcatttgtgacgaatgccactccacggatgcc

SEQ ID NO: 440961 - DNA, 58 bp, Artificial
  Synthetic oligonucleotide
gtgctcggtaataagaccttccggacgacggtggttgatggcgcccatcttgaagcga

SEQ ID NO: 440962 - DNA, 55 bp, Artificial
  Synthetic oligonucleotide
gtgctcgtgcaacgttataaccaaggtggtgggataggctttcattctgataatg

SEQ ID NO: 440963 - DNA, 51 bp, Artificial
  Synthetic oligonucleotide
gtgctcgtgtggcgttgtggcgagtgtggcaggttttttccagtctcaccg

SEQ ID NO: 440964 - DNA, 60 bp, Artificial
  Synthetic oligonucleotide
gtgctcgttgatttcctacacacgctgatgtctatgcgctcttggagccctgtggatata

SEQ ID NO: 440965 - DNA, 57 bp, Artificial
  Synthetic oligonucleotide
gtgctctaattgatgcggagattaaaatatcgaaggggatgggcatggtaccaccgt

SEQ ID NO: 440966 - DNA, 60 bp, Artificial
  Synthetic oligonucleotide
gtgctctagtggttggcgtgatctgcgcagctattctgcgccggcacgttggacccgggg

SEQ ID NO: 440967 - DNA, 50 bp, Artificial
  Synthetic oligonucleotide
gtgctctatgctagggaggagtgcacctggatattcaagccgcatgaggt

SEQ ID NO: 440968 - DNA, 55 bp, Artificial
  Synthetic oligonucleotide
gtgctctcactttgcaggaaaagcatcctttgcacgccactttctgcaaatcaac

SEQ ID NO: 440969 - DNA, 55 bp, Artificial
  Synthetic oligonucleotide
gtgctctcgaaaacgaaatccgtcattacggttattcgtggaaagattgaaactc

SEQ ID NO: 440970 - DNA, 59 bp, Artificial
  Synthetic oligonucleotide
gtgctctcgcgagcaaaaactcgctctcagacttggcgaaatccccgattattcccgcc

SEQ ID NO: 440971 - DNA, 60 bp, Artificial
  Synthetic oligonucleotide
gtgctctgcctgtagaaaccctccagttgaagaagacgcggattccgactcaagtgagga

SEQ ID NO: 440972 - DNA, 50 bp, Artificial
  Synthetic oligonucleotide
gtgctctggccttcgtccgtcgtcgctgacaagaccccgcggtacaagac

SEQ ID NO: 440973 - DNA, 56 bp, Artificial
  Synthetic oligonucleotide
gtgctctgtagtggtctctcatatcctcgttcggatgtacggaccactcgaagggt

SEQ ID NO: 440974 - DNA, 55 bp, Artificial
  Synthetic oligonucleotide
gtgctctgttgtcgctgggaaggtaaacgtaaacatgggagttaaaggttcacac

SEQ ID NO: 440975 - DNA, 55 bp, Artificial
  Synthetic oligonucleotide
gtgctcttactccaaaggagcaggattcatttcattggcaatcaggcagtaatgc

SEQ ID NO: 440976 - DNA, 58 bp, Artificial
  Synthetic oligonucleotide
gtgctcttcatcaaggttcaactggtttaagcgagtcagcgccatacatgggagtacc

SEQ ID NO: 440977 - DNA, 60 bp, Artificial
  Synthetic oligonucleotide
gtgctcttggagcccgatgccatgtccagagtaagcctgacgggggtgtttgacatgaat

SEQ ID NO: 440978 - DNA, 60 bp, Artificial
  Synthetic oligonucleotide
gtgctcttttgagccaagttgagacatggcagagtacgaggacgagtgtgttgtctcacc

SEQ ID NO: 440979 - DNA, 54 bp, Artificial
  Synthetic oligonucleotide
gtgctgaaaagcaaccagatactgggggatgcccaccattagagttaaaaaaca

SEQ ID NO: 440980 - DNA, 59 bp, Artificial
  Synthetic oligonucleotide
gtgctgaaacatcttttatagaaggtcatacacttgttggccctacgggtgaggctgac

SEQ ID NO: 440981 - DNA, 60 bp, Artificial
  Synthetic oligonucleotide
gtgctgaaatgctattaacaaagactgcaactgattacctgataggaaaagaccctgtcc

SEQ ID NO: 440982 - DNA, 58 bp, Artificial
  Synthetic oligonucleotide
gtgctgaaattggcttacactgctccaacctgtacgaggacgccccattctacacgta

SEQ ID NO: 440983 - DNA, 58 bp, Artificial
  Synthetic oligonucleotide
gtgctgaacagacgaagggaacgataaacgcaaataaatatcgattgttggagaagtg

SEQ ID NO: 440984 - DNA, 53 bp, Artificial
  Synthetic oligonucleotide
gtgctgaacgcccaccggttcccggcagggctcgccggtatcatcccggaaaa

SEQ ID NO: 440985 - DNA, 55 bp, Artificial
  Synthetic oligonucleotide
gtgctgaactctgccaagcagagagatgggccaaattgtgacaatgttcgaggct

SEQ ID NO: 440986 - DNA, 60 bp, Artificial
  Synthetic oligonucleotide
gtgctgaacttcaatccaactcgcatgtcacgaccttcggtggtaagctgttccagcaga

SEQ ID NO: 440987 - DNA, 58 bp, Artificial
  Synthetic oligonucleotide
gtgctgaagatattatgttactcaatatgtacgcatagtcttagaatttaacatacgt

SEQ ID NO: 440988 - DNA, 60 bp, Artificial
  Synthetic oligonucleotide
gtgctgaagattaccttgaaaaatctgacgatgagctccttgtcgcttttgagacgatgg

SEQ ID NO: 440989 - DNA, 56 bp, Artificial
  Synthetic oligonucleotide
gtgctgaccgggaaggggatatgaggtcgaaaaatcgattgttggtacaattgtac

SEQ ID NO: 440990 - DNA, 59 bp, Artificial
  Synthetic oligonucleotide
gtgctgacctggttggggataccaggtcgaagagtctgttattcgtgcattggaatttc

SEQ ID NO: 440991 - DNA, 55 bp, Artificial
  Synthetic oligonucleotide
gtgctgacctgtttggggataccaagtcgaagaaccgttggttcttacattggta

SEQ ID NO: 440992 - DNA, 60 bp, Artificial
  Synthetic oligonucleotide
gtgctgactatgttcaaccgattttgtctgcattcgctcggactctatctcgtgtgtcac

SEQ ID NO: 440993 - DNA, 55 bp, Artificial
  Synthetic oligonucleotide
gtgctgactctatatgaagagcatgggaactcagcccctttatacttacaaacag

SEQ ID NO: 440994 - DNA, 60 bp, Artificial
  Synthetic oligonucleotide
gtgctgagagatcttatctttgttgtaagatctaaccgaggacgcgtagcggaggagctt

SEQ ID NO: 440995 - DNA, 55 bp, Artificial
  Synthetic oligonucleotide
gtgctgagtcaataggaagtctatgtcaagaattagaatttaggggagaaagcat

SEQ ID NO: 440996 - DNA, 60 bp, Artificial
  Synthetic oligonucleotide
gtgctgatatatcgtgcacccgcactctagatcaactcgccgtcgtctgatcgctctcct

SEQ ID NO: 440997 - DNA, 57 bp, Artificial
  Synthetic oligonucleotide
gtgctgatgagtctagagtggttcttgaacctatggctaggaagttctactctcgag

SEQ ID NO: 440998 - DNA, 60 bp, Artificial
  Synthetic oligonucleotide
gtgctgatgtatccgaacacactcgttgaaataggtcccaagatgaatgatagatttaag

SEQ ID NO: 440999 - DNA, 55 bp, Artificial
  Synthetic oligonucleotide
gtgctgattcctgcaagactgtaagagcctctgacgtactgcctgcgataagtgc

SEQ ID NO: 441000 - DNA, 60 bp, Artificial
  Synthetic oligonucleotide
gtgctgcaatctattcgagaaattcttccctagcagctcatataggagaccggttggaat

SEQ ID NO: 441001 - DNA, 60 bp, Artificial
  Synthetic oligonucleotide
gtgctgcaatctatttgagaaattcttccctagtagttcatataggcggccagttggaat

SEQ ID NO: 441002 - DNA, 60 bp, Artificial
  Synthetic oligonucleotide
gtgctgcacaggtttcatgcgaaggtgactggtggtcagtatgctagtaatgagcagacg

SEQ ID NO: 441003 - DNA, 55 bp, Artificial
  Synthetic oligonucleotide
gtgctgcacatagtcgtaccgaggtatggcattggcacacgaggtgccgttggca

SEQ ID NO: 441004 - DNA, 60 bp, Artificial
  Synthetic oligonucleotide
gtgctgcacgactctgcggttgattctctgaatctccgggtgttgggtgaatgctactgg

SEQ ID NO: 441005 - DNA, 60 bp, Artificial
  Synthetic oligonucleotide
gtgctgcagtgaaaggagttgggacaatagcaatggagttaatcagaatgatcaagcgtg

SEQ ID NO: 441006 - DNA, 60 bp, Artificial
  Synthetic oligonucleotide
gtgctgcataggtttcaagccacgctcactggagggcagtacgcgtgcaaggaacaggtc

SEQ ID NO: 441007 - DNA, 60 bp, Artificial
  Synthetic oligonucleotide
gtgctgcatccgtttgtgtatacggttaccggtggtcagtatgcgtccaaggaacaggca

SEQ ID NO: 441008 - DNA, 55 bp, Artificial
  Synthetic oligonucleotide
gtgctgcatgcaactggactcgaggagagcgttgcgacctggaggacagggacag

SEQ ID NO: 441009 - DNA, 60 bp, Artificial
  Synthetic oligonucleotide
gtgctgccacactatagaacggaaggcttctttatggagtttacacgagcgaacgcagca

SEQ ID NO: 441010 - DNA, 55 bp, Artificial
  Synthetic oligonucleotide
gtgctgccaggattttccttttatgggcgtactggtagtcctaggcttagcgttg

SEQ ID NO: 441011 - DNA, 55 bp, Artificial
  Synthetic oligonucleotide
gtgctgcccaacttgataatagtaacactatagaccaccgtacccctttggatgc

SEQ ID NO: 441012 - DNA, 55 bp, Artificial
  Synthetic oligonucleotide
gtgctgccccttccttctttggagaattcacacggcggtctttccgtctctcaac

SEQ ID NO: 441013 - DNA, 60 bp, Artificial
  Synthetic oligonucleotide
gtgctgcccgaatgggtaggctctgtatgagtctacgcaatggggttccggtgagcgata

SEQ ID NO: 441014 - DNA, 60 bp, Artificial
  Synthetic oligonucleotide
gtgctgcgactggttcgcagtcacagatggctgttgtgacttcagtagatagtgtgacgg

SEQ ID NO: 441015 - DNA, 55 bp, Artificial
  Synthetic oligonucleotide
gtgctgcgccaatggcagaatttcaagacattgtcacccttagcaggccagttgt

SEQ ID NO: 441016 - DNA, 60 bp, Artificial
  Synthetic oligonucleotide
gtgctgctacacgtgcgcttgtcaagatcaaccacccatctgagtatatgataaacagta

SEQ ID NO: 441017 - DNA, 60 bp, Artificial
  Synthetic oligonucleotide
gtgctgctactatgctggtttctgctggttccttcgctgctgaacctaacgcagctacta

SEQ ID NO: 441018 - DNA, 55 bp, Artificial
  Synthetic oligonucleotide
gtgctgctatatttcaagactcaggaaagcaagagtattctatacttgaccaatc

SEQ ID NO: 441019 - DNA, 55 bp, Artificial
  Synthetic oligonucleotide
gtgctgctcgatgtcctattcttggacaggcgcactcgtcactccatgcgccgcg

SEQ ID NO: 441020 - DNA, 60 bp, Artificial
  Synthetic oligonucleotide
gtgctgctctgcagctgcattggagggtttcacgggaacgacatcatcacaccccatccg

SEQ ID NO: 441021 - DNA, 55 bp, Artificial
  Synthetic oligonucleotide
gtgctgctgaatttaaatacatggttgctaatggacttcatgcaccatatggacc

SEQ ID NO: 441022 - DNA, 60 bp, Artificial
  Synthetic oligonucleotide
gtgctggacgcgccagtcatcgcgtgtgaccatccacacatagactgcgcgttttacgag

SEQ ID NO: 441023 - DNA, 55 bp, Artificial
  Synthetic oligonucleotide
gtgctggagaagaatgtgactgtgactcattcagtcaatttactcgaaagcagcc

SEQ ID NO: 441024 - DNA, 57 bp, Artificial
  Synthetic oligonucleotide
gtgctggcgtagggtttttttataaatctcgccagataaatgagcaactatcaaata

SEQ ID NO: 441025 - DNA, 55 bp, Artificial
  Synthetic oligonucleotide
gtgctggcgttggcgactacataacagagcacggcgagttcctttccgatgtttt

SEQ ID NO: 441026 - DNA, 55 bp, Artificial
  Synthetic oligonucleotide
gtgctggctgggagtgaactcccgtagcacgtcgctggcagcagggttcatcaca

SEQ ID NO: 441027 - DNA, 60 bp, Artificial
  Synthetic oligonucleotide
gtgctggcttccagcctacctgacattctgtccgttgtcaagtgatggatcgtgcaattc

SEQ ID NO: 441028 - DNA, 55 bp, Artificial
  Synthetic oligonucleotide
gtgctgggaaggtagcatacaccttgcgaacggacccttgttcgctaccacgaac

SEQ ID NO: 441029 - DNA, 55 bp, Artificial
  Synthetic oligonucleotide
gtgctgggattgttcggggaaaactggcggaattgaacatagatagtgagaatgc

SEQ ID NO: 441030 - DNA, 59 bp, Artificial
  Synthetic oligonucleotide
gtgctgggtccaaatcacccccacgctgtcagccccgagcttcggagcagtcacggccc

SEQ ID NO: 441031 - DNA, 60 bp, Artificial
  Synthetic oligonucleotide
gtgctgggtggcgttaacccccactgtggcggcgcctagcgtcaatgctcctactgactc

SEQ ID NO: 441032 - DNA, 53 bp, Artificial
  Synthetic oligonucleotide
gtgctggtaaagggctagcttctttaggaaagggcgtacttaattgtattaag

SEQ ID NO: 441033 - DNA, 60 bp, Artificial
  Synthetic oligonucleotide
gtgctggtaatcatttaggactcaaagctcagtctcatgaatacgcaggtaattacgcat

SEQ ID NO: 441034 - DNA, 55 bp, Artificial
  Synthetic oligonucleotide
gtgctggtagaacaaccggtcgacgcgatcggaggcccagtggagatccagttcc

SEQ ID NO: 441035 - DNA, 60 bp, Artificial
  Synthetic oligonucleotide
gtgctggtagatgaggttgtgttactccactttgggcagttgtgtgctgtgatgtctaag

SEQ ID NO: 441036 - DNA, 60 bp, Artificial
  Synthetic oligonucleotide
gtgctggtgtggaagtttgacagcaagctagcattccatcacgtggcccgagagctgcat

SEQ ID NO: 441037 - DNA, 56 bp, Artificial
  Synthetic oligonucleotide
gtgctggttatgcctagtgtctgcacccccctattacgagggggttgcggtcctag

SEQ ID NO: 441038 - DNA, 55 bp, Artificial
  Synthetic oligonucleotide
gtgctggttccttaatgtcccagatttttacgactccaccccttctgttcagccc

SEQ ID NO: 441039 - DNA, 54 bp, Artificial
  Synthetic oligonucleotide
gtgctggtttcgtccccggtataccacttaattgtggtcgttcctgtgcttggt

SEQ ID NO: 441040 - DNA, 58 bp, Artificial
  Synthetic oligonucleotide
gtgctggtttggttagcatcattacaatgcccactacgggtacacagaacacggacgg

SEQ ID NO: 441041 - DNA, 53 bp, Artificial
  Synthetic oligonucleotide
gtgctgtactagaggtggcaccggaacctacccctccaacgcgggttagagtt

SEQ ID NO: 441042 - DNA, 60 bp, Artificial
  Synthetic oligonucleotide
gtgctgtagagactgggttattggagcgtatggtgtgcgggaggaattgctggaaggtgc

SEQ ID NO: 441043 - DNA, 55 bp, Artificial
  Synthetic oligonucleotide
gtgctgtcatgtctaaactgaaagctgtgcgagctatatgttttggggattcgga

SEQ ID NO: 441044 - DNA, 59 bp, Artificial
  Synthetic oligonucleotide
gtgctgtctcaacaactatgttgtcaacctttactgactcacaggggctttatccaacc

SEQ ID NO: 441045 - DNA, 60 bp, Artificial
  Synthetic oligonucleotide
gtgctgtgcgatcttcagttcattattgatgccgagtgacgacggctagggggaaattca

SEQ ID NO: 441046 - DNA, 55 bp, Artificial
  Synthetic oligonucleotide
gtgctgtgctagcatctctgcagaagactaccaaattcactgtggtggagtgtgg

SEQ ID NO: 441047 - DNA, 51 bp, Artificial
  Synthetic oligonucleotide
gtgctgtgtggcttgctgctcgtgctaactatcgtcagacatgtgtgaacc

SEQ ID NO: 441048 - DNA, 57 bp, Artificial
  Synthetic oligonucleotide
gtgctgtgttaggaacggcctgctgtcgtgtttcaaaattctgaaatacaggggatt

SEQ ID NO: 441049 - DNA, 58 bp, Artificial
  Synthetic oligonucleotide
gtgctgttaggcgagagggagtccgtgaaggtgaccgcagcgagttcaacggaacagg

SEQ ID NO: 441050 - DNA, 58 bp, Artificial
  Synthetic oligonucleotide
gtgctgttcactggacgagtcccaccagatttactgacggctactttcaagagtttgt

SEQ ID NO: 441051 - DNA, 53 bp, Artificial
  Synthetic oligonucleotide
gtgctgttggggggtggtaacgagacggaaggggtgggcttcaatgtgccggg

SEQ ID NO: 441052 - DNA, 55 bp, Artificial
  Synthetic oligonucleotide
gtgctgttgttcagctcactagcaacgatctgcccctcatcattaggagactcag

SEQ ID NO: 441053 - DNA, 55 bp, Artificial
  Synthetic oligonucleotide
gtgcttaataaggatgtcttatcgaaagtgaatgctgagatagaccaggctatcc

SEQ ID NO: 441054 - DNA, 60 bp, Artificial
  Synthetic oligonucleotide
gtgcttactttagcaatgtagtgtctggacagccggaggtatatcggacgccattttata

SEQ ID NO: 441055 - DNA, 55 bp, Artificial
  Synthetic oligonucleotide
gtgcttagcatcggcgtgcaatgatttctctgtgagaatgttgagagacacacct

SEQ ID NO: 441056 - DNA, 55 bp, Artificial
  Synthetic oligonucleotide
gtgcttagggacagtgctgtctggtccctattgttaattttagttggaggtttga

SEQ ID NO: 441057 - DNA, 54 bp, Artificial
  Synthetic oligonucleotide
gtgcttagggttaggacatgcatagaacgtagcagtataaagtagtacataggt

SEQ ID NO: 441058 - DNA, 60 bp, Artificial
  Synthetic oligonucleotide
gtgcttagtgtgagtcctccggcccctgaatgtggctaaccttaaccctgcagccattgc

SEQ ID NO: 441059 - DNA, 57 bp, Artificial
  Synthetic oligonucleotide
gtgcttagttgactatccatacagactctggcactacccctgcactgtcaactttac

SEQ ID NO: 441060 - DNA, 60 bp, Artificial
  Synthetic oligonucleotide
gtgcttatgacataataatttgtgacgagtgccactccacggatgccacatccatcttgg

SEQ ID NO: 441061 - DNA, 57 bp, Artificial
  Synthetic oligonucleotide
gtgcttattggacagagcttctaggtcgcccaaattggggaactttgctgtgtaaag

SEQ ID NO: 441062 - DNA, 59 bp, Artificial
  Synthetic oligonucleotide
gtgcttatttccgacccctgtagatgctcaccagttctaaatcgatgtagtagaagact

SEQ ID NO: 441063 - DNA, 60 bp, Artificial
  Synthetic oligonucleotide
gtgcttatttgcagcttgctttgtatagtgggtatgcgcggtccacacatttcaactgtg

SEQ ID NO: 441064 - DNA, 55 bp, Artificial
  Synthetic oligonucleotide
gtgcttccacagacagttggtatggtgtgtgccctaataacctcatgggcacctt

SEQ ID NO: 441065 - DNA, 60 bp, Artificial
  Synthetic oligonucleotide
gtgcttccagccgccaccttcactttcttggtgacatctctcacaaagccagtgcctctc

SEQ ID NO: 441066 - DNA, 60 bp, Artificial
  Synthetic oligonucleotide
gtgcttccattgccataccgtagtgctgctctcttcggtttattggatggagtttctatt

SEQ ID NO: 441067 - DNA, 56 bp, Artificial
  Synthetic oligonucleotide
gtgcttccctcccgcgctgaggtggttcctcttgttctcgagggccttccttcgtc

SEQ ID NO: 441068 - DNA, 60 bp, Artificial
  Synthetic oligonucleotide
gtgcttcctaaggaatgggtgcgaccggcagactttttatcatatcgatgtgagaacatc

SEQ ID NO: 441069 - DNA, 55 bp, Artificial
  Synthetic oligonucleotide
gtgcttcctgcgctaacgtgctatctggcaattgtgctttgtgtgtacctagccc

SEQ ID NO: 441070 - DNA, 60 bp, Artificial
  Synthetic oligonucleotide
gtgcttcgatgaatgtcaccatatcgagacttgcatattttgtaaacgtgtctacttctc

SEQ ID NO: 441071 - DNA, 60 bp, Artificial
  Synthetic oligonucleotide
gtgcttcggacatctgcaacagggagggtattcttttctactctgcgctccatcaattta

SEQ ID NO: 441072 - DNA, 54 bp, Artificial
  Synthetic oligonucleotide
gtgcttcgtgtcagcgtgcaacgacttttcagtcaggatgctcaaagacacacc

SEQ ID NO: 441073 - DNA, 60 bp, Artificial
  Synthetic oligonucleotide
gtgcttcgttgccatcgatggttcgtcgtatttcgccagtgcttcgaagcctgttctgct

SEQ ID NO: 441074 - DNA, 54 bp, Artificial
  Synthetic oligonucleotide
gtgcttctaaacgcctgagggtaagtacggagcacgaaagcttccttgggaaat

SEQ ID NO: 441075 - DNA, 58 bp, Artificial
  Synthetic oligonucleotide
gtgcttctataatagtggggtttccgccaattctagatctggtcaaagggaattagca

SEQ ID NO: 441076 - DNA, 55 bp, Artificial
  Synthetic oligonucleotide
gtgcttcttcttcatcccataacgcttaggttcatagttgcaaggtgcttgctca

SEQ ID NO: 441077 - DNA, 60 bp, Artificial
  Synthetic oligonucleotide
gtgcttcttcttgcaatagtcagccttgttaaaagtgatcagatttgcattggttaccat

SEQ ID NO: 441078 - DNA, 58 bp, Artificial
  Synthetic oligonucleotide
gtgcttgaaggctcaccttatctcctcagagctattttccgggatcttccccgcactt

SEQ ID NO: 441079 - DNA, 55 bp, Artificial
  Synthetic oligonucleotide
gtgcttgacacgagatgcacgaacgagcaccatatgtgccatgtcacaagtcgtg

SEQ ID NO: 441080 - DNA, 60 bp, Artificial
  Synthetic oligonucleotide
gtgcttgacgattatttcaccccactgcattagttagctaccttgctgccagtcataact

SEQ ID NO: 441081 - DNA, 55 bp, Artificial
  Synthetic oligonucleotide
gtgcttgaggtttagatttgcaaaacacaagcatctgtttgtgaatgtgtcctcc

SEQ ID NO: 441082 - DNA, 52 bp, Artificial
  Synthetic oligonucleotide
gtgcttgagtcggagaaacagacgctaggcgggcaactgtcgattaacggtg

SEQ ID NO: 441083 - DNA, 60 bp, Artificial
  Synthetic oligonucleotide
gtgcttgcagagtacaaggttccaggagagatcttggtgcctgtcaaagagatgctgtca

SEQ ID NO: 441084 - DNA, 60 bp, Artificial
  Synthetic oligonucleotide
gtgcttgcctgagattgtgattgaattgtattcggaggtgtatgatgtcctggtccaggt

SEQ ID NO: 441085 - DNA, 55 bp, Artificial
  Synthetic oligonucleotide
gtgcttgctccaattataaagaacgggtcctttattgtgagggtcagtggcttgc

SEQ ID NO: 441086 - DNA, 60 bp, Artificial
  Synthetic oligonucleotide
gtgcttgctgcgatgacacaagtaaacaccacggccgggtagctgtcaagcccgaattgc

SEQ ID NO: 441087 - DNA, 55 bp, Artificial
  Synthetic oligonucleotide
gtgcttggattgttgtcagcatactgatctaacatattgtcgaggttgtaccatg

SEQ ID NO: 441088 - DNA, 60 bp, Artificial
  Synthetic oligonucleotide
gtgcttggcgccaggaagaggtttctttggagtgaaccattgccttgctgctattcccgc

SEQ ID NO: 441089 - DNA, 60 bp, Artificial
  Synthetic oligonucleotide
gtgcttgtattctgacatttggtcgctcagattctgcggtctgagtcccttctctgctgg

SEQ ID NO: 441090 - DNA, 55 bp, Artificial
  Synthetic oligonucleotide
gtgcttgtggtggctccagtacctcctgaccagagtagaagcgctattgcacgtg

SEQ ID NO: 441091 - DNA, 60 bp, Artificial
  Synthetic oligonucleotide
gtgctttaaataatgcgggtccacgtcatcaatgacgttgaaccatgcatcattactgta

SEQ ID NO: 441092 - DNA, 59 bp, Artificial
  Synthetic oligonucleotide
gtgctttaacccttgcttttatgtggaattgatcagaggcaggccaaaagagagtagtg

SEQ ID NO: 441093 - DNA, 60 bp, Artificial
  Synthetic oligonucleotide
gtgctttacgtccctccattcctactggtcatggttgcactaattttgtcatgtatcagg

SEQ ID NO: 441094 - DNA, 55 bp, Artificial
  Synthetic oligonucleotide
gtgctttagatggaaacgaggtgtctgtggattgtaagcatagggtaccagtgca

SEQ ID NO: 441095 - DNA, 55 bp, Artificial
  Synthetic oligonucleotide
gtgctttcagcaattgctacccatatgacgtccctaactatgcattgctccggtc

SEQ ID NO: 441096 - DNA, 60 bp, Artificial
  Synthetic oligonucleotide
gtgctttcgagaccggagccttgaggttcatgatgtatttaacgccgatgtacaccgcaa

SEQ ID NO: 441097 - DNA, 50 bp, Artificial
  Synthetic oligonucleotide
gtgctttctgcggggacgatagtttgatatatctccctaaaggctgcgag

SEQ ID NO: 441098 - DNA, 60 bp, Artificial
  Synthetic oligonucleotide
gtgctttgcgaattgttgggcctataaaaggtaaagtgccacccactgagacatcagaca

SEQ ID NO: 441099 - DNA, 55 bp, Artificial
  Synthetic oligonucleotide
gtgctttgcgtaagggatttctctcgtacgggtacgatctacggaccagctacgg

SEQ ID NO: 441100 - DNA, 55 bp, Artificial
  Synthetic oligonucleotide
gtgctttgttgcttgtaatccagaagtgggtagcttttagcggtagtgtccctcc

SEQ ID NO: 441101 - DNA, 59 bp, Artificial
  Synthetic oligonucleotide
gtgcttttaatcgacgaatatactcttttgacgagtggtgaaatattattactgcagaa

SEQ ID NO: 441102 - DNA, 59 bp, Artificial
  Synthetic oligonucleotide
gtgcttttacactcacttgagaggttacagatacatccttcgcttttgtcgaacagact

SEQ ID NO: 441103 - DNA, 55 bp, Artificial
  Synthetic oligonucleotide
gtgcttttagagcacatgcgtccagtagtgttacacacctttaacccgaagaaag

SEQ ID NO: 441104 - DNA, 60 bp, Artificial
  Synthetic oligonucleotide
gtgcttttaggcaggtctgccacactactgtaccatggccaaatgcctcattggtgccta

SEQ ID NO: 441105 - DNA, 53 bp, Artificial
  Synthetic oligonucleotide
gtggaaaaagagcagtaggtacagttttagtaggacccacacctgtaaatatc

SEQ ID NO: 441106 - DNA, 58 bp, Artificial
  Synthetic oligonucleotide
gtggaaaagagattgacttataggtcaccattggatgttgccgcatttttaactcgaa

SEQ ID NO: 441107 - DNA, 55 bp, Artificial
  Synthetic oligonucleotide
gtggaaaagtctgctgctttcacaatgcttttaggatttgttacccaaagttgcc

SEQ ID NO: 441108 - DNA, 60 bp, Artificial
  Synthetic oligonucleotide
gtggaaaagtgcctcgcagcgctggagcatggccgctccttgcctaaaataaccaatgag

SEQ ID NO: 441109 - DNA, 56 bp, Artificial
  Synthetic oligonucleotide
gtggaaacagtactttctgatgtatggttgtacggcaagacttgcaaaagttttcg

SEQ ID NO: 441110 - DNA, 55 bp, Artificial
  Synthetic oligonucleotide
gtggaaacatcgaactcagacaatgggacatgttacccaggagatttcaccagtt

SEQ ID NO: 441111 - DNA, 52 bp, Artificial
  Synthetic oligonucleotide
gtggaaacatctagtccagacaatggaacgtgttacccaggagatttcatcg

SEQ ID NO: 441112 - DNA, 54 bp, Artificial
  Synthetic oligonucleotide
gtggaaaccaaacatgctggggtattgaagtctgatgaggctagtacatctaac

SEQ ID NO: 441113 - DNA, 55 bp, Artificial
  Synthetic oligonucleotide
gtggaaaccagttgtcaaattgaaagcgactgtacaagtttccatgacagggtgt

SEQ ID NO: 441114 - DNA, 58 bp, Artificial
  Synthetic oligonucleotide
gtggaaaccttcaacgggctggaggaactggcaagatgtcccattttgttcacatcat

SEQ ID NO: 441115 - DNA, 60 bp, Artificial
  Synthetic oligonucleotide
gtggaaactggggccacaaatccgctagtcccttctgatacagtgcaaaccagacatgtc

SEQ ID NO: 441116 - DNA, 55 bp, Artificial
  Synthetic oligonucleotide
gtggaaagattacttgtcctgattgcgtaactgacagtgaattatctcaaggaca

SEQ ID NO: 441117 - DNA, 58 bp, Artificial
  Synthetic oligonucleotide
gtggaaagcacgtttatgcaggaagacctcatcctagtccagccggataccgactggg

SEQ ID NO: 441118 - DNA, 54 bp, Artificial
  Synthetic oligonucleotide
gtggaaagcatatgatggtaagcgtttcagttgggcgttgtcacactacgggct

SEQ ID NO: 441119 - DNA, 60 bp, Artificial
  Synthetic oligonucleotide
gtggaaaggatactgcctacattgctggaaatcatgcatggaaaaaagccgacgatcaga

SEQ ID NO: 441120 - DNA, 59 bp, Artificial
  Synthetic oligonucleotide
gtggaaaggctgcctggggaccctgatatggttaggtacatcaataagtatggacaaga

SEQ ID NO: 441121 - DNA, 55 bp, Artificial
  Synthetic oligonucleotide
gtggaaagtgaatcaccggttgatccagctctttcaaacccaactatacggaagc

SEQ ID NO: 441122 - DNA, 55 bp, Artificial
  Synthetic oligonucleotide
gtggaaatccacccagacgggcgtacttttgttcagtgtgataaaggtccggctg

SEQ ID NO: 441123 - DNA, 55 bp, Artificial
  Synthetic oligonucleotide
gtggaaatccactcggagagaacagacaaatcacctccagaggaccccttcagcg

SEQ ID NO: 441124 - DNA, 55 bp, Artificial
  Synthetic oligonucleotide
gtggaaatctaatagcgccatggtatcgtttcgcactgagtagaggctttgggtc

SEQ ID NO: 441125 - DNA, 60 bp, Artificial
  Synthetic oligonucleotide
gtggaaattataggaacataagcaagaatgctattcttgtcagttatgcttttgtatcag

SEQ ID NO: 441126 - DNA, 55 bp, Artificial
  Synthetic oligonucleotide
gtggaaattctgggacagagcagtctcaggggactacagaggggatgggaagctc

SEQ ID NO: 441127 - DNA, 60 bp, Artificial
  Synthetic oligonucleotide
gtggaacaagcagagcatgttcagattcattctacaggagcatgagatggctgactaaaa

SEQ ID NO: 441128 - DNA, 53 bp, Artificial
  Synthetic oligonucleotide
gtggaacaagcagtgtgtacattgaagttttgcatttgacgcagggaacatgc

SEQ ID NO: 441129 - DNA, 54 bp, Artificial
  Synthetic oligonucleotide
gtggaacaataggttggggattggaggccaggttggactggccttccggtccaa

SEQ ID NO: 441130 - DNA, 58 bp, Artificial
  Synthetic oligonucleotide
gtggaacatactaatagcaccttttacctaacccgcgccacagaagtgcggcatagta

SEQ ID NO: 441131 - DNA, 60 bp, Artificial
  Synthetic oligonucleotide
gtggaacatagttcgtctcaagagtggagtggacgtcttccacatggcggctgagccgtg

SEQ ID NO: 441132 - DNA, 55 bp, Artificial
  Synthetic oligonucleotide
gtggaacatataaacaacagtgggggagggttggggctttgccctcattgtatta

SEQ ID NO: 441133 - DNA, 55 bp, Artificial
  Synthetic oligonucleotide
gtggaacatccatttggagacgggaataccaccagctaactgggccaagaaggga

SEQ ID NO: 441134 - DNA, 60 bp, Artificial
  Synthetic oligonucleotide
gtggaaccagcgcaacaagcgtatggtgtggtaacagtgtgtccacagtgtagttcacca

SEQ ID NO: 441135 - DNA, 55 bp, Artificial
  Synthetic oligonucleotide
gtggaaccattgcatacaaataagcagttggagttttaagtgcttgaacaccagc

SEQ ID NO: 441136 - DNA, 55 bp, Artificial
  Synthetic oligonucleotide
gtggaacgaacaaatgtccccaggatctgctcaaaagggaaaaggacagttgacc

SEQ ID NO: 441137 - DNA, 57 bp, Artificial
  Synthetic oligonucleotide
gtggaacggaaagcttgcccaagaacccacggaagaggatagcagtgacggaagaga

SEQ ID NO: 441138 - DNA, 59 bp, Artificial
  Synthetic oligonucleotide
gtggaacgtgttcatgcagaggtgaacatggactgtttagcgcctaagaccgaaggagt

SEQ ID NO: 441139 - DNA, 55 bp, Artificial
  Synthetic oligonucleotide
gtggaactccacggtattccaccgaactttacaagatcccagagtgaggggcctg

SEQ ID NO: 441140 - DNA, 59 bp, Artificial
  Synthetic oligonucleotide
gtggaactccccatgtgcttgcaatcgagcatgggcatggtggttgttaccggactcgc

SEQ ID NO: 441141 - DNA, 52 bp, Artificial
  Synthetic oligonucleotide
gtggaactggtgagcaactgagcaatgcatgtgagaggtttgaaagcattta

SEQ ID NO: 441142 - DNA, 58 bp, Artificial
  Synthetic oligonucleotide
gtggaactggtttacctagtgagttacatggagttccttgctgatttacaagccacca

SEQ ID NO: 441143 - DNA, 55 bp, Artificial
  Synthetic oligonucleotide
gtggaacttatgggacgcagcagcctcaagggactacagagagggtgggaagtcc

SEQ ID NO: 441144 - DNA, 55 bp, Artificial
  Synthetic oligonucleotide
gtggaacttctgggactcacggggtgggaagccctcaaatattggcggaatctcc

SEQ ID NO: 441145 - DNA, 55 bp, Artificial
  Synthetic oligonucleotide
gtggaactttgttagcgggatccaatacttggcgggcctgtcaaccctgccaggg

SEQ ID NO: 441146 - DNA, 55 bp, Artificial
  Synthetic oligonucleotide
gtggaagaaaaggaagtagaccaccaggacacgcagctaataatattcctgaacc

SEQ ID NO: 441147 - DNA, 54 bp, Artificial
  Synthetic oligonucleotide
gtggaagaactaagacaacatttgcttaaatgggggttcacaaccccagacaaa

SEQ ID NO: 441148 - DNA, 55 bp, Artificial
  Synthetic oligonucleotide
gtggaagaagcccaaccgtcattatttgaagtacgctctcgcgactgcaatcgcg

SEQ ID NO: 441149 - DNA, 59 bp, Artificial
  Synthetic oligonucleotide
gtggaagaaggctccatcggaaaagtatgcagggccttactggcaaagtctgtattcaa

SEQ ID NO: 441150 - DNA, 60 bp, Artificial
  Synthetic oligonucleotide
gtggaagaccactttctccgccaagtgcgaggaaatcgagcgcacaatctcactcaccgt

SEQ ID NO: 441151 - DNA, 51 bp, Artificial
  Synthetic oligonucleotide
gtggaagactttgaggagattgtaattttttagggtgcatttcactttgga

SEQ ID NO: 441152 - DNA, 54 bp, Artificial
  Synthetic oligonucleotide
gtggaagagtggaacagtccattttcaagttcttatggagggaaatcctttggt

SEQ ID NO: 441153 - DNA, 60 bp, Artificial
  Synthetic oligonucleotide
gtggaagatgaagcgaactattaaggaagatgcaatgtatcgcgacagaaagtttgattc

SEQ ID NO: 441154 - DNA, 55 bp, Artificial
  Synthetic oligonucleotide
gtggaagcaagtgttaggtattgtcacaaaattagttgccgtagtcacagccatc

SEQ ID NO: 441155 - DNA, 60 bp, Artificial
  Synthetic oligonucleotide
gtggaagctagttccaaatggcggccactaatcacaccaatgctaggacgactacaacca

SEQ ID NO: 441156 - DNA, 55 bp, Artificial
  Synthetic oligonucleotide
gtggaagctgatgcttaccttgcattgtgttgggaaatggatagcctaagtgaag

SEQ ID NO: 441157 - DNA, 60 bp, Artificial
  Synthetic oligonucleotide
gtggaagcttgtgggcatgttgcagctttaatgtgtcaaagcttatttccgtgcgggaaa

SEQ ID NO: 441158 - DNA, 55 bp, Artificial
  Synthetic oligonucleotide
gtggaaggagttactggagccgggcaaccaatgttgatattcgctcggccctcaa

SEQ ID NO: 441159 - DNA, 58 bp, Artificial
  Synthetic oligonucleotide
gtggaaggcccaaggaagacaaagtatggtggaccagtaatagtatagtatcgatgtg

SEQ ID NO: 441160 - DNA, 58 bp, Artificial
  Synthetic oligonucleotide
gtggaaggcgggcatcctatataaacgagagacaacacgtagcgcctccttctgtggg

SEQ ID NO: 441161 - DNA, 50 bp, Artificial
  Synthetic oligonucleotide
gtggaaggcgggtaggggggaccccagggtcaacctacggaaatccctga

SEQ ID NO: 441162 - DNA, 56 bp, Artificial
  Synthetic oligonucleotide
gtggaagggggctgtgtataagcggcgtaaacaggcgtataaggtagtacctgtga

SEQ ID NO: 441163 - DNA, 50 bp, Artificial
  Synthetic oligonucleotide
gtggaaggtccttcttgtacgttgtcaagcgtcaccccatagagaattga

SEQ ID NO: 441164 - DNA, 54 bp, Artificial
  Synthetic oligonucleotide
gtggaagtagatggagcacccgcaatttaggtcaattctccgcctccgtatggc

SEQ ID NO: 441165 - DNA, 54 bp, Artificial
  Synthetic oligonucleotide
gtggaagtagatggagcacccgcactgcagatcaatcctccgccgcctaatggc

SEQ ID NO: 441166 - DNA, 54 bp, Artificial
  Synthetic oligonucleotide
gtggaagtatatggagcacccgcaatgtagatcaatcctccgcctcctgattgc

SEQ ID NO: 441167 - DNA, 59 bp, Artificial
  Synthetic oligonucleotide
gtggaagtcccggaagaatcaaaactggaagcgctatcgcagtacccattccatagcac

SEQ ID NO: 441168 - DNA, 58 bp, Artificial
  Synthetic oligonucleotide
gtggaagtgaggcgagtgggggatttccactacgtgacgggcatgaccactgacaacc

SEQ ID NO: 441169 - DNA, 60 bp, Artificial
  Synthetic oligonucleotide
gtggaagtgcttcagtgaccctgtctgtgtgggtttagatgcctcccggtttgaccagca

SEQ ID NO: 441170 - DNA, 58 bp, Artificial
  Synthetic oligonucleotide
gtggaagtggggtgtttatacacaatgacgttgaggcatgggtggatcgttaccgcta

SEQ ID NO: 441171 - DNA, 60 bp, Artificial
  Synthetic oligonucleotide
gtggaagtttgacagtcgcctggcatacaagcacgtagcccgagagctgcatccggagtt

SEQ ID NO: 441172 - DNA, 60 bp, Artificial
  Synthetic oligonucleotide
gtggaatactgtctggaacatggcagtcatagcacattgctacgagttccgtgacctgag

SEQ ID NO: 441173 - DNA, 60 bp, Artificial
  Synthetic oligonucleotide
gtggaataggaaggttctacatacagatgtgcactgaactcaaactcagcgactatgaag

SEQ ID NO: 441174 - DNA, 57 bp, Artificial
  Synthetic oligonucleotide
gtggaatatagcagctacatggaacaattatttggtagatatagcgacgaaattgcg

SEQ ID NO: 441175 - DNA, 60 bp, Artificial
  Synthetic oligonucleotide
gtggaatatcacatcgttgcgatcaccatatactaatgcgaatttctttcaagattagag

SEQ ID NO: 441176 - DNA, 54 bp, Artificial
  Synthetic oligonucleotide
gtggaatcaacaaggaagagattgtgtattacgtcaatggcgatgacctattga

SEQ ID NO: 441177 - DNA, 50 bp, Artificial
  Synthetic oligonucleotide
gtggaatcagattacacagccttcgacgtctcacaggatcataccatatt

SEQ ID NO: 441178 - DNA, 55 bp, Artificial
  Synthetic oligonucleotide
gtggaatcccagtgctcttctctccctgtagttgaccctcagttggaatttgagg

SEQ ID NO: 441179 - DNA, 56 bp, Artificial
  Synthetic oligonucleotide
gtggaatcgaccacgtcaccttttcgcgtcgactgtgtcgtcaacaccctttcggc

SEQ ID NO: 441180 - DNA, 51 bp, Artificial
  Synthetic oligonucleotide
gtggaatcggcagatttaaatctgttatattccatttcatgtccggacgtc

SEQ ID NO: 441181 - DNA, 60 bp, Artificial
  Synthetic oligonucleotide
gtggaatcgggagattctacatacagatgtgcactgaactcaagctcagtgaccacgaag

SEQ ID NO: 441182 - DNA, 59 bp, Artificial
  Synthetic oligonucleotide
gtggaatctacccgtcattcatgtcccgtgtcatttacaagcactaccgtagcttaata

SEQ ID NO: 441183 - DNA, 55 bp, Artificial
  Synthetic oligonucleotide
gtggaatctcctactgtattggggtcgggagctaaaaattagtgctgttagtttg

SEQ ID NO: 441184 - DNA, 60 bp, Artificial
  Synthetic oligonucleotide
gtggaatcttctgccgagttcatggactgtgcagagggcttggtcgcatcggttcgtggt

SEQ ID NO: 441185 - DNA, 57 bp, Artificial
  Synthetic oligonucleotide
gtggaatctttcctggtccacaagatggtggatgatcttgagttacagaggggaact

SEQ ID NO: 441186 - DNA, 60 bp, Artificial
  Synthetic oligonucleotide
gtggaatgaacgtacctttctcccactgacatactgggttcttcagtatgtattctctga

SEQ ID NO: 441187 - DNA, 55 bp, Artificial
  Synthetic oligonucleotide
gtggaatgcagagcagacagaaaagtctaatcagttcaatgcacaagaagctcag

SEQ ID NO: 441188 - DNA, 54 bp, Artificial
  Synthetic oligonucleotide
gtggaatggggatctttgggtgcctatttatatcgagctcccaaatggcattat

SEQ ID NO: 441189 - DNA, 60 bp, Artificial
  Synthetic oligonucleotide
gtggaatgggtcgccggccaggagacatacaccagcacttccggtgagccgtgtcaagga

SEQ ID NO: 441190 - DNA, 60 bp, Artificial
  Synthetic oligonucleotide
gtggaatgttggagcattgtcgcgctactagtctgaccaagcacagatgtctattgccat

SEQ ID NO: 441191 - DNA, 60 bp, Artificial
  Synthetic oligonucleotide
gtggaatgtttggccgaggataatcggagcttggccttgatggatgcgaatttcacgcct

SEQ ID NO: 441192 - DNA, 54 bp, Artificial
  Synthetic oligonucleotide
gtggaattacccatattccgggtattttgggaagagtgttggcaaccgtgtata

SEQ ID NO: 441193 - DNA, 55 bp, Artificial
  Synthetic oligonucleotide
gtggaattagacgacccattaacactgaatactgacaagcagctaacgattgact

SEQ ID NO: 441194 - DNA, 55 bp, Artificial
  Synthetic oligonucleotide
gtggaattccactgccttccaccaaactctgcaggatcccagagtcaggggtctg

SEQ ID NO: 441195 - DNA, 60 bp, Artificial
  Synthetic oligonucleotide
gtggaattgatgagcaaactagaggtgccatgtaaaagtgtttccgaggagtgtgtccag

SEQ ID NO: 441196 - DNA, 59 bp, Artificial
  Synthetic oligonucleotide
gtggaatttagtccatggtgcaggtacacagaaaaggttctctccgcgaatctgccgga

SEQ ID NO: 441197 - DNA, 50 bp, Artificial
  Synthetic oligonucleotide
gtggaatttcatcagtggcatccaatacctggccgggttatccaccctac

SEQ ID NO: 441198 - DNA, 55 bp, Artificial
  Synthetic oligonucleotide
gtggacaaaatgttatcggttcacgctcaactactgcttggaggcccgttaggcc

SEQ ID NO: 441199 - DNA, 55 bp, Artificial
  Synthetic oligonucleotide
gtggacaaacgcctttgaagaaattctatgccttgttagcgattgccgcaactgg

SEQ ID NO: 441200 - DNA, 55 bp, Artificial
  Synthetic oligonucleotide
gtggacaaaggatccaaagaacactcaagaccacgttcgatcgttgtgcttattg

SEQ ID NO: 441201 - DNA, 55 bp, Artificial
  Synthetic oligonucleotide
gtggacaaccgacttttatgggaggccgcgtttaggacggtctttcctcagcgca

SEQ ID NO: 441202 - DNA, 55 bp, Artificial
  Synthetic oligonucleotide
gtggacaactatttgtttgaggcaatattcgcctacagattaggtgagaggctct

SEQ ID NO: 441203 - DNA, 56 bp, Artificial
  Synthetic oligonucleotide
gtggacaagtaacctaccaacaaggccttcacaaaatgtggtcacgtcaaacaaga

SEQ ID NO: 441204 - DNA, 58 bp, Artificial
  Synthetic oligonucleotide
gtggacacaataattgagagcaacgtcaccgttaccagctccgttgaactggttgaaa

SEQ ID NO: 441205 - DNA, 55 bp, Artificial
  Synthetic oligonucleotide
gtggacacagagcgcagagacccggcaccttcggggtaggtgccgggtctccgtt

SEQ ID NO: 441206 - DNA, 56 bp, Artificial
  Synthetic oligonucleotide
gtggacacccgaccctgagaacgtgctcgcgtacgtcccctacgaccaggagccac

SEQ ID NO: 441207 - DNA, 55 bp, Artificial
  Synthetic oligonucleotide
gtggacaccgcctcacccctgaaagcggctcaattcggggatgtgtggaaaggcg

SEQ ID NO: 441208 - DNA, 55 bp, Artificial
  Synthetic oligonucleotide
gtggacacctcagccctggatctttaccgccgagatctagctcaagtggtggagc

SEQ ID NO: 441209 - DNA, 60 bp, Artificial
  Synthetic oligonucleotide
gtggacagagtacacaatgggatcaggctgccattctctattcaaattacattgtaaata

SEQ ID NO: 441210 - DNA, 59 bp, Artificial
  Synthetic oligonucleotide
gtggacagatagagttatagaattaggacaaagactttgtagagctattttacacatac

SEQ ID NO: 441211 - DNA, 55 bp, Artificial
  Synthetic oligonucleotide
gtggacaggcatcgctgaatggaacccagaactcttaaatgagggaggggaggtg

SEQ ID NO: 441212 - DNA, 55 bp, Artificial
  Synthetic oligonucleotide
gtggacaggcgttgcagagtggaatccggagctcctgaatgagggaggggaagtg

SEQ ID NO: 441213 - DNA, 60 bp, Artificial
  Synthetic oligonucleotide
gtggacagtacagcctataaaattgccagacaaagacagttggactatcaatgatataca

SEQ ID NO: 441214 - DNA, 56 bp, Artificial
  Synthetic oligonucleotide
gtggacagtacagcctataaagctgccagaaaaagatagctggactgtcaatgaca

SEQ ID NO: 441215 - DNA, 60 bp, Artificial
  Synthetic oligonucleotide
gtggacagtatgccagcaacgagcaggctatagtcaagaggttctggaaggtcaacaatt

SEQ ID NO: 441216 - DNA, 60 bp, Artificial
  Synthetic oligonucleotide
gtggacagtatgcgtctaaggaacaggcaatcgtcaagaagttctggaagttgaatcatc

SEQ ID NO: 441217 - DNA, 58 bp, Artificial
  Synthetic oligonucleotide
gtggacagttacgtacaaagaatcgtacgcatcgaaagaacacggatccaacaagtga

SEQ ID NO: 441218 - DNA, 55 bp, Artificial
  Synthetic oligonucleotide
gtggacatacccccgtttatcttgccagggttcaaccttccagaaagcactctta

SEQ ID NO: 441219 - DNA, 60 bp, Artificial
  Synthetic oligonucleotide
gtggacatagaccagctcatggctttcgtgtcggcgtccgttcatttgagccagtgtcac

SEQ ID NO: 441220 - DNA, 60 bp, Artificial
  Synthetic oligonucleotide
gtggacatgagagcgggacgtataatcgcgtgggatgggcaggcggtgctacaaattcac

SEQ ID NO: 441221 - DNA, 60 bp, Artificial
  Synthetic oligonucleotide
gtggacatgatatccagtgcaattcaacctctgactaaagtagactcaattaccactttt

SEQ ID NO: 441222 - DNA, 55 bp, Artificial
  Synthetic oligonucleotide
gtggacatggggcatcttaggctgttggatgttattgacttgtagtgtggtgggg

SEQ ID NO: 441223 - DNA, 55 bp, Artificial
  Synthetic oligonucleotide
gtggacatgtctcaatcacgcgagttcctaacgaaggcaattgagcaggggtcca

SEQ ID NO: 441224 - DNA, 57 bp, Artificial
  Synthetic oligonucleotide
gtggacatttaccaatatatggatgatctttacataggttcagatcttaatgaagag

SEQ ID NO: 441225 - DNA, 54 bp, Artificial
  Synthetic oligonucleotide
gtggaccaaatcctgaccggcttaatcgccgtcgggaacctactctaaagcatg

SEQ ID NO: 441226 - DNA, 60 bp, Artificial
  Synthetic oligonucleotide
gtggaccaaattccgcggctagcatctctatcggaacgctgactggcttgtcgcgagtcc

SEQ ID NO: 441227 - DNA, 57 bp, Artificial
  Synthetic oligonucleotide
gtggaccagtataaagttgacatggagataatgtgtccaaattgttatgattcagtc

SEQ ID NO: 441228 - DNA, 60 bp, Artificial
  Synthetic oligonucleotide
gtggaccataatctcacgtcgtattccgcaagcgctctgctaatgaattttcagtggctt

SEQ ID NO: 441229 - DNA, 55 bp, Artificial
  Synthetic oligonucleotide
gtggacccaagctatgagagcttactcgacacaatgcaagagaattttaaggagc

SEQ ID NO: 441230 - DNA, 60 bp, Artificial
  Synthetic oligonucleotide
gtggacccaatacttcatagcgcggatggaagctgcgctacaagtatgggtcccgagcct

SEQ ID NO: 441231 - DNA, 51 bp, Artificial
  Synthetic oligonucleotide
gtggacccacttacgggagccacattagacgacaatccgttcacggacatc

SEQ ID NO: 441232 - DNA, 60 bp, Artificial
  Synthetic oligonucleotide
gtggacccagatgaagttaacaagagcacattacaaggtagacgggcggctgtgtcaaca

SEQ ID NO: 441233 - DNA, 55 bp, Artificial
  Synthetic oligonucleotide
gtggacccgctcgcaactacgaccacaattcaagacccactgcgtactctgcgaa

SEQ ID NO: 441234 - DNA, 55 bp, Artificial
  Synthetic oligonucleotide
gtggaccctgacacaggtaggaacttaggggaattcaagctttatccagatggct

SEQ ID NO: 441235 - DNA, 56 bp, Artificial
  Synthetic oligonucleotide
gtggaccgtttatgcccagagaccaggaagccaactcttgggacataaccgcaggt

SEQ ID NO: 441236 - DNA, 55 bp, Artificial
  Synthetic oligonucleotide
gtggacctatacattttcagagacgagcgattctgggagcgttaaagttcggctg

SEQ ID NO: 441237 - DNA, 51 bp, Artificial
  Synthetic oligonucleotide
gtggacgaaaaaaaaaggttccatgaaatagcgggacgttggacggggcaa

SEQ ID NO: 441238 - DNA, 58 bp, Artificial
  Synthetic oligonucleotide
gtggacgagcaacagcttagttgcactatgtggaagcccagtcccagttgggtccggt

SEQ ID NO: 441239 - DNA, 57 bp, Artificial
  Synthetic oligonucleotide
gtggacgagcttaagcgtgaactggctaccctgcgttccgctaacgtacgattgaac

SEQ ID NO: 441240 - DNA, 52 bp, Artificial
  Synthetic oligonucleotide
gtggacgatggaacggggccagaaaagaaggtttccgcgcatacttcccggc

SEQ ID NO: 441241 - DNA, 51 bp, Artificial
  Synthetic oligonucleotide
gtggacgatttagtccccgatgtagggtctacttatttgtgcatgcttcag

SEQ ID NO: 441242 - DNA, 55 bp, Artificial
  Synthetic oligonucleotide
gtggacgatttcaacaaacaattctacaagactcatctcaaagcaccacatacag

SEQ ID NO: 441243 - DNA, 55 bp, Artificial
  Synthetic oligonucleotide
gtggacgcccaaactacaagaattcaagatcatcccaaaagggagacagtgtaca

SEQ ID NO: 441244 - DNA, 55 bp, Artificial
  Synthetic oligonucleotide
gtggacgcctatggatccctggtcaggaccctcaccggagctgccaccttttcag

SEQ ID NO: 441245 - DNA, 59 bp, Artificial
  Synthetic oligonucleotide
gtggacgcggtggatggtcatactacgccgcttccagacccaccgtattgagtgtgaag

SEQ ID NO: 441246 - DNA, 57 bp, Artificial
  Synthetic oligonucleotide
gtggacggaccgaaatactcctgcatctctataaataccctagtcctgtgaaggtat

SEQ ID NO: 441247 - DNA, 51 bp, Artificial
  Synthetic oligonucleotide
gtggacggctaccgggctgagggttctaaggagaacgctaagggtccgtgg

SEQ ID NO: 441248 - DNA, 55 bp, Artificial
  Synthetic oligonucleotide
gtggacgggaattgttattcgcggatccaagagggtctgtactactatggaaagt

SEQ ID NO: 441249 - DNA, 58 bp, Artificial
  Synthetic oligonucleotide
gtggacggtatctatgaacggtacggcagaaacccagtatggcgatgcattggcttgt

SEQ ID NO: 441250 - DNA, 59 bp, Artificial
  Synthetic oligonucleotide
gtggacgtgcaatacctgtacggtgtagggtcagtgctcgtctccttcgcaatcaagtg

SEQ ID NO: 441251 - DNA, 57 bp, Artificial
  Synthetic oligonucleotide
gtggacgtgcagtacttatacggggtggggtcaagcattgcgtcctgggccattaag

SEQ ID NO: 441252 - DNA, 55 bp, Artificial
  Synthetic oligonucleotide
gtggacgttacaatagacccatgtttcgatagaccacaagtttccgtaggacgac

SEQ ID NO: 441253 - DNA, 58 bp, Artificial
  Synthetic oligonucleotide
gtggacgttacgcgaaaatctatgagcgatcacgacaaacgcatctataaacttttac

SEQ ID NO: 441254 - DNA, 55 bp, Artificial
  Synthetic oligonucleotide
gtggacgttatggtatctacaactactttggtattgcagcttacgacaacaaccc

SEQ ID NO: 441255 - DNA, 56 bp, Artificial
  Synthetic oligonucleotide
gtggacgttcgtcctcctacggatgcccaggtcggaccgcggggaggtggagatgc

SEQ ID NO: 441256 - DNA, 60 bp, Artificial
  Synthetic oligonucleotide
gtggactacacatttaatgtctactggagcagcttatggtagcaaggatatttacaaggg

SEQ ID NO: 441257 - DNA, 55 bp, Artificial
  Synthetic oligonucleotide
gtggactaccataggatggatggtgctgaacccacgtgttccttggggttctggg

SEQ ID NO: 441258 - DNA, 54 bp, Artificial
  Synthetic oligonucleotide
gtggactagcggttagaggagacccctcccttacaaatcgcagcaaacaacggg

SEQ ID NO: 441259 - DNA, 60 bp, Artificial
  Synthetic oligonucleotide
gtggactatattttatacgataattgactatattaatacaattgtgcaagcaatgactcc

SEQ ID NO: 441260 - DNA, 55 bp, Artificial
  Synthetic oligonucleotide
gtggactattggcatggtgcctagtcttcgttcccattattggtatgtgggcagt

SEQ ID NO: 441261 - DNA, 57 bp, Artificial
  Synthetic oligonucleotide
gtggactcccgaagaagatcagaaagcacgggaagcctttcgtcgttatcaagaaga

SEQ ID NO: 441262 - DNA, 54 bp, Artificial
  Synthetic oligonucleotide
gtggactccctagcggagccctatcggaaggttttcttggtgtcaagttttgac

SEQ ID NO: 441263 - DNA, 55 bp, Artificial
  Synthetic oligonucleotide
gtggactccgttggctacatttgtgtctacgaccctgtaaaacactctccatggg

SEQ ID NO: 441264 - DNA, 55 bp, Artificial
  Synthetic oligonucleotide
gtggactcgcggagaagcagcattgtggacctgtcaacccacttctcggtgcagc

SEQ ID NO: 441265 - DNA, 51 bp, Artificial
  Synthetic oligonucleotide
gtggactctggcccagatgatcccagcagagatcctctatatgactgggga

SEQ ID NO: 441266 - DNA, 57 bp, Artificial
  Synthetic oligonucleotide
gtggactcttaatgggccttctgtagcaaatggacttttaaatgaattgggcttgga

SEQ ID NO: 441267 - DNA, 60 bp, Artificial
  Synthetic oligonucleotide
gtggactcttcgcggtagtacccggcgctcgagctgcatgagtagcgggagcagtaggtt

SEQ ID NO: 441268 - DNA, 60 bp, Artificial
  Synthetic oligonucleotide
gtggactgcattggcgtccttggctgcttggacattaggatggtaattggcactcctcct

SEQ ID NO: 441269 - DNA, 55 bp, Artificial
  Synthetic oligonucleotide
gtggactgttctacttctctcatagatccatttgcagtattcctgcgaggggctt

SEQ ID NO: 441270 - DNA, 59 bp, Artificial
  Synthetic oligonucleotide
gtggacttaccggctgaagtgagtgaaaagatgtacatagctaaagaagggtattgcta

SEQ ID NO: 441271 - DNA, 55 bp, Artificial
  Synthetic oligonucleotide
gtggacttagtcccactcttctacttgatagtgctaattgttgtccccgcggtca

SEQ ID NO: 441272 - DNA, 55 bp, Artificial
  Synthetic oligonucleotide
gtggacttcagcaatggaaagagtgtggtcgcaactgacaagtgggaggtggacc

SEQ ID NO: 441273 - DNA, 55 bp, Artificial
  Synthetic oligonucleotide
gtggacttccgcgtacctgcgcaaatttgtaccccaggactaccacgcccacgag

SEQ ID NO: 441274 - DNA, 60 bp, Artificial
  Synthetic oligonucleotide
gtggacttgattgaggatttctggcaaaccacacagggtatgagccaaattgcagatgca

SEQ ID NO: 441275 - DNA, 55 bp, Artificial
  Synthetic oligonucleotide
gtggactttccatcctctttcgatgaggttgagttattgatgcatatcaggcagg

SEQ ID NO: 441276 - DNA, 56 bp, Artificial
  Synthetic oligonucleotide
gtggactttctctcaccgggggcatacccattaaacagtcatattacaaatgcttc

SEQ ID NO: 441277 - DNA, 53 bp, Artificial
  Synthetic oligonucleotide
gtggagaaaccaaatcccgctaacggaatctgttacccgggtagtctagacaa

SEQ ID NO: 441278 - DNA, 60 bp, Artificial
  Synthetic oligonucleotide
gtggagaaagatctttaaatccaggaagcatttgtgaatctccaacttcctcttgacaca

SEQ ID NO: 441279 - DNA, 56 bp, Artificial
  Synthetic oligonucleotide
gtggagaacctagagactaccatgaggtccccggtgttcacggacaactcctctcc

SEQ ID NO: 441280 - DNA, 59 bp, Artificial
  Synthetic oligonucleotide
gtggagacacacttctcacagttctcactcaggttactggaacgtggagtaagggtgag

SEQ ID NO: 441281 - DNA, 60 bp, Artificial
  Synthetic oligonucleotide
gtggagacacggctttccatatgctgcttgtgcactgtgcctagaactgcacgggcaaat

SEQ ID NO: 441282 - DNA, 60 bp, Artificial
  Synthetic oligonucleotide
gtggagacatgggctctgagacacccaggattcacggtgatagccctttttctagcacat

SEQ ID NO: 441283 - DNA, 55 bp, Artificial
  Synthetic oligonucleotide
gtggagactggtggcatactcgattactactccacagggatagtgaccatctggt

SEQ ID NO: 441284 - DNA, 60 bp, Artificial
  Synthetic oligonucleotide
gtggagagacctacagctcaaaatggcatctgctacccaggaactttgaatgaaatagga

SEQ ID NO: 441285 - DNA, 53 bp, Artificial
  Synthetic oligonucleotide
gtggagagagtcttctgtgtggagagaaacgggaagctcactcgcactccaca

SEQ ID NO: 441286 - DNA, 55 bp, Artificial
  Synthetic oligonucleotide
gtggagagcattgtgttcgtggaacatgcagcacattgagctgcttagacgctgt

SEQ ID NO: 441287 - DNA, 60 bp, Artificial
  Synthetic oligonucleotide
gtggagagccagacaacgtcagatcaattcgcttagtgagcggattcttagcacttgcct

SEQ ID NO: 441288 - DNA, 55 bp, Artificial
  Synthetic oligonucleotide
gtggagagcgatattggatcggcggcaatagatgggttgatacaaggcaccgtac

SEQ ID NO: 441289 - DNA, 55 bp, Artificial
  Synthetic oligonucleotide
gtggagaggaaacaatagaagaggccttcgaatggctaaacagaacagtagaagg

SEQ ID NO: 441290 - DNA, 60 bp, Artificial
  Synthetic oligonucleotide
gtggagaggagtgactgctgatactagggctttgagaagatttggattctccatggccgc

SEQ ID NO: 441291 - DNA, 59 bp, Artificial
  Synthetic oligonucleotide
gtggagataaggcaagtgggggacttccactacgtgacgggcatgactactgacaatct

SEQ ID NO: 441292 - DNA, 55 bp, Artificial
  Synthetic oligonucleotide
gtggagatacccggatatcgtaaagaaagacttgacatatgatccagcgtgggcg

SEQ ID NO: 441293 - DNA, 60 bp, Artificial
  Synthetic oligonucleotide
gtggagatccaacgctttccgcacgttgtggttgaaccggatctgtatgtgatacactcg

SEQ ID NO: 441294 - DNA, 60 bp, Artificial
  Synthetic oligonucleotide
gtggagatcgatattgcatctgatcggaaaagtccacgacgcttgcaacgactcgttttc

SEQ ID NO: 441295 - DNA, 60 bp, Artificial
  Synthetic oligonucleotide
gtggagatctatattgcatctgatcgggaaagtccaagacgcttgtaaggattcatcgtc

SEQ ID NO: 441296 - DNA, 60 bp, Artificial
  Synthetic oligonucleotide
gtggagatctatgttgcatctgatcggaaatgtccatgacgcctgtaatgattcgttgtc

SEQ ID NO: 441297 - DNA, 60 bp, Artificial
  Synthetic oligonucleotide
gtggagatctatgttgcatcttaacgggaacgtccatgacgcctgcagagattcgttgtc

SEQ ID NO: 441298 - DNA, 60 bp, Artificial
  Synthetic oligonucleotide
gtggagatctatgttgcatcttatcgggaaagtccacgacgcctgtaacgactcatcgtc

SEQ ID NO: 441299 - DNA, 59 bp, Artificial
  Synthetic oligonucleotide
gtggagattcgtaatgaatatcataatctggttgataaaatagcatctgccttagaagg

SEQ ID NO: 441300 - DNA, 52 bp, Artificial
  Synthetic oligonucleotide
gtggagattgagaataggggcaaagtgaagttgggtaagcgtgaattcgcct

SEQ ID NO: 441301 - DNA, 60 bp, Artificial
  Synthetic oligonucleotide
gtggagatttgacagccgcctagcatttcatcacatggcccgagagaaacatccggagta

SEQ ID NO: 441302 - DNA, 59 bp, Artificial
  Synthetic oligonucleotide
gtggagcacaaatcaccggacatgtcaaaaacggttctatgaggatcgttgggcctaga

SEQ ID NO: 441303 - DNA, 60 bp, Artificial
  Synthetic oligonucleotide
gtggagcatcaggcaatatcattcactctgtcaacatgaccagccaagtgttgataggcc

SEQ ID NO: 441304 - DNA, 55 bp, Artificial
  Synthetic oligonucleotide
gtggagcatcgattgtccgcagcatgcaacttcacgcgcggggaccgctgtgggt

SEQ ID NO: 441305 - DNA, 55 bp, Artificial
  Synthetic oligonucleotide
gtggagccaaccgaaccttgtttgatgcgcggtacaaacagtggtatccggacta

SEQ ID NO: 441306 - DNA, 55 bp, Artificial
  Synthetic oligonucleotide
gtggagccaagcccttaaattgtgcgtaacgtgacgattacagcagagacgcacc

SEQ ID NO: 441307 - DNA, 59 bp, Artificial
  Synthetic oligonucleotide
gtggagccacactaacaaggacctagacctggccctgtactatggctgccgcttcaggt

SEQ ID NO: 441308 - DNA, 57 bp, Artificial
  Synthetic oligonucleotide
gtggagcccactcccctatcaccctgggtgatcggggagcagggccagaattcaacc

SEQ ID NO: 441309 - DNA, 55 bp, Artificial
  Synthetic oligonucleotide
gtggagccccttttctatacagggctagctgaaagtctaggcctcaacaccgctg

SEQ ID NO: 441310 - DNA, 59 bp, Artificial
  Synthetic oligonucleotide
gtggagccgtgctagaggcagacatgattccagacgacgccaccgtccttgtgccttca

SEQ ID NO: 441311 - DNA, 55 bp, Artificial
  Synthetic oligonucleotide
gtggagcctcaaaattggagttttcgcaagatccaagcaaatttactgacccagt

SEQ ID NO: 441312 - DNA, 55 bp, Artificial
  Synthetic oligonucleotide
gtggagcgaacaaacattcccaggatctgctcaaaagggaaaaggacaatcgacc

SEQ ID NO: 441313 - DNA, 60 bp, Artificial
  Synthetic oligonucleotide
gtggagcgtgagcaatccgccaccgaagcctaccacctgcgcgctcttgatggtgccaca

SEQ ID NO: 441314 - DNA, 60 bp, Artificial
  Synthetic oligonucleotide
gtggagctcatgagaagaggagatctaccagtctggctatcttacaaagtcgcctcagaa

SEQ ID NO: 441315 - DNA, 55 bp, Artificial
  Synthetic oligonucleotide
gtggagctcgactagaaccctgcaacggtacaagccctgattgtgttacaagggc

SEQ ID NO: 441316 - DNA, 59 bp, Artificial
  Synthetic oligonucleotide
gtggagctcgtcagcgagacaggccgagtttagctcgatccaacccggggagcaggggc

SEQ ID NO: 441317 - DNA, 60 bp, Artificial
  Synthetic oligonucleotide
gtggagcttcaagattagatttttcacaggatcccagtaagttcactgatccagtcaaag

SEQ ID NO: 441318 - DNA, 55 bp, Artificial
  Synthetic oligonucleotide
gtggaggaaacaccagtcaacagagagcatctgcaggacagataagtgtgcaacc

SEQ ID NO: 441319 - DNA, 59 bp, Artificial
  Synthetic oligonucleotide
gtggaggaaacactaatcaacaaagggcatctgcgggccaaatcagcatacaacctacg

SEQ ID NO: 441320 - DNA, 55 bp, Artificial
  Synthetic oligonucleotide
gtggaggaaacactaatcaacagagagcatccgcgggccagatcagcgtgcaacc

SEQ ID NO: 441321 - DNA, 55 bp, Artificial
  Synthetic oligonucleotide
gtggaggaaataccaatcgacagagggcatccgcgggccaaatcagtgtgcaacc

SEQ ID NO: 441322 - DNA, 53 bp, Artificial
  Synthetic oligonucleotide
gtggaggaacatcgtcaaaccgttcccgttcttcggggacaactccaacctga

SEQ ID NO: 441323 - DNA, 55 bp, Artificial
  Synthetic oligonucleotide
gtggaggaacgtttgggacggaatggtgtggtactttatcaacactcccattctc

SEQ ID NO: 441324 - DNA, 55 bp, Artificial
  Synthetic oligonucleotide
gtggaggaagctgtcaattctatggaggcgtacagggtggaggtcaacacatcga

SEQ ID NO: 441325 - DNA, 54 bp, Artificial
  Synthetic oligonucleotide
gtggaggaaggttccattggaaaagtttgcagaaccttgttagcaaaatccgta

SEQ ID NO: 441326 - DNA, 58 bp, Artificial
  Synthetic oligonucleotide
gtggaggaaggttccattgggaaagtatgcaggaccttactagcaaagtctgtattca

SEQ ID NO: 441327 - DNA, 60 bp, Artificial
  Synthetic oligonucleotide
gtggaggaataacatggtagaacaaatgcatacagatataatcagtctatgggatcaaag

SEQ ID NO: 441328 - DNA, 55 bp, Artificial
  Synthetic oligonucleotide
gtggaggaatcgtataagaaagataggagtcagtacaacaggacaactttgctaa

SEQ ID NO: 441329 - DNA, 60 bp, Artificial
  Synthetic oligonucleotide
gtggaggaatgtggatatagtgacagagtgcgtcaaattacactagggaattcaaccatc

SEQ ID NO: 441330 - DNA, 55 bp, Artificial
  Synthetic oligonucleotide
gtggaggacagattagaagagttccccaatcaagttcaggtcggaaggttcagga

SEQ ID NO: 441331 - DNA, 54 bp, Artificial
  Synthetic oligonucleotide
gtggaggactatagggtgaataacccgaggggtccgaatgccttgtctaggaag

SEQ ID NO: 441332 - DNA, 59 bp, Artificial
  Synthetic oligonucleotide
gtggaggacttatgcccgggtatcgttgtggagattaagacgatggatccatctctttc

SEQ ID NO: 441333 - DNA, 59 bp, Artificial
  Synthetic oligonucleotide
gtggaggaggaatgcaattagtggtaatacattcctggacagtcgtccttacaatatcg

SEQ ID NO: 441334 - DNA, 60 bp, Artificial
  Synthetic oligonucleotide
gtggaggagtgttcttgttatcctcgataccctggtgtcaggtgtatctgcagagacaac

SEQ ID NO: 441335 - DNA, 55 bp, Artificial
  Synthetic oligonucleotide
gtggaggcaatacaacaccgctctcaatcaggtcctcaatgtgtgagatgtggag

SEQ ID NO: 441336 - DNA, 51 bp, Artificial
  Synthetic oligonucleotide
gtggaggcatcttaagatgtgtgcatggtccgataggacttctaactgctg

SEQ ID NO: 441337 - DNA, 60 bp, Artificial
  Synthetic oligonucleotide
gtggaggcatgttgacttggtcaatcggtgtctctcaaacctctctatgtatcggtgtat

SEQ ID NO: 441338 - DNA, 60 bp, Artificial
  Synthetic oligonucleotide
gtggaggcccatatccactcgtctggagaaagttattattggatgagtctagccaacacc

SEQ ID NO: 441339 - DNA, 60 bp, Artificial
  Synthetic oligonucleotide
gtggaggcctacgttgcaagcgattgggaaagtgaaagccgcttgagctgcgtcttcaag

SEQ ID NO: 441340 - DNA, 60 bp, Artificial
  Synthetic oligonucleotide
gtggagggagtcggacatcgacccgcgagtgcttgacatggtcatgccaacctcacttga

SEQ ID NO: 441341 - DNA, 55 bp, Artificial
  Synthetic oligonucleotide
gtggagggatccttaggtgccaacacggtgtgattggactggtaaccgctggtgg

SEQ ID NO: 441342 - DNA, 55 bp, Artificial
  Synthetic oligonucleotide
gtggagggattgtctactagctctcgactttagggaggatatcatccaacccttg

SEQ ID NO: 441343 - DNA, 55 bp, Artificial
  Synthetic oligonucleotide
gtggagggcctagagacaactatgaggtcccccgtgtttacggacaattccgctc

SEQ ID NO: 441344 - DNA, 58 bp, Artificial
  Synthetic oligonucleotide
gtggaggggaatttttctactgtaatacaacacaattgtttaatggtatgtggcatgc

SEQ ID NO: 441345 - DNA, 55 bp, Artificial
  Synthetic oligonucleotide
gtggaggggtgcgggattacgttgtgcaattgcttcctatgcgcaaatcaaagcc

SEQ ID NO: 441346 - DNA, 50 bp, Artificial
  Synthetic oligonucleotide
gtggaggggttcgtcggctagtttcacgttggggctcgagaggctggtga

SEQ ID NO: 441347 - DNA, 58 bp, Artificial
  Synthetic oligonucleotide
gtggaggtcattgtcatggctaacttcctgccgaaggaaggaatattctcggaagacc

SEQ ID NO: 441348 - DNA, 54 bp, Artificial
  Synthetic oligonucleotide
gtggaggtctcctgtctggattaggacaggggattggcgcttatgcacaaggca

SEQ ID NO: 441349 - DNA, 55 bp, Artificial
  Synthetic oligonucleotide
gtggaggtcttgaggcacattctgttctcggttctgcagggtccttatagtgacg

SEQ ID NO: 441350 - DNA, 55 bp, Artificial
  Synthetic oligonucleotide
gtggaggttggtgctactacgcagcagctcagaaagaggtcagcggtgtgaaagg

SEQ ID NO: 441351 - DNA, 60 bp, Artificial
  Synthetic oligonucleotide
gtggaggtttgacagtgccctagcacgaagacacatagcccgagaactgcatcctgagta

SEQ ID NO: 441352 - DNA, 55 bp, Artificial
  Synthetic oligonucleotide
gtggagtagatgtgtactacagggcttcagaagcgagtgacactttgctctgtga

SEQ ID NO: 441353 - DNA, 56 bp, Artificial
  Synthetic oligonucleotide
gtggagtagtaaggtatattgttgagagtataaatatgggacaaatgcatagtcgc

SEQ ID NO: 441354 - DNA, 54 bp, Artificial
  Synthetic oligonucleotide
gtggagtcaggctttctgtggtagcatctgacggagcagtatatttgctccagc

SEQ ID NO: 441355 - DNA, 55 bp, Artificial
  Synthetic oligonucleotide
gtggagtccatccctctggccatttagtcttatgaatccaaggcgcattcccgcg

SEQ ID NO: 441356 - DNA, 55 bp, Artificial
  Synthetic oligonucleotide
gtggagtcctcttctattagtcttgcgagaaagacacgtgtgtgcttatccaccg

SEQ ID NO: 441357 - DNA, 60 bp, Artificial
  Synthetic oligonucleotide
gtggagtcgacgttttctatagaccatcagaagcgagcgacacattgctctgtgacattg

SEQ ID NO: 441358 - DNA, 60 bp, Artificial
  Synthetic oligonucleotide
gtggagtctaatgttttggagatattagggatagcaattaatagatataatggattgact

SEQ ID NO: 441359 - DNA, 55 bp, Artificial
  Synthetic oligonucleotide
gtggagtctatccttcattgatgtctagagttgtttataaacattatcgcagcct

SEQ ID NO: 441360 - DNA, 55 bp, Artificial
  Synthetic oligonucleotide
gtggagtctcctacagtattggagtcaggagctaaagaatagtgctgtcaacttg

SEQ ID NO: 441361 - DNA, 55 bp, Artificial
  Synthetic oligonucleotide
gtggagtgcacgtcgtatgaagtcagacatcaagcaaaagaagaagccggttcgc

SEQ ID NO: 441362 - DNA, 54 bp, Artificial
  Synthetic oligonucleotide
gtggagtgcttcgagcatatcgaagtggtttgcagcgttgactcgaccgctgcg

SEQ ID NO: 441363 - DNA, 52 bp, Artificial
  Synthetic oligonucleotide
gtggagtggaactttccccattaacgcctacaccacgggcccctgtactccc

SEQ ID NO: 441364 - DNA, 60 bp, Artificial
  Synthetic oligonucleotide
gtggagtgtgatggaagcacgctaaatcccggcaagcacctttatgaccgcctcacctac

SEQ ID NO: 441365 - DNA, 60 bp, Artificial
  Synthetic oligonucleotide
gtggagtgtttggagacaatcccagaccagtggatggcaccggatcgtgtagtggaccaa

SEQ ID NO: 441366 - DNA, 57 bp, Artificial
  Synthetic oligonucleotide
gtggagttaatctcgtttttgccttctgacttctttccttccgtcagagatctccta

SEQ ID NO: 441367 - DNA, 52 bp, Artificial
  Synthetic oligonucleotide
gtggagttactctcgtttttgcctgctgacttttatccgtcggtgcgagacc

SEQ ID NO: 441368 - DNA, 57 bp, Artificial
  Synthetic oligonucleotide
gtggagttactctcgtttttgccttctgacttctttccatccgtacgagatcttcta

SEQ ID NO: 441369 - DNA, 59 bp, Artificial
  Synthetic oligonucleotide
gtggagttactctcttttttgcctgctgacttctttccttctattcgggatctgctcga

SEQ ID NO: 441370 - DNA, 58 bp, Artificial
  Synthetic oligonucleotide
gtggagttagtaagtcttgcaccggagatactttttgcgaagatagataatgtctagg

SEQ ID NO: 441371 - DNA, 54 bp, Artificial
  Synthetic oligonucleotide
gtggagtttgtaaggtaaacagctcgtgtatatttcagacgcctgtcataaaat

SEQ ID NO: 441372 - DNA, 54 bp, Artificial
  Synthetic oligonucleotide
gtggagtttttctgtctcttccagttaggacgaatacgctgtttcgtaggaaaa

SEQ ID NO: 441373 - DNA, 56 bp, Artificial
  Synthetic oligonucleotide
gtggataaactagttagttccggaatcaggaaggtgctgtttttagatgggataga

SEQ ID NO: 441374 - DNA, 55 bp, Artificial
  Synthetic oligonucleotide
gtggataacaagattggcaacgctaagtgttgtccatttatatgcggcaaagccg

SEQ ID NO: 441375 - DNA, 60 bp, Artificial
  Synthetic oligonucleotide
gtggataagagatatgctaatcacatatttacttatcatgctaatcaaagattcactatt

SEQ ID NO: 441376 - DNA, 60 bp, Artificial
  Synthetic oligonucleotide
gtggataagcacgaatggcctctgatctgtgcttggttggtgaagaatggttaccaatct

SEQ ID NO: 441377 - DNA, 54 bp, Artificial
  Synthetic oligonucleotide
gtggatacctctcaggcagtggacttgcatattgaactagaagagcaaacaatt

SEQ ID NO: 441378 - DNA, 60 bp, Artificial
  Synthetic oligonucleotide
gtggatacgattcaacagtgatcttgactatcaaattggttatgtatgtagtggagtgtt

SEQ ID NO: 441379 - DNA, 58 bp, Artificial
  Synthetic oligonucleotide
gtggatactacactcagtggtcagggtcattggaggttactttcatgttcaccgggtc

SEQ ID NO: 441380 - DNA, 52 bp, Artificial
  Synthetic oligonucleotide
gtggatagaacagaagccaaagaagggttaaaaagaggagaaataacacacc

SEQ ID NO: 441381 - DNA, 59 bp, Artificial
  Synthetic oligonucleotide
gtggatagcggcactgtgggttggtcttggccagacggtgctgagtttccatttaacat

SEQ ID NO: 441382 - DNA, 60 bp, Artificial
  Synthetic oligonucleotide
gtggataggatctactagagaagaatatgaaagtagtttagaagaaacacatcaatcagg

SEQ ID NO: 441383 - DNA, 55 bp, Artificial
  Synthetic oligonucleotide
gtggatagggtcttactacttgaggataaggaaatccgcgtcacgaagaaagccc

SEQ ID NO: 441384 - DNA, 59 bp, Artificial
  Synthetic oligonucleotide
gtggataggttctataggacctgcaaactagttgggatcaatatgagcaaaaagaagtc

SEQ ID NO: 441385 - DNA, 60 bp, Artificial
  Synthetic oligonucleotide
gtggatagtatcctcatgtgaatgaagatcttcatattctccatgatgcgatcgcatcat

SEQ ID NO: 441386 - DNA, 60 bp, Artificial
  Synthetic oligonucleotide
gtggatatatgcaaggcagcaatgggtctgaggattagctcttccttcagctttggaggc

SEQ ID NO: 441387 - DNA, 55 bp, Artificial
  Synthetic oligonucleotide
gtggatatcctgctttaatgcctctgtatgcatgcattcaatccgggcaggcttt

SEQ ID NO: 441388 - DNA, 60 bp, Artificial
  Synthetic oligonucleotide
gtggatatctcatgttccttggaggcgtcaaacccactcacatctcctatatcatgctca

SEQ ID NO: 441389 - DNA, 55 bp, Artificial
  Synthetic oligonucleotide
gtggatatgctttacccaaggcagaaactaatctcatcgttatccgcaaggtgcc

SEQ ID NO: 441390 - DNA, 60 bp, Artificial
  Synthetic oligonucleotide
gtggatatttagtaactgacaagtactctccagtaacaagtgagtactgtcacatgattg

SEQ ID NO: 441391 - DNA, 60 bp, Artificial
  Synthetic oligonucleotide
gtggatcaacgtcatcgatgacgttataccatgcctcgttagagtatgttttgttgttta

SEQ ID NO: 441392 - DNA, 59 bp, Artificial
  Synthetic oligonucleotide
gtggatcaagcgtacgcccatcgactgtttcttgttctgtcttcgcgttatccctatct

SEQ ID NO: 441393 - DNA, 55 bp, Artificial
  Synthetic oligonucleotide
gtggatcaatgcaacggagttctatggcaggctagtgagggcctaggacccgata

SEQ ID NO: 441394 - DNA, 56 bp, Artificial
  Synthetic oligonucleotide
gtggatcaattaggaaccgagacttttcgttgaggcccttgtataaagtacgcata

SEQ ID NO: 441395 - DNA, 60 bp, Artificial
  Synthetic oligonucleotide
gtggatcactgctggacttataatgccagattttaaagtggtgattcgctatccagccaa

SEQ ID NO: 441396 - DNA, 57 bp, Artificial
  Synthetic oligonucleotide
gtggatcataaccctcttgttacattttactctggtataattgtaaagtttgagcat

SEQ ID NO: 441397 - DNA, 55 bp, Artificial
  Synthetic oligonucleotide
gtggatcatcagaaattgggagactgtgaagattcaatggtctaaggaccctaca

SEQ ID NO: 441398 - DNA, 55 bp, Artificial
  Synthetic oligonucleotide
gtggatcatctggccatgaaatgggagaattaaccgcaaaagcccgtgaattagg

SEQ ID NO: 441399 - DNA, 59 bp, Artificial
  Synthetic oligonucleotide
gtggatccactcacaggagcaacgctggatgagagcccttttacggacatcaccctcgt

SEQ ID NO: 441400 - DNA, 60 bp, Artificial
  Synthetic oligonucleotide
gtggatccgaagattgtcgatctgccaaacacagaccctccaacgatgtatatttcgaag

SEQ ID NO: 441401 - DNA, 60 bp, Artificial
  Synthetic oligonucleotide
gtggatccggtccctggatcacacccagatgcttggtcaactacccatacaggctgtggc

SEQ ID NO: 441402 - DNA, 59 bp, Artificial
  Synthetic oligonucleotide
gtggatcctgcaaaaggggatcagccgatagtttctttagccgactgaattggctaaca

SEQ ID NO: 441403 - DNA, 57 bp, Artificial
  Synthetic oligonucleotide
gtggatcgcggaattcaataactcatccctcatacgtaagactcttacctactcggg

SEQ ID NO: 441404 - DNA, 60 bp, Artificial
  Synthetic oligonucleotide
gtggatcggaaaccccacttgactgcatctggtggtctacatacattcgacgagctcttc

SEQ ID NO: 441405 - DNA, 55 bp, Artificial
  Synthetic oligonucleotide
gtggatcgtaaaccccatttgggttcgagtggtagtcttcatacattcgacgaac

SEQ ID NO: 441406 - DNA, 57 bp, Artificial
  Synthetic oligonucleotide
gtggatcgtaaacctcaccttggaccctctgggggactgcctacatttgacgagcta

SEQ ID NO: 441407 - DNA, 60 bp, Artificial
  Synthetic oligonucleotide
gtggatcgtgagtcatgcaagggtgtttatgataacataagcaagaacgccctgttagtc

SEQ ID NO: 441408 - DNA, 60 bp, Artificial
  Synthetic oligonucleotide
gtggatctactgatgatagacaaaacacgtcatttgaccctaaacaagtgcagatgtttg

SEQ ID NO: 441409 - DNA, 60 bp, Artificial
  Synthetic oligonucleotide
gtggatctcagttggttgtaggaactccacgaagatccactgtatcagtcactgtaccta

SEQ ID NO: 441410 - DNA, 60 bp, Artificial
  Synthetic oligonucleotide
gtggatctgtacgacccgtccatatctcaagctcgacacccaagcgccaaacaccataca

SEQ ID NO: 441411 - DNA, 60 bp, Artificial
  Synthetic oligonucleotide
gtggatcttccataggggggagatgatatttgtgaaggcggtacgcattggtcaactcaa

SEQ ID NO: 441412 - DNA, 55 bp, Artificial
  Synthetic oligonucleotide
gtggatgaaaatgacgagagctcatctgactccgacttctgatttccgctgccca

SEQ ID NO: 441413 - DNA, 59 bp, Artificial
  Synthetic oligonucleotide
gtggatgaaccgcctcattgccttcgcgtctcggggcaatcacgtgtcgcccacacact

SEQ ID NO: 441414 - DNA, 60 bp, Artificial
  Synthetic oligonucleotide
gtggatgaaccgtctaattgcgttcgcatcgcgaggcaatcacgtatctccaacgcatta

SEQ ID NO: 441415 - DNA, 60 bp, Artificial
  Synthetic oligonucleotide
gtggatgaagcccaataaggagactggcaggttgaacatcaatgggcccacccgcacaaa

SEQ ID NO: 441416 - DNA, 55 bp, Artificial
  Synthetic oligonucleotide
gtggatgaaggacccagagagcagaacaaccctgcaagagcagtggcaaggccca

SEQ ID NO: 441417 - DNA, 55 bp, Artificial
  Synthetic oligonucleotide
gtggatgaatacaacattggagaacaactggctgtggaagacgacatgataggat

SEQ ID NO: 441418 - DNA, 55 bp, Artificial
  Synthetic oligonucleotide
gtggatgactgttggtgtgaccgggcctgattccaaggcagtagcagtagtccat

SEQ ID NO: 441419 - DNA, 55 bp, Artificial
  Synthetic oligonucleotide
gtggatgagttggccacattgattgcaatcttaagttattaccaacctgatctca

SEQ ID NO: 441420 - DNA, 60 bp, Artificial
  Synthetic oligonucleotide
gtggatgatacatgagtctgttcttcttaaataatggtaggaattgtgatatatggactg

SEQ ID NO: 441421 - DNA, 60 bp, Artificial
  Synthetic oligonucleotide
gtggatgatctaagagctgatacaataagctcacaaatagagcttgcagtcttgctttcc

SEQ ID NO: 441422 - DNA, 58 bp, Artificial
  Synthetic oligonucleotide
gtggatgatttcaacaacaagttctacagtttgcacctaaagatcccgtcgacagtgg

SEQ ID NO: 441423 - DNA, 56 bp, Artificial
  Synthetic oligonucleotide
gtggatgcaaacacctattcctccggtgtaacagtgggtcacaccacctccacgtt

SEQ ID NO: 441424 - DNA, 55 bp, Artificial
  Synthetic oligonucleotide
gtggatgcagccatgtttcacacaagagtcaacctctatcagagttgagaggagc

SEQ ID NO: 441425 - DNA, 54 bp, Artificial
  Synthetic oligonucleotide
gtggatgcataagaggcttgaaacctctgtcctctatgtaagtgaccctcattg

SEQ ID NO: 441426 - DNA, 55 bp, Artificial
  Synthetic oligonucleotide
gtggatgccaaaggaattggaaggtttaacaactagatacgtgataaatgctctc

SEQ ID NO: 441427 - DNA, 51 bp, Artificial
  Synthetic oligonucleotide
gtggatgctggtatgggatggaaattcggccaactgctcacggagacgaca

SEQ ID NO: 441428 - DNA, 55 bp, Artificial
  Synthetic oligonucleotide
gtggatggacaaatattgcctttatatggaggggtagcgggtatttctgaaccgt

SEQ ID NO: 441429 - DNA, 60 bp, Artificial
  Synthetic oligonucleotide
gtggatggagacgtcatcaatcccttccccgatggagagacaaagccagcgctatacgag

SEQ ID NO: 441430 - DNA, 55 bp, Artificial
  Synthetic oligonucleotide
gtggatggcaagtaccgaatggtgcgaaaccttcatcagagcatgtctaaagatc

SEQ ID NO: 441431 - DNA, 57 bp, Artificial
  Synthetic oligonucleotide
gtggatgggatcatatataagaaaaccttggaatcgtcaaggaaacaattacacttc

SEQ ID NO: 441432 - DNA, 55 bp, Artificial
  Synthetic oligonucleotide
gtggatgggctatatacacaaaagacaacagcatacgaattggctccaaaggaga

SEQ ID NO: 441433 - DNA, 60 bp, Artificial
  Synthetic oligonucleotide
gtggatggggtatgagctccacccagacaaatggacagtgcagcctatccaattgcctaa

SEQ ID NO: 441434 - DNA, 59 bp, Artificial
  Synthetic oligonucleotide
gtggatggtagtgagttctttgactctccaacgcttgacgtattttatgaaatgtccta

SEQ ID NO: 441435 - DNA, 54 bp, Artificial
  Synthetic oligonucleotide
gtggatggttatccaacacctgcggtcaaagatttccgaacccgtaacccacga

SEQ ID NO: 441436 - DNA, 57 bp, Artificial
  Synthetic oligonucleotide
gtggatgtacagtatttatacggggtggggtcaagcgtcgcatcctgggccattaag

SEQ ID NO: 441437 - DNA, 55 bp, Artificial
  Synthetic oligonucleotide
gtggatgtcatgtctgctatatttcagggccccatctctatggaagttccacccc

SEQ ID NO: 441438 - DNA, 60 bp, Artificial
  Synthetic oligonucleotide
gtggatgtcttggaggaatgctgctacgtattctgagtatgtgcgaatgcatgcagaggg

SEQ ID NO: 441439 - DNA, 53 bp, Artificial
  Synthetic oligonucleotide
gtggatgtgcagtacttgtatggcctgtcaccggccgtcactaagtacattgt

SEQ ID NO: 441440 - DNA, 55 bp, Artificial
  Synthetic oligonucleotide
gtggatgtgttgacaatcaaatgtccttggtatatgcttgacacgatcgagaagt

SEQ ID NO: 441441 - DNA, 56 bp, Artificial
  Synthetic oligonucleotide
gtggatgttccttcctgggggaccaaacatcccttggggatgttttggcatcacaa

SEQ ID NO: 441442 - DNA, 60 bp, Artificial
  Synthetic oligonucleotide
gtggatgtttcaacataaatccctcatgcttgtttgtacatacagtgctaaggagcgtga

SEQ ID NO: 441443 - DNA, 54 bp, Artificial
  Synthetic oligonucleotide
gtggattacctctatcgccttaaggacgagggtggaactaccatcggttggcgg

SEQ ID NO: 441444 - DNA, 55 bp, Artificial
  Synthetic oligonucleotide
gtggattacctttagtcagcacgagagatggcaacatagttggtattcatagtct

SEQ ID NO: 441445 - DNA, 55 bp, Artificial
  Synthetic oligonucleotide
gtggattacgtaaatcaaatcgtgcaagcaatgtctaagaggtccaggtcactag

SEQ ID NO: 441446 - DNA, 60 bp, Artificial
  Synthetic oligonucleotide
gtggattactggggtatatattatgtgcacgagcagcataagacatattatgaagtgttt

SEQ ID NO: 441447 - DNA, 60 bp, Artificial
  Synthetic oligonucleotide
gtggattcaaggtggaatagtacccgccagtctgacaatatgaccgctgtagcttgtcag

SEQ ID NO: 441448 - DNA, 53 bp, Artificial
  Synthetic oligonucleotide
gtggattcggacccatgaccacgagtcgcacgctatgcgattggccgggtcta

SEQ ID NO: 441449 - DNA, 55 bp, Artificial
  Synthetic oligonucleotide
gtggattgacaacgtggcttggaggcacctgggttgccattggaaagatcttagg

SEQ ID NO: 441450 - DNA, 55 bp, Artificial
  Synthetic oligonucleotide
gtggattgcccacagaagaaacgcaaatccgacaagaatttgaacgcttaaccga

SEQ ID NO: 441451 - DNA, 55 bp, Artificial
  Synthetic oligonucleotide
gtggattgctgtggactggtattatgcagaccctgatttagcggacatgcgagag

SEQ ID NO: 441452 - DNA, 55 bp, Artificial
  Synthetic oligonucleotide
gtggattggtgatgcgtacaatccgaggcatattcgctcgctggaactgtgtcgg

SEQ ID NO: 441453 - DNA, 58 bp, Artificial
  Synthetic oligonucleotide
gtggattgtaaggaatgccagaaagacgaagaacgtagaaggcgtttctatgtcagaa

SEQ ID NO: 441454 - DNA, 59 bp, Artificial
  Synthetic oligonucleotide
gtggatttctcctagtgaggcagttgccacactcaaaaatcttctaggagaacacgtcc

SEQ ID NO: 441455 - DNA, 56 bp, Artificial
  Synthetic oligonucleotide
gtggatttttcctgcgactcatggacatccaacatagttaagcaactctcaaaggt

SEQ ID NO: 441456 - DNA, 55 bp, Artificial
  Synthetic oligonucleotide
gtggcaaaacaccttgtggaacgtgttaccatggcatgtgaagaggagtacacac

SEQ ID NO: 441457 - DNA, 56 bp, Artificial
  Synthetic oligonucleotide
gtggcaaacgccacgattacttcacttcggccttaccttggcctcagaaaggtgac

SEQ ID NO: 441458 - DNA, 55 bp, Artificial
  Synthetic oligonucleotide
gtggcaacagaagatataaataggaccttcaaaccattgatagggccaaggcctc

SEQ ID NO: 441459 - DNA, 58 bp, Artificial
  Synthetic oligonucleotide
gtggcaacctaactttataagacgctgctacatcatagggtacttaccacttatattc

SEQ ID NO: 441460 - DNA, 53 bp, Artificial
  Synthetic oligonucleotide
gtggcaacctgacgttgttaaacactgtaagataacaggatggatgcccctca

SEQ ID NO: 441461 - DNA, 55 bp, Artificial
  Synthetic oligonucleotide
gtggcaacctttattccaagcgacaaagactggctgcggaccgattgtactctcc

SEQ ID NO: 441462 - DNA, 55 bp, Artificial
  Synthetic oligonucleotide
gtggcaactaacattatagaaaacggtgtcacgcttgacatagaggtggttgtag

SEQ ID NO: 441463 - DNA, 55 bp, Artificial
  Synthetic oligonucleotide
gtggcaactaccatcaattagaaaagatacttagttctggcaatgaggcagctcg

SEQ ID NO: 441464 - DNA, 55 bp, Artificial
  Synthetic oligonucleotide
gtggcaacttgggtaagtttggcttacgagttcggcttccagttctgctatgcgc

SEQ ID NO: 441465 - DNA, 55 bp, Artificial
  Synthetic oligonucleotide
gtggcaaggaggggcacatagccagaaattgcagggcccctaggaaaaggggatg

SEQ ID NO: 441466 - DNA, 55 bp, Artificial
  Synthetic oligonucleotide
gtggcaaggagtaggaaaaggaatctttgcacctcctattagaggaacaattcaa

SEQ ID NO: 441467 - DNA, 55 bp, Artificial
  Synthetic oligonucleotide
gtggcaaggcattacaatttagagatagaaataatggtgatcacttgtccttggc

SEQ ID NO: 441468 - DNA, 60 bp, Artificial
  Synthetic oligonucleotide
gtggcaataactgattggtcaggatatagcgggagttttgtccaacatccagagttaaca

SEQ ID NO: 441469 - DNA, 55 bp, Artificial
  Synthetic oligonucleotide
gtggcaatctgctgtgccactggagtgtttggcactgcctatctcgtgcctcgtc

SEQ ID NO: 441470 - DNA, 55 bp, Artificial
  Synthetic oligonucleotide
gtggcaatggcgccacaatcagttgaatggacggcgtttctagcgccaggaggac

SEQ ID NO: 441471 - DNA, 55 bp, Artificial
  Synthetic oligonucleotide
gtggcacaatggaagagacacatacaagcagtttgaggacaagatacgcagtgtt

SEQ ID NO: 441472 - DNA, 60 bp, Artificial
  Synthetic oligonucleotide
gtggcacacattgtgtctgtggtgcccgctatgatacttcagatagaatgaaacttcaca

SEQ ID NO: 441473 - DNA, 55 bp, Artificial
  Synthetic oligonucleotide
gtggcacacggcatgaggacaatcaatttaagcgagtggacacaaacatcactcg

SEQ ID NO: 441474 - DNA, 60 bp, Artificial
  Synthetic oligonucleotide
gtggcacattgccacactgtacacaaagcgtttttaatccttaggcaactcatttcctgc

SEQ ID NO: 441475 - DNA, 60 bp, Artificial
  Synthetic oligonucleotide
gtggcacctcactcatagatgtcctgcggacgtctgtgagttaatccgtggtgcgtatcc

SEQ ID NO: 441476 - DNA, 60 bp, Artificial
  Synthetic oligonucleotide
gtggcacgacgaactgatcacacgtgtgtagggtgcatttgcacgagtgtcttcgggtaa

SEQ ID NO: 441477 - DNA, 55 bp, Artificial
  Synthetic oligonucleotide
gtggcacgttacccatcgttgccccgccgatgtgtgtgagctcatacgtggggct

SEQ ID NO: 441478 - DNA, 50 bp, Artificial
  Synthetic oligonucleotide
gtggcactaataggagaaggcgtgagcataccgctaagttacataggcct

SEQ ID NO: 441479 - DNA, 57 bp, Artificial
  Synthetic oligonucleotide
gtggcactcatgccaacacgacaaaaacgagagaaacttcctttttgagtgttttga

SEQ ID NO: 441480 - DNA, 55 bp, Artificial
  Synthetic oligonucleotide
gtggcactcccccccctgtcgcgttcgctcgttcgctggctcgattgggggggtg

SEQ ID NO: 441481 - DNA, 55 bp, Artificial
  Synthetic oligonucleotide
gtggcagactacggtgttggggccgcttcgtgcgagtcgctcgcctggtgtgctt

SEQ ID NO: 441482 - DNA, 60 bp, Artificial
  Synthetic oligonucleotide
gtggcagagagcaggacgagcaatgtttgcccctcccatccaaggagcaataaggtgtga

SEQ ID NO: 441483 - DNA, 55 bp, Artificial
  Synthetic oligonucleotide
gtggcagaggctgtacaggtcgttgcagacacagtcaattactttactggcggcg

SEQ ID NO: 441484 - DNA, 55 bp, Artificial
  Synthetic oligonucleotide
gtggcagatattatgaacacgctccaatagagttgatttatgcatgcagatcagc

SEQ ID NO: 441485 - DNA, 54 bp, Artificial
  Synthetic oligonucleotide
gtggcagattctgcctcagctgtctggatgaggtccacaatttcagccacctgg

SEQ ID NO: 441486 - DNA, 51 bp, Artificial
  Synthetic oligonucleotide
gtggcagcaaccctcagaaaacttggggtgcccccattgagagcgtggaga

SEQ ID NO: 441487 - DNA, 60 bp, Artificial
  Synthetic oligonucleotide
gtggcaggaacaactcttatgccgcccttctctgtgacagcaagtcctgattcgcgccca

SEQ ID NO: 441488 - DNA, 54 bp, Artificial
  Synthetic oligonucleotide
gtggcaggaaccgtcagtctatcagtgtggtggttcgcccgcctgctacagggg

SEQ ID NO: 441489 - DNA, 55 bp, Artificial
  Synthetic oligonucleotide
gtggcaggagcaacatcagctgagttcatagaaatgctacactgcttacaaggtg

SEQ ID NO: 441490 - DNA, 55 bp, Artificial
  Synthetic oligonucleotide
gtggcaggaggtttacttctggcagcctacgtgatgagtggtagctcagcagacc

SEQ ID NO: 441491 - DNA, 60 bp, Artificial
  Synthetic oligonucleotide
gtggcaggagtggcatgagatacctagttttataatatatgcctgaccgaattaggtctg

SEQ ID NO: 441492 - DNA, 60 bp, Artificial
  Synthetic oligonucleotide
gtggcaggtgttctatacagtcgtggactatgtcaatcagataattcaggcaatgtccaa

SEQ ID NO: 441493 - DNA, 53 bp, Artificial
  Synthetic oligonucleotide
gtggcaggtttgtaacaaatcaaccattattgattaattgcttgtggccagtg

SEQ ID NO: 441494 - DNA, 55 bp, Artificial
  Synthetic oligonucleotide
gtggcagtcagcataatcgcaattctgaaagggattgtgaacatctggaagagcg

SEQ ID NO: 441495 - DNA, 60 bp, Artificial
  Synthetic oligonucleotide
gtggcagtccatgtggcaagtggatacttagaagcagaagtaattccagctgagactgga

SEQ ID NO: 441496 - DNA, 55 bp, Artificial
  Synthetic oligonucleotide
gtggcagtgcaagttaccctgggagcaacgcaaccaacgtgctccagttttggta

SEQ ID NO: 441497 - DNA, 50 bp, Artificial
  Synthetic oligonucleotide
gtggcagttgcatacgcaagccattgctgtgttgcaagtgtgcttatgat

SEQ ID NO: 441498 - DNA, 50 bp, Artificial
  Synthetic oligonucleotide
gtggcataaaacacatgcacaggtagatgcgaaaggcctgtatttcgtag

SEQ ID NO: 441499 - DNA, 55 bp, Artificial
  Synthetic oligonucleotide
gtggcataaccgacctgtacatacaccgttcttgggtggtatcaaccagttaggt

SEQ ID NO: 441500 - DNA, 55 bp, Artificial
  Synthetic oligonucleotide
gtggcatacatgttagaaagggaactggtccgcaaaaccagattcctaccggtag

SEQ ID NO: 441501 - DNA, 55 bp, Artificial
  Synthetic oligonucleotide
gtggcataccagcttacgtgcctgtggttataacagtaaatgacacaatcagctg

SEQ ID NO: 441502 - DNA, 55 bp, Artificial
  Synthetic oligonucleotide
gtggcatactcgtaaataagagggtgtaccccgtttgagctctcgttcaaaagtc

SEQ ID NO: 441503 - DNA, 55 bp, Artificial
  Synthetic oligonucleotide
gtggcatatcgaggtcactgccagcttcaatcatgcgtccacatccacggggcta

SEQ ID NO: 441504 - DNA, 59 bp, Artificial
  Synthetic oligonucleotide
gtggcatattgggtgacagaggaaggtaaaaacgtctgttactggtgcacaatacacaa

SEQ ID NO: 441505 - DNA, 60 bp, Artificial
  Synthetic oligonucleotide
gtggcatatttgtaaatatgggtgttcccccgaatagctctctcgctcaaaactcatatc

SEQ ID NO: 441506 - DNA, 55 bp, Artificial
  Synthetic oligonucleotide
gtggcatcgaagggttgggtaatctcgggggagccctccagtctctcctgggtag

SEQ ID NO: 441507 - DNA, 57 bp, Artificial
  Synthetic oligonucleotide
gtggcatctatgtacccgcgcagtattcagatattacaagcgctaggtgacaagaca

SEQ ID NO: 441508 - DNA, 53 bp, Artificial
  Synthetic oligonucleotide
gtggcatgagttttccgggttttcttttcccgatgcttggggtagtgccaaaa

SEQ ID NO: 441509 - DNA, 59 bp, Artificial
  Synthetic oligonucleotide
gtggcatgcagtttcgtttcatagttgccgggtcaggtgtgtttggtgggcgactggtc

SEQ ID NO: 441510 - DNA, 55 bp, Artificial
  Synthetic oligonucleotide
gtggcatgccccagtggcttatccgactgtaccacctagttagatcagcctggac

SEQ ID NO: 441511 - DNA, 55 bp, Artificial
  Synthetic oligonucleotide
gtggcattatacgagtatcaacaatgacacgagagtagcacttgaccccaaaccg

SEQ ID NO: 441512 - DNA, 53 bp, Artificial
  Synthetic oligonucleotide
gtggcattcactctcttggagatggcgccataggtgcggcaactgtactatca

SEQ ID NO: 441513 - DNA, 55 bp, Artificial
  Synthetic oligonucleotide
gtggcattcatggctttattgaccatgtgtattgataatgaaaggagtgacgcgg

SEQ ID NO: 441514 - DNA, 55 bp, Artificial
  Synthetic oligonucleotide
gtggcattgattcgcgtgagttgatcaatccaacaacatatggcattgggatgac

SEQ ID NO: 441515 - DNA, 55 bp, Artificial
  Synthetic oligonucleotide
gtggcattgcccagttgccgaatgcggcatgcaaagatattatggttctcctgac

SEQ ID NO: 441516 - DNA, 55 bp, Artificial
  Synthetic oligonucleotide
gtggcattgttaatcttcacttagaggagggactaactactgaacttgcccgcac

SEQ ID NO: 441517 - DNA, 55 bp, Artificial
  Synthetic oligonucleotide
gtggcatttctactttgatctgccaactcacgaactcttcagatggccacaagga

SEQ ID NO: 441518 - DNA, 55 bp, Artificial
  Synthetic oligonucleotide
gtggcattttcctctcagtgccctgctcctctcggagactgcacccagggactgt

SEQ ID NO: 441519 - DNA, 60 bp, Artificial
  Synthetic oligonucleotide
gtggcatttttgtaataagaatgggtactccagatgagttactccaattgagccttctca

SEQ ID NO: 441520 - DNA, 60 bp, Artificial
  Synthetic oligonucleotide
gtggcatttttgtaatttagaggtgtacaccaattgagctctctcaaacttgctgattca

SEQ ID NO: 441521 - DNA, 59 bp, Artificial
  Synthetic oligonucleotide
gtggccaaccctctacagttgttgataacacactcatggtcatactagcattcaattac

SEQ ID NO: 441522 - DNA, 55 bp, Artificial
  Synthetic oligonucleotide
gtggccaatgtgtttagacagacatacctaaacagagacggtgctgactgcctct

SEQ ID NO: 441523 - DNA, 53 bp, Artificial
  Synthetic oligonucleotide
gtggccaattggggaatcacctaaaggggtggaggaaagctccattgggaagg

SEQ ID NO: 441524 - DNA, 50 bp, Artificial
  Synthetic oligonucleotide
gtggccacattatctaacttcacgagatgccaccgctatagataagcctt

SEQ ID NO: 441525 - DNA, 55 bp, Artificial
  Synthetic oligonucleotide
gtggccaccggcactaacctggttctttatgccgcccctcttagtccgctcttac

SEQ ID NO: 441526 - DNA, 60 bp, Artificial
  Synthetic oligonucleotide
gtggccagtatgcaagtaaggagcaagcaatcgtcaggaaattcatgaaggtgaacaacc

SEQ ID NO: 441527 - DNA, 58 bp, Artificial
  Synthetic oligonucleotide
gtggccagtggatatgatttcgaaagagaagggtactctctagtcggaatagatcctt

SEQ ID NO: 441528 - DNA, 57 bp, Artificial
  Synthetic oligonucleotide
gtggccagtgggtatgacttccaaagagaagggtactctctagtcgggatagatccc

SEQ ID NO: 441529 - DNA, 56 bp, Artificial
  Synthetic oligonucleotide
gtggccatatctgcatttgtcaactgaagggttctcatacggtccagggtagcact

SEQ ID NO: 441530 - DNA, 60 bp, Artificial
  Synthetic oligonucleotide
gtggccatcgtgttaggcggggccaacgaaggtgctcgcactgcgctgtctgtggtgacg

SEQ ID NO: 441531 - DNA, 51 bp, Artificial
  Synthetic oligonucleotide
gtggccatctactcagcggagtggagtctcttacgccaaccacccaccgcg

SEQ ID NO: 441532 - DNA, 60 bp, Artificial
  Synthetic oligonucleotide
gtggccatggtattttcacaagaggactgcatgatcaaagcggttcgaggcgatctgaac

SEQ ID NO: 441533 - DNA, 60 bp, Artificial
  Synthetic oligonucleotide
gtggcccaaagtccatacaattccatgcatgtttcaatcagcatatgtcttgtgtaagat

SEQ ID NO: 441534 - DNA, 55 bp, Artificial
  Synthetic oligonucleotide
gtggcccaagtaactccgaaagtgtgccagccctgacggcagctgagaccggaca

SEQ ID NO: 441535 - DNA, 56 bp, Artificial
  Synthetic oligonucleotide
gtggcccagtgtattgcttcacccccagccctgtggtggtgggaacgaccgacaag

SEQ ID NO: 441536 - DNA, 55 bp, Artificial
  Synthetic oligonucleotide
gtggccccaatcttgctcaatttgtatctgcagacaacatccaacaggaggggca

SEQ ID NO: 441537 - DNA, 55 bp, Artificial
  Synthetic oligonucleotide
gtggccccatgtgggcctcatttccattttagctaacttaattcggtagtcttcg

SEQ ID NO: 441538 - DNA, 55 bp, Artificial
  Synthetic oligonucleotide
gtggcccctcattacaacaagtcatgagagaccagttgaaaccattcacagaacc

SEQ ID NO: 441539 - DNA, 54 bp, Artificial
  Synthetic oligonucleotide
gtggccccttttataaaacacaccgcgaccacgaagtgtccgtctgagccattt

SEQ ID NO: 441540 - DNA, 55 bp, Artificial
  Synthetic oligonucleotide
gtggcccgcctctcatgtgagaaagagcgggtacggatgggttatgtaccagggc

SEQ ID NO: 441541 - DNA, 50 bp, Artificial
  Synthetic oligonucleotide
gtggccgaacggaagtcggttaccatgggaagacagagaatccaagagat

SEQ ID NO: 441542 - DNA, 55 bp, Artificial
  Synthetic oligonucleotide
gtggccgaatccctctgaagaaatggagtagtggccccatgtgggtctcatctcc

SEQ ID NO: 441543 - DNA, 55 bp, Artificial
  Synthetic oligonucleotide
gtggccgatacctccgacaggggtgccggttggtgacttttatgtctgtggcagg

SEQ ID NO: 441544 - DNA, 60 bp, Artificial
  Synthetic oligonucleotide
gtggccgatcctgatgatgccgcccagggatccggacacaccaagtccattcttaatctt

SEQ ID NO: 441545 - DNA, 57 bp, Artificial
  Synthetic oligonucleotide
gtggccgcaacttcatgattcctggagagaagcccaacttccgctactttccccggc

SEQ ID NO: 441546 - DNA, 60 bp, Artificial
  Synthetic oligonucleotide
gtggccgcggagtgccataggccgccgaggcttaagtatcctcccgctctgcctgtgtgg

SEQ ID NO: 441547 - DNA, 54 bp, Artificial
  Synthetic oligonucleotide
gtggccgcgtcgtgtggcggcgttgttcttgtcgggttaatggtgctaactctg

SEQ ID NO: 441548 - DNA, 57 bp, Artificial
  Synthetic oligonucleotide
gtggccgcgtgtgattttatcatgcgcaatgcagacgacacaccaaacttcgtgcaa

SEQ ID NO: 441549 - DNA, 57 bp, Artificial
  Synthetic oligonucleotide
gtggccggccatcacatagtggacgacctggtccgtagactcggtgtggcggagggt

SEQ ID NO: 441550 - DNA, 51 bp, Artificial
  Synthetic oligonucleotide
gtggccgggctactgttacagtgcgtcccaacacttctaatggtgtttacg

SEQ ID NO: 441551 - DNA, 54 bp, Artificial
  Synthetic oligonucleotide
gtggccgtacgggctatataccccttggtacccggcctcctactgtggttgatg

SEQ ID NO: 441552 - DNA, 60 bp, Artificial
  Synthetic oligonucleotide
gtggccgtcatgggtgatatattaggcgcagtttatgatttagggcacagaccttaccta

SEQ ID NO: 441553 - DNA, 55 bp, Artificial
  Synthetic oligonucleotide
gtggcctaaggatgaatggtttagggacgctagacaaggaccctacctagaggat

SEQ ID NO: 441554 - DNA, 55 bp, Artificial
  Synthetic oligonucleotide
gtggcctcatcaggaaccttagagttcatcaccgaaggctttacgtggacaggag

SEQ ID NO: 441555 - DNA, 60 bp, Artificial
  Synthetic oligonucleotide
gtggcctcattatctgacacctcaggatgctacagctatagacaagccctcccgaccaga

SEQ ID NO: 441556 - DNA, 60 bp, Artificial
  Synthetic oligonucleotide
gtggcctggagcttttgataagcagccggtagcaactggtaaagcgcacctcgtcaagca

SEQ ID NO: 441557 - DNA, 53 bp, Artificial
  Synthetic oligonucleotide
gtggcctggcttgcccataataatcaggccaggtttgttagagaatgtgcatc

SEQ ID NO: 441558 - DNA, 55 bp, Artificial
  Synthetic oligonucleotide
gtggcctgtccgtcagatccaaccatttcggatcaggtccttcctcgctgggctc

SEQ ID NO: 441559 - DNA, 60 bp, Artificial
  Synthetic oligonucleotide
gtggccttatgtgcccttaacacctgctgacacaacccattatgtgtacatagatggtgg

SEQ ID NO: 441560 - DNA, 55 bp, Artificial
  Synthetic oligonucleotide
gtggccttgaccaccttttcccggatgtggtggcgcagaagaaattagattcggt

SEQ ID NO: 441561 - DNA, 55 bp, Artificial
  Synthetic oligonucleotide
gtggcctttggtacaaagttatcggctagaataacaacagtggagcccactcccc

SEQ ID NO: 441562 - DNA, 55 bp, Artificial
  Synthetic oligonucleotide
gtggcgaaagaactggccatttggagtatgcgcagcgtgcttgtgcagagaagct

SEQ ID NO: 441563 - DNA, 55 bp, Artificial
  Synthetic oligonucleotide
gtggcgaaagatgagtttaaccacggtcggtgttctttgacttttgtcgcagacg

SEQ ID NO: 441564 - DNA, 58 bp, Artificial
  Synthetic oligonucleotide
gtggcgaacccaatggaccaagtgtgtatagaaaaccatcaggcggtgtattccaatc

SEQ ID NO: 441565 - DNA, 54 bp, Artificial
  Synthetic oligonucleotide
gtggcgactatgactgacaaattctatcctagatttggtatagcatattatttt

SEQ ID NO: 441566 - DNA, 60 bp, Artificial
  Synthetic oligonucleotide
gtggcgagcaagacaacggcagatccgttcgattagtgagcggattcttgcctcttgcct

SEQ ID NO: 441567 - DNA, 55 bp, Artificial
  Synthetic oligonucleotide
gtggcgagcccttgaggccttttgggcgaagcacatgtggagcttcatcagcggg

SEQ ID NO: 441568 - DNA, 54 bp, Artificial
  Synthetic oligonucleotide
gtggcgaggcagatgttactaaattgtatctcggaggtatgtcatacttctgtg

SEQ ID NO: 441569 - DNA, 60 bp, Artificial
  Synthetic oligonucleotide
gtggcgatgaaaacccgcgaggcccagtgagccgtgaacatgtggagtggtgcagagaat

SEQ ID NO: 441570 - DNA, 55 bp, Artificial
  Synthetic oligonucleotide
gtggcgcacaatgcaaccacaccagatacaacagaacgcgccgtcacagtagtat

SEQ ID NO: 441571 - DNA, 55 bp, Artificial
  Synthetic oligonucleotide
gtggcgcagggaggcagaaataaaactcagggagttagaaaatctcgtggactcg

SEQ ID NO: 441572 - DNA, 60 bp, Artificial
  Synthetic oligonucleotide
gtggcgcatctggcatcagaaggttgagggcagtccggcttacgacgacgtgtggcagca

SEQ ID NO: 441573 - DNA, 50 bp, Artificial
  Synthetic oligonucleotide
gtggcgccagtaggtgctaggtacgcgcttcagttccgaccgagttggtt

SEQ ID NO: 441574 - DNA, 60 bp, Artificial
  Synthetic oligonucleotide
gtggcgccattctgcgtcgacagtataatctgtctacgtctccactcacgtcatctgtcg

SEQ ID NO: 441575 - DNA, 57 bp, Artificial
  Synthetic oligonucleotide
gtggcgcccgaacaggggactcgaaagcgaaagtagaaccagagaagctctctcgac

SEQ ID NO: 441576 - DNA, 55 bp, Artificial
  Synthetic oligonucleotide
gtggcgccctctgaggtttcgtctgaggtcagtatcgagatcgggacggagtcgg

SEQ ID NO: 441577 - DNA, 57 bp, Artificial
  Synthetic oligonucleotide
gtggcgccgtttcattgcattttgccggggttacattatccacgcaatttactgact

SEQ ID NO: 441578 - DNA, 59 bp, Artificial
  Synthetic oligonucleotide
gtggcgcgacatacgcagtactattgaagtttcgcgagcagtgcttaagtaaaacccaa

SEQ ID NO: 441579 - DNA, 58 bp, Artificial
  Synthetic oligonucleotide
gtggcgcgagctacggcatattttaccgcaccgaccggagatccgcattggaaggaag

SEQ ID NO: 441580 - DNA, 57 bp, Artificial
  Synthetic oligonucleotide
gtggcgcgctggtgaccattggataccgctctccctggtggtccccctcccaaggtg

SEQ ID NO: 441581 - DNA, 60 bp, Artificial
  Synthetic oligonucleotide
gtggcgcgtgagttttgtcagttagggttcggtgcctgctctcaccagtgtgaggtgggc

SEQ ID NO: 441582 - DNA, 55 bp, Artificial
  Synthetic oligonucleotide
gtggcgctagaagtccgtgttaggcgtcaaccaccagagggttgcctcggtcgga

SEQ ID NO: 441583 - DNA, 58 bp, Artificial
  Synthetic oligonucleotide
gtggcgctattttgcgccggcagtacaatttgtctacttccccgcttacgtcatctgt

SEQ ID NO: 441584 - DNA, 55 bp, Artificial
  Synthetic oligonucleotide
gtggcggaaacctttgggcttggcgttgccctcagtctcatgcaacatttcgggg

SEQ ID NO: 441585 - DNA, 51 bp, Artificial
  Synthetic oligonucleotide
gtggcggaacgaacatacccgcctacttcccttttactttctcgaaacgaa

SEQ ID NO: 441586 - DNA, 51 bp, Artificial
  Synthetic oligonucleotide
gtggcggactggtcagagtcccgctttctaggaactccacgcatgagatgt

SEQ ID NO: 441587 - DNA, 55 bp, Artificial
  Synthetic oligonucleotide
gtggcggagacccgtcttcgctacgaccaccttcctcacagttctaggctttgtc

SEQ ID NO: 441588 - DNA, 52 bp, Artificial
  Synthetic oligonucleotide
gtggcggatactttcgattaagaattacacttttacgttgtaatcggtttac

SEQ ID NO: 441589 - DNA, 54 bp, Artificial
  Synthetic oligonucleotide
gtggcggattacccttgctccaggcctattacggggcctttatccgtaattcca

SEQ ID NO: 441590 - DNA, 58 bp, Artificial
  Synthetic oligonucleotide
gtggcggcctagtgacaacaaactatatgtgcctcctcccgcccctgtatcaaaagta

SEQ ID NO: 441591 - DNA, 56 bp, Artificial
  Synthetic oligonucleotide
gtggcggcctggtgacggcaaggtatatctgccccccactcccgtgtctaaggtta

SEQ ID NO: 441592 - DNA, 59 bp, Artificial
  Synthetic oligonucleotide
gtggcggcgttgttctagtcgggttagtggcgctgactttgtcaccatactacaagcgc

SEQ ID NO: 441593 - DNA, 55 bp, Artificial
  Synthetic oligonucleotide
gtggcggctagtacactggtatcacggtacctttgtacgcctgttttatactccc

SEQ ID NO: 441594 - DNA, 51 bp, Artificial
  Synthetic oligonucleotide
gtggcggcttagaaaaaagtgacactggtttaaaaattaaacgtgcggccc

SEQ ID NO: 441595 - DNA, 55 bp, Artificial
  Synthetic oligonucleotide
gtggcgggtaaagcagattttgaagtggatataaccggatttaaaattaatatgc

SEQ ID NO: 441596 - DNA, 55 bp, Artificial
  Synthetic oligonucleotide
gtggcgggttgacgcacgtcggatacttgcgtgcttagttgcgaaatgttggggt

SEQ ID NO: 441597 - DNA, 55 bp, Artificial
  Synthetic oligonucleotide
gtggcggtgcgcgcatctgggcacttggtaacaatgttatcagggctggaggcgt

SEQ ID NO: 441598 - DNA, 58 bp, Artificial
  Synthetic oligonucleotide
gtggcggtgttaatttgtgaagcgttgaattcaattaaagttactcaatctgatgttg

SEQ ID NO: 441599 - DNA, 55 bp, Artificial
  Synthetic oligonucleotide
gtggcggttgctgacaacatacttgtatatgtcgcaagttacaatgaggtcgatg

SEQ ID NO: 441600 - DNA, 60 bp, Artificial
  Synthetic oligonucleotide
gtggcggttttgatctagcagtccgagatgacagcagaatggaccgccttgagcaagcga

SEQ ID NO: 441601 - DNA, 55 bp, Artificial
  Synthetic oligonucleotide
gtggcgtacgaacaaaagttcattacgtcattgatcttcctggtttgcgcgaagc

SEQ ID NO: 441602 - DNA, 55 bp, Artificial
  Synthetic oligonucleotide
gtggcgtagcagccctgtattggtttaggacaggcatttcaaatgcaagtacagt

SEQ ID NO: 441603 - DNA, 55 bp, Artificial
  Synthetic oligonucleotide
gtggcgtaggtatcggcaacaagccggccgttttcgattagcagcttccctaccg

SEQ ID NO: 441604 - DNA, 56 bp, Artificial
  Synthetic oligonucleotide
gtggcgtcaagacctatggaatgaaggaccgtacctataacggttctatctgtacc

SEQ ID NO: 441605 - DNA, 55 bp, Artificial
  Synthetic oligonucleotide
gtggcgtctcttatggcgttcgctgcttcagtcaccagtcccctgacgaccaatc

SEQ ID NO: 441606 - DNA, 60 bp, Artificial
  Synthetic oligonucleotide
gtggcgtctgctagtgcactgcttgatttgcgcacatgttgttttagcgttgcagctatt

SEQ ID NO: 441607 - DNA, 55 bp, Artificial
  Synthetic oligonucleotide
gtggcgtgaatagtgatactgtagattggtcttggccagacggcgccgagctgcc

SEQ ID NO: 441608 - DNA, 55 bp, Artificial
  Synthetic oligonucleotide
gtggcgtggaccttgcagttaagtctcatatagcagtgggtacacctgtgcgagt

SEQ ID NO: 441609 - DNA, 55 bp, Artificial
  Synthetic oligonucleotide
gtggcgtgtcccgaagcggaacgatcgccaaccctggcgaactcctcgtcttcac

SEQ ID NO: 441610 - DNA, 55 bp, Artificial
  Synthetic oligonucleotide
gtggcgtttcgacttcgcaaggtcaagcacgtcctggtcaaagtggttcgcctgg

SEQ ID NO: 441611 - DNA, 55 bp, Artificial
  Synthetic oligonucleotide
gtggcgtttcgcgggtggtttgccctcaacggggtggagcttgccaacagctcac

SEQ ID NO: 441612 - DNA, 55 bp, Artificial
  Synthetic oligonucleotide
gtggcgtttgttgaggggtatgacagcttatccctctcaaattgtacacgtacac

SEQ ID NO: 441613 - DNA, 60 bp, Artificial
  Synthetic oligonucleotide
gtggctaacatggtcatcagatttggtgactcccattggactactgtaatgattaagaat

SEQ ID NO: 441614 - DNA, 60 bp, Artificial
  Synthetic oligonucleotide
gtggctaaccctcagatgctgcatataagcagctgctttctgcttgtaccgggtctcggt

SEQ ID NO: 441615 - DNA, 56 bp, Artificial
  Synthetic oligonucleotide
gtggctaaccttaaccctgcagccgttgcccataatccaatgggtttgcggtcgta

SEQ ID NO: 441616 - DNA, 60 bp, Artificial
  Synthetic oligonucleotide
gtggctaagtgatggcagattgggagctctcaactctataacaaccggtgcgccttcgaa

SEQ ID NO: 441617 - DNA, 57 bp, Artificial
  Synthetic oligonucleotide
gtggctacaaagatgtgatactttggtttagcttcggggcgtcatgctttttacttc

SEQ ID NO: 441618 - DNA, 55 bp, Artificial
  Synthetic oligonucleotide
gtggctacagaaggatctagatcaacgacgattgatttctcttcccggtgcataa

SEQ ID NO: 441619 - DNA, 52 bp, Artificial
  Synthetic oligonucleotide
gtggctacatgcgtgcctactatgtcacggctagtccggttgttgcctacct

SEQ ID NO: 441620 - DNA, 54 bp, Artificial
  Synthetic oligonucleotide
gtggctaccattaaggcattgtaatcaaccacccaatactcagggtcgaaacga

SEQ ID NO: 441621 - DNA, 60 bp, Artificial
  Synthetic oligonucleotide
gtggctacgagccatatgtcatttcaccatcaccccgtgaggttggataccacgggtcac

SEQ ID NO: 441622 - DNA, 55 bp, Artificial
  Synthetic oligonucleotide
gtggctacgatttcaactgtcctgcaagtactacagatgttactcattacggtgg

SEQ ID NO: 441623 - DNA, 55 bp, Artificial
  Synthetic oligonucleotide
gtggctactaaccgttataccaaatgacatgtttcttcgtgaatcattagttgca

SEQ ID NO: 441624 - DNA, 60 bp, Artificial
  Synthetic oligonucleotide
gtggctactggttcagttctacgagtcgtcaagttatggctcgtcacactgataacgcgc

SEQ ID NO: 441625 - DNA, 55 bp, Artificial
  Synthetic oligonucleotide
gtggctagcgaaatagctcatagtcccgagcgtgaattcttagttcgcggagccg

SEQ ID NO: 441626 - DNA, 56 bp, Artificial
  Synthetic oligonucleotide
gtggctaggaccgtgggggaccaacggagccatgggatgctcttcccgattccgtc

SEQ ID NO: 441627 - DNA, 55 bp, Artificial
  Synthetic oligonucleotide
gtggctagtctgagaagcttcggcggacagactgcccctcaggtagaataaagcc

SEQ ID NO: 441628 - DNA, 55 bp, Artificial
  Synthetic oligonucleotide
gtggctagttggcagacgcgaaggcgagactctccatggtctcgacttttcgagc

SEQ ID NO: 441629 - DNA, 55 bp, Artificial
  Synthetic oligonucleotide
gtggctataagaactgatggatcaaatatctcaacacagtggcctagcaggagga

SEQ ID NO: 441630 - DNA, 55 bp, Artificial
  Synthetic oligonucleotide
gtggctatattttggacctacagcagttgggttcgttctatcagaaacagcttag

SEQ ID NO: 441631 - DNA, 60 bp, Artificial
  Synthetic oligonucleotide
gtggctatccatcaactgccgagtttgtcaaactgaggctaaccttatcatcaaccagga

SEQ ID NO: 441632 - DNA, 55 bp, Artificial
  Synthetic oligonucleotide
gtggctatcctgccttgatgccgttatatgcctgtatacaatctaggcaggcttt

SEQ ID NO: 441633 - DNA, 55 bp, Artificial
  Synthetic oligonucleotide
gtggctatcctgctttgatgcctttatatgcatgtattcacgctaagcaggcttt

SEQ ID NO: 441634 - DNA, 50 bp, Artificial
  Synthetic oligonucleotide
gtggctatgcattgcattactatgccaataatccaaccttgctcaaggag

SEQ ID NO: 441635 - DNA, 55 bp, Artificial
  Synthetic oligonucleotide
gtggctattgactgttataccaaatgacatgtttcttcgcgagtcgctagtcgca

SEQ ID NO: 441636 - DNA, 59 bp, Artificial
  Synthetic oligonucleotide
gtggctattgttctaggaggtgcaaacgagggcacgcgtacggcgctttcagtggtcac

SEQ ID NO: 441637 - DNA, 57 bp, Artificial
  Synthetic oligonucleotide
gtggctcaagggtacattcaggatatgttagaaagaggtacttggaatagacacgga

SEQ ID NO: 441638 - DNA, 55 bp, Artificial
  Synthetic oligonucleotide
gtggctcactagtctctagtgatgctcaactgtttaacaggccattctggctcca

SEQ ID NO: 441639 - DNA, 54 bp, Artificial
  Synthetic oligonucleotide
gtggctcagggaggcagaaaaacaactacgggtactagaaaacctcgtggactc

SEQ ID NO: 441640 - DNA, 60 bp, Artificial
  Synthetic oligonucleotide
gtggctccggaccttggatcacgcccaggtgcctggtccactatgcttacaggctttggc

SEQ ID NO: 441641 - DNA, 56 bp, Artificial
  Synthetic oligonucleotide
gtggctccggtccctggatcacgcccaggtgtttggtccactatccttacaggttg

SEQ ID NO: 441642 - DNA, 60 bp, Artificial
  Synthetic oligonucleotide
gtggctccggtccctggatcacgcctaggtgcctagtccactatccttataggctctggc

SEQ ID NO: 441643 - DNA, 56 bp, Artificial
  Synthetic oligonucleotide
gtggctccgtgggatcgaggaccccgtcgtagacgagcgaggactcccagtagccc

SEQ ID NO: 441644 - DNA, 53 bp, Artificial
  Synthetic oligonucleotide
gtggctcctggcggtgcttgggcctggttaccttctaagaggtgctttgacgc

SEQ ID NO: 441645 - DNA, 60 bp, Artificial
  Synthetic oligonucleotide
gtggctccttaggattatatcagctatggttataatcataagaaattcatctgacccaca

SEQ ID NO: 441646 - DNA, 60 bp, Artificial
  Synthetic oligonucleotide
gtggctcgtaggtgagtacactagacaagactagatagggagtagctaaccatatcgtgg

SEQ ID NO: 441647 - DNA, 60 bp, Artificial
  Synthetic oligonucleotide
gtggctcgttgctgcttggttctggcctcgcgagatagcagctgtgtgtgtggctttcat

SEQ ID NO: 441648 - DNA, 58 bp, Artificial
  Synthetic oligonucleotide
gtggctctctggttattacacaactggagagtttgagttcgattctcttaggggcacc

SEQ ID NO: 441649 - DNA, 52 bp, Artificial
  Synthetic oligonucleotide
gtggctctgacacgccatataccaccccaatcgaaccatgtgatgcatacag

SEQ ID NO: 441650 - DNA, 55 bp, Artificial
  Synthetic oligonucleotide
gtggctctggtagggatgttcgttctgggtcttgtcatcgttgcgttagtggcgg

SEQ ID NO: 441651 - DNA, 60 bp, Artificial
  Synthetic oligonucleotide
gtggctcttagcggtgcttgggcctgcttacctcctaagagatgctttgacacgcgtgcc

SEQ ID NO: 441652 - DNA, 60 bp, Artificial
  Synthetic oligonucleotide
gtggctcttggcctagtatgtgccacttgtgagcagattgctgatgcccaacatcggtct

SEQ ID NO: 441653 - DNA, 55 bp, Artificial
  Synthetic oligonucleotide
gtggctctttccgtactaaaagccttattcccacagagcgatgccacacgtaagc

SEQ ID NO: 441654 - DNA, 51 bp, Artificial
  Synthetic oligonucleotide
gtggctgaactccagaatatttcaatgggttacctaaataccaaagtcttg

SEQ ID NO: 441655 - DNA, 55 bp, Artificial
  Synthetic oligonucleotide
gtggctgaagaaaatatcataaagagacaagatagagtcggtggagtgaaattcc

SEQ ID NO: 441656 - DNA, 55 bp, Artificial
  Synthetic oligonucleotide
gtggctgaagaatggcgctgataaggacagtgattatgaagcccacgctcgcggt

SEQ ID NO: 441657 - DNA, 56 bp, Artificial
  Synthetic oligonucleotide
gtggctgacctgctagaatacgaagcgaggccgaccggagctggacactccaatcg

SEQ ID NO: 441658 - DNA, 55 bp, Artificial
  Synthetic oligonucleotide
gtggctgagataagtaagttggcacgtcctttactggacgcgatctgttaccgac

SEQ ID NO: 441659 - DNA, 55 bp, Artificial
  Synthetic oligonucleotide
gtggctgagccattcatttactcagggcattatattatcagggtcatgggcacta

SEQ ID NO: 441660 - DNA, 50 bp, Artificial
  Synthetic oligonucleotide
gtggctgagtgaagaccccgagggagcagtggacagggggtggacacaag

SEQ ID NO: 441661 - DNA, 60 bp, Artificial
  Synthetic oligonucleotide
gtggctgatgatcttgaaataaaggggatttggaacctcccagatatgtgcgccattccc

SEQ ID NO: 441662 - DNA, 59 bp, Artificial
  Synthetic oligonucleotide
gtggctgcagttcgttgtggctactcgacgacacaactggtcctaggccagggcaactt

SEQ ID NO: 441663 - DNA, 55 bp, Artificial
  Synthetic oligonucleotide
gtggctgccacagttcataaaattcctgtcaatcatgccgaggcggataaacgcg

SEQ ID NO: 441664 - DNA, 55 bp, Artificial
  Synthetic oligonucleotide
gtggctgccggtgagactatgatcacggtgcctaacggcggcatctgctctccga

SEQ ID NO: 441665 - DNA, 60 bp, Artificial
  Synthetic oligonucleotide
gtggctgcctgcacaccccttgtgggtgtgaagccataatcatgacagggtgcgaagagc

SEQ ID NO: 441666 - DNA, 55 bp, Artificial
  Synthetic oligonucleotide
gtggctgcgctgtggacctttcaacaagcatctttgtcaaacgccaaacgacaac

SEQ ID NO: 441667 - DNA, 58 bp, Artificial
  Synthetic oligonucleotide
gtggctgcggatgcccttcgcgatccttggtctttatttgtaaggctctctaacgtag

SEQ ID NO: 441668 - DNA, 58 bp, Artificial
  Synthetic oligonucleotide
gtggctggacaaggggcgattcatcaaaaaaggttattgaggtcgaggagtagtcatc

SEQ ID NO: 441669 - DNA, 53 bp, Artificial
  Synthetic oligonucleotide
gtggctggagacgttgttgtagcctgctttgatctcatggatatctctgatat

SEQ ID NO: 441670 - DNA, 59 bp, Artificial
  Synthetic oligonucleotide
gtggctggccaccacggaataacggcaattgtttgtatgtgggaggtcaagcctgccta

SEQ ID NO: 441671 - DNA, 57 bp, Artificial
  Synthetic oligonucleotide
gtggctgggccaggattgtacctgcttcctccagcccgttgaggggagggtcggcga

SEQ ID NO: 441672 - DNA, 55 bp, Artificial
  Synthetic oligonucleotide
gtggctggtgtatgacaccactcccggcggacaagcgccgaccccacaaacgata

SEQ ID NO: 441673 - DNA, 59 bp, Artificial
  Synthetic oligonucleotide
gtggctgtggtgtcagagaatcggttcgtgttggaacgacacatgaactgggaccccga

SEQ ID NO: 441674 - DNA, 55 bp, Artificial
  Synthetic oligonucleotide
gtggcttaaccaagcattaagtcttccgcaccaagtgccaccacctagatattcc

SEQ ID NO: 441675 - DNA, 59 bp, Artificial
  Synthetic oligonucleotide
gtggcttagataccaagaagatcaggtgtcgatggtttgagtggcccgccgtgtctaac

SEQ ID NO: 441676 - DNA, 55 bp, Artificial
  Synthetic oligonucleotide
gtggcttatctaaatgaattgtccaaacacagtgctgtccatactggtttgctga

SEQ ID NO: 441677 - DNA, 60 bp, Artificial
  Synthetic oligonucleotide
gtggcttgctaaatgtgaaccagaccacttgcctaaagacatatttgtatgcacaccgga

SEQ ID NO: 441678 - DNA, 55 bp, Artificial
  Synthetic oligonucleotide
gtggctttgactcgccacacagagaagtgtgtggttgtagatgccccagggctcc

SEQ ID NO: 441679 - DNA, 60 bp, Artificial
  Synthetic oligonucleotide
gtggctttgcacttcattaccatgccaataatgcaagtaagctcaaagactttgattaca

SEQ ID NO: 441680 - DNA, 60 bp, Artificial
  Synthetic oligonucleotide
gtggctttgccagggattgtagcgatgctgtgtgtgtgtgcggatttcccctcgtggcga

SEQ ID NO: 441681 - DNA, 57 bp, Artificial
  Synthetic oligonucleotide
gtggctttgtaatccaatggatataacactatactattatcagcaaactgatgaggc

SEQ ID NO: 441682 - DNA, 59 bp, Artificial
  Synthetic oligonucleotide
gtggcttttaaccagtcactagtcacgcccacacatgacgaggaaaaactcctgtcaga

SEQ ID NO: 441683 - DNA, 60 bp, Artificial
  Synthetic oligonucleotide
gtggcttttggtcactgctcgccagcttgacttctccttatatgtcaccgacaatcttga

SEQ ID NO: 441684 - DNA, 60 bp, Artificial
  Synthetic oligonucleotide
gtgggaaaacacacgattcatcatggatcgtgagttggcgcaaagtgcccacgcattctg

SEQ ID NO: 441685 - DNA, 59 bp, Artificial
  Synthetic oligonucleotide
gtgggaaaaccactacgctacgcagcagccttagctacgccggagcctagctcgccacc

SEQ ID NO: 441686 - DNA, 57 bp, Artificial
  Synthetic oligonucleotide
gtgggaaacttcggatcagtggcaaactccggagggtcagatctacaaccggtcata

SEQ ID NO: 441687 - DNA, 55 bp, Artificial
  Synthetic oligonucleotide
gtgggaaatattatgagcatgctccaatagaactgatttatgcatgcagatcagc

SEQ ID NO: 441688 - DNA, 55 bp, Artificial
  Synthetic oligonucleotide
gtgggaacaaacccgctcaaaggcaggactgctgatttcagatggaggaccaaac

SEQ ID NO: 441689 - DNA, 55 bp, Artificial
  Synthetic oligonucleotide
gtgggaaccaagctactctgtcagaaaattgaccccatctctctcaccaccccga

SEQ ID NO: 441690 - DNA, 55 bp, Artificial
  Synthetic oligonucleotide
gtgggaacggatgccaacaaccaagctgtggtagccgatcccacttaccaaccag

SEQ ID NO: 441691 - DNA, 55 bp, Artificial
  Synthetic oligonucleotide
gtgggaacgtttggggctccagacatcacactactcaaacaactgacattcttcc

SEQ ID NO: 441692 - DNA, 55 bp, Artificial
  Synthetic oligonucleotide
gtgggaacttatggatgaagattaccagggaaggctctgcaatcccctgaatcca

SEQ ID NO: 441693 - DNA, 53 bp, Artificial
  Synthetic oligonucleotide
gtgggaagaacgttcgggtggctacttaagcgcttctatacttaagtaccgaa

SEQ ID NO: 441694 - DNA, 55 bp, Artificial
  Synthetic oligonucleotide
gtgggaagcaagacctaatggatcgaccggcattaatggaacaaggtggggaacg

SEQ ID NO: 441695 - DNA, 60 bp, Artificial
  Synthetic oligonucleotide
gtgggaagcactgatgatcttggatgtctgtcagatgaggatggcagagattatagacat

SEQ ID NO: 441696 - DNA, 55 bp, Artificial
  Synthetic oligonucleotide
gtgggaaggaggagaccaagagtctctatccctctctcagctctctctttggaga

SEQ ID NO: 441697 - DNA, 55 bp, Artificial
  Synthetic oligonucleotide
gtgggaaggctattcaattcattgacagaagaacccaggttagatactccctgga

SEQ ID NO: 441698 - DNA, 57 bp, Artificial
  Synthetic oligonucleotide
gtgggaagtaatttggaagacccagcatccgcttacagaccaccaaatgcccctatc

SEQ ID NO: 441699 - DNA, 59 bp, Artificial
  Synthetic oligonucleotide
gtgggaagtaatttggaagatccagcatcatgcccctatcttatcaacacttccggaaa

SEQ ID NO: 441700 - DNA, 58 bp, Artificial
  Synthetic oligonucleotide
gtgggaagtaatttggacgacccagcatccagggaattagtagtcggctatgttgatg

SEQ ID NO: 441701 - DNA, 60 bp, Artificial
  Synthetic oligonucleotide
gtgggaatctatcacacgttggagacgcaattatgtgtcgttgcttagcttataaggaag

SEQ ID NO: 441702 - DNA, 51 bp, Artificial
  Synthetic oligonucleotide
gtgggaattattacttagagggtgggtcagttaatccgttgtgggtgggtt

SEQ ID NO: 441703 - DNA, 58 bp, Artificial
  Synthetic oligonucleotide
gtgggaattattgcaacatttcgtaggacacactctctacattacaacacaccagatt

SEQ ID NO: 441704 - DNA, 52 bp, Artificial
  Synthetic oligonucleotide
gtgggaatttgttaatacccctcccttagtaaaattatggtaccagctggaa

SEQ ID NO: 441705 - DNA, 56 bp, Artificial
  Synthetic oligonucleotide
gtgggacagatttcaaaggttcctctaagaagaattctaacttgttactggactga

SEQ ID NO: 441706 - DNA, 50 bp, Artificial
  Synthetic oligonucleotide
gtgggacagtaaggtccaaaaggtgtgaatatcctacctacgggataggt

SEQ ID NO: 441707 - DNA, 54 bp, Artificial
  Synthetic oligonucleotide
gtgggaccaaatcggacccacggacgaccgacgtgtacgctgatccgaaggttc

SEQ ID NO: 441708 - DNA, 60 bp, Artificial
  Synthetic oligonucleotide
gtgggaccagcatctcgggacctggaaaaatatggagcaatcacaagtagtaatacagca

SEQ ID NO: 441709 - DNA, 60 bp, Artificial
  Synthetic oligonucleotide
gtgggacggactccaatcctctgatgatttcgccctcatagtgaatgcaccgaaccatga

SEQ ID NO: 441710 - DNA, 60 bp, Artificial
  Synthetic oligonucleotide
gtgggactgtgcataaattaatgacatcaatgttgaatgtgcatgaaaagcaaatattgt

SEQ ID NO: 441711 - DNA, 55 bp, Artificial
  Synthetic oligonucleotide
gtgggagaaaggcgatccttaatcagaataagatgtctaagattgagcagtggag

SEQ ID NO: 441712 - DNA, 55 bp, Artificial
  Synthetic oligonucleotide
gtgggagacgacaaattggaaccgcatacgcgttcagaacagatagttagtcggt

SEQ ID NO: 441713 - DNA, 53 bp, Artificial
  Synthetic oligonucleotide
gtgggagacgggagccccctgtggccgactccactacctcgcaggcattcccc

SEQ ID NO: 441714 - DNA, 60 bp, Artificial
  Synthetic oligonucleotide
gtgggagagacgagcagtcaattgctgaagcaataattgtggccatggtattttcgcaag

SEQ ID NO: 441715 - DNA, 60 bp, Artificial
  Synthetic oligonucleotide
gtgggagatcgatctgagagtggctcagacgttgttacctacgaacgtcccaattggaga

SEQ ID NO: 441716 - DNA, 60 bp, Artificial
  Synthetic oligonucleotide
gtgggagatttatgttatcaagcagcgcgttcactccacgttgcagcagctaattatata

SEQ ID NO: 441717 - DNA, 60 bp, Artificial
  Synthetic oligonucleotide
gtgggagcagcatatctttttgtggtgtaaatagtgacactgtgagttggtcttggccag

SEQ ID NO: 441718 - DNA, 60 bp, Artificial
  Synthetic oligonucleotide
gtgggagcagtatctaaagacctagagaaacatggagcaatcacaagtagcaatatgaat

SEQ ID NO: 441719 - DNA, 60 bp, Artificial
  Synthetic oligonucleotide
gtgggagcagtgtctcaagacctggcaaaacatggagcaatcaccagtaacaatacacca

SEQ ID NO: 441720 - DNA, 56 bp, Artificial
  Synthetic oligonucleotide
gtgggagctaggttgttgttcgttagaaattccccaatctgctacagtatccggtg

SEQ ID NO: 441721 - DNA, 59 bp, Artificial
  Synthetic oligonucleotide
gtgggaggacccggccataaagcaagagttttggcggaggcaatgagtcaggcacaaca

SEQ ID NO: 441722 - DNA, 59 bp, Artificial
  Synthetic oligonucleotide
gtgggaggacctagtcataaagcaagggtgttggctgaggcaatgagccaagtacagcc

SEQ ID NO: 441723 - DNA, 55 bp, Artificial
  Synthetic oligonucleotide
gtgggaggcaaagtaattcaccatgatgcatttgaccctgtatctagcacacgag

SEQ ID NO: 441724 - DNA, 55 bp, Artificial
  Synthetic oligonucleotide
gtgggagggacgaacaatcaatcgcagaagcgatcatcgtagcaatggtattctc

SEQ ID NO: 441725 - DNA, 60 bp, Artificial
  Synthetic oligonucleotide
gtgggaggtgcacattggtaggactgtaataccatattccgaatctatgtctagcactgc

SEQ ID NO: 441726 - DNA, 55 bp, Artificial
  Synthetic oligonucleotide
gtgggagtacgtagtacttgccttcctgctactcgcagacgctcgggtctgcgcg

SEQ ID NO: 441727 - DNA, 60 bp, Artificial
  Synthetic oligonucleotide
gtgggagtcactccagtgacatcgaagttcataattgaatcataacagtcaagaccaatt

SEQ ID NO: 441728 - DNA, 55 bp, Artificial
  Synthetic oligonucleotide
gtgggagttataacacatcaagctccaactcccggatcagagttatggccgcctt

SEQ ID NO: 441729 - DNA, 54 bp, Artificial
  Synthetic oligonucleotide
gtgggagtttgtcaatactcctcccttagtgaaattgtggtaccagttagaaaa

SEQ ID NO: 441730 - DNA, 60 bp, Artificial
  Synthetic oligonucleotide
gtgggataagaaccaacggagcgacaagtgcctgcagaagatcaggttcttctttctatg

SEQ ID NO: 441731 - DNA, 55 bp, Artificial
  Synthetic oligonucleotide
gtgggatacgatagagcttctgtgctggatgttaaacgtggaattacagttatta

SEQ ID NO: 441732 - DNA, 58 bp, Artificial
  Synthetic oligonucleotide
gtgggatacggacgaatacacgtttatgtcacagggcatgcaaaagccgataaaactg

SEQ ID NO: 441733 - DNA, 55 bp, Artificial
  Synthetic oligonucleotide
gtgggatactgtaagacatatccagcgcaactcctggctaatagctatagcgcag

SEQ ID NO: 441734 - DNA, 60 bp, Artificial
  Synthetic oligonucleotide
gtgggatagaaataacacgccacacctgccacaaatgccacacgggctctttgcgtgaga

SEQ ID NO: 441735 - DNA, 60 bp, Artificial
  Synthetic oligonucleotide
gtgggatagggtggacatgctgacttggcgcaatacgtctgttcaccaggcgtctcgcac

SEQ ID NO: 441736 - DNA, 60 bp, Artificial
  Synthetic oligonucleotide
gtgggatatggttttgggactgtgagcataaacattactatgtgaagtttgccacggatg

SEQ ID NO: 441737 - DNA, 58 bp, Artificial
  Synthetic oligonucleotide
gtgggatcaacgatcggaacttctggagaggtgagaatggacgaaaaacaagaggtgc

SEQ ID NO: 441738 - DNA, 57 bp, Artificial
  Synthetic oligonucleotide
gtgggatccactgttaaatgagttccccgacaccgtactcggattcaggtgtatgct

SEQ ID NO: 441739 - DNA, 55 bp, Artificial
  Synthetic oligonucleotide
gtgggatccacttctgaacgagttccctgataccgtacatggtttcaggtgtatg

SEQ ID NO: 441740 - DNA, 60 bp, Artificial
  Synthetic oligonucleotide
gtgggatccattgttgaacgactttcccaaatcagtgcatggattccggtgcatgttggc

SEQ ID NO: 441741 - DNA, 49 bp, Artificial
  Synthetic oligonucleotide
gtgggatcctcttttgaacgagtttcccccgaaacctgtaaccacccgg

SEQ ID NO: 441742 - DNA, 49 bp, Artificial
  Synthetic oligonucleotide
gtgggatcctttacttaacgagttcccagaaaccgttcacggttttagg

SEQ ID NO: 441743 - DNA, 60 bp, Artificial
  Synthetic oligonucleotide
gtgggatcgcgacatcgaagccctgatagaaactatccgtcaagacttgcaaggctacaa

SEQ ID NO: 441744 - DNA, 55 bp, Artificial
  Synthetic oligonucleotide
gtgggatgacccttggggagaagtactggtttggaaatttgatccactattagcc

SEQ ID NO: 441745 - DNA, 60 bp, Artificial
  Synthetic oligonucleotide
gtgggatgagatttaatacagagcaagttcaaggcgtgcgacatatggtgttgttcaaga

SEQ ID NO: 441746 - DNA, 60 bp, Artificial
  Synthetic oligonucleotide
gtgggatgatcccctggtgcctgtatggtatcatgaacttcttcttggctaatgctggtg

SEQ ID NO: 441747 - DNA, 55 bp, Artificial
  Synthetic oligonucleotide
gtgggatgatgtgcagatgttggcttacggtgatgacattgttgccgcttcagac

SEQ ID NO: 441748 - DNA, 60 bp, Artificial
  Synthetic oligonucleotide
gtgggatggacttcaatcctcggatgactttgccctcatagtgaatgcaccgaatcatga

SEQ ID NO: 441749 - DNA, 60 bp, Artificial
  Synthetic oligonucleotide
gtgggatgggcaagccgcactacaaattcacaaccctactcagcagaatgcaatggtgca

SEQ ID NO: 441750 - DNA, 58 bp, Artificial
  Synthetic oligonucleotide
gtgggatgggtatctaccctatctggcaacgtatatctcgaagaaaggaaagtatgcc

SEQ ID NO: 441751 - DNA, 55 bp, Artificial
  Synthetic oligonucleotide
gtgggatggtataaagggattcgcatctaaaacctgggaaggtatccataagaat

SEQ ID NO: 441752 - DNA, 55 bp, Artificial
  Synthetic oligonucleotide
gtgggattacttctctttggtgctgacaaatgcctgtgagctaggggagtgggtg

SEQ ID NO: 441753 - DNA, 58 bp, Artificial
  Synthetic oligonucleotide
gtgggattagactgtcttgctaacatgcgaaaccttgacggtaagcccataagtgaag

SEQ ID NO: 441754 - DNA, 56 bp, Artificial
  Synthetic oligonucleotide
gtgggattggtgaattttgagtgcttggtaaaagcatacttggttgttgagaaaaa

SEQ ID NO: 441755 - DNA, 60 bp, Artificial
  Synthetic oligonucleotide
gtgggatttatcgagcagctagagatatcaccacccgctgtgtggcatgtgcccaggtaa

SEQ ID NO: 441756 - DNA, 60 bp, Artificial
  Synthetic oligonucleotide
gtgggatttggattcggctagaggagatgatgtctcaggtaattttgtgctttatcaaag

SEQ ID NO: 441757 - DNA, 54 bp, Artificial
  Synthetic oligonucleotide
gtgggatttgggcaaaaagttagactcttcataggccaagggagcgttagaacc

SEQ ID NO: 441758 - DNA, 54 bp, Artificial
  Synthetic oligonucleotide
gtgggcaaaagtagagatacagtctgtaagcttgtcactggtatgctgaataca

SEQ ID NO: 441759 - DNA, 58 bp, Artificial
  Synthetic oligonucleotide
gtgggcaaccctctacggttgtggacaacacactaatggttgtgatctctatttatta

SEQ ID NO: 441760 - DNA, 60 bp, Artificial
  Synthetic oligonucleotide
gtgggcaaccttacaatcttccctcaccagtggatcaatctgaggactaataatagtgcc

SEQ ID NO: 441761 - DNA, 52 bp, Artificial
  Synthetic oligonucleotide
gtgggcaactacagagtagtcaacagacaccttgctacacacaacgattggc

SEQ ID NO: 441762 - DNA, 57 bp, Artificial
  Synthetic oligonucleotide
gtgggcaatgaatttcgctgtctcgttaaaggagccgatacccgatccccctgtgcc

SEQ ID NO: 441763 - DNA, 60 bp, Artificial
  Synthetic oligonucleotide
gtgggcacattgaagaatgttcctgttatcccaacatggggaaagtggagtgtgtttgca

SEQ ID NO: 441764 - DNA, 57 bp, Artificial
  Synthetic oligonucleotide
gtgggcacccccacaactgaccagggtaaccctcgccgaggcgtcgcattctctgac

SEQ ID NO: 441765 - DNA, 56 bp, Artificial
  Synthetic oligonucleotide
gtgggcacgacagataaacttggagtgcccacttacacgtggggcgagaatgagac

SEQ ID NO: 441766 - DNA, 55 bp, Artificial
  Synthetic oligonucleotide
gtgggcacggggtggaccgcaaagggccaaattacagtgctggacatgcacccag

SEQ ID NO: 441767 - DNA, 57 bp, Artificial
  Synthetic oligonucleotide
gtgggcacgtcaacattaaataagaggtcaatccctgtaatagcaacaaggccaaag

SEQ ID NO: 441768 - DNA, 57 bp, Artificial
  Synthetic oligonucleotide
gtgggcactcggcgaaaacatggcaccggaaaaggtagactttgaggattgcaagga

SEQ ID NO: 441769 - DNA, 60 bp, Artificial
  Synthetic oligonucleotide
gtgggcactcggtgaaaatatggcaccagagaaagtagactttgatgattgcaaagatgt

SEQ ID NO: 441770 - DNA, 60 bp, Artificial
  Synthetic oligonucleotide
gtgggcagagccaaatgtaatgtcgaacttgaggaactggcaagcactattaggagctac

SEQ ID NO: 441771 - DNA, 50 bp, Artificial
  Synthetic oligonucleotide
gtgggcagagcccacagcgatgcttaaccagtgcgtgtctcgattgtgac

SEQ ID NO: 441772 - DNA, 55 bp, Artificial
  Synthetic oligonucleotide
gtgggcagagctttagctttaccagtttattctagtttgaggcgcaaatggctcg

SEQ ID NO: 441773 - DNA, 58 bp, Artificial
  Synthetic oligonucleotide
gtgggcagcgtcgaccgggatgggaggcacgggacgcaggtgccgagaactcagggga

SEQ ID NO: 441774 - DNA, 55 bp, Artificial
  Synthetic oligonucleotide
gtgggcaggcatagaacacagtacaggtgttccttataacccacagagccaaggg

SEQ ID NO: 441775 - DNA, 57 bp, Artificial
  Synthetic oligonucleotide
gtgggcagtctgtcgtaatgggtaactctgcagcggaaccgactactttgggtgtcc

SEQ ID NO: 441776 - DNA, 50 bp, Artificial
  Synthetic oligonucleotide
gtgggcatacgatcatgacataacagacgaaggaacgttggcatatgagt

SEQ ID NO: 441777 - DNA, 55 bp, Artificial
  Synthetic oligonucleotide
gtgggcatatgacaatgacataacagatgagagcgagctagcatatgactacgca

SEQ ID NO: 441778 - DNA, 60 bp, Artificial
  Synthetic oligonucleotide
gtgggcatccacatatgaggcaattgatccatcagtcccaccaatgcactgggactctgc

SEQ ID NO: 441779 - DNA, 55 bp, Artificial
  Synthetic oligonucleotide
gtgggcatgaagcggcgcctagtaaaacaatgataacaccttattctgtcgaaaa

SEQ ID NO: 441780 - DNA, 55 bp, Artificial
  Synthetic oligonucleotide
gtgggcatgatacaacggcatacaccagagccactgactcagccttgacgtactg

SEQ ID NO: 441781 - DNA, 60 bp, Artificial
  Synthetic oligonucleotide
gtgggcatgcagcagtggaaattgccggttcaatgtgtgtatataatccggaaaaaacac

SEQ ID NO: 441782 - DNA, 60 bp, Artificial
  Synthetic oligonucleotide
gtgggcatttgacaatgggaatgatgtttggatgggaagaacaatcagcaaagattcacg

SEQ ID NO: 441783 - DNA, 57 bp, Artificial
  Synthetic oligonucleotide
gtgggccaacttttcaccctccggcccagataccataccatcgttcaggagtgcaac

SEQ ID NO: 441784 - DNA, 58 bp, Artificial
  Synthetic oligonucleotide
gtgggccacgatatgaggaagacgtgaatctaggaagtggaactcgctccgttggaaa

SEQ ID NO: 441785 - DNA, 51 bp, Artificial
  Synthetic oligonucleotide
gtgggccacgcgtgctgagagaggaggacgtgctaccaatggcttcggggg

SEQ ID NO: 441786 - DNA, 60 bp, Artificial
  Synthetic oligonucleotide
gtgggccatagcacctcttctcataatgtataggaccgtcatgtggattcacagaaggtt

SEQ ID NO: 441787 - DNA, 55 bp, Artificial
  Synthetic oligonucleotide
gtgggcccacaagggcccaacgtgcccattggctttgccgggaccatgccaaatt

SEQ ID NO: 441788 - DNA, 58 bp, Artificial
  Synthetic oligonucleotide
gtgggccccacaacgcactaactgacaacgactagtggaccaatcacatgacgcgctc

SEQ ID NO: 441789 - DNA, 55 bp, Artificial
  Synthetic oligonucleotide
gtgggcccccgcacctattagttgtgactggactcctagtgacgggagaattagg

SEQ ID NO: 441790 - DNA, 54 bp, Artificial
  Synthetic oligonucleotide
gtgggccgaaccttgtacttaccaccctatgagtatttggaaaggaggtggata

SEQ ID NO: 441791 - DNA, 55 bp, Artificial
  Synthetic oligonucleotide
gtgggccgacaaacatatttcgaattgggcacccgcgaatgtcggccatcgttca

SEQ ID NO: 441792 - DNA, 55 bp, Artificial
  Synthetic oligonucleotide
gtgggccgctgttcacctaaagtgacgcaaggtctgtcagccgccagggtccgtt

SEQ ID NO: 441793 - DNA, 60 bp, Artificial
  Synthetic oligonucleotide
gtgggccggtgctttaatgaaagtagcagcccatcagtgtttcacggggaccacacagca

SEQ ID NO: 441794 - DNA, 55 bp, Artificial
  Synthetic oligonucleotide
gtgggccgtcgtacatgaccggcaagcagggttatgccactggtggtatgactcc

SEQ ID NO: 441795 - DNA, 55 bp, Artificial
  Synthetic oligonucleotide
gtgggcctaaagccctagcccacatcgtcttgcccgttcgactatccccttcaac

SEQ ID NO: 441796 - DNA, 55 bp, Artificial
  Synthetic oligonucleotide
gtgggcctaatgacctagcccacatcgttttgcccgtacgactatcaccctcaat

SEQ ID NO: 441797 - DNA, 55 bp, Artificial
  Synthetic oligonucleotide
gtgggcctaatgacctagcccacattgtcttccccgtccgactatccccttcgat

SEQ ID NO: 441798 - DNA, 55 bp, Artificial
  Synthetic oligonucleotide
gtgggcctgccagagaggcaacattaggtgcaacatttgcatttgagtgtattag

SEQ ID NO: 441799 - DNA, 60 bp, Artificial
  Synthetic oligonucleotide
gtgggcctgtctcgttgtaggtctccatgcccgactctgatacagtctccttaacagact

SEQ ID NO: 441800 - DNA, 55 bp, Artificial
  Synthetic oligonucleotide
gtgggcctgtgcaatccctcaaggaagcagctggagcagccctcatcccagtagg

SEQ ID NO: 441801 - DNA, 59 bp, Artificial
  Synthetic oligonucleotide
gtgggcgttaaccgagtgtgctcaagggtatgtaactgtcacaagtccctatgcgccta

SEQ ID NO: 441802 - DNA, 58 bp, Artificial
  Synthetic oligonucleotide
gtgggctaccgacagaattgatttcgtcggctggtggacaattgttctattctcgccc

SEQ ID NO: 441803 - DNA, 58 bp, Artificial
  Synthetic oligonucleotide
gtgggctactcaactggcggatggacggggggcaccatatttagcgagaacattgtgg

SEQ ID NO: 441804 - DNA, 55 bp, Artificial
  Synthetic oligonucleotide
gtgggctctgtcatgcattttaccaaaggtaccccgcctcctttgatgctgcctc

SEQ ID NO: 441805 - DNA, 55 bp, Artificial
  Synthetic oligonucleotide
gtgggctgaaatgcagggcactggggtgtttggtgacacaacaaaggacactggg

SEQ ID NO: 441806 - DNA, 58 bp, Artificial
  Synthetic oligonucleotide
gtgggctgctgttaggatccacgaatcagatattatactagcaccgcatatgtgtgtg

SEQ ID NO: 441807 - DNA, 55 bp, Artificial
  Synthetic oligonucleotide
gtgggctgggtattagcactggtcgtggtacaggcggtgctacaggctatgtgcc

SEQ ID NO: 441808 - DNA, 55 bp, Artificial
  Synthetic oligonucleotide
gtgggctgtaaccaatttacctagtctaaatctttacagtggcctagagacctac

SEQ ID NO: 441809 - DNA, 58 bp, Artificial
  Synthetic oligonucleotide
gtgggcttacccatcgtgttggtaagcgattctgtgtgaagtccgtgtatgttctggg

SEQ ID NO: 441810 - DNA, 54 bp, Artificial
  Synthetic oligonucleotide
gtgggcttcgaattttgctcgcaagttttcctaggtttgggtatcgcttaccca

SEQ ID NO: 441811 - DNA, 55 bp, Artificial
  Synthetic oligonucleotide
gtgggcttggaggaaaatcatgagcaggataagcccaagcatggtgacatacagg

SEQ ID NO: 441812 - DNA, 53 bp, Artificial
  Synthetic oligonucleotide
gtgggcttgtcagaatggaaacatccggtgccagatttgcatttaaagaaaaa

SEQ ID NO: 441813 - DNA, 59 bp, Artificial
  Synthetic oligonucleotide
gtgggcttttgactatggaagtgacgtttggatgggaagaacaatcagcaaggattctc

SEQ ID NO: 441814 - DNA, 51 bp, Artificial
  Synthetic oligonucleotide
gtggggaacacgctttactttaaattaaagtaaagtagcactaagtgggac

SEQ ID NO: 441815 - DNA, 60 bp, Artificial
  Synthetic oligonucleotide
gtggggaacgccaggatgccacagaaatcagagcatctgttggaagaatggttggtggga

SEQ ID NO: 441816 - DNA, 55 bp, Artificial
  Synthetic oligonucleotide
gtggggaagaatgcaattttcaaattaaaaccatcagaccttggtggcccacgtg

SEQ ID NO: 441817 - DNA, 59 bp, Artificial
  Synthetic oligonucleotide
gtggggaattcaaatggataacaatcgagctgtaccacactatagaacagaaggcttct

SEQ ID NO: 441818 - DNA, 54 bp, Artificial
  Synthetic oligonucleotide
gtggggaccggcgcgccaaccatatggcttctttctagaaacggaggaaacgta

SEQ ID NO: 441819 - DNA, 55 bp, Artificial
  Synthetic oligonucleotide
gtggggaccgttcaggcgtacgagttggggtttgcaaacggagctccgtccagca

SEQ ID NO: 441820 - DNA, 59 bp, Artificial
  Synthetic oligonucleotide
gtggggactcatactatatacactcaggaaagaacttcttctgtctggacagttttgta

SEQ ID NO: 441821 - DNA, 54 bp, Artificial
  Synthetic oligonucleotide
gtggggagagaccgcctccttgttctgttctacttgatgggtgcgtcgagggac

SEQ ID NO: 441822 - DNA, 59 bp, Artificial
  Synthetic oligonucleotide
gtggggagccactggagctgcaaggggtgctagctaactataggaccaaataccctgct

SEQ ID NO: 441823 - DNA, 55 bp, Artificial
  Synthetic oligonucleotide
gtggggaggagagttgacaaggtaaccttctggcgcgctcctcgggttcatgaca

SEQ ID NO: 441824 - DNA, 57 bp, Artificial
  Synthetic oligonucleotide
gtggggagtgcgtgccccagtaggagatcgggcaaccgtgtctagcttgctaacccc

SEQ ID NO: 441825 - DNA, 59 bp, Artificial
  Synthetic oligonucleotide
gtggggagttcctacgagtggcacaccgtgaacacacaagccacgggtatcttgcgaga

SEQ ID NO: 441826 - DNA, 53 bp, Artificial
  Synthetic oligonucleotide
gtggggatatagacaaggccaatcagtgtctaccaatactgttaccaatggtc

SEQ ID NO: 441827 - DNA, 60 bp, Artificial
  Synthetic oligonucleotide
gtggggatcaacgtcatcaacgacgtggtacaaggcatcaatgctatagaaccttgggct

SEQ ID NO: 441828 - DNA, 60 bp, Artificial
  Synthetic oligonucleotide
gtggggatcaacgtcatcgatgacgttataccacgcatcattgctgtaaactttggggct

SEQ ID NO: 441829 - DNA, 57 bp, Artificial
  Synthetic oligonucleotide
gtggggatccacgtcatcaatgacgttgtaccacgcctcattactgtaaaccttggg

SEQ ID NO: 441830 - DNA, 55 bp, Artificial
  Synthetic oligonucleotide
gtggggatccatcgtgaaggtgcttttgatgacagtgttccacctggtgaaaccg

SEQ ID NO: 441831 - DNA, 60 bp, Artificial
  Synthetic oligonucleotide
gtggggatcgacgtcatcaatgacgttataccatgcctcatttgtgtacactcttgggct

SEQ ID NO: 441832 - DNA, 60 bp, Artificial
  Synthetic oligonucleotide
gtggggatctacgtcatcaatgacattgtaccagacatcattactgtagacctttggact

SEQ ID NO: 441833 - DNA, 57 bp, Artificial
  Synthetic oligonucleotide
gtggggatgcgggaccatgtctttcccgcgcgatagcgacgggtggtcccgcgtgtg

SEQ ID NO: 441834 - DNA, 55 bp, Artificial
  Synthetic oligonucleotide
gtggggatggagacaggtattttgttgagatggactggacacggtatgatgggac

SEQ ID NO: 441835 - DNA, 60 bp, Artificial
  Synthetic oligonucleotide
gtggggatgtagctccatcgtggggatgtagctccatcgtggggatgtagctccatcgtg

SEQ ID NO: 441836 - DNA, 55 bp, Artificial
  Synthetic oligonucleotide
gtggggatttccactggagggtgggtcggaggttctcacttttcagacaaatatg

SEQ ID NO: 441837 - DNA, 60 bp, Artificial
  Synthetic oligonucleotide
gtggggcaagcaatgtatgccgctcccattgcaggaaatattacctgcagatcaaatatt

SEQ ID NO: 441838 - DNA, 55 bp, Artificial
  Synthetic oligonucleotide
gtggggcaatgggatataaacctcttacagaaggatccgtcactattggcacgtc

SEQ ID NO: 441839 - DNA, 55 bp, Artificial
  Synthetic oligonucleotide
gtggggcaggcattcttcgaggcactcagtactcagtctgttagccggccaatag

SEQ ID NO: 441840 - DNA, 57 bp, Artificial
  Synthetic oligonucleotide
gtggggcagggtgggacctcaggacaacagcagcccccggacttcccatatgtgaat

SEQ ID NO: 441841 - DNA, 52 bp, Artificial
  Synthetic oligonucleotide
gtggggcatacatcacccacctactgacactgaacaaacaagtctatacaaa

SEQ ID NO: 441842 - DNA, 51 bp, Artificial
  Synthetic oligonucleotide
gtggggccaatatacgtaggcgccggttgtcacacatttgttggcgtagtc

SEQ ID NO: 441843 - DNA, 57 bp, Artificial
  Synthetic oligonucleotide
gtggggccagacttcgccataaggcctttatcttctcgccattggatagtgtcgggg

SEQ ID NO: 441844 - DNA, 51 bp, Artificial
  Synthetic oligonucleotide
gtggggcggttgcaagaaccctgcgccagagaggcaaaagtgtgatctgtc

SEQ ID NO: 441845 - DNA, 55 bp, Artificial
  Synthetic oligonucleotide
gtggggctcatatggaaaaacctgtactactcgtactgaccccggctctggttaa

SEQ ID NO: 441846 - DNA, 55 bp, Artificial
  Synthetic oligonucleotide
gtggggctgctgcctctcggacttccactgaatcgcataagaaccaaagtgctac

SEQ ID NO: 441847 - DNA, 56 bp, Artificial
  Synthetic oligonucleotide
gtggggcttagaaatacaccttctgttgaacccaaagggctattcggagccattgc

SEQ ID NO: 441848 - DNA, 50 bp, Artificial
  Synthetic oligonucleotide
gtggggctttacgacccctgacaaaaaacatcagaaggaacccccgttcc

SEQ ID NO: 441849 - DNA, 60 bp, Artificial
  Synthetic oligonucleotide
gtgggggagtggtcagccccatctgactgcatataagcagcccgcttgccgcttgtattg

SEQ ID NO: 441850 - DNA, 60 bp, Artificial
  Synthetic oligonucleotide
gtgggggattcaccaccctaatgatgaggcagagcagacaaggctatatcaaaacccaac

SEQ ID NO: 441851 - DNA, 60 bp, Artificial
  Synthetic oligonucleotide
gtgggggcgcgtatgacgtaatcatctgtgatgagtgccactctacggatcctaccaccg

SEQ ID NO: 441852 - DNA, 59 bp, Artificial
  Synthetic oligonucleotide
gtggggggatcagcaagataagcactggctttacttatgggtcctccatcaactcggct

SEQ ID NO: 441853 - DNA, 54 bp, Artificial
  Synthetic oligonucleotide
gtgggggggtcgcaggctcgtggagcctacacagtttcgtccctctttacggct

SEQ ID NO: 441854 - DNA, 57 bp, Artificial
  Synthetic oligonucleotide
gtgggggtcgacgtcatcaatgacgttgtaccaggcgtcattgttgtataccttggg

SEQ ID NO: 441855 - DNA, 59 bp, Artificial
  Synthetic oligonucleotide
gtgggggtctacgtcatcaatgacgttataccaagcctcattactgtatactcttgggc

SEQ ID NO: 441856 - DNA, 57 bp, Artificial
  Synthetic oligonucleotide
gtgggggtgaggttgtcacgcgagcaagtgtcacttgtaaagagggatatttcgtgg

SEQ ID NO: 441857 - DNA, 60 bp, Artificial
  Synthetic oligonucleotide
gtgggggtggtaggtggcgtgccatgttctctagcagacgccattccagagctgctaaaa

SEQ ID NO: 441858 - DNA, 54 bp, Artificial
  Synthetic oligonucleotide
gtgggggtggtggcgtgaggctggaccgcttgaacctggcgaaccttcgggacg

SEQ ID NO: 441859 - DNA, 59 bp, Artificial
  Synthetic oligonucleotide
gtggggtaaattggtttccctgcgcatattgtgtgaaaatgctcccagcaatgtcaaac

SEQ ID NO: 441860 - DNA, 54 bp, Artificial
  Synthetic oligonucleotide
gtggggtagcaaaacgctaccccatctctgacagccttggaaggactcaaaaag

SEQ ID NO: 441861 - DNA, 55 bp, Artificial
  Synthetic oligonucleotide
gtggggtagtacagaggtagatgccgagatgcacaatggcgagaacaggaagatg

SEQ ID NO: 441862 - DNA, 55 bp, Artificial
  Synthetic oligonucleotide
gtggggtattcatcacccgtctaacagtaaggatcaacagaatatctatcagaat

SEQ ID NO: 441863 - DNA, 55 bp, Artificial
  Synthetic oligonucleotide
gtggggtcacttgctaaatcggttacgcagggtcaaaaccaacgaggccatcaat

SEQ ID NO: 441864 - DNA, 54 bp, Artificial
  Synthetic oligonucleotide
gtggggtcccaaactacgcgcccacattgttttgcccgtacgactatcgccctc

SEQ ID NO: 441865 - DNA, 55 bp, Artificial
  Synthetic oligonucleotide
gtggggtcctaatgacctggcccacattgtcttgcctgtacgactatcaccctct

SEQ ID NO: 441866 - DNA, 55 bp, Artificial
  Synthetic oligonucleotide
gtggggtctgtgattgcttggccatgcatgccattgtcagactgggcatcgtgcc

SEQ ID NO: 441867 - DNA, 59 bp, Artificial
  Synthetic oligonucleotide
gtggggtgcgacgaatcataggcttgggttgtgtgaggtagagaacacgaagtcgattg

SEQ ID NO: 441868 - DNA, 55 bp, Artificial
  Synthetic oligonucleotide
gtggggtggaggactggtgaggacccctttctcaaggaactcaacccatgaaatg

SEQ ID NO: 441869 - DNA, 60 bp, Artificial
  Synthetic oligonucleotide
gtggggtgtcctgcactgtcgcatagccacaggatttcgctgcactcgtctagcgtgtcc

SEQ ID NO: 441870 - DNA, 55 bp, Artificial
  Synthetic oligonucleotide
gtggggtgtcctggaacataatcagataatgataggggtggtagcatgccacccc

SEQ ID NO: 441871 - DNA, 55 bp, Artificial
  Synthetic oligonucleotide
gtggggttgcaatctagctgcgtcttgtgcgttccgtggataagccaaacgcact

SEQ ID NO: 441872 - DNA, 55 bp, Artificial
  Synthetic oligonucleotide
gtgggtaaatctaagaccggagcagatcgtgtcgctaatgatggtgcaacacgcg

SEQ ID NO: 441873 - DNA, 51 bp, Artificial
  Synthetic oligonucleotide
gtgggtaacttgaccatttacccgcaccagtggatcaatctacgcactaac

SEQ ID NO: 441874 - DNA, 55 bp, Artificial
  Synthetic oligonucleotide
gtgggtaagttcgacatcacacacagcaagacagaaaagctgacgtatgcaagtg

SEQ ID NO: 441875 - DNA, 55 bp, Artificial
  Synthetic oligonucleotide
gtgggtactatcgggcgtgttgcgttcgatgatactccgctgagtacgtgtatta

SEQ ID NO: 441876 - DNA, 56 bp, Artificial
  Synthetic oligonucleotide
gtgggtacttttgctatttgagttatcctaattttaatgcctttatcctcgcttga

SEQ ID NO: 441877 - DNA, 56 bp, Artificial
  Synthetic oligonucleotide
gtgggtatccctatcacaaacagaaaagcaaggattggacaggaaccgcctttatc

SEQ ID NO: 441878 - DNA, 56 bp, Artificial
  Synthetic oligonucleotide
gtgggtattacgaatactttgcgggcaaggtattcgagggactatactagtgagaa

SEQ ID NO: 441879 - DNA, 57 bp, Artificial
  Synthetic oligonucleotide
gtgggtattcacgttggcatactccgagaagccagagaactggcccagattaaagtt

SEQ ID NO: 441880 - DNA, 54 bp, Artificial
  Synthetic oligonucleotide
gtgggtcaaatcaaacacatataagctggggtaggtaagtttactaatcgtaag

SEQ ID NO: 441881 - DNA, 55 bp, Artificial
  Synthetic oligonucleotide
gtgggtcaccatattcttggaaacctcgaaaaggcatggggacgaatctttctgt

SEQ ID NO: 441882 - DNA, 60 bp, Artificial
  Synthetic oligonucleotide
gtgggtcatcatcccacatgtgctaacttgcgcatttaggggtggcggtacaccgtctga

SEQ ID NO: 441883 - DNA, 58 bp, Artificial
  Synthetic oligonucleotide
gtgggtcatccggtaattgggagcggtaagaaggcgtcgcactacagaaatctgttca

SEQ ID NO: 441884 - DNA, 54 bp, Artificial
  Synthetic oligonucleotide
gtgggtcatggattacgatggaccaactttcgatctcgattgggagcacggaga

SEQ ID NO: 441885 - DNA, 53 bp, Artificial
  Synthetic oligonucleotide
gtgggtcccaacttgttatcgggggacgtcggtctacaactacgtatacagta

SEQ ID NO: 441886 - DNA, 57 bp, Artificial
  Synthetic oligonucleotide
gtgggtcccagcttgttataggtaatcgaaggagcacaaactcttacactgttccta

SEQ ID NO: 441887 - DNA, 53 bp, Artificial
  Synthetic oligonucleotide
gtgggtcccctctgcctccacagcctatcgacgacccctaccaaaaacccacc

SEQ ID NO: 441888 - DNA, 55 bp, Artificial
  Synthetic oligonucleotide
gtgggtccctaatgcacgtgcccacattgtcttccccgttcgtgaatcaccttcg

SEQ ID NO: 441889 - DNA, 53 bp, Artificial
  Synthetic oligonucleotide
gtgggtccgggtaagtaccggcacctgcggccaagaatcaacggcaccataca

SEQ ID NO: 441890 - DNA, 55 bp, Artificial
  Synthetic oligonucleotide
gtgggtcctggttctatacacgtggtggctctgcagataatgttaactaccagta

SEQ ID NO: 441891 - DNA, 55 bp, Artificial
  Synthetic oligonucleotide
gtgggtcgcagaactggacagcgaaatcggtgtgtgcgctacaataagaaatcag

SEQ ID NO: 441892 - DNA, 55 bp, Artificial
  Synthetic oligonucleotide
gtgggtcgggttgtgaatgtcctgatagttctaactataccacaaccttcgtaaa

SEQ ID NO: 441893 - DNA, 58 bp, Artificial
  Synthetic oligonucleotide
gtgggtcgtagcacctattctcatgatatataggaccgtcacgtacattcacagaagg

SEQ ID NO: 441894 - DNA, 55 bp, Artificial
  Synthetic oligonucleotide
gtgggtcgttgaagataatctgaccggagtaagggattgcaactcgactattgac

SEQ ID NO: 441895 - DNA, 52 bp, Artificial
  Synthetic oligonucleotide
gtgggtctaggtcaaggttatgtgacaggttctgtagaaactacacctattc

SEQ ID NO: 441896 - DNA, 58 bp, Artificial
  Synthetic oligonucleotide
gtgggtctccaaggggactcctgtcctccgagaacaccttcactgtctctactcagcc

SEQ ID NO: 441897 - DNA, 60 bp, Artificial
  Synthetic oligonucleotide
gtgggtctgactagacacagaaggtctttggtctactacactgctattgaggacaggtta

SEQ ID NO: 441898 - DNA, 55 bp, Artificial
  Synthetic oligonucleotide
gtgggtcttttaggatttgctgctcctttcacacaatgtgggtatcctgctttga

SEQ ID NO: 441899 - DNA, 51 bp, Artificial
  Synthetic oligonucleotide
gtgggtgaaacctaaagccactagcggtagcgttggctgtcagacattcga

SEQ ID NO: 441900 - DNA, 58 bp, Artificial
  Synthetic oligonucleotide
gtgggtgaagccattacgttcttctctgggctcgtacctatgcggaactatccgcagg

SEQ ID NO: 441901 - DNA, 55 bp, Artificial
  Synthetic oligonucleotide
gtgggtgagctgatgtggtcgccaaggcatgtgccgatgtcttggtggtgggtgg

SEQ ID NO: 441902 - DNA, 54 bp, Artificial
  Synthetic oligonucleotide
gtgggtgatcttcaacataacctgccccacggtggtcgatatagagacggtacc

SEQ ID NO: 441903 - DNA, 57 bp, Artificial
  Synthetic oligonucleotide
gtgggtgcggagtacaacttgttctctacgccactgctacgccacccgggtctccta

SEQ ID NO: 441904 - DNA, 54 bp, Artificial
  Synthetic oligonucleotide
gtgggtgcgtaagaccctttctaaataatgttggtcacattaaagacttgttta

SEQ ID NO: 441905 - DNA, 54 bp, Artificial
  Synthetic oligonucleotide
gtgggtggacccgcggatacgtggcgcctcctggaaacgcgctgggaggttatt

SEQ ID NO: 441906 - DNA, 53 bp, Artificial
  Synthetic oligonucleotide
gtgggtggtcgtctactaaccgtcgagttaattatcgtaaccctgtttacaga

SEQ ID NO: 441907 - DNA, 55 bp, Artificial
  Synthetic oligonucleotide
gtgggtgtaccttatagtcttgaagagacgcgcgaacaactggataagccaacgc

SEQ ID NO: 441908 - DNA, 50 bp, Artificial
  Synthetic oligonucleotide
gtgggtgtcctaaattgggcagcacaaatctacccaggaataaagacaaa

SEQ ID NO: 441909 - DNA, 60 bp, Artificial
  Synthetic oligonucleotide
gtgggtgtgtccgcccgtcaagctgcttcgaactttcagcgacacgtccctgtcatcact

SEQ ID NO: 441910 - DNA, 60 bp, Artificial
  Synthetic oligonucleotide
gtgggttaagtaagcgtgatttaagcgctagagaggcatggatacgacagactctgcatc

SEQ ID NO: 441911 - DNA, 57 bp, Artificial
  Synthetic oligonucleotide
gtgggttacacagacgttactggcaaccaatcaaattccatcctcaaacgttagata

SEQ ID NO: 441912 - DNA, 53 bp, Artificial
  Synthetic oligonucleotide
gtgggttacagtttattatggggtacctgtatggaaagaagcaacaaccaccc

SEQ ID NO: 441913 - DNA, 58 bp, Artificial
  Synthetic oligonucleotide
gtgggttacatatgcggtgtgtcggttgtgggatatatgtaacccattcaaacgtctc

SEQ ID NO: 441914 - DNA, 54 bp, Artificial
  Synthetic oligonucleotide
gtgggttaccgacagaattgatttcgtcggctgggggtcagttgttctactccc

SEQ ID NO: 441915 - DNA, 55 bp, Artificial
  Synthetic oligonucleotide
gtgggttagttgcagtggggctggcaggcctgcaattgcgcattgccctaaagac

SEQ ID NO: 441916 - DNA, 56 bp, Artificial
  Synthetic oligonucleotide
gtgggttcggtgtattcgttaggaagtctgacaatgtaaaggttatgtagtcagaa

SEQ ID NO: 441917 - DNA, 55 bp, Artificial
  Synthetic oligonucleotide
gtgggttcggtgtgtttgttatgaaatctgccaatgcaaaggttatgtagtcaga

SEQ ID NO: 441918 - DNA, 50 bp, Artificial
  Synthetic oligonucleotide
gtgggttctgtaccaatgcatacagatctggagcttgacttctcgttaac

SEQ ID NO: 441919 - DNA, 55 bp, Artificial
  Synthetic oligonucleotide
gtgggttgagcaagtttggttcaagcaacattactgtgatgactagtggatttgc

SEQ ID NO: 441920 - DNA, 50 bp, Artificial
  Synthetic oligonucleotide
gtgggttgtacccactcacagggcccacggggcgtcagcactctggtacc

SEQ ID NO: 441921 - DNA, 59 bp, Artificial
  Synthetic oligonucleotide
gtgggttgttgcttggtggattgaagccatcggtcacagatgggaccaggacccaggtc

SEQ ID NO: 441922 - DNA, 57 bp, Artificial
  Synthetic oligonucleotide
gtgggtttatctagttgataagtatgtaaccgatttgtaatctaatcaaaatgtata

SEQ ID NO: 441923 - DNA, 56 bp, Artificial
  Synthetic oligonucleotide
gtgggttttcggacatgcgcattatcgaaacgactatgatatgcatggatgtagat

SEQ ID NO: 441924 - DNA, 59 bp, Artificial
  Synthetic oligonucleotide
gtgggttttgctagcaatggaatgttgcgatacactaaggaagggtgcggaatgagcgg

SEQ ID NO: 441925 - DNA, 59 bp, Artificial
  Synthetic oligonucleotide
gtggtaaacttcggcaccgcgataactcgatctcagaagataactttacctggcgcatc

SEQ ID NO: 441926 - DNA, 59 bp, Artificial
  Synthetic oligonucleotide
gtggtaaactttgtgagcatggaattttctctcactgacccaagactggaaccacacaa

SEQ ID NO: 441927 - DNA, 56 bp, Artificial
  Synthetic oligonucleotide
gtggtaaaggtacaggggggtccacaggctacacaccattgggtggcagaggagga

SEQ ID NO: 441928 - DNA, 56 bp, Artificial
  Synthetic oligonucleotide
gtggtaacacccttacatgctacttgaaggcctctgcggcctgtcgagctgcaaag

SEQ ID NO: 441929 - DNA, 60 bp, Artificial
  Synthetic oligonucleotide
gtggtaacaggttcacaaggctagtcaagggctgcctgatatacatggacctgatgtatg

SEQ ID NO: 441930 - DNA, 53 bp, Artificial
  Synthetic oligonucleotide
gtggtaacccaactcctgaacagacgattaaggacccctgtcaacaacccacc

SEQ ID NO: 441931 - DNA, 57 bp, Artificial
  Synthetic oligonucleotide
gtggtaacggtattactcaccgtgttggtaagcgtttctgcgtgaagtctctatata

SEQ ID NO: 441932 - DNA, 59 bp, Artificial
  Synthetic oligonucleotide
gtggtaactatgttactcacgctaaacaaggacgggcgaatgttcattcttgctgtcca

SEQ ID NO: 441933 - DNA, 57 bp, Artificial
  Synthetic oligonucleotide
gtggtaacttgcgggtctggatgcgtgatgtttagtggttgacctttggcgtccttc

SEQ ID NO: 441934 - DNA, 56 bp, Artificial
  Synthetic oligonucleotide
gtggtaactttttggatttcttagaactgtgtgagtttgacaaaaagagactgtgc

SEQ ID NO: 441935 - DNA, 55 bp, Artificial
  Synthetic oligonucleotide
gtggtaagagtagtttaataagggagttaatctcagaggacgagagtttcgtggc

SEQ ID NO: 441936 - DNA, 55 bp, Artificial
  Synthetic oligonucleotide
gtggtaagattgaagttcaaaccactacttacagatgcccacgtgatgccaccgc

SEQ ID NO: 441937 - DNA, 57 bp, Artificial
  Synthetic oligonucleotide
gtggtaagctactggtaagagatgtcggtacgacctcttttgctagtgacgtgtttg

SEQ ID NO: 441938 - DNA, 55 bp, Artificial
  Synthetic oligonucleotide
gtggtaagtgaagaatgctggttctatgagaacgttgtaactggagcggtaatca

SEQ ID NO: 441939 - DNA, 55 bp, Artificial
  Synthetic oligonucleotide
gtggtaataagttcgaggagtgcgtgtttacggctgaaagagcctatgccatggc

SEQ ID NO: 441940 - DNA, 59 bp, Artificial
  Synthetic oligonucleotide
gtggtaatacccaaaagctgtcttagtccacatcatagacttaccagatttcgctcgcc

SEQ ID NO: 441941 - DNA, 60 bp, Artificial
  Synthetic oligonucleotide
gtggtaataggccggtgtcgcagtcagatcctaatggcgctaccgttgctcgtcgtgaca

SEQ ID NO: 441942 - DNA, 51 bp, Artificial
  Synthetic oligonucleotide
gtggtaatgacagggacaataccaccgagatcttcagacctggaggaggga

SEQ ID NO: 441943 - DNA, 56 bp, Artificial
  Synthetic oligonucleotide
gtggtaattgatggtgtaagttggtgtttcagcaaggttatgagtttagacctaaa

SEQ ID NO: 441944 - DNA, 57 bp, Artificial
  Synthetic oligonucleotide
gtggtacaacatggggcacagcttatttttcacaacgttggaacagtgactttggat

SEQ ID NO: 441945 - DNA, 60 bp, Artificial
  Synthetic oligonucleotide
gtggtacacactgaaaggtcgtgtgttgaacgctcacatggatgaccgcttacctaatgt

SEQ ID NO: 441946 - DNA, 60 bp, Artificial
  Synthetic oligonucleotide
gtggtacagacaaatactttaagttggatcaattcgcaaaccacatgagcatatcacggc

SEQ ID NO: 441947 - DNA, 56 bp, Artificial
  Synthetic oligonucleotide
gtggtacaggtagagaatcagactttacttgaatctgaagggtatggaagtttagg

SEQ ID NO: 441948 - DNA, 53 bp, Artificial
  Synthetic oligonucleotide
gtggtacatagtctcgttaacccaaccggatacgtggactggttatttaagga

SEQ ID NO: 441949 - DNA, 57 bp, Artificial
  Synthetic oligonucleotide
gtggtaccaagaatcgctcttgttctcagcattcgtacctcccgttttggctacacg

SEQ ID NO: 441950 - DNA, 57 bp, Artificial
  Synthetic oligonucleotide
gtggtaccggctgataccgaagaggggtggtgtgagaggaaccatacgcgatacacg

SEQ ID NO: 441951 - DNA, 55 bp, Artificial
  Synthetic oligonucleotide
gtggtaccggtcaggcgtccaggtcttacgtgagctcattgctgcatatggatct

SEQ ID NO: 441952 - DNA, 55 bp, Artificial
  Synthetic oligonucleotide
gtggtacgacaactacgcatactacccagaaacgccaggagcgctagcatcggcc

SEQ ID NO: 441953 - DNA, 55 bp, Artificial
  Synthetic oligonucleotide
gtggtacggcgagcaaacgccggcaaaagtggtatctgtgcgggtcagggaccaa

SEQ ID NO: 441954 - DNA, 60 bp, Artificial
  Synthetic oligonucleotide
gtggtacgggacgtaatgcatatgcgtctttgtgtgagagcagggatcgggtttagactc

SEQ ID NO: 441955 - DNA, 55 bp, Artificial
  Synthetic oligonucleotide
gtggtacggttacaggtggacaatatgcgtctaaggaacaagctatgatcaagcg

SEQ ID NO: 441956 - DNA, 53 bp, Artificial
  Synthetic oligonucleotide
gtggtactctgttattacggtaactttgtatgccagttttatcctccccaccc

SEQ ID NO: 441957 - DNA, 54 bp, Artificial
  Synthetic oligonucleotide
gtggtactttaaccacgagtcgtcgttgagacgccagtttccttacaaggaagc

SEQ ID NO: 441958 - DNA, 55 bp, Artificial
  Synthetic oligonucleotide
gtggtactttgctaaagacatctgcaaaataggcctcttccaaatctatgccaca

SEQ ID NO: 441959 - DNA, 50 bp, Artificial
  Synthetic oligonucleotide
gtggtagacgagtcacattagccgcaaggaacataacaatgcgcatgatc

SEQ ID NO: 441960 - DNA, 59 bp, Artificial
  Synthetic oligonucleotide
gtggtagagcacagagtgccttaagagtataaacaatcttcctactaatgttgtactta

SEQ ID NO: 441961 - DNA, 60 bp, Artificial
  Synthetic oligonucleotide
gtggtagatccagtttcaaaatcaacattgatagtgtcactgtgttaacaagatctgaag

SEQ ID NO: 441962 - DNA, 60 bp, Artificial
  Synthetic oligonucleotide
gtggtagcattccccttcgcaattagcatcaacctgcacatcgctctggatccccatgga

SEQ ID NO: 441963 - DNA, 60 bp, Artificial
  Synthetic oligonucleotide
gtggtagcttgggccatagcgctcctgagctccatgagcgcgggaggctggaggcacaaa

SEQ ID NO: 441964 - DNA, 58 bp, Artificial
  Synthetic oligonucleotide
gtggtaggattacctatgacgttgctacacaagctctcaacctctgataggcaaacag

SEQ ID NO: 441965 - DNA, 57 bp, Artificial
  Synthetic oligonucleotide
gtggtaggcatatatacccaccccgtggttctgtgaccgtactttggggctatgcta

SEQ ID NO: 441966 - DNA, 55 bp, Artificial
  Synthetic oligonucleotide
gtggtagtcctaccggtattggtcgtgttcgtagtgcttctcagcccgtacccac

SEQ ID NO: 441967 - DNA, 54 bp, Artificial
  Synthetic oligonucleotide
gtggtagtcttaaaggttatttattagtggtgggccactatataccttacaggc

SEQ ID NO: 441968 - DNA, 55 bp, Artificial
  Synthetic oligonucleotide
gtggtagtggtattacccatcgcgttgggaaacgattttgtgttaagtctgtgta

SEQ ID NO: 441969 - DNA, 53 bp, Artificial
  Synthetic oligonucleotide
gtggtagttactacaccactctctgtgacacagagagctactgaattcgtcca

SEQ ID NO: 441970 - DNA, 55 bp, Artificial
  Synthetic oligonucleotide
gtggtatactagttgtcatgcgtccgcgtgatgaattgtattcggctcttaagtt

SEQ ID NO: 441971 - DNA, 53 bp, Artificial
  Synthetic oligonucleotide
gtggtatcaacctagtcatgcgagaggactgtacggttccaatgactgacggc

SEQ ID NO: 441972 - DNA, 51 bp, Artificial
  Synthetic oligonucleotide
gtggtatcaccctgaggggctagtcggcctgttcccgccgttttcccccgg

SEQ ID NO: 441973 - DNA, 60 bp, Artificial
  Synthetic oligonucleotide
gtggtatcagactatgtggatgcaggaaactacacctatgcccaattgccacctacaacg

SEQ ID NO: 441974 - DNA, 60 bp, Artificial
  Synthetic oligonucleotide
gtggtatcgaatgcgtgaagaaagaatacagtcgctgaagtttggattggaagcgattga

SEQ ID NO: 441975 - DNA, 55 bp, Artificial
  Synthetic oligonucleotide
gtggtatggatgctgtgaccttcttgactataaagatggacgctatgcatacagc

SEQ ID NO: 441976 - DNA, 58 bp, Artificial
  Synthetic oligonucleotide
gtggtatgggcccaaaatttgatatgggcgctgcttgggttaacaggcccatgtacag

SEQ ID NO: 441977 - DNA, 60 bp, Artificial
  Synthetic oligonucleotide
gtggtatggtgatagatcactgattaacgagctaaccaactgcaatttctgcctatcgtt

SEQ ID NO: 441978 - DNA, 55 bp, Artificial
  Synthetic oligonucleotide
gtggtatggttgaacggtcttttgatgtgagtggaagcaggaatgtactcacgtc

SEQ ID NO: 441979 - DNA, 56 bp, Artificial
  Synthetic oligonucleotide
gtggtatgtgaagcattttttgaccttctttgtgactaaaccgaacaagtcaacac

SEQ ID NO: 441980 - DNA, 60 bp, Artificial
  Synthetic oligonucleotide
gtggtatgttgcactgcctttatggagcaagatttggtctatctctacacgcaagtgttg

SEQ ID NO: 441981 - DNA, 50 bp, Artificial
  Synthetic oligonucleotide
gtggtattaacatgaccaataccaccgagaccttcagacctggaggagga

SEQ ID NO: 441982 - DNA, 59 bp, Artificial
  Synthetic oligonucleotide
gtggtattcctagaggtctcattgagctcgaagaaatcccgacgcgacgcttacgcgag

SEQ ID NO: 441983 - DNA, 54 bp, Artificial
  Synthetic oligonucleotide
gtggtattgtaagtttactagagtcgatacttttactcttttccgtggtgtgta

SEQ ID NO: 441984 - DNA, 55 bp, Artificial
  Synthetic oligonucleotide
gtggtatttgggtgcccgctgccacatcgagaaagcgaaaggaacaggtcagcag

SEQ ID NO: 441985 - DNA, 60 bp, Artificial
  Synthetic oligonucleotide
gtggtattttcttagtgagaacgcccactgaaacagtactgcaagaatatacacagagtc

SEQ ID NO: 441986 - DNA, 60 bp, Artificial
  Synthetic oligonucleotide
gtggtcaaaaagcagcatagttgggtggcctaatataagagaaagaatgagacgagctca

SEQ ID NO: 441987 - DNA, 60 bp, Artificial
  Synthetic oligonucleotide
gtggtcaaaaagtagtcttggtgcatggcctagagtaagggaaagaatgagacgagctga

SEQ ID NO: 441988 - DNA, 53 bp, Artificial
  Synthetic oligonucleotide
gtggtcaaagagcagcatagttggatggcctgcagtaagggaaagaataaggc

SEQ ID NO: 441989 - DNA, 55 bp, Artificial
  Synthetic oligonucleotide
gtggtcaacaggagcgtttggaacgagttgtatgagtacatgaagagagtgaagg

SEQ ID NO: 441990 - DNA, 55 bp, Artificial
  Synthetic oligonucleotide
gtggtcaaccttcgacggttgtggacaactcactcatggttgttctagctatgca

SEQ ID NO: 441991 - DNA, 55 bp, Artificial
  Synthetic oligonucleotide
gtggtcacactccataaccgagacctccctgctctggtatcgttccagcccacct

SEQ ID NO: 441992 - DNA, 55 bp, Artificial
  Synthetic oligonucleotide
gtggtcacagttggcccttctccctgaaccttggtgcagtgctcgcacgcaagct

SEQ ID NO: 441993 - DNA, 50 bp, Artificial
  Synthetic oligonucleotide
gtggtcaccaccgccaaaagcctttaaccgttacccgccaaccaactacg

SEQ ID NO: 441994 - DNA, 55 bp, Artificial
  Synthetic oligonucleotide
gtggtcacctcgctggttattctggtgatttgattgtggattggatgattagtgc

SEQ ID NO: 441995 - DNA, 60 bp, Artificial
  Synthetic oligonucleotide
gtggtcactgcctcgctcagttatcaacagaacaattagcggcgtttgtgatgcattaac

SEQ ID NO: 441996 - DNA, 56 bp, Artificial
  Synthetic oligonucleotide
gtggtcagactcccgccactttcccggtggtttccactgagccgttgcctattgcc

SEQ ID NO: 441997 - DNA, 60 bp, Artificial
  Synthetic oligonucleotide
gtggtcagataatagaacctatcagctatggtgtatatcaccccgtcagacaattgtctt

SEQ ID NO: 441998 - DNA, 50 bp, Artificial
  Synthetic oligonucleotide
gtggtcagcatagaacctataggagtggcaccaggtaaggccaaaaggca

SEQ ID NO: 441999 - DNA, 58 bp, Artificial
  Synthetic oligonucleotide
gtggtcaggcaactatcccgcaggtaccctcaactaccacgtgcggtgactactggga

SEQ ID NO: 442000 - DNA, 53 bp, Artificial
  Synthetic oligonucleotide
gtggtcaggcgggccacattagggcccagtgcagaatgggtacgggtggaggc

SEQ ID NO: 442001 - DNA, 60 bp, Artificial
  Synthetic oligonucleotide
gtggtcagtacgcatcaaaggaacaggcgattgtcaagaagttctataagatctatcatc

SEQ ID NO: 442002 - DNA, 58 bp, Artificial
  Synthetic oligonucleotide
gtggtcagtaggaggtacctggcatcgttacacaagagggctttgcccacctcagtaa

SEQ ID NO: 442003 - DNA, 60 bp, Artificial
  Synthetic oligonucleotide
gtggtcagtaggaggtacttggcatcattgcataaggaggcttcactcacttccgtgaca

SEQ ID NO: 442004 - DNA, 60 bp, Artificial
  Synthetic oligonucleotide
gtggtcatattaatgtcattgaagttggcgatgacctatcattgcacacagaatcgtatg

SEQ ID NO: 442005 - DNA, 55 bp, Artificial
  Synthetic oligonucleotide
gtggtccaaaacgcggtatccgaatcgcaatccacaatacacagtcccgttgttc

SEQ ID NO: 442006 - DNA, 53 bp, Artificial
  Synthetic oligonucleotide
gtggtccaaacgtagtacagctggatgggctgctataagggagagaatgcacc

SEQ ID NO: 442007 - DNA, 57 bp, Artificial
  Synthetic oligonucleotide
gtggtccaagccatgtatgttccacctggtgccccgaatccaaaagagtgggacgat

SEQ ID NO: 442008 - DNA, 55 bp, Artificial
  Synthetic oligonucleotide
gtggtccagaatacattaggctaacctcaactggttttgagatcacttcagctgt

SEQ ID NO: 442009 - DNA, 55 bp, Artificial
  Synthetic oligonucleotide
gtggtccatataggtaaggtcatgtgcatctctgatgtcactcgtggaattgggc

SEQ ID NO: 442010 - DNA, 58 bp, Artificial
  Synthetic oligonucleotide
gtggtccatgtacctttaattcaaaatgcctaagcgtgatgctccttggcgattaacg

SEQ ID NO: 442011 - DNA, 55 bp, Artificial
  Synthetic oligonucleotide
gtggtcccatacatcttttcgtacatctaatatgtgcgcttgtggtcccctgcac

SEQ ID NO: 442012 - DNA, 60 bp, Artificial
  Synthetic oligonucleotide
gtggtccccatgcaacctacaaccatgatagtacgagtaaattatgactcgtcaagaagc

SEQ ID NO: 442013 - DNA, 58 bp, Artificial
  Synthetic oligonucleotide
gtggtccccgaatgttcgattgcagatgttgcaccgccagagccccccgagcgtccct

SEQ ID NO: 442014 - DNA, 57 bp, Artificial
  Synthetic oligonucleotide
gtggtccccgcccactaacaaatgtcagccaatcaaatggaagcctgaaaggcttct

SEQ ID NO: 442015 - DNA, 59 bp, Artificial
  Synthetic oligonucleotide
gtggtcccctatttaaacttccgcagcaagtagtgcattccgcactatgtgggatccat

SEQ ID NO: 442016 - DNA, 55 bp, Artificial
  Synthetic oligonucleotide
gtggtccgtaagcaccacgccacgttacgccatcatccgagaagttgaccgcacg

SEQ ID NO: 442017 - DNA, 55 bp, Artificial
  Synthetic oligonucleotide
gtggtccgtacctcagtccattatcaacagagtaattagcggtgtttgtgatgca

SEQ ID NO: 442018 - DNA, 57 bp, Artificial
  Synthetic oligonucleotide
gtggtcctaatgacctggcccacattgtctttcccgtacgactatcgccctccacca

SEQ ID NO: 442019 - DNA, 55 bp, Artificial
  Synthetic oligonucleotide
gtggtcctataacttcacgggtgcaatcattccaatgcttgactaggcatcgcac

SEQ ID NO: 442020 - DNA, 58 bp, Artificial
  Synthetic oligonucleotide
gtggtcctatctataggaggagagacggaaaatggatgagagaactgatcctgtatga

SEQ ID NO: 442021 - DNA, 59 bp, Artificial
  Synthetic oligonucleotide
gtggtcctcaaccacaattcgaaataagctgtcgtcaagccgacgtacatccgagtcgc

SEQ ID NO: 442022 - DNA, 55 bp, Artificial
  Synthetic oligonucleotide
gtggtcgcacggagaccccggtcacgtaatcggacacttgaagcggttgcgactc

SEQ ID NO: 442023 - DNA, 55 bp, Artificial
  Synthetic oligonucleotide
gtggtcgctatgtatttccacgaaggagagttcgtatcttccgtagataaattta

SEQ ID NO: 442024 - DNA, 55 bp, Artificial
  Synthetic oligonucleotide
gtggtcgctcctgaagtctcaccgagcagagactataaacttgctcaaacgggcg

SEQ ID NO: 442025 - DNA, 55 bp, Artificial
  Synthetic oligonucleotide
gtggtcggtatcagcccaattggaatcagtctattcgtgcgtctatgcgtaatgc

SEQ ID NO: 442026 - DNA, 53 bp, Artificial
  Synthetic oligonucleotide
gtggtcgtaggcactactgatgctaagggcgccccaacctacacctggggtgc

SEQ ID NO: 442027 - DNA, 53 bp, Artificial
  Synthetic oligonucleotide
gtggtcgtcagggtaggcgccccaagactttttcaggacaagtggtaccccca

SEQ ID NO: 442028 - DNA, 55 bp, Artificial
  Synthetic oligonucleotide
gtggtcgtccccattaccttcatggttcccaacagaccttctgggcttacacagt

SEQ ID NO: 442029 - DNA, 60 bp, Artificial
  Synthetic oligonucleotide
gtggtctaggcacgcatctagtggagctttttcacctagcagcccctggcagatagcgca

SEQ ID NO: 442030 - DNA, 58 bp, Artificial
  Synthetic oligonucleotide
gtggtctatggaggggaccttccaccagagccaattatactcttgatttcaggcttaa

SEQ ID NO: 442031 - DNA, 60 bp, Artificial
  Synthetic oligonucleotide
gtggtctcatcgagtacatgcaagcctaccccggccggcatggcagtgctgtgggctgca

SEQ ID NO: 442032 - DNA, 58 bp, Artificial
  Synthetic oligonucleotide
gtggtctcgaggtggagagttaggagatacaatccccccaaatggtggaccagtcagc

SEQ ID NO: 442033 - DNA, 60 bp, Artificial
  Synthetic oligonucleotide
gtggtctggtgacaacggcgaggaatgaattgatacattggcacgagtgtgtaacgcata

SEQ ID NO: 442034 - DNA, 55 bp, Artificial
  Synthetic oligonucleotide
gtggtctgttccctactcaaatacaagtacgtaatatcatgagtccagtgatggg

SEQ ID NO: 442035 - DNA, 55 bp, Artificial
  Synthetic oligonucleotide
gtggtcttacattgtcgagagatcatcagctgtaaacggaatgtgttaccctgga

SEQ ID NO: 442036 - DNA, 57 bp, Artificial
  Synthetic oligonucleotide
gtggtcttatagaactcgaagaaatcccgacgcgacgcttacgcgaggagcgcgttg

SEQ ID NO: 442037 - DNA, 56 bp, Artificial
  Synthetic oligonucleotide
gtggtcttcctgattggaaggccttcaagttagtcaactaagggtgcctagaggaa

SEQ ID NO: 442038 - DNA, 52 bp, Artificial
  Synthetic oligonucleotide
gtggtcttcttctgcttactaattagctcctggttagttaaaccccatgcca

SEQ ID NO: 442039 - DNA, 57 bp, Artificial
  Synthetic oligonucleotide
gtggtgaagtctatcaagcctcagaagagtgagccccaaccatactcacaaacttac

SEQ ID NO: 442040 - DNA, 56 bp, Artificial
  Synthetic oligonucleotide
gtggtgaatggtactcttccactctccgtatcgctaatcaccgctcacgtaatgga

SEQ ID NO: 442041 - DNA, 58 bp, Artificial
  Synthetic oligonucleotide
gtggtgacatgaatacggcactaggcaattgtctccttgcctgtatgattacgaagca

SEQ ID NO: 442042 - DNA, 59 bp, Artificial
  Synthetic oligonucleotide
gtggtgaccaaattaagaatgatgatggaccattgttatcgattttcatgttacaagag

SEQ ID NO: 442043 - DNA, 53 bp, Artificial
  Synthetic oligonucleotide
gtggtgaccacataccatcatgtgattgcaccgtagggtgttattactccaaa

SEQ ID NO: 442044 - DNA, 55 bp, Artificial
  Synthetic oligonucleotide
gtggtgaccagaatcgccaatccggttacaactcgatgaatcgttctagcactgc

SEQ ID NO: 442045 - DNA, 60 bp, Artificial
  Synthetic oligonucleotide
gtggtgaccgcgttgtcataactgatagcatttggtacgctactaattttggatggcagc

SEQ ID NO: 442046 - DNA, 55 bp, Artificial
  Synthetic oligonucleotide
gtggtgacctgtctcatacatgacaccttgaaaccccacccgtgacagcatgggc

SEQ ID NO: 442047 - DNA, 54 bp, Artificial
  Synthetic oligonucleotide
gtggtgagaacattgtcaaactgcaaaacgcacgctcccaactgcttgagttta

SEQ ID NO: 442048 - DNA, 59 bp, Artificial
  Synthetic oligonucleotide
gtggtgagacattcaagttaagggaagagatggtgaggcgggtcgcagacgaggctccc

SEQ ID NO: 442049 - DNA, 59 bp, Artificial
  Synthetic oligonucleotide
gtggtgagcaggatatggaggtagtgtcccatcctccaggctaaattggacacaaaacg

SEQ ID NO: 442050 - DNA, 54 bp, Artificial
  Synthetic oligonucleotide
gtggtgagcattgaccgatttttgagggttcgggatcaacgggggaacgtacta

SEQ ID NO: 442051 - DNA, 57 bp, Artificial
  Synthetic oligonucleotide
gtggtgagcattgatcgatttttaagagttcgggaccatcgggggaatgtactattg

SEQ ID NO: 442052 - DNA, 60 bp, Artificial
  Synthetic oligonucleotide
gtggtgagcgacacactcaacatcgacagaccggttccggctactataacgtatcataag

SEQ ID NO: 442053 - DNA, 59 bp, Artificial
  Synthetic oligonucleotide
gtggtgaggaaccacgatgacttaattacggtgactgccacactagccctcattggttg

SEQ ID NO: 442054 - DNA, 55 bp, Artificial
  Synthetic oligonucleotide
gtggtgaggcccgacgtggttagcccaatacgtagcgaccccgtggcggatgctg

SEQ ID NO: 442055 - DNA, 60 bp, Artificial
  Synthetic oligonucleotide
gtggtgaggcctctcatcattgcgggtcggtggacacgtagtggtgacgctgaatccacg

SEQ ID NO: 442056 - DNA, 57 bp, Artificial
  Synthetic oligonucleotide
gtggtgaggcggatataacatggaattgtacaggaccattcttgagtctaggtaatt

SEQ ID NO: 442057 - DNA, 55 bp, Artificial
  Synthetic oligonucleotide
gtggtgaggttcgcgtacattaaccaaataattaaccgtgacttgttgtcagctt

SEQ ID NO: 442058 - DNA, 55 bp, Artificial
  Synthetic oligonucleotide
gtggtgatagtgctttcatgttccagtccgatagtgtgtcttgggtccccaagag

SEQ ID NO: 442059 - DNA, 55 bp, Artificial
  Synthetic oligonucleotide
gtggtgatattcctacccaggagttccctcccattacggccactcgcgctctaac

SEQ ID NO: 442060 - DNA, 59 bp, Artificial
  Synthetic oligonucleotide
gtggtgatggtaggtatgaggatctgtcaaccgcttcaaaggggcgtggacagaatacc

SEQ ID NO: 442061 - DNA, 54 bp, Artificial
  Synthetic oligonucleotide
gtggtgatggttacaaggcatagaagggttagacccttccgcctacgtaagcgt

SEQ ID NO: 442062 - DNA, 55 bp, Artificial
  Synthetic oligonucleotide
gtggtgattactcagtatatcaagatctctattgtgatgaggtaaaggtaccctc

SEQ ID NO: 442063 - DNA, 60 bp, Artificial
  Synthetic oligonucleotide
gtggtgattacttatccctagccacagtgtacaatagaatcacccaagagagcaaaaata

SEQ ID NO: 442064 - DNA, 59 bp, Artificial
  Synthetic oligonucleotide
gtggtgattcgctatccagccaatgcctttacaggtattacgtgggttatgagttttga

SEQ ID NO: 442065 - DNA, 55 bp, Artificial
  Synthetic oligonucleotide
gtggtgcaacgtgaacgacttagatactttgcctctatgcgttgaacagaccgac

SEQ ID NO: 442066 - DNA, 60 bp, Artificial
  Synthetic oligonucleotide
gtggtgcactatggaggaattcctactgatgtgatcaattcttgggcgggagatattcta

SEQ ID NO: 442067 - DNA, 57 bp, Artificial
  Synthetic oligonucleotide
gtggtgcatactataatgcatagtgttttatcctccacttaaatcgaaggatagtgt

SEQ ID NO: 442068 - DNA, 55 bp, Artificial
  Synthetic oligonucleotide
gtggtgcatcgctccacagtagttttatgcaccaagggtttgaattgggcaacct

SEQ ID NO: 442069 - DNA, 60 bp, Artificial
  Synthetic oligonucleotide
gtggtgcattatgggggaattcctactgatgtagtcaattcctgggcaggagatattcta

SEQ ID NO: 442070 - DNA, 55 bp, Artificial
  Synthetic oligonucleotide
gtggtgcattttaacgatcggacagattatattttaccatcaattactgaggagg

SEQ ID NO: 442071 - DNA, 55 bp, Artificial
  Synthetic oligonucleotide
gtggtgccaacacagttagtctatggtttctggaggaacattaaagtggtgcctg

SEQ ID NO: 442072 - DNA, 54 bp, Artificial
  Synthetic oligonucleotide
gtggtgccaaccagttcatgacaacagaggatgagcaatcaggtaatatattac

SEQ ID NO: 442073 - DNA, 55 bp, Artificial
  Synthetic oligonucleotide
gtggtgccagcattagcagtgtcacagacaaagggacaccaggcaattgaaatgc

SEQ ID NO: 442074 - DNA, 55 bp, Artificial
  Synthetic oligonucleotide
gtggtgcctaaggtatctggtaatcaatatagagtattaagggttatgctgccag

SEQ ID NO: 442075 - DNA, 52 bp, Artificial
  Synthetic oligonucleotide
gtggtgctaactacgtcatctatgttgatgagtcggataacatcttccgttc

SEQ ID NO: 442076 - DNA, 60 bp, Artificial
  Synthetic oligonucleotide
gtggtgctcgctatgatacttccgatagaatgaaactacacagagcttctggattgtgcc

SEQ ID NO: 442077 - DNA, 55 bp, Artificial
  Synthetic oligonucleotide
gtggtgctgaataagatggcgatacctcatgggaatgtgcggaactggcccacag

SEQ ID NO: 442078 - DNA, 55 bp, Artificial
  Synthetic oligonucleotide
gtggtgcttcgagtaatctttctagtcttactaggattttgctgctacagattgt

SEQ ID NO: 442079 - DNA, 60 bp, Artificial
  Synthetic oligonucleotide
gtggtggaacaacatcagctatacaaggtggatatgtagcatatgcaggatccggggtca

SEQ ID NO: 442080 - DNA, 60 bp, Artificial
  Synthetic oligonucleotide
gtggtggaaggtaactacatcgcaaagcatgacgacgtgttagatcgttggtacatcttc

SEQ ID NO: 442081 - DNA, 60 bp, Artificial
  Synthetic oligonucleotide
gtggtggaattgggctcagtggtgaggtgtttgagaattagccactatggctactactca

SEQ ID NO: 442082 - DNA, 55 bp, Artificial
  Synthetic oligonucleotide
gtggtggagatgtagaagcaagttctctacattttaactgtcatggagaattctt

SEQ ID NO: 442083 - DNA, 56 bp, Artificial
  Synthetic oligonucleotide
gtggtggaggcaatagctgtatagttgttctaacgggggaatcagttaggttccaa

SEQ ID NO: 442084 - DNA, 55 bp, Artificial
  Synthetic oligonucleotide
gtggtggcattttgagatgtcaacacggtgtcatgggccttatcactgccggagg

SEQ ID NO: 442085 - DNA, 60 bp, Artificial
  Synthetic oligonucleotide
gtggtggccgcttgtgcaggagagctgctgttattgccagcgctactcgattggaaaagc

SEQ ID NO: 442086 - DNA, 57 bp, Artificial
  Synthetic oligonucleotide
gtggtggccgggtttaatatcccgaagatacctagcatagctccaaaattggagtca

SEQ ID NO: 442087 - DNA, 55 bp, Artificial
  Synthetic oligonucleotide
gtggtggcgccacttctctttcatttacggttgcaagtacgggtgttcctaacgc

SEQ ID NO: 442088 - DNA, 52 bp, Artificial
  Synthetic oligonucleotide
gtggtggctgcttgctaagtttacgaaactactgttactcatatatacattg

SEQ ID NO: 442089 - DNA, 55 bp, Artificial
  Synthetic oligonucleotide
gtggtgggacggtgtgaatgaagtatggtatgcgtttgattacctgtcaagcgcc

SEQ ID NO: 442090 - DNA, 55 bp, Artificial
  Synthetic oligonucleotide
gtggtgggccctcgaccaatataattgcgcgctcatcgcttagttatcgcgtggt

SEQ ID NO: 442091 - DNA, 55 bp, Artificial
  Synthetic oligonucleotide
gtggtggggatattgaggaattgtcaacgatggtggatatggggcagcttaggct

SEQ ID NO: 442092 - DNA, 51 bp, Artificial
  Synthetic oligonucleotide
gtggtgggggccgcattactggtacttcttgcactggcacgccgacctcaa

SEQ ID NO: 442093 - DNA, 55 bp, Artificial
  Synthetic oligonucleotide
gtggtgggtattcggatgggttgttatggtatgttcctataacgcacccgtcaaa

SEQ ID NO: 442094 - DNA, 58 bp, Artificial
  Synthetic oligonucleotide
gtggtgggtgtcttacgtgtgtgtccctgtgagattagtataggtggtgggtagtata

SEQ ID NO: 442095 - DNA, 55 bp, Artificial
  Synthetic oligonucleotide
gtggtggtaaattgttgtgtaagcacggtgtaataggtatcataactgcaggtgg

SEQ ID NO: 442096 - DNA, 58 bp, Artificial
  Synthetic oligonucleotide
gtggtggtaactcattatcaactattagatgttcattacctaaattgacaaaggcacg

SEQ ID NO: 442097 - DNA, 55 bp, Artificial
  Synthetic oligonucleotide
gtggtggtaggaacgaccgacaaagcgggcgcgcctacctacaactggggtgaga

SEQ ID NO: 442098 - DNA, 52 bp, Artificial
  Synthetic oligonucleotide
gtggtggtccaacccttacccgtgtttacgaggcgcgttaattgcggcggag

SEQ ID NO: 442099 - DNA, 55 bp, Artificial
  Synthetic oligonucleotide
gtggtggtgaatcctagtgatagctcatggagtctcggtaagtgggtaactggct

SEQ ID NO: 442100 - DNA, 55 bp, Artificial
  Synthetic oligonucleotide
gtggtggtggataaactcgatcccacagattatcgaggcggcattcctggcttgc

SEQ ID NO: 442101 - DNA, 53 bp, Artificial
  Synthetic oligonucleotide
gtggtggtgggaacgaccgacaggttgggcgtccctacctacaactggggtga

SEQ ID NO: 442102 - DNA, 53 bp, Artificial
  Synthetic oligonucleotide
gtggtgtaaaccaacactcgcaaggtcgtaacgagtaattctgggacgggacc

SEQ ID NO: 442103 - DNA, 59 bp, Artificial
  Synthetic oligonucleotide
gtggtgtaaatagcaaagcaagctagagttctattactaaacacagcatgacttaaaaa

SEQ ID NO: 442104 - DNA, 60 bp, Artificial
  Synthetic oligonucleotide
gtggtgtaatacattccataatacatgatcaactgctctaattacattgttaatactgat

SEQ ID NO: 442105 - DNA, 58 bp, Artificial
  Synthetic oligonucleotide
gtggtgtacaaactgtggcaacatgggcacttggatgtcggtacgatggagaaacccc

SEQ ID NO: 442106 - DNA, 51 bp, Artificial
  Synthetic oligonucleotide
gtggtgtagtctaccacaaggctggattttaagtccattgatatatcaaag

SEQ ID NO: 442107 - DNA, 55 bp, Artificial
  Synthetic oligonucleotide
gtggtgtataatcaccaggaagctgggaagtacgaaaaccacactgagaatgcgt

SEQ ID NO: 442108 - DNA, 54 bp, Artificial
  Synthetic oligonucleotide
gtggtgtatattaagtcgcgaaggtacgcatataaaagtttggagtaacgcgtc

SEQ ID NO: 442109 - DNA, 58 bp, Artificial
  Synthetic oligonucleotide
gtggtgtatgtgaatggagagactcccgttaactttaatggagtgaagctgactgcgg

SEQ ID NO: 442110 - DNA, 55 bp, Artificial
  Synthetic oligonucleotide
gtggtgtcacggtttggtgtaatcaagaaaccgacaagaccttgcgtaactttga

SEQ ID NO: 442111 - DNA, 56 bp, Artificial
  Synthetic oligonucleotide
gtggtgtgagggtagttattcctgatcccccccctttcttaaggatcagatgttga

SEQ ID NO: 442112 - DNA, 59 bp, Artificial
  Synthetic oligonucleotide
gtggtgttagctctgtagctcaggtaggatataaattttttagtgagtgggatcataaa

SEQ ID NO: 442113 - DNA, 52 bp, Artificial
  Synthetic oligonucleotide
gtggtgtttacaccgaacaccgacacgtacatcgtagtggcccccgttccgg

SEQ ID NO: 442114 - DNA, 60 bp, Artificial
  Synthetic oligonucleotide
gtggtgtttctaaccgccagcgcagaaatgccaggagggccgcgaattttcgcaatcaga

SEQ ID NO: 442115 - DNA, 55 bp, Artificial
  Synthetic oligonucleotide
gtggtgttttactgtcttcttcctttctgcgaccgctcccgacctggttcctctc

SEQ ID NO: 442116 - DNA, 55 bp, Artificial
  Synthetic oligonucleotide
gtggttaaagggtgacgattggtcccagccaataccacctcgtgtccaaagacga

SEQ ID NO: 442117 - DNA, 50 bp, Artificial
  Synthetic oligonucleotide
gtggttaacaagtggaagttcaagtattgggaaagtgcattggacaaaag

SEQ ID NO: 442118 - DNA, 54 bp, Artificial
  Synthetic oligonucleotide
gtggttaacactaggatatgtactaagaacggagtaccgaggaattattactcg

SEQ ID NO: 442119 - DNA, 55 bp, Artificial
  Synthetic oligonucleotide
gtggttaactatgactagtaccattgtttctaacttcggaatctataataagacg

SEQ ID NO: 442120 - DNA, 55 bp, Artificial
  Synthetic oligonucleotide
gtggttaagagactcagagattttagctgctacgtactcattaaaccagtgaact

SEQ ID NO: 442121 - DNA, 60 bp, Artificial
  Synthetic oligonucleotide
gtggttaatccacggtgggatgccatcaggttccccatgtaccacagtgctcaactcatt

SEQ ID NO: 442122 - DNA, 55 bp, Artificial
  Synthetic oligonucleotide
gtggttacaacaagtggaacctatgtcagtgcaatagctcaagctaaagcatcac

SEQ ID NO: 442123 - DNA, 60 bp, Artificial
  Synthetic oligonucleotide
gtggttacgatttcaattgtcctgcaagcactacagatgttacacactatggtggttatg

SEQ ID NO: 442124 - DNA, 57 bp, Artificial
  Synthetic oligonucleotide
gtggttacgcggatctggacggtaatgtagcggtcggaactggatggcgatgggaaa

SEQ ID NO: 442125 - DNA, 57 bp, Artificial
  Synthetic oligonucleotide
gtggttaggatctactccgtaagattgtaccgaaaaattcaactccatcgagctcaa

SEQ ID NO: 442126 - DNA, 55 bp, Artificial
  Synthetic oligonucleotide
gtggttagtaggaggtatctagcatcattacacaagagggctttacccacctcag

SEQ ID NO: 442127 - DNA, 55 bp, Artificial
  Synthetic oligonucleotide
gtggttatcctgctttaatgcctttgtatgcatgtattcagtcgaagcaggcttt

SEQ ID NO: 442128 - DNA, 50 bp, Artificial
  Synthetic oligonucleotide
gtggttatcctttcgtaaaggaaggatggacacgagcgaaaattttcgga

SEQ ID NO: 442129 - DNA, 55 bp, Artificial
  Synthetic oligonucleotide
gtggttattggagtccacacggctgccgctcgtgggggtaacactgttatatgtg

SEQ ID NO: 442130 - DNA, 59 bp, Artificial
  Synthetic oligonucleotide
gtggttcaaaatagcaaggacacagtaattttgtccccaattgcattggtgatcaccaa

SEQ ID NO: 442131 - DNA, 55 bp, Artificial
  Synthetic oligonucleotide
gtggttcaagtgccatgtgccagtctttgacacagatccaatgttagctgaaata

SEQ ID NO: 442132 - DNA, 57 bp, Artificial
  Synthetic oligonucleotide
gtggttcaatgctcgtaaaggccggagaaggaaagctcaaatccgcgatacgacaaa

SEQ ID NO: 442133 - DNA, 55 bp, Artificial
  Synthetic oligonucleotide
gtggttcagagctctagaactggttctacgagagattggttactcggaggaggct

SEQ ID NO: 442134 - DNA, 58 bp, Artificial
  Synthetic oligonucleotide
gtggttcataaggctcatttactggcccagaacattattcgggatttgggatataaga

SEQ ID NO: 442135 - DNA, 51 bp, Artificial
  Synthetic oligonucleotide
gtggttcatccagacagtgtgccacaggtcgtagttagtgaggtgcatcgg

SEQ ID NO: 442136 - DNA, 56 bp, Artificial
  Synthetic oligonucleotide
gtggttcatccatcccaggtatggggggctcggtcttccgcttacgcggcctgtta

SEQ ID NO: 442137 - DNA, 55 bp, Artificial
  Synthetic oligonucleotide
gtggttcatgattatcaccttgacttgtgactctatcgtcaactcgcgaggctca

SEQ ID NO: 442138 - DNA, 55 bp, Artificial
  Synthetic oligonucleotide
gtggttcatgtcacatcaaggaatgatgattgaaggagtctatatccctaaactc

SEQ ID NO: 442139 - DNA, 58 bp, Artificial
  Synthetic oligonucleotide
gtggttccactactattgctttaccccctgccaccattgtcatcacctttcctcaggc

SEQ ID NO: 442140 - DNA, 54 bp, Artificial
  Synthetic oligonucleotide
gtggttccagtgcgctgcttacatctgcgatggacacgctggctgctaagaacc

SEQ ID NO: 442141 - DNA, 53 bp, Artificial
  Synthetic oligonucleotide
gtggttccccccactagtttggtcgatgaggctaggaactccccacgggtgac

SEQ ID NO: 442142 - DNA, 56 bp, Artificial
  Synthetic oligonucleotide
gtggttcctatggtgcttctacaagcccaggattcacctggttttaattcaattgg

SEQ ID NO: 442143 - DNA, 58 bp, Artificial
  Synthetic oligonucleotide
gtggttcctcacgaactacgtctgacgttggcaagcaagcgggaggtactagcgacga

SEQ ID NO: 442144 - DNA, 60 bp, Artificial
  Synthetic oligonucleotide
gtggttcctccctccttgccgtgatgggcttattgcaagatctgtatcattcgatcaatt

SEQ ID NO: 442145 - DNA, 60 bp, Artificial
  Synthetic oligonucleotide
gtggttcctctggtcgtccaaggtggtcagaaattgtccaaggctgctaagcgattgctc

SEQ ID NO: 442146 - DNA, 56 bp, Artificial
  Synthetic oligonucleotide
gtggttccttactctgtcaataacttctcaagttaatggtaaacgccttgtggaca

SEQ ID NO: 442147 - DNA, 55 bp, Artificial
  Synthetic oligonucleotide
gtggttcgtcatgtagtacggttcgtatgttatccaagaaactcgtgaacgaatc

SEQ ID NO: 442148 - DNA, 59 bp, Artificial
  Synthetic oligonucleotide
gtggttcgtctaactatcaaagacgatggtatacacgtcatcacgtgtataaacgtaca

SEQ ID NO: 442149 - DNA, 55 bp, Artificial
  Synthetic oligonucleotide
gtggttcgttatcaatcgtgtcctcaatctgtgttaagatatggagctgaatcaa

SEQ ID NO: 442150 - DNA, 53 bp, Artificial
  Synthetic oligonucleotide
gtggttctttcacattgccggttgaactaacaaagaaaggatgtttagtcccc

SEQ ID NO: 442151 - DNA, 55 bp, Artificial
  Synthetic oligonucleotide
gtggttctttgactactatgcgacattaccgctcgaaaggagaggagagcctcgg

SEQ ID NO: 442152 - DNA, 59 bp, Artificial
  Synthetic oligonucleotide
gtggttgaaagatcacggggtagagccagacactacagcagctaaacggagggatcaaa

SEQ ID NO: 442153 - DNA, 54 bp, Artificial
  Synthetic oligonucleotide
gtggttgaccccgatacttttactacagccctccggtccggctattccaccaca

SEQ ID NO: 442154 - DNA, 55 bp, Artificial
  Synthetic oligonucleotide
gtggttgataccactcgtagcactaatatgacattatgcactgaagtaactaagg

SEQ ID NO: 442155 - DNA, 55 bp, Artificial
  Synthetic oligonucleotide
gtggttgcactatatgcgctgtctaacgacttcaataatagagaagatgtgataa

SEQ ID NO: 442156 - DNA, 55 bp, Artificial
  Synthetic oligonucleotide
gtggttgcatatggggtgtggccatcatatctaagcgataaagatgccaacccgg

SEQ ID NO: 442157 - DNA, 59 bp, Artificial
  Synthetic oligonucleotide
gtggttgcccctgacgcgcctttctggattaacgcaactctgcaacttagtgtgtcgcc

SEQ ID NO: 442158 - DNA, 52 bp, Artificial
  Synthetic oligonucleotide
gtggttgcctacggacgatggcctgagtacctgagagacagcgaggccaacc

SEQ ID NO: 442159 - DNA, 60 bp, Artificial
  Synthetic oligonucleotide
gtggttgcctcgatggattgctctcgagtcgactggaaacgcgtcactagttctatccct

SEQ ID NO: 442160 - DNA, 60 bp, Artificial
  Synthetic oligonucleotide
gtggttgctaactgtggtaccgaacgacatgttcataagggaatcattagttgcatgtca

SEQ ID NO: 442161 - DNA, 56 bp, Artificial
  Synthetic oligonucleotide
gtggttgctgcgagcagccctgctacgaagcccaacggacaagggttgtaccctga

SEQ ID NO: 442162 - DNA, 55 bp, Artificial
  Synthetic oligonucleotide
gtggttggaactacccactcctgaacaaagcctgcaagaataacgcaggcgctgc

SEQ ID NO: 442163 - DNA, 55 bp, Artificial
  Synthetic oligonucleotide
gtggttggagatctaagtcaaccgactccgacgaaactaccatcatgcctccccg

SEQ ID NO: 442164 - DNA, 51 bp, Artificial
  Synthetic oligonucleotide
gtggttggatacgttgtgcacagggagcaatccttgagtcctaccacactg

SEQ ID NO: 442165 - DNA, 60 bp, Artificial
  Synthetic oligonucleotide
gtggttggccggctccctactaacaatctcatggtgagatgatggcacgtcccggaggaa

SEQ ID NO: 442166 - DNA, 60 bp, Artificial
  Synthetic oligonucleotide
gtggttggcttacatataggtgctgcggatggttataatgtggcatctaatgtagcctgg

SEQ ID NO: 442167 - DNA, 55 bp, Artificial
  Synthetic oligonucleotide
gtggttgggagccaggtaccttgagttcgaagcactcggatttttaaatgaagac

SEQ ID NO: 442168 - DNA, 54 bp, Artificial
  Synthetic oligonucleotide
gtggttggtcgtccagttctcgacgtaattacgcacgatatggtacgtttaaaa

SEQ ID NO: 442169 - DNA, 56 bp, Artificial
  Synthetic oligonucleotide
gtggttggtgtatgacgcacagccttcggggaatcccccgacagtgaaggatattt

SEQ ID NO: 442170 - DNA, 55 bp, Artificial
  Synthetic oligonucleotide
gtggttgtaaatgggccggaccgggccggctagcaagaaaagaaggcgcgcacta

SEQ ID NO: 442171 - DNA, 52 bp, Artificial
  Synthetic oligonucleotide
gtggttgtatcccctacaccctaccctcccttccacataggacgaataaacg

SEQ ID NO: 442172 - DNA, 55 bp, Artificial
  Synthetic oligonucleotide
gtggttgtgagcattgatcgtttcttaagggtccgagatcagagaggaaacgtgc

SEQ ID NO: 442173 - DNA, 56 bp, Artificial
  Synthetic oligonucleotide
gtggttgtggcccctggtttggggacactgcccgatgtggtgcgttttgctggtcg

SEQ ID NO: 442174 - DNA, 60 bp, Artificial
  Synthetic oligonucleotide
gtggtttaagatgattctcgattggtctgcgcaaagcaaggagcaaaaattacgtgatct

SEQ ID NO: 442175 - DNA, 60 bp, Artificial
  Synthetic oligonucleotide
gtggtttacagcattttccacagacttaacacctactgatatggctcaactactcatgtc

SEQ ID NO: 442176 - DNA, 60 bp, Artificial
  Synthetic oligonucleotide
gtggtttacggcattctccacagatttaacacctactgatatggctcagttacttatgtc

SEQ ID NO: 442177 - DNA, 59 bp, Artificial
  Synthetic oligonucleotide
gtggtttacgttgaatgtgacctatgcgcgtgtactttgagctcacaaagttattgcgt

SEQ ID NO: 442178 - DNA, 55 bp, Artificial
  Synthetic oligonucleotide
gtggtttagctgttataccttgcattggttttccggacagtgcgtcggagcaacg

SEQ ID NO: 442179 - DNA, 60 bp, Artificial
  Synthetic oligonucleotide
gtggtttaggtccgaaatctgaaggagagctatacatcgttaacagcgagtgtgtggtca

SEQ ID NO: 442180 - DNA, 59 bp, Artificial
  Synthetic oligonucleotide
gtggtttagtttatcacccaattacagagtgtggtacccattgcgtctgtggcgcaaga

SEQ ID NO: 442181 - DNA, 60 bp, Artificial
  Synthetic oligonucleotide
gtggtttatgggctgtgtgataatgtggtccattgtttggtgataaggttttggatgtga

SEQ ID NO: 442182 - DNA, 54 bp, Artificial
  Synthetic oligonucleotide
gtggtttatttgttctgactatcttattagacaaaaaaccctatctacctgaag

SEQ ID NO: 442183 - DNA, 60 bp, Artificial
  Synthetic oligonucleotide
gtggtttcaaccgcagctgccatggtgcatggtagcactctctcatatgcagttcgcacc

SEQ ID NO: 442184 - DNA, 55 bp, Artificial
  Synthetic oligonucleotide
gtggtttcaagaactatgccccgggtgcgcaactcaatggccgctacactgcccc

SEQ ID NO: 442185 - DNA, 60 bp, Artificial
  Synthetic oligonucleotide
gtggtttcacgcacagcttcttgacgacccgtcaccacatacatcttatcaaacaccctc

SEQ ID NO: 442186 - DNA, 55 bp, Artificial
  Synthetic oligonucleotide
gtggtttcaggatgagaagaggtgcctataccccccgttctactccattccctcg

SEQ ID NO: 442187 - DNA, 55 bp, Artificial
  Synthetic oligonucleotide
gtggtttcatatttcctgtcttacttttggacgtgaaactgtcctggagtatttg

SEQ ID NO: 442188 - DNA, 55 bp, Artificial
  Synthetic oligonucleotide
gtggtttcccatactttaagtttgtctgccactctctttgtgcgcctatgaggtg

SEQ ID NO: 442189 - DNA, 53 bp, Artificial
  Synthetic oligonucleotide
gtggtttctgaattacgttacgaaatacgaagttgaaagaagggcggagccgc

SEQ ID NO: 442190 - DNA, 57 bp, Artificial
  Synthetic oligonucleotide
gtggtttgatagaggggggagttgaggaagacgaatttcgcattatggagagtccag

SEQ ID NO: 442191 - DNA, 60 bp, Artificial
  Synthetic oligonucleotide
gtggtttgcagcgttgactcgtccgctgcgtgtatttttctctagtgctgtccacgcgct

SEQ ID NO: 442192 - DNA, 55 bp, Artificial
  Synthetic oligonucleotide
gtggtttgcatcacacgagatatcgcacatccgtgatggaccttgtggtatcgga

SEQ ID NO: 442193 - DNA, 55 bp, Artificial
  Synthetic oligonucleotide
gtggtttgccagtaggtgggaacgagaagaaggccaaactgtcaaatgcagtggc

SEQ ID NO: 442194 - DNA, 60 bp, Artificial
  Synthetic oligonucleotide
gtggtttgcgtacagtgaaaggttgcatatcacagactcatccgtcgatcttacttgtgt

SEQ ID NO: 442195 - DNA, 60 bp, Artificial
  Synthetic oligonucleotide
gtggtttgctctgacttgaatgtgaaatacccggctgcgtgtgtacattggcgtctccac

SEQ ID NO: 442196 - DNA, 58 bp, Artificial
  Synthetic oligonucleotide
gtggttttaaacgatgctcctggggttctagatgttgcactagtgaatccaataacta

SEQ ID NO: 442197 - DNA, 50 bp, Artificial
  Synthetic oligonucleotide
gtggtttttggtcaaggacacttttcagcactcgaagttgacccccttca

SEQ ID NO: 442198 - DNA, 59 bp, Artificial
  Synthetic oligonucleotide
gtgtaaaatctagcctacccctgaacactcctatataaggagaagtagtctgcatgtaa

SEQ ID NO: 442199 - DNA, 55 bp, Artificial
  Synthetic oligonucleotide
gtgtaaaatgaaccgccgaactatgtcagtttaatgcaacactggacaagtttgt

SEQ ID NO: 442200 - DNA, 60 bp, Artificial
  Synthetic oligonucleotide
gtgtaaacatgcgtggagaaacacctacgttgcaagactatgtgttagatttgcaacctg

SEQ ID NO: 442201 - DNA, 60 bp, Artificial
  Synthetic oligonucleotide
gtgtaaacatggggttataggcatagtaactgcaggaggtgagaatcatgttgcattcat

SEQ ID NO: 442202 - DNA, 59 bp, Artificial
  Synthetic oligonucleotide
gtgtaaagaggtatggtgatactctgatggagtataccgaaaccataccgagacctgaa

SEQ ID NO: 442203 - DNA, 60 bp, Artificial
  Synthetic oligonucleotide
gtgtaaagcaacccaaggtctgtgagtgcctgcacaacgtcattaagtgaggtctgtgac

SEQ ID NO: 442204 - DNA, 55 bp, Artificial
  Synthetic oligonucleotide
gtgtaaaggggacggcagttcatagtgcaatcgaacgttattgcaagtttgacga

SEQ ID NO: 442205 - DNA, 60 bp, Artificial
  Synthetic oligonucleotide
gtgtaacacagaacaacacgactttaatcgaaaacacatatgtcaacaatactactgtca

SEQ ID NO: 442206 - DNA, 56 bp, Artificial
  Synthetic oligonucleotide
gtgtaacacccacagacaagtataggggcccaactacctatacaattaatccacca

SEQ ID NO: 442207 - DNA, 50 bp, Artificial
  Synthetic oligonucleotide
gtgtaacagttgtatggttgcatcgcgcgcagcaaaccgagaagtagtcc

SEQ ID NO: 442208 - DNA, 58 bp, Artificial
  Synthetic oligonucleotide
gtgtaacatcgtagttgtggtctgctgtaaggtcatcgtaggtgagtgtaatgagtcg

SEQ ID NO: 442209 - DNA, 50 bp, Artificial
  Synthetic oligonucleotide
gtgtaaccaaaatcccctgtctgccagcatggcccctgtctgccagcatg

SEQ ID NO: 442210 - DNA, 55 bp, Artificial
  Synthetic oligonucleotide
gtgtaaccagcagacgacgctgtcgtatctcttcatatagtacacttggcaacgg

SEQ ID NO: 442211 - DNA, 50 bp, Artificial
  Synthetic oligonucleotide
gtgtaacccacgggggcgcaccacaggtatgatctacacgggggatggac

SEQ ID NO: 442212 - DNA, 59 bp, Artificial
  Synthetic oligonucleotide
gtgtaaccctgcgccaacgtcttagcgtccgtcgcctgtgtgtggatcgtagtgtcacc

SEQ ID NO: 442213 - DNA, 55 bp, Artificial
  Synthetic oligonucleotide
gtgtaaccgcggaggctgggtcaaccagataggggtagccgtggaggaaatgccc

SEQ ID NO: 442214 - DNA, 53 bp, Artificial
  Synthetic oligonucleotide
gtgtaaccttccaggtacttgactcaatatactattccgtaataggttacggt

SEQ ID NO: 442215 - DNA, 57 bp, Artificial
  Synthetic oligonucleotide
gtgtaacgcttggtggatatggcaactacaccccaagcgggtcggttactgttgata

SEQ ID NO: 442216 - DNA, 54 bp, Artificial
  Synthetic oligonucleotide
gtgtaacgtacaagcacttctgtttccccggagcgaggtataggtggtacccac

SEQ ID NO: 442217 - DNA, 55 bp, Artificial
  Synthetic oligonucleotide
gtgtaagaagggtaagaggttctctttcgcaggtgaggtgatcgacggtccctgc

SEQ ID NO: 442218 - DNA, 53 bp, Artificial
  Synthetic oligonucleotide
gtgtaagactagcggtataacattcccacagtgagaaccgtggacggaagaca

SEQ ID NO: 442219 - DNA, 55 bp, Artificial
  Synthetic oligonucleotide
gtgtaagcattgctcgttactccgttcttgtggtaatgcagtcacatggatgccc

SEQ ID NO: 442220 - DNA, 57 bp, Artificial
  Synthetic oligonucleotide
gtgtaagcttacttggggagattgatttgcccgagtttatgcgttacgcgtgaaggc

SEQ ID NO: 442221 - DNA, 53 bp, Artificial
  Synthetic oligonucleotide
gtgtaaggcgaagaagcaaaggaggaccgaggaaattggttacgggaatacac

SEQ ID NO: 442222 - DNA, 56 bp, Artificial
  Synthetic oligonucleotide
gtgtaagggtgtattgaccttcttgcaaacacgggggattattccatccacacctg

SEQ ID NO: 442223 - DNA, 59 bp, Artificial
  Synthetic oligonucleotide
gtgtaagtcaatactattgcagtacatttaagtatccatttagtaattattatgagtta

SEQ ID NO: 442224 - DNA, 55 bp, Artificial
  Synthetic oligonucleotide
gtgtaagtgcaatttacatcgactagtaagtggtttccggaatctccaaaagact

SEQ ID NO: 442225 - DNA, 51 bp, Artificial
  Synthetic oligonucleotide
gtgtaagttgcaatgaaggatcattattgttagttagtttacccttatcac

SEQ ID NO: 442226 - DNA, 56 bp, Artificial
  Synthetic oligonucleotide
gtgtaagttttcgactctcacttctatgtattcagccatgtttcagctagatcact

SEQ ID NO: 442227 - DNA, 55 bp, Artificial
  Synthetic oligonucleotide
gtgtaataaattgcacgaagtaccacgagaggtagaatgtaataaggttacggga

SEQ ID NO: 442228 - DNA, 57 bp, Artificial
  Synthetic oligonucleotide
gtgtaataactacccggctttgcggccgaccctcacacaacactgcagatagggggc

SEQ ID NO: 442229 - DNA, 55 bp, Artificial
  Synthetic oligonucleotide
gtgtaatagggactggttgtcacttgcgtgtctgaaacttcgaattccagttacg

SEQ ID NO: 442230 - DNA, 52 bp, Artificial
  Synthetic oligonucleotide
gtgtaatcacaatagcatcattcgggctaagatcatttcgacaaaactgaat

SEQ ID NO: 442231 - DNA, 59 bp, Artificial
  Synthetic oligonucleotide
gtgtaatcctctgaatccgtttgtcagtcataaggaaattgagtccgtaaacaatgctg

SEQ ID NO: 442232 - DNA, 59 bp, Artificial
  Synthetic oligonucleotide
gtgtaatctctccacgcgttattttggcacttttcaacagcggatcgttagacagggca

SEQ ID NO: 442233 - DNA, 55 bp, Artificial
  Synthetic oligonucleotide
gtgtaatgattcttaatcatagtcgtagtaatacgctgacctcttacaaggggtc

SEQ ID NO: 442234 - DNA, 55 bp, Artificial
  Synthetic oligonucleotide
gtgtaatggaggttcaccattcactgccagagccatattagatactggtgcttca

SEQ ID NO: 442235 - DNA, 58 bp, Artificial
  Synthetic oligonucleotide
gtgtaattaagtatagtgattatgtggaagtgattgtatttgctaattttactccgcg

SEQ ID NO: 442236 - DNA, 58 bp, Artificial
  Synthetic oligonucleotide
gtgtaattaattgggcctataaatattttacatgtctcccgttcgtcaatgcaagatg

SEQ ID NO: 442237 - DNA, 58 bp, Artificial
  Synthetic oligonucleotide
gtgtaattcccaccacctgtacagagacaagcactacttcgtgcggggtggcatgccc

SEQ ID NO: 442238 - DNA, 56 bp, Artificial
  Synthetic oligonucleotide
gtgtaattccggaacacgtccggatagaacagagagtccgcgaaattgtgcgttcg

SEQ ID NO: 442239 - DNA, 56 bp, Artificial
  Synthetic oligonucleotide
gtgtacaaacagggatttatgcccatcgtctgctccgaaaacggagagtttaaaca

SEQ ID NO: 442240 - DNA, 60 bp, Artificial
  Synthetic oligonucleotide
gtgtacaaagccagatctcagcaatttaatatacaacattcagtgtcaatgttagagtca

SEQ ID NO: 442241 - DNA, 49 bp, Artificial
  Synthetic oligonucleotide
gtgtacaacccgcccaggaccaactaccccgggcgttttacaaacttgt

SEQ ID NO: 442242 - DNA, 55 bp, Artificial
  Synthetic oligonucleotide
gtgtacaacgagatacctaaagagcacagacaaacggtggttagcatagtggatg

SEQ ID NO: 442243 - DNA, 56 bp, Artificial
  Synthetic oligonucleotide
gtgtacaagacccaacaataataccagaacaagtgtaaagataagaccaagacaaa

SEQ ID NO: 442244 - DNA, 60 bp, Artificial
  Synthetic oligonucleotide
gtgtacaagcaagacttaaccctgcgtctgcagtattcgatagcacatcccgcagtcgca

SEQ ID NO: 442245 - DNA, 58 bp, Artificial
  Synthetic oligonucleotide
gtgtacaaggcgactggtgccccatctctgggggactatgttcggcccgcctacatcg

SEQ ID NO: 442246 - DNA, 60 bp, Artificial
  Synthetic oligonucleotide
gtgtacaatatatactagaactctcaatctcgtgaagcacgagattcacacacgtggcgg

SEQ ID NO: 442247 - DNA, 51 bp, Artificial
  Synthetic oligonucleotide
gtgtacaattacaataacagtttgagagcactagaaaatgacatggctctt

SEQ ID NO: 442248 - DNA, 51 bp, Artificial
  Synthetic oligonucleotide
gtgtacaattataacactagaccactaccaactgatttcatgatacgaaat

SEQ ID NO: 442249 - DNA, 59 bp, Artificial
  Synthetic oligonucleotide
gtgtacacaaggtcctccagtgttaagcgtcctgccctacagattagtggtctcgtata

SEQ ID NO: 442250 - DNA, 58 bp, Artificial
  Synthetic oligonucleotide
gtgtacaccaattgggctctctcaaacttgctgattcaattggtgtattggggtaact

SEQ ID NO: 442251 - DNA, 60 bp, Artificial
  Synthetic oligonucleotide
gtgtacaccagccccaagtcactgagggactgaatgacatcatttaagtcaacctgacct

SEQ ID NO: 442252 - DNA, 60 bp, Artificial
  Synthetic oligonucleotide
gtgtacacccaactatgtgaccataggctaatgtcggcagccgtcaaggatgagagggcc

SEQ ID NO: 442253 - DNA, 55 bp, Artificial
  Synthetic oligonucleotide
gtgtacaccttttgcaccagaagcttaccttttcctgcggacagccgcatcagct

SEQ ID NO: 442254 - DNA, 55 bp, Artificial
  Synthetic oligonucleotide
gtgtacacttacacaatttcgggcaactccctgcattacgtgccagaagggcacc

SEQ ID NO: 442255 - DNA, 60 bp, Artificial
  Synthetic oligonucleotide
gtgtacagctgcgaccctgatggtgtaaggataaggacaactggattcaaggtggatgct

SEQ ID NO: 442256 - DNA, 60 bp, Artificial
  Synthetic oligonucleotide
gtgtacataaatacagctttgctcaacgcatcctgtgccgccatggatgaattccaattg

SEQ ID NO: 442257 - DNA, 60 bp, Artificial
  Synthetic oligonucleotide
gtgtacatacggcagatgctcgtttacaacgtagtgaatttcttggtggacatagtcagt

SEQ ID NO: 442258 - DNA, 60 bp, Artificial
  Synthetic oligonucleotide
gtgtacatatgcttaagcctcatgagactggctgtgaagccggctgagtcatttatgaag

SEQ ID NO: 442259 - DNA, 60 bp, Artificial
  Synthetic oligonucleotide
gtgtacatgcacaactggagtgtactactgtgagtctagaggaaaacactaccccatcac

SEQ ID NO: 442260 - DNA, 52 bp, Artificial
  Synthetic oligonucleotide
gtgtacatgtggatgtgaacatggatggagtatccccgaagatcgaaggagt

SEQ ID NO: 442261 - DNA, 60 bp, Artificial
  Synthetic oligonucleotide
gtgtacattgtcaaagctcagcgcatgacctacacccactgggccctgcgctgcgtgaac

SEQ ID NO: 442262 - DNA, 60 bp, Artificial
  Synthetic oligonucleotide
gtgtaccaatagtgtgacctcgtgatggcagcttaagtcaggaaatgtatatttaaactc

SEQ ID NO: 442263 - DNA, 55 bp, Artificial
  Synthetic oligonucleotide
gtgtaccccaattgagagctcgctctataagtcatatgaattggtgtaatggggc

SEQ ID NO: 442264 - DNA, 58 bp, Artificial
  Synthetic oligonucleotide
gtgtaccccgaacaatccggttggacgctggtgcattcacgcgatggtggttgggaga

SEQ ID NO: 442265 - DNA, 54 bp, Artificial
  Synthetic oligonucleotide
gtgtacccctgggagggtaggttagctacgccggagcttagctcgcccacgttc

SEQ ID NO: 442266 - DNA, 57 bp, Artificial
  Synthetic oligonucleotide
gtgtaccggtcaacggatgaatggtttacgcttgcgttgtacccagagtctagcgtg

SEQ ID NO: 442267 - DNA, 55 bp, Artificial
  Synthetic oligonucleotide
gtgtacctaaggcgggagtaggctcgggactcaaagacgtagtcgttgcaggttc

SEQ ID NO: 442268 - DNA, 56 bp, Artificial
  Synthetic oligonucleotide
gtgtacctgaatggtcctatatagtggaaagggaaaacccagtaaatggtctgtgc

SEQ ID NO: 442269 - DNA, 56 bp, Artificial
  Synthetic oligonucleotide
gtgtacctgcataaaatagaccttggcccaccaatatcgctggagaagctagatgt

SEQ ID NO: 442270 - DNA, 57 bp, Artificial
  Synthetic oligonucleotide
gtgtaccttatttgggaatagcttcagcttacaattgtttctatgatggatattccc

SEQ ID NO: 442271 - DNA, 60 bp, Artificial
  Synthetic oligonucleotide
gtgtacgaattgtcgcacgcgaatgaccctggatgagtacaacctgcagtgtaagcgaat

SEQ ID NO: 442272 - DNA, 55 bp, Artificial
  Synthetic oligonucleotide
gtgtacgaggtgccctctaatcagtgggtcgcgcgcaattactcacatttgctgt

SEQ ID NO: 442273 - DNA, 55 bp, Artificial
  Synthetic oligonucleotide
gtgtacggcacgaaaatgtactgttatacaaagcacgccaaatgggcctaagcca

SEQ ID NO: 442274 - DNA, 52 bp, Artificial
  Synthetic oligonucleotide
gtgtacgtaaaccgaacagccacagtctaagtcgagtcttctacgtctaatg

SEQ ID NO: 442275 - DNA, 60 bp, Artificial
  Synthetic oligonucleotide
gtgtacgtaaattgtgcagccgcactctaaatcaacgcgacgtcgtctgattgctcgttt

SEQ ID NO: 442276 - DNA, 59 bp, Artificial
  Synthetic oligonucleotide
gtgtacgtactgaaggaggctctctcgtggagctgaattggcttcaagttgacccggat

SEQ ID NO: 442277 - DNA, 56 bp, Artificial
  Synthetic oligonucleotide
gtgtacgtatgtttggtcttgacactgacaccctcgctattcgttccggaacttta

SEQ ID NO: 442278 - DNA, 60 bp, Artificial
  Synthetic oligonucleotide
gtgtacgtccgcactcgaccgatacccaccatgctctctccaagtacgctctggcccaca

SEQ ID NO: 442279 - DNA, 55 bp, Artificial
  Synthetic oligonucleotide
gtgtacgtggcaagttatacggaggtggacatgttgtcaaggctcctagttgaca

SEQ ID NO: 442280 - DNA, 60 bp, Artificial
  Synthetic oligonucleotide
gtgtacgtggtgctgtgcttgagcacccgaacatagcgcgcatgagggggattgcgcgag

SEQ ID NO: 442281 - DNA, 55 bp, Artificial
  Synthetic oligonucleotide
gtgtactacactgcactacagctgcttttagtttattcagaaatgcatccacagt

SEQ ID NO: 442282 - DNA, 51 bp, Artificial
  Synthetic oligonucleotide
gtgtactagatcggacaccagaggggaatccagagatgagccctatgttaa

SEQ ID NO: 442283 - DNA, 59 bp, Artificial
  Synthetic oligonucleotide
gtgtactcaggaggtaggaagctgcgcggcctcgtaaatcgacgccagagcgaacgaaa

SEQ ID NO: 442284 - DNA, 55 bp, Artificial
  Synthetic oligonucleotide
gtgtactcgtgtatatgcatactggtatagcaacggcaatagtgaggaaaggcat

SEQ ID NO: 442285 - DNA, 57 bp, Artificial
  Synthetic oligonucleotide
gtgtactggcttcgaagtacaataaggagggacacgccaaagaagtcgaaaggctga

SEQ ID NO: 442286 - DNA, 55 bp, Artificial
  Synthetic oligonucleotide
gtgtacttcaagagtgtgggcaatcagtagcccaatgtaatgagcccatagggcg

SEQ ID NO: 442287 - DNA, 58 bp, Artificial
  Synthetic oligonucleotide
gtgtacttcgtgtcacctcgtgctaagttcagttctgtacgtcgattttatgcggttc

SEQ ID NO: 442288 - DNA, 60 bp, Artificial
  Synthetic oligonucleotide
gtgtacttgacgatcccttcatacttgctgatcgctggtgacttggtggatactaggcta

SEQ ID NO: 442289 - DNA, 51 bp, Artificial
  Synthetic oligonucleotide
gtgtacttgggtgcttgctcagaatcagtataccgtatatacaatcgatta

SEQ ID NO: 442290 - DNA, 55 bp, Artificial
  Synthetic oligonucleotide
gtgtacttgtcacatggttacattctagatactgtgggtgtggcagacgatggtg

SEQ ID NO: 442291 - DNA, 56 bp, Artificial
  Synthetic oligonucleotide
gtgtagaaactactatggtgaaggagtatagggataagatcgatgctctacgaagc

SEQ ID NO: 442292 - DNA, 50 bp, Artificial
  Synthetic oligonucleotide
gtgtagagagtttcttaggtagggcaggctgcattcatgagtctatactg

SEQ ID NO: 442293 - DNA, 60 bp, Artificial
  Synthetic oligonucleotide
gtgtagagcgagacagtggaagcattgtccttgattctccagctctaaatcattatgtca

SEQ ID NO: 442294 - DNA, 55 bp, Artificial
  Synthetic oligonucleotide
gtgtagagcgcattcccaccatagacaacccagacgatgtgtacgttccgaactc

SEQ ID NO: 442295 - DNA, 60 bp, Artificial
  Synthetic oligonucleotide
gtgtagatcttcgtggcagcgaagatctgattctgtgaagggcgacacatacggttcagg

SEQ ID NO: 442296 - DNA, 54 bp, Artificial
  Synthetic oligonucleotide
gtgtagatgcctggggacaggttagtgtacggggatgtagtttctatgcgtgtt

SEQ ID NO: 442297 - DNA, 58 bp, Artificial
  Synthetic oligonucleotide
gtgtagatggccaccgctgtcaaaagctcttaaccgttatccgccagttaactacgca

SEQ ID NO: 442298 - DNA, 50 bp, Artificial
  Synthetic oligonucleotide
gtgtagcaattgcgggccgagacacaactatccgtgtccgtactgtaagc

SEQ ID NO: 442299 - DNA, 55 bp, Artificial
  Synthetic oligonucleotide
gtgtagcactaatcatggaatgttagcaccacctacaatcacgtccttgccagca

SEQ ID NO: 442300 - DNA, 60 bp, Artificial
  Synthetic oligonucleotide
gtgtagcattgtgactaagaacgtatagcggagcgtcgctcaagctacttcaaatctatg

SEQ ID NO: 442301 - DNA, 52 bp, Artificial
  Synthetic oligonucleotide
gtgtagcgcctgcatggctatgcgagcagcgagtatcgaatggtccggatgc

SEQ ID NO: 442302 - DNA, 51 bp, Artificial
  Synthetic oligonucleotide
gtgtagcggacacattacccagtgggccaagcaactcagaaagcataccag

SEQ ID NO: 442303 - DNA, 59 bp, Artificial
  Synthetic oligonucleotide
gtgtagctggatggcttcttggaaacccaatgtgtgatgaattcctaaatgtaccggaa

SEQ ID NO: 442304 - DNA, 53 bp, Artificial
  Synthetic oligonucleotide
gtgtagcttcttgaataaactgccctattgcctctgtatcagcacgttgaata

SEQ ID NO: 442305 - DNA, 55 bp, Artificial
  Synthetic oligonucleotide
gtgtaggatcgtacacatctgattctgaaatcaaagagccatctaacagccactt

SEQ ID NO: 442306 - DNA, 57 bp, Artificial
  Synthetic oligonucleotide
gtgtaggccgagtattcctcgtttatgtaccgatcattcaagcaacgacctcgggtc

SEQ ID NO: 442307 - DNA, 54 bp, Artificial
  Synthetic oligonucleotide
gtgtagggataagaacttcaatggaacaggaccgtgcaataatgtcagcacagt

SEQ ID NO: 442308 - DNA, 52 bp, Artificial
  Synthetic oligonucleotide
gtgtagggtacgggtgccccccactagttagtggggctccaaaaggagacca

SEQ ID NO: 442309 - DNA, 55 bp, Artificial
  Synthetic oligonucleotide
gtgtaggtagtatgagcatccacacttgaggtcgattcgtctacgcctcactacc

SEQ ID NO: 442310 - DNA, 60 bp, Artificial
  Synthetic oligonucleotide
gtgtagtaaattccattcggacactcccagaccagccgatccttcaatagtgtcatgcga

SEQ ID NO: 442311 - DNA, 53 bp, Artificial
  Synthetic oligonucleotide
gtgtagtacactgttattccggtaactttgtacgccagttttatatccccacc

SEQ ID NO: 442312 - DNA, 59 bp, Artificial
  Synthetic oligonucleotide
gtgtagtacctatacaaggtccgattaacagggctgttgcacaaaacgcctatgtgtga

SEQ ID NO: 442313 - DNA, 53 bp, Artificial
  Synthetic oligonucleotide
gtgtagtagaggaggccaacaacggagagaacaactgcttgctacaccctata

SEQ ID NO: 442314 - DNA, 51 bp, Artificial
  Synthetic oligonucleotide
gtgtagtccgaacgggtattcttttcgaattcttaggcacatcttaagatc

SEQ ID NO: 442315 - DNA, 55 bp, Artificial
  Synthetic oligonucleotide
gtgtagtccgggaaatcatgtgttgcgccaatggctcgtgcatacatatgtctgc

SEQ ID NO: 442316 - DNA, 56 bp, Artificial
  Synthetic oligonucleotide
gtgtagtccttagacaatatgtttattgtcgggggtttaaatcttatgtctgttga

SEQ ID NO: 442317 - DNA, 55 bp, Artificial
  Synthetic oligonucleotide
gtgtagtgcctaacattggcagcagacccttggtgagaggacaaagcggcagagt

SEQ ID NO: 442318 - DNA, 60 bp, Artificial
  Synthetic oligonucleotide
gtgtagtggagactgcgatggaagcgcaatctcacaatactccgaagtgataagttatta

SEQ ID NO: 442319 - DNA, 60 bp, Artificial
  Synthetic oligonucleotide
gtgtagtgtaatatcttgggaacaactactatactggtgggatgcaatcggcacgtgtgg

SEQ ID NO: 442320 - DNA, 60 bp, Artificial
  Synthetic oligonucleotide
gtgtagttagctctagttgcaattatccagaaggacatagcaaggtaggatccctacagt

SEQ ID NO: 442321 - DNA, 55 bp, Artificial
  Synthetic oligonucleotide
gtgtagttatcatggatgatgtgatgcaaaatccaagtggagaagatatgactct

SEQ ID NO: 442322 - DNA, 54 bp, Artificial
  Synthetic oligonucleotide
gtgtagttcattaacaaacgccattattaagtatctaaacccctgcaggtaaac

SEQ ID NO: 442323 - DNA, 53 bp, Artificial
  Synthetic oligonucleotide
gtgtagttcgcgacccgaagagcaagggtggtgttggttggcgagggggggct

SEQ ID NO: 442324 - DNA, 55 bp, Artificial
  Synthetic oligonucleotide
gtgtataaattgcccattttgtggttggaatattgcgatctccactggatcatta

SEQ ID NO: 442325 - DNA, 55 bp, Artificial
  Synthetic oligonucleotide
gtgtataatcaccaggaagccgcgaaatacgagaatcatacggagaacgctctgt

SEQ ID NO: 442326 - DNA, 55 bp, Artificial
  Synthetic oligonucleotide
gtgtatacctaacagtgcaatttcaggctcaattcctgctgattcagctagaaaa

SEQ ID NO: 442327 - DNA, 59 bp, Artificial
  Synthetic oligonucleotide
gtgtatacgatttcacctcttccatgaacaccagatccgttacacaaggaccaaatgta

SEQ ID NO: 442328 - DNA, 55 bp, Artificial
  Synthetic oligonucleotide
gtgtatacggatcatcccaatataaccaacttgttggaggattatgaaataagcc

SEQ ID NO: 442329 - DNA, 60 bp, Artificial
  Synthetic oligonucleotide
gtgtatacggtatgccttttggtgggtcgtctgtacctcgtagacatgtcagcaattctg

SEQ ID NO: 442330 - DNA, 57 bp, Artificial
  Synthetic oligonucleotide
gtgtatactgttcttcgacccgaattcgcaatacacggcgtaaatccaatgcccggc

SEQ ID NO: 442331 - DNA, 55 bp, Artificial
  Synthetic oligonucleotide
gtgtataggagttcaatgttgacaaacacgaccttgtcatatgatggctggatca

SEQ ID NO: 442332 - DNA, 59 bp, Artificial
  Synthetic oligonucleotide
gtgtatatagaagtgttacatttgactcaaggaacctgctgggaacaaatgtacacacc

SEQ ID NO: 442333 - DNA, 54 bp, Artificial
  Synthetic oligonucleotide
gtgtatatgcagaatcaactgttcgacgtaaagtatcccgtcctcaagaccgtg

SEQ ID NO: 442334 - DNA, 56 bp, Artificial
  Synthetic oligonucleotide
gtgtatattatcaacctaacaaagacttatgggttaatattcagaaacaaggacaa

SEQ ID NO: 442335 - DNA, 60 bp, Artificial
  Synthetic oligonucleotide
gtgtatcaaacattacaggaatactattgacaagagatggtggtgctaataatgcgacta

SEQ ID NO: 442336 - DNA, 60 bp, Artificial
  Synthetic oligonucleotide
gtgtatcaaattcttgctatctatagtacggtatcgagcagtctagtcttggtggggctg

SEQ ID NO: 442337 - DNA, 55 bp, Artificial
  Synthetic oligonucleotide
gtgtatcaagtagaggctgctcattacggtatgcgtaccactcgtgtcaagcgtg

SEQ ID NO: 442338 - DNA, 53 bp, Artificial
  Synthetic oligonucleotide
gtgtatcagatcactgacacacacgagacggacgcggcagtcatcgttactgt

SEQ ID NO: 442339 - DNA, 56 bp, Artificial
  Synthetic oligonucleotide
gtgtatccatattaaacctaggtcaaaggaaatacacaaagaccacatactggtgg

SEQ ID NO: 442340 - DNA, 60 bp, Artificial
  Synthetic oligonucleotide
gtgtatccattcgaattattgcgatcgattacgcgttggaagtgggattagtctggagat

SEQ ID NO: 442341 - DNA, 57 bp, Artificial
  Synthetic oligonucleotide
gtgtatcccgtcgattgatagagaggacgtaatgccaactacgacaccgaattacgg

SEQ ID NO: 442342 - DNA, 55 bp, Artificial
  Synthetic oligonucleotide
gtgtatcctcctgaaatacttgctggggctaaagagagtctaaatccttggtgtt

SEQ ID NO: 442343 - DNA, 60 bp, Artificial
  Synthetic oligonucleotide
gtgtatcctgtggagcagggagttcgagcataccagtacaaaccagatgagtttgatcag

SEQ ID NO: 442344 - DNA, 57 bp, Artificial
  Synthetic oligonucleotide
gtgtatcgatcaactttcgattttcttcgaattgaaatacaagaagtctggggaaga

SEQ ID NO: 442345 - DNA, 51 bp, Artificial
  Synthetic oligonucleotide
gtgtatcggaacaagacatactgtgtcctcggtgggatgccatcagggtgc

SEQ ID NO: 442346 - DNA, 58 bp, Artificial
  Synthetic oligonucleotide
gtgtatcggttttagagcacgtgggtggtccctctattacgtggcgcactctggagtc

SEQ ID NO: 442347 - DNA, 55 bp, Artificial
  Synthetic oligonucleotide
gtgtatcttaacgcttaaaggccgcatgcccgtcaagttgaatgaacgggccagg

SEQ ID NO: 442348 - DNA, 58 bp, Artificial
  Synthetic oligonucleotide
gtgtatcttcgttgggagcttggatcgccgtgtagtggtgacgactccgatacccgtg

SEQ ID NO: 442349 - DNA, 59 bp, Artificial
  Synthetic oligonucleotide
gtgtatgaaagggtacacatacactacgttggatatcagaccgacacaaactcagaagg

SEQ ID NO: 442350 - DNA, 56 bp, Artificial
  Synthetic oligonucleotide
gtgtatgaacccagatcttctgggttgatgggtatttaaattggaaagtgttcttc

SEQ ID NO: 442351 - DNA, 55 bp, Artificial
  Synthetic oligonucleotide
gtgtatgaaggcatggaaggcctacctggagaccccaccatggaacggcacctcg

SEQ ID NO: 442352 - DNA, 55 bp, Artificial
  Synthetic oligonucleotide
gtgtatgaatctgtcatacgagatatggctgaaattgatgacacttgggtgttgc

SEQ ID NO: 442353 - DNA, 57 bp, Artificial
  Synthetic oligonucleotide
gtgtatgacatacaacctccttttacaattaacaagcacacatacatgatgactcac

SEQ ID NO: 442354 - DNA, 55 bp, Artificial
  Synthetic oligonucleotide
gtgtatgagaaggtctggcttgcccaccaccccaccggcttcacctttaatgtca

SEQ ID NO: 442355 - DNA, 60 bp, Artificial
  Synthetic oligonucleotide
gtgtatgatcatgtctgtgtcattcccactcatgcacaacctagtgatagtgttttagtt

SEQ ID NO: 442356 - DNA, 60 bp, Artificial
  Synthetic oligonucleotide
gtgtatgatgttggtgactcctctgaataaaagcataggttctttaaggcagcactcata

SEQ ID NO: 442357 - DNA, 57 bp, Artificial
  Synthetic oligonucleotide
gtgtatgcctgggtaacggccgttttataggctggttcgttccagtcacagccatac

SEQ ID NO: 442358 - DNA, 55 bp, Artificial
  Synthetic oligonucleotide
gtgtatgcgctcattgcacctccaactccagtgtgccaagtgataatcaccggtg

SEQ ID NO: 442359 - DNA, 55 bp, Artificial
  Synthetic oligonucleotide
gtgtatgctgggataacacattgtttgttacagttgtggatactactagaggtac

SEQ ID NO: 442360 - DNA, 55 bp, Artificial
  Synthetic oligonucleotide
gtgtatgcttattggaaatgcaaccgtcatacccagtccacaaacgttattccac

SEQ ID NO: 442361 - DNA, 60 bp, Artificial
  Synthetic oligonucleotide
gtgtatggctggtcgctccactataaacccaatagtagacctggcagatgaggctagaaa

SEQ ID NO: 442362 - DNA, 55 bp, Artificial
  Synthetic oligonucleotide
gtgtatggtggtggcatattgacaagttggaacaagtccggcctgatttcctcgc

SEQ ID NO: 442363 - DNA, 58 bp, Artificial
  Synthetic oligonucleotide
gtgtatgtaaggctaacgtggatgagattagaagaaaattagcggccgtggactcgaa

SEQ ID NO: 442364 - DNA, 60 bp, Artificial
  Synthetic oligonucleotide
gtgtatgtatgtcacgtttgtttgtactgtatgtatgttgtgtactgtatgtgtaatgtt

SEQ ID NO: 442365 - DNA, 55 bp, Artificial
  Synthetic oligonucleotide
gtgtatgttaatacaaactttaaatgttcttaacctgtgaagtattatacacgtg

SEQ ID NO: 442366 - DNA, 55 bp, Artificial
  Synthetic oligonucleotide
gtgtatgttagatcattagcggctgatttaaacgacgtagtttgtagtggcggtg

SEQ ID NO: 442367 - DNA, 58 bp, Artificial
  Synthetic oligonucleotide
gtgtattaaccacaaaggcgaggtatatatacgagtaggttcttttgacacagcatac

SEQ ID NO: 442368 - DNA, 55 bp, Artificial
  Synthetic oligonucleotide
gtgtattaagtccatgggtatcgatggtaaggtttggatggatgacaacgtcgcc

SEQ ID NO: 442369 - DNA, 57 bp, Artificial
  Synthetic oligonucleotide
gtgtattacacgccatatataagtaccttccgttgatacgtctaatgacactatatg

SEQ ID NO: 442370 - DNA, 60 bp, Artificial
  Synthetic oligonucleotide
gtgtattactgacacatatctgggtcagaacctcctgaaatatggatctcgttatcaaaa

SEQ ID NO: 442371 - DNA, 55 bp, Artificial
  Synthetic oligonucleotide
gtgtattagtgatgtcacccgtggaattgggctaactcatagggtcggtaagagg

SEQ ID NO: 442372 - DNA, 55 bp, Artificial
  Synthetic oligonucleotide
gtgtattagtgatgtcactcgcggtacggggttaacacatagagttggtaagcgg

SEQ ID NO: 442373 - DNA, 50 bp, Artificial
  Synthetic oligonucleotide
gtgtattatacacgagcggcgactgtcgatacaagtgattgtttatacaa

SEQ ID NO: 442374 - DNA, 55 bp, Artificial
  Synthetic oligonucleotide
gtgtattatgtggacttctcaaccgacgcgggacgttttgctgctaatggacact

SEQ ID NO: 442375 - DNA, 52 bp, Artificial
  Synthetic oligonucleotide
gtgtattcaagttctacgtgacatccttatgacagctaagactgtaatctta

SEQ ID NO: 442376 - DNA, 60 bp, Artificial
  Synthetic oligonucleotide
gtgtattcagcttaggctgaatccgtcgcctaagttcgattccaccatctgggtatctct

SEQ ID NO: 442377 - DNA, 56 bp, Artificial
  Synthetic oligonucleotide
gtgtattctcctcaaccctgtccttgttaaggacgctactggaagtactcagtttg

SEQ ID NO: 442378 - DNA, 53 bp, Artificial
  Synthetic oligonucleotide
gtgtattctctaatttctaaaaccccgtcttttcctccaagttccgagcgtca

SEQ ID NO: 442379 - DNA, 60 bp, Artificial
  Synthetic oligonucleotide
gtgtattgacaatggcacatctccagatgccaatggcgtgtgggtgatgatggatggaga

SEQ ID NO: 442380 - DNA, 51 bp, Artificial
  Synthetic oligonucleotide
gtgtattgcctgaaggaactaacacgcattgaggtatatgattttgcacgg

SEQ ID NO: 442381 - DNA, 55 bp, Artificial
  Synthetic oligonucleotide
gtgtattgtcatttcagagctttgctatccctgttgaactgaataatgcgccagt

SEQ ID NO: 442382 - DNA, 59 bp, Artificial
  Synthetic oligonucleotide
gtgtattgtccctatctttagaactgtcgtccgattcatgctatttaaacgaatagcca

SEQ ID NO: 442383 - DNA, 55 bp, Artificial
  Synthetic oligonucleotide
gtgtatttccgatgtgacacgtggcaatggtattacccaccgtgttggtaagcgt

SEQ ID NO: 442384 - DNA, 55 bp, Artificial
  Synthetic oligonucleotide
gtgtatttctaaacttacaccccattgtatggaacgtaggccgcgaagtcgtcac

SEQ ID NO: 442385 - DNA, 55 bp, Artificial
  Synthetic oligonucleotide
gtgtatttgaacaacaccactatagagagagaggtttgccctgtaatagcggact

SEQ ID NO: 442386 - DNA, 54 bp, Artificial
  Synthetic oligonucleotide
gtgtatttgacgccggctcacgacttttaccagggttgaataaggccctagtta

SEQ ID NO: 442387 - DNA, 54 bp, Artificial
  Synthetic oligonucleotide
gtgtattttatggcatctatacctggtcccaatcagtctgggtctcctaattta

SEQ ID NO: 442388 - DNA, 55 bp, Artificial
  Synthetic oligonucleotide
gtgtattttgtcactgtttagttcgcctagtagtccattgtactgctactgatat

SEQ ID NO: 442389 - DNA, 57 bp, Artificial
  Synthetic oligonucleotide
gtgtcaaaacgatccattgggacccaatttgaagacataactgcagctgtcgtcaag

SEQ ID NO: 442390 - DNA, 60 bp, Artificial
  Synthetic oligonucleotide
gtgtcaaaatgcagaaccatattgttactaaaatagtacaatgtgaggaagtattagata

SEQ ID NO: 442391 - DNA, 58 bp, Artificial
  Synthetic oligonucleotide
gtgtcaaaatggaaaagcgaacgagcagtttggattgatggagccttacgacgactac

SEQ ID NO: 442392 - DNA, 60 bp, Artificial
  Synthetic oligonucleotide
gtgtcaaacaatgattggtcaggctactcaggtagcttcatcgtccaaactggtggatgt

SEQ ID NO: 442393 - DNA, 56 bp, Artificial
  Synthetic oligonucleotide
gtgtcaaagaaacttgtccacacgtggataagaagtcaaaggtatacctcaaaatc

SEQ ID NO: 442394 - DNA, 55 bp, Artificial
  Synthetic oligonucleotide
gtgtcaaagcaatggacttaggggcatccccacagttggcacaattagctgttgt

SEQ ID NO: 442395 - DNA, 60 bp, Artificial
  Synthetic oligonucleotide
gtgtcaaagtgagacaatatagcatggggagattggctgcggaggaagacaagtacacta

SEQ ID NO: 442396 - DNA, 56 bp, Artificial
  Synthetic oligonucleotide
gtgtcaaatgtgactaattcggtaaatgatatttcgacacaaacgtctacgatcag

SEQ ID NO: 442397 - DNA, 50 bp, Artificial
  Synthetic oligonucleotide
gtgtcaacaaataatggaacagttacaatcagctctcaggacaggaacag

SEQ ID NO: 442398 - DNA, 55 bp, Artificial
  Synthetic oligonucleotide
gtgtcaacagaggcacaaatccagaaaatgtcgcaggatttacaattagaggcat

SEQ ID NO: 442399 - DNA, 50 bp, Artificial
  Synthetic oligonucleotide
gtgtcaacattgaagggctatgggttgtccccaacagctccagacaaagg

SEQ ID NO: 442400 - DNA, 50 bp, Artificial
  Synthetic oligonucleotide
gtgtcaacctattctaatatgacaagggaacagttgcgggagtacacccg

SEQ ID NO: 442401 - DNA, 54 bp, Artificial
  Synthetic oligonucleotide
gtgtcaacgaaattattccgcccaaaataagcattgaacgttattacggtcgtc

SEQ ID NO: 442402 - DNA, 55 bp, Artificial
  Synthetic oligonucleotide
gtgtcaacgttgaaattagttttagtgtccaccctaaaggtctatggctatatac

SEQ ID NO: 442403 - DNA, 57 bp, Artificial
  Synthetic oligonucleotide
gtgtcaacttgcaacagagcgcgttcccagtctcgaaccgctagggcgcgttcgtag

SEQ ID NO: 442404 - DNA, 52 bp, Artificial
  Synthetic oligonucleotide
gtgtcaagctggcttcctcttacaaaatccctacttggatagagtccttggc

SEQ ID NO: 442405 - DNA, 60 bp, Artificial
  Synthetic oligonucleotide
gtgtcaaggggtttcctccagatgcagagctttacattgtgccaatatctgaccatgatg

SEQ ID NO: 442406 - DNA, 51 bp, Artificial
  Synthetic oligonucleotide
gtgtcaaggtgtgcagcgtgcacgggcaaaagggcgtacttaaccgaagcg

SEQ ID NO: 442407 - DNA, 59 bp, Artificial
  Synthetic oligonucleotide
gtgtcaagtgtcacatttatacctccaatggctgatttgcctgacaaaggtaagccttt

SEQ ID NO: 442408 - DNA, 60 bp, Artificial
  Synthetic oligonucleotide
gtgtcaatcccaatcacagcagcggcttggtacctatgggagacaaaaaagcagagggcc

SEQ ID NO: 442409 - DNA, 55 bp, Artificial
  Synthetic oligonucleotide
gtgtcaatgtttggcggaggactgcgcgttaagggcaacaatttaacatgctctt

SEQ ID NO: 442410 - DNA, 60 bp, Artificial
  Synthetic oligonucleotide
gtgtcacaagaatagatgtcagtcttgggctgatagagaggtctcaaaggagtttaaagg

SEQ ID NO: 442411 - DNA, 50 bp, Artificial
  Synthetic oligonucleotide
gtgtcacaattagcaccaggtggctgtggtaattgatggatagggaagat

SEQ ID NO: 442412 - DNA, 55 bp, Artificial
  Synthetic oligonucleotide
gtgtcacaccaatatgaagtggtatgtcaacaacgccactcagaacaaccacaca

SEQ ID NO: 442413 - DNA, 60 bp, Artificial
  Synthetic oligonucleotide
gtgtcacactgccgggctactgagtatataatgaagggagtatatattaacacagcgttg

SEQ ID NO: 442414 - DNA, 51 bp, Artificial
  Synthetic oligonucleotide
gtgtcacacttgcccggtgcgtactcaaacgtgtgtgccccaccgcgatag

SEQ ID NO: 442415 - DNA, 52 bp, Artificial
  Synthetic oligonucleotide
gtgtcacagatgctgagggcaatataacgacactaacagcgacagcgcaagg

SEQ ID NO: 442416 - DNA, 60 bp, Artificial
  Synthetic oligonucleotide
gtgtcacagttaattgacttagctatgctgccactagacatgttttcgatgttctcggga

SEQ ID NO: 442417 - DNA, 60 bp, Artificial
  Synthetic oligonucleotide
gtgtcacatcctttgatggacaaatttgtagacaatgccatatccataatgggtaggtca

SEQ ID NO: 442418 - DNA, 60 bp, Artificial
  Synthetic oligonucleotide
gtgtcaccaagctggcagatgcggagtgaaccttacgaagcgacacacctgtggtagcgc

SEQ ID NO: 442419 - DNA, 55 bp, Artificial
  Synthetic oligonucleotide
gtgtcacccagacagtcgattttagcttagatcccaccttcaccattgagacgac

SEQ ID NO: 442420 - DNA, 60 bp, Artificial
  Synthetic oligonucleotide
gtgtcacccagacagttgatttcagccttgaccctaccttcaccattgagacaaccacgc

SEQ ID NO: 442421 - DNA, 60 bp, Artificial
  Synthetic oligonucleotide
gtgtcaccggggatgatagaaatgcaactgctagtttcatttacaatggaatgcttgttg

SEQ ID NO: 442422 - DNA, 60 bp, Artificial
  Synthetic oligonucleotide
gtgtcacgagcccatcataatgtgtcatagtttcacagttttccactgtcacagctggaa

SEQ ID NO: 442423 - DNA, 60 bp, Artificial
  Synthetic oligonucleotide
gtgtcacgctgatgggctagcgtaccgctgctaccgtgtgaagtgtggactatccggtaa

SEQ ID NO: 442424 - DNA, 55 bp, Artificial
  Synthetic oligonucleotide
gtgtcactaactagagtgacgtccgtgcgtagaaatcatcatctttacgtgcggc

SEQ ID NO: 442425 - DNA, 55 bp, Artificial
  Synthetic oligonucleotide
gtgtcactactcagtacacttggacctggcttcctcaagggttcaagaactcccc

SEQ ID NO: 442426 - DNA, 60 bp, Artificial
  Synthetic oligonucleotide
gtgtcactctacattgtgcagatgtagaaaatagcacgaatagcatgaatgatagcatga

SEQ ID NO: 442427 - DNA, 55 bp, Artificial
  Synthetic oligonucleotide
gtgtcactgcaaacgctgctgctatcattgtacagtttgctttctgacaaaaggc

SEQ ID NO: 442428 - DNA, 52 bp, Artificial
  Synthetic oligonucleotide
gtgtcactggatggactgccaccccaatgcaggatgttcaggttacaattga

SEQ ID NO: 442429 - DNA, 60 bp, Artificial
  Synthetic oligonucleotide
gtgtcactggggatgatagaaatgcgaccgctagtttcatttatgatgggatgcttgttg

SEQ ID NO: 442430 - DNA, 55 bp, Artificial
  Synthetic oligonucleotide
gtgtcacttaatgtggcacaacggtagacatgcatatcaggaattcatcaagggt

SEQ ID NO: 442431 - DNA, 55 bp, Artificial
  Synthetic oligonucleotide
gtgtcactttaaactgtacacagtataataataccaataggggtaatgttaccta

SEQ ID NO: 442432 - DNA, 56 bp, Artificial
  Synthetic oligonucleotide
gtgtcactttaaactgtagtgatgctaaggttaatggtactgtcaatgataccatg

SEQ ID NO: 442433 - DNA, 59 bp, Artificial
  Synthetic oligonucleotide
gtgtcactttaaattgtacagatgcacaagttaatgttaccagtattaataatgctacc

SEQ ID NO: 442434 - DNA, 60 bp, Artificial
  Synthetic oligonucleotide
gtgtcactttaacatgtagcaatgttagtgttaccaatagtagtattcccaatgagacca

SEQ ID NO: 442435 - DNA, 55 bp, Artificial
  Synthetic oligonucleotide
gtgtcagaaggactaaatgacttcagcgtgtcacacggtgtactagacatgggtc

SEQ ID NO: 442436 - DNA, 60 bp, Artificial
  Synthetic oligonucleotide
gtgtcagacatggctagtaatgtactttactgttcatcgcttatacaagccacagacggc

SEQ ID NO: 442437 - DNA, 55 bp, Artificial
  Synthetic oligonucleotide
gtgtcagacgctacaccaatgcacaaagcacatatgacttttgatgaacaatccg

SEQ ID NO: 442438 - DNA, 60 bp, Artificial
  Synthetic oligonucleotide
gtgtcagacttggcatagtgccaaactgattgttcaggagagaagagtctttgacgtccc

SEQ ID NO: 442439 - DNA, 55 bp, Artificial
  Synthetic oligonucleotide
gtgtcagaggcgaagtccattcaagagcgatacgccatcatgatgagtcggatgc

SEQ ID NO: 442440 - DNA, 55 bp, Artificial
  Synthetic oligonucleotide
gtgtcagaggggctacaggggagagtggcgtggagatggcgtgatgcacaccaca

SEQ ID NO: 442441 - DNA, 53 bp, Artificial
  Synthetic oligonucleotide
gtgtcagaggttggactgaggcgcttatacactagtaagcgtgggtcaatgga

SEQ ID NO: 442442 - DNA, 55 bp, Artificial
  Synthetic oligonucleotide
gtgtcagatgacaatgcttcaacagattttgtagccgaacctgtcaaactgcctg

SEQ ID NO: 442443 - DNA, 50 bp, Artificial
  Synthetic oligonucleotide
gtgtcagatgtgtctgcagagacaactggaaaggttctaacaggcccatc

SEQ ID NO: 442444 - DNA, 55 bp, Artificial
  Synthetic oligonucleotide
gtgtcagattgactaggtggcaagcgtggctgccatatgcatatctcaccgcagc

SEQ ID NO: 442445 - DNA, 55 bp, Artificial
  Synthetic oligonucleotide
gtgtcagcactggaggacaaactcgcagacttcaagcgacagatggcagacgctg

SEQ ID NO: 442446 - DNA, 57 bp, Artificial
  Synthetic oligonucleotide
gtgtcagcagtaaacatgacatccagaatgttgctaaaccgattcacaatggctcac

SEQ ID NO: 442447 - DNA, 60 bp, Artificial
  Synthetic oligonucleotide
gtgtcagcagtccaaaattatcagaacctaatggctattggttccaaccaaatggctata

SEQ ID NO: 442448 - DNA, 55 bp, Artificial
  Synthetic oligonucleotide
gtgtcagcattggaggacaaactcgcagactttaagcgaagaatggcagatgctg

SEQ ID NO: 442449 - DNA, 60 bp, Artificial
  Synthetic oligonucleotide
gtgtcagcccaacgcatacatgagaatcagtatgggcctgagtttgtaatggcccagaac

SEQ ID NO: 442450 - DNA, 55 bp, Artificial
  Synthetic oligonucleotide
gtgtcagcgtattgacaacaacgtggtggtttactgtaatggacagaagaaagtc

SEQ ID NO: 442451 - DNA, 57 bp, Artificial
  Synthetic oligonucleotide
gtgtcaggggtaaattaccatatgtttgccattgggggagaacctctggatttgcaa

SEQ ID NO: 442452 - DNA, 54 bp, Artificial
  Synthetic oligonucleotide
gtgtcagtacgtatcgcccttgaaaccgtctgccatttcttccagtcgcacgtg

SEQ ID NO: 442453 - DNA, 53 bp, Artificial
  Synthetic oligonucleotide
gtgtcagtattatatcgtaaagtcttgatgcttgatacggtgaaagtcaatag

SEQ ID NO: 442454 - DNA, 51 bp, Artificial
  Synthetic oligonucleotide
gtgtcagtgctgcttctattgacatcctcagatacttttctgatcgtaccc

SEQ ID NO: 442455 - DNA, 55 bp, Artificial
  Synthetic oligonucleotide
gtgtcataaacaatggtatcggcggaattaatggtgttattcatacattcggtgg

SEQ ID NO: 442456 - DNA, 55 bp, Artificial
  Synthetic oligonucleotide
gtgtcataacgccacaacaggcacttaggcaaactgtttctgagtggtctcagcg

SEQ ID NO: 442457 - DNA, 55 bp, Artificial
  Synthetic oligonucleotide
gtgtcatacacccgactttggtatttgacatcaccaagctactgctggccgtctt

SEQ ID NO: 442458 - DNA, 57 bp, Artificial
  Synthetic oligonucleotide
gtgtcatattctctatagtggtgggtcatatgtcccgagttagtgcgccacgtaagc

SEQ ID NO: 442459 - DNA, 60 bp, Artificial
  Synthetic oligonucleotide
gtgtcatcagttgagtggtacctaagatctatggaattgtcggacgatataaagactgac

SEQ ID NO: 442460 - DNA, 55 bp, Artificial
  Synthetic oligonucleotide
gtgtcatcccatcatcgttgcagcagcccaacgccagcaaacattgttccgaacg

SEQ ID NO: 442461 - DNA, 55 bp, Artificial
  Synthetic oligonucleotide
gtgtcatgcaaccttgggagaaaagtatagatatatccatcctaaggcacgcttg

SEQ ID NO: 442462 - DNA, 58 bp, Artificial
  Synthetic oligonucleotide
gtgtcatgcagccccgataaatgttatcaattcgcacttgggcagggaaccacactgg

SEQ ID NO: 442463 - DNA, 55 bp, Artificial
  Synthetic oligonucleotide
gtgtcatgccacattcaccatgaggttactatcgccaattagggtaccaaactac

SEQ ID NO: 442464 - DNA, 60 bp, Artificial
  Synthetic oligonucleotide
gtgtcatgcgatcctagcaggtgttaccagtttgcgctcggacaggggaccacactagac

SEQ ID NO: 442465 - DNA, 60 bp, Artificial
  Synthetic oligonucleotide
gtgtcatgcgatcctatcaagtgttatcagtttgcactaggacagggaaccacactggac

SEQ ID NO: 442466 - DNA, 60 bp, Artificial
  Synthetic oligonucleotide
gtgtcatgtgatcctggcaagtgttatcaatttgcactcgggcaggggaccacactagac

SEQ ID NO: 442467 - DNA, 59 bp, Artificial
  Synthetic oligonucleotide
gtgtcatgttatggatcaataaattgtgtgtcattgtgggtttcatgtccggctgcacc

SEQ ID NO: 442468 - DNA, 60 bp, Artificial
  Synthetic oligonucleotide
gtgtcattcagagtaggactgcacgagtacccggtgggatcgcaattaccttgcgagcct

SEQ ID NO: 442469 - DNA, 57 bp, Artificial
  Synthetic oligonucleotide
gtgtcattcgtagtgagttgtctggttaggagggagtgtgtcgggcaaacgtaccaa

SEQ ID NO: 442470 - DNA, 55 bp, Artificial
  Synthetic oligonucleotide
gtgtcattgctggaagagtccagactaatagaggcaggtgtaccggccccaacat

SEQ ID NO: 442471 - DNA, 55 bp, Artificial
  Synthetic oligonucleotide
gtgtcattgtgggttacatgtccggctgcaccctgtgagtaagtatgcaccttgc

SEQ ID NO: 442472 - DNA, 60 bp, Artificial
  Synthetic oligonucleotide
gtgtcatttctgataaatattggcctaccacatggccaaaacagatggctatttccactc

SEQ ID NO: 442473 - DNA, 55 bp, Artificial
  Synthetic oligonucleotide
gtgtcatttgtgtttgcggtcagcataccaaaccgtgacatagcttcggtatact

SEQ ID NO: 442474 - DNA, 50 bp, Artificial
  Synthetic oligonucleotide
gtgtccaactaggggtgcctaaggcgtgtgccagggtttaatactagtat

SEQ ID NO: 442475 - DNA, 60 bp, Artificial
  Synthetic oligonucleotide
gtgtccaactcgaccactgacggcggcacaagtgttcaacgtatcgagcgaaaggatgta

SEQ ID NO: 442476 - DNA, 60 bp, Artificial
  Synthetic oligonucleotide
gtgtccacactgccaggggacaggaataatccctaggagtgagcctatggcttatatccg

SEQ ID NO: 442477 - DNA, 54 bp, Artificial
  Synthetic oligonucleotide
gtgtccacagtcacttcagtggcaacaccaactgaaatagaagcccttggaaag

SEQ ID NO: 442478 - DNA, 55 bp, Artificial
  Synthetic oligonucleotide
gtgtccaccgcaacttagatactgtagggccaaattgggcgaatgtgacaagtgc

SEQ ID NO: 442479 - DNA, 55 bp, Artificial
  Synthetic oligonucleotide
gtgtccactctaataccccgaggaatgctacgcaggtacccctggtccaccaggg

SEQ ID NO: 442480 - DNA, 56 bp, Artificial
  Synthetic oligonucleotide
gtgtccactgaatacacaaacgttaggaataggttgccaaacgacgaatggagact

SEQ ID NO: 442481 - DNA, 51 bp, Artificial
  Synthetic oligonucleotide
gtgtccagagtatcactcggctgcttaagaatataactgcgaggcatgtac

SEQ ID NO: 442482 - DNA, 60 bp, Artificial
  Synthetic oligonucleotide
gtgtccaggactaccacttatcatacctgatggctacaagctaattgacaattccctcat

SEQ ID NO: 442483 - DNA, 55 bp, Artificial
  Synthetic oligonucleotide
gtgtccaggtcgggcgttgaaaagttgtagcttgccatcagatcggatagcgact

SEQ ID NO: 442484 - DNA, 53 bp, Artificial
  Synthetic oligonucleotide
gtgtccagtcgatgtaacacattttctcaatcaacgctacgaaggtgcagtca

SEQ ID NO: 442485 - DNA, 55 bp, Artificial
  Synthetic oligonucleotide
gtgtccatgcccgagggaatccgacactagtctcgtcgtagaaggcgccgacgtt

SEQ ID NO: 442486 - DNA, 52 bp, Artificial
  Synthetic oligonucleotide
gtgtccatggggagaaaggcaatcttcgcagactacgagggtccccagcgca

SEQ ID NO: 442487 - DNA, 59 bp, Artificial
  Synthetic oligonucleotide
gtgtccatggtattaagtactattcacgtgttagaagtgttagaggtagagctattata

SEQ ID NO: 442488 - DNA, 55 bp, Artificial
  Synthetic oligonucleotide
gtgtccattgaatacccaaacgctgggaataggatgtcagactacgaatactgga

SEQ ID NO: 442489 - DNA, 50 bp, Artificial
  Synthetic oligonucleotide
gtgtcccaccggtttgcgctgactgcggcaaacccgctgccaataagtgg

SEQ ID NO: 442490 - DNA, 59 bp, Artificial
  Synthetic oligonucleotide
gtgtcccagcgaaaatgggtcactggacatgaacggattccgcatcaaaactctgaaag

SEQ ID NO: 442491 - DNA, 55 bp, Artificial
  Synthetic oligonucleotide
gtgtcccagtgggacgctgtctggccctacctgcgttttcggccctgcgcaggaa

SEQ ID NO: 442492 - DNA, 54 bp, Artificial
  Synthetic oligonucleotide
gtgtcccagtgtcattattccgctcagtttcagatctgccggaattctccaagc

SEQ ID NO: 442493 - DNA, 55 bp, Artificial
  Synthetic oligonucleotide
gtgtcccatctgcgcaccgaagacataacaacgatggcggacgattcaggtacag

SEQ ID NO: 442494 - DNA, 59 bp, Artificial
  Synthetic oligonucleotide
gtgtcccccacgcactatgtgccagagagcgatgcagctgcccgcgtcactaccatact

SEQ ID NO: 442495 - DNA, 58 bp, Artificial
  Synthetic oligonucleotide
gtgtccccgagccttttgattaccaccactcatgtcgtgcccaaggatacaaccgaga

SEQ ID NO: 442496 - DNA, 55 bp, Artificial
  Synthetic oligonucleotide
gtgtcccctaagagacacaccgtatatagctaataatctataggtatacgtgtcc

SEQ ID NO: 442497 - DNA, 55 bp, Artificial
  Synthetic oligonucleotide
gtgtcccgtggatgtatgctatttactatctaatctcacggaccctattggtaac

SEQ ID NO: 442498 - DNA, 52 bp, Artificial
  Synthetic oligonucleotide
gtgtccctagtcactgcagtggccggcgttagagccctgcccacggcaagtg

SEQ ID NO: 442499 - DNA, 60 bp, Artificial
  Synthetic oligonucleotide
gtgtccctgacaaggtgagtatcagaactagaggcatacagaagccaggacctattcctg

SEQ ID NO: 442500 - DNA, 58 bp, Artificial
  Synthetic oligonucleotide
gtgtccctggaccatcttaacaacccactccacagtaacagtacaggccacaacacaa

SEQ ID NO: 442501 - DNA, 58 bp, Artificial
  Synthetic oligonucleotide
gtgtccgaaatatataacggtgcaccatttgttaaaatgtcacctatgtttaatgcag

SEQ ID NO: 442502 - DNA, 60 bp, Artificial
  Synthetic oligonucleotide
gtgtccgaataccttcgacagaagtaaggatacattatacagagtgcaagcagagttgaa

SEQ ID NO: 442503 - DNA, 55 bp, Artificial
  Synthetic oligonucleotide
gtgtccggaatgcaggttgatgtggatgtgaaaagtgttactggcattgctagct

SEQ ID NO: 442504 - DNA, 57 bp, Artificial
  Synthetic oligonucleotide
gtgtccggggaactcgcctagttgacgcttgcggttatggtagttaaagatatatga

SEQ ID NO: 442505 - DNA, 57 bp, Artificial
  Synthetic oligonucleotide
gtgtccgtaatcacacgtggtgcgtacgataacgcatagtgtttttccctccactta

SEQ ID NO: 442506 - DNA, 55 bp, Artificial
  Synthetic oligonucleotide
gtgtccgtattgtgactgagcagcagacacatagggtcaaaataaccagcagaat

SEQ ID NO: 442507 - DNA, 55 bp, Artificial
  Synthetic oligonucleotide
gtgtccgtgagtttattatcgaattgcactgtgcaacaagcgcgcacgatgatgc

SEQ ID NO: 442508 - DNA, 55 bp, Artificial
  Synthetic oligonucleotide
gtgtcctatccatttgtgtgtcgatatttacaagcgtgcttttcctaggagtgtg

SEQ ID NO: 442509 - DNA, 58 bp, Artificial
  Synthetic oligonucleotide
gtgtcctatcgttgtccgtgggatgtctgcgcttggttgagcgttgtttacgataacg

SEQ ID NO: 442510 - DNA, 58 bp, Artificial
  Synthetic oligonucleotide
gtgtcctcatggttttgatgactcggcacctcctgatgtctctggggattccccatga

SEQ ID NO: 442511 - DNA, 55 bp, Artificial
  Synthetic oligonucleotide
gtgtcctgatggtcctcatgactaggcaactatgcaagaacctctccataccgca

SEQ ID NO: 442512 - DNA, 60 bp, Artificial
  Synthetic oligonucleotide
gtgtcctgccaacgcggatataagggggtctggcgaggagatggcattatgcacacccgc

SEQ ID NO: 442513 - DNA, 55 bp, Artificial
  Synthetic oligonucleotide
gtgtcctgtatgattccgggtgctacacatgttacgcttcgattcgcattagcgc

SEQ ID NO: 442514 - DNA, 55 bp, Artificial
  Synthetic oligonucleotide
gtgtccttagccgcttggacgttcgggtgaaatccggcagaccttctggggtgag

SEQ ID NO: 442515 - DNA, 60 bp, Artificial
  Synthetic oligonucleotide
gtgtccttcacgacagtgctgccagcagcatattcgggttttgagacgactttttcaatc

SEQ ID NO: 442516 - DNA, 60 bp, Artificial
  Synthetic oligonucleotide
gtgtccttggctgttgtctgtatgctgcagctgtagtcagagtaaccgtgggtaccgttg

SEQ ID NO: 442517 - DNA, 60 bp, Artificial
  Synthetic oligonucleotide
gtgtcgaaacatcctgcgcgtgttgggctgccacctaccgctagcagtggtcatgggtat

SEQ ID NO: 442518 - DNA, 56 bp, Artificial
  Synthetic oligonucleotide
gtgtcgaaccaaaaacattctaccacttctggtgacaacatacataagttttccaa

SEQ ID NO: 442519 - DNA, 55 bp, Artificial
  Synthetic oligonucleotide
gtgtcgaacgctggtctatttccaacgcggacgggttcaggtggtggacccactg

SEQ ID NO: 442520 - DNA, 55 bp, Artificial
  Synthetic oligonucleotide
gtgtcgaatagcgtgtgtaggactattaactatttagtaccggatgtcttcaagt

SEQ ID NO: 442521 - DNA, 55 bp, Artificial
  Synthetic oligonucleotide
gtgtcgaattgggccgacaactcatcagggcgtttcttgtacacggatgtgaagt

SEQ ID NO: 442522 - DNA, 52 bp, Artificial
  Synthetic oligonucleotide
gtgtcgacaagccaaagcgtgttggcccagctccaaatcatcgatcggagct

SEQ ID NO: 442523 - DNA, 55 bp, Artificial
  Synthetic oligonucleotide
gtgtcgaccgccgacctccacctagcccatttgcaggaggtgaaacgtcgaagac

SEQ ID NO: 442524 - DNA, 57 bp, Artificial
  Synthetic oligonucleotide
gtgtcgacgctgaccgacctgcataagtggtgtgggcacatgcgagacgccacgcta

SEQ ID NO: 442525 - DNA, 55 bp, Artificial
  Synthetic oligonucleotide
gtgtcgacgctgctatggaagttcaagtggtatatgttgagaaaggtaatagcct

SEQ ID NO: 442526 - DNA, 55 bp, Artificial
  Synthetic oligonucleotide
gtgtcgagtaatttgaaacgaatagcgacgtgccaagtgtacggcaccgaacatg

SEQ ID NO: 442527 - DNA, 55 bp, Artificial
  Synthetic oligonucleotide
gtgtcgagtcggagttcgtggccccaacgttgaagatgaatgcacttctttgggt

SEQ ID NO: 442528 - DNA, 55 bp, Artificial
  Synthetic oligonucleotide
gtgtcgagttcgcgaatgtcgtgatgtacggtgatgtttaccggtcccgcatgca

SEQ ID NO: 442529 - DNA, 59 bp, Artificial
  Synthetic oligonucleotide
gtgtcgatagtggtattttattcttgtggtctagagtagttcatttagcgagagtttca

SEQ ID NO: 442530 - DNA, 60 bp, Artificial
  Synthetic oligonucleotide
gtgtcgatttccgggctcgctgccgctttcatgatccgtcacaagctgaccgatggggta

SEQ ID NO: 442531 - DNA, 60 bp, Artificial
  Synthetic oligonucleotide
gtgtcgcccagcgaagcctaaagctaagcgaggcggcaacgcatatatgtcagaccagta

SEQ ID NO: 442532 - DNA, 53 bp, Artificial
  Synthetic oligonucleotide
gtgtcgcgactttgagagtccgactcagaaggcaacccaacatgcgactttgt

SEQ ID NO: 442533 - DNA, 60 bp, Artificial
  Synthetic oligonucleotide
gtgtcgcgatacatgatagtcagtatattcctaatcccctcttctaaattattgaagtcg

SEQ ID NO: 442534 - DNA, 51 bp, Artificial
  Synthetic oligonucleotide
gtgtcgcggcggatttgttatctggggtatgattctgaggaagtgttggac

SEQ ID NO: 442535 - DNA, 59 bp, Artificial
  Synthetic oligonucleotide
gtgtcgctctcggcggagtgaccgtagtccaggtaaacgagatgcgaacgttcgtgata

SEQ ID NO: 442536 - DNA, 55 bp, Artificial
  Synthetic oligonucleotide
gtgtcgctgctcttgttactgctgctggtgtttccatcattggcattaccatggc

SEQ ID NO: 442537 - DNA, 55 bp, Artificial
  Synthetic oligonucleotide
gtgtcggaaccatcaccagttggcagggtaccattagcacctaccgaaccgttgg

SEQ ID NO: 442538 - DNA, 54 bp, Artificial
  Synthetic oligonucleotide
gtgtcggcggactaaggtggccgggtgcgttaatccggattgtcggtttcagag

SEQ ID NO: 442539 - DNA, 60 bp, Artificial
  Synthetic oligonucleotide
gtgtcgggacatctgtatgtcacgttgctgagtggatcatatgtcacggatctattgtgg

SEQ ID NO: 442540 - DNA, 55 bp, Artificial
  Synthetic oligonucleotide
gtgtcggggcattgttttatctgttgcgagccaaactgcgccatgggaacgtacg

SEQ ID NO: 442541 - DNA, 58 bp, Artificial
  Synthetic oligonucleotide
gtgtcggttcgacaagtacctcaacttttgaggaagccagtctgccgacatccaagga

SEQ ID NO: 442542 - DNA, 55 bp, Artificial
  Synthetic oligonucleotide
gtgtcggttgtgggaaatatgtgacccattcaaacgtctcttagattaaacttac

SEQ ID NO: 442543 - DNA, 55 bp, Artificial
  Synthetic oligonucleotide
gtgtcgtccactaccagtttacggcaggtgtccctggctccggcaagtcacggtc

SEQ ID NO: 442544 - DNA, 58 bp, Artificial
  Synthetic oligonucleotide
gtgtcgtccgtcatgtttacaacttattaactaatacacatatagcaaacgctaaagc

SEQ ID NO: 442545 - DNA, 60 bp, Artificial
  Synthetic oligonucleotide
gtgtcgtcggactcatatgaggtccccgtgaaactgcgtgtgtggtccagtctcatcgac

SEQ ID NO: 442546 - DNA, 57 bp, Artificial
  Synthetic oligonucleotide
gtgtcgtctcttacgaggtccctcagggttacactatgcagtactttaacaccacca

SEQ ID NO: 442547 - DNA, 55 bp, Artificial
  Synthetic oligonucleotide
gtgtcgtgaaactgtgctgaaactctttgcagacttattaacccttgaggtcacc

SEQ ID NO: 442548 - DNA, 55 bp, Artificial
  Synthetic oligonucleotide
gtgtcgtgcggtcttgggaaatgttaccaatttgcacttgggcagggaaccactt

SEQ ID NO: 442549 - DNA, 60 bp, Artificial
  Synthetic oligonucleotide
gtgtcgtgctcacactgaagtcccaccccatgaccatactcgacgccatgatcgtgcaaa

SEQ ID NO: 442550 - DNA, 58 bp, Artificial
  Synthetic oligonucleotide
gtgtcgtggtggaaaaacagaatgggatgtacaaagcagcaccaaaacgtttggctgc

SEQ ID NO: 442551 - DNA, 53 bp, Artificial
  Synthetic oligonucleotide
gtgtcgtgtttagattacgaaggttatggctttccaaggtcccagtaggacgt

SEQ ID NO: 442552 - DNA, 51 bp, Artificial
  Synthetic oligonucleotide
gtgtcgttcacgagtaacactgtgaaattgacttcaggacacctgaaatgt

SEQ ID NO: 442553 - DNA, 55 bp, Artificial
  Synthetic oligonucleotide
gtgtcgtttgtctttatagacttcgtcgcgaagtagtggagcgcgtcaacatgtg

SEQ ID NO: 442554 - DNA, 55 bp, Artificial
  Synthetic oligonucleotide
gtgtctaaaattcgcagtgttgctgctggacgggcactgtatatacctggatacg

SEQ ID NO: 442555 - DNA, 55 bp, Artificial
  Synthetic oligonucleotide
gtgtctaagctcatagccacagatgattaccgaggtaatggctggttggtgtgga

SEQ ID NO: 442556 - DNA, 55 bp, Artificial
  Synthetic oligonucleotide
gtgtctacaggcattaaccaggtattttatgaggaattgttgcagctgaaggaag

SEQ ID NO: 442557 - DNA, 56 bp, Artificial
  Synthetic oligonucleotide
gtgtctactgcacagagttacagggcacaaataggtacggtgttttgtgatggcca

SEQ ID NO: 442558 - DNA, 55 bp, Artificial
  Synthetic oligonucleotide
gtgtctactgcggacgccaagaggaaaccgtggcaggtccatgtgcgtattcagg

SEQ ID NO: 442559 - DNA, 55 bp, Artificial
  Synthetic oligonucleotide
gtgtctactgcgtatggcgatatgcctaccaacgagaacactggtgagttcaccc

SEQ ID NO: 442560 - DNA, 55 bp, Artificial
  Synthetic oligonucleotide
gtgtctagattgctgtcagtatactgatttaacctattgtcggggatgttccatg

SEQ ID NO: 442561 - DNA, 60 bp, Artificial
  Synthetic oligonucleotide
gtgtctagtcattcctagcttgttcccaaattcgatttgagatagcccctctgcaattcg

SEQ ID NO: 442562 - DNA, 55 bp, Artificial
  Synthetic oligonucleotide
gtgtctatattggaagtcaggatgggcctgtcgtttatagcccaggattatttcc

SEQ ID NO: 442563 - DNA, 55 bp, Artificial
  Synthetic oligonucleotide
gtgtctatgcgcggtaaatcatttagtggtatgttaaccctgttcaagatcctgt

SEQ ID NO: 442564 - DNA, 60 bp, Artificial
  Synthetic oligonucleotide
gtgtctatgctttaccagagcggagattacttactctccatattagggtctgatgggtat

SEQ ID NO: 442565 - DNA, 55 bp, Artificial
  Synthetic oligonucleotide
gtgtctcaacactaaagctagtttgagccaattcggtaagtagaagtgtaccaag

SEQ ID NO: 442566 - DNA, 55 bp, Artificial
  Synthetic oligonucleotide
gtgtctcagccgtgttgtggcaggtgtggctgacactaccagcctacctcagcct

SEQ ID NO: 442567 - DNA, 60 bp, Artificial
  Synthetic oligonucleotide
gtgtctcattgcagggccacagaatatataatgaagggggtatacattaatactgctttg

SEQ ID NO: 442568 - DNA, 60 bp, Artificial
  Synthetic oligonucleotide
gtgtctccataaggattcctatctccctgaaggtgcctttgataaggaagctctggcact

SEQ ID NO: 442569 - DNA, 55 bp, Artificial
  Synthetic oligonucleotide
gtgtctccatcctatgcgatgaaggcagagtgatgtctgatccaatcactcgtgt

SEQ ID NO: 442570 - DNA, 57 bp, Artificial
  Synthetic oligonucleotide
gtgtctcccctagctgtaacctggtggaacaggaatgggccaacgacaagtacagtc

SEQ ID NO: 442571 - DNA, 57 bp, Artificial
  Synthetic oligonucleotide
gtgtctcccctagctgtgacttggtggaataggaatgggccggcgacgggtacagtc

SEQ ID NO: 442572 - DNA, 53 bp, Artificial
  Synthetic oligonucleotide
gtgtctcccgaggcttcgggcccaggtagttttgccggtccgtgttgggccga

SEQ ID NO: 442573 - DNA, 55 bp, Artificial
  Synthetic oligonucleotide
gtgtctccgaattcaccagtttacaacaattaccgagatgccggaattccacaca

SEQ ID NO: 442574 - DNA, 55 bp, Artificial
  Synthetic oligonucleotide
gtgtctccgacggctacatagtgggactgcacagtttgtcaacctcaaccggcga

SEQ ID NO: 442575 - DNA, 55 bp, Artificial
  Synthetic oligonucleotide
gtgtctccgggaatttatgtaaccttatctggcacatcaacagtagacagtacag

SEQ ID NO: 442576 - DNA, 58 bp, Artificial
  Synthetic oligonucleotide
gtgtctccgtccttatcgatgtaggacttgacgtcggaacttgatttagctccctgaa

SEQ ID NO: 442577 - DNA, 51 bp, Artificial
  Synthetic oligonucleotide
gtgtctcctatcctcagcctgacgagcccaatgcaattgtatccgatggtc

SEQ ID NO: 442578 - DNA, 57 bp, Artificial
  Synthetic oligonucleotide
gtgtctcgaacggtgtaatctctacaattatggtgcacaagtgaagttacctgacgg

SEQ ID NO: 442579 - DNA, 55 bp, Artificial
  Synthetic oligonucleotide
gtgtctgaaggatctgtgtccattgagggaccttggaagcccagaatagtagggg

SEQ ID NO: 442580 - DNA, 55 bp, Artificial
  Synthetic oligonucleotide
gtgtctgacatactctatcctgagtgtcaccttaactctcctatcgttaaaggta

SEQ ID NO: 442581 - DNA, 59 bp, Artificial
  Synthetic oligonucleotide
gtgtctgaccaacggaattgctcgtgtcgccgtacggccacgttggccaactcacgagc

SEQ ID NO: 442582 - DNA, 55 bp, Artificial
  Synthetic oligonucleotide
gtgtctgagtgccaaagcatcccgtttccgttatacgaacgcacgactgcattcc

SEQ ID NO: 442583 - DNA, 58 bp, Artificial
  Synthetic oligonucleotide
gtgtctgatgagattcggtggaacattctcggtatccgtggtggcgtgtttcccagcg

SEQ ID NO: 442584 - DNA, 51 bp, Artificial
  Synthetic oligonucleotide
gtgtctgcctgctcttatctgtagattgtgttttagaccgggaggcatttt

SEQ ID NO: 442585 - DNA, 55 bp, Artificial
  Synthetic oligonucleotide
gtgtctgcctgggtatgacaccatatacctagattcgaagtttgtgagtcgcgtt

SEQ ID NO: 442586 - DNA, 59 bp, Artificial
  Synthetic oligonucleotide
gtgtctgcgatgattgcccccttgctgggtgattacgagttacagggccctgaggacct

SEQ ID NO: 442587 - DNA, 56 bp, Artificial
  Synthetic oligonucleotide
gtgtctggaacaagtcttaaagaaaatagggtttcaatgttcagaactaatccagc

SEQ ID NO: 442588 - DNA, 56 bp, Artificial
  Synthetic oligonucleotide
gtgtctggaaggcgcgtggtaatgcgttgaaaaaggtgaccgtctctctccaaaaa

SEQ ID NO: 442589 - DNA, 57 bp, Artificial
  Synthetic oligonucleotide
gtgtctggacacctctcggcagtgaggtcctctggactggaaaacggaccttttggc

SEQ ID NO: 442590 - DNA, 55 bp, Artificial
  Synthetic oligonucleotide
gtgtctggactgttgccaacatactgacttaacttattgtcgaggttgtaccatg

SEQ ID NO: 442591 - DNA, 60 bp, Artificial
  Synthetic oligonucleotide
gtgtctggcgcactactacttgctgttactgtataagctacatcgttaatgtagattgtt

SEQ ID NO: 442592 - DNA, 59 bp, Artificial
  Synthetic oligonucleotide
gtgtctggcttaaggtcagagaagattactcattagaatgtgacccagccgtcatagga

SEQ ID NO: 442593 - DNA, 55 bp, Artificial
  Synthetic oligonucleotide
gtgtctgggctcctcatagaacaccatttctctacgttacgaggcctctctgtcc

SEQ ID NO: 442594 - DNA, 60 bp, Artificial
  Synthetic oligonucleotide
gtgtctggtcaatggcaaggaccatatcctgacgactacacaataaaagatgttccccta

SEQ ID NO: 442595 - DNA, 60 bp, Artificial
  Synthetic oligonucleotide
gtgtctggtccgtactcactgatctgtttgtgcagggtcaggaccatctccgggatacgg

SEQ ID NO: 442596 - DNA, 56 bp, Artificial
  Synthetic oligonucleotide
gtgtctggtgcattacccttaccggttgtggcattacccgtgcaccctaaattata

SEQ ID NO: 442597 - DNA, 55 bp, Artificial
  Synthetic oligonucleotide
gtgtctggtggctctgagtcttctatggaggtcgttagcctggacacctctagtt

SEQ ID NO: 442598 - DNA, 60 bp, Artificial
  Synthetic oligonucleotide
gtgtctgtatggatggagctcgttctccacctctgagtccgcatcagactggcccgtacc

SEQ ID NO: 442599 - DNA, 58 bp, Artificial
  Synthetic oligonucleotide
gtgtctgtcaccgcattcgatagacttcaggcttatggtaagaaagagcttaaacaat

SEQ ID NO: 442600 - DNA, 56 bp, Artificial
  Synthetic oligonucleotide
gtgtctgtcgtttcggcacgactacggactaatgaccgaagaggaacggcgcaagt

SEQ ID NO: 442601 - DNA, 57 bp, Artificial
  Synthetic oligonucleotide
gtgtctgtgaagtgacttgttacactgtgtgcctttgtggcgaaaatgagggcccga

SEQ ID NO: 442602 - DNA, 50 bp, Artificial
  Synthetic oligonucleotide
gtgtctgtgctatccgaaccgaagaacacgattcgttgcttcacgcccac

SEQ ID NO: 442603 - DNA, 55 bp, Artificial
  Synthetic oligonucleotide
gtgtctgtgggagtaggagctttgccaacgctaccgcgtcagtggatagcgacag

SEQ ID NO: 442604 - DNA, 55 bp, Artificial
  Synthetic oligonucleotide
gtgtctgttgttcgtttgcaatatgtatccccttgtagttagttcccctcagggg

SEQ ID NO: 442605 - DNA, 58 bp, Artificial
  Synthetic oligonucleotide
gtgtcttattacacactccgtcttatgactgagagtaaatcgaataacagtgataaag

SEQ ID NO: 442606 - DNA, 60 bp, Artificial
  Synthetic oligonucleotide
gtgtcttcagttgaatggtacatgaaatcaatggagttgcctgatgaggttaagacggat

SEQ ID NO: 442607 - DNA, 56 bp, Artificial
  Synthetic oligonucleotide
gtgtcttccaccaagttttcgaagggaataaggagccagcagtcctcaggaacgga

SEQ ID NO: 442608 - DNA, 56 bp, Artificial
  Synthetic oligonucleotide
gtgtcttccatcaagtttttgaaggttcaaaggaaccagcagtactcaattcaaaa

SEQ ID NO: 442609 - DNA, 60 bp, Artificial
  Synthetic oligonucleotide
gtgtcttcgcaagacaggcacaagcaaaagattattgcacccgcaaagcagctgttgaac

SEQ ID NO: 442610 - DNA, 55 bp, Artificial
  Synthetic oligonucleotide
gtgtcttctgccgcgaggaggaatgcaaggatatcatactctttggacatcaccc

SEQ ID NO: 442611 - DNA, 55 bp, Artificial
  Synthetic oligonucleotide
gtgtcttgcggaccactgtgtgcagtataagcgtgaggtcacatttgtgaacgcc

SEQ ID NO: 442612 - DNA, 55 bp, Artificial
  Synthetic oligonucleotide
gtgtcttgtaaagcaggactaacagttacaaacttgttgcacacacctaatccgg

SEQ ID NO: 442613 - DNA, 53 bp, Artificial
  Synthetic oligonucleotide
gtgtctttacgaactgccatttagaccaactacgttacttttccctacaacaa

SEQ ID NO: 442614 - DNA, 58 bp, Artificial
  Synthetic oligonucleotide
gtgtctttcaatcaaaatctagagtatcaaatagggtacatatgcagtggggttttcg

SEQ ID NO: 442615 - DNA, 55 bp, Artificial
  Synthetic oligonucleotide
gtgtctttccgtgggcggggagttttcgagctctcagacgagaaggcaacgaacc

SEQ ID NO: 442616 - DNA, 51 bp, Artificial
  Synthetic oligonucleotide
gtgtctttgacctgcacccctccttgctgcgccgccggcgtaagcggaggt

SEQ ID NO: 442617 - DNA, 51 bp, Artificial
  Synthetic oligonucleotide
gtgtgaaaaaaagacattacccttaacatggactgggttcataccattacc

SEQ ID NO: 442618 - DNA, 55 bp, Artificial
  Synthetic oligonucleotide
gtgtgaaacagaagatgagggcacccaagagcaagaagccaccattgaattgccc

SEQ ID NO: 442619 - DNA, 55 bp, Artificial
  Synthetic oligonucleotide
gtgtgaaaccctcaacacgaatatgcttcctgacatgcgtaaaattgtccaaggc

SEQ ID NO: 442620 - DNA, 60 bp, Artificial
  Synthetic oligonucleotide
gtgtgaaagcaccgagagtgagtggtacaagtggtgttggaggtatgaagatgaaattca

SEQ ID NO: 442621 - DNA, 57 bp, Artificial
  Synthetic oligonucleotide
gtgtgaaaggatttgcattcctagatggggataattcctggttgggaaggaccataa

SEQ ID NO: 442622 - DNA, 55 bp, Artificial
  Synthetic oligonucleotide
gtgtgaaccagtagcagttgtcatacatggtgagcccggaactggaaaatccatg

SEQ ID NO: 442623 - DNA, 56 bp, Artificial
  Synthetic oligonucleotide
gtgtgaacctcgagtgcgagaccgaaactcaaacccgagggaaccttctgccggca

SEQ ID NO: 442624 - DNA, 58 bp, Artificial
  Synthetic oligonucleotide
gtgtgaacctcgagtgcgaggccgaaactcaaactcgaggaagccctctaccgacatg

SEQ ID NO: 442625 - DNA, 60 bp, Artificial
  Synthetic oligonucleotide
gtgtgaactgcacgctcaatcggtccgcgacatgcacctactccaccaacatgacgtcct

SEQ ID NO: 442626 - DNA, 60 bp, Artificial
  Synthetic oligonucleotide
gtgtgaagaaagcctgtctgatttgtctgacctaattgataatgctgaatgcgagcaagg

SEQ ID NO: 442627 - DNA, 60 bp, Artificial
  Synthetic oligonucleotide
gtgtgaagaatcgggaaaggtttgagactcgactgcgacatgaggctagtgctgagtggg

SEQ ID NO: 442628 - DNA, 60 bp, Artificial
  Synthetic oligonucleotide
gtgtgaagagccgcgtgtgctcagtgtgcttcctccggcccctgaatgtggctaacctta

SEQ ID NO: 442629 - DNA, 59 bp, Artificial
  Synthetic oligonucleotide
gtgtgaagaggctattgggagtcacaaagaaccggacatgtatgcgtgtgtctggggtt

SEQ ID NO: 442630 - DNA, 59 bp, Artificial
  Synthetic oligonucleotide
gtgtgaagatactgctccggaggtggaggtacccccaaatactgacggcacagcacgga

SEQ ID NO: 442631 - DNA, 56 bp, Artificial
  Synthetic oligonucleotide
gtgtgaagcctccagcaaactttttagtttgtgaggagtgactacactcgggcttt

SEQ ID NO: 442632 - DNA, 60 bp, Artificial
  Synthetic oligonucleotide
gtgtgaataaattaccctcctttgcggagttatttggaccttattctgctgcatatgcga

SEQ ID NO: 442633 - DNA, 53 bp, Artificial
  Synthetic oligonucleotide
gtgtgaatataaggacggtaaggttcttcaatatgaaggactgcctaccgcaa

SEQ ID NO: 442634 - DNA, 57 bp, Artificial
  Synthetic oligonucleotide
gtgtgaatcaactccaatgtaaactaaaaaattgtatcaaaggcgagccacgactaa

SEQ ID NO: 442635 - DNA, 52 bp, Artificial
  Synthetic oligonucleotide
gtgtgaatcccagcgctgaatttgtgtgcaagattctctccccgtattcgtt

SEQ ID NO: 442636 - DNA, 60 bp, Artificial
  Synthetic oligonucleotide
gtgtgaatgcaacaaagattagttacactcttagcactgatccaacggcagtccctcgaa

SEQ ID NO: 442637 - DNA, 55 bp, Artificial
  Synthetic oligonucleotide
gtgtgaatgcaacgaagattagttacactctaagcactgatccgacagcaattcc

SEQ ID NO: 442638 - DNA, 50 bp, Artificial
  Synthetic oligonucleotide
gtgtgaatggttagcgttattactattcactcgtgcattcaaatgattca

SEQ ID NO: 442639 - DNA, 60 bp, Artificial
  Synthetic oligonucleotide
gtgtgaatgtaaacatgtggagaagagagatagaatataaagcaaatgggatctgtctta

SEQ ID NO: 442640 - DNA, 56 bp, Artificial
  Synthetic oligonucleotide
gtgtgaatgtcagggctctggtaaagaggatcttgaaatctgcttcagaaagaagc

SEQ ID NO: 442641 - DNA, 55 bp, Artificial
  Synthetic oligonucleotide
gtgtgacaaaagaggagcatctgtgaggagtaccacagagagtggcaaggtcatc

SEQ ID NO: 442642 - DNA, 55 bp, Artificial
  Synthetic oligonucleotide
gtgtgacaatcaaggagaagcaaaatcaaacctcatcccaacatcaagctgtcag

SEQ ID NO: 442643 - DNA, 60 bp, Artificial
  Synthetic oligonucleotide
gtgtgacaatcagttggacgtgaatgggatgtttcaatggggtgaaagaggttaccatgc

SEQ ID NO: 442644 - DNA, 55 bp, Artificial
  Synthetic oligonucleotide
gtgtgacacttacaagaggtcaaaatacagtgaaagtgtcaggaaagggcggaca

SEQ ID NO: 442645 - DNA, 55 bp, Artificial
  Synthetic oligonucleotide
gtgtgacaggggggacggcaggccataccacccgcagctttacgtccctcttttc

SEQ ID NO: 442646 - DNA, 59 bp, Artificial
  Synthetic oligonucleotide
gtgtgacatcagaccggctcatacgagacccgaaagcagttaaggtgttgagttacgaa

SEQ ID NO: 442647 - DNA, 55 bp, Artificial
  Synthetic oligonucleotide
gtgtgacatcctcggaagaaggaatcaagcccaacaaggtcaaccgtccaggtac

SEQ ID NO: 442648 - DNA, 55 bp, Artificial
  Synthetic oligonucleotide
gtgtgacattggagaaagcaatccagatgctgcagtggagggtgagaggacacgg

SEQ ID NO: 442649 - DNA, 55 bp, Artificial
  Synthetic oligonucleotide
gtgtgacattggagaaagtaacccagatgccgtggtggagggtgaaaggacacgg

SEQ ID NO: 442650 - DNA, 55 bp, Artificial
  Synthetic oligonucleotide
gtgtgaccatggttgttggcttcttacgccgctaacggctcacctctatgcctcc

SEQ ID NO: 442651 - DNA, 60 bp, Artificial
  Synthetic oligonucleotide
gtgtgacccagaaactttctggtcaaagataccagcaatgttagatgataagtgtattat

SEQ ID NO: 442652 - DNA, 53 bp, Artificial
  Synthetic oligonucleotide
gtgtgaccgaccggtacccgcataaggtgcccgtgaaaggggcctttgtggag

SEQ ID NO: 442653 - DNA, 60 bp, Artificial
  Synthetic oligonucleotide
gtgtgacgaatgatttcgacctgcaagtcgcgatgaattgtttagcacgatgctatttat

SEQ ID NO: 442654 - DNA, 55 bp, Artificial
  Synthetic oligonucleotide
gtgtgacgatgaatgcatggaaagtgtgaagaatggcacatacgactatcccaag

SEQ ID NO: 442655 - DNA, 56 bp, Artificial
  Synthetic oligonucleotide
gtgtgacgcagttgtatgaaggcctacgccctctaaccccttcccgtgactctaaa

SEQ ID NO: 442656 - DNA, 55 bp, Artificial
  Synthetic oligonucleotide
gtgtgacgcgcggccaagcgaaataaatgtgtcacttgaatgaggtcaggaggac

SEQ ID NO: 442657 - DNA, 55 bp, Artificial
  Synthetic oligonucleotide
gtgtgacgcgtgcaggttcctatgccacctgtgtgttatgccacctgtgtgtgcc

SEQ ID NO: 442658 - DNA, 54 bp, Artificial
  Synthetic oligonucleotide
gtgtgacggatgttactcgtggcggtggtttaacccaccgtactgggaagagat

SEQ ID NO: 442659 - DNA, 58 bp, Artificial
  Synthetic oligonucleotide
gtgtgacggcagcatgcccttatgctggagcaaacagtttctacagaaatttaatatg

SEQ ID NO: 442660 - DNA, 57 bp, Artificial
  Synthetic oligonucleotide
gtgtgacgttcgttcagctggacacgaccgcgagtgactccacgaagccctggagag

SEQ ID NO: 442661 - DNA, 55 bp, Artificial
  Synthetic oligonucleotide
gtgtgactatcactgatggtaaggacaaaacaagtttggaacttccttttcgcag

SEQ ID NO: 442662 - DNA, 55 bp, Artificial
  Synthetic oligonucleotide
gtgtgactatgggacgcaaaacccgacgacatttggattgtggggactttacaac

SEQ ID NO: 442663 - DNA, 55 bp, Artificial
  Synthetic oligonucleotide
gtgtgactggacgtttgcgggtatagtagagacagtcatcttaatggcggaactc

SEQ ID NO: 442664 - DNA, 55 bp, Artificial
  Synthetic oligonucleotide
gtgtgactttcctgccgaatttaaagatgggtatgttgcatcttcactggttggt

SEQ ID NO: 442665 - DNA, 55 bp, Artificial
  Synthetic oligonucleotide
gtgtgagaactacatggccgctcatactagcgaatggcaaccactacacagctac

SEQ ID NO: 442666 - DNA, 55 bp, Artificial
  Synthetic oligonucleotide
gtgtgagaaggcccggtctacgttccactctgtgcctacagatatttgggatcgg

SEQ ID NO: 442667 - DNA, 55 bp, Artificial
  Synthetic oligonucleotide
gtgtgagagctcttgtatcgaacggtatcccggagatatatccggaagcttacac

SEQ ID NO: 442668 - DNA, 55 bp, Artificial
  Synthetic oligonucleotide
gtgtgagagggacgatagtattaattcttaaggttataggattcatcgcatatgc

SEQ ID NO: 442669 - DNA, 56 bp, Artificial
  Synthetic oligonucleotide
gtgtgagatcaaccgtcatacaagatagaagtaaccaaattctagtgaatttccga

SEQ ID NO: 442670 - DNA, 57 bp, Artificial
  Synthetic oligonucleotide
gtgtgagccatggcgacttttaaagacgcttgttatcattataaaaagttgaataag

SEQ ID NO: 442671 - DNA, 51 bp, Artificial
  Synthetic oligonucleotide
gtgtgagcctctcacgaacaagctcgagattagactccgtttgcaagccta

SEQ ID NO: 442672 - DNA, 55 bp, Artificial
  Synthetic oligonucleotide
gtgtgaggaccttgctgtagtgtctgctagtatccgagcctttcttggtgtgctg

SEQ ID NO: 442673 - DNA, 55 bp, Artificial
  Synthetic oligonucleotide
gtgtgaggctttgcctcttatcttataggtttgagggatgtactagcttcgaacc

SEQ ID NO: 442674 - DNA, 59 bp, Artificial
  Synthetic oligonucleotide
gtgtgagtcctccggcccctgaatgtggctaaccttaaccccgcagctatggtgtgcaa

SEQ ID NO: 442675 - DNA, 55 bp, Artificial
  Synthetic oligonucleotide
gtgtgagtcggtgtacatgatgtggatgaggttcttgatcccctcttcgagtgcg

SEQ ID NO: 442676 - DNA, 58 bp, Artificial
  Synthetic oligonucleotide
gtgtgagttaaaagcagtctatttgacaacaatgaaaccttatggtatggtctcaaag

SEQ ID NO: 442677 - DNA, 58 bp, Artificial
  Synthetic oligonucleotide
gtgtgatacaagaattggctgtctagaggtattaaaagtacatccagaaacaccagtg

SEQ ID NO: 442678 - DNA, 55 bp, Artificial
  Synthetic oligonucleotide
gtgtgatactgcaattgaaccagtgatagacatacgcgttccattatgtgcgggg

SEQ ID NO: 442679 - DNA, 52 bp, Artificial
  Synthetic oligonucleotide
gtgtgatatctagcatcacgactccgctcaaagtccctgtcaaccagattaa

SEQ ID NO: 442680 - DNA, 60 bp, Artificial
  Synthetic oligonucleotide
gtgtgatattactgagccctttatagaccatgtgtgtcgtttgtatgggcatgaacatct

SEQ ID NO: 442681 - DNA, 55 bp, Artificial
  Synthetic oligonucleotide
gtgtgatcacagtggacaaagaaacagctcagatccgtttgcagacagacaacac

SEQ ID NO: 442682 - DNA, 60 bp, Artificial
  Synthetic oligonucleotide
gtgtgatcacgaacttacagtgtggttgtgcctgcggcctggcatcaattggggtgcaaa

SEQ ID NO: 442683 - DNA, 51 bp, Artificial
  Synthetic oligonucleotide
gtgtgatcccgacactttctggtcagtgattccttgcttgttagatggaga

SEQ ID NO: 442684 - DNA, 55 bp, Artificial
  Synthetic oligonucleotide
gtgtgatcctgagactttctggtccaaaatccctgttatgcttgatggagactgc

SEQ ID NO: 442685 - DNA, 57 bp, Artificial
  Synthetic oligonucleotide
gtgtgatcgatatcctttgactgttgagactaaaggtggaactgtaccttttttggc

SEQ ID NO: 442686 - DNA, 60 bp, Artificial
  Synthetic oligonucleotide
gtgtgatgaggggcacgcagtaggaatgctcgtgtccgtgcttcactcgggcggtagagt

SEQ ID NO: 442687 - DNA, 57 bp, Artificial
  Synthetic oligonucleotide
gtgtgatgagtgtagtggaacaacttacaggcagaggccctaaacaattagtaatga

SEQ ID NO: 442688 - DNA, 60 bp, Artificial
  Synthetic oligonucleotide
gtgtgatgctcttgcttacttatcggcatggacggcaacttggatggtcggcttaacacg

SEQ ID NO: 442689 - DNA, 55 bp, Artificial
  Synthetic oligonucleotide
gtgtgatgtgagatggatcgcgctgcgctctccaatttgttaatcgcgacgatac

SEQ ID NO: 442690 - DNA, 57 bp, Artificial
  Synthetic oligonucleotide
gtgtgattaataaccctatattgacccctttgatgttcttgatagttattcagtacc

SEQ ID NO: 442691 - DNA, 53 bp, Artificial
  Synthetic oligonucleotide
gtgtgattcaaaagaccgcagatgtttaccatccttgccaaactaatggacct

SEQ ID NO: 442692 - DNA, 58 bp, Artificial
  Synthetic oligonucleotide
gtgtgattcgtagtttagaagtcttaaataaggaggccatagtcgatcctggggtgca

SEQ ID NO: 442693 - DNA, 58 bp, Artificial
  Synthetic oligonucleotide
gtgtgattgaagccagtagcgtgaatgacactatactgttcaggacaacttttggcaa

SEQ ID NO: 442694 - DNA, 60 bp, Artificial
  Synthetic oligonucleotide
gtgtgatttaatggcaggcatgatgctggttgacactttccactcgcgcccagagaatgc

SEQ ID NO: 442695 - DNA, 55 bp, Artificial
  Synthetic oligonucleotide
gtgtgatttccccaagctacgcatgctgtcgatggacgaggctatcaacggaact

SEQ ID NO: 442696 - DNA, 55 bp, Artificial
  Synthetic oligonucleotide
gtgtgatttgtacctgaatttaggagttaccattaaacaagccactgtatcgaac

SEQ ID NO: 442697 - DNA, 60 bp, Artificial
  Synthetic oligonucleotide
gtgtgattttatcatgcgtggggcagatgacacaccaaacttcgtgcaagtgcaaaacag

SEQ ID NO: 442698 - DNA, 55 bp, Artificial
  Synthetic oligonucleotide
gtgtgcaacaaagaatgaagtgtgaaacagctttgataacaagcatctttaagcc

SEQ ID NO: 442699 - DNA, 60 bp, Artificial
  Synthetic oligonucleotide
gtgtgcaacaaatctaggacaccctctcattctagacacctgcaccatcgaaggactggt

SEQ ID NO: 442700 - DNA, 59 bp, Artificial
  Synthetic oligonucleotide
gtgtgcaacaaccctgggacaccctcttattctagacacctgcaatatagaaggattgg

SEQ ID NO: 442701 - DNA, 52 bp, Artificial
  Synthetic oligonucleotide
gtgtgcaacaacgatcatttgtttcgtttgcgctgctgaaagcacgttccaa

SEQ ID NO: 442702 - DNA, 59 bp, Artificial
  Synthetic oligonucleotide
gtgtgcaacccactttctcggtacagagaaatcttccttttgagagggcgactatcatg

SEQ ID NO: 442703 - DNA, 57 bp, Artificial
  Synthetic oligonucleotide
gtgtgcaagactacaatggtatgatagaaaatatgtccaaattggataacactgacg

SEQ ID NO: 442704 - DNA, 57 bp, Artificial
  Synthetic oligonucleotide
gtgtgcaatgcggttaatctaataccgctggacaccccgcagaggttccgtgttgtt

SEQ ID NO: 442705 - DNA, 60 bp, Artificial
  Synthetic oligonucleotide
gtgtgcaccatcctccagatgaagtcgagcaagctaacttatatggcattggtagccggt

SEQ ID NO: 442706 - DNA, 55 bp, Artificial
  Synthetic oligonucleotide
gtgtgcactctcaccgatgtgtacctccctgaaattcggccatatttgcaacctg

SEQ ID NO: 442707 - DNA, 60 bp, Artificial
  Synthetic oligonucleotide
gtgtgcagaaattgagtatgactcatggtaccccaatcccctagaccctacttcattggc

SEQ ID NO: 442708 - DNA, 60 bp, Artificial
  Synthetic oligonucleotide
gtgtgcagaaccttactagcaaaatctgtattcaacagtctatatgcatcaccacaactc

SEQ ID NO: 442709 - DNA, 55 bp, Artificial
  Synthetic oligonucleotide
gtgtgcagacggcactgttagatatattacgtgggtgtgtgttcatgacgaaaac

SEQ ID NO: 442710 - DNA, 51 bp, Artificial
  Synthetic oligonucleotide
gtgtgcagagtataatggcttgcgcctagcaacacccctgcagggtctacc

SEQ ID NO: 442711 - DNA, 54 bp, Artificial
  Synthetic oligonucleotide
gtgtgcagatccagatgttggaatggaccctaatcgtggtgggctttctggagt

SEQ ID NO: 442712 - DNA, 57 bp, Artificial
  Synthetic oligonucleotide
gtgtgcaggttaattacggccctacgggggagccattggattttcagatcggcagga

SEQ ID NO: 442713 - DNA, 55 bp, Artificial
  Synthetic oligonucleotide
gtgtgcatcgacttcaatgatgccatggacttgcaaatgttccactcaaccgctg

SEQ ID NO: 442714 - DNA, 55 bp, Artificial
  Synthetic oligonucleotide
gtgtgcatgaaatgcttatgcagggaagccaaagtacgtgagctacgccactggg

SEQ ID NO: 442715 - DNA, 53 bp, Artificial
  Synthetic oligonucleotide
gtgtgcatgcatttattgactaatgaaccagattttttgtgttagtgtggggt

SEQ ID NO: 442716 - DNA, 52 bp, Artificial
  Synthetic oligonucleotide
gtgtgcatttctggcaacccgcatatttgggcgaaggagtatcccagtgaat

SEQ ID NO: 442717 - DNA, 55 bp, Artificial
  Synthetic oligonucleotide
gtgtgccaagaccacctagagttctgggagagcgtctttactgggttaacccaaa

SEQ ID NO: 442718 - DNA, 55 bp, Artificial
  Synthetic oligonucleotide
gtgtgccacaagaatcctggtacttacactggaggttgggttggctgcaatccag

SEQ ID NO: 442719 - DNA, 60 bp, Artificial
  Synthetic oligonucleotide
gtgtgccactgtcagctgcgctgatgatgatgccattgcgactgtcgcacgtttaggatc

SEQ ID NO: 442720 - DNA, 55 bp, Artificial
  Synthetic oligonucleotide
gtgtgccattaggatcttcacccaatgcctaccaggccaagtttgagtctgttgc

SEQ ID NO: 442721 - DNA, 60 bp, Artificial
  Synthetic oligonucleotide
gtgtgcccccaggacaaggtaaggactctcccgctatcactcgtgcagaagctctggcta

SEQ ID NO: 442722 - DNA, 60 bp, Artificial
  Synthetic oligonucleotide
gtgtgcccgactgcttgtgtatcaggggtttatcttgatccctggccattaactccatat

SEQ ID NO: 442723 - DNA, 54 bp, Artificial
  Synthetic oligonucleotide
gtgtgccggaagaactcgaaagaagggattacattgttgggatgtaccttgggt

SEQ ID NO: 442724 - DNA, 55 bp, Artificial
  Synthetic oligonucleotide
gtgtgcctggactagctgtacaggaatggtcgaacgtggacttgactggtttgag

SEQ ID NO: 442725 - DNA, 55 bp, Artificial
  Synthetic oligonucleotide
gtgtgccttcgcagattgggcaacctatcgcgagtttcggtatctagaagatact

SEQ ID NO: 442726 - DNA, 55 bp, Artificial
  Synthetic oligonucleotide
gtgtgcgaatcttcctggtttgccgaaaacatcggctggtgtgatttatgttgct

SEQ ID NO: 442727 - DNA, 55 bp, Artificial
  Synthetic oligonucleotide
gtgtgcgagctttatttgctcacttcctccgtcgataaaatcccgaattttcggg

SEQ ID NO: 442728 - DNA, 54 bp, Artificial
  Synthetic oligonucleotide
gtgtgcgatcaatcaccctaggcaactctactattaccactcaggaaagcgcaa

SEQ ID NO: 442729 - DNA, 60 bp, Artificial
  Synthetic oligonucleotide
gtgtgcgccgtcatttgcaaggtgagactggtcatttaaggagtcaacttgggaattctc

SEQ ID NO: 442730 - DNA, 55 bp, Artificial
  Synthetic oligonucleotide
gtgtgcgcttgcagcgtaatgtttagtcgcatgaggcactctggcaacgtaacgg

SEQ ID NO: 442731 - DNA, 55 bp, Artificial
  Synthetic oligonucleotide
gtgtgcgctttggccgtcctgtcagatgaaccccgccggtaacatttacttcctc

SEQ ID NO: 442732 - DNA, 55 bp, Artificial
  Synthetic oligonucleotide
gtgtgcggtgggagagagcgacaggcggccgacgttaattgcgacgtgcgattca

SEQ ID NO: 442733 - DNA, 55 bp, Artificial
  Synthetic oligonucleotide
gtgtgcgtaccagaagcagaaatggggtgttctaacgtgaacaatcaacccagtt

SEQ ID NO: 442734 - DNA, 60 bp, Artificial
  Synthetic oligonucleotide
gtgtgcgtacgccacttagttcgactaatgcgtgcccccacactgcgcagggattctgat

SEQ ID NO: 442735 - DNA, 54 bp, Artificial
  Synthetic oligonucleotide
gtgtgctacgatccttgttttggaacgaaccggctataggccagaagttggttt

SEQ ID NO: 442736 - DNA, 60 bp, Artificial
  Synthetic oligonucleotide
gtgtgctacgatccttgttttggaatgagccagctattggccagaaattggtctttacgc

SEQ ID NO: 442737 - DNA, 54 bp, Artificial
  Synthetic oligonucleotide
gtgtgctagaggcacttgcctactacggtttcaaaccgaatcttcgtaaaacgt

SEQ ID NO: 442738 - DNA, 57 bp, Artificial
  Synthetic oligonucleotide
gtgtgctagcaacaccggaaataccttttacaacggaagcggcgaatgaaatagctc

SEQ ID NO: 442739 - DNA, 52 bp, Artificial
  Synthetic oligonucleotide
gtgtgctatcccagaatttgatgtcacgccaccaattgacatacctggggaa

SEQ ID NO: 442740 - DNA, 55 bp, Artificial
  Synthetic oligonucleotide
gtgtgctatcgagtgtttagcgaaaagatatggttgagcgctgttccgagaggag

SEQ ID NO: 442741 - DNA, 55 bp, Artificial
  Synthetic oligonucleotide
gtgtgctcacagaagtgcagctatgtgctaagcgccttggcctgttgttaactcc

SEQ ID NO: 442742 - DNA, 55 bp, Artificial
  Synthetic oligonucleotide
gtgtgctcatctattcagaactctggtgtctagagatccctcagagtaaagtagc

SEQ ID NO: 442743 - DNA, 55 bp, Artificial
  Synthetic oligonucleotide
gtgtgctccctgcgcactttacctgtaacttcagtaggcgctttggtctagcaac

SEQ ID NO: 442744 - DNA, 55 bp, Artificial
  Synthetic oligonucleotide
gtgtgctgattactatgagcctttgcagtgtatctggtgcaaagcaacactcgga

SEQ ID NO: 442745 - DNA, 60 bp, Artificial
  Synthetic oligonucleotide
gtgtgctgccaactggatcctgcgcgggacgtcctttgtctacgtcccgtcagcgctgaa

SEQ ID NO: 442746 - DNA, 55 bp, Artificial
  Synthetic oligonucleotide
gtgtgctgttttctgcctacagctgtggaatctaggaggtactcttgtgcccact

SEQ ID NO: 442747 - DNA, 51 bp, Artificial
  Synthetic oligonucleotide
gtgtgcttcgcagacattagacagttggacttcatcgctgaaacacagggc

SEQ ID NO: 442748 - DNA, 55 bp, Artificial
  Synthetic oligonucleotide
gtgtggaaaattgggacacctagcaaaagactgcaggggacaggtgaatttttta

SEQ ID NO: 442749 - DNA, 57 bp, Artificial
  Synthetic oligonucleotide
gtgtggaacacatactgttgttgtcattgatgggcaaccggtacccgaacaaggaag

SEQ ID NO: 442750 - DNA, 55 bp, Artificial
  Synthetic oligonucleotide
gtgtggaacggatgaaattgggcaagcaagatataattcagttgaagcagcaagg

SEQ ID NO: 442751 - DNA, 55 bp, Artificial
  Synthetic oligonucleotide
gtgtggaagcccaaccagacaccggtctttacttgctcaattccctatgtacctt

SEQ ID NO: 442752 - DNA, 55 bp, Artificial
  Synthetic oligonucleotide
gtgtggacaccaattcggccttacaacatcccaaattggatccgttcgcgggtcc

SEQ ID NO: 442753 - DNA, 55 bp, Artificial
  Synthetic oligonucleotide
gtgtggacatgaagcttcgcctagtaagacaatgatgacgccatactctgtggag

SEQ ID NO: 442754 - DNA, 55 bp, Artificial
  Synthetic oligonucleotide
gtgtggacccaatgatcgagcccacatcgtcttccccgtccgactatcgccctct

SEQ ID NO: 442755 - DNA, 57 bp, Artificial
  Synthetic oligonucleotide
gtgtggacccagtgctcgtgcccacatcgtcttgcccgtcctcgagtctccttcaac

SEQ ID NO: 442756 - DNA, 54 bp, Artificial
  Synthetic oligonucleotide
gtgtggacggttacggcaacatggtaaccacagacccgaagacggctgaccccg

SEQ ID NO: 442757 - DNA, 59 bp, Artificial
  Synthetic oligonucleotide
gtgtggactatccttggagactttaacaagacacgccggcttgtagaggatagttcaga

SEQ ID NO: 442758 - DNA, 55 bp, Artificial
  Synthetic oligonucleotide
gtgtggagcgggagtgaaagaggcctccgggtgaaggtaagtgcctacaccgaaa

SEQ ID NO: 442759 - DNA, 60 bp, Artificial
  Synthetic oligonucleotide
gtgtggagtcttgcgcgttgttactcaatgtggaagccaacacagtgggacgtcatttac

SEQ ID NO: 442760 - DNA, 59 bp, Artificial
  Synthetic oligonucleotide
gtgtggatcatagcttatatagaatataggaagtggttaagacaaagaaaaatagactg

SEQ ID NO: 442761 - DNA, 55 bp, Artificial
  Synthetic oligonucleotide
gtgtggatcgaggacaatccatggatggaagacaaaactccagtcacaacctggg

SEQ ID NO: 442762 - DNA, 57 bp, Artificial
  Synthetic oligonucleotide
gtgtggatcggcaatattgtgaatcgcgtagcccaaggtcgttacacgggtggtact

SEQ ID NO: 442763 - DNA, 55 bp, Artificial
  Synthetic oligonucleotide
gtgtggatgacttcaacaacaagttttacagtttgcacttgaaaattccatcgac

SEQ ID NO: 442764 - DNA, 60 bp, Artificial
  Synthetic oligonucleotide
gtgtggatggcatgccactctgctgcatttgaagatttaagagtatcaagcttcataaga

SEQ ID NO: 442765 - DNA, 57 bp, Artificial
  Synthetic oligonucleotide
gtgtggatgggaagaacgatcagcgaaaagttccgctcaggttatgaaaccttcaaa

SEQ ID NO: 442766 - DNA, 60 bp, Artificial
  Synthetic oligonucleotide
gtgtggattgtacatgagtttgatctgcttaaataatgcaagtaatgttgatacatggac

SEQ ID NO: 442767 - DNA, 55 bp, Artificial
  Synthetic oligonucleotide
gtgtggcagatagacaggatgaagattagaacatggaacagcttagtaaaacatc

SEQ ID NO: 442768 - DNA, 56 bp, Artificial
  Synthetic oligonucleotide
gtgtggccatcaagtccctcactgagaggctttacgtcgggggccctcttaccaat

SEQ ID NO: 442769 - DNA, 55 bp, Artificial
  Synthetic oligonucleotide
gtgtggccctaatgaccttgcccacattgtcttgcctgtcctgctatcaccctct

SEQ ID NO: 442770 - DNA, 55 bp, Artificial
  Synthetic oligonucleotide
gtgtggccctttattccacacacatctattgacacacaacatgctattgttatac

SEQ ID NO: 442771 - DNA, 52 bp, Artificial
  Synthetic oligonucleotide
gtgtggcgtgagggtcgcgcggatttggtggcttcgcttcgtgcgcatgtga

SEQ ID NO: 442772 - DNA, 53 bp, Artificial
  Synthetic oligonucleotide
gtgtggcgtggtaccagctaaggaagtgtgtggcccagtctactgcttcacac

SEQ ID NO: 442773 - DNA, 56 bp, Artificial
  Synthetic oligonucleotide
gtgtggctattaaaggcacgcgttgtgaagtattttacaagggtggaagcgagtgg

SEQ ID NO: 442774 - DNA, 56 bp, Artificial
  Synthetic oligonucleotide
gtgtggctcccatggacatcaagtacccctaacggtgccaccaaccaaaacgtgta

SEQ ID NO: 442775 - DNA, 55 bp, Artificial
  Synthetic oligonucleotide
gtgtggctgttctgataggcggttcatctgtgttacctggggttaagaattccgt

SEQ ID NO: 442776 - DNA, 55 bp, Artificial
  Synthetic oligonucleotide
gtgtggcttcgccgacctcatgggatacattccgctcgtaggcgcccctgtgggt

SEQ ID NO: 442777 - DNA, 58 bp, Artificial
  Synthetic oligonucleotide
gtgtgggaaacaccattctattcgggtcctgacatagtgttgcctacaggccccagta

SEQ ID NO: 442778 - DNA, 55 bp, Artificial
  Synthetic oligonucleotide
gtgtgggaacacccttctgacctcagtcacccagatacatggaaatacttcggtg

SEQ ID NO: 442779 - DNA, 56 bp, Artificial
  Synthetic oligonucleotide
gtgtgggacggtgtaaggggtttacctgtgtgttgtgtgcaacatattaacaatag

SEQ ID NO: 442780 - DNA, 55 bp, Artificial
  Synthetic oligonucleotide
gtgtgggaggattacaacagagatcttctagtcagcacaaccacagcacacgggt

SEQ ID NO: 442781 - DNA, 54 bp, Artificial
  Synthetic oligonucleotide
gtgtgggaggattataacagagacctcctcgttagcaccaccacagcccacggg

SEQ ID NO: 442782 - DNA, 55 bp, Artificial
  Synthetic oligonucleotide
gtgtgggcagcccgttccacttgacttgggcggactaccctgacagtaccaatcg

SEQ ID NO: 442783 - DNA, 55 bp, Artificial
  Synthetic oligonucleotide
gtgtgggcatataatgcagagttgctagtactacttgaaaatcagaaaacactcg

SEQ ID NO: 442784 - DNA, 55 bp, Artificial
  Synthetic oligonucleotide
gtgtgggcatgtgtaggtttggaggtaggccgcggacagcctttaggtgctgggc

SEQ ID NO: 442785 - DNA, 56 bp, Artificial
  Synthetic oligonucleotide
gtgtgggccgagacttcgggcccataatgttttgcctgtccgtgaaggaccctcga

SEQ ID NO: 442786 - DNA, 52 bp, Artificial
  Synthetic oligonucleotide
gtgtgggcctgtaggggtgttgaaataggccgtgggcaacctttaggggtag

SEQ ID NO: 442787 - DNA, 60 bp, Artificial
  Synthetic oligonucleotide
gtgtgggctgcacaactaaatgagagctatgattgtagggacgtagtaaagcgttaccat

SEQ ID NO: 442788 - DNA, 55 bp, Artificial
  Synthetic oligonucleotide
gtgtgggctgctagtgctgaaactcagaatcttaattctgggtggacagacacag

SEQ ID NO: 442789 - DNA, 53 bp, Artificial
  Synthetic oligonucleotide
gtgtggggcaccccttatcctccaccatcccgcctctcccacagtggtgggta

SEQ ID NO: 442790 - DNA, 60 bp, Artificial
  Synthetic oligonucleotide
gtgtggggcatacatcatccacccaccgatactgaacagacaaatttgtacataaacacc

SEQ ID NO: 442791 - DNA, 59 bp, Artificial
  Synthetic oligonucleotide
gtgtgggggaaaatttgtgggtcacagtctactatggagtacctgtgtggagagaagca

SEQ ID NO: 442792 - DNA, 50 bp, Artificial
  Synthetic oligonucleotide
gtgtggggttacacggtctcgttcgggcggctcaaaagtttaacccggag

SEQ ID NO: 442793 - DNA, 57 bp, Artificial
  Synthetic oligonucleotide
gtgtgggtgctcgttgtgtggttgcggggacgaacttggtgttgcagcggtcgtcgt

SEQ ID NO: 442794 - DNA, 55 bp, Artificial
  Synthetic oligonucleotide
gtgtggtacctacgcatgctgaatgcggagagactgtggacatagatggtaggga

SEQ ID NO: 442795 - DNA, 58 bp, Artificial
  Synthetic oligonucleotide
gtgtggtatcgtacccgcgtcgcaggtgtgtggtccggtgtattgcttcaccccgagc

SEQ ID NO: 442796 - DNA, 60 bp, Artificial
  Synthetic oligonucleotide
gtgtggtctcacttagcgcggggcgagtctccctcacattccgctccactgtcaagcaga

SEQ ID NO: 442797 - DNA, 56 bp, Artificial
  Synthetic oligonucleotide
gtgtggtgctgccactcgccctcttattggtggttgtccttcacgccccgtctttt

SEQ ID NO: 442798 - DNA, 60 bp, Artificial
  Synthetic oligonucleotide
gtgtggtgcttaaagaaatggagcgcgcgttgagtggaaagagagtcaggttccactctc

SEQ ID NO: 442799 - DNA, 55 bp, Artificial
  Synthetic oligonucleotide
gtgtggtggcgtcttatgctcaactggcaaaatctacggaattcatgttggtggt

SEQ ID NO: 442800 - DNA, 54 bp, Artificial
  Synthetic oligonucleotide
gtgtggttatctttcaataagtcgaattactcaggttttagtcaggatttatgg

SEQ ID NO: 442801 - DNA, 55 bp, Artificial
  Synthetic oligonucleotide
gtgtggttccctctattccaaaccaacacacctcctacagtgctactagagcagc

SEQ ID NO: 442802 - DNA, 58 bp, Artificial
  Synthetic oligonucleotide
gtgtggttgatcaagaagaacaatgtgtaccgaacaataacaaggacctaccacaaca

SEQ ID NO: 442803 - DNA, 55 bp, Artificial
  Synthetic oligonucleotide
gtgtggttgatcaagaagaataatgcgtacccaacaataaagaggacccacagta

SEQ ID NO: 442804 - DNA, 55 bp, Artificial
  Synthetic oligonucleotide
gtgtggttgtacttggaggacgtggttaaatgaaaatcttataagacagaagtgg

SEQ ID NO: 442805 - DNA, 56 bp, Artificial
  Synthetic oligonucleotide
gtgtggtttccccaagaacaaacttagccgctgactgggcattcaagttagaatta

SEQ ID NO: 442806 - DNA, 55 bp, Artificial
  Synthetic oligonucleotide
gtgtggtttgttcctagcgtgaagatgggaaacgagatagccgtgtgcttgacga

SEQ ID NO: 442807 - DNA, 55 bp, Artificial
  Synthetic oligonucleotide
gtgtgtaaccgcgttaatgtttgctccatgatctattatcgcgtagatgaatcgc

SEQ ID NO: 442808 - DNA, 60 bp, Artificial
  Synthetic oligonucleotide
gtgtgtaagctagtttatctggctgataagtgtctccgtgatgcaaatcacaacacggtg

SEQ ID NO: 442809 - DNA, 60 bp, Artificial
  Synthetic oligonucleotide
gtgtgtacagagacttggtttcggatagctctagcaaagctagagcaaatgtgatcacaa

SEQ ID NO: 442810 - DNA, 57 bp, Artificial
  Synthetic oligonucleotide
gtgtgtacccctgggagggtagaaaccactacgctacgcagcagccttagctacgcc

SEQ ID NO: 442811 - DNA, 58 bp, Artificial
  Synthetic oligonucleotide
gtgtgtacccctgggagggtaggtaccactacgctacgcagcagccttagctcgccca

SEQ ID NO: 442812 - DNA, 56 bp, Artificial
  Synthetic oligonucleotide
gtgtgtacccctgggagggtaggtaccctacgcagcagccttagctacgccggagc

SEQ ID NO: 442813 - DNA, 59 bp, Artificial
  Synthetic oligonucleotide
gtgtgtacgaggcatattgaattgggtgctctcaaaactctatggaatggggtgctttg

SEQ ID NO: 442814 - DNA, 55 bp, Artificial
  Synthetic oligonucleotide
gtgtgtactatacagcgaacattacaacatcagtgtagcgtgaagcaagtgtggg

SEQ ID NO: 442815 - DNA, 60 bp, Artificial
  Synthetic oligonucleotide
gtgtgtactcagcggtgtttttcgacaaatcatgtgttgtggacacatcaggtcccattc

SEQ ID NO: 442816 - DNA, 51 bp, Artificial
  Synthetic oligonucleotide
gtgtgtagaagcccttgctctatttaagatgggacaaacaaaggatccttt

SEQ ID NO: 442817 - DNA, 60 bp, Artificial
  Synthetic oligonucleotide
gtgtgtaggagtgggtacgcagctgcagggggctagggcacagcgtgtgcacgtgcaggg

SEQ ID NO: 442818 - DNA, 52 bp, Artificial
  Synthetic oligonucleotide
gtgtgtagtggggtccatttcctattccctaacagatgtggggttatcacct

SEQ ID NO: 442819 - DNA, 60 bp, Artificial
  Synthetic oligonucleotide
gtgtgtatattgaagtattgcatttgactcaaggaacctgttgggaacaaatgtacactc

SEQ ID NO: 442820 - DNA, 60 bp, Artificial
  Synthetic oligonucleotide
gtgtgtatggacgaaatggctagggaatcgcaaagaaatggaattgcaccacaatcggat

SEQ ID NO: 442821 - DNA, 60 bp, Artificial
  Synthetic oligonucleotide
gtgtgtatggacgaaatggtcagagaatcacaaagaaatggaatcgcaccacaatcagat

SEQ ID NO: 442822 - DNA, 60 bp, Artificial
  Synthetic oligonucleotide
gtgtgtattgtgcagctatgcactcaatgtttgagggccatataagatcaatagagtgca

SEQ ID NO: 442823 - DNA, 52 bp, Artificial
  Synthetic oligonucleotide
gtgtgtcacagaagatgaaactatgtgcaatattcgataaccttcgttatct

SEQ ID NO: 442824 - DNA, 52 bp, Artificial
  Synthetic oligonucleotide
gtgtgtcacgtttgttcaaacgattacgcttacaagaggagatacgaggtga

SEQ ID NO: 442825 - DNA, 58 bp, Artificial
  Synthetic oligonucleotide
gtgtgtcagggcaacttgttgaaggtgtctgttttaatcctatccatacaatggccct

SEQ ID NO: 442826 - DNA, 55 bp, Artificial
  Synthetic oligonucleotide
gtgtgtcagtgatgttacgcgtggaactgggctgacccatcgagtgggtaaaagg

SEQ ID NO: 442827 - DNA, 60 bp, Artificial
  Synthetic oligonucleotide
gtgtgtccagcactggatctagtgtgagcactcaacatctggaattcgtggagcatacaa

SEQ ID NO: 442828 - DNA, 52 bp, Artificial
  Synthetic oligonucleotide
gtgtgtccatgtgagcggttgcccgtggaagaggatgagtgtctgaatgccg

SEQ ID NO: 442829 - DNA, 55 bp, Artificial
  Synthetic oligonucleotide
gtgtgtccattgaatactcaaacactaggaataggatgtcagactacaaacaccg

SEQ ID NO: 442830 - DNA, 55 bp, Artificial
  Synthetic oligonucleotide
gtgtgtcccacatgcatataaatgatcggcgggcctatcgaatgacagcgtgtgc

SEQ ID NO: 442831 - DNA, 60 bp, Artificial
  Synthetic oligonucleotide
gtgtgtccctgatgagctcttctgtcccgttgaagtcgaatggtagaaccatatgggcgt

SEQ ID NO: 442832 - DNA, 59 bp, Artificial
  Synthetic oligonucleotide
gtgtgtccgaatccggctgaactaatagagtaatggccccatgtgggcctgagttccat

SEQ ID NO: 442833 - DNA, 53 bp, Artificial
  Synthetic oligonucleotide
gtgtgtcggtttaacatctgccgcgtaccgtgctgaagtcaagaaagaagcgt

SEQ ID NO: 442834 - DNA, 55 bp, Artificial
  Synthetic oligonucleotide
gtgtgtcgtacttgcaatagttctactgtggcccaataattatcatccatgtgtc

SEQ ID NO: 442835 - DNA, 55 bp, Artificial
  Synthetic oligonucleotide
gtgtgtctggacaactggtagaaggcacatgcttcaatccgatccacacaatggc

SEQ ID NO: 442836 - DNA, 59 bp, Artificial
  Synthetic oligonucleotide
gtgtgtcttatgcactccatcaaaaagggtccaagtatacctccaaggctttagatatc

SEQ ID NO: 442837 - DNA, 60 bp, Artificial
  Synthetic oligonucleotide
gtgtgtgagaatgttaaatgctgttcctgctgacttgttgtattgccagatcaccaattc

SEQ ID NO: 442838 - DNA, 60 bp, Artificial
  Synthetic oligonucleotide
gtgtgtgagctcatacgtggagcttatccaaagatccaaacgactagccgtgtgctacgg

SEQ ID NO: 442839 - DNA, 52 bp, Artificial
  Synthetic oligonucleotide
gtgtgtgatgaaatcgcccaagagtttcatgatgtgggcgtgcgagggagga

SEQ ID NO: 442840 - DNA, 55 bp, Artificial
  Synthetic oligonucleotide
gtgtgtgcactgcgacactacgacagatcagcattttggcatacagtagaacaag

SEQ ID NO: 442841 - DNA, 55 bp, Artificial
  Synthetic oligonucleotide
gtgtgtggaaaagctattcagttaatggacaagaataccagaatgagatattcgc

SEQ ID NO: 442842 - DNA, 60 bp, Artificial
  Synthetic oligonucleotide
gtgtgtggaggcctaggtgatgcctgggccgacactgtcacacggaaccggactacgcac

SEQ ID NO: 442843 - DNA, 56 bp, Artificial
  Synthetic oligonucleotide
gtgtgtggcaaggccattcaatttgtagacaggagaacgcaagtgagatatacctt

SEQ ID NO: 442844 - DNA, 60 bp, Artificial
  Synthetic oligonucleotide
gtgtgtggccacgagtcaaggtggatacgatatacgggaaggtcattgggcagctacatg

SEQ ID NO: 442845 - DNA, 60 bp, Artificial
  Synthetic oligonucleotide
gtgtgtggcccagacatgatccaagtgtcattgaatgctggtgctagaggtgatgtgcaa

SEQ ID NO: 442846 - DNA, 59 bp, Artificial
  Synthetic oligonucleotide
gtgtgtggcgacgacttagtcgttatctgtgagagtgcgggggttcaggaggacgcggc

SEQ ID NO: 442847 - DNA, 59 bp, Artificial
  Synthetic oligonucleotide
gtgtgtggcgagacttgcaaagaactttgttgacgacatcccgtacaaccaagtccaca

SEQ ID NO: 442848 - DNA, 58 bp, Artificial
  Synthetic oligonucleotide
gtgtgtggcgcacagacctggtaaatttgagtcctttgaaagtcctgatttctgtttg

SEQ ID NO: 442849 - DNA, 60 bp, Artificial
  Synthetic oligonucleotide
gtgtgtgggatgtgagaagaggacgctggctattgaaacctaacgcgaagtgtcacgctt

SEQ ID NO: 442850 - DNA, 52 bp, Artificial
  Synthetic oligonucleotide
gtgtgtgggctttccgtattttacatttgactgccagtctctttgcgcgccc

SEQ ID NO: 442851 - DNA, 55 bp, Artificial
  Synthetic oligonucleotide
gtgtgtggtcaggtaatatgttgtcctgaatttgtatctagtacctccggggacc

SEQ ID NO: 442852 - DNA, 60 bp, Artificial
  Synthetic oligonucleotide
gtgtgtggtccggatatgatacaagtgtcactgaatgctggagcgagaggagatgtgcaa

SEQ ID NO: 442853 - DNA, 60 bp, Artificial
  Synthetic oligonucleotide
gtgtgtgtatactggggcggtattgagcgaggcggtactcgccatctctcctatcttatc

SEQ ID NO: 442854 - DNA, 55 bp, Artificial
  Synthetic oligonucleotide
gtgtgtgtccgacgttactcgtggtaatgggctgactcatcgtgttggtaagagg

SEQ ID NO: 442855 - DNA, 55 bp, Artificial
  Synthetic oligonucleotide
gtgtgtgtgccggcatctaatcctcgcgcctgcgtctgaatctgtactagttagc

SEQ ID NO: 442856 - DNA, 53 bp, Artificial
  Synthetic oligonucleotide
gtgtgtgttaacaaacattcccctgtgggcggcctttaacggctacccagact

SEQ ID NO: 442857 - DNA, 54 bp, Artificial
  Synthetic oligonucleotide
gtgtgttaaatatgcattgctggtttgtgtttggaatttaaacggtgaactttt

SEQ ID NO: 442858 - DNA, 51 bp, Artificial
  Synthetic oligonucleotide
gtgtgttaattaatgtcaaactcttgaacccatgaaagagtataaagagtc

SEQ ID NO: 442859 - DNA, 60 bp, Artificial
  Synthetic oligonucleotide
gtgtgttacccgtttgtgtaacgggcatctgtaccgtctgagtacagcagagcgcacagg

SEQ ID NO: 442860 - DNA, 55 bp, Artificial
  Synthetic oligonucleotide
gtgtgttagacttcttaatgcagtccctgcagatctcttgtactgtcaagtgcca

SEQ ID NO: 442861 - DNA, 59 bp, Artificial
  Synthetic oligonucleotide
gtgtgttagcggataaaggagtgtttggacaaaatctgcagttccactatctttataga

SEQ ID NO: 442862 - DNA, 55 bp, Artificial
  Synthetic oligonucleotide
gtgtgttaggttccttgtcttgttaggtttgaggcgtacagtaacgatgctcgtg

SEQ ID NO: 442863 - DNA, 55 bp, Artificial
  Synthetic oligonucleotide
gtgtgttcagaagtacacattccactaggagatgctagattagtagtcagaacat

SEQ ID NO: 442864 - DNA, 55 bp, Artificial
  Synthetic oligonucleotide
gtgtgttcccatctctcctagtcgccgcctggtcaactcggtactcaagaccctg

SEQ ID NO: 442865 - DNA, 55 bp, Artificial
  Synthetic oligonucleotide
gtgtgttcctgtccggtgcttaagaacctagtgcactaacggggtctgacagttc

SEQ ID NO: 442866 - DNA, 60 bp, Artificial
  Synthetic oligonucleotide
gtgtgttctacttctaacagcgacattgcagatggcttcaatctagctgcagtcaaagtt

SEQ ID NO: 442867 - DNA, 55 bp, Artificial
  Synthetic oligonucleotide
gtgtgttctatactatcttcttttcttagtggtctgtcacctgaccttactgcag

SEQ ID NO: 442868 - DNA, 55 bp, Artificial
  Synthetic oligonucleotide
gtgtgttctgctaagatcttctagtgatacgcctttgtgttcacacatcatgagg

SEQ ID NO: 442869 - DNA, 54 bp, Artificial
  Synthetic oligonucleotide
gtgtgttgctcaatgtcatattcgtggactggagcgcttgtaacaccctgtgcg

SEQ ID NO: 442870 - DNA, 52 bp, Artificial
  Synthetic oligonucleotide
gtgtgttggaggctgccaagaaaaccatcatcaatgtccttgaacaaacaat

SEQ ID NO: 442871 - DNA, 56 bp, Artificial
  Synthetic oligonucleotide
gtgtgttgtctttgagtcagagttatttactcccgccctttgtagtataaatatgt

SEQ ID NO: 442872 - DNA, 55 bp, Artificial
  Synthetic oligonucleotide
gtgtgtttcgcgttagattacctgatcctaataagtttggccttcctgatgcaaa

SEQ ID NO: 442873 - DNA, 60 bp, Artificial
  Synthetic oligonucleotide
gtgtgtttctcacagagtggattgaacctatcccaaactggatcctcaaagaccctcgca

SEQ ID NO: 442874 - DNA, 57 bp, Artificial
  Synthetic oligonucleotide
gtgtgttttcgctgattgggcaacctatcgcgagttccggtacctagaggatactag

SEQ ID NO: 442875 - DNA, 56 bp, Artificial
  Synthetic oligonucleotide
gtgttaaaagtctactcgttacaactgcctagggctgaccccctgccgtgatcgga

SEQ ID NO: 442876 - DNA, 55 bp, Artificial
  Synthetic oligonucleotide
gtgttaaaagttaactcgtttatgcctagattctctgaatcttgtaaggttgtac

SEQ ID NO: 442877 - DNA, 55 bp, Artificial
  Synthetic oligonucleotide
gtgttaaacaacgcttaacggctattgaaacttctataggttcagatgatattcc

SEQ ID NO: 442878 - DNA, 57 bp, Artificial
  Synthetic oligonucleotide
gtgttaaacgaatccctggaaaatcatcgtccatagtgaaatgtactaggttaatga

SEQ ID NO: 442879 - DNA, 60 bp, Artificial
  Synthetic oligonucleotide
gtgttaaatacaccatgtgccggaacccccgcactgccattgctaaagatagcgtgtatc

SEQ ID NO: 442880 - DNA, 55 bp, Artificial
  Synthetic oligonucleotide
gtgttaacactttaacaacctgtcatggatataagaaaaggtattcgccctctgc

SEQ ID NO: 442881 - DNA, 55 bp, Artificial
  Synthetic oligonucleotide
gtgttaacccctctcctgaagcacctaatcacctcagaatacgtcaccccatcgt

SEQ ID NO: 442882 - DNA, 51 bp, Artificial
  Synthetic oligonucleotide
gtgttaacggccacgtttaaaactaacaattctccggccgctagttttata

SEQ ID NO: 442883 - DNA, 60 bp, Artificial
  Synthetic oligonucleotide
gtgttaagggcggcatgccatctggctgctcgggcacttccatctttaattcaatgatta

SEQ ID NO: 442884 - DNA, 55 bp, Artificial
  Synthetic oligonucleotide
gtgttaaggtgacagcccctcacactatcaaggctgacccgtcaggcgccaccat

SEQ ID NO: 442885 - DNA, 53 bp, Artificial
  Synthetic oligonucleotide
gtgttaagtttaataggtttccgttttgggtgtcatttaaagatacatctgat

SEQ ID NO: 442886 - DNA, 51 bp, Artificial
  Synthetic oligonucleotide
gtgttaatagcttgactgacgccataactgatgcagctagttcaatttcta

SEQ ID NO: 442887 - DNA, 58 bp, Artificial
  Synthetic oligonucleotide
gtgttaatatcatgccttttctaatcgctgcttgcttgcccatcattgccctttccct

SEQ ID NO: 442888 - DNA, 51 bp, Artificial
  Synthetic oligonucleotide
gtgttaatgccatagttatttagcctccaatgcggcaactttagtttcgag

SEQ ID NO: 442889 - DNA, 56 bp, Artificial
  Synthetic oligonucleotide
gtgttacacacaggattctttcgaagctaagtataatcttaagtgggaaggttcga

SEQ ID NO: 442890 - DNA, 60 bp, Artificial
  Synthetic oligonucleotide
gtgttacacgagcccaagagcaggttgttcacagtgcttccaatgtcttacaacatcgtt

SEQ ID NO: 442891 - DNA, 55 bp, Artificial
  Synthetic oligonucleotide
gtgttacactcatcagaggccaaaatacagtaaaggtttccgggaaaggtgggca

SEQ ID NO: 442892 - DNA, 57 bp, Artificial
  Synthetic oligonucleotide
gtgttacaggcggggttttccttgttgacaagaatcctcacaataccacagagtcta

SEQ ID NO: 442893 - DNA, 60 bp, Artificial
  Synthetic oligonucleotide
gtgttacagtggaagtttgacagcaaactagcattccatcacgtggcccgagagaaacat

SEQ ID NO: 442894 - DNA, 58 bp, Artificial
  Synthetic oligonucleotide
gtgttacagtggaagtttgacagccacctagcatttcgtcacatagcccgcgagatac

SEQ ID NO: 442895 - DNA, 53 bp, Artificial
  Synthetic oligonucleotide
gtgttaccatatgttaattcattggctattgactgtatggccaaacataacaa

SEQ ID NO: 442896 - DNA, 55 bp, Artificial
  Synthetic oligonucleotide
gtgttaccggcttggatcgtcaactgcattgtgaatggcacaagtgatgagagga

SEQ ID NO: 442897 - DNA, 60 bp, Artificial
  Synthetic oligonucleotide
gtgttacggctcactggaaacggggtatgctgtcatttatcgctcaaatgcacgcaatga

SEQ ID NO: 442898 - DNA, 51 bp, Artificial
  Synthetic oligonucleotide
gtgttacgggctaacgacctgctaggcgaccctgtaccattcgccaatcga

SEQ ID NO: 442899 - DNA, 51 bp, Artificial
  Synthetic oligonucleotide
gtgttacgtgcattgcgtaaccttgttgttgaaacccgcaatgctgcgtgg

SEQ ID NO: 442900 - DNA, 60 bp, Artificial
  Synthetic oligonucleotide
gtgttactaacctctgcacctaagatcctcagaggcctcttgacaatgatgagtggtgca

SEQ ID NO: 442901 - DNA, 55 bp, Artificial
  Synthetic oligonucleotide
gtgttactacgtctccccagtcattgaaactctactttgtatttagtgctgtagt

SEQ ID NO: 442902 - DNA, 55 bp, Artificial
  Synthetic oligonucleotide
gtgttactattgtgatagcgtggttggtccaccaacatattgtgagtactttatg

SEQ ID NO: 442903 - DNA, 57 bp, Artificial
  Synthetic oligonucleotide
gtgttactcaacgcggcgtctctggccggggcgcatggtcttgtgtccttcctcggt

SEQ ID NO: 442904 - DNA, 55 bp, Artificial
  Synthetic oligonucleotide
gtgttactgctacaaatcatgataagactcctgtgccaagacccatggccaatcc

SEQ ID NO: 442905 - DNA, 60 bp, Artificial
  Synthetic oligonucleotide
gtgttactgctcactggaagcggggtatgctgtcctttgttgcgcagatgcacgcgatga

SEQ ID NO: 442906 - DNA, 57 bp, Artificial
  Synthetic oligonucleotide
gtgttactttgactgtagtgagtacgcggtcgagaggcgcacttttaatcttacaaa

SEQ ID NO: 442907 - DNA, 58 bp, Artificial
  Synthetic oligonucleotide
gtgttagaactggacatttctaagtatgataagtcgcagaacgagtttcattgtgctg

SEQ ID NO: 442908 - DNA, 54 bp, Artificial
  Synthetic oligonucleotide
gtgttagacgctaacgaaaacaacaagtttgtacgtttccaatatagaactgga

SEQ ID NO: 442909 - DNA, 58 bp, Artificial
  Synthetic oligonucleotide
gtgttagacgggtatgagtttagtatagactgcctagccgtggtagcaagtctcgaac

SEQ ID NO: 442910 - DNA, 55 bp, Artificial
  Synthetic oligonucleotide
gtgttagagctactaaatgaagaactaatttatcccaggtataggccacgacagt

SEQ ID NO: 442911 - DNA, 52 bp, Artificial
  Synthetic oligonucleotide
gtgttagaggttactaattctatgggtgtaactaagttagacgtacccttaa

SEQ ID NO: 442912 - DNA, 55 bp, Artificial
  Synthetic oligonucleotide
gtgttagatgctagtgctatggcattcagaagtttacttgctgatcgtgcgtttg

SEQ ID NO: 442913 - DNA, 60 bp, Artificial
  Synthetic oligonucleotide
gtgttagatggtaaccctatgtcattagatagcaaacataaggccccaatgcagattaca

SEQ ID NO: 442914 - DNA, 55 bp, Artificial
  Synthetic oligonucleotide
gtgttagatttctacataggacaattctaccaggaaaacatcgcaaatcaatttg

SEQ ID NO: 442915 - DNA, 55 bp, Artificial
  Synthetic oligonucleotide
gtgttagcgcatgtggtgagattctatctcgattgccttaacatttgataggagg

SEQ ID NO: 442916 - DNA, 55 bp, Artificial
  Synthetic oligonucleotide
gtgttagctgtatgttgtgccggctattcgcatacacacaggtcagagcgttatc

SEQ ID NO: 442917 - DNA, 59 bp, Artificial
  Synthetic oligonucleotide
gtgttagcttccaccaattccagtagaataaccccacccacggttgcgcatagtgatgc

SEQ ID NO: 442918 - DNA, 52 bp, Artificial
  Synthetic oligonucleotide
gtgttagggtcctggaagacgggataaattacgcaacagggaatctacccgg

SEQ ID NO: 442919 - DNA, 58 bp, Artificial
  Synthetic oligonucleotide
gtgttagggttcaatgtctctgggtcagtagttgcccgtcagcaggagcgggttgacg

SEQ ID NO: 442920 - DNA, 55 bp, Artificial
  Synthetic oligonucleotide
gtgttaggtaacaacgcttaggtaaacaacagaaaagatcatagtgtttacaaca

SEQ ID NO: 442921 - DNA, 55 bp, Artificial
  Synthetic oligonucleotide
gtgttagtaccagtagctctgaacatagtaggaagataacagcggcttatcactc

SEQ ID NO: 442922 - DNA, 55 bp, Artificial
  Synthetic oligonucleotide
gtgttagtaccgtttcgtacacaatgaagaccttccgctaggcgattacccataa

SEQ ID NO: 442923 - DNA, 58 bp, Artificial
  Synthetic oligonucleotide
gtgttagtgatgtcacccgtggtaatgggcttacccatcgtgttggtaagagattctg

SEQ ID NO: 442924 - DNA, 55 bp, Artificial
  Synthetic oligonucleotide
gtgttagtgtcctttacattacctttcaaccgatttcggttgctgttggcaagct

SEQ ID NO: 442925 - DNA, 53 bp, Artificial
  Synthetic oligonucleotide
gtgttagttgtttactaatcaaaatatacgggtttataatcgtaagtatcagg

SEQ ID NO: 442926 - DNA, 57 bp, Artificial
  Synthetic oligonucleotide
gtgttataacagtagctggacacgccatcgacgttggcccggactattaccgccaaa

SEQ ID NO: 442927 - DNA, 55 bp, Artificial
  Synthetic oligonucleotide
gtgttatcctcgtgacagcacacaatttgttctgggacttttcttactatgaagg

SEQ ID NO: 442928 - DNA, 56 bp, Artificial
  Synthetic oligonucleotide
gtgttatcctgtattgaaagtagtatttatgttactcagggtgggtttgtaatcag

SEQ ID NO: 442929 - DNA, 60 bp, Artificial
  Synthetic oligonucleotide
gtgttatcgccttcttgtaaggcactcatgcagtgcctaatggatggtgatgtcaagaaa

SEQ ID NO: 442930 - DNA, 55 bp, Artificial
  Synthetic oligonucleotide
gtgttatgcctatatgcggtggtatgcctttgtgttatgtatgtggcagtaccgt

SEQ ID NO: 442931 - DNA, 55 bp, Artificial
  Synthetic oligonucleotide
gtgttatgcgtgccatggatcagccagacacactacagactggtccagcaggatg

SEQ ID NO: 442932 - DNA, 52 bp, Artificial
  Synthetic oligonucleotide
gtgttatgtgtctatccaacggaattttcatagtaaaagctttcttctcgac

SEQ ID NO: 442933 - DNA, 55 bp, Artificial
  Synthetic oligonucleotide
gtgttattaataccccatcattttattgacgtatgcttggctaaactcctcgttc

SEQ ID NO: 442934 - DNA, 55 bp, Artificial
  Synthetic oligonucleotide
gtgttattaatttaactgccgaggttatggcctacctacatagtatgaatgctgc

SEQ ID NO: 442935 - DNA, 59 bp, Artificial
  Synthetic oligonucleotide
gtgttattagcgaatatggtggtaggccagcaagaaaggattgacccggtgatattgga

SEQ ID NO: 442936 - DNA, 55 bp, Artificial
  Synthetic oligonucleotide
gtgttattcaattgcagcagccccaaaagtgagatgcagagagctcgttccttga

SEQ ID NO: 442937 - DNA, 55 bp, Artificial
  Synthetic oligonucleotide
gtgttattcgagttctctgagtctccatacagtgtgggtggcccacgtgctattc

SEQ ID NO: 442938 - DNA, 55 bp, Artificial
  Synthetic oligonucleotide
gtgttattggatgctggatggtcacgttggagactgcatgtggcagtcttgaaac

SEQ ID NO: 442939 - DNA, 55 bp, Artificial
  Synthetic oligonucleotide
gtgttattggctgcttgaggttggagttgaacgcccaaccgggattgtgtaggtt

SEQ ID NO: 442940 - DNA, 58 bp, Artificial
  Synthetic oligonucleotide
gtgttattgtggatttaattattctcatctcccaaatctagaacgtgactttaacatc

SEQ ID NO: 442941 - DNA, 58 bp, Artificial
  Synthetic oligonucleotide
gtgttcaaacgtgtattgtctgtggagaaggatacgttaatggttgatcttgaaggga

SEQ ID NO: 442942 - DNA, 57 bp, Artificial
  Synthetic oligonucleotide
gtgttcaaagatcctaactgacacaagtcggcctaatgatcccggaagcgggaactg

SEQ ID NO: 442943 - DNA, 60 bp, Artificial
  Synthetic oligonucleotide
gtgttcaactacaacaaagctaacaagaggctcacagtcctcggaaaggatgcaggtgca

SEQ ID NO: 442944 - DNA, 55 bp, Artificial
  Synthetic oligonucleotide
gtgttcaactggcaagatatatggtatacatgtaggtggcaatgggagacaaggt

SEQ ID NO: 442945 - DNA, 55 bp, Artificial
  Synthetic oligonucleotide
gtgttcaagtggggcactcacaccgacgtcggagactggttcccgtgggactact

SEQ ID NO: 442946 - DNA, 52 bp, Artificial
  Synthetic oligonucleotide
gtgttcaataccttattaaagggcgtaagcgtgataaagttacaggggaatt

SEQ ID NO: 442947 - DNA, 55 bp, Artificial
  Synthetic oligonucleotide
gtgttcacagcagaataggagcatgaatcctatagatcctcaagtagccccatgg

SEQ ID NO: 442948 - DNA, 55 bp, Artificial
  Synthetic oligonucleotide
gtgttcacatgggtcacggggtctacgcctcagtagcacacgtggttaagggtga

SEQ ID NO: 442949 - DNA, 59 bp, Artificial
  Synthetic oligonucleotide
gtgttcaccagctagtacagaaacttatgaagttgtatcaaatgacactcaattggcat

SEQ ID NO: 442950 - DNA, 60 bp, Artificial
  Synthetic oligonucleotide
gtgttcacgcgatgacgtcataggaccatgactcacctctcccatcgttcgtgcctctct

SEQ ID NO: 442951 - DNA, 55 bp, Artificial
  Synthetic oligonucleotide
gtgttcactcaataatgacaggtgattcgtatggtgaaagtgtgaagcaagcggt

SEQ ID NO: 442952 - DNA, 52 bp, Artificial
  Synthetic oligonucleotide
gtgttcagggtttttagcctccttcatttcgaaagcctgaatggaagattcg

SEQ ID NO: 442953 - DNA, 56 bp, Artificial
  Synthetic oligonucleotide
gtgttcagtgcaaatcaagtctgtaacgcagtcaatctaataccattagacatagc

SEQ ID NO: 442954 - DNA, 55 bp, Artificial
  Synthetic oligonucleotide
gtgttcatgaaacccaagcatgtacgagtatggtgcccaagaccgtgtcgtacct

SEQ ID NO: 442955 - DNA, 51 bp, Artificial
  Synthetic oligonucleotide
gtgttccaaatggccggtgccactgatgatgcacaaaaggattccatctat

SEQ ID NO: 442956 - DNA, 55 bp, Artificial
  Synthetic oligonucleotide
gtgttccaaggaaaacgtctgctgattttacaatgtgcatcaaggaagaagtgtc

SEQ ID NO: 442957 - DNA, 53 bp, Artificial
  Synthetic oligonucleotide
gtgttccacgcgtagttgtaacatccgagcagtctcgtctcccacatgagtcc

SEQ ID NO: 442958 - DNA, 55 bp, Artificial
  Synthetic oligonucleotide
gtgttcccaagaagtaagatggtcctccagcaagaccagtattgcctgcctcttg

SEQ ID NO: 442959 - DNA, 55 bp, Artificial
  Synthetic oligonucleotide
gtgttcccatcatactataataagtggacacatgccccgatgttcaatgctcggg

SEQ ID NO: 442960 - DNA, 60 bp, Artificial
  Synthetic oligonucleotide
gtgttccctaatgcaaggctcaacacttcccagaaggtctggagccgcaggtgctgcagt

SEQ ID NO: 442961 - DNA, 55 bp, Artificial
  Synthetic oligonucleotide
gtgttccgattatgcacttagctgcggacttggactgtatgacgctggctctacc

SEQ ID NO: 442962 - DNA, 60 bp, Artificial
  Synthetic oligonucleotide
gtgttccgtcacgcttagtaggtgcttcagctagttccgtctagctgttgcgtggatcct

SEQ ID NO: 442963 - DNA, 55 bp, Artificial
  Synthetic oligonucleotide
gtgttcctctctggcaactcgaatgaatgttggactgacgactgaccatgataag

SEQ ID NO: 442964 - DNA, 60 bp, Artificial
  Synthetic oligonucleotide
gtgttccttggatttctgatacaccctatcgggtaaacagatatacaaagtcagcacatc

SEQ ID NO: 442965 - DNA, 51 bp, Artificial
  Synthetic oligonucleotide
gtgttcctttaccccaataccccgatacaccaatatattggggtacaaggg

SEQ ID NO: 442966 - DNA, 60 bp, Artificial
  Synthetic oligonucleotide
gtgttcgacgtgtatcgtcgcgtctcgatccaggtatgagcgtgttggaagtctcggagt

SEQ ID NO: 442967 - DNA, 60 bp, Artificial
  Synthetic oligonucleotide
gtgttcgagacatgggaacaaacagtagaccgtgtgattgaccaccaacgatggctctgg

SEQ ID NO: 442968 - DNA, 55 bp, Artificial
  Synthetic oligonucleotide
gtgttcgagcgtggtgactctatctacctgatggacactaccggacaggttaacg

SEQ ID NO: 442969 - DNA, 55 bp, Artificial
  Synthetic oligonucleotide
gtgttcgatttcacattgtacacgagaaacttcgggcccttgagtatagcagggg

SEQ ID NO: 442970 - DNA, 60 bp, Artificial
  Synthetic oligonucleotide
gtgttcgcgaagaacaaatattggctgagcctcccaaaatacgtagtacagtagcagcca

SEQ ID NO: 442971 - DNA, 60 bp, Artificial
  Synthetic oligonucleotide
gtgttcgcgttgcaggagataatgcagaaagtgagacaagtgcaagctgattatatgacc

SEQ ID NO: 442972 - DNA, 58 bp, Artificial
  Synthetic oligonucleotide
gtgttcggctcaacagcgagccgactatgcctgtagagttttcgggggtgtatatccg

SEQ ID NO: 442973 - DNA, 55 bp, Artificial
  Synthetic oligonucleotide
gtgttctacactgataatcgtggctctcttcctgttagacccaccccaggtaggt

SEQ ID NO: 442974 - DNA, 53 bp, Artificial
  Synthetic oligonucleotide
gtgttctagtgacagatgtagagcccgtgcctgagctttataggcccttagac

SEQ ID NO: 442975 - DNA, 60 bp, Artificial
  Synthetic oligonucleotide
gtgttctatacagtcgtggactacgtcaatcagataattcaggcaatgtccaaaagatct

SEQ ID NO: 442976 - DNA, 54 bp, Artificial
  Synthetic oligonucleotide
gtgttctatgacaaatttcgaaccgagtcaaaccgatacaaagccttatttcgg

SEQ ID NO: 442977 - DNA, 55 bp, Artificial
  Synthetic oligonucleotide
gtgttctattcttatcaagcgtgactctggtgagctgctaccccttgctgtccga

SEQ ID NO: 442978 - DNA, 55 bp, Artificial
  Synthetic oligonucleotide
gtgttctcatctctcctagtcgccgcctggtcattcggggtcccggataacgagc

SEQ ID NO: 442979 - DNA, 60 bp, Artificial
  Synthetic oligonucleotide
gtgttctcccacgctctccctacaactgatgttctacaagctatgtatggccacccctca

SEQ ID NO: 442980 - DNA, 55 bp, Artificial
  Synthetic oligonucleotide
gtgttctccttggaccctcgttggactgacgccgacgccctatctcaccaaggcc

SEQ ID NO: 442981 - DNA, 59 bp, Artificial
  Synthetic oligonucleotide
gtgttctcgtgacaatctgcatttcttctctgtggttccttgcttgggcattaaaccgg

SEQ ID NO: 442982 - DNA, 55 bp, Artificial
  Synthetic oligonucleotide
gtgttctgaaccataaaggtgatgctggatttaagcgaataagctcacacaatgc

SEQ ID NO: 442983 - DNA, 60 bp, Artificial
  Synthetic oligonucleotide
gtgttctgaagatacattcagaacacacaccgaaagttcatatatatacgacgccctggg

SEQ ID NO: 442984 - DNA, 56 bp, Artificial
  Synthetic oligonucleotide
gtgttctggcaagaaggacaaccatacccaagatttaccattccctttatgagtat

SEQ ID NO: 442985 - DNA, 60 bp, Artificial
  Synthetic oligonucleotide
gtgttctgtatgattaagaaattgtaatgtgttccaccctcacagtttgtcagtctgcaa

SEQ ID NO: 442986 - DNA, 59 bp, Artificial
  Synthetic oligonucleotide
gtgttcttaaataatgctaggaattgtgatacttggacttgaatcatttacgtggttga

SEQ ID NO: 442987 - DNA, 55 bp, Artificial
  Synthetic oligonucleotide
gtgttgaacaacaatgagcggtcttatcacatcggaacagctcagggtctcctgt

SEQ ID NO: 442988 - DNA, 57 bp, Artificial
  Synthetic oligonucleotide
gtgttgaacactaacatacatgactcatcttaatttaaagatttggggtcatttggg

SEQ ID NO: 442989 - DNA, 50 bp, Artificial
  Synthetic oligonucleotide
gtgttgaacatcgaagggtgcccgtcactctacaaattcaatccgtttag

SEQ ID NO: 442990 - DNA, 55 bp, Artificial
  Synthetic oligonucleotide
gtgttgaacttatcaacgagtgcctcttgagtatccgtataggaagccacgggga

SEQ ID NO: 442991 - DNA, 59 bp, Artificial
  Synthetic oligonucleotide
gtgttgaaggagggggttcgatcacgcattcaaatagtaaatggcctgccatgactatt

SEQ ID NO: 442992 - DNA, 55 bp, Artificial
  Synthetic oligonucleotide
gtgttgaagttctgaacaccatgtctctagggagcacaactctcaggacttttgc

SEQ ID NO: 442993 - DNA, 55 bp, Artificial
  Synthetic oligonucleotide
gtgttgacacgtctatttcattaggcgtggcgagtcatgcgaggcgtcgtgctgt

SEQ ID NO: 442994 - DNA, 60 bp, Artificial
  Synthetic oligonucleotide
gtgttgacactggtggcgaactaattatggtcaatgagggtgggagaattccagctgagt

SEQ ID NO: 442995 - DNA, 55 bp, Artificial
  Synthetic oligonucleotide
gtgttgacattatcacagacaggaaacaactttgagttggacattgcccgagacc

SEQ ID NO: 442996 - DNA, 60 bp, Artificial
  Synthetic oligonucleotide
gtgttgaccgccgagcatcgtgcgatgattcagaacgcattggatggatcgataatcgaa

SEQ ID NO: 442997 - DNA, 55 bp, Artificial
  Synthetic oligonucleotide
gtgttgacttttgaagaaaaggacacctctgctcttagtcttgaagccaggctgg

SEQ ID NO: 442998 - DNA, 55 bp, Artificial
  Synthetic oligonucleotide
gtgttgagacagctttgaacattactgttatttgcaagcatcagctcccaattcg

SEQ ID NO: 442999 - DNA, 55 bp, Artificial
  Synthetic oligonucleotide
gtgttgagagggcccgtgatgccaaccacttaatcgcgaggtttcgcgcagctcc

SEQ ID NO: 443000 - DNA, 59 bp, Artificial
  Synthetic oligonucleotide
gtgttgaggagtcaatctaccaatgttgtgacctggcccccgaagctaggaaggccata

SEQ ID NO: 443001 - DNA, 59 bp, Artificial
  Synthetic oligonucleotide
gtgttgaggagtcaatttaccaatgttgtgacttggcccccgaagccagacgagctata

SEQ ID NO: 443002 - DNA, 50 bp, Artificial
  Synthetic oligonucleotide
gtgttgagggttcgaaacccaacattacatgagactgccgatgagctaaa

SEQ ID NO: 443003 - DNA, 57 bp, Artificial
  Synthetic oligonucleotide
gtgttgagtaaagtattgaggtatcaccgaaccgtctcaagagaaacgctcactcgt

SEQ ID NO: 443004 - DNA, 58 bp, Artificial
  Synthetic oligonucleotide
gtgttgagtgttgagttaggtcggattggcccttattttgtcgaatcaatgaattcta

SEQ ID NO: 443005 - DNA, 54 bp, Artificial
  Synthetic oligonucleotide
gtgttgataatgttgcagtgttaaaattaccacctgagcttaatggcgtgaaac

SEQ ID NO: 443006 - DNA, 55 bp, Artificial
  Synthetic oligonucleotide
gtgttgatccagcgcaacgaggcgatgccgctgttgacatccgggccactcatgc

SEQ ID NO: 443007 - DNA, 50 bp, Artificial
  Synthetic oligonucleotide
gtgttgatgcgccgaagaaggagcaaggaagtcgacatcactcgcattga

SEQ ID NO: 443008 - DNA, 55 bp, Artificial
  Synthetic oligonucleotide
gtgttgcacctggagaacaactcaagcagcaacgccccgaagtgtatgagcgcac

SEQ ID NO: 443009 - DNA, 55 bp, Artificial
  Synthetic oligonucleotide
gtgttgcaggctaccaaactcctacccgacaaaggtgcgtgtccgcgtgctgagt

SEQ ID NO: 443010 - DNA, 59 bp, Artificial
  Synthetic oligonucleotide
gtgttgccatactctactagtctactattaacattaggtactcatcgagttttgttcaa

SEQ ID NO: 443011 - DNA, 51 bp, Artificial
  Synthetic oligonucleotide
gtgttgccgaggggtactccccctgtctggccggacccgtccttttggtcg

SEQ ID NO: 443012 - DNA, 55 bp, Artificial
  Synthetic oligonucleotide
gtgttgcgattggtgtattgctgcatttggacttacacccagtatagctgacagt

SEQ ID NO: 443013 - DNA, 55 bp, Artificial
  Synthetic oligonucleotide
gtgttgcgctaaattatacacacgtagttctatcgcttgcaccaacagtaggtgt

SEQ ID NO: 443014 - DNA, 60 bp, Artificial
  Synthetic oligonucleotide
gtgttgctaataggagtaagcatagctgcttttctcgtcaaccctaatgtcacaacagta

SEQ ID NO: 443015 - DNA, 60 bp, Artificial
  Synthetic oligonucleotide
gtgttgctatcattgtccagtgtgcttcctaaacaaaggcttaggcatctcctatggcag

SEQ ID NO: 443016 - DNA, 50 bp, Artificial
  Synthetic oligonucleotide
gtgttgctattaagcttactgaacactcctggagtgccgatttgtatgca

SEQ ID NO: 443017 - DNA, 60 bp, Artificial
  Synthetic oligonucleotide
gtgttgctccaataatgttctcgaacaagatggctagattgggtaaaggatacatgtttg

SEQ ID NO: 443018 - DNA, 55 bp, Artificial
  Synthetic oligonucleotide
gtgttggaaattagtgcctgtggaatttagtgaagagtctaatgacagctctcag

SEQ ID NO: 443019 - DNA, 52 bp, Artificial
  Synthetic oligonucleotide
gtgttggaagaatcccccgtggatccaatccccttacctgaacctactaaaa

SEQ ID NO: 443020 - DNA, 57 bp, Artificial
  Synthetic oligonucleotide
gtgttggaagcaatggctttccttgaagagtcccacccagggatctttgaaaactca

SEQ ID NO: 443021 - DNA, 55 bp, Artificial
  Synthetic oligonucleotide
gtgttggaaggaaggacaaatgctccttgataatatgagtgtgaagcagtccatg

SEQ ID NO: 443022 - DNA, 53 bp, Artificial
  Synthetic oligonucleotide
gtgttggaaggaataaacccggaacagtggtccgcattggaaaaactatgaaa

SEQ ID NO: 443023 - DNA, 58 bp, Artificial
  Synthetic oligonucleotide
gtgttggaagggtgtgcgggatacatggattaagttgcggctcggttatgaggaggga

SEQ ID NO: 443024 - DNA, 54 bp, Artificial
  Synthetic oligonucleotide
gtgttggacagaggtcccagtttcaaaccctattctggtacggcttacaactcc

SEQ ID NO: 443025 - DNA, 57 bp, Artificial
  Synthetic oligonucleotide
gtgttggactgccagtccctctgggaccccatgaattccttaaagtgctttagatag

SEQ ID NO: 443026 - DNA, 60 bp, Artificial
  Synthetic oligonucleotide
gtgttggagaagtgttttgggcagtgtcaactgatgtagttaacacagtagcagatgcta

SEQ ID NO: 443027 - DNA, 52 bp, Artificial
  Synthetic oligonucleotide
gtgttggcaacggtgtacaacgggacgaacaagtactccacgggcggtacgg

SEQ ID NO: 443028 - DNA, 55 bp, Artificial
  Synthetic oligonucleotide
gtgttggcaccagtccaggatgtattcgataagaaaaaaccggtgacctcgaaat

SEQ ID NO: 443029 - DNA, 59 bp, Artificial
  Synthetic oligonucleotide
gtgttggcagacgatttgggtattttcccgagacgcaatatcagtggtgaggtgataag

SEQ ID NO: 443030 - DNA, 51 bp, Artificial
  Synthetic oligonucleotide
gtgttggcccaactccaaatcatcgagcgaagcctaccagaacttgtagag

SEQ ID NO: 443031 - DNA, 52 bp, Artificial
  Synthetic oligonucleotide
gtgttggccctaccggtgtgaataagggcccgacgtcaggttcgtcgttaaa

SEQ ID NO: 443032 - DNA, 57 bp, Artificial
  Synthetic oligonucleotide
gtgttggcgagacaaaatagagtcatgttgatatttaaagttgaatcgttaccagag

SEQ ID NO: 443033 - DNA, 57 bp, Artificial
  Synthetic oligonucleotide
gtgttggcgctggtcgcgcattgtatatccctccttatgacctactcctgcatgagt

SEQ ID NO: 443034 - DNA, 60 bp, Artificial
  Synthetic oligonucleotide
gtgttggctacctgaagcagcagtatgaggctcgaatcagtggccagaacgtgtctgtcg

SEQ ID NO: 443035 - DNA, 52 bp, Artificial
  Synthetic oligonucleotide
gtgttgggagccttttaccgacgtttccccagtggtgagtcccatggggagt

SEQ ID NO: 443036 - DNA, 55 bp, Artificial
  Synthetic oligonucleotide
gtgttggtgtaagtggccatccactgttcaataggttggatgacactgaaagctc

SEQ ID NO: 443037 - DNA, 55 bp, Artificial
  Synthetic oligonucleotide
gtgttggttaccataccacacgcattcctttcattagtccactacatttcatccg

SEQ ID NO: 443038 - DNA, 57 bp, Artificial
  Synthetic oligonucleotide
gtgttggttcgcgataagacccctcgtgtatattcaaccactgaacctctgataccg

SEQ ID NO: 443039 - DNA, 60 bp, Artificial
  Synthetic oligonucleotide
gtgttggttcgggttgggataatctgtctaataagggtgatgtgcctgcgtggcctgtga

SEQ ID NO: 443040 - DNA, 52 bp, Artificial
  Synthetic oligonucleotide
gtgttgtacagccacggctgatctcccgctaccgtgaggtacttcggtttcg

SEQ ID NO: 443041 - DNA, 51 bp, Artificial
  Synthetic oligonucleotide
gtgttgtagccaagtatgtgtcttgcaactatgggcaagccctttacaaac

SEQ ID NO: 443042 - DNA, 50 bp, Artificial
  Synthetic oligonucleotide
gtgttgtcacatacaataaggctattgactatgtcatgtaccgccttacg

SEQ ID NO: 443043 - DNA, 60 bp, Artificial
  Synthetic oligonucleotide
gtgttgtcaccttcttgtaaggcactcatgcagtgcctgatggacggtgacgtcaagaag

SEQ ID NO: 443044 - DNA, 57 bp, Artificial
  Synthetic oligonucleotide
gtgttgtcccaagacctcccgattatttgtgaccttgatccaatatatggccaaccc

SEQ ID NO: 443045 - DNA, 60 bp, Artificial
  Synthetic oligonucleotide
gtgttgtcccaagatctcccaagaatttgcgatctagaaccaatataaggccacccatca

SEQ ID NO: 443046 - DNA, 56 bp, Artificial
  Synthetic oligonucleotide
gtgttgtcccgtcaagcccaaaccattccaagcgtggtaattccggaagcagcgga

SEQ ID NO: 443047 - DNA, 60 bp, Artificial
  Synthetic oligonucleotide
gtgttgtccctgatgagtgaagcttatccaaatgatgatatgacatgctatggtgtagct

SEQ ID NO: 443048 - DNA, 60 bp, Artificial
  Synthetic oligonucleotide
gtgttgtccgcagtatccgagtagagattgcatatgcaggtgctttgtaccacgtacgtg

SEQ ID NO: 443049 - DNA, 55 bp, Artificial
  Synthetic oligonucleotide
gtgttgtcgctggcttagtcacgtatcttgaccatcttatgtagcagcacgatca

SEQ ID NO: 443050 - DNA, 60 bp, Artificial
  Synthetic oligonucleotide
gtgttgtcgctgttacagatggccctgcggctaatagtgcggaccatcgggtttactgga

SEQ ID NO: 443051 - DNA, 55 bp, Artificial
  Synthetic oligonucleotide
gtgttgtgagtgccaaccgttcacaagagattaaagaatgctctcttttcaaccc

SEQ ID NO: 443052 - DNA, 55 bp, Artificial
  Synthetic oligonucleotide
gtgttgtgatcatggatgatatcatgcagaaccctgatggagaagacatgacact

SEQ ID NO: 443053 - DNA, 55 bp, Artificial
  Synthetic oligonucleotide
gtgttgtgctgatggggttcattatgtgggcctgccagaggggcaacattaggtg

SEQ ID NO: 443054 - DNA, 50 bp, Artificial
  Synthetic oligonucleotide
gtgttgtggatcctttagtcatagacgagtattatgcgtacttacgtaaa

SEQ ID NO: 443055 - DNA, 52 bp, Artificial
  Synthetic oligonucleotide
gtgttgtgtgcctacgttgaagacccgaccaaatctgatcctccgtccagca

SEQ ID NO: 443056 - DNA, 59 bp, Artificial
  Synthetic oligonucleotide
gtgttgttaacaaaggagcacctccatttcttattggcacatgctccttattcggaaca

SEQ ID NO: 443057 - DNA, 55 bp, Artificial
  Synthetic oligonucleotide
gtgttgttcacagtatacttctggtatgtctacatactccctgcagtgtgcaacc

SEQ ID NO: 443058 - DNA, 55 bp, Artificial
  Synthetic oligonucleotide
gtgttgttcacgtttgcttgatatgtataggtaggtgtactgtttgtgaggtcgc

SEQ ID NO: 443059 - DNA, 55 bp, Artificial
  Synthetic oligonucleotide
gtgtttaaacacagaaatttgaacatttggctatagattcacaggataaaccctt

SEQ ID NO: 443060 - DNA, 60 bp, Artificial
  Synthetic oligonucleotide
gtgtttaagctcttcacagatggtaatgcagcagtgcttatctatcaacacgtctcgacc

SEQ ID NO: 443061 - DNA, 57 bp, Artificial
  Synthetic oligonucleotide
gtgtttaatttcatgcttttagtggcgatagtgtgttgtttgtcctttggacacact

SEQ ID NO: 443062 - DNA, 58 bp, Artificial
  Synthetic oligonucleotide
gtgtttacggtgtgtctgggccggtgagtcttacagctcccagtctcctaacgccaca

SEQ ID NO: 443063 - DNA, 55 bp, Artificial
  Synthetic oligonucleotide
gtgtttacgttggtgttaatggttgtcaaagcagcgtttgcagtattaacgtctg

SEQ ID NO: 443064 - DNA, 60 bp, Artificial
  Synthetic oligonucleotide
gtgtttagacatgatgttgtcagcagcaggaattaatgtcggaccaatctcacctgacta

SEQ ID NO: 443065 - DNA, 55 bp, Artificial
  Synthetic oligonucleotide
gtgtttagattgctgtcaacatactgacttaacttattgtagcgggtgtaccatg

SEQ ID NO: 443066 - DNA, 54 bp, Artificial
  Synthetic oligonucleotide
gtgtttagcgggtctttattacacaaacgtgggcgactgcgtttcctgttacgc

SEQ ID NO: 443067 - DNA, 58 bp, Artificial
  Synthetic oligonucleotide
gtgtttagcttaataatggatacaaagccttatttacctgctggtgttcaagctcttc

SEQ ID NO: 443068 - DNA, 59 bp, Artificial
  Synthetic oligonucleotide
gtgtttagtaagatgacagaccctccgccgcaagtgtcagtaccatttatgtctcccgc

SEQ ID NO: 443069 - DNA, 55 bp, Artificial
  Synthetic oligonucleotide
gtgtttatctattggccagagtgttgctgcgatgggagttgtcatcgcaagcgcg

SEQ ID NO: 443070 - DNA, 57 bp, Artificial
  Synthetic oligonucleotide
gtgtttatgacaacataaacaagaatgccctgttagtttattactcatgggtatcgg

SEQ ID NO: 443071 - DNA, 55 bp, Artificial
  Synthetic oligonucleotide
gtgtttcaaacacaaaggtcaatatgacacaggagagggcacagaggtgagagtg

SEQ ID NO: 443072 - DNA, 60 bp, Artificial
  Synthetic oligonucleotide
gtgtttcaataaatatcacatgaattgtagtggacttaagatgtttgatagtgacaaaac

SEQ ID NO: 443073 - DNA, 56 bp, Artificial
  Synthetic oligonucleotide
gtgtttcatcccagcacctgttatccaaccttgctgagagggtagtctatgatcag

SEQ ID NO: 443074 - DNA, 55 bp, Artificial
  Synthetic oligonucleotide
gtgtttcatttgatgaactagttgcattgagagaggagaatgccaaactgaaaca

SEQ ID NO: 443075 - DNA, 55 bp, Artificial
  Synthetic oligonucleotide
gtgtttccagggacaaaggagccagcagttctgcatccagcagatgagagattgg

SEQ ID NO: 443076 - DNA, 55 bp, Artificial
  Synthetic oligonucleotide
gtgtttccgaccaacgagataactcagccaattacatccatcaagctggagatag

SEQ ID NO: 443077 - DNA, 55 bp, Artificial
  Synthetic oligonucleotide
gtgtttccgatgtcactagaggaaacaaccttactcatcgtgttggtaaacgatt

SEQ ID NO: 443078 - DNA, 51 bp, Artificial
  Synthetic oligonucleotide
gtgtttcctcgatacgttgaatatcatcggctgacaccgttccatagtagt

SEQ ID NO: 443079 - DNA, 59 bp, Artificial
  Synthetic oligonucleotide
gtgtttcctcgcataccgaggtgacaaccgtgaacatacatgttatacgggattggatg

SEQ ID NO: 443080 - DNA, 51 bp, Artificial
  Synthetic oligonucleotide
gtgtttcgggggttcgctgggaccccatccggggtaagtgggaggctaata

SEQ ID NO: 443081 - DNA, 58 bp, Artificial
  Synthetic oligonucleotide
gtgtttctacacatgaaaagacccagttccccaattcgcaggcatttgtgaataccag

SEQ ID NO: 443082 - DNA, 58 bp, Artificial
  Synthetic oligonucleotide
gtgtttctagtgcttgaatttgggaaagtgcttcctctttagttagagagcagtgtgg

SEQ ID NO: 443083 - DNA, 55 bp, Artificial
  Synthetic oligonucleotide
gtgtttctgacgtcactcgtggtaacgggcttacacatcgtgttggaaagaggtt

SEQ ID NO: 443084 - DNA, 60 bp, Artificial
  Synthetic oligonucleotide
gtgtttcttgcacaaggggttgaatctctcccagacagtgtcctcatacactctggcttg

SEQ ID NO: 443085 - DNA, 55 bp, Artificial
  Synthetic oligonucleotide
gtgtttgaaaagggacatgggaactttgtgagaactaatcagacttctttattaa

SEQ ID NO: 443086 - DNA, 52 bp, Artificial
  Synthetic oligonucleotide
gtgtttgaaaatcggaactcaagttgtcgtctccccggtcagatcaaatcgg

SEQ ID NO: 443087 - DNA, 60 bp, Artificial
  Synthetic oligonucleotide
gtgtttgagggagaatgcacgttaatcatccctccgctagtgatggagcgtaatccaaaa

SEQ ID NO: 443088 - DNA, 57 bp, Artificial
  Synthetic oligonucleotide
gtgtttgatgggtcccaatacatcatggttcgaaaaccctcggtagtcacatcgaag

SEQ ID NO: 443089 - DNA, 56 bp, Artificial
  Synthetic oligonucleotide
gtgtttgattgccagtccctttgggcccccatgaattctttaaagtgtttcagata

SEQ ID NO: 443090 - DNA, 57 bp, Artificial
  Synthetic oligonucleotide
gtgtttgattgccagtctttctgggcccccatgaattctttgaagtgctttaggtag

SEQ ID NO: 443091 - DNA, 53 bp, Artificial
  Synthetic oligonucleotide
gtgtttgcactcgtgtggggttaatttaagcaactaagggaactaagtggatt

SEQ ID NO: 443092 - DNA, 60 bp, Artificial
  Synthetic oligonucleotide
gtgtttgcagttgattactcaaagtgggattcaactcaatcacctcgtgttagtgcctcg

SEQ ID NO: 443093 - DNA, 57 bp, Artificial
  Synthetic oligonucleotide
gtgtttgcggtgattgttgtgagtcttttacactcgcggacgaaaaacctcatgtta

SEQ ID NO: 443094 - DNA, 56 bp, Artificial
  Synthetic oligonucleotide
gtgtttgctagtttctttctgaaatctagtaggaaagcgatcaaagggcgcgaaaa

SEQ ID NO: 443095 - DNA, 53 bp, Artificial
  Synthetic oligonucleotide
gtgtttggacaaatcacatggaattcaaaaattttgtaaaaaccgtagtagcc

SEQ ID NO: 443096 - DNA, 60 bp, Artificial
  Synthetic oligonucleotide
gtgtttggagtgccaggaaagtggggtgggatgtcgctgtgtagattgttgctcatgctt

SEQ ID NO: 443097 - DNA, 57 bp, Artificial
  Synthetic oligonucleotide
gtgtttggtcacgtgaaaatgttgagtataacgagaggacattggctaacttaacat

SEQ ID NO: 443098 - DNA, 55 bp, Artificial
  Synthetic oligonucleotide
gtgtttggttcctctccaatctccatcatgactagcggctttgcgttgcactact

SEQ ID NO: 443099 - DNA, 54 bp, Artificial
  Synthetic oligonucleotide
gtgtttggttttatcaaacgacgtgagcacgaatggcgaattatgcgcttagaa

SEQ ID NO: 443100 - DNA, 60 bp, Artificial
  Synthetic oligonucleotide
gtgtttgtatacgtttgacgagttattcggtgccaggatcaacagtcatggcaatctagc

SEQ ID NO: 443101 - DNA, 55 bp, Artificial
  Synthetic oligonucleotide
gtgtttgtcactttccccggcatcggacccacggttgtcttacactatgctggga

SEQ ID NO: 443102 - DNA, 59 bp, Artificial
  Synthetic oligonucleotide
gtgtttgtgatgacatagccaagctttcgtttgtggacgaaatataatatcatactgtt

SEQ ID NO: 443103 - DNA, 60 bp, Artificial
  Synthetic oligonucleotide
gtgtttgtgcttgctactgatcgggctattcgagaatttcaaactttgctgttggaggag

SEQ ID NO: 443104 - DNA, 55 bp, Artificial
  Synthetic oligonucleotide
gtgttttacacatggcccctgtgagtcttgacaacttgcaggttcagcggtactg

SEQ ID NO: 443105 - DNA, 57 bp, Artificial
  Synthetic oligonucleotide
gtgttttacctatagaggacatttttatgcaagtttcaggttttgagacaagacata

SEQ ID NO: 443106 - DNA, 52 bp, Artificial
  Synthetic oligonucleotide
gtgttttagtgtattctttcgcctctttcgttttaggttggtgccttcgtag

SEQ ID NO: 443107 - DNA, 54 bp, Artificial
  Synthetic oligonucleotide
gtgttttatcggtagataaagacacgactatgatagacgttgagggttccactt

SEQ ID NO: 443108 - DNA, 55 bp, Artificial
  Synthetic oligonucleotide
gtgttttcccaaatactgatttaagagctgccacaatttctgtactctttataat

SEQ ID NO: 443109 - DNA, 55 bp, Artificial
  Synthetic oligonucleotide
gtgttttcgtaaacatttccattattttctccttaccagtttagtgatggcgcac

SEQ ID NO: 443110 - DNA, 54 bp, Artificial
  Synthetic oligonucleotide
gtgttttctctagataggacacctccagtgttcaggggatttcaatttccccgg

SEQ ID NO: 443111 - DNA, 55 bp, Artificial
  Synthetic oligonucleotide
gtgttttgaacgtcgacaacgttcctaacagtgttaagaatgttgtcaagtgtaa

SEQ ID NO: 443112 - DNA, 57 bp, Artificial
  Synthetic oligonucleotide
gtgttttgagaactggacttcgtacaaaacagccaattaataaagagttcatgataa

SEQ ID NO: 443113 - DNA, 59 bp, Artificial
  Synthetic oligonucleotide
gtgttttgcctgattggatagcgaagcagacgcttttgactcatcagtttgctggcgaa

SEQ ID NO: 443114 - DNA, 53 bp, Artificial
  Synthetic oligonucleotide
gtgttttgcggaagacaatttcaacttcgcccttatttgggcaaaggttgttc

SEQ ID NO: 443115 - DNA, 55 bp, Artificial
  Synthetic oligonucleotide
gtgttttgcggaagacaatttcagttttgcctttatctgggcaaatgttgttccg

SEQ ID NO: 443116 - DNA, 60 bp, Artificial
  Synthetic oligonucleotide
gtgttttgctcaaggaagcaacgcagctgtgcgccagtgactccactgtagagccgtgca

SEQ ID NO: 443117 - DNA, 55 bp, Artificial
  Synthetic oligonucleotide
gtgttttggctggtgcttcagcttagtaccagttgacacaggagaagtagaggag

SEQ ID NO: 443118 - DNA, 55 bp, Artificial
  Synthetic oligonucleotide
gtgttttgtctttatatacttgggcaccaagtttgggccttgtccataatgtggg

SEQ ID NO: 443119 - DNA, 55 bp, Artificial
  Synthetic oligonucleotide
gtgttttgtgttattggatgctggatggtcacgttggagactgcatgtggcagtc

SEQ ID NO: 443120 - DNA, 53 bp, Artificial
  Synthetic oligonucleotide
gtgtttttagtttagttgataagtgtcttccaatacacattaaaccttggacg

SEQ ID NO: 443121 - DNA, 55 bp, Artificial
  Synthetic oligonucleotide
gtgtttttcccgtggcccgccaactcagtgtcaaagattaagtctgttcgtccga

SEQ ID NO: 443122 - DNA, 60 bp, Artificial
  Synthetic oligonucleotide
gttaaaaaactatagagatggacactatctcggcaagagcacttactgtaatgcgggcat

SEQ ID NO: 443123 - DNA, 60 bp, Artificial
  Synthetic oligonucleotide
gttaaaaaatcgcatatgtcagctgcgatacttcttgcacccggtgacgtgatcaagcgt

SEQ ID NO: 443124 - DNA, 60 bp, Artificial
  Synthetic oligonucleotide
gttaaaaaatcgttcaagatggacacaatcgttgcgcgagcgctcactgtaataagatca

SEQ ID NO: 443125 - DNA, 59 bp, Artificial
  Synthetic oligonucleotide
gttaaaaacctatgcatcatggcggaattcagcatactaatttggaaagatactcgtac

SEQ ID NO: 443126 - DNA, 57 bp, Artificial
  Synthetic oligonucleotide
gttaaaaacgttagcctagagatggaggagctagttataccagtcataactcgtcaa

SEQ ID NO: 443127 - DNA, 54 bp, Artificial
  Synthetic oligonucleotide
gttaaaaagagtgcagatgtcaagaattgttttactagctcccggagatgtaat

SEQ ID NO: 443128 - DNA, 60 bp, Artificial
  Synthetic oligonucleotide
gttaaaaagcagccaccaaacattgcatgatggggaagatcatcaagtcgttgggcaaat

SEQ ID NO: 443129 - DNA, 58 bp, Artificial
  Synthetic oligonucleotide
gttaaaaagtagccaccaaacatcgcatgatggggaagatcattaaatcgctggggaa

SEQ ID NO: 443130 - DNA, 57 bp, Artificial
  Synthetic oligonucleotide
gttaaaaagtggtgcgtagcttgcataatgggcaagttcattaaacaactgagtaag

SEQ ID NO: 443131 - DNA, 50 bp, Artificial
  Synthetic oligonucleotide
gttaaaaagttcctcaagatcgcggaagatggggaagatcataaaatcac

SEQ ID NO: 443132 - DNA, 60 bp, Artificial
  Synthetic oligonucleotide
gttaaaaatctatagagatggacactatcgctgcaagggcactcactgtgatgcgagcat

SEQ ID NO: 443133 - DNA, 60 bp, Artificial
  Synthetic oligonucleotide
gttaaaaatctctagagatggacactatcgcagcgagagcgctcactgtaatgcgggcat

SEQ ID NO: 443134 - DNA, 59 bp, Artificial
  Synthetic oligonucleotide
gttaaaaatctggttgtatctactcttgaatgaacgtgcataaagctgatcttaaaggc

SEQ ID NO: 443135 - DNA, 55 bp, Artificial
  Synthetic oligonucleotide
gttaaaaatgtcttctacacacgcagtaatctatctcgcacgaggatttgagcca

SEQ ID NO: 443136 - DNA, 55 bp, Artificial
  Synthetic oligonucleotide
gttaaaacaatcctcaacattttggattaaaacacaagtaccagattgacagacc

SEQ ID NO: 443137 - DNA, 60 bp, Artificial
  Synthetic oligonucleotide
gttaaaacatgccggagccacatgcagtgatctatgttacggaggaattggtgcacctca

SEQ ID NO: 443138 - DNA, 60 bp, Artificial
  Synthetic oligonucleotide
gttaaaacatgcctgagccacacgcagtactttatgtcacaaacgagctctctcacctcg

SEQ ID NO: 443139 - DNA, 57 bp, Artificial
  Synthetic oligonucleotide
gttaaaaccaatgtatgctgctattactaaccaagttaactttagcttctcttctgc

SEQ ID NO: 443140 - DNA, 57 bp, Artificial
  Synthetic oligonucleotide
gttaaaagagtgtcccatcatggaggagttcgtcatacccgtctattcggaaacaga

SEQ ID NO: 443141 - DNA, 50 bp, Artificial
  Synthetic oligonucleotide
gttaaaagagtgttctaccatggaggagttcgtcataccggtgttttctg

SEQ ID NO: 443142 - DNA, 55 bp, Artificial
  Synthetic oligonucleotide
gttaaaagattggtatatacacgacacacctatgaacgaacacctcaaatggttg

SEQ ID NO: 443143 - DNA, 52 bp, Artificial
  Synthetic oligonucleotide
gttaaaagcttttcaggatggacgagttcggtattccattgtatcgttcgac

SEQ ID NO: 443144 - DNA, 56 bp, Artificial
  Synthetic oligonucleotide
gttaaaagttatctaggatggatgaattcggaatacccatttatctttcgagtagc

SEQ ID NO: 443145 - DNA, 53 bp, Artificial
  Synthetic oligonucleotide
gttaaaataagaccccccaaactatttcaagacaagcggtacacccagcagga

SEQ ID NO: 443146 - DNA, 51 bp, Artificial
  Synthetic oligonucleotide
gttaaaatacggcgcggatataaacctaccgaccataaacggtgtataccc

SEQ ID NO: 443147 - DNA, 58 bp, Artificial
  Synthetic oligonucleotide
gttaaaatagtagcgcgatggatgaactaggcatcccagtttataagagaggatttcc

SEQ ID NO: 443148 - DNA, 51 bp, Artificial
  Synthetic oligonucleotide
gttaaaatagtgtcgcgatggatgagttaggcataccaatctacaaacgag

SEQ ID NO: 443149 - DNA, 57 bp, Artificial
  Synthetic oligonucleotide
gttaaaatcatggagccttgtgcagtgttacacgtcagtggtgacatcgtgcctctc

SEQ ID NO: 443150 - DNA, 60 bp, Artificial
  Synthetic oligonucleotide
gttaaaatccgttctccatatcaccgaacgcctgctagattgcttgctggtcaaagtcag

SEQ ID NO: 443151 - DNA, 55 bp, Artificial
  Synthetic oligonucleotide
gttaaaatctggaaccaatatggaagggatttatgcacgtgctttttgttacctc

SEQ ID NO: 443152 - DNA, 60 bp, Artificial
  Synthetic oligonucleotide
gttaaaatgctcgaagaaccagtgaaacatgatgatcacctattacaagactctgaatta

SEQ ID NO: 443153 - DNA, 59 bp, Artificial
  Synthetic oligonucleotide
gttaaaattacatctaatggcttagattgcactgcagtcttcccacctggcaaggcccc

SEQ ID NO: 443154 - DNA, 56 bp, Artificial
  Synthetic oligonucleotide
gttaaaattcggttaggatggacgcgatagcagcaagagccttgtccgttgtacgg

SEQ ID NO: 443155 - DNA, 55 bp, Artificial
  Synthetic oligonucleotide
gttaaaatttggtgaaaatggacacgattgcagcaagagctctgacagtcataaa

SEQ ID NO: 443156 - DNA, 53 bp, Artificial
  Synthetic oligonucleotide
gttaaacaagccggacacccaatcagccatggcgaaattgagtcaactacttc

SEQ ID NO: 443157 - DNA, 52 bp, Artificial
  Synthetic oligonucleotide
gttaaacacaagtcgattcaaacggttttcggtcaaaggaatattcgtgttg

SEQ ID NO: 443158 - DNA, 58 bp, Artificial
  Synthetic oligonucleotide
gttaaacccgaagaagagaggtccttgctaagctgcatagagaagtcgacgcgtattg

SEQ ID NO: 443159 - DNA, 59 bp, Artificial
  Synthetic oligonucleotide
gttaaacctgaggacttatatacatcgatgttgcgattagcaagaaatacaagttcagg

SEQ ID NO: 443160 - DNA, 57 bp, Artificial
  Synthetic oligonucleotide
gttaaacggtcaatttgctcatcaattgagaacccttcctctgcttggttagtagtg

SEQ ID NO: 443161 - DNA, 55 bp, Artificial
  Synthetic oligonucleotide
gttaaacgtcacaacagcaacgtgtaccatacgcaactgtaaaaaattaggacca

SEQ ID NO: 443162 - DNA, 56 bp, Artificial
  Synthetic oligonucleotide
gttaaacgttttgttttctagcaatgaagtgcagtaatcttctctacggtgtggaa

SEQ ID NO: 443163 - DNA, 60 bp, Artificial
  Synthetic oligonucleotide
gttaaactaaaggatgaacgatttatgagcttatcgagcgccatgccgcaagcaagtggg

SEQ ID NO: 443164 - DNA, 55 bp, Artificial
  Synthetic oligonucleotide
gttaaactaagccagctatgtgaaatctttctaagcgtaaacaatgtgtccgtag

SEQ ID NO: 443165 - DNA, 59 bp, Artificial
  Synthetic oligonucleotide
gttaaactacactttcaatcgcgagtgttgagttggtagtattgcttcaaactgcctga

SEQ ID NO: 443166 - DNA, 56 bp, Artificial
  Synthetic oligonucleotide
gttaaacttaatgtttccaatcgttcgaatgtttgatcctgtagacttacgtgata

SEQ ID NO: 443167 - DNA, 56 bp, Artificial
  Synthetic oligonucleotide
gttaaactttcataagtttaccagcgattcttctgagatacctcctgatatcagag

SEQ ID NO: 443168 - DNA, 55 bp, Artificial
  Synthetic oligonucleotide
gttaaagaaattcaccgaggcatgtaatgcagctaaggggttagagtggttggcc

SEQ ID NO: 443169 - DNA, 56 bp, Artificial
  Synthetic oligonucleotide
gttaaagaactctcatagttaggttcattccataataatacacgtttattaggtgc

SEQ ID NO: 443170 - DNA, 60 bp, Artificial
  Synthetic oligonucleotide
gttaaagaacttgttgctgaattgaggtggcagtataatagattcgctgtgataacgcat

SEQ ID NO: 443171 - DNA, 53 bp, Artificial
  Synthetic oligonucleotide
gttaaagactgggcagatcggattagagaatctatggaaaaagagtgcccctt

SEQ ID NO: 443172 - DNA, 60 bp, Artificial
  Synthetic oligonucleotide
gttaaagatatgaaggatttctctcaattgatctgctttataatcgattgtattttcgag

SEQ ID NO: 443173 - DNA, 56 bp, Artificial
  Synthetic oligonucleotide
gttaaagcagcctgttggtgggccaatgtccggcaagaatttgggatcccctacaa

SEQ ID NO: 443174 - DNA, 58 bp, Artificial
  Synthetic oligonucleotide
gttaaagcgcgccaatttgcaagtgaagcacaagtcgtattcgccacaccccggctgt

SEQ ID NO: 443175 - DNA, 52 bp, Artificial
  Synthetic oligonucleotide
gttaaaggccacgagtttatatgctttgccggggatgatatgtgtgcttccg

SEQ ID NO: 443176 - DNA, 54 bp, Artificial
  Synthetic oligonucleotide
gttaaaggtcacctatacgtcatcagtcacgtgggggaaggcgtgcctaaaccc

SEQ ID NO: 443177 - DNA, 57 bp, Artificial
  Synthetic oligonucleotide
gttaaagtctgtcttctaagcaccactgtcaaacttgggtcaacagacacattagtt

SEQ ID NO: 443178 - DNA, 49 bp, Artificial
  Synthetic oligonucleotide
gttaaagttggggtggttacccaacccgtcctctccttgtggggaggcg

SEQ ID NO: 443179 - DNA, 54 bp, Artificial
  Synthetic oligonucleotide
gttaaatacctgcggttagtagaaaatacgtattccccagatactctgggctac

SEQ ID NO: 443180 - DNA, 58 bp, Artificial
  Synthetic oligonucleotide
gttaaatagcacagaagatagcacagcgctaaacgagactataattctcccatgcaga

SEQ ID NO: 443181 - DNA, 56 bp, Artificial
  Synthetic oligonucleotide
gttaaatatccgaaaggtgttgaccggtcgtatggttcctttgatagcctatagca

SEQ ID NO: 443182 - DNA, 53 bp, Artificial
  Synthetic oligonucleotide
gttaaatccgttaatcgttctacgtttttagaaccgcctaagccagacatgtc

SEQ ID NO: 443183 - DNA, 60 bp, Artificial
  Synthetic oligonucleotide
gttaaatctcgtagatcggattgggtagtgagctataggtgcaattactgctcgcatggc

SEQ ID NO: 443184 - DNA, 55 bp, Artificial
  Synthetic oligonucleotide
gttaaatgaggtaaccataggtgattctcataacctaccaaacatgcaagagttg

SEQ ID NO: 443185 - DNA, 55 bp, Artificial
  Synthetic oligonucleotide
gttaaatggattatgtttaaaatgggtcgcacctggaacaagaggtgtaccagat

SEQ ID NO: 443186 - DNA, 57 bp, Artificial
  Synthetic oligonucleotide
gttaaatggcggagtgtcagctccgcaagaccgtgggaatccacatacttccgcaag

SEQ ID NO: 443187 - DNA, 55 bp, Artificial
  Synthetic oligonucleotide
gttaaatggggtgagtcaaatcgagcaaaaacccttccagttcaatggcttgtcg

SEQ ID NO: 443188 - DNA, 60 bp, Artificial
  Synthetic oligonucleotide
gttaaatgtatctgcgaactggcacatatgaaaggttcgcgtaagcgagttgacctcaga

SEQ ID NO: 443189 - DNA, 57 bp, Artificial
  Synthetic oligonucleotide
gttaaatgtcctaacaatgatgtacgctttctgcgaaagcacaggggtcccgtacaa

SEQ ID NO: 443190 - DNA, 55 bp, Artificial
  Synthetic oligonucleotide
gttaaattagccgtacctattagtgccgaatggtatactgaacaattcgaagtta

SEQ ID NO: 443191 - DNA, 58 bp, Artificial
  Synthetic oligonucleotide
gttaaattagtttcgtgatggatgagcttgcgattccgattattaatgggcatttccc

SEQ ID NO: 443192 - DNA, 60 bp, Artificial
  Synthetic oligonucleotide
gttaaatttccgtggctatggctgctcaagatgagcgcaagacagagaatattaagacga

SEQ ID NO: 443193 - DNA, 60 bp, Artificial
  Synthetic oligonucleotide
gttaaatttgggatggtcaatcatgcaagacgcatcgttggttcgaagcagcgtgcaacg

SEQ ID NO: 443194 - DNA, 57 bp, Artificial
  Synthetic oligonucleotide
gttaacaaacgctcaactttgtgatatctgtctcttagacgattttacctgtctatt

SEQ ID NO: 443195 - DNA, 57 bp, Artificial
  Synthetic oligonucleotide
gttaacaaagacagagtatcatctgttataccttgaataacgccttcaacggatacg

SEQ ID NO: 443196 - DNA, 57 bp, Artificial
  Synthetic oligonucleotide
gttaacaagagccccgcgcaccacgcctacgtatatggagtatttatacgtgacgcc

SEQ ID NO: 443197 - DNA, 51 bp, Artificial
  Synthetic oligonucleotide
gttaacaataaaagtacaacacaaacttttactaactactcaaacacctta

SEQ ID NO: 443198 - DNA, 55 bp, Artificial
  Synthetic oligonucleotide
gttaacaatcatgtcacctataatcatcaggaggcagcgaagtatgacaatcata

SEQ ID NO: 443199 - DNA, 57 bp, Artificial
  Synthetic oligonucleotide
gttaacaatttcgatgttattaattactgggaagcaatgaacaggagatgggaatta

SEQ ID NO: 443200 - DNA, 60 bp, Artificial
  Synthetic oligonucleotide
gttaacacctatcaatggattatcagaaattgggagactgtgaagatccaatggtcccaa

SEQ ID NO: 443201 - DNA, 58 bp, Artificial
  Synthetic oligonucleotide
gttaacactaatggagtgaagcatcagggtcatcttaaggtcctttctcttgcccaat

SEQ ID NO: 443202 - DNA, 58 bp, Artificial
  Synthetic oligonucleotide
gttaacactacaaagtaaccattcttctatagcaacagttggcggcagtaagattata

SEQ ID NO: 443203 - DNA, 57 bp, Artificial
  Synthetic oligonucleotide
gttaacacttcgggtcaaggtattgagctgtttatagatccatttgactttgacaaa

SEQ ID NO: 443204 - DNA, 55 bp, Artificial
  Synthetic oligonucleotide
gttaacagaaggataacatttgatgcgtcgaaacaggtgtatgtgaggaggtcga

SEQ ID NO: 443205 - DNA, 51 bp, Artificial
  Synthetic oligonucleotide
gttaacagctatgggcatgtccttaaatctccccgtagctaaggtggagcc

SEQ ID NO: 443206 - DNA, 55 bp, Artificial
  Synthetic oligonucleotide
gttaacaggcccatgtataggaagcccagaatttatcggacattgagaggccccg

SEQ ID NO: 443207 - DNA, 55 bp, Artificial
  Synthetic oligonucleotide
gttaacatagacaagtccacacgccatacagaatcaaccaatggaaaatacatcc

SEQ ID NO: 443208 - DNA, 57 bp, Artificial
  Synthetic oligonucleotide
gttaacatgactattagtaataactacgttaacaaaatcaacgcaggtgctagccaa

SEQ ID NO: 443209 - DNA, 55 bp, Artificial
  Synthetic oligonucleotide
gttaaccaactgattgaaacagcaatgttgccactcgacgtaatgtcaacgtccg

SEQ ID NO: 443210 - DNA, 54 bp, Artificial
  Synthetic oligonucleotide
gttaaccacgaactctacatttaaagtgtttgattcggaagactttattataga

SEQ ID NO: 443211 - DNA, 58 bp, Artificial
  Synthetic oligonucleotide
gttaaccatccacctagatttgtgggtatttcattatgttccagattcacacctgctt

SEQ ID NO: 443212 - DNA, 54 bp, Artificial
  Synthetic oligonucleotide
gttaacccctcatcaattactatttggggttgatggtaatataccttttgccaa

SEQ ID NO: 443213 - DNA, 50 bp, Artificial
  Synthetic oligonucleotide
gttaacccctctctgcgtcactttaaattgtgccgatgttaatgtcacca

SEQ ID NO: 443214 - DNA, 54 bp, Artificial
  Synthetic oligonucleotide
gttaacccctctctgcgttactttaaattgtactaatatcatgggaaacagtaa

SEQ ID NO: 443215 - DNA, 57 bp, Artificial
  Synthetic oligonucleotide
gttaacccctctctgtgttactttaaactgtagccatgaggtcatctttaatagcac

SEQ ID NO: 443216 - DNA, 52 bp, Artificial
  Synthetic oligonucleotide
gttaacccgagagtttttgaacgtgtcgaagttaataacgcactggacgtaa

SEQ ID NO: 443217 - DNA, 54 bp, Artificial
  Synthetic oligonucleotide
gttaaccggctacctacttcgagaagcctagtaatgccgttgaagttttattga

SEQ ID NO: 443218 - DNA, 55 bp, Artificial
  Synthetic oligonucleotide
gttaaccggtgttgacaaggctaggagttgttcaagagcgtcctcctttgtaaga

SEQ ID NO: 443219 - DNA, 53 bp, Artificial
  Synthetic oligonucleotide
gttaaccgtattaagctaggaaacagtcctgtagaaacagtaacacgagttac

SEQ ID NO: 443220 - DNA, 57 bp, Artificial
  Synthetic oligonucleotide
gttaaccgtgcgtccgcgtgagtatttcatcgggcgtcgttaagcaacaggagacca

SEQ ID NO: 443221 - DNA, 60 bp, Artificial
  Synthetic oligonucleotide
gttaacctcaccatacagcactcaggcaagcaattctgtgctggggtgagttgatgactc

SEQ ID NO: 443222 - DNA, 57 bp, Artificial
  Synthetic oligonucleotide
gttaacctttaacacttaagctatatactcacccgatatacttgcatatagcttaac

SEQ ID NO: 443223 - DNA, 53 bp, Artificial
  Synthetic oligonucleotide
gttaacgaaatttggcctttacaaggaacctgtgttggtttatgaaagactca

SEQ ID NO: 443224 - DNA, 58 bp, Artificial
  Synthetic oligonucleotide
gttaacgaagctttaaatattgccttaatagcagttagcatcatatcaattctaaagg

SEQ ID NO: 443225 - DNA, 54 bp, Artificial
  Synthetic oligonucleotide
gttaacgagcaatttgagcccgtaatgtttttagacgtcgtgatttcgacaacg

SEQ ID NO: 443226 - DNA, 60 bp, Artificial
  Synthetic oligonucleotide
gttaacgaggggtactatcatcattcataccagacagcagtgaggcggaaagtacttgtc

SEQ ID NO: 443227 - DNA, 59 bp, Artificial
  Synthetic oligonucleotide
gttaacgagggtccggcgacgcgtacagtgccgagggtatatcaagcggcgctgcactg

SEQ ID NO: 443228 - DNA, 52 bp, Artificial
  Synthetic oligonucleotide
gttaacgccgtcgaaggtaaacttcttggacacaccggatggataccaggtt

SEQ ID NO: 443229 - DNA, 50 bp, Artificial
  Synthetic oligonucleotide
gttaacgcgtggggatgggcacccgggggtgatgaactaggtgggctttc

SEQ ID NO: 443230 - DNA, 55 bp, Artificial
  Synthetic oligonucleotide
gttaacgcttgcacggaggcgcgatcttcagtatttctacaacaggctctctcgc

SEQ ID NO: 443231 - DNA, 57 bp, Artificial
  Synthetic oligonucleotide
gttaacggatggcgacgagagaacgagagcggatctcttttacttgacaaatatccg

SEQ ID NO: 443232 - DNA, 52 bp, Artificial
  Synthetic oligonucleotide
gttaacgggatataaccacaagatggaccttcacccggaagtaaaacggcaa

SEQ ID NO: 443233 - DNA, 56 bp, Artificial
  Synthetic oligonucleotide
gttaacggtctttagtgctttcgtagcgtattagtatataagtatgtgtgagtctt

SEQ ID NO: 443234 - DNA, 50 bp, Artificial
  Synthetic oligonucleotide
gttaacgtcctgttcaagatgacccttcgaagcctacagcagcgatggag

SEQ ID NO: 443235 - DNA, 60 bp, Artificial
  Synthetic oligonucleotide
gttaactaagctgctcaatgtatagctctcgtgactgagagctcgcgcgctatcaactta

SEQ ID NO: 443236 - DNA, 58 bp, Artificial
  Synthetic oligonucleotide
gttaactacgatgtcggccctaggacatctatcgagttaacgacgatcgctttgcgat

SEQ ID NO: 443237 - DNA, 55 bp, Artificial
  Synthetic oligonucleotide
gttaactatcgctcgtgcgaaactgacctctaactacgtaccatccgctgaccgt

SEQ ID NO: 443238 - DNA, 53 bp, Artificial
  Synthetic oligonucleotide
gttaactatgttaacactaacatgggcctaaaaattagacaactactgtggtt

SEQ ID NO: 443239 - DNA, 55 bp, Artificial
  Synthetic oligonucleotide
gttaactcccgaaaatctagcctacattcatacaatggaccctaatattttagag

SEQ ID NO: 443240 - DNA, 56 bp, Artificial
  Synthetic oligonucleotide
gttaactcctctctgcgtcactttaaattgtaccagtgctattttgaggactaatt

SEQ ID NO: 443241 - DNA, 56 bp, Artificial
  Synthetic oligonucleotide
gttaactcctctctgcgttactttaaattgtaccaatgctaagttgaacacaacca

SEQ ID NO: 443242 - DNA, 55 bp, Artificial
  Synthetic oligonucleotide
gttaactcctctctgcgttactttaaattgtacccatgctaatttgaaccatacc

SEQ ID NO: 443243 - DNA, 57 bp, Artificial
  Synthetic oligonucleotide
gttaactcctctctgcgttactttaaattgtaccgatgctaagttgaccaatagtca

SEQ ID NO: 443244 - DNA, 59 bp, Artificial
  Synthetic oligonucleotide
gttaactcctctctgcgttactttaaattgtaccgatgctcaagtcaatcagacttgga

SEQ ID NO: 443245 - DNA, 56 bp, Artificial
  Synthetic oligonucleotide
gttaactcctctctgcgttactttagattgtaccaacgctaatttgaccaatgtaa

SEQ ID NO: 443246 - DNA, 57 bp, Artificial
  Synthetic oligonucleotide
gttaactcgcgcaacctccaaggcgcaattccactctgtcgaatacaaccaaccttc

SEQ ID NO: 443247 - DNA, 55 bp, Artificial
  Synthetic oligonucleotide
gttaacttaattctaagctcgacattgacgggatgcctatgctcgggttcgcaac

SEQ ID NO: 443248 - DNA, 55 bp, Artificial
  Synthetic oligonucleotide
gttaacttgtaatcttttcattcctgtgtcggagcagtggtaatggagccggacg

SEQ ID NO: 443249 - DNA, 55 bp, Artificial
  Synthetic oligonucleotide
gttaagaaatgagggtgattgaaataagttggtgggcaatagcgatcggtttata

SEQ ID NO: 443250 - DNA, 50 bp, Artificial
  Synthetic oligonucleotide
gttaagaacaaccttttaggcaaagctgcgactattgatcaggcactaaa

SEQ ID NO: 443251 - DNA, 56 bp, Artificial
  Synthetic oligonucleotide
gttaagaacagctgtgtaaccgcaaggcttaaccacaaaccatatccgtgctaaag

SEQ ID NO: 443252 - DNA, 53 bp, Artificial
  Synthetic oligonucleotide
gttaagaagaccctcatgtctttagtctccaacttcacaagaatatttcgaac

SEQ ID NO: 443253 - DNA, 55 bp, Artificial
  Synthetic oligonucleotide
gttaagacaacatatgcttggtgaaccagtggcagcccacccactgtcagaagcg

SEQ ID NO: 443254 - DNA, 55 bp, Artificial
  Synthetic oligonucleotide
gttaagacaaggacccactgagaatcctagtaactacttggaaaaggctctagaa

SEQ ID NO: 443255 - DNA, 55 bp, Artificial
  Synthetic oligonucleotide
gttaagacactgattgaaatccagagaatggggcagggaaaaggaaggttgctgg

SEQ ID NO: 443256 - DNA, 55 bp, Artificial
  Synthetic oligonucleotide
gttaagaccgaatgcaataccaaaggttaatcttcacaactggctgacggctcgt

SEQ ID NO: 443257 - DNA, 58 bp, Artificial
  Synthetic oligonucleotide
gttaagacctctagagagttggactctttggtgagagcctgtggggggcgtatagcta

SEQ ID NO: 443258 - DNA, 52 bp, Artificial
  Synthetic oligonucleotide
gttaagacgatcatgtcggatatcaacgaggtggttgttgggactccgattg

SEQ ID NO: 443259 - DNA, 60 bp, Artificial
  Synthetic oligonucleotide
gttaagacgcacgcaaacttattcctgcatgatgagctacattattggagtaaggacgat

SEQ ID NO: 443260 - DNA, 60 bp, Artificial
  Synthetic oligonucleotide
gttaagactggattcatgatcacagccaacacgtatttgtacgttaggtcagaagcagac

SEQ ID NO: 443261 - DNA, 55 bp, Artificial
  Synthetic oligonucleotide
gttaagagagcaggcactaatgagagacaaagggttgtgcctacattgtaagaac

SEQ ID NO: 443262 - DNA, 60 bp, Artificial
  Synthetic oligonucleotide
gttaagatctccatcagtcttatgcttgaaaaattatgtctaaacatcagtcatggcaat

SEQ ID NO: 443263 - DNA, 51 bp, Artificial
  Synthetic oligonucleotide
gttaagatttggaagagtagattcagatgcatggggcaagtggttagctaa

SEQ ID NO: 443264 - DNA, 58 bp, Artificial
  Synthetic oligonucleotide
gttaagcacacgggtattgttcgatgcgttagtgatgtcacacgtggcccgggtatta

SEQ ID NO: 443265 - DNA, 55 bp, Artificial
  Synthetic oligonucleotide
gttaagcagattaaacactcatcgctagagccgcaaattatttcccgatgacaac

SEQ ID NO: 443266 - DNA, 60 bp, Artificial
  Synthetic oligonucleotide
gttaagcatactattaaattgaagcaggagagatggttaggcaaaagagtatcgcaattc

SEQ ID NO: 443267 - DNA, 60 bp, Artificial
  Synthetic oligonucleotide
gttaagccagtgtggaggtgtgtgttgtaagacagtacggctatgtgtgtatagcacgca

SEQ ID NO: 443268 - DNA, 59 bp, Artificial
  Synthetic oligonucleotide
gttaagcccttacctggtggtggcagtcctgttcttatgcctcggcctgtcattctcaa

SEQ ID NO: 443269 - DNA, 55 bp, Artificial
  Synthetic oligonucleotide
gttaagccgcatgaaaagggtatcaatcccaattacctcctagcatggaaacagg

SEQ ID NO: 443270 - DNA, 53 bp, Artificial
  Synthetic oligonucleotide
gttaagccttccgcgtctgttgatgtttcggcgtttactgcgcagcctatcaa

SEQ ID NO: 443271 - DNA, 54 bp, Artificial
  Synthetic oligonucleotide
gttaagctcacagatccacctgctcaggtatcagtccccttcatgtcacctgct

SEQ ID NO: 443272 - DNA, 55 bp, Artificial
  Synthetic oligonucleotide
gttaagctcttctgactcacccttagacagcttagagatatccttgaaggctacg

SEQ ID NO: 443273 - DNA, 58 bp, Artificial
  Synthetic oligonucleotide
gttaagctgcgatccaagggttgggcttccttgaccacggctcaaaagagggcagcgc

SEQ ID NO: 443274 - DNA, 56 bp, Artificial
  Synthetic oligonucleotide
gttaagcttcatcagagggacaaaagtatctcctcgggggaaactgtcaactagag

SEQ ID NO: 443275 - DNA, 55 bp, Artificial
  Synthetic oligonucleotide
gttaaggaattgctcgaggaacaacgcgctcttgttgccttaaagatgcgcgagc

SEQ ID NO: 443276 - DNA, 55 bp, Artificial
  Synthetic oligonucleotide
gttaaggacataaaggcaagactgataaacaatggggatgactgcgtgctcattg

SEQ ID NO: 443277 - DNA, 57 bp, Artificial
  Synthetic oligonucleotide
gttaaggaggtaaccgcacagaatgctgagtccctgtcatggcccctggtccttggg

SEQ ID NO: 443278 - DNA, 56 bp, Artificial
  Synthetic oligonucleotide
gttaaggcactcttcggtgacctgaatccccacctggagaaacaacgtgcgcgtaa

SEQ ID NO: 443279 - DNA, 55 bp, Artificial
  Synthetic oligonucleotide
gttaaggcggaagtggatgggaaagaggtcgttgtctctaagaagcgtgtagtaa

SEQ ID NO: 443280 - DNA, 57 bp, Artificial
  Synthetic oligonucleotide
gttaaggcggtactgtcggatttatcccgcgcgcataaactggattttagcgagcga

SEQ ID NO: 443281 - DNA, 60 bp, Artificial
  Synthetic oligonucleotide
gttaagggcagagttcacatatgtagcccttgtacttatggcatagtcctgagagttgtt

SEQ ID NO: 443282 - DNA, 56 bp, Artificial
  Synthetic oligonucleotide
gttaaggtcaacactggtgttatcccatgacctaccgttgatttgtgaccttgaac

SEQ ID NO: 443283 - DNA, 55 bp, Artificial
  Synthetic oligonucleotide
gttaaggtctgactgttctaactggttctcctgtccattatcatctaagccgggc

SEQ ID NO: 443284 - DNA, 51 bp, Artificial
  Synthetic oligonucleotide
gttaaggtgcacgaagaccgagcacccgcagtctaggtcaattctgcgtcg

SEQ ID NO: 443285 - DNA, 55 bp, Artificial
  Synthetic oligonucleotide
gttaaggttgcctcttctgatcaagtcatggatgcgggttctcgtcacaacggcg

SEQ ID NO: 443286 - DNA, 52 bp, Artificial
  Synthetic oligonucleotide
gttaaggttgtaatgtactgaccgggtgtgaattgtaccggtccttgtaggg

SEQ ID NO: 443287 - DNA, 55 bp, Artificial
  Synthetic oligonucleotide
gttaagtaccgatgtaccactttccactttaaggcttgacttgcctacatggtac

SEQ ID NO: 443288 - DNA, 57 bp, Artificial
  Synthetic oligonucleotide
gttaagtagcctgtagaatgataaacttgtacctctttaactgcagcactcgtttaa

SEQ ID NO: 443289 - DNA, 58 bp, Artificial
  Synthetic oligonucleotide
gttaagtagtggcagaatggtaaaactggctgtgagtgaggcgcagtgctgagctaaa

SEQ ID NO: 443290 - DNA, 56 bp, Artificial
  Synthetic oligonucleotide
gttaagtatagacgtggctggtcgactactcaacgacgaagttatcgacgggctcc

SEQ ID NO: 443291 - DNA, 60 bp, Artificial
  Synthetic oligonucleotide
gttaagtccgtctatgttctgggcaagatttggatggatgagaacatcaagactaagaat

SEQ ID NO: 443292 - DNA, 60 bp, Artificial
  Synthetic oligonucleotide
gttaagtccgtgtatattctcggtaagatctggatggatgagaacatcaagctgaagaac

SEQ ID NO: 443293 - DNA, 55 bp, Artificial
  Synthetic oligonucleotide
gttaagtctgttcccaatcgcacaagaacgtatataaaattgaaacgactgcgtt

SEQ ID NO: 443294 - DNA, 60 bp, Artificial
  Synthetic oligonucleotide
gttaagtgctgcggcgtaagcgtcgttggccgtctgcggggctcctcttgctgatcttcc

SEQ ID NO: 443295 - DNA, 60 bp, Artificial
  Synthetic oligonucleotide
gttaagtgctgctgcgtaagcgtcgttggctgtttgctgtccccctcttgcagatcgtcc

SEQ ID NO: 443296 - DNA, 59 bp, Artificial
  Synthetic oligonucleotide
gttaagtgcttcaattgtggcaaggaggggcacatagccagaaattgcagggcccctag

SEQ ID NO: 443297 - DNA, 60 bp, Artificial
  Synthetic oligonucleotide
gttaagtgtgtgcaagacaaaagttccctgaagtgcagcatcacagcaactgtcactctc

SEQ ID NO: 443298 - DNA, 60 bp, Artificial
  Synthetic oligonucleotide
gttaagttatatacatctgttgagaatgcgcagcaggacaagggcattaccatcccacac

SEQ ID NO: 443299 - DNA, 55 bp, Artificial
  Synthetic oligonucleotide
gttaagtttgacgactaacttgtctaactcttcgtgtttcgataggctcagggtc

SEQ ID NO: 443300 - DNA, 49 bp, Artificial
  Synthetic oligonucleotide
gttaataacaatcttggtttaaaaaataggagggaccgaaaacggttca

SEQ ID NO: 443301 - DNA, 55 bp, Artificial
  Synthetic oligonucleotide
gttaataacaatgctttttgactccgaaagaagtgactgtgtgttcaaaacgtta

SEQ ID NO: 443302 - DNA, 59 bp, Artificial
  Synthetic oligonucleotide
gttaataacagtaggaagctcaaaataccatcaatcattcaccccaagtccaggagcgc

SEQ ID NO: 443303 - DNA, 57 bp, Artificial
  Synthetic oligonucleotide
gttaataagctaaacgcaatattgatcaagggggccacagcgacaggggaggaattc

SEQ ID NO: 443304 - DNA, 59 bp, Artificial
  Synthetic oligonucleotide
gttaataaggaaagcaagtcctacttgtagacatagaactgcagcatttatagtaagaa

SEQ ID NO: 443305 - DNA, 55 bp, Artificial
  Synthetic oligonucleotide
gttaataatacgacaataattaccaaggaaccagatttgaaagctccaagctact

SEQ ID NO: 443306 - DNA, 53 bp, Artificial
  Synthetic oligonucleotide
gttaataatccaataaggggaccccatccttttacgcttataagattaggatg

SEQ ID NO: 443307 - DNA, 60 bp, Artificial
  Synthetic oligonucleotide
gttaatactggacaaaggccatggttctgcgccagctgtcacgacaagcttcagtgaaaa

SEQ ID NO: 443308 - DNA, 55 bp, Artificial
  Synthetic oligonucleotide
gttaatagagctttcgtccttagtcacaatctgcaagcattcatgctccaaagtt

SEQ ID NO: 443309 - DNA, 54 bp, Artificial
  Synthetic oligonucleotide
gttaatagcagtagctgtcgcaaaccgtaccctaccctaattaaaactagacta

SEQ ID NO: 443310 - DNA, 55 bp, Artificial
  Synthetic oligonucleotide
gttaatagggcaaatcagcgattgaaccctatgcatcaactcctgcgacatttcc

SEQ ID NO: 443311 - DNA, 54 bp, Artificial
  Synthetic oligonucleotide
gttaatagtactattgaggacggggatatgtgtgatatcggtttcgggaacatg

SEQ ID NO: 443312 - DNA, 60 bp, Artificial
  Synthetic oligonucleotide
gttaatagtatcactgttacaacgattaagatctccaccagaacatatttgtaatggtgc

SEQ ID NO: 443313 - DNA, 60 bp, Artificial
  Synthetic oligonucleotide
gttaatattagccattcgatagtagtgagttatagtcatcaatctgacaacgatcatgaa

SEQ ID NO: 443314 - DNA, 59 bp, Artificial
  Synthetic oligonucleotide
gttaatcaaattgtacaagttatgtccaagcgatcacgttccctaaattcagctgcatt

SEQ ID NO: 443315 - DNA, 57 bp, Artificial
  Synthetic oligonucleotide
gttaatcaaccgatgctccttctgagcgtgggagtgtatctctaacgccccggtttc

SEQ ID NO: 443316 - DNA, 60 bp, Artificial
  Synthetic oligonucleotide
gttaatcagaacatgcatacacttcttggcatgggctccccgcagtaaagattgggtcaa

SEQ ID NO: 443317 - DNA, 60 bp, Artificial
  Synthetic oligonucleotide
gttaatcagattataaagtgcacctggtgcgattggatctagcttttgtggaagcaccgc

SEQ ID NO: 443318 - DNA, 55 bp, Artificial
  Synthetic oligonucleotide
gttaatcaggccatgaattttgaggcagtgtatccaaggcacaaaatggatgatg

SEQ ID NO: 443319 - DNA, 52 bp, Artificial
  Synthetic oligonucleotide
gttaatcatttaaacaagggatttgtgtttaatgattgcaggcaacgcctag

SEQ ID NO: 443320 - DNA, 53 bp, Artificial
  Synthetic oligonucleotide
gttaatcctaacagacagtttactaagccatccgtggccttagctggtttgag

SEQ ID NO: 443321 - DNA, 60 bp, Artificial
  Synthetic oligonucleotide
gttaatcgaatatacagatatacccaatgatggatctttaacatatctaaatattggaac

SEQ ID NO: 443322 - DNA, 60 bp, Artificial
  Synthetic oligonucleotide
gttaatcgcctgagcatatgcatcgttcgccgtttgctgaccaccacgagcagatcgtcc

SEQ ID NO: 443323 - DNA, 60 bp, Artificial
  Synthetic oligonucleotide
gttaatcgcgtgtgtcagggttatctcacgaacgacatcacgccaagacaagtcatattt

SEQ ID NO: 443324 - DNA, 56 bp, Artificial
  Synthetic oligonucleotide
gttaatcgtgcacggctcggtatgtctcccgtggatggttgtctccgtatgtaaag

SEQ ID NO: 443325 - DNA, 55 bp, Artificial
  Synthetic oligonucleotide
gttaatgacagatttctagaggttgacaatgatgcacaacggttggtccgagaga

SEQ ID NO: 443326 - DNA, 55 bp, Artificial
  Synthetic oligonucleotide
gttaatgaccctaaatctacagtccaaattcctccctgggtcacaattgaaggcc

SEQ ID NO: 443327 - DNA, 51 bp, Artificial
  Synthetic oligonucleotide
gttaatggacctgtatgaatcaggtttagaggatcttgaaacacaaatact

SEQ ID NO: 443328 - DNA, 54 bp, Artificial
  Synthetic oligonucleotide
gttaatggagttaacaattttagttacaatggcggttcgctgccgacggacttc

SEQ ID NO: 443329 - DNA, 55 bp, Artificial
  Synthetic oligonucleotide
gttaatggagttggatatgcttatgtagttcccgaatgggctggagcaggtacag

SEQ ID NO: 443330 - DNA, 56 bp, Artificial
  Synthetic oligonucleotide
gttaatgggactccaatgttaatttcagagggacctctcaaaatggaggagaaggc

SEQ ID NO: 443331 - DNA, 54 bp, Artificial
  Synthetic oligonucleotide
gttaatggtgtgaataacttcagttataatggaggatcactgccaactgatttt

SEQ ID NO: 443332 - DNA, 53 bp, Artificial
  Synthetic oligonucleotide
gttaatggttttttccacaatagtgtgtcgcactacagattcagtactgtcgc

SEQ ID NO: 443333 - DNA, 53 bp, Artificial
  Synthetic oligonucleotide
gttaatgtcacccaggtggaccgtacacatgttgtcatgtgtgcagacttccg

SEQ ID NO: 443334 - DNA, 56 bp, Artificial
  Synthetic oligonucleotide
gttaatgtggactttactgtagacactaatggtgtttatagtgaacctcgccctat

SEQ ID NO: 443335 - DNA, 52 bp, Artificial
  Synthetic oligonucleotide
gttaatgtgtggggcaccgtgttgtgtacccacaacggacctatccccttag

SEQ ID NO: 443336 - DNA, 55 bp, Artificial
  Synthetic oligonucleotide
gttaatgttagaacaaagacagcatttcacccctcagtgcttcatgatgtgttcc

SEQ ID NO: 443337 - DNA, 60 bp, Artificial
  Synthetic oligonucleotide
gttaattacacaattatctatgatctcatgtttctacgagtcatgttgaatcttggtggc

SEQ ID NO: 443338 - DNA, 60 bp, Artificial
  Synthetic oligonucleotide
gttaattacatcctcaatatggatagaaacttgccatcaacggctagatatataaggccg

SEQ ID NO: 443339 - DNA, 55 bp, Artificial
  Synthetic oligonucleotide
gttaattagtaaattaggtagtaagagtcttgtcgggtatgagcatgtcgaggag

SEQ ID NO: 443340 - DNA, 57 bp, Artificial
  Synthetic oligonucleotide
gttaattcagcccgcttcttggaaaccaagactggagactcagggtgggcctcgcag

SEQ ID NO: 443341 - DNA, 55 bp, Artificial
  Synthetic oligonucleotide
gttaattccttcattatagagttaagtgcctccatcgttgtttcgcgagcagtag

SEQ ID NO: 443342 - DNA, 60 bp, Artificial
  Synthetic oligonucleotide
gttaattgcagtaattagggccaataattatgtcgaagcgtgcagccgatatgatcattt

SEQ ID NO: 443343 - DNA, 50 bp, Artificial
  Synthetic oligonucleotide
gttaattggttataatccccacccaacaatttgactttaattttccttaa

SEQ ID NO: 443344 - DNA, 57 bp, Artificial
  Synthetic oligonucleotide
gttaatttagctgaaattatgcgaaacagtattgaattatgcgcgtgaaaaacgtcg

SEQ ID NO: 443345 - DNA, 58 bp, Artificial
  Synthetic oligonucleotide
gttaatttgcttcgtcattaggttggcgaagaactgtatgtcctggcgctactcatgc

SEQ ID NO: 443346 - DNA, 55 bp, Artificial
  Synthetic oligonucleotide
gttacaaaagaaagtggggacgaagatcccgaagaggtcatggcatctatcgccg

SEQ ID NO: 443347 - DNA, 55 bp, Artificial
  Synthetic oligonucleotide
gttacaaaatccacaacgaccacggtacatcagatctcgtctgcctgcttcctcc

SEQ ID NO: 443348 - DNA, 56 bp, Artificial
  Synthetic oligonucleotide
gttacaaactgataaggtttcacgataaccaaatgtacacttagttcatatggaaa

SEQ ID NO: 443349 - DNA, 56 bp, Artificial
  Synthetic oligonucleotide
gttacaaagagcacagggtcacaacaatggaatttgctgggagaatcagcttttta

SEQ ID NO: 443350 - DNA, 55 bp, Artificial
  Synthetic oligonucleotide
gttacaacagcggaaaattctgtatgagtgaaggacttgtcgggactacatcggc

SEQ ID NO: 443351 - DNA, 58 bp, Artificial
  Synthetic oligonucleotide
gttacaacatagacgaacatccactaccaggaggtattaggtggagtggtaacacaga

SEQ ID NO: 443352 - DNA, 56 bp, Artificial
  Synthetic oligonucleotide
gttacaaccacgacaatttgattttacacagtctctatttcagcttacgtcaagac

SEQ ID NO: 443353 - DNA, 59 bp, Artificial
  Synthetic oligonucleotide
gttacaagacatgttaaagtatgtatcatcggtacagtttcaaagttctcgcaaggtga

SEQ ID NO: 443354 - DNA, 58 bp, Artificial
  Synthetic oligonucleotide
gttacaagacgagcattgtcagacctgccaaacaactgtgtaacttcgacctgttaaa

SEQ ID NO: 443355 - DNA, 52 bp, Artificial
  Synthetic oligonucleotide
gttacaaggagttgtactgcacgactatccaacactccaaatgttggattca

SEQ ID NO: 443356 - DNA, 55 bp, Artificial
  Synthetic oligonucleotide
gttacaaggtatattacagagaaggagctgacccaacttggaagggacccgctac

SEQ ID NO: 443357 - DNA, 55 bp, Artificial
  Synthetic oligonucleotide
gttacaagttggcggctcagaagtgctagacattacagcagatccaaccactaca

SEQ ID NO: 443358 - DNA, 54 bp, Artificial
  Synthetic oligonucleotide
gttacaatagtacacttaggcgaataccttgcaagataaaacaggtagtaaggt

SEQ ID NO: 443359 - DNA, 55 bp, Artificial
  Synthetic oligonucleotide
gttacaatcacggggaagagtgatcaatcaaatggacttgatgaaaaggcgattc

SEQ ID NO: 443360 - DNA, 55 bp, Artificial
  Synthetic oligonucleotide
gttacaatgccatcgttccgcttcccattagagctagactcttccgctaacattg

SEQ ID NO: 443361 - DNA, 50 bp, Artificial
  Synthetic oligonucleotide
gttacaatgtttggcccgacattttgaagtttaaccgaaaaagtaaactg

SEQ ID NO: 443362 - DNA, 55 bp, Artificial
  Synthetic oligonucleotide
gttacaattttcattgaacgtagacaagacccaaaattcattacaacaggaccaa

SEQ ID NO: 443363 - DNA, 55 bp, Artificial
  Synthetic oligonucleotide
gttacacaaaccgagttgatcctgctgccacggagctcagaagagtgatttggcc

SEQ ID NO: 443364 - DNA, 60 bp, Artificial
  Synthetic oligonucleotide
gttacacaagatgctccactcgatgagatttaccattggcgcgaccatggaaatctcaca

SEQ ID NO: 443365 - DNA, 60 bp, Artificial
  Synthetic oligonucleotide
gttacacactctggtagtgatggaatagaaacaggggacatattcttagattgtgaagtc

SEQ ID NO: 443366 - DNA, 55 bp, Artificial
  Synthetic oligonucleotide
gttacacactgagaagagaacagacccgcaaggttcgtatagtgctgaatgtgac

SEQ ID NO: 443367 - DNA, 55 bp, Artificial
  Synthetic oligonucleotide
gttacacactttccgtggaaatgccgagacgaacaaaggctcgttggaattgtct

SEQ ID NO: 443368 - DNA, 59 bp, Artificial
  Synthetic oligonucleotide
gttacacatgcagaaactaacgtacgtgaacaattacgtgctcaaggagtaatgtaatg

SEQ ID NO: 443369 - DNA, 57 bp, Artificial
  Synthetic oligonucleotide
gttacaccatcagcaagtatttactccccgagtctgcttaaaaactgatcacttaaa

SEQ ID NO: 443370 - DNA, 59 bp, Artificial
  Synthetic oligonucleotide
gttacaccctatgagccaacatgggatggacgacccggagagagaagttctagtgtgga

SEQ ID NO: 443371 - DNA, 55 bp, Artificial
  Synthetic oligonucleotide
gttacacgcggtattaaacaatcgtcgcgtttccctgcgaatagcgaatcgcgac

SEQ ID NO: 443372 - DNA, 51 bp, Artificial
  Synthetic oligonucleotide
gttacacggaaattgtcgctcgttgctattataaacatgcgagtagctata

SEQ ID NO: 443373 - DNA, 59 bp, Artificial
  Synthetic oligonucleotide
gttacacgtcatttgtgacgtatccgtccaggggatcatctggtgatgggcgttgtcgg

SEQ ID NO: 443374 - DNA, 56 bp, Artificial
  Synthetic oligonucleotide
gttacacgtcggatttgatttgcacttttagcgacgtcccatgcctcttcacgtgt

SEQ ID NO: 443375 - DNA, 60 bp, Artificial
  Synthetic oligonucleotide
gttacactcattaatgaagatatcatcaaccctgcgtatagatgttgatctcagtattac

SEQ ID NO: 443376 - DNA, 60 bp, Artificial
  Synthetic oligonucleotide
gttacactgtactaatgtcaaagaccccaatgccaccgctctcgaaaacagcaccctgca

SEQ ID NO: 443377 - DNA, 51 bp, Artificial
  Synthetic oligonucleotide
gttacagaatagttactgactgcacgaagtgtcagtgcacagtatgccttg

SEQ ID NO: 443378 - DNA, 50 bp, Artificial
  Synthetic oligonucleotide
gttacagaatgtgactgaaaaactaaaacaactccttaatacgaacataa

SEQ ID NO: 443379 - DNA, 60 bp, Artificial
  Synthetic oligonucleotide
gttacagagatgcgacgagttgtcgccgcttataagacacataggcgctgtggggtgcaa

SEQ ID NO: 443380 - DNA, 56 bp, Artificial
  Synthetic oligonucleotide
gttacagagggcccaaggccacaacaatggcatttgctggggtaaccaggtattcc

SEQ ID NO: 443381 - DNA, 60 bp, Artificial
  Synthetic oligonucleotide
gttacagatgcatatactacgtggacctatacattttcagagacgagcgattctgggagc

SEQ ID NO: 443382 - DNA, 55 bp, Artificial
  Synthetic oligonucleotide
gttacagcaacccctttgattatatagtagtcgtaagggtagtggtactgtggct

SEQ ID NO: 443383 - DNA, 57 bp, Artificial
  Synthetic oligonucleotide
gttacaggaatattcaagggacctttactaggcaaggtaattgtcatagactcagag

SEQ ID NO: 443384 - DNA, 58 bp, Artificial
  Synthetic oligonucleotide
gttacaggacactgggagtttttagatacaagagcagatgttatgttggtttagtatg

SEQ ID NO: 443385 - DNA, 55 bp, Artificial
  Synthetic oligonucleotide
gttacaggagaaatgccagtatggatactcaagcaagtgagcatacaggaccagt

SEQ ID NO: 443386 - DNA, 60 bp, Artificial
  Synthetic oligonucleotide
gttacaggattctgaattggctggtttactatcaatgtcatcagcgtcgaatggtgaatc

SEQ ID NO: 443387 - DNA, 53 bp, Artificial
  Synthetic oligonucleotide
gttacagtcaaaggcaagggccgttatggacctttagcaaaacccgagaggtc

SEQ ID NO: 443388 - DNA, 60 bp, Artificial
  Synthetic oligonucleotide
gttacagtctcgcacggcaagcttagaggcggtaaagatagatgcggtagctccgccgct

SEQ ID NO: 443389 - DNA, 55 bp, Artificial
  Synthetic oligonucleotide
gttacagtgaatccaggaccattcgcgcaaactggatatgctccggttaattggg

SEQ ID NO: 443390 - DNA, 55 bp, Artificial
  Synthetic oligonucleotide
gttacataagcattcatgtactataggactacacgcactaacacggagtgagcag

SEQ ID NO: 443391 - DNA, 57 bp, Artificial
  Synthetic oligonucleotide
gttacatatacgattacattctacgttaccagtggcgtttcgatgacatggggggta

SEQ ID NO: 443392 - DNA, 59 bp, Artificial
  Synthetic oligonucleotide
gttacatatagtaagaaagacaacagcatggcatatggggcatttgttaagagatataa

SEQ ID NO: 443393 - DNA, 55 bp, Artificial
  Synthetic oligonucleotide
gttacatatggagaaactggtaggagaagctgacccggcatctacgtcggccgag

SEQ ID NO: 443394 - DNA, 56 bp, Artificial
  Synthetic oligonucleotide
gttacatcactgtgcatgctcattggaaatgcaactgttatacccaatccacaaac

SEQ ID NO: 443395 - DNA, 56 bp, Artificial
  Synthetic oligonucleotide
gttacatccaattggaatggtaaactccgcctgcttggaatcaccctcgtataacc

SEQ ID NO: 443396 - DNA, 57 bp, Artificial
  Synthetic oligonucleotide
gttacatccgataatagatttaaacaactcctgttgtattttttgatagcggatatc

SEQ ID NO: 443397 - DNA, 60 bp, Artificial
  Synthetic oligonucleotide
gttacatgcggcacaggaaattgcgtatgcaattaagccgacgtatcagttaatagtgca

SEQ ID NO: 443398 - DNA, 56 bp, Artificial
  Synthetic oligonucleotide
gttacatgcttgtatacacgatattcgtcgtttacttgtatgtctattactggagc

SEQ ID NO: 443399 - DNA, 60 bp, Artificial
  Synthetic oligonucleotide
gttacatggaaaccgccatgaacacctctcatcctctgccaaggcagttatataagagga

SEQ ID NO: 443400 - DNA, 54 bp, Artificial
  Synthetic oligonucleotide
gttacatggaggtgcgatccatgcacggtacattcagggtgaagaacctacaca

SEQ ID NO: 443401 - DNA, 54 bp, Artificial
  Synthetic oligonucleotide
gttacattcatcgtataggtaaataattgggacaccaaaggtaaatgggacacc

SEQ ID NO: 443402 - DNA, 60 bp, Artificial
  Synthetic oligonucleotide
gttacattgatgtccggtgcttatgtcacagatttgttttggtggtttaagatgattctc

SEQ ID NO: 443403 - DNA, 60 bp, Artificial
  Synthetic oligonucleotide
gttacattgtgtactgagcagaatttgcagcgctatcaacacatgataaaaactgatatt

SEQ ID NO: 443404 - DNA, 56 bp, Artificial
  Synthetic oligonucleotide
gttacatttaactattcctcatgtcacaataatatgcacatataggcatgcacccc

SEQ ID NO: 443405 - DNA, 50 bp, Artificial
  Synthetic oligonucleotide
gttacatttatactttggattatgtattttgttagatccattcagctata

SEQ ID NO: 443406 - DNA, 60 bp, Artificial
  Synthetic oligonucleotide
gttaccaacacagctaccacagtgttgctggatgaacagggtgtggggcctctgtgtaaa

SEQ ID NO: 443407 - DNA, 58 bp, Artificial
  Synthetic oligonucleotide
gttaccaacctcaatgaaaaaatatgagttatcaatacagaagaggaccatatctaaa

SEQ ID NO: 443408 - DNA, 55 bp, Artificial
  Synthetic oligonucleotide
gttaccaactgcagacgtagttctagtacaattagacgtaagttccgcttgggaa

SEQ ID NO: 443409 - DNA, 52 bp, Artificial
  Synthetic oligonucleotide
gttaccaattttcttgtgtctttgggtatacatttgaaccctaataaaacca

SEQ ID NO: 443410 - DNA, 55 bp, Artificial
  Synthetic oligonucleotide
gttaccacctgcgagctctatgagctcgtggaggccatggtagagaaaggccagg

SEQ ID NO: 443411 - DNA, 58 bp, Artificial
  Synthetic oligonucleotide
gttaccaggtcgtaaggaagtggtatgcaactgttactggtggacagtatggagcaaa

SEQ ID NO: 443412 - DNA, 57 bp, Artificial
  Synthetic oligonucleotide
gttaccatagacatctgtgggaaaaaggctataggtacagtgttagtgggacctaca

SEQ ID NO: 443413 - DNA, 59 bp, Artificial
  Synthetic oligonucleotide
gttaccatagggtactacatgatattccagttaacgatctccttaatcgtgccatcgaa

SEQ ID NO: 443414 - DNA, 55 bp, Artificial
  Synthetic oligonucleotide
gttaccatctatgcataaccctctatgagcacaatagttaaaagctaacactgtc

SEQ ID NO: 443415 - DNA, 57 bp, Artificial
  Synthetic oligonucleotide
gttaccatgcaaacaactcaacagagcaggttgacacaataatggaaaaaaacgtta

SEQ ID NO: 443416 - DNA, 60 bp, Artificial
  Synthetic oligonucleotide
gttaccatgggcgcacaagtctccagacagaatgttggcacacactccacgcaaaacatg

SEQ ID NO: 443417 - DNA, 55 bp, Artificial
  Synthetic oligonucleotide
gttaccattgacggggaacgctacaccctgccgcatcaactgcggatgaggaacg

SEQ ID NO: 443418 - DNA, 56 bp, Artificial
  Synthetic oligonucleotide
gttaccatttactaaaggtaacattgaaatgttaaaaccaatgtatgctgctatta

SEQ ID NO: 443419 - DNA, 55 bp, Artificial
  Synthetic oligonucleotide
gttaccccagacggatttgcttaccgtcgtactcatgccggtgttccttcaggaa

SEQ ID NO: 443420 - DNA, 59 bp, Artificial
  Synthetic oligonucleotide
gttacccccaatccatgtaataagcaacgttgcaattatacctatccaagtgatagcga

SEQ ID NO: 443421 - DNA, 55 bp, Artificial
  Synthetic oligonucleotide
gttacccccgtaagttgaagagttatcctgatctagttgcatccatttaccgtaa

SEQ ID NO: 443422 - DNA, 57 bp, Artificial
  Synthetic oligonucleotide
gttaccccctcccaaatattcgtgcaaagcggtgcacctggttgaacacctgcatgc

SEQ ID NO: 443423 - DNA, 54 bp, Artificial
  Synthetic oligonucleotide
gttaccccgccccacacgccaggagtagttgcccgtgccaaccaaacacttgcg

SEQ ID NO: 443424 - DNA, 53 bp, Artificial
  Synthetic oligonucleotide
gttaccccgccgtaggcacccccggacttcgagtcgtcaggtacatatccacg

SEQ ID NO: 443425 - DNA, 55 bp, Artificial
  Synthetic oligonucleotide
gttaccccggtgaagttgcatagactgtacccacggttgaaagtgactgatccgt

SEQ ID NO: 443426 - DNA, 55 bp, Artificial
  Synthetic oligonucleotide
gttacccctactattctattaaagtaattaccgttacctgagatgtgcggctgct

SEQ ID NO: 443427 - DNA, 51 bp, Artificial
  Synthetic oligonucleotide
gttacccctcaggcgcgcctgtctttcttcgcgggttttggtatttccccc

SEQ ID NO: 443428 - DNA, 52 bp, Artificial
  Synthetic oligonucleotide
gttaccccttaatcgttggatgggaaaattgacttttccccagggtgtgaca

SEQ ID NO: 443429 - DNA, 57 bp, Artificial
  Synthetic oligonucleotide
gttacccgaccagctacttcgagaagcttagtaccaccatgaacgaggcagagtgtt

SEQ ID NO: 443430 - DNA, 51 bp, Artificial
  Synthetic oligonucleotide
gttacccgcaccacgtacattgataaacaagggagttctaaaaccgcagga

SEQ ID NO: 443431 - DNA, 59 bp, Artificial
  Synthetic oligonucleotide
gttacccgctttacaccatttaaagtacctgtgtcgcagtcgtgatgcactgcgtgcgg

SEQ ID NO: 443432 - DNA, 55 bp, Artificial
  Synthetic oligonucleotide
gttacccggccaattacttcgagaaacccagtaccaccatgaaggttgcgcagcg

SEQ ID NO: 443433 - DNA, 54 bp, Artificial
  Synthetic oligonucleotide
gttacccgttcccggcaatctgtctccgaagactgcgaagcgtaggttaattcc

SEQ ID NO: 443434 - DNA, 55 bp, Artificial
  Synthetic oligonucleotide
gttacccgtttgtcctatgatacccggatcatcaacaaccagcacgggaccatgc

SEQ ID NO: 443435 - DNA, 55 bp, Artificial
  Synthetic oligonucleotide
gttaccgcaaacagtataatcgtgccatcgatcaggaaacattttacgtatcgtg

SEQ ID NO: 443436 - DNA, 58 bp, Artificial
  Synthetic oligonucleotide
gttaccgcgcaactgacgtcccagggactagcacaaacggcgagtggttcagtgcgtc

SEQ ID NO: 443437 - DNA, 55 bp, Artificial
  Synthetic oligonucleotide
gttaccgcgtagatagacttcgaggtttgcaatattgtaatttgttgtcccgaac

SEQ ID NO: 443438 - DNA, 51 bp, Artificial
  Synthetic oligonucleotide
gttaccgctagattccttgtaaataacatcaagccatttactagcgcctac

SEQ ID NO: 443439 - DNA, 52 bp, Artificial
  Synthetic oligonucleotide
gttaccggttagtgattattcaattctagtccctatgcatccatgtacaact

SEQ ID NO: 443440 - DNA, 52 bp, Artificial
  Synthetic oligonucleotide
gttaccggttgggtcaaaagctaatttaataccgtcaaccaagtcgccacta

SEQ ID NO: 443441 - DNA, 55 bp, Artificial
  Synthetic oligonucleotide
gttaccgtcactacgtcccgatacgcctaccatgacgatgagtagcagggtgatc

SEQ ID NO: 443442 - DNA, 50 bp, Artificial
  Synthetic oligonucleotide
gttaccgttaaaccagacgtacgctcatgaagcactcaatgatataacgt

SEQ ID NO: 443443 - DNA, 55 bp, Artificial
  Synthetic oligonucleotide
gttacctaattagagcattaaccctgaacacaatgaccaaagatgctgaaagggg

SEQ ID NO: 443444 - DNA, 51 bp, Artificial
  Synthetic oligonucleotide
gttacctatagtatacagttccgctacattacagtaccgtccttcagtacg

SEQ ID NO: 443445 - DNA, 55 bp, Artificial
  Synthetic oligonucleotide
gttacctattgtgaacaagcaaagctgcagcatatcaaatatcgcgactgtgata

SEQ ID NO: 443446 - DNA, 58 bp, Artificial
  Synthetic oligonucleotide
gttacctcaagtggaagacatctcatattagacgtacttaccacaaggagttggttgc

SEQ ID NO: 443447 - DNA, 55 bp, Artificial
  Synthetic oligonucleotide
gttacctccaacatgtgctgcgctatgagcgagaggttattacagcatctccaga

SEQ ID NO: 443448 - DNA, 54 bp, Artificial
  Synthetic oligonucleotide
gttacctgcatgcacgcagtctgttgcttagccatagtcacaagatcgttcttc

SEQ ID NO: 443449 - DNA, 56 bp, Artificial
  Synthetic oligonucleotide
gttacctgttggatttgacttggatttatttctctcgaaagtaattgagggcacga

SEQ ID NO: 443450 - DNA, 56 bp, Artificial
  Synthetic oligonucleotide
gttaccttttaagtaaggctgtggaaaagtctgctgctttcacaatgcttttagga

SEQ ID NO: 443451 - DNA, 55 bp, Artificial
  Synthetic oligonucleotide
gttacgaagttagacttaaagcggttcattgactgtgccgttgatgttgcagctg

SEQ ID NO: 443452 - DNA, 56 bp, Artificial
  Synthetic oligonucleotide
gttacgaatttctttgacataagtcgcagatggcataccattatacaaagtttcgg

SEQ ID NO: 443453 - DNA, 52 bp, Artificial
  Synthetic oligonucleotide
gttacgaccctacagattataacttcgttcggtccgtcgatccgttaactgg

SEQ ID NO: 443454 - DNA, 50 bp, Artificial
  Synthetic oligonucleotide
gttacgaggggtagaagaacgtgcctataggatatcggaaaagcgtgggg

SEQ ID NO: 443455 - DNA, 53 bp, Artificial
  Synthetic oligonucleotide
gttacgatctggtattcgtcaacatccatactgagtaccggcaacaccactac

SEQ ID NO: 443456 - DNA, 60 bp, Artificial
  Synthetic oligonucleotide
gttacgccaaacgtcgtcgtgccaagtcaattggtcgatgcgagaggtgctacaggatct

SEQ ID NO: 443457 - DNA, 60 bp, Artificial
  Synthetic oligonucleotide
gttacgcccgtataaattgagagattgcgaaattagattgagtgaagcagcgataccaca

SEQ ID NO: 443458 - DNA, 60 bp, Artificial
  Synthetic oligonucleotide
gttacgccgagcatgggtgaactacgaggactctggtgcattcacagtggaagtggagaa

SEQ ID NO: 443459 - DNA, 60 bp, Artificial
  Synthetic oligonucleotide
gttacgccgagtcgggtacaacctgctagactcaatcaggactatgccagcttcgcacag

SEQ ID NO: 443460 - DNA, 60 bp, Artificial
  Synthetic oligonucleotide
gttacgcggcacgtgcaattagcagtctcgtaagcggcaactggttgtcattcgccaacc

SEQ ID NO: 443461 - DNA, 55 bp, Artificial
  Synthetic oligonucleotide
gttacgctgcccttaaatgaatacttctctcgaattggtggggttacaagtccag

SEQ ID NO: 443462 - DNA, 53 bp, Artificial
  Synthetic oligonucleotide
gttacgcttcgattcgcattagcgcctagtaaaaatttaattcgtcgtgagtc

SEQ ID NO: 443463 - DNA, 55 bp, Artificial
  Synthetic oligonucleotide
gttacggaatttgtacactgaaattgtgtacacaccaatcgcaacaccagatgga

SEQ ID NO: 443464 - DNA, 55 bp, Artificial
  Synthetic oligonucleotide
gttacggagcgttaaatgcgacttagtgctaatcggtggttcttcgtatcttccg

SEQ ID NO: 443465 - DNA, 53 bp, Artificial
  Synthetic oligonucleotide
gttacggcgatgacatagttctggaatataaagttcctattagaacaaatgta

SEQ ID NO: 443466 - DNA, 55 bp, Artificial
  Synthetic oligonucleotide
gttacggctcgtcactgataacgcattacggcaaacgccaatgcacttcgacgcg

SEQ ID NO: 443467 - DNA, 56 bp, Artificial
  Synthetic oligonucleotide
gttacgggtatgactactgacaaccttaaatgcccgtgccaggtcccagcgcccga

SEQ ID NO: 443468 - DNA, 52 bp, Artificial
  Synthetic oligonucleotide
gttacgggtcatcctcttttgagcaggtttacggacaacgaaaacccctcaa

SEQ ID NO: 443469 - DNA, 50 bp, Artificial
  Synthetic oligonucleotide
gttacggtaaatacgcagacccatctgggaatgtgactcacatgtctaag

SEQ ID NO: 443470 - DNA, 53 bp, Artificial
  Synthetic oligonucleotide
gttacggtattatggtacggtaaagaaccttccattagtgaaggttacaatgc

SEQ ID NO: 443471 - DNA, 54 bp, Artificial
  Synthetic oligonucleotide
gttacgtacatattccgatagtaagggtgttacctatgatcggaacctacaaac

SEQ ID NO: 443472 - DNA, 50 bp, Artificial
  Synthetic oligonucleotide
gttacgtccgcgtcgtggatatgatccgcgtcgtctcgccaccacgccaa

SEQ ID NO: 443473 - DNA, 55 bp, Artificial
  Synthetic oligonucleotide
gttacgtcgagtaacctccactaccgatcgattggttgactttacggatggttca

SEQ ID NO: 443474 - DNA, 59 bp, Artificial
  Synthetic oligonucleotide
gttacgtctgacgagcttatgtacatgcaacaacttgggcctcaagttgttgggcctgg

SEQ ID NO: 443475 - DNA, 60 bp, Artificial
  Synthetic oligonucleotide
gttacgtctttactcagttcgagtcaagatgtgatagataggatatacaagcaggtggct

SEQ ID NO: 443476 - DNA, 55 bp, Artificial
  Synthetic oligonucleotide
gttactaaacaaagccccatgtatggattcactttacgtggaagattatccacgt

SEQ ID NO: 443477 - DNA, 57 bp, Artificial
  Synthetic oligonucleotide
gttactaacattactcaggtctctggcgtggccgggggatgtgtatatttcgcccca

SEQ ID NO: 443478 - DNA, 57 bp, Artificial
  Synthetic oligonucleotide
gttactaactgtagtgtcaaatgacatgttcataagggaatcattggttgcatgcca

SEQ ID NO: 443479 - DNA, 58 bp, Artificial
  Synthetic oligonucleotide
gttactaactgtggtaccaaacgacatgttcataagggaatcgttagttgcatgtcag

SEQ ID NO: 443480 - DNA, 53 bp, Artificial
  Synthetic oligonucleotide
gttactaataccactagtaacagtggggaaacaatagggagagaagaaatgac

SEQ ID NO: 443481 - DNA, 53 bp, Artificial
  Synthetic oligonucleotide
gttactaatttagtacattcagctttcgggaaaaacaccggttctgagattac

SEQ ID NO: 443482 - DNA, 53 bp, Artificial
  Synthetic oligonucleotide
gttactacctggtcaaagatggtaacgcctatgtaatcaagatagcccccgaa

SEQ ID NO: 443483 - DNA, 60 bp, Artificial
  Synthetic oligonucleotide
gttactagagaacgataaaactctagacatgcatgatgctaatgttagaaacctgcatga

SEQ ID NO: 443484 - DNA, 60 bp, Artificial
  Synthetic oligonucleotide
gttactagccctcagagatggaccacctcagatgaacataattacagattctcagtatgt

SEQ ID NO: 443485 - DNA, 57 bp, Artificial
  Synthetic oligonucleotide
gttactagttcaatccctagtggcgtggatcccaacgttgtaaacaccatactgcca

SEQ ID NO: 443486 - DNA, 58 bp, Artificial
  Synthetic oligonucleotide
gttactatcgcttgccgggaaagaagtcacagtcgcatctgtgccttttaattctacc

SEQ ID NO: 443487 - DNA, 55 bp, Artificial
  Synthetic oligonucleotide
gttactatgaaacaattcatccttgcaacgtcttttgtgtcttgtctggcccagg

SEQ ID NO: 443488 - DNA, 53 bp, Artificial
  Synthetic oligonucleotide
gttactatgaacggaaatgattttcaaactggaggaattggtaatctacccgt

SEQ ID NO: 443489 - DNA, 55 bp, Artificial
  Synthetic oligonucleotide
gttactcaaccgccgttgaatgctgtgggtcaatacatctaaggggcttcactga

SEQ ID NO: 443490 - DNA, 55 bp, Artificial
  Synthetic oligonucleotide
gttactcaacgggaatttaagaatgaagccccttatgacggacaattagaacata

SEQ ID NO: 443491 - DNA, 58 bp, Artificial
  Synthetic oligonucleotide
gttactcaatctgatgttgcgagtgtactttcaaaagtagtttctgtaagacatctag

SEQ ID NO: 443492 - DNA, 55 bp, Artificial
  Synthetic oligonucleotide
gttactcacagtaattgcacatctggcctcagttttagcccacatttgccaacca

SEQ ID NO: 443493 - DNA, 60 bp, Artificial
  Synthetic oligonucleotide
gttactcagacaggattatacaaatcacaagaggagattcaacaatcacgtcacaagatg

SEQ ID NO: 443494 - DNA, 55 bp, Artificial
  Synthetic oligonucleotide
gttactcctgaattcaaagaatctatgatagctgattcgactttaatggttgggg

SEQ ID NO: 443495 - DNA, 56 bp, Artificial
  Synthetic oligonucleotide
gttactcctggtaaatacttgtttaagggttatcatgctgatataatacttcttcc

SEQ ID NO: 443496 - DNA, 60 bp, Artificial
  Synthetic oligonucleotide
gttactctgctggtgcacttgccagttgtatgggcctcatatacaacagaatggggactg

SEQ ID NO: 443497 - DNA, 58 bp, Artificial
  Synthetic oligonucleotide
gttactcttgacattgatgtagttgctgactttgggacgaaggtactcccatatcttg

SEQ ID NO: 443498 - DNA, 57 bp, Artificial
  Synthetic oligonucleotide
gttactcttgtgactatggggctagggtttgtgtgagggtaaatgctgacaaaccca

SEQ ID NO: 443499 - DNA, 59 bp, Artificial
  Synthetic oligonucleotide
gttactgactgtggtaccaaatgacatgtttataagggaatcgttagttgcatctcaac

SEQ ID NO: 443500 - DNA, 56 bp, Artificial
  Synthetic oligonucleotide
gttactgatcgacaacacccagcctacccttacaggatcacaccaaaccctccgac

SEQ ID NO: 443501 - DNA, 57 bp, Artificial
  Synthetic oligonucleotide
gttactgcacgctaaactacaacaacgaggcggtggatcgttcggccttctactgtc

SEQ ID NO: 443502 - DNA, 55 bp, Artificial
  Synthetic oligonucleotide
gttactgcatacgggtagcttaagcgccaccgtgtcggtcttatcatcccttgac

SEQ ID NO: 443503 - DNA, 55 bp, Artificial
  Synthetic oligonucleotide
gttactgcccaaggctaagaggttcgcacagtggttgctcgacgacccacaggcc

SEQ ID NO: 443504 - DNA, 55 bp, Artificial
  Synthetic oligonucleotide
gttactgccggatccgattcaggttcgttcgatatttctccgggtgccacgacgg

SEQ ID NO: 443505 - DNA, 51 bp, Artificial
  Synthetic oligonucleotide
gttactggcatccattcgaaacaatattcgaagtttcttaagtttttgtcg

SEQ ID NO: 443506 - DNA, 60 bp, Artificial
  Synthetic oligonucleotide
gttactggctaagtcagtattcaatagtttgtatgcatctccacaattagaaggattttc

SEQ ID NO: 443507 - DNA, 55 bp, Artificial
  Synthetic oligonucleotide
gttactggggatgatagaaatgcaactgccagcatcatttatggtggtatacttg

SEQ ID NO: 443508 - DNA, 50 bp, Artificial
  Synthetic oligonucleotide
gttactgtcgtgaaaacgttccttgctctttcggcaccgcagttttcctt

SEQ ID NO: 443509 - DNA, 60 bp, Artificial
  Synthetic oligonucleotide
gttactgttgtcaagacccatcttgccttgtctgcgccagaattctctcttgctgcgtgt

SEQ ID NO: 443510 - DNA, 54 bp, Artificial
  Synthetic oligonucleotide
gttacttaccacggaagtattatcgtttgcatttagagatttaaaggttgtgtg

SEQ ID NO: 443511 - DNA, 55 bp, Artificial
  Synthetic oligonucleotide
gttacttacgagctgcgggtgtttccagtcgagttgagcttgagatgcttcgggc

SEQ ID NO: 443512 - DNA, 55 bp, Artificial
  Synthetic oligonucleotide
gttactttctccgtgtggttcaataagaagaactttgtcactaattctggtcgtg

SEQ ID NO: 443513 - DNA, 56 bp, Artificial
  Synthetic oligonucleotide
gttactttggttggtgttgtgatttccggggtctggacaattcctgagaattgtgc

SEQ ID NO: 443514 - DNA, 55 bp, Artificial
  Synthetic oligonucleotide
gttactttgtgagataagaaatcgccaagcttatatcccgtggtagattaaacgg

SEQ ID NO: 443515 - DNA, 55 bp, Artificial
  Synthetic oligonucleotide
gttagaaatgcagctactagctgtcaaaaggacacccctccacaggctaagccag

SEQ ID NO: 443516 - DNA, 53 bp, Artificial
  Synthetic oligonucleotide
gttagaaccttcgtgcgacccccgtacccggaggtgtggtgcgtgacgcagtt

SEQ ID NO: 443517 - DNA, 60 bp, Artificial
  Synthetic oligonucleotide
gttagaacgacattcaaatgacgttacagatgcaaacaaaatttacagacgcagactgga

SEQ ID NO: 443518 - DNA, 60 bp, Artificial
  Synthetic oligonucleotide
gttagaacgacattcagctgacgttgctgatgcaaacaaaatttataaacgtagactaga

SEQ ID NO: 443519 - DNA, 55 bp, Artificial
  Synthetic oligonucleotide
gttagaacgttacgtgtcattggctattgacgcatacccgctcacaaaacaccct

SEQ ID NO: 443520 - DNA, 50 bp, Artificial
  Synthetic oligonucleotide
gttagaagagttgctgaagtgtcgttccgtcagtataaaccagaaacacc

SEQ ID NO: 443521 - DNA, 60 bp, Artificial
  Synthetic oligonucleotide
gttagaagattaaacgcggtcttgcttccaaacattcacacactgtttgacatgtcagct

SEQ ID NO: 443522 - DNA, 57 bp, Artificial
  Synthetic oligonucleotide
gttagaagcgccaccggagatagaccgtgtggttcagtacacttatgaaatcgcacg

SEQ ID NO: 443523 - DNA, 52 bp, Artificial
  Synthetic oligonucleotide
gttagaagggtcgagtggttctacgttagtggaccagaacctcgggagagtt

SEQ ID NO: 443524 - DNA, 55 bp, Artificial
  Synthetic oligonucleotide
gttagaatccaataagatgggttagtaatagtcgaaccttatttcaaaagctgaa

SEQ ID NO: 443525 - DNA, 51 bp, Artificial
  Synthetic oligonucleotide
gttagacaaacatacaatacgttcagcccttgttgttctgaacgatgttgt

SEQ ID NO: 443526 - DNA, 60 bp, Artificial
  Synthetic oligonucleotide
gttagacaacatgctgaatcagcaggttgtagcatgattgacaacattgactctccatcg

SEQ ID NO: 443527 - DNA, 56 bp, Artificial
  Synthetic oligonucleotide
gttagacaccctcccccatggcgaatggacaccaccccggctagccgcggacaatg

SEQ ID NO: 443528 - DNA, 54 bp, Artificial
  Synthetic oligonucleotide
gttagacagtactctgactttaaatttgagacgtgggatccgttagatacacca

SEQ ID NO: 443529 - DNA, 51 bp, Artificial
  Synthetic oligonucleotide
gttagacattgcagtagcgttaagtagtaatgtataaccacgatttgcgtc

SEQ ID NO: 443530 - DNA, 60 bp, Artificial
  Synthetic oligonucleotide
gttagacatttccctaggatatggctccatggcttagggcaacatatctatgaaacttat

SEQ ID NO: 443531 - DNA, 54 bp, Artificial
  Synthetic oligonucleotide
gttagaccacaagtaccccttagacctatgacatttaaaggagcttttgattta

SEQ ID NO: 443532 - DNA, 55 bp, Artificial
  Synthetic oligonucleotide
gttagaccctgcttttgttcgtgtccatgcggctacaggttgaggaatctgtgta

SEQ ID NO: 443533 - DNA, 52 bp, Artificial
  Synthetic oligonucleotide
gttagaccggtattctctaatttttgcgtggatagcatacgcgggatgtcta

SEQ ID NO: 443534 - DNA, 55 bp, Artificial
  Synthetic oligonucleotide
gttagacctctcggtgtctttgacactgagtgcttatattattcggcatataggg

SEQ ID NO: 443535 - DNA, 59 bp, Artificial
  Synthetic oligonucleotide
gttagaccttgaaggatgcagctccttatctaataagcgcttcaattgttggtctagtt

SEQ ID NO: 443536 - DNA, 59 bp, Artificial
  Synthetic oligonucleotide
gttagacgcaaccgccgtgtgtgactcaatacttgtctatgtcgccagttacaacgaag

SEQ ID NO: 443537 - DNA, 53 bp, Artificial
  Synthetic oligonucleotide
gttagactcattctagataactctacttaggaacccaagaacccctccctggg

SEQ ID NO: 443538 - DNA, 55 bp, Artificial
  Synthetic oligonucleotide
gttagactcttcataggccaagggagcgttagaaccttcaagcgaactgcctcac

SEQ ID NO: 443539 - DNA, 55 bp, Artificial
  Synthetic oligonucleotide
gttagactgcgtcctttgtgccgcaacgattgaagctgattcacctgggtcgaga

SEQ ID NO: 443540 - DNA, 57 bp, Artificial
  Synthetic oligonucleotide
gttagacttgagcattcaagatgaatatcctgcattgcagacaatagtctaccattc

SEQ ID NO: 443541 - DNA, 55 bp, Artificial
  Synthetic oligonucleotide
gttagagaaggaacccatagtaggagcagaaactttctatgttgatggggcagct

SEQ ID NO: 443542 - DNA, 53 bp, Artificial
  Synthetic oligonucleotide
gttagagaagtatctaggtgagtgattatgctatttagatgccctgtatgcgg

SEQ ID NO: 443543 - DNA, 60 bp, Artificial
  Synthetic oligonucleotide
gttagagaattgagaatcaggcctgatctcagtatcagaggatcaaaattcacagacaag

SEQ ID NO: 443544 - DNA, 55 bp, Artificial
  Synthetic oligonucleotide
gttagagacagcttaaagtgtacggtttacaatacgacttacattgcagaccttg

SEQ ID NO: 443545 - DNA, 59 bp, Artificial
  Synthetic oligonucleotide
gttagagacgcaatacgtcgacaactatctaaggtctgcctacatctatgaaatgtaca

SEQ ID NO: 443546 - DNA, 52 bp, Artificial
  Synthetic oligonucleotide
gttagagagaagttggacattctctctctagacaccgattcggggtctctcc

SEQ ID NO: 443547 - DNA, 55 bp, Artificial
  Synthetic oligonucleotide
gttagagagtgtgcagcaatggtaagatattataaaagaggacaaatgcgggata

SEQ ID NO: 443548 - DNA, 60 bp, Artificial
  Synthetic oligonucleotide
gttagagatctagtctcagttatcagggctcgtaattatgtcgaagcgaccaggagatat

SEQ ID NO: 443549 - DNA, 55 bp, Artificial
  Synthetic oligonucleotide
gttagagattgtgcagctatgtgtaagcattataggttggcagaaatgaggcgga

SEQ ID NO: 443550 - DNA, 60 bp, Artificial
  Synthetic oligonucleotide
gttagagatttagagtgtgttagtaacttcttgttggatgtgtatatggtagatagtgtg

SEQ ID NO: 443551 - DNA, 53 bp, Artificial
  Synthetic oligonucleotide
gttagagcctagtgcattccaccacgtgtttgaaggagttaaggaacctgctg

SEQ ID NO: 443552 - DNA, 60 bp, Artificial
  Synthetic oligonucleotide
gttagaggcagcatctgaggaggtgcccctaatcggagcgggtatggcgacagccgtcgc

SEQ ID NO: 443553 - DNA, 53 bp, Artificial
  Synthetic oligonucleotide
gttagaggctccccaaataatggactttgcacccgggggctacccattaatat

SEQ ID NO: 443554 - DNA, 59 bp, Artificial
  Synthetic oligonucleotide
gttagaggtgaatacgagggtaagatcttcgatgctaggtcaaagcttacagagacgac

SEQ ID NO: 443555 - DNA, 60 bp, Artificial
  Synthetic oligonucleotide
gttagaggtgagcgatctaatggcctctgggacgcatccgttacctccctcagcaatcat

SEQ ID NO: 443556 - DNA, 57 bp, Artificial
  Synthetic oligonucleotide
gttagagtggtgccagatgcacagaggatgttcgagaagttgtccaacccgatccga

SEQ ID NO: 443557 - DNA, 55 bp, Artificial
  Synthetic oligonucleotide
gttagagtgtataatcatggaggagtgcggtatgccgcagtggatgattcgactc

SEQ ID NO: 443558 - DNA, 55 bp, Artificial
  Synthetic oligonucleotide
gttagagttgggtacaaaacctactgcccctcatgttcgtaataagaaggtgata

SEQ ID NO: 443559 - DNA, 60 bp, Artificial
  Synthetic oligonucleotide
gttagataacaagttaataaggaaagcaagtcctacttgcagacatagaactgcagcatt

SEQ ID NO: 443560 - DNA, 60 bp, Artificial
  Synthetic oligonucleotide
gttagataccatatcaaggttatcacaatatatgtcagaggtaagcacatataaagtaaa

SEQ ID NO: 443561 - DNA, 58 bp, Artificial
  Synthetic oligonucleotide
gttagatacccagaagagtttggaagcaagtcaggcctgtcagaggaagaggttagaa

SEQ ID NO: 443562 - DNA, 55 bp, Artificial
  Synthetic oligonucleotide
gttagatatagaagtgagaagaactgtcaaagccacggagatgatagtctacacc

SEQ ID NO: 443563 - DNA, 60 bp, Artificial
  Synthetic oligonucleotide
gttagatataggagatgcttattttactatccctctagacccagactatcagcaatatac

SEQ ID NO: 443564 - DNA, 60 bp, Artificial
  Synthetic oligonucleotide
gttagatatataggcaagttgattaattgtgaattgattgtatgatgcactgctgatcaa

SEQ ID NO: 443565 - DNA, 60 bp, Artificial
  Synthetic oligonucleotide
gttagatcattagttgcagagttgaataatatatattgcgatggaggagattacagcttc

SEQ ID NO: 443566 - DNA, 55 bp, Artificial
  Synthetic oligonucleotide
gttagatcggcggttcggcgagatatcggacaaagacctagcgataggtgtgctg

SEQ ID NO: 443567 - DNA, 60 bp, Artificial
  Synthetic oligonucleotide
gttagatctctcaggacacctatatgtggcgttaatgtcaggtgcttacgtcacagactt

SEQ ID NO: 443568 - DNA, 55 bp, Artificial
  Synthetic oligonucleotide
gttagatgaaacatcgagttcaccctcagaattggagaatacaccagtgcccacg

SEQ ID NO: 443569 - DNA, 57 bp, Artificial
  Synthetic oligonucleotide
gttagatgatgcaacgaccacgtgttggacatactttgatacctatatgagaaatgc

SEQ ID NO: 443570 - DNA, 55 bp, Artificial
  Synthetic oligonucleotide
gttagatgatgccacaccaccaacgtgggactactttgacacatatcttaggaac

SEQ ID NO: 443571 - DNA, 57 bp, Artificial
  Synthetic oligonucleotide
gttagatgcttatgaacgtgaagtcttatcttgtgccttgttgcatatgaacccaat

SEQ ID NO: 443572 - DNA, 60 bp, Artificial
  Synthetic oligonucleotide
gttagatggagttccaacatactctaccactgtcgcggacatcccagtgaaggcagtcac

SEQ ID NO: 443573 - DNA, 60 bp, Artificial
  Synthetic oligonucleotide
gttagatgggcatgttgagagccgctgcctttgtggttgcgtgatcacaggcgacgtcct

SEQ ID NO: 443574 - DNA, 55 bp, Artificial
  Synthetic oligonucleotide
gttagatgtggaggttggagatgttgtcccatatggacaattgaacctaagcggt

SEQ ID NO: 443575 - DNA, 60 bp, Artificial
  Synthetic oligonucleotide
gttagattaacatctatggttggtgcctcagcagtcaatggtaccgtagtgaggatatca

SEQ ID NO: 443576 - DNA, 57 bp, Artificial
  Synthetic oligonucleotide
gttagattcaacacctagggtgctaactagaaaattcctatttatgtgagtaattgc

SEQ ID NO: 443577 - DNA, 59 bp, Artificial
  Synthetic oligonucleotide
gttagattcagacacttacggaaaagtgcttacacttgtggcagatcggggagaggatg

SEQ ID NO: 443578 - DNA, 59 bp, Artificial
  Synthetic oligonucleotide
gttagatttatacgcggaaaaggatccttcatattacacgacattccaaccagagatca

SEQ ID NO: 443579 - DNA, 58 bp, Artificial
  Synthetic oligonucleotide
gttagcaaatgtgtcacagtggaaggatttaactcgtttgccaattcgtgttcgtgga

SEQ ID NO: 443580 - DNA, 60 bp, Artificial
  Synthetic oligonucleotide
gttagcacgaattggtgtccctttgtaatcataacccacagtaacacgcatgcgccacga

SEQ ID NO: 443581 - DNA, 55 bp, Artificial
  Synthetic oligonucleotide
gttagcacttgacaagtatggggttgatttgccaatggtgacatttcttaaagat

SEQ ID NO: 443582 - DNA, 60 bp, Artificial
  Synthetic oligonucleotide
gttagcagaccacaagattgatcagacaagtatgattgcatactgggtgggaacgttata

SEQ ID NO: 443583 - DNA, 51 bp, Artificial
  Synthetic oligonucleotide
gttagcagacttcccggaacactgtgcctccattctcgccatgcgaaatgg

SEQ ID NO: 443584 - DNA, 59 bp, Artificial
  Synthetic oligonucleotide
gttagcaggcttggacgccgaggcacaataaaaactagaagtggtgtgcaaattgggca

SEQ ID NO: 443585 - DNA, 54 bp, Artificial
  Synthetic oligonucleotide
gttagcatacaattacccggtactaactatgttgggcctggcaatgagctacaa

SEQ ID NO: 443586 - DNA, 60 bp, Artificial
  Synthetic oligonucleotide
gttagcatatctaccatagaaggccatctctctagcatcatgatcgcgatcccgggattt

SEQ ID NO: 443587 - DNA, 53 bp, Artificial
  Synthetic oligonucleotide
gttagcattacaataacagtgttagtcctccccggaaacggaaataatgggag

SEQ ID NO: 443588 - DNA, 55 bp, Artificial
  Synthetic oligonucleotide
gttagccaaaacactcaagacatatccgccatgggtgacagactcaatgctatcg

SEQ ID NO: 443589 - DNA, 52 bp, Artificial
  Synthetic oligonucleotide
gttagccatatggcaactttacgcagtttcgtactcgtcgataatggcggta

SEQ ID NO: 443590 - DNA, 56 bp, Artificial
  Synthetic oligonucleotide
gttagccgtgtcagtgtccgtaacggacagctgtggtcgggggcgaaacagccgct

SEQ ID NO: 443591 - DNA, 55 bp, Artificial
  Synthetic oligonucleotide
gttagccgttatggttctgaatttgttattagttcgagttgtaagtcgcaccaca

SEQ ID NO: 443592 - DNA, 60 bp, Artificial
  Synthetic oligonucleotide
gttagcctagaattaactagggtaatctctgctgcactagttggtatggcttataatgct

SEQ ID NO: 443593 - DNA, 59 bp, Artificial
  Synthetic oligonucleotide
gttagcctgaagaacagaacactcattaagtatgtggtgacgcaggtcccgacaaccca

SEQ ID NO: 443594 - DNA, 55 bp, Artificial
  Synthetic oligonucleotide
gttagccttcacattatggtagcttacaatgaacgtcttggggtctccggccctt

SEQ ID NO: 443595 - DNA, 59 bp, Artificial
  Synthetic oligonucleotide
gttagcgagaacatttgttctctctaacacctcgtcagctgaaataccgataggcctaa

SEQ ID NO: 443596 - DNA, 60 bp, Artificial
  Synthetic oligonucleotide
gttagcgaggctaacatgttcaacgagatggccgctagtcagagggacatcgctaatgcc

SEQ ID NO: 443597 - DNA, 55 bp, Artificial
  Synthetic oligonucleotide
gttagcgcacacataccgataacgtgtacatacatatgtgacatgaatgtgtacg

SEQ ID NO: 443598 - DNA, 58 bp, Artificial
  Synthetic oligonucleotide
gttagcggggttcaaaagcaaactgaagaagattgtagggactcattccaggatcagc

SEQ ID NO: 443599 - DNA, 55 bp, Artificial
  Synthetic oligonucleotide
gttagcggtggaagagccaccattcgcgataatgagaacaagagttagtggtttg

SEQ ID NO: 443600 - DNA, 60 bp, Artificial
  Synthetic oligonucleotide
gttagcgttggcggagtagacatgcgggcagggcgtatcatagcgtgggatggacaagct

SEQ ID NO: 443601 - DNA, 57 bp, Artificial
  Synthetic oligonucleotide
gttagctaacgcttttgcttatgccctagtaaaagctttcggaatacagtcatacta

SEQ ID NO: 443602 - DNA, 55 bp, Artificial
  Synthetic oligonucleotide
gttagctaatgtgacgtcagttagacgagaatacgcgattccagtcggaccagtt

SEQ ID NO: 443603 - DNA, 56 bp, Artificial
  Synthetic oligonucleotide
gttagctagcgcctttcgcaattctcgcctaactcgccaaatggatcatgtctcag

SEQ ID NO: 443604 - DNA, 60 bp, Artificial
  Synthetic oligonucleotide
gttagctgacacagattctaatgctagagcatttttacaaagtaattgtcaagcacgtat

SEQ ID NO: 443605 - DNA, 55 bp, Artificial
  Synthetic oligonucleotide
gttagctgaggcaatgagccaagcaaacagtaacatactggtacagagaagcagt

SEQ ID NO: 443606 - DNA, 51 bp, Artificial
  Synthetic oligonucleotide
gttagctgagtcaaccaaggacatctggcctacaactgcaaacatctttgg

SEQ ID NO: 443607 - DNA, 55 bp, Artificial
  Synthetic oligonucleotide
gttagctgatagaggaggttatgtgcctgtgtataagcaaggtagtcatgtagat

SEQ ID NO: 443608 - DNA, 55 bp, Artificial
  Synthetic oligonucleotide
gttagcttcggtatgtcagcccgattggttactgccgactcaccccttcccgacc

SEQ ID NO: 443609 - DNA, 54 bp, Artificial
  Synthetic oligonucleotide
gttaggaaacaggtagttgttgataatttgaactggtcgggatacagtgggtct

SEQ ID NO: 443610 - DNA, 54 bp, Artificial
  Synthetic oligonucleotide
gttaggaaaccctccgttgtaacttccaaagatgtcactagcttaataccgtgc

SEQ ID NO: 443611 - DNA, 54 bp, Artificial
  Synthetic oligonucleotide
gttaggaaaggtaagtaaaccaggcactcctggcctcgacgtcacaccccataa

SEQ ID NO: 443612 - DNA, 60 bp, Artificial
  Synthetic oligonucleotide
gttaggaaggtccaggtcaatgataccagcgaagctagggtgcatcatggctctcggata

SEQ ID NO: 443613 - DNA, 56 bp, Artificial
  Synthetic oligonucleotide
gttaggaatggcacaagaagctagtggacggactttaacggaggcctatagagagt

SEQ ID NO: 443614 - DNA, 55 bp, Artificial
  Synthetic oligonucleotide
gttaggaatttctttgctagaatggaaagcaagcctagaacagtcagaataacag

SEQ ID NO: 443615 - DNA, 57 bp, Artificial
  Synthetic oligonucleotide
gttaggaccatgtcttgtggtaacaaccctatgatgtagctaaggagtccaggttgg

SEQ ID NO: 443616 - DNA, 55 bp, Artificial
  Synthetic oligonucleotide
gttaggacctaccgcagaataactactcgtatatactaagactcttacgccgtta

SEQ ID NO: 443617 - DNA, 55 bp, Artificial
  Synthetic oligonucleotide
gttaggacgatttcatattcgccaattttccgatccggtgtcagaagggttagca

SEQ ID NO: 443618 - DNA, 56 bp, Artificial
  Synthetic oligonucleotide
gttaggactctgcacgtttctcgaagtttacttttcgatgacctgccgtagcctaa

SEQ ID NO: 443619 - DNA, 58 bp, Artificial
  Synthetic oligonucleotide
gttaggagaaatcaattgcggttaggcatgagagtgtctgccctgcaatctttgagtg

SEQ ID NO: 443620 - DNA, 58 bp, Artificial
  Synthetic oligonucleotide
gttaggagctaatgatgtctggagaccttctactctaacaaaacgtaaaggatggtgc

SEQ ID NO: 443621 - DNA, 60 bp, Artificial
  Synthetic oligonucleotide
gttaggagctggaattactcaaactcagcatttatatgttgtgttatacaccagtgttgc

SEQ ID NO: 443622 - DNA, 57 bp, Artificial
  Synthetic oligonucleotide
gttaggagtgatcacactagcgaagcgcataatctattattagggctgtgagcacta

SEQ ID NO: 443623 - DNA, 56 bp, Artificial
  Synthetic oligonucleotide
gttaggatcatcggtgatgaaaaactgggggatggtctctaagtactacttatccc

SEQ ID NO: 443624 - DNA, 59 bp, Artificial
  Synthetic oligonucleotide
gttaggatgcccgggcatgtctttggaaatgacgagctaatgacgaagctactaaatgt

SEQ ID NO: 443625 - DNA, 55 bp, Artificial
  Synthetic oligonucleotide
gttaggcactagtcccgagttgttaccgccaatgtactcgagctcgttccacgta

SEQ ID NO: 443626 - DNA, 60 bp, Artificial
  Synthetic oligonucleotide
gttaggcactcatgtaatatgggatataggtcttcaatctacaatatcaatggtggtacc

SEQ ID NO: 443627 - DNA, 60 bp, Artificial
  Synthetic oligonucleotide
gttaggcactcatgtggtgtgggatgttgggctccaatccagctgcgtgttatgcatccc

SEQ ID NO: 443628 - DNA, 55 bp, Artificial
  Synthetic oligonucleotide
gttaggcagaggcggcagaaacggaggccgtgggaatggtagcacatcggccgaa

SEQ ID NO: 443629 - DNA, 60 bp, Artificial
  Synthetic oligonucleotide
gttaggcaggatttagagcgacagttgaatgaactacgtcaagaatttaattcgctgtca

SEQ ID NO: 443630 - DNA, 52 bp, Artificial
  Synthetic oligonucleotide
gttaggcaggggtactcacctttgtcgtttcagacccttgccccgaacccag

SEQ ID NO: 443631 - DNA, 57 bp, Artificial
  Synthetic oligonucleotide
gttaggcatataccggtttgtcactccgggggagaggccgtctggcatgtttgacac

SEQ ID NO: 443632 - DNA, 60 bp, Artificial
  Synthetic oligonucleotide
gttaggcctccacaacgcacaccactccttcacaatcaggcacacaagctcggctaatca

SEQ ID NO: 443633 - DNA, 60 bp, Artificial
  Synthetic oligonucleotide
gttaggcctcgggagatgcaattgtgcctcatcgccacacccacgtgaccaatgagacca

SEQ ID NO: 443634 - DNA, 55 bp, Artificial
  Synthetic oligonucleotide
gttaggcgcagctaacagaacctggccctatcctagcacatggaacaatgacact

SEQ ID NO: 443635 - DNA, 57 bp, Artificial
  Synthetic oligonucleotide
gttaggcgtaaacaggttattgatcctgatgatgtgttcgttcctaattgtaattta

SEQ ID NO: 443636 - DNA, 58 bp, Artificial
  Synthetic oligonucleotide
gttaggcttatcccaccttacctttatactcatagacgatatacctcaactagctcca

SEQ ID NO: 443637 - DNA, 53 bp, Artificial
  Synthetic oligonucleotide
gttaggcttcggtcttagtgtttcaaactatgacgaagataacaagtctaaga

SEQ ID NO: 443638 - DNA, 59 bp, Artificial
  Synthetic oligonucleotide
gttagggacctaatcgacaccgctacagctctctacagggatgacttagagtcaccgga

SEQ ID NO: 443639 - DNA, 50 bp, Artificial
  Synthetic oligonucleotide
gttagggactaaaagtgtaaataggtgggttcttaggtccttccgttgta

SEQ ID NO: 443640 - DNA, 50 bp, Artificial
  Synthetic oligonucleotide
gttaggggacaattacactccaaaagtagtggggggaatagggggattca

SEQ ID NO: 443641 - DNA, 53 bp, Artificial
  Synthetic oligonucleotide
gttagggtggaaactctcaatgtcgaagaacccttggttcgtcgtttgtacag

SEQ ID NO: 443642 - DNA, 51 bp, Artificial
  Synthetic oligonucleotide
gttagggttctagaagacggcgtaaattacgcaacagggaaccttcctggt

SEQ ID NO: 443643 - DNA, 55 bp, Artificial
  Synthetic oligonucleotide
gttagggttttctcatgttctgattgggtgcacagagtttcttttgaggtaaaag

SEQ ID NO: 443644 - DNA, 59 bp, Artificial
  Synthetic oligonucleotide
gttaggtacaggtgaagagttaccagacccactgagccctggcgaacgtggcatgcaaa

SEQ ID NO: 443645 - DNA, 52 bp, Artificial
  Synthetic oligonucleotide
gttaggtatagtgctaaaacatcccaatttcctacgtacgttcgaacgggct

SEQ ID NO: 443646 - DNA, 55 bp, Artificial
  Synthetic oligonucleotide
gttaggtcatattagtacagattgttttcaaatgctctcgggaaacgggaaacag

SEQ ID NO: 443647 - DNA, 54 bp, Artificial
  Synthetic oligonucleotide
gttaggtcattagccgctaatttaaattccgtaacatgtaacggtggtgactac

SEQ ID NO: 443648 - DNA, 50 bp, Artificial
  Synthetic oligonucleotide
gttaggtctagggttcgtctaattatgtgcttatagtctcgtatgacctc

SEQ ID NO: 443649 - DNA, 60 bp, Artificial
  Synthetic oligonucleotide
gttaggtcttcaagaattatatctcacgccgacaaaagcattatcgattagcgaatatgt

SEQ ID NO: 443650 - DNA, 55 bp, Artificial
  Synthetic oligonucleotide
gttaggtgatgtgcaaaaccctaaccaggtgaagtggtggaagactggagacgct

SEQ ID NO: 443651 - DNA, 56 bp, Artificial
  Synthetic oligonucleotide
gttaggtggactgtatctcaccttgggacaaacctgtactctggtttacataatta

SEQ ID NO: 443652 - DNA, 53 bp, Artificial
  Synthetic oligonucleotide
gttaggttctagttttgttagaccgattgtcaattcaacaactggttttatgg

SEQ ID NO: 443653 - DNA, 58 bp, Artificial
  Synthetic oligonucleotide
gttaggtttaattcatatccagtctatgtatcatttaaggacacggaggattctgaac

SEQ ID NO: 443654 - DNA, 56 bp, Artificial
  Synthetic oligonucleotide
gttagtaaaaacacatcagagtgggataaatgacaatgataacattagatgtcatt

SEQ ID NO: 443655 - DNA, 50 bp, Artificial
  Synthetic oligonucleotide
gttagtaactataacttggctaccaaaaggatggacgaagcaatgcagca

SEQ ID NO: 443656 - DNA, 53 bp, Artificial
  Synthetic oligonucleotide
gttagtacaacgtggtcgtgggttgggggtaattctaatgacagaatagggcg

SEQ ID NO: 443657 - DNA, 55 bp, Artificial
  Synthetic oligonucleotide
gttagtacaagagagaacattgctgatttgtggaagataggtacagttgcagtga

SEQ ID NO: 443658 - DNA, 57 bp, Artificial
  Synthetic oligonucleotide
gttagtagaggggcgttcaaaacgtgtcatgacagacacagaagccgttaaggacaa

SEQ ID NO: 443659 - DNA, 60 bp, Artificial
  Synthetic oligonucleotide
gttagtagattcggcactcactacaagcgcgatggtactcgttgttccggtgatcctcac

SEQ ID NO: 443660 - DNA, 56 bp, Artificial
  Synthetic oligonucleotide
gttagtagccgtgttggataggtatctatctgagattgcaagcagtttatttttag

SEQ ID NO: 443661 - DNA, 57 bp, Artificial
  Synthetic oligonucleotide
gttagtagctatcatctaaaatagagtagctaggtactgctctatgcctcctccgtc

SEQ ID NO: 443662 - DNA, 55 bp, Artificial
  Synthetic oligonucleotide
gttagtaggttaggtcaaagggagggaatgattatgaggagtggcttacaagtag

SEQ ID NO: 443663 - DNA, 60 bp, Artificial
  Synthetic oligonucleotide
gttagtagtcgagtcgggcagcaacttgttgtgttagctattgtgtctgtgttaatagta

SEQ ID NO: 443664 - DNA, 54 bp, Artificial
  Synthetic oligonucleotide
gttagtataggcgggatctatgtacacatatagggttgaccctagccggtcaac

SEQ ID NO: 443665 - DNA, 55 bp, Artificial
  Synthetic oligonucleotide
gttagtatataaggaacctttttagactgttcgaggccacttctttggacttgca

SEQ ID NO: 443666 - DNA, 56 bp, Artificial
  Synthetic oligonucleotide
gttagtcaattgtgtgatttctttcttagattaggaagttttccgtggcgatagga

SEQ ID NO: 443667 - DNA, 57 bp, Artificial
  Synthetic oligonucleotide
gttagtcattggtggttgaaacctgcctaagacgtcctaggtctacgctgtgcgggc

SEQ ID NO: 443668 - DNA, 54 bp, Artificial
  Synthetic oligonucleotide
gttagtccggtctataaggtaaagccaactaataagtttgttgttgcactgtat

SEQ ID NO: 443669 - DNA, 55 bp, Artificial
  Synthetic oligonucleotide
gttagtcctagcccgaagcagcgggtaatagatttaagcccacgacttgaagcgc

SEQ ID NO: 443670 - DNA, 54 bp, Artificial
  Synthetic oligonucleotide
gttagtcctccccggaaacggaaataatgggagttgcaatgaaacagtcattag

SEQ ID NO: 443671 - DNA, 55 bp, Artificial
  Synthetic oligonucleotide
gttagtctcgaacgcagagtgttccgtgtaaagaacgctgcgggagagttagtag

SEQ ID NO: 443672 - DNA, 60 bp, Artificial
  Synthetic oligonucleotide
gttagtctttaacagtctactagaggtgaatgatctgatggcctctggaactcacccatt

SEQ ID NO: 443673 - DNA, 52 bp, Artificial
  Synthetic oligonucleotide
gttagtgaaagaggagagacgaaacggagggacccacggttccggagccttc

SEQ ID NO: 443674 - DNA, 55 bp, Artificial
  Synthetic oligonucleotide
gttagtgaatgaggagagttgaaacggaggtacccacggttccggagccttctga

SEQ ID NO: 443675 - DNA, 57 bp, Artificial
  Synthetic oligonucleotide
gttagtgacttaaattgaggaggagtagtaaggtctatagttgagagtataaatatg

SEQ ID NO: 443676 - DNA, 59 bp, Artificial
  Synthetic oligonucleotide
gttagtgagagtttgtcggcaagtgacaaattatttatccttgcgtccgatatatccaa

SEQ ID NO: 443677 - DNA, 56 bp, Artificial
  Synthetic oligonucleotide
gttagtgagatcggagctagaaaaacaacgaatgtcacagttaatccaggtccgtt

SEQ ID NO: 443678 - DNA, 53 bp, Artificial
  Synthetic oligonucleotide
gttagtgcaggctatccaacaacaattacgcgaattggcaaaggtaaggtgca

SEQ ID NO: 443679 - DNA, 55 bp, Artificial
  Synthetic oligonucleotide
gttagtgcggaaagccgccgggggtcattatatccaaatggcccttgtaaagctg

SEQ ID NO: 443680 - DNA, 60 bp, Artificial
  Synthetic oligonucleotide
gttagtgcgtatttatatgtgctttcctgcagctaatgcatcagtggtggaaatcaagga

SEQ ID NO: 443681 - DNA, 56 bp, Artificial
  Synthetic oligonucleotide
gttagtggctaattatgttcaaagtgatgtaaacgtcgaagtagcttccggtttca

SEQ ID NO: 443682 - DNA, 59 bp, Artificial
  Synthetic oligonucleotide
gttagtgggtctttggtatccactgatgcacaattatttaatcggccatattggttaca

SEQ ID NO: 443683 - DNA, 60 bp, Artificial
  Synthetic oligonucleotide
gttagtggtccttacgagatggagtcttttgatacatctgatgtcaatctctttgggcca

SEQ ID NO: 443684 - DNA, 58 bp, Artificial
  Synthetic oligonucleotide
gttagtggttgtgagctgaataaacacaccctggagatcgttcggtctctgaagcctg

SEQ ID NO: 443685 - DNA, 55 bp, Artificial
  Synthetic oligonucleotide
gttagtgtcagtgtccactgcacttgttcaggttgtgtttcttgcagtctggtct

SEQ ID NO: 443686 - DNA, 55 bp, Artificial
  Synthetic oligonucleotide
gttagtgtggaagtctgacagccacctagcatttcagcattatgcccgagagctg

SEQ ID NO: 443687 - DNA, 55 bp, Artificial
  Synthetic oligonucleotide
gttagtgtggggtgtgaaaggtatagatgttggtaggggacagccattaggcctc

SEQ ID NO: 443688 - DNA, 51 bp, Artificial
  Synthetic oligonucleotide
gttagtgtgggtgatagttttaaagtttatggtttatacggttctcgaaaa

SEQ ID NO: 443689 - DNA, 54 bp, Artificial
  Synthetic oligonucleotide
gttagttcgatcaaatgggttcgatctcgaacgattttcgccaaggggcggaac

SEQ ID NO: 443690 - DNA, 56 bp, Artificial
  Synthetic oligonucleotide
gttagttgacaacgagagttgtttggtaaatactcttcgagttccgatttcagcat

SEQ ID NO: 443691 - DNA, 60 bp, Artificial
  Synthetic oligonucleotide
gttagttgcagattggcatgattgcagacctcagaaatcatctggtggccatatcaatgt

SEQ ID NO: 443692 - DNA, 55 bp, Artificial
  Synthetic oligonucleotide
gttagttgcgacgggtacgtcgttaaaagaatagctatcagtccaggcctgtatg

SEQ ID NO: 443693 - DNA, 51 bp, Artificial
  Synthetic oligonucleotide
gttagttggaaaatatactaatcacctcgctttgagtttctacaaacagca

SEQ ID NO: 443694 - DNA, 57 bp, Artificial
  Synthetic oligonucleotide
gttagttggatcagtaattaatttagcattccaacttatattggctattattcgcgg

SEQ ID NO: 443695 - DNA, 55 bp, Artificial
  Synthetic oligonucleotide
gttagttggctagtcccagctgttggcatgagggctatgaactgagcgttgtatg

SEQ ID NO: 443696 - DNA, 59 bp, Artificial
  Synthetic oligonucleotide
gttagttgtccaggagtgccgtagtcctgtcggaagctttagtgtgagcctctcacgaa

SEQ ID NO: 443697 - DNA, 57 bp, Artificial
  Synthetic oligonucleotide
gttagttgtggcagtgctactatttgctatccatactgtccaaaaaagtaccttgtt

SEQ ID NO: 443698 - DNA, 55 bp, Artificial
  Synthetic oligonucleotide
gttagtttaaaaccgtctggaacaacaaagggcagaccaggacacaatatgcctc

SEQ ID NO: 443699 - DNA, 50 bp, Artificial
  Synthetic oligonucleotide
gttagtttacaatggacaaatatttaacccttggggccccaagtagttta

SEQ ID NO: 443700 - DNA, 59 bp, Artificial
  Synthetic oligonucleotide
gttagtttattattgttggatgtcggatactgtatccaaagcatccacatttgtatcgt

SEQ ID NO: 443701 - DNA, 53 bp, Artificial
  Synthetic oligonucleotide
gttagttttacccagttccatccgggattccgtacgacaagatctagagttag

SEQ ID NO: 443702 - DNA, 55 bp, Artificial
  Synthetic oligonucleotide
gttataaacgtcagcccaggatccaaaatttgaatgggtcttgccaccgctaagc

SEQ ID NO: 443703 - DNA, 60 bp, Artificial
  Synthetic oligonucleotide
gttataaatttcttgcatattcacgatgtcagtattcgattattcacttcagaccaaagt

SEQ ID NO: 443704 - DNA, 55 bp, Artificial
  Synthetic oligonucleotide
gttataacaccgtccgctttagatgtgttgattcgggcgtatgatagaaagcaca

SEQ ID NO: 443705 - DNA, 60 bp, Artificial
  Synthetic oligonucleotide
gttataacagcaataagaggagttaggcatatggcccatagaccaggaaatcccatgctg

SEQ ID NO: 443706 - DNA, 59 bp, Artificial
  Synthetic oligonucleotide
gttataacccggcgacaccagttgtgcgcctgcgttgtagtcactgtgacttctatggt

SEQ ID NO: 443707 - DNA, 53 bp, Artificial
  Synthetic oligonucleotide
gttataacgtgtcgcgtgaaaacacctcctcgcacggaaaccgtggggacgac

SEQ ID NO: 443708 - DNA, 54 bp, Artificial
  Synthetic oligonucleotide
gttataagattctttgtcaggaattcgaagctactaacgggtttaagtaagagc

SEQ ID NO: 443709 - DNA, 55 bp, Artificial
  Synthetic oligonucleotide
gttataagtgctagtgcgtataacggcaatgacacagagggattactaaaagaga

SEQ ID NO: 443710 - DNA, 58 bp, Artificial
  Synthetic oligonucleotide
gttataatactaatgataattcgagaggaatgaattacgagacgactatgtttaataa

SEQ ID NO: 443711 - DNA, 54 bp, Artificial
  Synthetic oligonucleotide
gttataatatgagggtcctaggttttttacgggtgtgcatatacctatataaat

SEQ ID NO: 443712 - DNA, 56 bp, Artificial
  Synthetic oligonucleotide
gttataattcacaaacaactagagctagactaaatggtcttgggtttaatgttgtc

SEQ ID NO: 443713 - DNA, 53 bp, Artificial
  Synthetic oligonucleotide
gttatacaaccgaggaacgtaagatacaacgttgaggttggtcgttatctacg

SEQ ID NO: 443714 - DNA, 55 bp, Artificial
  Synthetic oligonucleotide
gttatacaccaaaatggaatttgaaccatttcagtctcttgtccctaaggcaacc

SEQ ID NO: 443715 - DNA, 60 bp, Artificial
  Synthetic oligonucleotide
gttatacatgagatggccccaccgctcaagtctccaagcgctgaggcatgtggttacagt

SEQ ID NO: 443716 - DNA, 55 bp, Artificial
  Synthetic oligonucleotide
gttatacatgctccgagaagacggtttacgagtgtaagtacgcttcttatacggt

SEQ ID NO: 443717 - DNA, 55 bp, Artificial
  Synthetic oligonucleotide
gttataccaagcactgttgctgtaaactttagggcttagatctaaatgcccacac

SEQ ID NO: 443718 - DNA, 55 bp, Artificial
  Synthetic oligonucleotide
gttataccacaggggagaaaatttgcacaattaatactcatgcctttggtgcatg

SEQ ID NO: 443719 - DNA, 60 bp, Artificial
  Synthetic oligonucleotide
gttataccagattcgcaacaagagatgtgtacagagtatataaggagaggattgccagcc

SEQ ID NO: 443720 - DNA, 60 bp, Artificial
  Synthetic oligonucleotide
gttataccaggcatcattattgtagaccttcgggctaaggtctagatgtccacacaaata

SEQ ID NO: 443721 - DNA, 55 bp, Artificial
  Synthetic oligonucleotide
gttataccaggcctcgttactgtacacctttggactaaggtctagatgcccacac

SEQ ID NO: 443722 - DNA, 59 bp, Artificial
  Synthetic oligonucleotide
gttatacctaggaggaactgtgtcttgcgcttcctcagtgcctgcaaacgccaaaattg

SEQ ID NO: 443723 - DNA, 52 bp, Artificial
  Synthetic oligonucleotide
gttatacctgcgggaggcttacctactgagccttttaccccgttagagcctc

SEQ ID NO: 443724 - DNA, 53 bp, Artificial
  Synthetic oligonucleotide
gttataccttagggaaaagcagttctgtttaggcggaaccaatactctggttc

SEQ ID NO: 443725 - DNA, 60 bp, Artificial
  Synthetic oligonucleotide
gttatacgaaaagcttcattcggaatatgcaattcgatcgatcgatacttatgatggacg

SEQ ID NO: 443726 - DNA, 60 bp, Artificial
  Synthetic oligonucleotide
gttatacgtatatgctatcggataatatgtatgtagcaaatgctagtggtgtgttatcaa

SEQ ID NO: 443727 - DNA, 55 bp, Artificial
  Synthetic oligonucleotide
gttatactccacatcgtttgaatagacttttgaattgaaatcaaggtgaccgctc

SEQ ID NO: 443728 - DNA, 55 bp, Artificial
  Synthetic oligonucleotide
gttatactccccgttccacaacattcgctcgtgaccggagatcatataattccgg

SEQ ID NO: 443729 - DNA, 55 bp, Artificial
  Synthetic oligonucleotide
gttatactcggcatcgttcgagaaaaccctagaattgaaatcaaggtgcccactg

SEQ ID NO: 443730 - DNA, 56 bp, Artificial
  Synthetic oligonucleotide
gttatacttacacttcgttggatgttcgaccgactagaactgagaaggacaagagt

SEQ ID NO: 443731 - DNA, 55 bp, Artificial
  Synthetic oligonucleotide
gttatagaaggatacatccaaatcaaactcactgccgaaatattcctcgggaccc

SEQ ID NO: 443732 - DNA, 60 bp, Artificial
  Synthetic oligonucleotide
gttatagagagatgctgtcgggcataccaagcagccagaactaatggcccgatggcaacg

SEQ ID NO: 443733 - DNA, 60 bp, Artificial
  Synthetic oligonucleotide
gttatagccacaaccaataagatggattttaactgcatggtgttaactgaccctggtgca

SEQ ID NO: 443734 - DNA, 60 bp, Artificial
  Synthetic oligonucleotide
gttataggaaggtcatgtcactgttaccagaaatcatagtcaggatgacacagcaaatgt

SEQ ID NO: 443735 - DNA, 55 bp, Artificial
  Synthetic oligonucleotide
gttataggatggagggaactgtaagatcttccattgtgtcggccaaccaaccccg

SEQ ID NO: 443736 - DNA, 50 bp, Artificial
  Synthetic oligonucleotide
gttatagggttttctcttggttggtgtgtttgttcatggtgtgtttaatg

SEQ ID NO: 443737 - DNA, 55 bp, Artificial
  Synthetic oligonucleotide
gttataggtccaatcttcatatcgttgtagaatctcgaaccctcgacacgtgatt

SEQ ID NO: 443738 - DNA, 53 bp, Artificial
  Synthetic oligonucleotide
gttataggtggttacacattctatactaccaatcatgaacagttctacccctt

SEQ ID NO: 443739 - DNA, 60 bp, Artificial
  Synthetic oligonucleotide
gttatagtaccacatggtcctgggtgcatgcagacggtaatgagagaataggtagagcta

SEQ ID NO: 443740 - DNA, 51 bp, Artificial
  Synthetic oligonucleotide
gttatagtagacgtcgtctttatttgctttggaccccccggaaactttgta

SEQ ID NO: 443741 - DNA, 55 bp, Artificial
  Synthetic oligonucleotide
gttatagtccggccacatgggaaactatgtggactaaccgcgtttatagaagaca

SEQ ID NO: 443742 - DNA, 55 bp, Artificial
  Synthetic oligonucleotide
gttatagtcgtacttgcaccgctcattaaagctcaaaattacggaattaatttac

SEQ ID NO: 443743 - DNA, 58 bp, Artificial
  Synthetic oligonucleotide
gttatataatgtgtgcatccgtacacaattattgcagtcggttgggtgttaagcggtt

SEQ ID NO: 443744 - DNA, 58 bp, Artificial
  Synthetic oligonucleotide
gttatatacatgcccaattcttgaatccatcgtcgatgagataaaaaccgccttaggg

SEQ ID NO: 443745 - DNA, 60 bp, Artificial
  Synthetic oligonucleotide
gttatatatagtgggcatttaataagggcgatggctggatctgcttctatcgatgacggt

SEQ ID NO: 443746 - DNA, 60 bp, Artificial
  Synthetic oligonucleotide
gttatatcgtttatcgcatgagaattggagtattcaaaggtatggtaatgacgcggaatg

SEQ ID NO: 443747 - DNA, 57 bp, Artificial
  Synthetic oligonucleotide
gttatatcttcacaatgtgggtgttcttattggttcttgaatctatactatgggctg

SEQ ID NO: 443748 - DNA, 56 bp, Artificial
  Synthetic oligonucleotide
gttatattgaaatgaagaaaagaacctccctcgctggtatgaagaagttaattcca

SEQ ID NO: 443749 - DNA, 54 bp, Artificial
  Synthetic oligonucleotide
gttatcaaaaacctcattgtgtatcacttgagaagacgaattgacattggcacg

SEQ ID NO: 443750 - DNA, 54 bp, Artificial
  Synthetic oligonucleotide
gttatcaaacgtaaaggtgacgaccactatgcacaagcaagtgtctacgcctat

SEQ ID NO: 443751 - DNA, 58 bp, Artificial
  Synthetic oligonucleotide
gttatcaacttattttaaattatataacatgttctatagaaatcatatcacgtttgga

SEQ ID NO: 443752 - DNA, 52 bp, Artificial
  Synthetic oligonucleotide
gttatcaagtgttaaggaaatggcatgcgactgtgactggagggacttatgc

SEQ ID NO: 443753 - DNA, 58 bp, Artificial
  Synthetic oligonucleotide
gttatcaagttaagtctatatgttaggtttgattcatatatgttatcaagttaagcct

SEQ ID NO: 443754 - DNA, 50 bp, Artificial
  Synthetic oligonucleotide
gttatcaatgtcttcagcatcaaatggagagtctagacagcttaaattcg

SEQ ID NO: 443755 - DNA, 57 bp, Artificial
  Synthetic oligonucleotide
gttatcaattcagaccatcactgggtatggacgtgcttgggttaaaaacacagggga

SEQ ID NO: 443756 - DNA, 59 bp, Artificial
  Synthetic oligonucleotide
gttatcacaggccttaactacatgtgacttagtggggtgatcaggagtagtacgaggct

SEQ ID NO: 443757 - DNA, 60 bp, Artificial
  Synthetic oligonucleotide
gttatcacaggctaggaccggcctgataaaggtccgacttgatgtgcagcttcttaggtg

SEQ ID NO: 443758 - DNA, 55 bp, Artificial
  Synthetic oligonucleotide
gttatcaccccaccaaaatttgactggaatctttacgctcttaacgctaacaaga

SEQ ID NO: 443759 - DNA, 56 bp, Artificial
  Synthetic oligonucleotide
gttatcagctattccctttaaccggacccccttccgatgacacttctgaggagatg

SEQ ID NO: 443760 - DNA, 50 bp, Artificial
  Synthetic oligonucleotide
gttatcagtcaagcacagagtattctcggcggcagatataaatcacgtta

SEQ ID NO: 443761 - DNA, 60 bp, Artificial
  Synthetic oligonucleotide
gttatcatcaaagcagctcatacggccgattatttagatatactacattaccaactgtac

SEQ ID NO: 443762 - DNA, 60 bp, Artificial
  Synthetic oligonucleotide
gttatcatcatcaaaatgagcagggatcaggatatgcagccgaccgaaagagcacacaaa

SEQ ID NO: 443763 - DNA, 57 bp, Artificial
  Synthetic oligonucleotide
gttatcatcatcagaatgaacaaggatctggatatgctgcagacaaaaaaagcacac

SEQ ID NO: 443764 - DNA, 60 bp, Artificial
  Synthetic oligonucleotide
gttatcatttcttactgacattttggcagcgcagcagaaatggctccgcaggtgaataaa

SEQ ID NO: 443765 - DNA, 57 bp, Artificial
  Synthetic oligonucleotide
gttatccaacgcgtgacagtttacgttgttagatttgcatgttcaaatctaaaataa

SEQ ID NO: 443766 - DNA, 57 bp, Artificial
  Synthetic oligonucleotide
gttatccaagaagtacaccgcccttgtcaagatttatgaacagtcttgcaaggtagg

SEQ ID NO: 443767 - DNA, 60 bp, Artificial
  Synthetic oligonucleotide
gttatccacgctggtattatgacgtataagatcattggtgtacctgggatatgcccaccc

SEQ ID NO: 443768 - DNA, 60 bp, Artificial
  Synthetic oligonucleotide
gttatccacggtgtacgcccatcgcacattgcacacgcagtgccgctagctgtcgcggcc

SEQ ID NO: 443769 - DNA, 58 bp, Artificial
  Synthetic oligonucleotide
gttatccagaacgcaaagagccagctacttgagttcaataacatacgaacgccgaaaa

SEQ ID NO: 443770 - DNA, 56 bp, Artificial
  Synthetic oligonucleotide
gttatccagactattcaaacacaaaaggtttgtacggtgttgccccagctaatgga

SEQ ID NO: 443771 - DNA, 56 bp, Artificial
  Synthetic oligonucleotide
gttatccattaggaataatcactgggataactccccgtcgcctaacatgtacgggc

SEQ ID NO: 443772 - DNA, 55 bp, Artificial
  Synthetic oligonucleotide
gttatccccgatatccagacgtcagatgtgtttgcagagacaactggaaaggttc

SEQ ID NO: 443773 - DNA, 58 bp, Artificial
  Synthetic oligonucleotide
gttatcccgaaggtataaacgccactcgttgcttgaagcgcagtgatgtactcccctg

SEQ ID NO: 443774 - DNA, 55 bp, Artificial
  Synthetic oligonucleotide
gttatcccgcaaacgcagctatggtctggtgcgagtgcgtacccggacccaaccc

SEQ ID NO: 443775 - DNA, 60 bp, Artificial
  Synthetic oligonucleotide
gttatccgatgcgttgccgcgatgacagcacacaggtatcttagaagaccgagtttgtac

SEQ ID NO: 443776 - DNA, 50 bp, Artificial
  Synthetic oligonucleotide
gttatccgcaaagtgcctacgaaaagcctagtaacactttgaaaacccat

SEQ ID NO: 443777 - DNA, 60 bp, Artificial
  Synthetic oligonucleotide
gttatccgccagttagaacaagactcgctccgatccagttctcgaaagattgcaagcctc

SEQ ID NO: 443778 - DNA, 57 bp, Artificial
  Synthetic oligonucleotide
gttatccggccagttacttcgagaaacctagtaacatcatggaggttgcgcagtgtt

SEQ ID NO: 443779 - DNA, 57 bp, Artificial
  Synthetic oligonucleotide
gttatccgtcagtgcggtacacgtggtccaattaaattgcatctggcgagtctagtt

SEQ ID NO: 443780 - DNA, 51 bp, Artificial
  Synthetic oligonucleotide
gttatcctggccacggcgtctaagagcacagtggagattgccccgggccac

SEQ ID NO: 443781 - DNA, 55 bp, Artificial
  Synthetic oligonucleotide
gttatcctttaatggacctaaatccgcatctcaatctagttatctgggcttcatc

SEQ ID NO: 443782 - DNA, 58 bp, Artificial
  Synthetic oligonucleotide
gttatcgataactactgaatgtactcttgctggtccattcgatggcccgggaaaccca

SEQ ID NO: 443783 - DNA, 55 bp, Artificial
  Synthetic oligonucleotide
gttatcgatgaacgattagggatcaacgttattactcacgtaactgcgtacgagt

SEQ ID NO: 443784 - DNA, 56 bp, Artificial
  Synthetic oligonucleotide
gttatcgattcaagaatgggtataacgaagtaagaatagaaagcgcttatgtgacc

SEQ ID NO: 443785 - DNA, 55 bp, Artificial
  Synthetic oligonucleotide
gttatcgcggtggggttatcgcgctgataatggtcgcacacatacgtacctaaca

SEQ ID NO: 443786 - DNA, 55 bp, Artificial
  Synthetic oligonucleotide
gttatcgtcacatctacttcgagccggtaattcgccatggcagctgactcagttc

SEQ ID NO: 443787 - DNA, 55 bp, Artificial
  Synthetic oligonucleotide
gttatcgtccctaatcccgttcgcgtggtctattagcccattaggccactgcccg

SEQ ID NO: 443788 - DNA, 58 bp, Artificial
  Synthetic oligonucleotide
gttatcgtcttattggtacggttaaacggtatgtaactacagatgaagcgcatgtaca

SEQ ID NO: 443789 - DNA, 60 bp, Artificial
  Synthetic oligonucleotide
gttatcgtgcgcactgacgtcgagcgcctgacggcgctctctttcgctaaaaataacatc

SEQ ID NO: 443790 - DNA, 60 bp, Artificial
  Synthetic oligonucleotide
gttatctaaatacatcaacacatgttccctaaataaattcaagaaatgcgagttctgatg

SEQ ID NO: 443791 - DNA, 54 bp, Artificial
  Synthetic oligonucleotide
gttatctaagcgtgcaactaagcgtatcttgcatgaactttgctatggcaacct

SEQ ID NO: 443792 - DNA, 60 bp, Artificial
  Synthetic oligonucleotide
gttatctacacacaagtgttagtaccagtagctctgaacatagtaggaagataacagcgg

SEQ ID NO: 443793 - DNA, 60 bp, Artificial
  Synthetic oligonucleotide
gttatctagatccagtcacaggtgcgactctggacgaatctccaatgacagacttgaaca

SEQ ID NO: 443794 - DNA, 58 bp, Artificial
  Synthetic oligonucleotide
gttatctatcatgctaatgtctattcgactgacattaacaagcatggacactccaaaa

SEQ ID NO: 443795 - DNA, 55 bp, Artificial
  Synthetic oligonucleotide
gttatctatgcaaccgcatgtgacttgcaatatccgttcggctcaccacaaactg

SEQ ID NO: 443796 - DNA, 52 bp, Artificial
  Synthetic oligonucleotide
gttatctattggcaaattggttatccctttggacttccaacgtatccgcgat

SEQ ID NO: 443797 - DNA, 60 bp, Artificial
  Synthetic oligonucleotide
gttatctcctaagaggtgctttgacgcgtgtgccgtatttcgtcagagctcacgctctgc

SEQ ID NO: 443798 - DNA, 60 bp, Artificial
  Synthetic oligonucleotide
gttatctcctcgacacatccgcgtctgcgttggttttgatccgctgttttcgcgctggac

SEQ ID NO: 443799 - DNA, 58 bp, Artificial
  Synthetic oligonucleotide
gttatctgcactaacgggcaccgaatttaagcctagatcagcactaaaatgcaagggt

SEQ ID NO: 443800 - DNA, 51 bp, Artificial
  Synthetic oligonucleotide
gttatcttaattaagagcataattatactgatttgtctctcgttgatagag

SEQ ID NO: 443801 - DNA, 58 bp, Artificial
  Synthetic oligonucleotide
gttatcttatgggtggcagtggttccttgtttgctgttcccccactcactgattatgg

SEQ ID NO: 443802 - DNA, 56 bp, Artificial
  Synthetic oligonucleotide
gttatcttgtccttgcgacgtagacggaagtagtaaatacggctactcctcctgtg

SEQ ID NO: 443803 - DNA, 53 bp, Artificial
  Synthetic oligonucleotide
gttatctttcccgcaatgaataaggtctttctgtttcccccagagggtcccaa

SEQ ID NO: 443804 - DNA, 55 bp, Artificial
  Synthetic oligonucleotide
gttatctttgtggcgaggaacgtcacttcgcacgggaatgtccaaatgaccggcg

SEQ ID NO: 443805 - DNA, 60 bp, Artificial
  Synthetic oligonucleotide
gttatgaacctgggttcagctcgttcacgtgagtggcttaacgagctacctagtgcgaca

SEQ ID NO: 443806 - DNA, 60 bp, Artificial
  Synthetic oligonucleotide
gttatgaacgattattggattcatagtttctcgttgtgacaccgtgttgccattagcgag

SEQ ID NO: 443807 - DNA, 53 bp, Artificial
  Synthetic oligonucleotide
gttatgaagaccagcctagtttgcagttggaaggtgctaatgtgatgtctacg

SEQ ID NO: 443808 - DNA, 57 bp, Artificial
  Synthetic oligonucleotide
gttatgaagccacttgtgtccacatcagttcaccttgactcagttggtgtcacggtg

SEQ ID NO: 443809 - DNA, 55 bp, Artificial
  Synthetic oligonucleotide
gttatgaatcccagagtattagaagactggaatctagcttttgttccaccacctc

SEQ ID NO: 443810 - DNA, 60 bp, Artificial
  Synthetic oligonucleotide
gttatgaatgatatgaagattacaggtaagagacctatcgagtacattgaagagtgctgt

SEQ ID NO: 443811 - DNA, 60 bp, Artificial
  Synthetic oligonucleotide
gttatgaattcattggatcaaccctcttgaaagacctgctctggcgcgagctaaagcgca

SEQ ID NO: 443812 - DNA, 60 bp, Artificial
  Synthetic oligonucleotide
gttatgacaacgagccaagcaccggtactgtgaagaatgatatcagagacaggtttcaag

SEQ ID NO: 443813 - DNA, 55 bp, Artificial
  Synthetic oligonucleotide
gttatgacactagacagtttgagaagatgctgtttgctggtgatgattcgctagc

SEQ ID NO: 443814 - DNA, 58 bp, Artificial
  Synthetic oligonucleotide
gttatgacgaaccttctcgtcattgtacagtgttacttcgtagactttcatgttacga

SEQ ID NO: 443815 - DNA, 60 bp, Artificial
  Synthetic oligonucleotide
gttatgacgcaagccgtatgcctcctagtgaagaccgagtgttctcacagcacaatggcg

SEQ ID NO: 443816 - DNA, 60 bp, Artificial
  Synthetic oligonucleotide
gttatgactccgccgctaccacatctgtgctcgagtcttatgttgcagcagcgtcacagg

SEQ ID NO: 443817 - DNA, 56 bp, Artificial
  Synthetic oligonucleotide
gttatgacttccactggtcttatttgttctagttactattcatgtccagcaaagca

SEQ ID NO: 443818 - DNA, 60 bp, Artificial
  Synthetic oligonucleotide
gttatgagactttcaaggtcattggtggttggaccacagctaacgccaaatcacaggtga

SEQ ID NO: 443819 - DNA, 60 bp, Artificial
  Synthetic oligonucleotide
gttatgataggtggtcaatgcgaaccagcctatgatcaggccaagtgggccgaaacgtgc

SEQ ID NO: 443820 - DNA, 57 bp, Artificial
  Synthetic oligonucleotide
gttatgatcctgtaatactctgcttatagattgtaagggttaaggcaatgcttactg

SEQ ID NO: 443821 - DNA, 53 bp, Artificial
  Synthetic oligonucleotide
gttatgatgaatggtgacctaaacgggtttatagtctcgttgctaataccctg

SEQ ID NO: 443822 - DNA, 60 bp, Artificial
  Synthetic oligonucleotide
gttatgcaaagcgacagccggtacatcattgtaatgacggcaataatggagaacggtatc

SEQ ID NO: 443823 - DNA, 55 bp, Artificial
  Synthetic oligonucleotide
gttatgcacaggttctcagctaaggtcacaggtggacagtatgccagcaacgagc

SEQ ID NO: 443824 - DNA, 55 bp, Artificial
  Synthetic oligonucleotide
gttatgcatgtgcctttcttaatgttgttcagtatcatagggcaaactgccaatc

SEQ ID NO: 443825 - DNA, 60 bp, Artificial
  Synthetic oligonucleotide
gttatgccaacccgctttagtgtgttttcttgagcctctcatgtcttccttcattggatg

SEQ ID NO: 443826 - DNA, 55 bp, Artificial
  Synthetic oligonucleotide
gttatgcccatcttaacaagaaaattcagagttgtacccttaccttacttgaaga

SEQ ID NO: 443827 - DNA, 55 bp, Artificial
  Synthetic oligonucleotide
gttatgccgtgtgtacgaccccacaattctttacgcacccattgattcgggcggg

SEQ ID NO: 443828 - DNA, 56 bp, Artificial
  Synthetic oligonucleotide
gttatgcgaacctatggaagttttccaacacgcctcacaatcccgtgtgtcccgtg

SEQ ID NO: 443829 - DNA, 60 bp, Artificial
  Synthetic oligonucleotide
gttatgcgcgtggatgaaaagagacaacagagtgtactggtatcaaggagcgacgccgaa

SEQ ID NO: 443830 - DNA, 55 bp, Artificial
  Synthetic oligonucleotide
gttatgcgtgttacgaaaattgatttcggcgaacttacgtctaaccaaatcaagc

SEQ ID NO: 443831 - DNA, 55 bp, Artificial
  Synthetic oligonucleotide
gttatgctgtgcttttagggttgaccctgggagaaacggtccatgggagtccacc

SEQ ID NO: 443832 - DNA, 60 bp, Artificial
  Synthetic oligonucleotide
gttatgcttcagacacttcatccatgaagaaccgtgagattgagaacataattgctgagc

SEQ ID NO: 443833 - DNA, 59 bp, Artificial
  Synthetic oligonucleotide
gttatggaagaatgaatcgcaagttgtggtgatactgacaacggaacatcaaaacgaaa

SEQ ID NO: 443834 - DNA, 54 bp, Artificial
  Synthetic oligonucleotide
gttatggaatatcttggcctcccaagggacttgatagaggattacaaattcatt

SEQ ID NO: 443835 - DNA, 55 bp, Artificial
  Synthetic oligonucleotide
gttatggacacaatcagaagataacttgtgtatgcagggataactggcagggcgc

SEQ ID NO: 443836 - DNA, 60 bp, Artificial
  Synthetic oligonucleotide
gttatggagttattaggtatcgctctaaatagatataatgctatgtcattaaggggtgta

SEQ ID NO: 443837 - DNA, 55 bp, Artificial
  Synthetic oligonucleotide
gttatggatatgacgatctgatggttgaaattgagcggtatgcagttttctgggc

SEQ ID NO: 443838 - DNA, 57 bp, Artificial
  Synthetic oligonucleotide
gttatggatatgctcctcgtgcagatgggacggtgcctgattggaacaatctaggca

SEQ ID NO: 443839 - DNA, 53 bp, Artificial
  Synthetic oligonucleotide
gttatggctctgcctcagttaactcaagataaggctgaggtgaagcagtatat

SEQ ID NO: 443840 - DNA, 54 bp, Artificial
  Synthetic oligonucleotide
gttatggggagtatgtctttattaagtacgagggttgtttaattacatggacag

SEQ ID NO: 443841 - DNA, 57 bp, Artificial
  Synthetic oligonucleotide
gttatggtatacgtctttggatagatcgctagacacggttccggaattggctccaac

SEQ ID NO: 443842 - DNA, 58 bp, Artificial
  Synthetic oligonucleotide
gttatggtcgaatttccaaaagttctgtggagaacaagataatcctggagattccaca

SEQ ID NO: 443843 - DNA, 60 bp, Artificial
  Synthetic oligonucleotide
gttatggtgagtggccttcctactgctcggattctgacgctacagcagtggataaaccaa

SEQ ID NO: 443844 - DNA, 56 bp, Artificial
  Synthetic oligonucleotide
gttatggtgataccactactgaaggaggaacctttggacaccgggccagagcttta

SEQ ID NO: 443845 - DNA, 58 bp, Artificial
  Synthetic oligonucleotide
gttatggtgcacagagtgtaacacttgtgagagggcaaaacacagttaaaatttctgg

SEQ ID NO: 443846 - DNA, 60 bp, Artificial
  Synthetic oligonucleotide
gttatggtgcatgtactaagtatgaatacccctggcatacagcgaaatgtcactttgaaa

SEQ ID NO: 443847 - DNA, 55 bp, Artificial
  Synthetic oligonucleotide
gttatggtttatggaggtgactctgtgggtcgataaattgttcaatagttggcgt

SEQ ID NO: 443848 - DNA, 55 bp, Artificial
  Synthetic oligonucleotide
gttatgtaacccaatggatataacgttgtattattatcagcagacagatgaggcg

SEQ ID NO: 443849 - DNA, 55 bp, Artificial
  Synthetic oligonucleotide
gttatgtcactccttttgctatcaatgccgatcttagacatgcttcacaaatgtc

SEQ ID NO: 443850 - DNA, 55 bp, Artificial
  Synthetic oligonucleotide
gttatgtcgttagttatggggatgactgtgtcctgtcagtgccagaggtgcgcga

SEQ ID NO: 443851 - DNA, 50 bp, Artificial
  Synthetic oligonucleotide
gttatgtggactttgactcgctactgcgtcggggctagtagctcccagta

SEQ ID NO: 443852 - DNA, 53 bp, Artificial
  Synthetic oligonucleotide
gttatgtggcatacttgctcctgccgttattttatccagtgacgtggttttac

SEQ ID NO: 443853 - DNA, 55 bp, Artificial
  Synthetic oligonucleotide
gttatgtgtatggaataataaaacgcctcatgcgattgccgcaattagtatggca

SEQ ID NO: 443854 - DNA, 56 bp, Artificial
  Synthetic oligonucleotide
gttatgtgtgctcaggccttgttggcgacacacccagaaacaacgatgaatctagc

SEQ ID NO: 443855 - DNA, 55 bp, Artificial
  Synthetic oligonucleotide
gttatgttcgagtgaacactttcagtcctgattttccggttaccaaacgtcttga

SEQ ID NO: 443856 - DNA, 56 bp, Artificial
  Synthetic oligonucleotide
gttatgttctggctagttagggataggagacccagtggaacggcaatggattttgg

SEQ ID NO: 443857 - DNA, 55 bp, Artificial
  Synthetic oligonucleotide
gttatgttctggttggtcagggatcgtagaccgtatagcacgcccatggatttcg

SEQ ID NO: 443858 - DNA, 60 bp, Artificial
  Synthetic oligonucleotide
gttatgttgcgtcagtagccgcaccattgcgattaaatccaaccactagggtactcgatc

SEQ ID NO: 443859 - DNA, 56 bp, Artificial
  Synthetic oligonucleotide
gttatgtttttccttgttagagatcgtaggcctgttgataagcctcaagattttgg

SEQ ID NO: 443860 - DNA, 52 bp, Artificial
  Synthetic oligonucleotide
gttatgtttttcttagttcgtgatcggagaccgtttgggactccccaagatt

SEQ ID NO: 443861 - DNA, 55 bp, Artificial
  Synthetic oligonucleotide
gttattaaactcggaaaaacatagtgatgggttgtttgattaccatgtacctgac

SEQ ID NO: 443862 - DNA, 55 bp, Artificial
  Synthetic oligonucleotide
gttattaacaactgcaccggagtaatgctccattattcagctttgtgttgcgaat

SEQ ID NO: 443863 - DNA, 56 bp, Artificial
  Synthetic oligonucleotide
gttattaacgccatatatctaagtggctttggaagagaaacgccatcaatgtggat

SEQ ID NO: 443864 - DNA, 54 bp, Artificial
  Synthetic oligonucleotide
gttattaacttgcgcaaaacagatggagaagtgcggaacataagagataatcaa

SEQ ID NO: 443865 - DNA, 59 bp, Artificial
  Synthetic oligonucleotide
gttattaagtacgcaggaacaatcggatttagtgagtcatcaataattatatgtattcc

SEQ ID NO: 443866 - DNA, 55 bp, Artificial
  Synthetic oligonucleotide
gttattaatgggatttgttgcttcaattctttgatgttgacgccggtctttgtgt

SEQ ID NO: 443867 - DNA, 51 bp, Artificial
  Synthetic oligonucleotide
gttattacgtcgttgttggtgttgaatagcctctcgtggtgcttgattatc

SEQ ID NO: 443868 - DNA, 54 bp, Artificial
  Synthetic oligonucleotide
gttattagatattggcggtagaacaattaacgtttgtacatttactggtggaaa

SEQ ID NO: 443869 - DNA, 55 bp, Artificial
  Synthetic oligonucleotide
gttattaggacggacaaagagtggaacattaacattagaggttgacgacattggt

SEQ ID NO: 443870 - DNA, 60 bp, Artificial
  Synthetic oligonucleotide
gttattatccagcggttatgaactagaatatcagaaggccttgaacagttggattgcaca

SEQ ID NO: 443871 - DNA, 59 bp, Artificial
  Synthetic oligonucleotide
gttattatggcatgacccgctagacgacccacacttggagaagcggcttgcccacgctc

SEQ ID NO: 443872 - DNA, 58 bp, Artificial
  Synthetic oligonucleotide
gttattattcggatgataggattgtgcgatatgaaaacgcaattaagagaatcgcgat

SEQ ID NO: 443873 - DNA, 59 bp, Artificial
  Synthetic oligonucleotide
gttattattgacgacttctacggatggattaaatacgacgaactgctaaagatcacaga

SEQ ID NO: 443874 - DNA, 52 bp, Artificial
  Synthetic oligonucleotide
gttattcaaaagccagtcatagtgttcaaaatgtacgataaagagctccaca

SEQ ID NO: 443875 - DNA, 58 bp, Artificial
  Synthetic oligonucleotide
gttattcaaattgtcccctctatgtggaacacctcatatgggacctaaatattatgga

SEQ ID NO: 443876 - DNA, 55 bp, Artificial
  Synthetic oligonucleotide
gttattcaactgaaggtgaaagcccatatacatggatgtatttaccaggcaatct

SEQ ID NO: 443877 - DNA, 60 bp, Artificial
  Synthetic oligonucleotide
gttattcaagcacagccaacacaaccatcacgctcccatgcagaatcagacagatcataa

SEQ ID NO: 443878 - DNA, 55 bp, Artificial
  Synthetic oligonucleotide
gttattcaagcgtgatgacattgagttgcacggtgacttgctagctagggtcgag

SEQ ID NO: 443879 - DNA, 55 bp, Artificial
  Synthetic oligonucleotide
gttattcaatggaccactacaacgcataacaggacttattaacagcgagggtgag

SEQ ID NO: 443880 - DNA, 60 bp, Artificial
  Synthetic oligonucleotide
gttattcaggacgaaattcagtggatactgctaggcgctccttagctgctaactctagtg

SEQ ID NO: 443881 - DNA, 55 bp, Artificial
  Synthetic oligonucleotide
gttattcatgttcccgacaacgtagagttcttgcagtacgataatgacgagtggg

SEQ ID NO: 443882 - DNA, 54 bp, Artificial
  Synthetic oligonucleotide
gttattccagcaaagacagggcaggaaacagcatactttctcttgaaactagca

SEQ ID NO: 443883 - DNA, 52 bp, Artificial
  Synthetic oligonucleotide
gttattcgactccgtcgtcctctgcgaggcgtatgatacgggttgcgcgtgg

SEQ ID NO: 443884 - DNA, 59 bp, Artificial
  Synthetic oligonucleotide
gttattcgtgagactgctgtgtggtttcctgtgtgcttggcgcctccgaccccacaccc

SEQ ID NO: 443885 - DNA, 59 bp, Artificial
  Synthetic oligonucleotide
gttattctatccgcttctcgcgcaacttagaaaacaacaatgctcaataatgtacggat

SEQ ID NO: 443886 - DNA, 59 bp, Artificial
  Synthetic oligonucleotide
gttattcttgtcttcgtccagaaattctttataactgctgttaggtcctggattgcaga

SEQ ID NO: 443887 - DNA, 55 bp, Artificial
  Synthetic oligonucleotide
gttattgaaacagctagaaccagctcttaagacagggtcagaaggactgcgctct

SEQ ID NO: 443888 - DNA, 55 bp, Artificial
  Synthetic oligonucleotide
gttattgaatcacgaagggatggtggtacgtaaaggagcccctatcaccactgag

SEQ ID NO: 443889 - DNA, 50 bp, Artificial
  Synthetic oligonucleotide
gttattgacacgcacagagggcaagttgatatggaaaacactctcgggcg

SEQ ID NO: 443890 - DNA, 60 bp, Artificial
  Synthetic oligonucleotide
gttattgcaccgatccattacaaatcccattgatcaattatacttttggacctaatcaga

SEQ ID NO: 443891 - DNA, 54 bp, Artificial
  Synthetic oligonucleotide
gttattgcattacctcaaggagatacgcgtcaacaagtattaggcaaaggtgta

SEQ ID NO: 443892 - DNA, 57 bp, Artificial
  Synthetic oligonucleotide
gttattgcggccatccaccattggcagaagtacccttttggggaatctccgatgtgg

SEQ ID NO: 443893 - DNA, 59 bp, Artificial
  Synthetic oligonucleotide
gttattgcttaaccaaatggatgatccttgctgcggaactcaaatgtttcgggaacaca

SEQ ID NO: 443894 - DNA, 57 bp, Artificial
  Synthetic oligonucleotide
gttattggactgtgcgtccgcatcttcgttaacgggcccgatggtactcctggtcgc

SEQ ID NO: 443895 - DNA, 54 bp, Artificial
  Synthetic oligonucleotide
gttattggatgttattagcaccaacgaacgcgggggtagtagtagaaggtacga

SEQ ID NO: 443896 - DNA, 60 bp, Artificial
  Synthetic oligonucleotide
gttattggtctaatactgctagctctcatcataatatcagtggccatactagtagccaga

SEQ ID NO: 443897 - DNA, 60 bp, Artificial
  Synthetic oligonucleotide
gttattggtgatttttccatcccactcatctgcagaactgagcagattgaatgtgttcgt

SEQ ID NO: 443898 - DNA, 57 bp, Artificial
  Synthetic oligonucleotide
gttattggtggtccatctggcatgaaggagcaggctttgattaaaaggttttacagg

SEQ ID NO: 443899 - DNA, 60 bp, Artificial
  Synthetic oligonucleotide
gttattgtaccccgatatatcggtgctcaattggtgctaagatccgtacacatatatcct

SEQ ID NO: 443900 - DNA, 60 bp, Artificial
  Synthetic oligonucleotide
gttattgtgggaggctgtggaagttctggcttattgtcatgattcacctgatcttgttat

SEQ ID NO: 443901 - DNA, 56 bp, Artificial
  Synthetic oligonucleotide
gttattgttaatcgaatgagataacaacctccgtaatggatcaaattcgaattaac

SEQ ID NO: 443902 - DNA, 55 bp, Artificial
  Synthetic oligonucleotide
gttattgttacatatcacgatgaagggtgcttcaggacttaggcgcttgggtttc

SEQ ID NO: 443903 - DNA, 60 bp, Artificial
  Synthetic oligonucleotide
gttatttcatttgacgcctgcaatcggagtaatggagtacaatatatagtgaggggtgta

SEQ ID NO: 443904 - DNA, 58 bp, Artificial
  Synthetic oligonucleotide
gttatttccagtactagttcgcagctagaagtttaactcttcgatatcggctacattg

SEQ ID NO: 443905 - DNA, 60 bp, Artificial
  Synthetic oligonucleotide
gttatttccgaatgcgcagccatttgaacatcatgctacagtaggactcacacttagaat

SEQ ID NO: 443906 - DNA, 59 bp, Artificial
  Synthetic oligonucleotide
gttatttgaacccatgccttgccaggatactgtctccctttctatacagcacacgtcgg

SEQ ID NO: 443907 - DNA, 60 bp, Artificial
  Synthetic oligonucleotide
gttatttgataagtagatctcagagcataatacgtgcattacgctgtgacttaagagaaa

SEQ ID NO: 443908 - DNA, 60 bp, Artificial
  Synthetic oligonucleotide
gttatttgatgatctaatgtcactaagtatacatgttacgatgcttctgagaaaaggctg

SEQ ID NO: 443909 - DNA, 55 bp, Artificial
  Synthetic oligonucleotide
gttatttgcacaaacccaaggcccttattcaggtaatccatcccacaataaactc

SEQ ID NO: 443910 - DNA, 55 bp, Artificial
  Synthetic oligonucleotide
gttatttgtaccatggaggaattgttcaacgccctacctcaaccactacaacaac

SEQ ID NO: 443911 - DNA, 53 bp, Artificial
  Synthetic oligonucleotide
gttatttgtattgatatgtacaaatatacttaatcagacacattaatccgatg

SEQ ID NO: 443912 - DNA, 55 bp, Artificial
  Synthetic oligonucleotide
gttatttgtatttcggatgttacccgtggcaatggtattactcatcgcgttggta

SEQ ID NO: 443913 - DNA, 54 bp, Artificial
  Synthetic oligonucleotide
gttatttgtggtttcggcctgaggaggcgtttgaaacccttgctaagataccac

SEQ ID NO: 443914 - DNA, 59 bp, Artificial
  Synthetic oligonucleotide
gttatttgtgtatcggatgtgactcgtggtaacggaattacacatcgtgttggcaagag

SEQ ID NO: 443915 - DNA, 56 bp, Artificial
  Synthetic oligonucleotide
gttatttgtgtatcggatgttacacgtggaaatggaattacccaccgtgttggcaa

SEQ ID NO: 443916 - DNA, 53 bp, Artificial
  Synthetic oligonucleotide
gttattttagttttatgttaggataggttggattggtccgattctctgtaacg

SEQ ID NO: 443917 - DNA, 51 bp, Artificial
  Synthetic oligonucleotide
gttattttgtctcgcaggaacggtacaagaatgggcccttctatgcttgca

SEQ ID NO: 443918 - DNA, 59 bp, Artificial
  Synthetic oligonucleotide
gttatttttattcaaagactgtttgagctacaacctgaacctgcttgactagattgcgc

SEQ ID NO: 443919 - DNA, 53 bp, Artificial
  Synthetic oligonucleotide
gttcaaaaccttcgaaaaggcattgttagctccccccaccccaatagtcatct

SEQ ID NO: 443920 - DNA, 51 bp, Artificial
  Synthetic oligonucleotide
gttcaaaagggctctcctttgatcaagctgttgtgaactcaaattccccat

SEQ ID NO: 443921 - DNA, 50 bp, Artificial
  Synthetic oligonucleotide
gttcaaaagtagacggagttgttaacgctcaaggattgtctaagggcgaa

SEQ ID NO: 443922 - DNA, 55 bp, Artificial
  Synthetic oligonucleotide
gttcaaaatagggctggactttgaggagaatgaagttgagaggattgtcactgac

SEQ ID NO: 443923 - DNA, 55 bp, Artificial
  Synthetic oligonucleotide
gttcaaacagcattagagccagtcaaagtaagtctgaaaccagacaaagaattgc

SEQ ID NO: 443924 - DNA, 59 bp, Artificial
  Synthetic oligonucleotide
gttcaaacaggtgatatctgtcgataaggatacgacaatgtttgacgtgaaagggtcta

SEQ ID NO: 443925 - DNA, 55 bp, Artificial
  Synthetic oligonucleotide
gttcaaacattgggtatcggttgccaaactactaatgtaaacacgtttgagcaag

SEQ ID NO: 443926 - DNA, 60 bp, Artificial
  Synthetic oligonucleotide
gttcaaaccatcgtgaggtggtgaggcctctcatcattgcgggtcggtggacacgtagtg

SEQ ID NO: 443927 - DNA, 59 bp, Artificial
  Synthetic oligonucleotide
gttcaaacccgagaaattagacagagttcctgtgctgtgcagtagaaccccattgctta

SEQ ID NO: 443928 - DNA, 55 bp, Artificial
  Synthetic oligonucleotide
gttcaaagattctaactgacacaagtcggcctaatgaccccgggagcggaaactg

SEQ ID NO: 443929 - DNA, 55 bp, Artificial
  Synthetic oligonucleotide
gttcaaagcctcgagaatcgagaacgcaccttcacgggtgccagtagaggggttg

SEQ ID NO: 443930 - DNA, 58 bp, Artificial
  Synthetic oligonucleotide
gttcaaaggcaggactgttggtatcagatggaggaccaaacctatacaacatccggaa

SEQ ID NO: 443931 - DNA, 55 bp, Artificial
  Synthetic oligonucleotide
gttcaaaggctgggtaggccccaatattcagaaactccagcagggtatctccgag

SEQ ID NO: 443932 - DNA, 57 bp, Artificial
  Synthetic oligonucleotide
gttcaaaggtttgttgcagcaatgtaactatacttgtacttatgagtgatcgaatgg

SEQ ID NO: 443933 - DNA, 57 bp, Artificial
  Synthetic oligonucleotide
gttcaaatcgaccgtgggtgtctttcaatcgaaatctggagtatcaaatagggtaca

SEQ ID NO: 443934 - DNA, 59 bp, Artificial
  Synthetic oligonucleotide
gttcaaatcgtagatgacttaagcaatttaacattggatataaacgatgtcaagactat

SEQ ID NO: 443935 - DNA, 53 bp, Artificial
  Synthetic oligonucleotide
gttcaaatgcagttcgtcaatccactattcgatcggtcgcgcacaagcgtgct

SEQ ID NO: 443936 - DNA, 56 bp, Artificial
  Synthetic oligonucleotide
gttcaaatggagtacgttcaagtttcgaccgaacttgtttctatagattgtgcgcg

SEQ ID NO: 443937 - DNA, 50 bp, Artificial
  Synthetic oligonucleotide
gttcaaatgtcagcacagtacaatgtacacatgggattaggccagtagta

SEQ ID NO: 443938 - DNA, 59 bp, Artificial
  Synthetic oligonucleotide
gttcaaatgtgatgttagtacccggacatttgactggattcattgcagagcatgataca

SEQ ID NO: 443939 - DNA, 58 bp, Artificial
  Synthetic oligonucleotide
gttcaaattatgacttattgaagttgtgcggtgatgtcgaatccaaccctggacccac

SEQ ID NO: 443940 - DNA, 55 bp, Artificial
  Synthetic oligonucleotide
gttcaacaaacaatacaggatgacgctgcaacggtgcaagccctaaaacgaaagt

SEQ ID NO: 443941 - DNA, 55 bp, Artificial
  Synthetic oligonucleotide
gttcaacaaatgaagaactatgtggacagtttggcagcttcgttgtccgccactg

SEQ ID NO: 443942 - DNA, 55 bp, Artificial
  Synthetic oligonucleotide
gttcaacaatgcttacctcatattctcaggtcagctaccttctaacgtcaacccg

SEQ ID NO: 443943 - DNA, 55 bp, Artificial
  Synthetic oligonucleotide
gttcaacacctggggagactcaaatagatctgggaaatttacatacagcagcaga

SEQ ID NO: 443944 - DNA, 60 bp, Artificial
  Synthetic oligonucleotide
gttcaacatcctgagctaacagggctagactgtatgaggccttgcttctgggttgaatta

SEQ ID NO: 443945 - DNA, 60 bp, Artificial
  Synthetic oligonucleotide
gttcaacatgtttgacaacgagcccagcactgcaaccgtgaagaacgatctacgtgatcg

SEQ ID NO: 443946 - DNA, 52 bp, Artificial
  Synthetic oligonucleotide
gttcaacctctgtggcttcatgatattgatatagtcagaaccagatctgaat

SEQ ID NO: 443947 - DNA, 55 bp, Artificial
  Synthetic oligonucleotide
gttcaacggcctccagtacgtgggcggtggacagtcgggagccgacaacaaccca

SEQ ID NO: 443948 - DNA, 59 bp, Artificial
  Synthetic oligonucleotide
gttcaactacaataaagccactaaaaggctcacagtcctcggaaaggatgcaggtgcgc

SEQ ID NO: 443949 - DNA, 52 bp, Artificial
  Synthetic oligonucleotide
gttcaactatggaccctacttatcaaagctgtaacggccccggacacagctc

SEQ ID NO: 443950 - DNA, 51 bp, Artificial
  Synthetic oligonucleotide
gttcaactcgaatccagttacctgttatgcgatgggtgagagatgttggat

SEQ ID NO: 443951 - DNA, 59 bp, Artificial
  Synthetic oligonucleotide
gttcaactctttatgtattgatcttcctcgcgatctttctctcgaaatttaccaatcaa

SEQ ID NO: 443952 - DNA, 60 bp, Artificial
  Synthetic oligonucleotide
gttcaactgataggtgcagtagagctacagctacacctgggcaggacacaagcccaggcg

SEQ ID NO: 443953 - DNA, 50 bp, Artificial
  Synthetic oligonucleotide
gttcaagaaacatcacatttcctaggttcaacgggaggtcgtttgacttc

SEQ ID NO: 443954 - DNA, 60 bp, Artificial
  Synthetic oligonucleotide
gttcaagacttatatgagatggacaaatggcatgccttgagaagtaggttgagcaagaat

SEQ ID NO: 443955 - DNA, 55 bp, Artificial
  Synthetic oligonucleotide
gttcaagagaattatccctctaattctgttggttattcgtaccttgcagggttaa

SEQ ID NO: 443956 - DNA, 57 bp, Artificial
  Synthetic oligonucleotide
gttcaagagcaaacaccgtattgaaccagtatgtttgttagtacacggcagcccagg

SEQ ID NO: 443957 - DNA, 50 bp, Artificial
  Synthetic oligonucleotide
gttcaagaggatagagagggtaaagccactagggaactggttaaaagatc

SEQ ID NO: 443958 - DNA, 55 bp, Artificial
  Synthetic oligonucleotide
gttcaagagtgttatttctgtgatgaaagacactacaatgatcgacgttgagggt

SEQ ID NO: 443959 - DNA, 60 bp, Artificial
  Synthetic oligonucleotide
gttcaagatgcccaatacacaaataatagaggaaagagtattcttttcatgtggggcata

SEQ ID NO: 443960 - DNA, 59 bp, Artificial
  Synthetic oligonucleotide
gttcaagcacttagggacaatctagagcctgggaccttcgatcttggggggctatatga

SEQ ID NO: 443961 - DNA, 60 bp, Artificial
  Synthetic oligonucleotide
gttcaagcccactttgctatatccattcacggagggtatgacatgggctttagaggatta

SEQ ID NO: 443962 - DNA, 55 bp, Artificial
  Synthetic oligonucleotide
gttcaaggatattgccgcaaacttctcagttcaccaggacgcaaaggcaatggat

SEQ ID NO: 443963 - DNA, 60 bp, Artificial
  Synthetic oligonucleotide
gttcaaggcttattatatcattgcagagagatatgaatctagaaaaatcaattgattgtt

SEQ ID NO: 443964 - DNA, 54 bp, Artificial
  Synthetic oligonucleotide
gttcaagggtgttaacccctgtgctgaaatcctcttgggtaacaagtccttctg

SEQ ID NO: 443965 - DNA, 53 bp, Artificial
  Synthetic oligonucleotide
gttcaaggttccgatgggtcttaccctaaagaagcctgcccctacatcccgat

SEQ ID NO: 443966 - DNA, 58 bp, Artificial
  Synthetic oligonucleotide
gttcaagtaacggtatcaaatgactcgcagacaaagtggaagtttgtggatctaagta

SEQ ID NO: 443967 - DNA, 52 bp, Artificial
  Synthetic oligonucleotide
gttcaagtccaaatctcgcattgaaccagtatgtttgataatacatggatct

SEQ ID NO: 443968 - DNA, 60 bp, Artificial
  Synthetic oligonucleotide
gttcaagtcctgattctaagataatcttgtcaaatgactcataatcacataaattccccc

SEQ ID NO: 443969 - DNA, 60 bp, Artificial
  Synthetic oligonucleotide
gttcaagtgatgtagcctacgatatgacatatgactcagattacatttattacgtagtaa

SEQ ID NO: 443970 - DNA, 59 bp, Artificial
  Synthetic oligonucleotide
gttcaagtggtctccaccgcaacacaatctttcctggcgacctgcgtcaacggcgtgtg

SEQ ID NO: 443971 - DNA, 56 bp, Artificial
  Synthetic oligonucleotide
gttcaagttcccttgaagccagttcattgatactgggaacgtgtttgtctctaggt

SEQ ID NO: 443972 - DNA, 58 bp, Artificial
  Synthetic oligonucleotide
gttcaataacagtaaataatattacagttgcggattgtgttgcacctgaaagtgaagg

SEQ ID NO: 443973 - DNA, 60 bp, Artificial
  Synthetic oligonucleotide
gttcaatagcgataccaagcctaccgtctcagatgattttatcactacgtacattaggcc

SEQ ID NO: 443974 - DNA, 55 bp, Artificial
  Synthetic oligonucleotide
gttcaatagctccccttggttcactaccctactatcaaccatcgccgggccccta

SEQ ID NO: 443975 - DNA, 51 bp, Artificial
  Synthetic oligonucleotide
gttcaatagctggtacaccaagaaccgacaagaaacctggccaaacagcca

SEQ ID NO: 443976 - DNA, 55 bp, Artificial
  Synthetic oligonucleotide
gttcaatagtatatacagtcctacatacaggcctaatgggacaagtgattcaacc

SEQ ID NO: 443977 - DNA, 60 bp, Artificial
  Synthetic oligonucleotide
gttcaatcaagtactttacctctcacctctcacagttattcaatcccatgcttactctgg

SEQ ID NO: 443978 - DNA, 60 bp, Artificial
  Synthetic oligonucleotide
gttcaatctccgtacccatcgcacagcctgcgcagtatgcaaacacccaagcgagcaacc

SEQ ID NO: 443979 - DNA, 55 bp, Artificial
  Synthetic oligonucleotide
gttcaatctctgttcccattattgggtctgctcaatgcgcaacggctccaatcgg

SEQ ID NO: 443980 - DNA, 55 bp, Artificial
  Synthetic oligonucleotide
gttcaatgagtgaacgtgccagaaccgtccctgccgaagtcctctacatgacccg

SEQ ID NO: 443981 - DNA, 58 bp, Artificial
  Synthetic oligonucleotide
gttcaatgccttgctattgcttcattgctgtactaacatcacaacaacactacctcat

SEQ ID NO: 443982 - DNA, 60 bp, Artificial
  Synthetic oligonucleotide
gttcaatgggacagggccatgcaataatgttagtacagtacaatgcacacatggaattaa

SEQ ID NO: 443983 - DNA, 57 bp, Artificial
  Synthetic oligonucleotide
gttcaatgggtcgtatagacctgaagacgtctggatactattacttacgtctagtac

SEQ ID NO: 443984 - DNA, 60 bp, Artificial
  Synthetic oligonucleotide
gttcaatgtggtagatccgcatcaacggaggctatatgaacacgcgagtcgccacaccaa

SEQ ID NO: 443985 - DNA, 51 bp, Artificial
  Synthetic oligonucleotide
gttcaatgtgttgcgttttggcacagagcttacaatttgatttggaaccag

SEQ ID NO: 443986 - DNA, 60 bp, Artificial
  Synthetic oligonucleotide
gttcaattgatagcttctgatcaggatgtagcagtttctttgagaacaccattcgagata

SEQ ID NO: 443987 - DNA, 54 bp, Artificial
  Synthetic oligonucleotide
gttcaattgcatgaaatagcaacccgattttttaacagggggataaacgtcgaa

SEQ ID NO: 443988 - DNA, 60 bp, Artificial
  Synthetic oligonucleotide
gttcaattgtccatcacaaacctcagattgacctgtgcttcagaatctggtctcgagggc

SEQ ID NO: 443989 - DNA, 57 bp, Artificial
  Synthetic oligonucleotide
gttcaattgtgcttgggaataacagggttacctcggtcttctcactggacagttgga

SEQ ID NO: 443990 - DNA, 60 bp, Artificial
  Synthetic oligonucleotide
gttcacaaaattcaatgggatgaaagtcagtgatgtcttggagcaaattcgtggaccgac

SEQ ID NO: 443991 - DNA, 58 bp, Artificial
  Synthetic oligonucleotide
gttcacaaaccgtatcatgttttgttgtatggacgtttgaccgctcatcctaatgtaa

SEQ ID NO: 443992 - DNA, 55 bp, Artificial
  Synthetic oligonucleotide
gttcacaaagctgtgcacgcatgttgagaagaaattgctaggatcatcccgggct

SEQ ID NO: 443993 - DNA, 55 bp, Artificial
  Synthetic oligonucleotide
gttcacaacgtttgaagttgagatacctggtgaggctggtacttcagatagccaa

SEQ ID NO: 443994 - DNA, 55 bp, Artificial
  Synthetic oligonucleotide
gttcacaagtttcttctaccgctatggatttgtagccaacttcagcatggagctg

SEQ ID NO: 443995 - DNA, 59 bp, Artificial
  Synthetic oligonucleotide
gttcacaatagtagggaaaagggcaacagctatactcagaaaagcaaccagaagattga

SEQ ID NO: 443996 - DNA, 55 bp, Artificial
  Synthetic oligonucleotide
gttcacaatgtaaattcaccttcatcaggactacataataaaggtcagggctgta

SEQ ID NO: 443997 - DNA, 55 bp, Artificial
  Synthetic oligonucleotide
gttcacaattaccccttattgataacaactcggtgcccgcggtatcacgtaacat

SEQ ID NO: 443998 - DNA, 57 bp, Artificial
  Synthetic oligonucleotide
gttcacacccccacacggtggcctgttggggtggagcccacaggcacagggtgtgct

SEQ ID NO: 443999 - DNA, 55 bp, Artificial
  Synthetic oligonucleotide
gttcacacccgcctgacataacgactgaggatcaaggaaccgtcgttgccactgg

SEQ ID NO: 444000 - DNA, 60 bp, Artificial
  Synthetic oligonucleotide
gttcacacgggttcgcagcagccctaaagcgctcatacttcactcagagtcaaggtgaaa

SEQ ID NO: 444001 - DNA, 52 bp, Artificial
  Synthetic oligonucleotide
gttcacacggtatagattcaatctggacctcttcgcgccatgatttcggttc

SEQ ID NO: 444002 - DNA, 52 bp, Artificial
  Synthetic oligonucleotide
gttcacactctggtgagcattgacagcgtagcagcaactgttggtgtaggtc

SEQ ID NO: 444003 - DNA, 55 bp, Artificial
  Synthetic oligonucleotide
gttcacactgttcacctttctgttttctccttttatttcagagtgataggtggtg

SEQ ID NO: 444004 - DNA, 59 bp, Artificial
  Synthetic oligonucleotide
gttcacaggtgcacctagggtgcaattgtctgatgatttacccgctacgttggatttta

SEQ ID NO: 444005 - DNA, 58 bp, Artificial
  Synthetic oligonucleotide
gttcacagtatcccctagaaacgctccaggtgaaatactatggagcgcgcccttaggc

SEQ ID NO: 444006 - DNA, 60 bp, Artificial
  Synthetic oligonucleotide
gttcacagtgggccgtcttatgcactgatgaatcagtgcgacgtgacatcgtatgtgacg

SEQ ID NO: 444007 - DNA, 55 bp, Artificial
  Synthetic oligonucleotide
gttcacatccccaacccgcgggccggctactcttctttccctctgctcgtcttcc

SEQ ID NO: 444008 - DNA, 56 bp, Artificial
  Synthetic oligonucleotide
gttcacatcgatcgagggagtgtttgataaaaggaacatgtttaagagaaaatttc

SEQ ID NO: 444009 - DNA, 55 bp, Artificial
  Synthetic oligonucleotide
gttcaccaacatgagacccaactctattgccaaacacttgcatgactcccatgct

SEQ ID NO: 444010 - DNA, 58 bp, Artificial
  Synthetic oligonucleotide
gttcaccacaggagagaagcatgaacgaagttacgtttgcagacgttatcaaatccgt

SEQ ID NO: 444011 - DNA, 55 bp, Artificial
  Synthetic oligonucleotide
gttcaccagctagtacggaaacatacgaagtattatcaaatgatactcaactggc

SEQ ID NO: 444012 - DNA, 56 bp, Artificial
  Synthetic oligonucleotide
gttcaccatcctggtgagtagtgtgtcctgttgatgtgtttagtatacgtatagta

SEQ ID NO: 444013 - DNA, 55 bp, Artificial
  Synthetic oligonucleotide
gttcaccattccggtggtatcaaaacccgagaggggacagagagtactaagacta

SEQ ID NO: 444014 - DNA, 57 bp, Artificial
  Synthetic oligonucleotide
gttcaccattcgtgacaaacaggctttcgctaacgaccctcgttcaatggacttgtg

SEQ ID NO: 444015 - DNA, 50 bp, Artificial
  Synthetic oligonucleotide
gttcacccaccttacttccacaggagcgttatactaagctcgtaggtttg

SEQ ID NO: 444016 - DNA, 52 bp, Artificial
  Synthetic oligonucleotide
gttcacccggggctggaatattgcaggccccaatggcatgcagtggaacggc

SEQ ID NO: 444017 - DNA, 58 bp, Artificial
  Synthetic oligonucleotide
gttcacccgtgctcaagtcggcagtgcgccctcactcaccctacttccaccaaactaa

SEQ ID NO: 444018 - DNA, 54 bp, Artificial
  Synthetic oligonucleotide
gttcaccgatagcgttaactggcgtaaagaactggttgacccgaactataaggc

SEQ ID NO: 444019 - DNA, 55 bp, Artificial
  Synthetic oligonucleotide
gttcaccgtataccaatgcaaacttctttcacgattagagcgcttagatgtgacc

SEQ ID NO: 444020 - DNA, 60 bp, Artificial
  Synthetic oligonucleotide
gttcaccgttgacaaagttgcattacattcgtacctgtgattcttacttgatgtctgcct

SEQ ID NO: 444021 - DNA, 60 bp, Artificial
  Synthetic oligonucleotide
gttcaccttcatgcatgggtacgtttcaatgttagtcagagatgcgaaggatcaaagtgg

SEQ ID NO: 444022 - DNA, 60 bp, Artificial
  Synthetic oligonucleotide
gttcaccttttcgccccgccggcatatgacgctacaagactgtaattgctcaatctatcc

SEQ ID NO: 444023 - DNA, 54 bp, Artificial
  Synthetic oligonucleotide
gttcacgaaaacccttctgcaatcgatagaaggctatgtaaggcataccggcga

SEQ ID NO: 444024 - DNA, 60 bp, Artificial
  Synthetic oligonucleotide
gttcacgaagatcgaggcgctctgccgtcataactccacatgtagacaaaggacttacta

SEQ ID NO: 444025 - DNA, 55 bp, Artificial
  Synthetic oligonucleotide
gttcacgaattggctcgccaatggtctaccagcgagcatcgatgaattttggaca

SEQ ID NO: 444026 - DNA, 53 bp, Artificial
  Synthetic oligonucleotide
gttcacgacggaggaaagggagagggtaaggacagaaagtaggcgggaggtca

SEQ ID NO: 444027 - DNA, 55 bp, Artificial
  Synthetic oligonucleotide
gttcacgagagtgttttgcgcgttgactatgttcgtagtaacgaggctgtggtgg

SEQ ID NO: 444028 - DNA, 55 bp, Artificial
  Synthetic oligonucleotide
gttcacgcaccgacacaacacacagaacctggttgaagccttatttcaggggcca

SEQ ID NO: 444029 - DNA, 52 bp, Artificial
  Synthetic oligonucleotide
gttcacggaaagcgagtccagtgagacccacggtgttcagactgccgtgcac

SEQ ID NO: 444030 - DNA, 60 bp, Artificial
  Synthetic oligonucleotide
gttcacggagtgaggagagacacagccgcttcagtgtacagcacgagaccgtacgatgtt

SEQ ID NO: 444031 - DNA, 51 bp, Artificial
  Synthetic oligonucleotide
gttcacggcccaacttcgacattactgcgagaaccacgagcgagtcgtgct

SEQ ID NO: 444032 - DNA, 57 bp, Artificial
  Synthetic oligonucleotide
gttcacggtttcaggtgtatgctagcggttaaatatctccttcttgtagaggctacg

SEQ ID NO: 444033 - DNA, 52 bp, Artificial
  Synthetic oligonucleotide
gttcacgtgagtcccacggacttcgactcccagccggaactcctgtccttca

SEQ ID NO: 444034 - DNA, 59 bp, Artificial
  Synthetic oligonucleotide
gttcacgtgcgctgttttgtgggcgtttccgcacggcaagcttcgcgtaattactgtga

SEQ ID NO: 444035 - DNA, 50 bp, Artificial
  Synthetic oligonucleotide
gttcacgtggtgaaaagggccctatcgttaaaggaatctataaactggtt

SEQ ID NO: 444036 - DNA, 60 bp, Artificial
  Synthetic oligonucleotide
gttcacgtgtattggcatggtacgttccatctgcagtattgatgcgtcatggatggtgtt

SEQ ID NO: 444037 - DNA, 60 bp, Artificial
  Synthetic oligonucleotide
gttcacgttctcattaaaccaaaagcgcagcttaatccagagcgcaagagggggctgata

SEQ ID NO: 444038 - DNA, 55 bp, Artificial
  Synthetic oligonucleotide
gttcactagatggcagaccagaaccaagtccattctggagtgttacgtttgacca

SEQ ID NO: 444039 - DNA, 55 bp, Artificial
  Synthetic oligonucleotide
gttcactcaacactgatgaattatatagaaacgggacagactgcggcatttaggg

SEQ ID NO: 444040 - DNA, 55 bp, Artificial
  Synthetic oligonucleotide
gttcactcggaaaacaattgattgggtgagtgaccaaactggtattaaagatttg

SEQ ID NO: 444041 - DNA, 60 bp, Artificial
  Synthetic oligonucleotide
gttcactcgtgtcttcagttgaatggtacatgaaatcaatggagttgcctgatgaagtta

SEQ ID NO: 444042 - DNA, 57 bp, Artificial
  Synthetic oligonucleotide
gttcactgctgtggaggacccaccacaagaggtagcgccccccgtgactcacttccc

SEQ ID NO: 444043 - DNA, 59 bp, Artificial
  Synthetic oligonucleotide
gttcacttacgccaactcatagttgtgcatagtcagacaacgaattttcccagtagttg

SEQ ID NO: 444044 - DNA, 55 bp, Artificial
  Synthetic oligonucleotide
gttcacttacgctgacattccgaaagttgtcggattctgtaattccgctcacgct

SEQ ID NO: 444045 - DNA, 55 bp, Artificial
  Synthetic oligonucleotide
gttcacttccgaaaccaagtcaaaatacgccgcagagtggatgtgaatccgggcc

SEQ ID NO: 444046 - DNA, 60 bp, Artificial
  Synthetic oligonucleotide
gttcacttcctgggcatggtctacgtgctgatataaagcggtgcacttccgaatggctga

SEQ ID NO: 444047 - DNA, 55 bp, Artificial
  Synthetic oligonucleotide
gttcacttgtgtcttcagtcgaatggtacctgaaatcaatggaattgcctgatga

SEQ ID NO: 444048 - DNA, 60 bp, Artificial
  Synthetic oligonucleotide
gttcagaaatgttctgagtatcgcacccataatgttctctaataaaatggcaagactagg

SEQ ID NO: 444049 - DNA, 55 bp, Artificial
  Synthetic oligonucleotide
gttcagaaggagtagttgaaaagatcttaaagaacctggtcaagttgatctcagc

SEQ ID NO: 444050 - DNA, 60 bp, Artificial
  Synthetic oligonucleotide
gttcagaagtacatatcccagtaggtcaggcaagattagtgatagtcacttattggggac

SEQ ID NO: 444051 - DNA, 55 bp, Artificial
  Synthetic oligonucleotide
gttcagaagttgctaacttttaccaacaagcaacttgaggaggtcaaagggctta

SEQ ID NO: 444052 - DNA, 55 bp, Artificial
  Synthetic oligonucleotide
gttcagaatgccctaaatgggaacggagacccgaataacatggatagggcagtca

SEQ ID NO: 444053 - DNA, 55 bp, Artificial
  Synthetic oligonucleotide
gttcagaccctgtctttgaacatgcctgtatttgcctgagtatgagttggcattc

SEQ ID NO: 444054 - DNA, 52 bp, Artificial
  Synthetic oligonucleotide
gttcagagagctacaacaggaggttcactcctgagatcagtgcgaggcctgc

SEQ ID NO: 444055 - DNA, 51 bp, Artificial
  Synthetic oligonucleotide
gttcagagatgctgagatattccgtaatagttggaatgagacttctagcat

SEQ ID NO: 444056 - DNA, 55 bp, Artificial
  Synthetic oligonucleotide
gttcagataccagatggtaacgtaatcaaaaagaaccagtacggagctgtcgctt

SEQ ID NO: 444057 - DNA, 51 bp, Artificial
  Synthetic oligonucleotide
gttcagatcttatcgaaccgaataaactttcaagtatgggaaatggtttta

SEQ ID NO: 444058 - DNA, 55 bp, Artificial
  Synthetic oligonucleotide
gttcagatggctgttgactcaaattatgaaggttgctaaggaaagtggtgagagc

SEQ ID NO: 444059 - DNA, 60 bp, Artificial
  Synthetic oligonucleotide
gttcagatgtttatatggtctgctggtgacggacgaatgtccgatctccgatctgcttgc

SEQ ID NO: 444060 - DNA, 56 bp, Artificial
  Synthetic oligonucleotide
gttcagcaaagttagcgacgacacaagcggtaacacgttgcgccaaactccgtggg

SEQ ID NO: 444061 - DNA, 54 bp, Artificial
  Synthetic oligonucleotide
gttcagcaacaactaacattcagaccaacccgacgcgcgagcacagaagatcga

SEQ ID NO: 444062 - DNA, 60 bp, Artificial
  Synthetic oligonucleotide
gttcagcaaggtgatgctttagatttttcatttgctgctggctctcagcgtggcactgtt

SEQ ID NO: 444063 - DNA, 55 bp, Artificial
  Synthetic oligonucleotide
gttcagcaaggtggtagtgcggattatgaaaatccgaataaggttggaacaaagc

SEQ ID NO: 444064 - DNA, 60 bp, Artificial
  Synthetic oligonucleotide
gttcagcaatggtaggagaggtcaccacccagatgggtgctacctccatgatagcccccg

SEQ ID NO: 444065 - DNA, 55 bp, Artificial
  Synthetic oligonucleotide
gttcagcagcgtaatacatacgagacgtatgataagatcgagagcagttcaccct

SEQ ID NO: 444066 - DNA, 56 bp, Artificial
  Synthetic oligonucleotide
gttcagcatgaagctggacacctacccgataccaaacgagaaaggcgaagtttggt

SEQ ID NO: 444067 - DNA, 60 bp, Artificial
  Synthetic oligonucleotide
gttcagccaaacacatagaagaatgttcttgttatggtcataatcaaagagtgacttgtg

SEQ ID NO: 444068 - DNA, 58 bp, Artificial
  Synthetic oligonucleotide
gttcagcccagaaatagtgcctatgtttattgccttgtcagaaggatgcatcccgtat

SEQ ID NO: 444069 - DNA, 51 bp, Artificial
  Synthetic oligonucleotide
gttcagctatggccacgggcaaattcctcatctcttacaccccacctgggg

SEQ ID NO: 444070 - DNA, 60 bp, Artificial
  Synthetic oligonucleotide
gttcagctcaggtaccacccatcgttcctcaagctactcagcaacgtccatcgcatcccc

SEQ ID NO: 444071 - DNA, 55 bp, Artificial
  Synthetic oligonucleotide
gttcagctctactggaaacagatccaaggtgcttagagatataccagagctagag

SEQ ID NO: 444072 - DNA, 55 bp, Artificial
  Synthetic oligonucleotide
gttcagctgtgaacttcacatcaacaatctttatgtcctgtctaccatgcatgtc

SEQ ID NO: 444073 - DNA, 55 bp, Artificial
  Synthetic oligonucleotide
gttcaggaacgctttgtgaagatttagtgctctcctcaggttgtggttgaaccgg

SEQ ID NO: 444074 - DNA, 60 bp, Artificial
  Synthetic oligonucleotide
gttcaggaacgttctgagcatcgcacccataatgttctcaaacaaaatggcgagactagg

SEQ ID NO: 444075 - DNA, 55 bp, Artificial
  Synthetic oligonucleotide
gttcaggaattaatatagcctctcctgataaaaggccctgattctgagaagcagt

SEQ ID NO: 444076 - DNA, 52 bp, Artificial
  Synthetic oligonucleotide
gttcaggagatggcgtcatcgccctattcgtgcgaaacgacgtccgcttgcg

SEQ ID NO: 444077 - DNA, 57 bp, Artificial
  Synthetic oligonucleotide
gttcaggattttattttaagctatttgctacgatttgtatgtgagtgttattataaa

SEQ ID NO: 444078 - DNA, 60 bp, Artificial
  Synthetic oligonucleotide
gttcaggcagagatgaatctactaagtactctgacaagtaaaagggccctggatctgcca

SEQ ID NO: 444079 - DNA, 60 bp, Artificial
  Synthetic oligonucleotide
gttcagggatagtgaaccctgttccgactactgtctctcacacctcgtcaatcttctcga

SEQ ID NO: 444080 - DNA, 60 bp, Artificial
  Synthetic oligonucleotide
gttcaggtatacagaccctgacacatatactagtgctggtcatctttcctgttggtacca

SEQ ID NO: 444081 - DNA, 55 bp, Artificial
  Synthetic oligonucleotide
gttcaggtcctctatcgttatttgaggtttcggtctgaggaggcgtttgaatccc

SEQ ID NO: 444082 - DNA, 56 bp, Artificial
  Synthetic oligonucleotide
gttcaggttaagactagtgttcctaggtttgattcatccgcggtaccgactgtgga

SEQ ID NO: 444083 - DNA, 53 bp, Artificial
  Synthetic oligonucleotide
gttcaggttgttcccacctggacttcctatgtggagttgtacactgttatccc

SEQ ID NO: 444084 - DNA, 55 bp, Artificial
  Synthetic oligonucleotide
gttcagtatgatcccgcagcactatcgttcttattgaacgctcgtgttgactggg

SEQ ID NO: 444085 - DNA, 55 bp, Artificial
  Synthetic oligonucleotide
gttcagtatggtccaacgggagaaccactagatttccgaataggacgtgggcagt

SEQ ID NO: 444086 - DNA, 58 bp, Artificial
  Synthetic oligonucleotide
gttcagtattacaccggcaagaaagttgtgtcaccaatcagtccaactgtgtataaac

SEQ ID NO: 444087 - DNA, 60 bp, Artificial
  Synthetic oligonucleotide
gttcagtattggagttggagctaaaaagagtactattagcctgattgataccatagcaat

SEQ ID NO: 444088 - DNA, 60 bp, Artificial
  Synthetic oligonucleotide
gttcagtcaacacagggctaatcatccagatgctcctggatggtgtgggttttactggca

SEQ ID NO: 444089 - DNA, 55 bp, Artificial
  Synthetic oligonucleotide
gttcagtcaatggtgtgaataacttcagttacaatggaggatcactgccaactca

SEQ ID NO: 444090 - DNA, 54 bp, Artificial
  Synthetic oligonucleotide
gttcagtccaagccttttgtaagacccccaatacgaacctatgggcctctacta

SEQ ID NO: 444091 - DNA, 53 bp, Artificial
  Synthetic oligonucleotide
gttcagtcccggcgttggagacccctaatgatgatttagtctaagttcacaag

SEQ ID NO: 444092 - DNA, 55 bp, Artificial
  Synthetic oligonucleotide
gttcagtcctataccagtgtccgatccaccgtttccgtccatcatcaggaagttg

SEQ ID NO: 444093 - DNA, 58 bp, Artificial
  Synthetic oligonucleotide
gttcagtcgagtagctgcgagacgtagatggtcgaagtttcctgttcgaggtaataaa

SEQ ID NO: 444094 - DNA, 60 bp, Artificial
  Synthetic oligonucleotide
gttcagtcgcataggccaaagggcgtctatgcgcacacgcagtggtaaacatattggggc

SEQ ID NO: 444095 - DNA, 60 bp, Artificial
  Synthetic oligonucleotide
gttcagtcgtctgatgctggagattatgtcaataccgataagggtggtcttgtctccggt

SEQ ID NO: 444096 - DNA, 58 bp, Artificial
  Synthetic oligonucleotide
gttcagtgaccgactgagtatccatctacctaagaccacccgcttgacacccaaggaa

SEQ ID NO: 444097 - DNA, 58 bp, Artificial
  Synthetic oligonucleotide
gttcagtgtgctgaacgtttcggtaaagcctgtgtggtggtatataatggtttggatc

SEQ ID NO: 444098 - DNA, 57 bp, Artificial
  Synthetic oligonucleotide
gttcagttaattctcccgtctaatgcgcttccctgtttttatgttattctctctgta

SEQ ID NO: 444099 - DNA, 50 bp, Artificial
  Synthetic oligonucleotide
gttcagttagagaatgttaagggtgaaaacgcaaaacttaccaaaaccct

SEQ ID NO: 444100 - DNA, 55 bp, Artificial
  Synthetic oligonucleotide
gttcagttagattgagaatatatggtgactttgattacgcagttgagcacgacgg

SEQ ID NO: 444101 - DNA, 51 bp, Artificial
  Synthetic oligonucleotide
gttcagttagcgagatggcgcgttttagtttcttcctggcgtttggagtta

SEQ ID NO: 444102 - DNA, 60 bp, Artificial
  Synthetic oligonucleotide
gttcagttccactgggaatagatccaacgtgcctagagaaataccagagctagagactaa

SEQ ID NO: 444103 - DNA, 53 bp, Artificial
  Synthetic oligonucleotide
gttcagtttaataaataggggggtcttttccatctcgacggtgtgtgtacgaa

SEQ ID NO: 444104 - DNA, 56 bp, Artificial
  Synthetic oligonucleotide
gttcataacacgcctttacagttggttgttcgagaagtccggccgtgattatatcc

SEQ ID NO: 444105 - DNA, 60 bp, Artificial
  Synthetic oligonucleotide
gttcataagtaactggatggacaagagtataggcgtcgatgcttacatggtagaggtgtg

SEQ ID NO: 444106 - DNA, 60 bp, Artificial
  Synthetic oligonucleotide
gttcataccaccaggtgcaccaaacccaatcaaatgggatgactacacatggcaaagtgc

SEQ ID NO: 444107 - DNA, 54 bp, Artificial
  Synthetic oligonucleotide
gttcataccctgtatacatggcaccagtcccagaaattctagcctacaatgcct

SEQ ID NO: 444108 - DNA, 58 bp, Artificial
  Synthetic oligonucleotide
gttcatagaagtgactccccgagtagatttagccagttctattaagttagcttgtgga

SEQ ID NO: 444109 - DNA, 60 bp, Artificial
  Synthetic oligonucleotide
gttcatagccgagatgaggcaacgagttcaggctgatcgaaatgtagttaattatccatc

SEQ ID NO: 444110 - DNA, 60 bp, Artificial
  Synthetic oligonucleotide
gttcatatggatataagtggagatatttatggttgatagtgacattactatcaaccatga

SEQ ID NO: 444111 - DNA, 55 bp, Artificial
  Synthetic oligonucleotide
gttcatatgtttcaccacgtgttaatggtaggcgtcgtgttagtaacccaaacag

SEQ ID NO: 444112 - DNA, 60 bp, Artificial
  Synthetic oligonucleotide
gttcatattagtccattgtcaggaagtgctcaacatatagaggagtgttcctgttacccc

SEQ ID NO: 444113 - DNA, 55 bp, Artificial
  Synthetic oligonucleotide
gttcatcaaacgttcaccatgatgattatgaagaacaccgttcgagtgtcatcga

SEQ ID NO: 444114 - DNA, 59 bp, Artificial
  Synthetic oligonucleotide
gttcatcaaagattacagatacacgtaccggtgtcacaggggtgacactcaaatacaaa

SEQ ID NO: 444115 - DNA, 60 bp, Artificial
  Synthetic oligonucleotide
gttcatcaaggattacagatacacataccggtgccacagaggggacactcaaatccagac

SEQ ID NO: 444116 - DNA, 55 bp, Artificial
  Synthetic oligonucleotide
gttcatcacgtatatggtcgcttattcatcgaactttactgctgatgatcaagta

SEQ ID NO: 444117 - DNA, 54 bp, Artificial
  Synthetic oligonucleotide
gttcatcactggactaaggcccaaatgttctcatttcttaaaagcacgaaggtc

SEQ ID NO: 444118 - DNA, 60 bp, Artificial
  Synthetic oligonucleotide
gttcatcagctggtcaatctctgtcaatggatccatctaagtttactgaaccagttaaag

SEQ ID NO: 444119 - DNA, 51 bp, Artificial
  Synthetic oligonucleotide
gttcatcagtcacgcaagttgaactagacaaagctttgaagcagttgctag

SEQ ID NO: 444120 - DNA, 54 bp, Artificial
  Synthetic oligonucleotide
gttcatcatggacggaattcactctgcgttaccaccggtgtgtgccgaagaagc

SEQ ID NO: 444121 - DNA, 60 bp, Artificial
  Synthetic oligonucleotide
gttcatccttgcctcgatagaccatggcagattcaattgacggaggcaattgacgaggaa

SEQ ID NO: 444122 - DNA, 57 bp, Artificial
  Synthetic oligonucleotide
gttcatcgacgtttttagcatcgatgggttttatgtttactcgttgagtcacaagaa

SEQ ID NO: 444123 - DNA, 55 bp, Artificial
  Synthetic oligonucleotide
gttcatcgcaatcttttcaacgtcaccctcagtactacataagcgttcgttgggg

SEQ ID NO: 444124 - DNA, 55 bp, Artificial
  Synthetic oligonucleotide
gttcatcggaactaccaaactggcttattccggtgtcaattttcgattttcgaca

SEQ ID NO: 444125 - DNA, 60 bp, Artificial
  Synthetic oligonucleotide
gttcatctattagatctaacatatcatccatatcagtgtggacagatgtttccgaacaaa

SEQ ID NO: 444126 - DNA, 55 bp, Artificial
  Synthetic oligonucleotide
gttcatgaaattcgaaagttttacgcgtggcttcttgaaatgcaacccttcgcga

SEQ ID NO: 444127 - DNA, 57 bp, Artificial
  Synthetic oligonucleotide
gttcatgaaccctaccggctccgggctaaagaccgagacttgcagtttgcttagatc

SEQ ID NO: 444128 - DNA, 55 bp, Artificial
  Synthetic oligonucleotide
gttcatgaaggaaaatgctcaggtgtcggcgcaaactcatggaacccctgacccc

SEQ ID NO: 444129 - DNA, 55 bp, Artificial
  Synthetic oligonucleotide
gttcatgaagttcagggcgaaacgtacgaaaagacagcgatcgttcggttaacag

SEQ ID NO: 444130 - DNA, 56 bp, Artificial
  Synthetic oligonucleotide
gttcatgacctcaacagttaggtgcgaaactacgtttgtcaacatcaccggttgtt

SEQ ID NO: 444131 - DNA, 55 bp, Artificial
  Synthetic oligonucleotide
gttcatgacgctgagttacctcgcatattggttgatcataagagccaaacatgtc

SEQ ID NO: 444132 - DNA, 60 bp, Artificial
  Synthetic oligonucleotide
gttcatgagcttaagattgaatgtccacacacagtagtgctagggcaaggttatgttgca

SEQ ID NO: 444133 - DNA, 55 bp, Artificial
  Synthetic oligonucleotide
gttcatgatctacccctagttagttgacaacgattcgatattatcttttcgttcg

SEQ ID NO: 444134 - DNA, 54 bp, Artificial
  Synthetic oligonucleotide
gttcatgctgattacgatccgtttgctgcaggtatgagcaagtacgcacgagag

SEQ ID NO: 444135 - DNA, 51 bp, Artificial
  Synthetic oligonucleotide
gttcatgctttggagactcagcgttgtggattgctgaaacatgtatggcga

SEQ ID NO: 444136 - DNA, 55 bp, Artificial
  Synthetic oligonucleotide
gttcatggccgtctcagtttcgacgattgtcggtagcgcgatgtcctccgaggcg

SEQ ID NO: 444137 - DNA, 60 bp, Artificial
  Synthetic oligonucleotide
gttcatgtcctcacgcgctattggattagcctatgcttcatgtgcacaagattctacatt

SEQ ID NO: 444138 - DNA, 55 bp, Artificial
  Synthetic oligonucleotide
gttcatgtgcaaggagaaagctggtacacttatggccatggacggaacgattcgc

SEQ ID NO: 444139 - DNA, 60 bp, Artificial
  Synthetic oligonucleotide
gttcatgtgccaacgccctgtgcgggatgaaacctctactgccctaggaatgccaggcag

SEQ ID NO: 444140 - DNA, 60 bp, Artificial
  Synthetic oligonucleotide
gttcatgttctagagttttgcacgctcgacaattgcaagttcgctatcgtcggcgaggag

SEQ ID NO: 444141 - DNA, 55 bp, Artificial
  Synthetic oligonucleotide
gttcattagaaccgttgattcttatcttctcagcccgagtgtgaccggaagctgt

SEQ ID NO: 444142 - DNA, 55 bp, Artificial
  Synthetic oligonucleotide
gttcattataagtcaggccttgcggagacttacattctggacagttatgggatgg

SEQ ID NO: 444143 - DNA, 55 bp, Artificial
  Synthetic oligonucleotide
gttcattcaattatcacaggagaatcatatggtgaatccgtaaagcaggcggtac

SEQ ID NO: 444144 - DNA, 60 bp, Artificial
  Synthetic oligonucleotide
gttcattcatgacctatcaggctactgagaaaaccccaacatacaagcgtgctcttgcgg

SEQ ID NO: 444145 - DNA, 59 bp, Artificial
  Synthetic oligonucleotide
gttcattccctactaggtgcataacgatcaattgggcttctacattgtcagagggttcc

SEQ ID NO: 444146 - DNA, 58 bp, Artificial
  Synthetic oligonucleotide
gttcattgaaagcagaactgaggccactagaaaaggttgaggctaacaaaacacgcac

SEQ ID NO: 444147 - DNA, 60 bp, Artificial
  Synthetic oligonucleotide
gttcattgaatgcatgagattatgtttttgtggtataggatatagaggcatgaatccaca

SEQ ID NO: 444148 - DNA, 52 bp, Artificial
  Synthetic oligonucleotide
gttcattgtaagtttacaactagaagtacctaagtcgacgactatgctacaa

SEQ ID NO: 444149 - DNA, 57 bp, Artificial
  Synthetic oligonucleotide
gttcatttatgggtacttagagcctgtagatgacgggacagattggttcctatacgt

SEQ ID NO: 444150 - DNA, 55 bp, Artificial
  Synthetic oligonucleotide
gttcatttgccaaacactctcctatttgacataggacttcgtgtcaggtttgaac

SEQ ID NO: 444151 - DNA, 55 bp, Artificial
  Synthetic oligonucleotide
gttccaaaacacggtctgtcgggacttagacgacttcaagaagaggctcgggatc

SEQ ID NO: 444152 - DNA, 56 bp, Artificial
  Synthetic oligonucleotide
gttccaaactggtgaaatcattggcttaccccattttcaaacctgactatggccca

SEQ ID NO: 444153 - DNA, 57 bp, Artificial
  Synthetic oligonucleotide
gttccaaacttagaaccaaatgattaagcgcagtaatatactgatccctaatttcga

SEQ ID NO: 444154 - DNA, 54 bp, Artificial
  Synthetic oligonucleotide
gttccaaatggagcttgacgaaatatttcgaccgggaaataacgagcgtaccaa

SEQ ID NO: 444155 - DNA, 54 bp, Artificial
  Synthetic oligonucleotide
gttccaacaaatgagggatgtgcttgggacatttgacaccgctcagataataaa

SEQ ID NO: 444156 - DNA, 60 bp, Artificial
  Synthetic oligonucleotide
gttccaacaggtgaatttccattacatcagatgatgctgataagacgcgatttcccaacg

SEQ ID NO: 444157 - DNA, 60 bp, Artificial
  Synthetic oligonucleotide
gttccaacatatggcagctagtatgccgcagagaatagcgtgcagcagtgggttatatgg

SEQ ID NO: 444158 - DNA, 55 bp, Artificial
  Synthetic oligonucleotide
gttccaacggcggggaaggctcttcaataccactacatattcggagcttctcgcc

SEQ ID NO: 444159 - DNA, 54 bp, Artificial
  Synthetic oligonucleotide
gttccaagaggacaactatccaccagaggggttaaagttgctttatttgagaac

SEQ ID NO: 444160 - DNA, 59 bp, Artificial
  Synthetic oligonucleotide
gttccaagaggctgtgaagggccctgtaagatccagtcgtttgaacaacgccatgatgt

SEQ ID NO: 444161 - DNA, 55 bp, Artificial
  Synthetic oligonucleotide
gttccaaggcacagaatggaacatcaagccgtctaatgtggttgtacctatgcaa

SEQ ID NO: 444162 - DNA, 60 bp, Artificial
  Synthetic oligonucleotide
gttccaagtcaaagcggacagatccacctgcaagtcgggagaggaatatgtgagttacca

SEQ ID NO: 444163 - DNA, 55 bp, Artificial
  Synthetic oligonucleotide
gttccaatcaaccatttcacaaggttagagatcattggaagggaaggtgcaggca

SEQ ID NO: 444164 - DNA, 56 bp, Artificial
  Synthetic oligonucleotide
gttccaatcatcaagcccgtccaaactcattcgccgagtttctaaacaagacgtat

SEQ ID NO: 444165 - DNA, 60 bp, Artificial
  Synthetic oligonucleotide
gttccaatccatccaaatcgccattagttagagcagcacttcgttttcagttcaatggca

SEQ ID NO: 444166 - DNA, 50 bp, Artificial
  Synthetic oligonucleotide
gttccaatctggtgattttacctggtcaagatctccaatatgttttggca

SEQ ID NO: 444167 - DNA, 55 bp, Artificial
  Synthetic oligonucleotide
gttccaattactgctttgacataactatcccaaagaatgaggaaagagtgcaggc

SEQ ID NO: 444168 - DNA, 55 bp, Artificial
  Synthetic oligonucleotide
gttccaattggcgtagcccaggaacttaaacaagaattggctgaatggatacccc

SEQ ID NO: 444169 - DNA, 60 bp, Artificial
  Synthetic oligonucleotide
gttccaattgttgaggtactcagtccagctcaaacaactgtgtcaatagtaggttcagac

SEQ ID NO: 444170 - DNA, 57 bp, Artificial
  Synthetic oligonucleotide
gttccacaagaactgctgacattgagcttcctacaagggactttccgctggggactt

SEQ ID NO: 444171 - DNA, 60 bp, Artificial
  Synthetic oligonucleotide
gttccacacgcggctgtagaccacgtcgccaacagtgtttcgggcgcgcatcaccacttg

SEQ ID NO: 444172 - DNA, 58 bp, Artificial
  Synthetic oligonucleotide
gttccacagtgagtttactggtaggcttagccacttatcaaatggtcttatagaccac

SEQ ID NO: 444173 - DNA, 60 bp, Artificial
  Synthetic oligonucleotide
gttccacatttgacattcggagtactatttatatccgataatatgatacacgatgtaatc

SEQ ID NO: 444174 - DNA, 51 bp, Artificial
  Synthetic oligonucleotide
gttccaccacgtatttgagggaaacaaggaaccagcagtgctgcgaaatgg

SEQ ID NO: 444175 - DNA, 60 bp, Artificial
  Synthetic oligonucleotide
gttccaccagctcccagtggtataggcgatacttacagatacttaaaatctgatgctaca

SEQ ID NO: 444176 - DNA, 60 bp, Artificial
  Synthetic oligonucleotide
gttccacctattgacccagagatccagtgtgcagcactgatgatagctgatataaaaggg

SEQ ID NO: 444177 - DNA, 55 bp, Artificial
  Synthetic oligonucleotide
gttccacgtaggtgacgacgtgctaattctgctggatagccctgcagacgcgtgg

SEQ ID NO: 444178 - DNA, 59 bp, Artificial
  Synthetic oligonucleotide
gttccacgttccactatcagtacagacagtaagttgcgggtcagcgagactcttccgac

SEQ ID NO: 444179 - DNA, 55 bp, Artificial
  Synthetic oligonucleotide
gttccactatacatgagaggtaagtggtatccctctatctatcaccaagaggagg

SEQ ID NO: 444180 - DNA, 56 bp, Artificial
  Synthetic oligonucleotide
gttccacttgttccacaacttgccgctaggacaccaactgattacaattttggaac

SEQ ID NO: 444181 - DNA, 58 bp, Artificial
  Synthetic oligonucleotide
gttccagaaggaagtgaagaagttgctgaggcgtaagtgcagtttcggtagaaagtgc

SEQ ID NO: 444182 - DNA, 55 bp, Artificial
  Synthetic oligonucleotide
gttccagacgatcaaatgtatagattgagagatagattacgattactaccagtgg

SEQ ID NO: 444183 - DNA, 55 bp, Artificial
  Synthetic oligonucleotide
gttccagagctccaaactttctaaggttggatgatcaagtatcgctgaaacttac

SEQ ID NO: 444184 - DNA, 59 bp, Artificial
  Synthetic oligonucleotide
gttccagagggggtcagcatattgccgacgttcaatgagttgttcggggaatatgaatc

SEQ ID NO: 444185 - DNA, 59 bp, Artificial
  Synthetic oligonucleotide
gttccagcacagaattccttggacaatggaactggcctgatggggctaaaatagagtac

SEQ ID NO: 444186 - DNA, 54 bp, Artificial
  Synthetic oligonucleotide
gttccagctaacaattggcaatcgagaataattcaaacgcctgttgggacgtcg

SEQ ID NO: 444187 - DNA, 56 bp, Artificial
  Synthetic oligonucleotide
gttccaggagtccgagattctagcatcagattagttaaagtctctaagatagcttc

SEQ ID NO: 444188 - DNA, 54 bp, Artificial
  Synthetic oligonucleotide
gttccagggatctgctgtagtcaactaaaacctgggctcttcgtggttacgggg

SEQ ID NO: 444189 - DNA, 54 bp, Artificial
  Synthetic oligonucleotide
gttccaggggacatgtttttgttataagggagcctttcgtctcttgttcgccca

SEQ ID NO: 444190 - DNA, 55 bp, Artificial
  Synthetic oligonucleotide
gttccaggggctacctggactgacaaagaggggactgtatatgatggaaaccctg

SEQ ID NO: 444191 - DNA, 60 bp, Artificial
  Synthetic oligonucleotide
gttccagtataaaacctggctacttagatccctttctcgtctagctgactctgccactca

SEQ ID NO: 444192 - DNA, 55 bp, Artificial
  Synthetic oligonucleotide
gttccagtctccaaggctaaacgtgatatttcatctctcgccgccacccctggac

SEQ ID NO: 444193 - DNA, 53 bp, Artificial
  Synthetic oligonucleotide
gttccagtgggtcgatgccttttgcttccggcttattcgacacttagacggaa

SEQ ID NO: 444194 - DNA, 60 bp, Artificial
  Synthetic oligonucleotide
gttccagttgccactactgtttaccacagagtgaagaagatttatgaatctgttggaaca

SEQ ID NO: 444195 - DNA, 57 bp, Artificial
  Synthetic oligonucleotide
gttccatattagtaacgagaccataattaacattcctatgaacacacgaagaacttc

SEQ ID NO: 444196 - DNA, 60 bp, Artificial
  Synthetic oligonucleotide
gttccatctcaagagtgtagatgcagttaaaaagggggctatgatgtcagcggtgtacac

SEQ ID NO: 444197 - DNA, 60 bp, Artificial
  Synthetic oligonucleotide
gttccatgcctgcttcaatcagcatatgtcttgcgtcagatttttacacaggacaatatt

SEQ ID NO: 444198 - DNA, 51 bp, Artificial
  Synthetic oligonucleotide
gttccatgcggatacgcccttttgcggcttttgtatggcggcccacgggtc

SEQ ID NO: 444199 - DNA, 60 bp, Artificial
  Synthetic oligonucleotide
gttccatggtaataggtagttccgtgcgaaaatccgtgatggcattcatgatgaattgtg

SEQ ID NO: 444200 - DNA, 59 bp, Artificial
  Synthetic oligonucleotide
gttccatggtttgtgagatctgtaagtacgagtgtgaaacattaaaggaattgaaggca

SEQ ID NO: 444201 - DNA, 60 bp, Artificial
  Synthetic oligonucleotide
gttccattagacatttgtcaatccatctgtaaatatccagattatttgcaaatgtctgct

SEQ ID NO: 444202 - DNA, 59 bp, Artificial
  Synthetic oligonucleotide
gttccattctcaataccagtcaaaggggaattcttgaggatgaacagatgtaccagaaa

SEQ ID NO: 444203 - DNA, 55 bp, Artificial
  Synthetic oligonucleotide
gttccattctcttctcaatgttgattctactaaggctctcacaagactggctagg

SEQ ID NO: 444204 - DNA, 54 bp, Artificial
  Synthetic oligonucleotide
gttccattgagtcaccagccaacgctcccgcaactatcgccagaaaaggttcta

SEQ ID NO: 444205 - DNA, 55 bp, Artificial
  Synthetic oligonucleotide
gttccatttatttacaccagaggtgcttaccattttaaagatccacaatacccag

SEQ ID NO: 444206 - DNA, 54 bp, Artificial
  Synthetic oligonucleotide
gttcccaaacatgtacatccctgtagggcaggttacagactacggttttctaaa

SEQ ID NO: 444207 - DNA, 60 bp, Artificial
  Synthetic oligonucleotide
gttcccaacagctttcctctagcggtctactgtgatggtcatttacaggattttgtgctc

SEQ ID NO: 444208 - DNA, 55 bp, Artificial
  Synthetic oligonucleotide
gttcccaagggttgtgaagggccgtgtaaggttcagtctttcgagcagcggcatg

SEQ ID NO: 444209 - DNA, 54 bp, Artificial
  Synthetic oligonucleotide
gttcccaatcgcactagaacgtatataaaattgaaacgactgcgttttaaggga

SEQ ID NO: 444210 - DNA, 60 bp, Artificial
  Synthetic oligonucleotide
gttcccacatcgcacacccactcccacgtgaagcacatcttaaggaattaagatttgcaa

SEQ ID NO: 444211 - DNA, 60 bp, Artificial
  Synthetic oligonucleotide
gttcccacccatggattacgagattagtcgctaatagggcgcgggatgacgtgcatatta

SEQ ID NO: 444212 - DNA, 55 bp, Artificial
  Synthetic oligonucleotide
gttcccacctgtatcacccaagtggtgtggtgctcttgtatttcggtacgtttgc

SEQ ID NO: 444213 - DNA, 53 bp, Artificial
  Synthetic oligonucleotide
gttcccacgaacccattcaaagtatggtagtgggacggtcatggatgtggtgg

SEQ ID NO: 444214 - DNA, 52 bp, Artificial
  Synthetic oligonucleotide
gttcccacgtcagccattacgggtcagactccagccaagcaacacagtcacc

SEQ ID NO: 444215 - DNA, 58 bp, Artificial
  Synthetic oligonucleotide
gttcccaggtcagatagtcttagatttaaagatagatccgggtgaaagaatggatcca

SEQ ID NO: 444216 - DNA, 59 bp, Artificial
  Synthetic oligonucleotide
gttcccagttgattcgtgtgcgcagatggacttatcgtcgtttgtgggcgtcgagtccc

SEQ ID NO: 444217 - DNA, 60 bp, Artificial
  Synthetic oligonucleotide
gttcccataacggtcaccgttgcacccatgtgtgcggaatacaatggtctgagattggca

SEQ ID NO: 444218 - DNA, 60 bp, Artificial
  Synthetic oligonucleotide
gttcccatgcggaaagataacctgccctgactgtgtaacagacagtgagctatcccaagg

SEQ ID NO: 444219 - DNA, 54 bp, Artificial
  Synthetic oligonucleotide
gttcccatgtggtacgttattgagttcaacggagttcagtatccgtactaaagg

SEQ ID NO: 444220 - DNA, 60 bp, Artificial
  Synthetic oligonucleotide
gttcccatttttgattcaccctactatgccaatgagggagatccatgagtccattcgatg

SEQ ID NO: 444221 - DNA, 59 bp, Artificial
  Synthetic oligonucleotide
gttccccaaaagtacatgggcaggagtagacaccagcagtggggtatcaagtgcttgtc

SEQ ID NO: 444222 - DNA, 59 bp, Artificial
  Synthetic oligonucleotide
gttccccaagagcacatggaccggagtggacactaatagtggagttacgagcgcttgcc

SEQ ID NO: 444223 - DNA, 55 bp, Artificial
  Synthetic oligonucleotide
gttccccatatcatcgaactccactgcgcttattggatgcacaggcagcgagctc

SEQ ID NO: 444224 - DNA, 58 bp, Artificial
  Synthetic oligonucleotide
gttccccatatgtctctatcgtacttctattatgtgcgtatgtggtccctccgcatta

SEQ ID NO: 444225 - DNA, 60 bp, Artificial
  Synthetic oligonucleotide
gttcccccatcactaggattgctgagcgagctactgctatgttagagtacgccgcttatg

SEQ ID NO: 444226 - DNA, 55 bp, Artificial
  Synthetic oligonucleotide
gttccccgacctgggtgtgcgcgtatgcgagaaaatggctttgtacgacgtggtc

SEQ ID NO: 444227 - DNA, 58 bp, Artificial
  Synthetic oligonucleotide
gttcccctccttggctagcctgtgcttcactttgattggaacctgtgtagagtgggct

SEQ ID NO: 444228 - DNA, 60 bp, Artificial
  Synthetic oligonucleotide
gttcccctgtgcgtgaatccatgcccggtacagcctatgtgaaagtatatggagcacccg

SEQ ID NO: 444229 - DNA, 60 bp, Artificial
  Synthetic oligonucleotide
gttcccctgtgcgtgaatccatggttgtggcaggctaatgcaatgaagtatgaacagccg

SEQ ID NO: 444230 - DNA, 60 bp, Artificial
  Synthetic oligonucleotide
gttcccctgtgcgtgaatccatgtcctgtgcagccgatgtggaagtaaatggagcacccg

SEQ ID NO: 444231 - DNA, 57 bp, Artificial
  Synthetic oligonucleotide
gttccccttgtttcgagggacatgaagcccgttatcggcgccgattgtatgaggctg

SEQ ID NO: 444232 - DNA, 60 bp, Artificial
  Synthetic oligonucleotide
gttcccgaagacgtaacatcatcctgcacgacctggcgtgtctgcatcatgctcggagtt

SEQ ID NO: 444233 - DNA, 50 bp, Artificial
  Synthetic oligonucleotide
gttcccgacacgttaatcacggggccgaacgtaggcaagtgcatataagc

SEQ ID NO: 444234 - DNA, 58 bp, Artificial
  Synthetic oligonucleotide
gttcccgagcgactcggatgtacgtgggcttgacgacagaccatggcaagtcccgaag

SEQ ID NO: 444235 - DNA, 51 bp, Artificial
  Synthetic oligonucleotide
gttcccgatgtacgtgatgttggcgttcaatctgaaatcacagttcgtacc

SEQ ID NO: 444236 - DNA, 56 bp, Artificial
  Synthetic oligonucleotide
gttcccgattttctacgtgattacttcgctaggaaaggggttcatacgagtgtgca

SEQ ID NO: 444237 - DNA, 55 bp, Artificial
  Synthetic oligonucleotide
gttcccgccctagaggcccacgtggcggctagcactctggtatcacggtaccttt

SEQ ID NO: 444238 - DNA, 50 bp, Artificial
  Synthetic oligonucleotide
gttcccgccttttgatagatgaggccggtttgttgcattatggtcagtta

SEQ ID NO: 444239 - DNA, 51 bp, Artificial
  Synthetic oligonucleotide
gttcccggcataccagatggatggcccgacacaacaatcccaggtgagttg

SEQ ID NO: 444240 - DNA, 54 bp, Artificial
  Synthetic oligonucleotide
gttcccgggtatgtgttttgtcccgtggaaagacctgacggctatgagcgaccc

SEQ ID NO: 444241 - DNA, 59 bp, Artificial
  Synthetic oligonucleotide
gttcccgtcaccacgactcctgcctcgcgattggactgaagacactgacacccgcccca

SEQ ID NO: 444242 - DNA, 59 bp, Artificial
  Synthetic oligonucleotide
gttcccgtgagttgggttcccatgggtcgcaccacttggagcatccacgcgagtggtga

SEQ ID NO: 444243 - DNA, 58 bp, Artificial
  Synthetic oligonucleotide
gttcccgtgtttgagaacactcacgttagttacgcctgctggcaagaggaagagtctc

SEQ ID NO: 444244 - DNA, 50 bp, Artificial
  Synthetic oligonucleotide
gttccctatcggtagtccagagcataaagcattctctgatacttgcatcg

SEQ ID NO: 444245 - DNA, 53 bp, Artificial
  Synthetic oligonucleotide
gttccctcaaacaattatcgcgagttactgattcaacaggtgagttattcccc

SEQ ID NO: 444246 - DNA, 60 bp, Artificial
  Synthetic oligonucleotide
gttccctccatgtagcagagctgcccccgctttcacagccgcaccaagactgaaattata

SEQ ID NO: 444247 - DNA, 59 bp, Artificial
  Synthetic oligonucleotide
gttccctctagggagacggttcctagctcagcaaggtttaggatgcacaacaatagtgc

SEQ ID NO: 444248 - DNA, 56 bp, Artificial
  Synthetic oligonucleotide
gttccctgaaaccgtacatggttttaggtgtatgcttgcaattaaatatcttcagt

SEQ ID NO: 444249 - DNA, 55 bp, Artificial
  Synthetic oligonucleotide
gttccctgagacgctactatctggagacacctcctatcactgctactgtgaccac

SEQ ID NO: 444250 - DNA, 58 bp, Artificial
  Synthetic oligonucleotide
gttccctgctagactctcaccagcacttggccggtgctgggcagagcggctccacgct

SEQ ID NO: 444251 - DNA, 60 bp, Artificial
  Synthetic oligonucleotide
gttccctgtcactggcaatcatgatagctgggatctctctatggatgtgctccaacgggt

SEQ ID NO: 444252 - DNA, 53 bp, Artificial
  Synthetic oligonucleotide
gttcccttatatgaagactttagaaaatatactgcattcactatacctagtag

SEQ ID NO: 444253 - DNA, 55 bp, Artificial
  Synthetic oligonucleotide
gttcccttctatgataatggatttggccttatggctgtcggcaacaggcctgcca

SEQ ID NO: 444254 - DNA, 60 bp, Artificial
  Synthetic oligonucleotide
gttcccttgtaggtcatatggttggtggttggaatgcatttcatattgacattccatcaa

SEQ ID NO: 444255 - DNA, 55 bp, Artificial
  Synthetic oligonucleotide
gttcccttttctcgggctgatctccaaggctacctcggcctttcagagcccagtc

SEQ ID NO: 444256 - DNA, 53 bp, Artificial
  Synthetic oligonucleotide
gttccgaaaacagctttcagttactaaacagctttcgtttcgattaaacagcc

SEQ ID NO: 444257 - DNA, 55 bp, Artificial
  Synthetic oligonucleotide
gttccgaaagcctcggatgtacagaatgttcagaagccctgatgttcccagaggt

SEQ ID NO: 444258 - DNA, 52 bp, Artificial
  Synthetic oligonucleotide
gttccgaaagtttcggagctacctgaacttccgtcgaaatgggtggactacc

SEQ ID NO: 444259 - DNA, 59 bp, Artificial
  Synthetic oligonucleotide
gttccgaccactgtctctcacacatcgtcaatcttctcgaggactggggaccctgcact

SEQ ID NO: 444260 - DNA, 55 bp, Artificial
  Synthetic oligonucleotide
gttccgagaaaacagctttcagttactaaaacagctttcagttacagaacagctt

SEQ ID NO: 444261 - DNA, 60 bp, Artificial
  Synthetic oligonucleotide
gttccgagaccatcctcgatcaacactatcagaggagacttgaaaccggtggacgtatca

SEQ ID NO: 444262 - DNA, 59 bp, Artificial
  Synthetic oligonucleotide
gttccgagagggaactgaagcatatcgagaggatatgcgttataggggagatggacccc

SEQ ID NO: 444263 - DNA, 56 bp, Artificial
  Synthetic oligonucleotide
gttccgatgaattgaaaattaagacctggttcgtagagtattatctgaatataaac

SEQ ID NO: 444264 - DNA, 52 bp, Artificial
  Synthetic oligonucleotide
gttccgattcaggttacggaagaaagaaccctcgtaaggttcttctgaggag

SEQ ID NO: 444265 - DNA, 54 bp, Artificial
  Synthetic oligonucleotide
gttccgcaaaacactgcgtaatttcagcaacggcttcgtttgttactcccaccg

SEQ ID NO: 444266 - DNA, 60 bp, Artificial
  Synthetic oligonucleotide
gttccgcaatttgtagctgattggataagtcgtcgtagacaagaaggatacaatttgatc

SEQ ID NO: 444267 - DNA, 57 bp, Artificial
  Synthetic oligonucleotide
gttccgcagttccttcgcttatagatgtcttgatctctggcgctgatgcatctccta

SEQ ID NO: 444268 - DNA, 52 bp, Artificial
  Synthetic oligonucleotide
gttccgccccacgaaacacacggggggacttttattcatagagaaggttgtg

SEQ ID NO: 444269 - DNA, 55 bp, Artificial
  Synthetic oligonucleotide
gttccgcgctccagtgtcatgctatggaccctagcttcatatcaactttcgacgc

SEQ ID NO: 444270 - DNA, 58 bp, Artificial
  Synthetic oligonucleotide
gttccgcgtctcggcttttctgccagtccgtggcgaatgaatggtcaaggattaggga

SEQ ID NO: 444271 - DNA, 57 bp, Artificial
  Synthetic oligonucleotide
gttccgcttctggcgtaagaatttggcactcgattagaagagctcgaaattcttttg

SEQ ID NO: 444272 - DNA, 55 bp, Artificial
  Synthetic oligonucleotide
gttccggaggtaggtactatcccagatatccaaacttggttcgatgctacgtttc

SEQ ID NO: 444273 - DNA, 55 bp, Artificial
  Synthetic oligonucleotide
gttccggagtctaagcgatgggctagagtctcgtgtatttccaatgaccagattg

SEQ ID NO: 444274 - DNA, 52 bp, Artificial
  Synthetic oligonucleotide
gttccggcctcagacaaccggttcaggtacttacatatttgaagctggtggt

SEQ ID NO: 444275 - DNA, 59 bp, Artificial
  Synthetic oligonucleotide
gttccggctagcattagagcggggcgtataaggctaagatttccgctaagcgcgcgaca

SEQ ID NO: 444276 - DNA, 59 bp, Artificial
  Synthetic oligonucleotide
gttccgtgagtgacgtcagttcctctttcccacgtgtcgtcactgccgggtatcttgca

SEQ ID NO: 444277 - DNA, 60 bp, Artificial
  Synthetic oligonucleotide
gttccgtgcagtatatcacatagtggtagtttagactgcgggtgtcgttgatcacgttag

SEQ ID NO: 444278 - DNA, 56 bp, Artificial
  Synthetic oligonucleotide
gttccgttcaaatccgttgtcaacggagcgccagactaccgactgtgtttactgta

SEQ ID NO: 444279 - DNA, 57 bp, Artificial
  Synthetic oligonucleotide
gttccgtttactgacggatttgaaacggaatacctgaacaatgctgataatctgtcg

SEQ ID NO: 444280 - DNA, 59 bp, Artificial
  Synthetic oligonucleotide
gttcctaaaagaatttaatccaagcatgcaattaatagtaagctatgcagatacggacc

SEQ ID NO: 444281 - DNA, 50 bp, Artificial
  Synthetic oligonucleotide
gttcctaacccggcgcgggatctacatattagtgggttcgccgccgacgc

SEQ ID NO: 444282 - DNA, 55 bp, Artificial
  Synthetic oligonucleotide
gttcctacgaaagcaatctgtcttaataagcgtaaggattttacgcctgtacagg

SEQ ID NO: 444283 - DNA, 55 bp, Artificial
  Synthetic oligonucleotide
gttcctagaaacggacaagtagaatgcagttcttcaaagatgatggctaatacgc

SEQ ID NO: 444284 - DNA, 55 bp, Artificial
  Synthetic oligonucleotide
gttcctagaagcgcagtcgatgaatgctagggtggacatgctcactggtgtccac

SEQ ID NO: 444285 - DNA, 59 bp, Artificial
  Synthetic oligonucleotide
gttcctagaggctgtgaagggccttgtaaggttcagtcttacgagtctcgtcatgatgt

SEQ ID NO: 444286 - DNA, 53 bp, Artificial
  Synthetic oligonucleotide
gttcctagctgagaagggattcctcagggtagctcacacctacgacacatcag

SEQ ID NO: 444287 - DNA, 55 bp, Artificial
  Synthetic oligonucleotide
gttcctagggcctatggaaggaggtggtataatctttaaacactggtgcacatca

SEQ ID NO: 444288 - DNA, 55 bp, Artificial
  Synthetic oligonucleotide
gttcctataactaagcgagcttgggcccagggagtgatgcctcttgagcatgcta

SEQ ID NO: 444289 - DNA, 60 bp, Artificial
  Synthetic oligonucleotide
gttcctatatcaagctaaagagtctgaacatatctgggacatttgctgttcgtaaatctg

SEQ ID NO: 444290 - DNA, 55 bp, Artificial
  Synthetic oligonucleotide
gttcctatcgattgtacttcattcagtgaatatgaatggcgcgggcccacagcaa

SEQ ID NO: 444291 - DNA, 55 bp, Artificial
  Synthetic oligonucleotide
gttcctatttgtgaacaaaactggtttgagtcctgccttagatcacacgcatgct

SEQ ID NO: 444292 - DNA, 55 bp, Artificial
  Synthetic oligonucleotide
gttcctcaagcgaatcgctgaactctatcacgatgtaaaggaagtacctgggctg

SEQ ID NO: 444293 - DNA, 60 bp, Artificial
  Synthetic oligonucleotide
gttcctcagaattgctgggcttaattaggattgattccaacatattgcccccatccagca

SEQ ID NO: 444294 - DNA, 51 bp, Artificial
  Synthetic oligonucleotide
gttcctccatggtggactccaggacccccgaaaggaggggggtgggccctg

SEQ ID NO: 444295 - DNA, 55 bp, Artificial
  Synthetic oligonucleotide
gttcctccgaaatacctgcatgcagactgagggcttgaggacttacagtatacag

SEQ ID NO: 444296 - DNA, 55 bp, Artificial
  Synthetic oligonucleotide
gttcctcctcctgcctcgaccaatcggcagtcaggaaggcagcctactcccatct

SEQ ID NO: 444297 - DNA, 50 bp, Artificial
  Synthetic oligonucleotide
gttcctcggacatgatcggcgttatatactttcagtccacgttttgaccc

SEQ ID NO: 444298 - DNA, 56 bp, Artificial
  Synthetic oligonucleotide
gttcctcgtccccaactcgttagttctggtgatacagtaacgaaagctggtactgc

SEQ ID NO: 444299 - DNA, 60 bp, Artificial
  Synthetic oligonucleotide
gttcctcgtttggtgcttcccttcgaactgaagcagaacatggagataaggctgtccatc

SEQ ID NO: 444300 - DNA, 53 bp, Artificial
  Synthetic oligonucleotide
gttcctctccaaggtttcactcaaggtgctcacaaaagttaaacccctggtcc

SEQ ID NO: 444301 - DNA, 60 bp, Artificial
  Synthetic oligonucleotide
gttcctctgtgactggtatcgagacgattagcattgaaaaccctggcttttcgaacatga

SEQ ID NO: 444302 - DNA, 55 bp, Artificial
  Synthetic oligonucleotide
gttcctcttagtaaccagcaaactctttatgtcgaactttccagaatgaaggcga

SEQ ID NO: 444303 - DNA, 55 bp, Artificial
  Synthetic oligonucleotide
gttcctctttgggtttcaatttacgtcgcatagtcaatgaaccgtcggctgccgc

SEQ ID NO: 444304 - DNA, 55 bp, Artificial
  Synthetic oligonucleotide
gttcctgatccccaagtcggcataaaagggaaagccaatagggggaagatggatg

SEQ ID NO: 444305 - DNA, 55 bp, Artificial
  Synthetic oligonucleotide
gttcctgatccccaagtcggcataataaccatgagggacctaaaagggaaagcca

SEQ ID NO: 444306 - DNA, 55 bp, Artificial
  Synthetic oligonucleotide
gttcctgcactaatgctgttggaggaagcgggacgaataactatggagtgaaagg

SEQ ID NO: 444307 - DNA, 55 bp, Artificial
  Synthetic oligonucleotide
gttcctgcactaatgctgttggagggagtggaactaacaactatggagtgaaggg

SEQ ID NO: 444308 - DNA, 56 bp, Artificial
  Synthetic oligonucleotide
gttcctgcggagcaaaaacttagaaagatgcggttaagcggagtaaatatgtggga

SEQ ID NO: 444309 - DNA, 58 bp, Artificial
  Synthetic oligonucleotide
gttcctgctcaaatgggaatacttactgatgaagttagacttttaatgcgtactggta

SEQ ID NO: 444310 - DNA, 55 bp, Artificial
  Synthetic oligonucleotide
gttcctggggacgacaaccgggacaatatgtccatggattataaacaaactcagt

SEQ ID NO: 444311 - DNA, 55 bp, Artificial
  Synthetic oligonucleotide
gttcctgtacagcgtgtcaataggcaagcatctcatcggcttctggtccctaacc

SEQ ID NO: 444312 - DNA, 60 bp, Artificial
  Synthetic oligonucleotide
gttcctgtcgtactcgtccgcagaaatgctcccagtggatatggtcaagctgaccacgct

SEQ ID NO: 444313 - DNA, 55 bp, Artificial
  Synthetic oligonucleotide
gttccttatgatatcaatactatgctaaatgccataggaggacatcaaggagctt

SEQ ID NO: 444314 - DNA, 60 bp, Artificial
  Synthetic oligonucleotide
gttccttcacagccgcaacgcaagcctcacgcaagttctgccctatcgactacctgtttg

SEQ ID NO: 444315 - DNA, 55 bp, Artificial
  Synthetic oligonucleotide
gttccttcaccttacgcccttccctacacgaacagtgaggctcccattcggaatc

SEQ ID NO: 444316 - DNA, 57 bp, Artificial
  Synthetic oligonucleotide
gttccttcatctagtcggaatacccacccatcgacacctcaaaggcgaagcctgtcc

SEQ ID NO: 444317 - DNA, 55 bp, Artificial
  Synthetic oligonucleotide
gttccttcccagaattcatcggcacctctaggaatggggaatagagttttgctta

SEQ ID NO: 444318 - DNA, 57 bp, Artificial
  Synthetic oligonucleotide
gttccttctaattaccattattgcccgtcaagctcagatttaaattggcataatgac

SEQ ID NO: 444319 - DNA, 56 bp, Artificial
  Synthetic oligonucleotide
gttccttgagaatgtaatccctgaccttgtttactgattttgcactctgaatgttt

SEQ ID NO: 444320 - DNA, 55 bp, Artificial
  Synthetic oligonucleotide
gttccttgagcgtgtattcagtaacgatgaatggattagccttcgtgaagattca

SEQ ID NO: 444321 - DNA, 55 bp, Artificial
  Synthetic oligonucleotide
gttccttgagttagattatttgagcgatggatggatcaatggggtgcgtgcggac

SEQ ID NO: 444322 - DNA, 55 bp, Artificial
  Synthetic oligonucleotide
gttccttgatcaaaatcttcaaggcaaaggacgccagcattgaatacactggacg

SEQ ID NO: 444323 - DNA, 60 bp, Artificial
  Synthetic oligonucleotide
gttccttgatcctcatcctcccaacgggtgctagagcatcgcgctcaatgctagttgggc

SEQ ID NO: 444324 - DNA, 52 bp, Artificial
  Synthetic oligonucleotide
gttcctttaaactgccagggggcgggctcgagccttcgggcgagtccgccct

SEQ ID NO: 444325 - DNA, 55 bp, Artificial
  Synthetic oligonucleotide
gttcctttatgtttctcaacaaatccaagcaggtcatttgcactggttcagtgtg

SEQ ID NO: 444326 - DNA, 56 bp, Artificial
  Synthetic oligonucleotide
gttcctttggtagtccaaggtggtcagaaattgtctaaagctgccaagcggttgct

SEQ ID NO: 444327 - DNA, 55 bp, Artificial
  Synthetic oligonucleotide
gttccttttatttacacaagaggagcctatcatttcaaggaccctcaatatcccg

SEQ ID NO: 444328 - DNA, 51 bp, Artificial
  Synthetic oligonucleotide
gttccttttcgtctttggatgatgggttgaggtggctgtgcacacgattga

SEQ ID NO: 444329 - DNA, 59 bp, Artificial
  Synthetic oligonucleotide
gttcgaaaacactcacgtgagttacgcctgctggcaagaggaagagtctcccacgactc

SEQ ID NO: 444330 - DNA, 55 bp, Artificial
  Synthetic oligonucleotide
gttcgaaagtagtagactacagaagttggtcaaagccgcaatgtcaaattactgg

SEQ ID NO: 444331 - DNA, 55 bp, Artificial
  Synthetic oligonucleotide
gttcgaacataaacgcgtgcaccccatactcgtgtttggaattgtacgaatttac

SEQ ID NO: 444332 - DNA, 59 bp, Artificial
  Synthetic oligonucleotide
gttcgaactcatccgcgattgtggagacggttgtacagatgttcccgaacttcaagcag

SEQ ID NO: 444333 - DNA, 57 bp, Artificial
  Synthetic oligonucleotide
gttcgaactctcaggacctcagatcctgccgggttcgttcgaactcactccaacaaa

SEQ ID NO: 444334 - DNA, 55 bp, Artificial
  Synthetic oligonucleotide
gttcgaagagcgacagtgtcagcggacccgctgctgtcactactggagatgtgcc

SEQ ID NO: 444335 - DNA, 55 bp, Artificial
  Synthetic oligonucleotide
gttcgaagaggcaacccctgccccgaagcaggagccgagagacagggaaccctta

SEQ ID NO: 444336 - DNA, 60 bp, Artificial
  Synthetic oligonucleotide
gttcgaaggcctggtcatggaatccatcaagactcgtatgctaaatgagagcccgtcgtc

SEQ ID NO: 444337 - DNA, 57 bp, Artificial
  Synthetic oligonucleotide
gttcgaatcgtgatgtggaaagttaataatatctcgggaacaaaggcaacgttagca

SEQ ID NO: 444338 - DNA, 49 bp, Artificial
  Synthetic oligonucleotide
gttcgaattcgtataaacctggttacgttcgaaagggattccgtaaacc

SEQ ID NO: 444339 - DNA, 60 bp, Artificial
  Synthetic oligonucleotide
gttcgacagaaccaccaatgagctgatttggacaagtctctgcgatgccctgatgggggt

SEQ ID NO: 444340 - DNA, 60 bp, Artificial
  Synthetic oligonucleotide
gttcgacagttctttgactcccttattgttgaatgctgtcctcagtattagatgttgctt

SEQ ID NO: 444341 - DNA, 59 bp, Artificial
  Synthetic oligonucleotide
gttcgacccgtacttaaagaatctctaatcaattgtccttatgcgcttaatgattatga

SEQ ID NO: 444342 - DNA, 55 bp, Artificial
  Synthetic oligonucleotide
gttcgaccgagatcttcagacctgggggaggaaatatgaaagacaactggagaag

SEQ ID NO: 444343 - DNA, 52 bp, Artificial
  Synthetic oligonucleotide
gttcgacggtcacaaccacaacagttgttggtcggttccatgcctactaact

SEQ ID NO: 444344 - DNA, 55 bp, Artificial
  Synthetic oligonucleotide
gttcgactatctccctcaattactatactccgaggtctaagggcccgcgcagcgg

SEQ ID NO: 444345 - DNA, 58 bp, Artificial
  Synthetic oligonucleotide
gttcgactcaaaggttgtagtgtatgggcacgaggtgtataattatgactttccagaa

SEQ ID NO: 444346 - DNA, 59 bp, Artificial
  Synthetic oligonucleotide
gttcgactctctcagaggtttaagtcgaagacatctatgcctattgccccctgtaggag

SEQ ID NO: 444347 - DNA, 55 bp, Artificial
  Synthetic oligonucleotide
gttcgacttagaccttgcttggaaactagcgaatacagcaaacaaaagacgtggg

SEQ ID NO: 444348 - DNA, 58 bp, Artificial
  Synthetic oligonucleotide
gttcgactttccggataactgtatgagacagtgtaggtgtggagagccgtcggagtgt

SEQ ID NO: 444349 - DNA, 55 bp, Artificial
  Synthetic oligonucleotide
gttcgagaactcgttgaatttgtctcagcttgctagatccaatgacctatgtgcc

SEQ ID NO: 444350 - DNA, 55 bp, Artificial
  Synthetic oligonucleotide
gttcgagccaatggtggtaataccctattagccactttgagattcacggggaacc

SEQ ID NO: 444351 - DNA, 54 bp, Artificial
  Synthetic oligonucleotide
gttcgagccgagtaccataaaaggtaaacgagcaagggccgagttttcacagac

SEQ ID NO: 444352 - DNA, 59 bp, Artificial
  Synthetic oligonucleotide
gttcgagctgacgggacagcgtctcggacaagagtagggtccaagtggtggaggatctg

SEQ ID NO: 444353 - DNA, 55 bp, Artificial
  Synthetic oligonucleotide
gttcgagctgagagatgttcgacacgagcgcgatactgtgaccattagatcagtg

SEQ ID NO: 444354 - DNA, 60 bp, Artificial
  Synthetic oligonucleotide
gttcgaggagactttgcggattgacagaccgcattgggaagcttcccgaatgcaatctgg

SEQ ID NO: 444355 - DNA, 55 bp, Artificial
  Synthetic oligonucleotide
gttcgaggagggcggccgcataaacggcttctacgactccaagtcgggtctcacc

SEQ ID NO: 444356 - DNA, 60 bp, Artificial
  Synthetic oligonucleotide
gttcgaggcacgggaaagtacaatcaagctctgttcgagagcgcgagtggactcacctgg

SEQ ID NO: 444357 - DNA, 55 bp, Artificial
  Synthetic oligonucleotide
gttcgaggcagggttcgataatgaatatggccgctggtttacatatggtagccac

SEQ ID NO: 444358 - DNA, 60 bp, Artificial
  Synthetic oligonucleotide
gttcgaggctggattaatggacagaacacttaaagtcatgactattgtgactgacgaaaa

SEQ ID NO: 444359 - DNA, 55 bp, Artificial
  Synthetic oligonucleotide
gttcgagttcacacgcgtgggatccgactaacctgtagcgtgcggcacaattgta

SEQ ID NO: 444360 - DNA, 60 bp, Artificial
  Synthetic oligonucleotide
gttcgataggaaggacgtgaagcttagaagcgtatcagtgcgcgtcataagagacgacgc

SEQ ID NO: 444361 - DNA, 55 bp, Artificial
  Synthetic oligonucleotide
gttcgatatcgagaagttcacagacttctgtcatcatcatgacgtgaatccgggc

SEQ ID NO: 444362 - DNA, 53 bp, Artificial
  Synthetic oligonucleotide
gttcgatatggctgagtgagctaaaaacttaacacactggtcacgatggtacc

SEQ ID NO: 444363 - DNA, 59 bp, Artificial
  Synthetic oligonucleotide
gttcgatccaatgtaagtagctagtgcagtgtttagtttccttctatacaatagcctta

SEQ ID NO: 444364 - DNA, 59 bp, Artificial
  Synthetic oligonucleotide
gttcgatgaagaaggagaccaatcttgggacacttcgaaaacagcacttgtggtcataa

SEQ ID NO: 444365 - DNA, 59 bp, Artificial
  Synthetic oligonucleotide
gttcgatgaccctacgggcatcaaatccttgataagcaaactctcggacccactgttca

SEQ ID NO: 444366 - DNA, 59 bp, Artificial
  Synthetic oligonucleotide
gttcgatgattgggaacgattcatgagggagaagctacgtgtgttaaagtacgagatat

SEQ ID NO: 444367 - DNA, 60 bp, Artificial
  Synthetic oligonucleotide
gttcgatgctcaatatcaacgagcttggaactacgtggttgatcagcttggaatggaact

SEQ ID NO: 444368 - DNA, 60 bp, Artificial
  Synthetic oligonucleotide
gttcgatggtgctatgatgtttgacgaccaaggtgtaatacctgagcttaattgtcagtg

SEQ ID NO: 444369 - DNA, 55 bp, Artificial
  Synthetic oligonucleotide
gttcgattcagcggatccacttatcgcaagtttatcagtgggataacaggacaac

SEQ ID NO: 444370 - DNA, 55 bp, Artificial
  Synthetic oligonucleotide
gttcgattgagcatcgacttcggggagactatcgagtttattatcctcgtcctgg

SEQ ID NO: 444371 - DNA, 54 bp, Artificial
  Synthetic oligonucleotide
gttcgattggtccgggtttgatgcctccgttcaagaatgggaaatccgtttcgc

SEQ ID NO: 444372 - DNA, 60 bp, Artificial
  Synthetic oligonucleotide
gttcgcaaaaccagattcctaccagtagctggcgggacaagcagcgtgtatattgaggtg

SEQ ID NO: 444373 - DNA, 54 bp, Artificial
  Synthetic oligonucleotide
gttcgcaaccatattgtcagattaaaattggaagggtaatagcttttaaacctg

SEQ ID NO: 444374 - DNA, 60 bp, Artificial
  Synthetic oligonucleotide
gttcgcaagaccagattcctaccagtggcgggcgggacaagcagcgtgtatatagaagta

SEQ ID NO: 444375 - DNA, 60 bp, Artificial
  Synthetic oligonucleotide
gttcgcaagtacaaacgatgataacgaaggtgagtagaggattttgtcatgatttagcgc

SEQ ID NO: 444376 - DNA, 55 bp, Artificial
  Synthetic oligonucleotide
gttcgcaccatcgcctgtagatattccccgaacctgtctaggcgctgttccgtcc

SEQ ID NO: 444377 - DNA, 59 bp, Artificial
  Synthetic oligonucleotide
gttcgcagaatttaccaaattactgggttggatagtggcatcaattttggcgtgcacaa

SEQ ID NO: 444378 - DNA, 59 bp, Artificial
  Synthetic oligonucleotide
gttcgcaggcccctggcttgtagctctgggtagctcgtcaggtgttctggaaaggtctc

SEQ ID NO: 444379 - DNA, 59 bp, Artificial
  Synthetic oligonucleotide
gttcgcagggctttcccacattgtttggctttcagttatatggatgatgtggtactggg

SEQ ID NO: 444380 - DNA, 60 bp, Artificial
  Synthetic oligonucleotide
gttcgcagggtgggtgacttccattacatcactggggtaacgcaggacaacatcaaatgc

SEQ ID NO: 444381 - DNA, 60 bp, Artificial
  Synthetic oligonucleotide
gttcgcaggttgtatggtgatggagataggtattttgttgagatggactggacgcggtat

SEQ ID NO: 444382 - DNA, 55 bp, Artificial
  Synthetic oligonucleotide
gttcgcataaagcctcctcctagctgttcttctgctgcacgtactatgtcttccg

SEQ ID NO: 444383 - DNA, 55 bp, Artificial
  Synthetic oligonucleotide
gttcgcattcatcaatggtggtgtagtggctaattgcattgcatccacatgtaca

SEQ ID NO: 444384 - DNA, 55 bp, Artificial
  Synthetic oligonucleotide
gttcgccagctgcgggagcatacgacccagccaggaaactgctggagcagtatgc

SEQ ID NO: 444385 - DNA, 57 bp, Artificial
  Synthetic oligonucleotide
gttcgccagttccagcatgtttgaaggtaagttgacagctgaatacctttaccggtc

SEQ ID NO: 444386 - DNA, 55 bp, Artificial
  Synthetic oligonucleotide
gttcgcccatgtactgaacgccttccacgtcatcccacaggcgggtaacgttggt

SEQ ID NO: 444387 - DNA, 55 bp, Artificial
  Synthetic oligonucleotide
gttcgcctaccactctccactctccgtgatactgaggagatagctatgagatgct

SEQ ID NO: 444388 - DNA, 60 bp, Artificial
  Synthetic oligonucleotide
gttcgcctaggaagattgatgccagaatttggtgatgcagtgcgcggtggaggttgggca

SEQ ID NO: 444389 - DNA, 60 bp, Artificial
  Synthetic oligonucleotide
gttcgcctcgtggtggaatcatcaactaagtagaggattcacaatcccgcactacagaac

SEQ ID NO: 444390 - DNA, 58 bp, Artificial
  Synthetic oligonucleotide
gttcgcgaccgagctgcaaggcgacccgcgatccgatgaagacaagacgtttaccaac

SEQ ID NO: 444391 - DNA, 55 bp, Artificial
  Synthetic oligonucleotide
gttcgcgagtacggtcgcgactctttgaaggttccgatgcgcgggacttacactt

SEQ ID NO: 444392 - DNA, 60 bp, Artificial
  Synthetic oligonucleotide
gttcgcgatccacggcgtaaatccaatgcctggcccgcttacacgtgcgattgctcgcgc

SEQ ID NO: 444393 - DNA, 60 bp, Artificial
  Synthetic oligonucleotide
gttcgcgcgcgatcttttcagaagtgggacctggttctacactcgtggaggatctgcaga

SEQ ID NO: 444394 - DNA, 55 bp, Artificial
  Synthetic oligonucleotide
gttcgcgcggaagcgatcatctatgcggatgcgtggaacaaaccctacttcgatc

SEQ ID NO: 444395 - DNA, 55 bp, Artificial
  Synthetic oligonucleotide
gttcgcgctgtggagggtgtctgcggaggaatacgtggaggtaaggcaagtgggg

SEQ ID NO: 444396 - DNA, 59 bp, Artificial
  Synthetic oligonucleotide
gttcgctacgcgaagtatctaggcatgtcgttctcgacagtcgacctggatattaaagt

SEQ ID NO: 444397 - DNA, 55 bp, Artificial
  Synthetic oligonucleotide
gttcgctatcaagcagttgatgcagtaagtaatgtgtggttcacacataagggga

SEQ ID NO: 444398 - DNA, 55 bp, Artificial
  Synthetic oligonucleotide
gttcgctcaggggtggggtcccatcacttatgctgaggttgacagcccggaccag

SEQ ID NO: 444399 - DNA, 52 bp, Artificial
  Synthetic oligonucleotide
gttcgctcattgccttataaagcggtgtcagcgacagtagactcatcttatc

SEQ ID NO: 444400 - DNA, 58 bp, Artificial
  Synthetic oligonucleotide
gttcgctccgcttgggtcttgcaggccccaaaagagtccttgcgtggcttctggaaga

SEQ ID NO: 444401 - DNA, 60 bp, Artificial
  Synthetic oligonucleotide
gttcgctctctattcaacattgtcaagtatttgtgagtacgattgtgctctactattctc

SEQ ID NO: 444402 - DNA, 60 bp, Artificial
  Synthetic oligonucleotide
gttcgctgatgatggtatgatccgttacaagaaggccgggtgtcgtatgagtggtgacat

SEQ ID NO: 444403 - DNA, 60 bp, Artificial
  Synthetic oligonucleotide
gttcgctgtattaccagaccactattgtactaaacacatcgcacatgaaacagagtatag

SEQ ID NO: 444404 - DNA, 55 bp, Artificial
  Synthetic oligonucleotide
gttcgcttagatcgttcaacaattgtgtgtctaatatgtttaggctgtacgcgcc

SEQ ID NO: 444405 - DNA, 55 bp, Artificial
  Synthetic oligonucleotide
gttcgcttcactaactggctcgcgctttttgtttccgcattggacccgcgttaaa

SEQ ID NO: 444406 - DNA, 60 bp, Artificial
  Synthetic oligonucleotide
gttcgcttcataatagaacggtggcaagttctgtgcatgctgctcaagtgcagggcacta

SEQ ID NO: 444407 - DNA, 60 bp, Artificial
  Synthetic oligonucleotide
gttcgcttcgcggggtaaccatgtctcccccacgcactatgtgcctgaaagcgacgctgc

SEQ ID NO: 444408 - DNA, 60 bp, Artificial
  Synthetic oligonucleotide
gttcgctttttattgattccgatctgatatcgtcatctataccgtattcttctcgcataa

SEQ ID NO: 444409 - DNA, 55 bp, Artificial
  Synthetic oligonucleotide
gttcggaaactatgcgctgagagagcgtgcagtactctacctagcgcgaagcgct

SEQ ID NO: 444410 - DNA, 54 bp, Artificial
  Synthetic oligonucleotide
gttcggaactcttctaccgtcgcaggaacccttataaggaaacgagagagccta

SEQ ID NO: 444411 - DNA, 50 bp, Artificial
  Synthetic oligonucleotide
gttcggaatcatctttaccaccgagtaaaccaccagcacctcctttcata

SEQ ID NO: 444412 - DNA, 57 bp, Artificial
  Synthetic oligonucleotide
gttcggacatccctccttcgaatgcaagttggaagccgtgcaagcggaacatttact

SEQ ID NO: 444413 - DNA, 53 bp, Artificial
  Synthetic oligonucleotide
gttcggagacgtactcaaactgaggaggggtctccacatagaccccctcctta

SEQ ID NO: 444414 - DNA, 57 bp, Artificial
  Synthetic oligonucleotide
gttcggagccaactcaaacaatccagattgggacttcaaccccaacaagtatcactg

SEQ ID NO: 444415 - DNA, 55 bp, Artificial
  Synthetic oligonucleotide
gttcggaggattagctaactgagactccatatgaagaacaatggccgcgcagcgg

SEQ ID NO: 444416 - DNA, 51 bp, Artificial
  Synthetic oligonucleotide
gttcggagggaaatcccaagagggtcacccgagattcaagaggtgaggggg

SEQ ID NO: 444417 - DNA, 52 bp, Artificial
  Synthetic oligonucleotide
gttcggagggccgtcaggcccgagaacccgaccagcccggagggccccgtca

SEQ ID NO: 444418 - DNA, 55 bp, Artificial
  Synthetic oligonucleotide
gttcggagttaatccgtatattcagagtcaggcagtatgacagggcgaatgcgcg

SEQ ID NO: 444419 - DNA, 57 bp, Artificial
  Synthetic oligonucleotide
gttcggatgattaaaagaggaatcaatgaccggaatttctggagaggcgaaaatgga

SEQ ID NO: 444420 - DNA, 55 bp, Artificial
  Synthetic oligonucleotide
gttcggatggaaatgtgttgccctggtttcggcatgtaagtcgaagaaccgttgg

SEQ ID NO: 444421 - DNA, 55 bp, Artificial
  Synthetic oligonucleotide
gttcggcacttggatggttcaaaaccacgctatgatcttgtgttggacgaggcaa

SEQ ID NO: 444422 - DNA, 59 bp, Artificial
  Synthetic oligonucleotide
gttcggcgctggtatgcaagagattatcgagaagtgataaactcaaggtcgcccaaggg

SEQ ID NO: 444423 - DNA, 55 bp, Artificial
  Synthetic oligonucleotide
gttcggctcacaatactactagaattggtacgacaaccatacagcatgcggaggc

SEQ ID NO: 444424 - DNA, 56 bp, Artificial
  Synthetic oligonucleotide
gttcggctgtacatggatgaatagcaccgggttcaccaagacgtgcgggggccccc

SEQ ID NO: 444425 - DNA, 58 bp, Artificial
  Synthetic oligonucleotide
gttcggctgtacctggatgaactcaactggattcaccaaagtgtgcggagcgcccccc

SEQ ID NO: 444426 - DNA, 60 bp, Artificial
  Synthetic oligonucleotide
gttcggctgtcgctccctctgaatcatcagactcacagagttacatcagggagaatggcc

SEQ ID NO: 444427 - DNA, 53 bp, Artificial
  Synthetic oligonucleotide
gttcgggaagaggaacaccatctggctctttgggccggccacgacgggtaaaa

SEQ ID NO: 444428 - DNA, 57 bp, Artificial
  Synthetic oligonucleotide
gttcgggatcaacgaggaaacgtactattgtcacctgaagaagtcagcgaaacacaa

SEQ ID NO: 444429 - DNA, 53 bp, Artificial
  Synthetic oligonucleotide
gttcgggatctaaccacagaaggggttgaacctaatccaggaccagtaatggt

SEQ ID NO: 444430 - DNA, 57 bp, Artificial
  Synthetic oligonucleotide
gttcggggcagaagtagtaccaggatttcaggcactatcagaagggtgcacccctta

SEQ ID NO: 444431 - DNA, 52 bp, Artificial
  Synthetic oligonucleotide
gttcggggtgatttgaactttgtcaaccgggcaaaccagcggctaaacccaa

SEQ ID NO: 444432 - DNA, 55 bp, Artificial
  Synthetic oligonucleotide
gttcgggtgtgttatcgaccacccctagtgtgcagttttcaggttcctctggagt

SEQ ID NO: 444433 - DNA, 52 bp, Artificial
  Synthetic oligonucleotide
gttcggtaatatttgaaacgtcaagggaatttgttgtcgttgaaaggataaa

SEQ ID NO: 444434 - DNA, 57 bp, Artificial
  Synthetic oligonucleotide
gttcggtcctagtgctataacttagatagttgtccacttcacgataatcaccgtaac

SEQ ID NO: 444435 - DNA, 60 bp, Artificial
  Synthetic oligonucleotide
gttcggtgacgacgtcacctttgtctctgagatgtacgtcggagatgatactctggccta

SEQ ID NO: 444436 - DNA, 57 bp, Artificial
  Synthetic oligonucleotide
gttcggtgagaacttctccaccatcggtggtcggttcatctcgaagcggactgggtc

SEQ ID NO: 444437 - DNA, 60 bp, Artificial
  Synthetic oligonucleotide
gttcggttattgcaaaattgtgcatggatgagaggaattttgaagttctatgttgtggca

SEQ ID NO: 444438 - DNA, 54 bp, Artificial
  Synthetic oligonucleotide
gttcggttgcaaggtattaggagatcgtttagacgtaccactcttcttacgaaa

SEQ ID NO: 444439 - DNA, 54 bp, Artificial
  Synthetic oligonucleotide
gttcggtttccgaacacccaagggaggcgaacgttgtggcagtgaccaactgga

SEQ ID NO: 444440 - DNA, 50 bp, Artificial
  Synthetic oligonucleotide
gttcgtaaattgtgtgcggaaagagcgtgcagcactctgcctagcgcgaa

SEQ ID NO: 444441 - DNA, 55 bp, Artificial
  Synthetic oligonucleotide
gttcgtaaccacccgcagctggtagctcgaaaggacaacccagtgaccaacgtgc

SEQ ID NO: 444442 - DNA, 57 bp, Artificial
  Synthetic oligonucleotide
gttcgtaactgagtcttgtgtcacgtatagtgaccactactgttcccttggcgttaa

SEQ ID NO: 444443 - DNA, 60 bp, Artificial
  Synthetic oligonucleotide
gttcgtaagcaactgaaccgacatacatattcggacggaggattacatgctctcgtggtg

SEQ ID NO: 444444 - DNA, 60 bp, Artificial
  Synthetic oligonucleotide
gttcgtacgtttgtctagctgcataactcctccgattgttgttcacagtgttccaggcgc

SEQ ID NO: 444445 - DNA, 52 bp, Artificial
  Synthetic oligonucleotide
gttcgtacttttggggaagagaaacaacctcttctgaataaaagtcgtagta

SEQ ID NO: 444446 - DNA, 60 bp, Artificial
  Synthetic oligonucleotide
gttcgtagaaagtgatctcggcagcgcaactatagatggcattatacagggcagtgtgca

SEQ ID NO: 444447 - DNA, 60 bp, Artificial
  Synthetic oligonucleotide
gttcgtagaattcgagcaagcgtgaccactcatcaaacccataggctgtctgagttatta

SEQ ID NO: 444448 - DNA, 53 bp, Artificial
  Synthetic oligonucleotide
gttcgtagaggtggtccttgtcgatgatccaggcgtaattggacatgtcttcc

SEQ ID NO: 444449 - DNA, 57 bp, Artificial
  Synthetic oligonucleotide
gttcgtagcgctaacgtttgtgacgaggagacggttgagtatttgtttagtctctca

SEQ ID NO: 444450 - DNA, 55 bp, Artificial
  Synthetic oligonucleotide
gttcgtcacaagagatggcgccattcggggccgttttgacatacctggcacggcg

SEQ ID NO: 444451 - DNA, 60 bp, Artificial
  Synthetic oligonucleotide
gttcgtcagagctctgcgcagaatcgcaaatacaccattaaagtcgaggtgcctaaggtg

SEQ ID NO: 444452 - DNA, 54 bp, Artificial
  Synthetic oligonucleotide
gttcgtcaggaacttttgtgggataaaccatatcctaatccttgttctaaatgg

SEQ ID NO: 444453 - DNA, 51 bp, Artificial
  Synthetic oligonucleotide
gttcgtcaggaagggtcgggccaaccggtccgttctccggctcagtacccg

SEQ ID NO: 444454 - DNA, 55 bp, Artificial
  Synthetic oligonucleotide
gttcgtcatcaaaaggaaacggatctccaaatcgaaatacgtataatgatgggat

SEQ ID NO: 444455 - DNA, 54 bp, Artificial
  Synthetic oligonucleotide
gttcgtcatggttcgcttcagatcgttgacagccgcactacatgacgggtaaaa

SEQ ID NO: 444456 - DNA, 53 bp, Artificial
  Synthetic oligonucleotide
gttcgtccgttgtagggcttgtacggccccttcttggttccatctcattttac

SEQ ID NO: 444457 - DNA, 57 bp, Artificial
  Synthetic oligonucleotide
gttcgtctcatcatctggctttcgtattcggagcgaaactatccgtgtaacgattga

SEQ ID NO: 444458 - DNA, 58 bp, Artificial
  Synthetic oligonucleotide
gttcgtctttcaactggggccatcatactgttagaattgatgtatcgtaggaagtcgt

SEQ ID NO: 444459 - DNA, 55 bp, Artificial
  Synthetic oligonucleotide
gttcgtgaacggtaggtcgatcttggggtcattaacgtggaaatcagcagatgtc

SEQ ID NO: 444460 - DNA, 57 bp, Artificial
  Synthetic oligonucleotide
gttcgtgacccaaaccggatggacctggacagtgttgggacacggacctgagcaatg

SEQ ID NO: 444461 - DNA, 51 bp, Artificial
  Synthetic oligonucleotide
gttcgtgatcgtagaccatacggtacgcctatggattttggacaagtgttt

SEQ ID NO: 444462 - DNA, 55 bp, Artificial
  Synthetic oligonucleotide
gttcgtgcacaagcgttggctagaacatatgctgcctgttcgcggaatttggaat

SEQ ID NO: 444463 - DNA, 55 bp, Artificial
  Synthetic oligonucleotide
gttcgtgccgctcttgacagaatcactgatccatcggttaaagctgtactcaatg

SEQ ID NO: 444464 - DNA, 60 bp, Artificial
  Synthetic oligonucleotide
gttcgtgcctgattaggtgaagagactccttcacggatcatcaagccaggtgatacgccg

SEQ ID NO: 444465 - DNA, 53 bp, Artificial
  Synthetic oligonucleotide
gttcgtgcgaaggcgccaaaaggttagggcctaaatgtgtgcgttttggtttc

SEQ ID NO: 444466 - DNA, 59 bp, Artificial
  Synthetic oligonucleotide
gttcgtgctaacactgaacgtacacatgtagaaacggaccgctctaagcaggaggtcca

SEQ ID NO: 444467 - DNA, 58 bp, Artificial
  Synthetic oligonucleotide
gttcgtggacagccagctaatgcgaggcaatttgaatacctgtacaatttgaggacgc

SEQ ID NO: 444468 - DNA, 60 bp, Artificial
  Synthetic oligonucleotide
gttcgtggcgtgacgaacagctctaattacattattaattgagataacacctagttcatc

SEQ ID NO: 444469 - DNA, 60 bp, Artificial
  Synthetic oligonucleotide
gttcgtggcttcttatacgtatcaatccgagacgatgatggagcaatgcgtccagtactt

SEQ ID NO: 444470 - DNA, 59 bp, Artificial
  Synthetic oligonucleotide
gttcgtgtttagcttaatcatggacacaaagccttatttacctgctggtgttcaagctc

SEQ ID NO: 444471 - DNA, 58 bp, Artificial
  Synthetic oligonucleotide
gttcgttaatgcaagatgtattctgtttacagacgtgggtataagactccgtatagga

SEQ ID NO: 444472 - DNA, 56 bp, Artificial
  Synthetic oligonucleotide
gttcgttacattgaaaagccgttcgataaagaggaacataccgatatactgttatc

SEQ ID NO: 444473 - DNA, 51 bp, Artificial
  Synthetic oligonucleotide
gttcgttagtataccatataaatacgacgttaaagtaccacatttaacgtt

SEQ ID NO: 444474 - DNA, 55 bp, Artificial
  Synthetic oligonucleotide
gttcgttatccggctaactacttcgagaaacctagtagcatcgtgaaagttgcgg

SEQ ID NO: 444475 - DNA, 55 bp, Artificial
  Synthetic oligonucleotide
gttcgttcgcgatgtcgatcggatcccgcgctgtcacgccttgccctccaagatc

SEQ ID NO: 444476 - DNA, 55 bp, Artificial
  Synthetic oligonucleotide
gttcgttgcacgagtgtcgtctgacccagtgtcggccgcaggtgggacactgttg

SEQ ID NO: 444477 - DNA, 55 bp, Artificial
  Synthetic oligonucleotide
gttcgttgcgtaaatttgctcgcacaacgaagtacctagctaatgattggcatga

SEQ ID NO: 444478 - DNA, 52 bp, Artificial
  Synthetic oligonucleotide
gttcgtttaaacacgttcttgatagtatctctttattaacccaacgcgtaaa

SEQ ID NO: 444479 - DNA, 55 bp, Artificial
  Synthetic oligonucleotide
gttcgttttggttaacaagctccaccccgaaccagatctaagcatcgaagcgtca

SEQ ID NO: 444480 - DNA, 52 bp, Artificial
  Synthetic oligonucleotide
gttctaacaaatagacatatcgctaaatttgctaatggagatccatctaaag

SEQ ID NO: 444481 - DNA, 60 bp, Artificial
  Synthetic oligonucleotide
gttctaacagagcaactcgccgctggtttacagctaggccaaggcgaggtggtactgata

SEQ ID NO: 444482 - DNA, 58 bp, Artificial
  Synthetic oligonucleotide
gttctaacgttcccaactctgatgaggccgcacccagttttgtttctggtgctatggc

SEQ ID NO: 444483 - DNA, 60 bp, Artificial
  Synthetic oligonucleotide
gttctaactcctggtcgaatgagtgagatgggtgcatgcttcggggttattcctgttgca

SEQ ID NO: 444484 - DNA, 50 bp, Artificial
  Synthetic oligonucleotide
gttctaagaatacttcgaagcattgaaaagggggctaaagggggaaaaag

SEQ ID NO: 444485 - DNA, 58 bp, Artificial
  Synthetic oligonucleotide
gttctaagcgtggtgcgtcattcgctgcacgacgattttattcacgtaatcaggtttt

SEQ ID NO: 444486 - DNA, 55 bp, Artificial
  Synthetic oligonucleotide
gttctaagggaacagatgaaaggcgaaccagtagaaccatacccagtaacagtcg

SEQ ID NO: 444487 - DNA, 58 bp, Artificial
  Synthetic oligonucleotide
gttctaatccgggtattgatggttcccgcttgcttggagctatagcacaaggacctgt

SEQ ID NO: 444488 - DNA, 60 bp, Artificial
  Synthetic oligonucleotide
gttctacaatgcgtatatggtccccatatgtcttctcatatttattgttaatgcacatat

SEQ ID NO: 444489 - DNA, 57 bp, Artificial
  Synthetic oligonucleotide
gttctaccaatcctacttaaggaggactcaatctatgggaatacaactggaccagaa

SEQ ID NO: 444490 - DNA, 60 bp, Artificial
  Synthetic oligonucleotide
gttctaccactacctgggtaggagtggatatacaattcacgtgcaatgcaatgcatcgaa

SEQ ID NO: 444491 - DNA, 57 bp, Artificial
  Synthetic oligonucleotide
gttctacctgttttgacggctgagcaccgcgcgatgatacagaatgttttagacggc

SEQ ID NO: 444492 - DNA, 59 bp, Artificial
  Synthetic oligonucleotide
gttctactaccacttctagtaaatacaggctcataatctaccatgttatataaatctgt

SEQ ID NO: 444493 - DNA, 52 bp, Artificial
  Synthetic oligonucleotide
gttctactcacagtcgaatcagttattatcgtatggtgacgtcacacggttc

SEQ ID NO: 444494 - DNA, 55 bp, Artificial
  Synthetic oligonucleotide
gttctactgggtaggtaccatccgaggtacgacactcagaatggagagtaccttc

SEQ ID NO: 444495 - DNA, 52 bp, Artificial
  Synthetic oligonucleotide
gttctagaaacccggatccggactaacgcgcgggattgaggcctaaaggtta

SEQ ID NO: 444496 - DNA, 59 bp, Artificial
  Synthetic oligonucleotide
gttctagaacagctcgccgcaggacgtgagtgggagtgtgtaccagacagcgccctaaa

SEQ ID NO: 444497 - DNA, 55 bp, Artificial
  Synthetic oligonucleotide
gttctagaatctactcaggtcagatctttgactcctcttgatttatcgaccgact

SEQ ID NO: 444498 - DNA, 59 bp, Artificial
  Synthetic oligonucleotide
gttctagatggacaaacagtacagttgcaagtttcaaatgaatcaagtacgctttggaa

SEQ ID NO: 444499 - DNA, 58 bp, Artificial
  Synthetic oligonucleotide
gttctagatgttatgatgacgagtcggttcgggctccgcactaggtttggtcacctag

SEQ ID NO: 444500 - DNA, 58 bp, Artificial
  Synthetic oligonucleotide
gttctagcagatttgtactgtcaaccagggacctgcccaccaattcgaggtctacgac

SEQ ID NO: 444501 - DNA, 60 bp, Artificial
  Synthetic oligonucleotide
gttctagcctgcgtggctgcctgcacaccctaacgggtgtgaagcccagtattggacaag

SEQ ID NO: 444502 - DNA, 60 bp, Artificial
  Synthetic oligonucleotide
gttctagcctgcgtggctgcctgcacaccctcacgggtgtgaagccatatactcgacaag

SEQ ID NO: 444503 - DNA, 53 bp, Artificial
  Synthetic oligonucleotide
gttctagggggcgtacaccatcctcagaataaagcgttattggggggtcactg

SEQ ID NO: 444504 - DNA, 54 bp, Artificial
  Synthetic oligonucleotide
gttctagggtagttgtgaacggagtttcggtacgtagtgaatgggatgtaccca

SEQ ID NO: 444505 - DNA, 55 bp, Artificial
  Synthetic oligonucleotide
gttctaggtggatttcctttagctgcggttctttagcagccgggtccattgtcct

SEQ ID NO: 444506 - DNA, 59 bp, Artificial
  Synthetic oligonucleotide
gttctagttcagaaggtcgacatagaagaggcacaaaatcaggggtttgacatacttga

SEQ ID NO: 444507 - DNA, 59 bp, Artificial
  Synthetic oligonucleotide
gttctatacacgtggtggctctgcagataatgttagctaccagtacataggatgtttag

SEQ ID NO: 444508 - DNA, 60 bp, Artificial
  Synthetic oligonucleotide
gttctatagactgataaagtaaggtcagctttagttgatcgctaccatcagtaactatag

SEQ ID NO: 444509 - DNA, 50 bp, Artificial
  Synthetic oligonucleotide
gttctataggaacggtcagataggatgtcctcatgatctagcaggactac

SEQ ID NO: 444510 - DNA, 52 bp, Artificial
  Synthetic oligonucleotide
gttctataggtctggtttaaaacgtaaatagacggcccacaaactatagaac

SEQ ID NO: 444511 - DNA, 52 bp, Artificial
  Synthetic oligonucleotide
gttctatatgtaccaccaagcactgtatagacaattcagacatgaagcacta

SEQ ID NO: 444512 - DNA, 57 bp, Artificial
  Synthetic oligonucleotide
gttctatcacgtctcctaacatagttacgttcccagctaatctgtactacatgtctc

SEQ ID NO: 444513 - DNA, 52 bp, Artificial
  Synthetic oligonucleotide
gttctatcctaaccttactaagtatttgcccttagataaaggcattaaaccg

SEQ ID NO: 444514 - DNA, 55 bp, Artificial
  Synthetic oligonucleotide
gttctatctgtggagaaggatacgacgatggtggatgtggaaggatctaccacgc

SEQ ID NO: 444515 - DNA, 60 bp, Artificial
  Synthetic oligonucleotide
gttctatgagtagtgaggagcagaagttacgtgccttgaattcttcgagtgccggtgtta

SEQ ID NO: 444516 - DNA, 55 bp, Artificial
  Synthetic oligonucleotide
gttctatgatcccgatggacaaagtgatcaaggcggctttctgcggtgacgacag

SEQ ID NO: 444517 - DNA, 51 bp, Artificial
  Synthetic oligonucleotide
gttctatgatggtttcagctattactagcgcaatgcacaatgttgttagtg

SEQ ID NO: 444518 - DNA, 55 bp, Artificial
  Synthetic oligonucleotide
gttctatgcaagatccaactacgcgaaggatcaaagcaaggcagggacaggagta

SEQ ID NO: 444519 - DNA, 55 bp, Artificial
  Synthetic oligonucleotide
gttctatgcagcccctaagaatggcaaaacaatggcctccacagtgtactctgca

SEQ ID NO: 444520 - DNA, 55 bp, Artificial
  Synthetic oligonucleotide
gttctatgcgtggattcttgaccacgacatgtttaagagtttggtagccgagggg

SEQ ID NO: 444521 - DNA, 55 bp, Artificial
  Synthetic oligonucleotide
gttctatgctaaggtcacgggaggtcagtatgccagtaacgagcaggctctggtg

SEQ ID NO: 444522 - DNA, 60 bp, Artificial
  Synthetic oligonucleotide
gttctatggtttgtgaagtttgtcaacaaggatgtgagactgcaaaggagctagaatctc

SEQ ID NO: 444523 - DNA, 60 bp, Artificial
  Synthetic oligonucleotide
gttctatgtaattcagacacaactctcttaattctaaaatggtttcatccattgcgcatc

SEQ ID NO: 444524 - DNA, 50 bp, Artificial
  Synthetic oligonucleotide
gttctattgttgattattttcgtggtgctgatcaaaaagtggcagacgtt

SEQ ID NO: 444525 - DNA, 55 bp, Artificial
  Synthetic oligonucleotide
gttctatttaatcggctgcagaggaccagtgaacactttgcgttgctatcgcttt

SEQ ID NO: 444526 - DNA, 59 bp, Artificial
  Synthetic oligonucleotide
gttctcaaacaagatggcgaggttaggaaaaggatacatgttcgagagtaagagtatga

SEQ ID NO: 444527 - DNA, 60 bp, Artificial
  Synthetic oligonucleotide
gttctcaacgagcttcgccatgatccacagctagttgctaccctccatgagtggctggtc

SEQ ID NO: 444528 - DNA, 57 bp, Artificial
  Synthetic oligonucleotide
gttctcaacttggatttcactgataaggcatgcactaggataacattctttcagaag

SEQ ID NO: 444529 - DNA, 56 bp, Artificial
  Synthetic oligonucleotide
gttctcaatggctataattaagcaccggattccaagattcatggagcaataccata

SEQ ID NO: 444530 - DNA, 60 bp, Artificial
  Synthetic oligonucleotide
gttctcaatggttggaactttaatcgaactgctcagactaatgatttcactgcatttgat

SEQ ID NO: 444531 - DNA, 51 bp, Artificial
  Synthetic oligonucleotide
gttctcaatgttttccggaattaaatcaacagtggaagcagtgaaatctat

SEQ ID NO: 444532 - DNA, 55 bp, Artificial
  Synthetic oligonucleotide
gttctcaattgcatcaaacgatttgaatcaaatgtcaaagtgtctcaaggtcagg

SEQ ID NO: 444533 - DNA, 60 bp, Artificial
  Synthetic oligonucleotide
gttctcacaactaattaggaggtcgctatatggctacattgaaagctcttagcaccttaa

SEQ ID NO: 444534 - DNA, 60 bp, Artificial
  Synthetic oligonucleotide
gttctcacaagaggattgtatggtaaaggcagtccgaggtgatctgaatttcgtcaacag

SEQ ID NO: 444535 - DNA, 55 bp, Artificial
  Synthetic oligonucleotide
gttctcacacaagcataaagtcaaaacacgcggctttagtgaagccgacttagaa

SEQ ID NO: 444536 - DNA, 60 bp, Artificial
  Synthetic oligonucleotide
gttctcacgagttcagtctggccagaatcttctcaatgctattgagaaagagcgaaatga

SEQ ID NO: 444537 - DNA, 55 bp, Artificial
  Synthetic oligonucleotide
gttctcagcaacggaacaagttcgactgtccaacaatcccgcagtcgtcatgggt

SEQ ID NO: 444538 - DNA, 55 bp, Artificial
  Synthetic oligonucleotide
gttctcagcaactgaacacgtacgactatccaacaatcctgcagttgttatgggc

SEQ ID NO: 444539 - DNA, 54 bp, Artificial
  Synthetic oligonucleotide
gttctcatacgttggttctgaagcggacgtagacgctgctgagattgtgcctcc

SEQ ID NO: 444540 - DNA, 60 bp, Artificial
  Synthetic oligonucleotide
gttctcatgacaatacgcaccgttttggccagcattatcaagggaccacacctgtacctg

SEQ ID NO: 444541 - DNA, 59 bp, Artificial
  Synthetic oligonucleotide
gttctcatgagacattatcccttttgggttagattcaaagacattcctagtcttgaggc

SEQ ID NO: 444542 - DNA, 53 bp, Artificial
  Synthetic oligonucleotide
gttctccaatgtccaatactttgcacattattgcagaaagtacgcccccttgt

SEQ ID NO: 444543 - DNA, 60 bp, Artificial
  Synthetic oligonucleotide
gttctccaccttcccggatgcgtcccatgtgagaatgataatggcaccttgcgatgttgg

SEQ ID NO: 444544 - DNA, 52 bp, Artificial
  Synthetic oligonucleotide
gttctccaggggcgtcatgcacacacagcacacgatcgtttcctggccgaac

SEQ ID NO: 444545 - DNA, 50 bp, Artificial
  Synthetic oligonucleotide
gttctccatctgtccggcctggtataatatcgttgtgcgtcaacactttg

SEQ ID NO: 444546 - DNA, 60 bp, Artificial
  Synthetic oligonucleotide
gttctccattcaggtgcttattgacaaccacactcttgttgcttgcaagatctagtgctg

SEQ ID NO: 444547 - DNA, 60 bp, Artificial
  Synthetic oligonucleotide
gttctcccctacaaagctgtgacagcccatggttattgtggctctgtgatggttgcagat

SEQ ID NO: 444548 - DNA, 55 bp, Artificial
  Synthetic oligonucleotide
gttctcccgtgtacaacgtgcctggtaggacggtcaaagtccataccttcgcacc

SEQ ID NO: 444549 - DNA, 55 bp, Artificial
  Synthetic oligonucleotide
gttctccctatcatcgaactccactacgtttattggacgcacaggcagctagtgc

SEQ ID NO: 444550 - DNA, 55 bp, Artificial
  Synthetic oligonucleotide
gttctccgggtttgttggcgctagggacaggtttacattgcagggtgccgaacca

SEQ ID NO: 444551 - DNA, 60 bp, Artificial
  Synthetic oligonucleotide
gttctccgtcgatttcaagcgactgtcaccggtggtcagtatgcaagtaaggagcaagca

SEQ ID NO: 444552 - DNA, 59 bp, Artificial
  Synthetic oligonucleotide
gttctcctaacacacatgttttgaatccgtttggctcgactgcccaactggcttgggca

SEQ ID NO: 444553 - DNA, 59 bp, Artificial
  Synthetic oligonucleotide
gttctcctagttctttccgcttctatggcatccaccagttctaacacttattacatgga

SEQ ID NO: 444554 - DNA, 55 bp, Artificial
  Synthetic oligonucleotide
gttctcctataagttgataggacctgatgtagatatgtcaccattgcaccttgat

SEQ ID NO: 444555 - DNA, 60 bp, Artificial
  Synthetic oligonucleotide
gttctcctatgacaccagatgctttgactcaacggtcacggagcgcgacatacgtactga

SEQ ID NO: 444556 - DNA, 58 bp, Artificial
  Synthetic oligonucleotide
gttctcctgaagttttaaaacgcatagcaccgctattatataaggcaggaagatcgcg

SEQ ID NO: 444557 - DNA, 55 bp, Artificial
  Synthetic oligonucleotide
gttctcctgcctaggtcacgcaaactgctagaaacacaggggctcgctatggagc

SEQ ID NO: 444558 - DNA, 56 bp, Artificial
  Synthetic oligonucleotide
gttctcctgccttggagaagtgtttcgcttcgctcgtgtgtcccccggaatcaaat

SEQ ID NO: 444559 - DNA, 51 bp, Artificial
  Synthetic oligonucleotide
gttctcctgttcgacccgacagtaccttcagtggttagtccgcggaagtat

SEQ ID NO: 444560 - DNA, 60 bp, Artificial
  Synthetic oligonucleotide
gttctcgacctctgagtccgcatctgattgacccgttcccaatgcactcctggaagccca

SEQ ID NO: 444561 - DNA, 57 bp, Artificial
  Synthetic oligonucleotide
gttctcgaggacaacaacccagttgagctttggacaaaatcgggtgagaagaagata

SEQ ID NO: 444562 - DNA, 55 bp, Artificial
  Synthetic oligonucleotide
gttctcgcagatgccacctgatgagtgactgtactggcaatagatgccagagatg

SEQ ID NO: 444563 - DNA, 55 bp, Artificial
  Synthetic oligonucleotide
gttctcgccaacatataaggcctttctacgcaaacaatatctgaacctttacccc

SEQ ID NO: 444564 - DNA, 60 bp, Artificial
  Synthetic oligonucleotide
gttctcgcgtactggagaggtagttgctgctcgtataatctccccagaataatatacttc

SEQ ID NO: 444565 - DNA, 55 bp, Artificial
  Synthetic oligonucleotide
gttctcgcgtgggaaccacttcgcagcgagaccgttcttgtcgtttacaatcgca

SEQ ID NO: 444566 - DNA, 51 bp, Artificial
  Synthetic oligonucleotide
gttctcgctcatgcctcggtaccagacccacaggttgccccctgtgatgtg

SEQ ID NO: 444567 - DNA, 54 bp, Artificial
  Synthetic oligonucleotide
gttctcggccacctacaaatgcatcccggtccccgtagtggtaagggactataa

SEQ ID NO: 444568 - DNA, 55 bp, Artificial
  Synthetic oligonucleotide
gttctcgtaacctatgtgtaggtcagtagcccttgatgtgtaatcagaacctgtg

SEQ ID NO: 444569 - DNA, 60 bp, Artificial
  Synthetic oligonucleotide
gttctcgtgttgaatccatcagtagcggccacactaggcttcggctctttcatgtcgcga

SEQ ID NO: 444570 - DNA, 50 bp, Artificial
  Synthetic oligonucleotide
gttctctaacaggtggcacgcttaagaggaaggcaactattgaagaacgt

SEQ ID NO: 444571 - DNA, 51 bp, Artificial
  Synthetic oligonucleotide
gttctctaacggtctagtgtctaacggacccttcctggccacaatgcacat

SEQ ID NO: 444572 - DNA, 58 bp, Artificial
  Synthetic oligonucleotide
gttctctgaagagcacatcctatccctatataccctatccttacctatccggtaattc

SEQ ID NO: 444573 - DNA, 52 bp, Artificial
  Synthetic oligonucleotide
gttctctgaatactttggaacaaattcagctcgtacctcagaccatatgcgc

SEQ ID NO: 444574 - DNA, 58 bp, Artificial
  Synthetic oligonucleotide
gttctctgacgctggcagactatgcacggaatagaagttggtcacctttgacgggggg

SEQ ID NO: 444575 - DNA, 60 bp, Artificial
  Synthetic oligonucleotide
gttctctgatgaacattcgtatcgcagactctgtagtagagtttccatggaattgggtcc

SEQ ID NO: 444576 - DNA, 55 bp, Artificial
  Synthetic oligonucleotide
gttctctgcagtttaactggttaaccatcaaccgtgaaatcaacttagtatggac

SEQ ID NO: 444577 - DNA, 60 bp, Artificial
  Synthetic oligonucleotide
gttctctggggcctgacgaattctactatgccatcgttggacacgagaatggtgagcaag

SEQ ID NO: 444578 - DNA, 60 bp, Artificial
  Synthetic oligonucleotide
gttctctggtatgcttgtttcgttcttgtttagagaatctccagcgatcattccagaaat

SEQ ID NO: 444579 - DNA, 59 bp, Artificial
  Synthetic oligonucleotide
gttctctggtgcacatttgtatcacaaactctgtaatacagtttccatggaatcgggtc

SEQ ID NO: 444580 - DNA, 55 bp, Artificial
  Synthetic oligonucleotide
gttctctgtgaaaggagcccaagatagccgatgggagatggtcttgagaactgac

SEQ ID NO: 444581 - DNA, 57 bp, Artificial
  Synthetic oligonucleotide
gttctcttactcacggctgccccggagccatcacctatgccttatgtcccttacccc

SEQ ID NO: 444582 - DNA, 60 bp, Artificial
  Synthetic oligonucleotide
gttctcttcggtgaacatgccttatgggaactacgaatgcctcgagagcggcgtgctgtt

SEQ ID NO: 444583 - DNA, 53 bp, Artificial
  Synthetic oligonucleotide
gttctcttgttcctttttctagtctgtaaatactcgttttagctttcctagtg

SEQ ID NO: 444584 - DNA, 54 bp, Artificial
  Synthetic oligonucleotide
gttctgaaagtagcggcgttggagattggactggttttaagactgcctgttgtg

SEQ ID NO: 444585 - DNA, 53 bp, Artificial
  Synthetic oligonucleotide
gttctgaagaccttacaagtttatgaacggggttgtcgctggtaccccattgt

SEQ ID NO: 444586 - DNA, 60 bp, Artificial
  Synthetic oligonucleotide
gttctgaccacccacagtggcagctctggagatcttccccatcttgcttagacattcaga

SEQ ID NO: 444587 - DNA, 55 bp, Artificial
  Synthetic oligonucleotide
gttctgactgggagatggcatttgtctgagtcctgccctggcggtgccacgtttg

SEQ ID NO: 444588 - DNA, 58 bp, Artificial
  Synthetic oligonucleotide
gttctgagaattcgcatttacgaagagaacatgtaaatatcctccgatcgtaaataag

SEQ ID NO: 444589 - DNA, 60 bp, Artificial
  Synthetic oligonucleotide
gttctgagagattacctgcttacgcagatgcctacaacgagaagttgtagatgccccgtt

SEQ ID NO: 444590 - DNA, 60 bp, Artificial
  Synthetic oligonucleotide
gttctgattatcagaatcaacgagttggtgatgagcttctttcttgggactttcacacgc

SEQ ID NO: 444591 - DNA, 55 bp, Artificial
  Synthetic oligonucleotide
gttctgcaacccttctgcggttcataactacggtattatcatgcggtacggtaag

SEQ ID NO: 444592 - DNA, 60 bp, Artificial
  Synthetic oligonucleotide
gttctgcaatctctctgatgcacacaaaaggaacctgtatgatcacacccttatgtccat

SEQ ID NO: 444593 - DNA, 54 bp, Artificial
  Synthetic oligonucleotide
gttctgcctcccccggacggtaaatataggggaacaatgtacgcgaaagcgaca

SEQ ID NO: 444594 - DNA, 57 bp, Artificial
  Synthetic oligonucleotide
gttctgcgatggacccttccgcgaatcgtgcggtaagcactggttccaaggggtaga

SEQ ID NO: 444595 - DNA, 60 bp, Artificial
  Synthetic oligonucleotide
gttctgcggcaatctgatcaccccacggggctacctcaaggatcccatgaaggtacaaca

SEQ ID NO: 444596 - DNA, 60 bp, Artificial
  Synthetic oligonucleotide
gttctgcggttctggagctcgacttatgtagccgtgatgtgtctcgtataacattctttc

SEQ ID NO: 444597 - DNA, 54 bp, Artificial
  Synthetic oligonucleotide
gttctgcggttttggagcttgatttgtgtagccgtgatgtgtcccggataacat

SEQ ID NO: 444598 - DNA, 55 bp, Artificial
  Synthetic oligonucleotide
gttctgcgtttagtctatccttcggtacttttgtaaggtcatgctcatcagcgta

SEQ ID NO: 444599 - DNA, 55 bp, Artificial
  Synthetic oligonucleotide
gttctgctactgggagtcctgaatcaaatgcccgccatgctctactcatgatggc

SEQ ID NO: 444600 - DNA, 60 bp, Artificial
  Synthetic oligonucleotide
gttctgctaggcttacccagactgatgtaccaaaaagttgtggaatcaattgacatggtg

SEQ ID NO: 444601 - DNA, 60 bp, Artificial
  Synthetic oligonucleotide
gttctggactcaacctagctgtgttagatcccaaagtcaatagtagctggctatcatggg

SEQ ID NO: 444602 - DNA, 59 bp, Artificial
  Synthetic oligonucleotide
gttctggagctgcaagagcttgtccaacccactgacctgcattgctacgaagaattgac

SEQ ID NO: 444603 - DNA, 55 bp, Artificial
  Synthetic oligonucleotide
gttctggatatctctcaagttgggaaactcctgataaggtgggagacaacgaaac

SEQ ID NO: 444604 - DNA, 55 bp, Artificial
  Synthetic oligonucleotide
gttctggcggtctatattctacgcttttggatagaataactacaaacaagaccag

SEQ ID NO: 444605 - DNA, 55 bp, Artificial
  Synthetic oligonucleotide
gttctggctccagaacccagaccgttgctgaggcaggaacacctctgatcgatga

SEQ ID NO: 444606 - DNA, 50 bp, Artificial
  Synthetic oligonucleotide
gttctggctttccgtactttgtatttgaaagccagtccctttgggccccc

SEQ ID NO: 444607 - DNA, 55 bp, Artificial
  Synthetic oligonucleotide
gttctggggtcataattgtttaattggcagtataagggaagagagccttaccatc

SEQ ID NO: 444608 - DNA, 56 bp, Artificial
  Synthetic oligonucleotide
gttctggggttaaatagaattgtgagaatgtatagtcctgtcagcattctagagat

SEQ ID NO: 444609 - DNA, 55 bp, Artificial
  Synthetic oligonucleotide
gttctgggtgcgttttgttctttattgccggctgctttgaaacgccggctttgga

SEQ ID NO: 444610 - DNA, 55 bp, Artificial
  Synthetic oligonucleotide
gttctggtactacaaggtccaccccagccagctcgcggagcatacccgagaggtg

SEQ ID NO: 444611 - DNA, 54 bp, Artificial
  Synthetic oligonucleotide
gttctggttggttagggaccgtagaccgtatggaactcctatggatttcggaca

SEQ ID NO: 444612 - DNA, 60 bp, Artificial
  Synthetic oligonucleotide
gttctggtttgacacagaattcgaccagcaacaactgattaacttgcaggaatacactca

SEQ ID NO: 444613 - DNA, 55 bp, Artificial
  Synthetic oligonucleotide
gttctgtaagtgatggcaagactatatgcaccctgaatggggctgtggtgatgaa

SEQ ID NO: 444614 - DNA, 57 bp, Artificial
  Synthetic oligonucleotide
gttctgtactaggatgctcgatccgaggacacgtgagtcggggctaaacaagttttc

SEQ ID NO: 444615 - DNA, 52 bp, Artificial
  Synthetic oligonucleotide
gttctgtatcttgaaataaaggggatttggtacctcccagataaaaacggaa

SEQ ID NO: 444616 - DNA, 60 bp, Artificial
  Synthetic oligonucleotide
gttctgtccatgcggattccccttaacacatcagccaggacactgtaggccatcccaatc

SEQ ID NO: 444617 - DNA, 52 bp, Artificial
  Synthetic oligonucleotide
gttctgtgaaaaagaaaggaggttaggtagttacatcatggaggaaggttat

SEQ ID NO: 444618 - DNA, 57 bp, Artificial
  Synthetic oligonucleotide
gttctgtggatacaggattacgcccaaaggtttcatcaaggatccaaagaaacttca

SEQ ID NO: 444619 - DNA, 55 bp, Artificial
  Synthetic oligonucleotide
gttctgtgggcttaactgaatgtccaagctttatgacatcactgaaggcatgtga

SEQ ID NO: 444620 - DNA, 56 bp, Artificial
  Synthetic oligonucleotide
gttctgtgtacatgactataaaacaaaaggtacctacggtttatatgacagtcacg

SEQ ID NO: 444621 - DNA, 52 bp, Artificial
  Synthetic oligonucleotide
gttctgtgttggggtgagttaatgaatcttgctacctgggtgggaacctgtc

SEQ ID NO: 444622 - DNA, 55 bp, Artificial
  Synthetic oligonucleotide
gttctgttcaaatgagttcattgtatagttatgagagccggattgtgcgtttgga

SEQ ID NO: 444623 - DNA, 59 bp, Artificial
  Synthetic oligonucleotide
gttctgttcaatcatgaggtaaattgggatgtcattaatttattagttcagagcgttgg

SEQ ID NO: 444624 - DNA, 60 bp, Artificial
  Synthetic oligonucleotide
gttcttaaaaactctacgagccgagcaagcttcacaggatgtatacaactggaagacaga

SEQ ID NO: 444625 - DNA, 60 bp, Artificial
  Synthetic oligonucleotide
gttcttaaaaatggcaacattctcatgctcacattatacaaatgaatctaagtttaagct

SEQ ID NO: 444626 - DNA, 54 bp, Artificial
  Synthetic oligonucleotide
gttcttaacatacccacacgaataagacagggtttagaaagagctttactataa

SEQ ID NO: 444627 - DNA, 56 bp, Artificial
  Synthetic oligonucleotide
gttcttaacattcacgcttttgatagtttatcgacgactgaaacacttagatgtta

SEQ ID NO: 444628 - DNA, 60 bp, Artificial
  Synthetic oligonucleotide
gttcttaatcccggtgaccctatacaagcagacgtacaatctgcgttcgcagctgatggc

SEQ ID NO: 444629 - DNA, 55 bp, Artificial
  Synthetic oligonucleotide
gttcttaatcggtggatgggtaagctttctttcccacaaggtacggatgtcacgc

SEQ ID NO: 444630 - DNA, 56 bp, Artificial
  Synthetic oligonucleotide
gttcttacacgcctttgtcaactggccccacacaccaatggaccgcaaccctacca

SEQ ID NO: 444631 - DNA, 59 bp, Artificial
  Synthetic oligonucleotide
gttcttacactttaggcatggatgcacccattcaaggattggacagccaaggggaccaa

SEQ ID NO: 444632 - DNA, 59 bp, Artificial
  Synthetic oligonucleotide
gttcttacatgataccccaaggatagtgacaagaaggactactgctgctttggtggata

SEQ ID NO: 444633 - DNA, 55 bp, Artificial
  Synthetic oligonucleotide
gttcttacgattgaggcaaacgatggttcgcgtttgaatggtttgtctgctcgcg

SEQ ID NO: 444634 - DNA, 53 bp, Artificial
  Synthetic oligonucleotide
gttcttacttaataggcgtgcgcgagcataattcgtcgttaagtttgaacacg

SEQ ID NO: 444635 - DNA, 60 bp, Artificial
  Synthetic oligonucleotide
gttcttacttagcagccgcaatgcaattttttgagggaacatgccctgaggactggacca

SEQ ID NO: 444636 - DNA, 56 bp, Artificial
  Synthetic oligonucleotide
gttcttagcattcccagggtactcgtttttctcgttagaacttcttctgcgagtga

SEQ ID NO: 444637 - DNA, 57 bp, Artificial
  Synthetic oligonucleotide
gttcttagctctagatcgcagcgaccgtgtttatttccatacgggtgaacgccctat

SEQ ID NO: 444638 - DNA, 53 bp, Artificial
  Synthetic oligonucleotide
gttcttaggccgtcctcacggacccaggcatcgcctatgtggttccactcctt

SEQ ID NO: 444639 - DNA, 55 bp, Artificial
  Synthetic oligonucleotide
gttcttaggtcaatgactacaaagaggatcagctcgaaggaacaagttacaatgg

SEQ ID NO: 444640 - DNA, 60 bp, Artificial
  Synthetic oligonucleotide
gttcttagtgagcttgagtgtaatgattcttaatcatagtcgtagtaatacgctgacctc

SEQ ID NO: 444641 - DNA, 55 bp, Artificial
  Synthetic oligonucleotide
gttcttatcacgttgctaagcctgtgataatgcacagaggacatatcggacggag

SEQ ID NO: 444642 - DNA, 55 bp, Artificial
  Synthetic oligonucleotide
gttcttattgatttgttaagagccgaagtttcttactgagaggcaacaggggtta

SEQ ID NO: 444643 - DNA, 54 bp, Artificial
  Synthetic oligonucleotide
gttcttattggattcttttctatctaaagtcccactgaatgctagtcacaattc

SEQ ID NO: 444644 - DNA, 52 bp, Artificial
  Synthetic oligonucleotide
gttcttcaaaacccacttgttcgactgggtcaccagtgacccgtttggacgg

SEQ ID NO: 444645 - DNA, 60 bp, Artificial
  Synthetic oligonucleotide
gttcttcaagaattatgcatggacagatctattttattgaaaccattgtcacttgtacca

SEQ ID NO: 444646 - DNA, 60 bp, Artificial
  Synthetic oligonucleotide
gttcttcaagtggtactgaatcttcgctctcctcgagatctattgattctgacacactag

SEQ ID NO: 444647 - DNA, 53 bp, Artificial
  Synthetic oligonucleotide
gttcttcaagtttacagcattagccccgaccaaggcgcttttaggccgatgga

SEQ ID NO: 444648 - DNA, 56 bp, Artificial
  Synthetic oligonucleotide
gttcttcacggaacaacgcgcgggtgtttatcaggtcgacattaactacgcatcgg

SEQ ID NO: 444649 - DNA, 55 bp, Artificial
  Synthetic oligonucleotide
gttcttcatgctgaacacaatagccactggttttgccctgggaaaacaccctctg

SEQ ID NO: 444650 - DNA, 55 bp, Artificial
  Synthetic oligonucleotide
gttcttccaggagcagtagcacctgggatgatctctactgcgacgagtccatctc

SEQ ID NO: 444651 - DNA, 56 bp, Artificial
  Synthetic oligonucleotide
gttcttccatgaattgggtgttaggtggttcctgtttttggatggtgccaatcaaa

SEQ ID NO: 444652 - DNA, 60 bp, Artificial
  Synthetic oligonucleotide
gttcttccgctgggccagtgatcacgtgaccgaggtggcgcatgagttttacgtcagaaa

SEQ ID NO: 444653 - DNA, 60 bp, Artificial
  Synthetic oligonucleotide
gttcttctgcgccaattacatcgtgacggcagggcatgtcgttggacaacacaaggttgt

SEQ ID NO: 444654 - DNA, 60 bp, Artificial
  Synthetic oligonucleotide
gttcttgacaagaactggggatcttgtagagaatagctcaatgataacattgaatgagtt

SEQ ID NO: 444655 - DNA, 55 bp, Artificial
  Synthetic oligonucleotide
gttcttgatttaggacaaaagacttattgcggtaaagtggttagagcagtagatg

SEQ ID NO: 444656 - DNA, 60 bp, Artificial
  Synthetic oligonucleotide
gttcttgcacagctcaaacgctggcacttactatttcaatattcccgcaaatgcaactcg

SEQ ID NO: 444657 - DNA, 55 bp, Artificial
  Synthetic oligonucleotide
gttcttgcactactccaactcaaggacgaagctagaattctgaggggtgcattcc

SEQ ID NO: 444658 - DNA, 60 bp, Artificial
  Synthetic oligonucleotide
gttcttgccgacgcaagcgaaacaatgttagcaaatgtgacatctgttagacaagaatac

SEQ ID NO: 444659 - DNA, 53 bp, Artificial
  Synthetic oligonucleotide
gttcttgcgatggtctttttggaaaaggcgctactcctagtaaaccttcacct

SEQ ID NO: 444660 - DNA, 60 bp, Artificial
  Synthetic oligonucleotide
gttcttgctactagggctgacgatgcctttcatgttgctgacgtgccgtacgttgtcgat

SEQ ID NO: 444661 - DNA, 55 bp, Artificial
  Synthetic oligonucleotide
gttcttgctgcattaggagaaaatcagagaatcccatcaggaaaccctttcagag

SEQ ID NO: 444662 - DNA, 59 bp, Artificial
  Synthetic oligonucleotide
gttcttgctttaccgtaatgacagacggaccaagtaatggacaggcctcatacaagatc

SEQ ID NO: 444663 - DNA, 54 bp, Artificial
  Synthetic oligonucleotide
gttcttgggaccaccgacaataattgttgggttaatgcaacttgtataatttta

SEQ ID NO: 444664 - DNA, 55 bp, Artificial
  Synthetic oligonucleotide
gttcttgggcgggatccacgggatgcaagcgggagttaaaggagcgaggagcatc

SEQ ID NO: 444665 - DNA, 55 bp, Artificial
  Synthetic oligonucleotide
gttcttggtcactccatcaccgatgtcactttcctcaaaagacactttcacatgg

SEQ ID NO: 444666 - DNA, 60 bp, Artificial
  Synthetic oligonucleotide
gttcttggtggcatcactactctagagaggattacagagtacattcctgttgtcctattc

SEQ ID NO: 444667 - DNA, 60 bp, Artificial
  Synthetic oligonucleotide
gttcttgtagtatcatcgcattcgtttgtattgtgtttactattctacgcgtcaaccaca

SEQ ID NO: 444668 - DNA, 58 bp, Artificial
  Synthetic oligonucleotide
gttcttgtcaacatacttgggtcatggctaaaaccacaatgcttgggttatgagaagg

SEQ ID NO: 444669 - DNA, 57 bp, Artificial
  Synthetic oligonucleotide
gttcttgttatccccggtacccaaacgtcagatgtgtctgcagagacaactggaagg

SEQ ID NO: 444670 - DNA, 57 bp, Artificial
  Synthetic oligonucleotide
gttcttgtttcagaccaaaagatgaggtggaggctaaactgttgaggggctatggtg

SEQ ID NO: 444671 - DNA, 59 bp, Artificial
  Synthetic oligonucleotide
gttctttaattaagaacatagatttgcttaaatcgcttgcggaatgtggcaaatctcaa

SEQ ID NO: 444672 - DNA, 53 bp, Artificial
  Synthetic oligonucleotide
gttctttaccgaggaggtgcgcactacaaagtgcgttattaacggtaaaatgg

SEQ ID NO: 444673 - DNA, 60 bp, Artificial
  Synthetic oligonucleotide
gttctttcaggaacacttttcacatgaaccactactaatgatacaggccacagcagccaa

SEQ ID NO: 444674 - DNA, 60 bp, Artificial
  Synthetic oligonucleotide
gttctttcctcatcactcgctgaacttgcgagacttgactgaagtcaagtccgtccacca

SEQ ID NO: 444675 - DNA, 60 bp, Artificial
  Synthetic oligonucleotide
gttctttgacagctggagtgaagtataatggtgacaattctgtagaactttcaacagctt

SEQ ID NO: 444676 - DNA, 58 bp, Artificial
  Synthetic oligonucleotide
gttctttgctaattactttgaaaagattgatcacagtaagggttatgaatattatagc

SEQ ID NO: 444677 - DNA, 55 bp, Artificial
  Synthetic oligonucleotide
gttcttttggataactgtgattggctaagattcccaaggtagaccccacctacag

SEQ ID NO: 444678 - DNA, 57 bp, Artificial
  Synthetic oligonucleotide
gttctttttagcataatcgagtagcttaggaaaaatcgcaggagtccactgaaccac

SEQ ID NO: 444679 - DNA, 52 bp, Artificial
  Synthetic oligonucleotide
gttgaaaagcccgatgtacaggaaccggacaaaacggaaacttcggacactg

SEQ ID NO: 444680 - DNA, 51 bp, Artificial
  Synthetic oligonucleotide
gttgaaaaggtctgcaaggtccatgccatgtgagaattttgagtcctgttt

SEQ ID NO: 444681 - DNA, 59 bp, Artificial
  Synthetic oligonucleotide
gttgaaacacattgaagtgtgcctgctgaagacccaccgactgattaacaaactgggcg

SEQ ID NO: 444682 - DNA, 60 bp, Artificial
  Synthetic oligonucleotide
gttgaaacgagctgcagtgatgggttcccctgtgcgtgaatccatgattcgcgcaggtta

SEQ ID NO: 444683 - DNA, 55 bp, Artificial
  Synthetic oligonucleotide
gttgaaatcaatgtgcttctccctcaagttgcagttaacctctcaaactgtcacg

SEQ ID NO: 444684 - DNA, 60 bp, Artificial
  Synthetic oligonucleotide
gttgaaatggcacgagaagaggtacccccacacctatcttgctttcgagcagatagagag

SEQ ID NO: 444685 - DNA, 56 bp, Artificial
  Synthetic oligonucleotide
gttgaaatgtaacagtgcaaactttacaggagtaggaacttgtaacaatgtaagtg

SEQ ID NO: 444686 - DNA, 55 bp, Artificial
  Synthetic oligonucleotide
gttgaaattgcacaccacctgtgatacccagtcagagattgacgacattggctgg

SEQ ID NO: 444687 - DNA, 58 bp, Artificial
  Synthetic oligonucleotide
gttgaaattggcatagatacagttgtgcacgttccgcggaaaactaaactacgcagaa

SEQ ID NO: 444688 - DNA, 53 bp, Artificial
  Synthetic oligonucleotide
gttgaacaacatcaccgcagaacagacaacgacagcacagcctccgacactcc

SEQ ID NO: 444689 - DNA, 54 bp, Artificial
  Synthetic oligonucleotide
gttgaacaactcaaatggggaagaggtggtctcagcgacaccgcaagagtattc

SEQ ID NO: 444690 - DNA, 58 bp, Artificial
  Synthetic oligonucleotide
gttgaaccaagttaccaattgattatcacaagcaacttttcgatagatcaatgttttg

SEQ ID NO: 444691 - DNA, 55 bp, Artificial
  Synthetic oligonucleotide
gttgaaccactaaacaacgacataatatttaattacatacctgaaaggatacgaa

SEQ ID NO: 444692 - DNA, 55 bp, Artificial
  Synthetic oligonucleotide
gttgaaccaggcctcattattgtacacctttgggctaaggtctagatgaccacac

SEQ ID NO: 444693 - DNA, 56 bp, Artificial
  Synthetic oligonucleotide
gttgaaccatgcacactgactttgagtaaagctgaccctgtggaggcagagatgcg

SEQ ID NO: 444694 - DNA, 59 bp, Artificial
  Synthetic oligonucleotide
gttgaaccatgcgctacgtgatatactttcgctagagggatcgttagggataattattg

SEQ ID NO: 444695 - DNA, 60 bp, Artificial
  Synthetic oligonucleotide
gttgaacccatgcacatctaacagtgagccagagcccaccacctcggttttcactgagac

SEQ ID NO: 444696 - DNA, 60 bp, Artificial
  Synthetic oligonucleotide
gttgaaccccctactgagtacggcaaaatggaagtggccatggagcatgtgcaatttgct

SEQ ID NO: 444697 - DNA, 52 bp, Artificial
  Synthetic oligonucleotide
gttgaacccctttcaagaattcgaaatagaaagccctccaaaaactagtaca

SEQ ID NO: 444698 - DNA, 54 bp, Artificial
  Synthetic oligonucleotide
gttgaaccgtatctggagtgtgatgatgtcgtgggtcatgttccctggcctctt

SEQ ID NO: 444699 - DNA, 54 bp, Artificial
  Synthetic oligonucleotide
gttgaactagagcttttttgactcgtccatccagaaattgttcctttgccttgc

SEQ ID NO: 444700 - DNA, 55 bp, Artificial
  Synthetic oligonucleotide
gttgaactaggtttagttaataactttccattggctactccagccattgctcaac

SEQ ID NO: 444701 - DNA, 59 bp, Artificial
  Synthetic oligonucleotide
gttgaactatgtttctattagccttcacacctgtgcacaaatctttgaacaaatcttgg

SEQ ID NO: 444702 - DNA, 51 bp, Artificial
  Synthetic oligonucleotide
gttgaactcgaacacagatgcgtcgcaaaacggcgcgtggtaaccaatgca

SEQ ID NO: 444703 - DNA, 60 bp, Artificial
  Synthetic oligonucleotide
gttgaactggacctgcactgtgattacgtcgtgtttcatcatgaatggcctctcgtggtg

SEQ ID NO: 444704 - DNA, 55 bp, Artificial
  Synthetic oligonucleotide
gttgaactgtatctgaactgtaatgatgtcgtgctctcgtaggaatggtctgctg

SEQ ID NO: 444705 - DNA, 54 bp, Artificial
  Synthetic oligonucleotide
gttgaagaaccacacgaacagcgtcatgttttggttagttagggaccgtagacc

SEQ ID NO: 444706 - DNA, 55 bp, Artificial
  Synthetic oligonucleotide
gttgaagaatcacacgaacagtgtgatgttttggttagtcagagatcgtagaccg

SEQ ID NO: 444707 - DNA, 60 bp, Artificial
  Synthetic oligonucleotide
gttgaagatcgcagaaggggatattccaattgctggggtgaaaagctccagaatctattc

SEQ ID NO: 444708 - DNA, 60 bp, Artificial
  Synthetic oligonucleotide
gttgaagatggtgtactttgatcttattcgtccgatgtgtagccttcgtcgtctgtatcg

SEQ ID NO: 444709 - DNA, 60 bp, Artificial
  Synthetic oligonucleotide
gttgaagattcaggctctgtcagccattcccgactcatgtcggttatggggaaagaggct

SEQ ID NO: 444710 - DNA, 60 bp, Artificial
  Synthetic oligonucleotide
gttgaagcatgtggttactctgatagaattattcagataaccagaggagactcaactatc

SEQ ID NO: 444711 - DNA, 60 bp, Artificial
  Synthetic oligonucleotide
gttgaagcctctgcttggctgttttgtgttggaccttgatgggaatctgagtacaatggc

SEQ ID NO: 444712 - DNA, 55 bp, Artificial
  Synthetic oligonucleotide
gttgaagcgaaccggcgatataatcatttccacacccgcctcgaaggttcgccga

SEQ ID NO: 444713 - DNA, 60 bp, Artificial
  Synthetic oligonucleotide
gttgaaggaattggaagattctacatacagatgtgcactgaactccaactcagtgattat

SEQ ID NO: 444714 - DNA, 50 bp, Artificial
  Synthetic oligonucleotide
gttgaaggagaaaacgtccgttacccggctaactacttcgagaaacctag

SEQ ID NO: 444715 - DNA, 55 bp, Artificial
  Synthetic oligonucleotide
gttgaaggggaatgtggcaactagcgaggagttctcagatgcgacaacacagttg

SEQ ID NO: 444716 - DNA, 60 bp, Artificial
  Synthetic oligonucleotide
gttgaaggtacactctattctaatgttagcgatctcattcaacaatttaatcaaatgata

SEQ ID NO: 444717 - DNA, 55 bp, Artificial
  Synthetic oligonucleotide
gttgaaggtcaaatggtggaacaacgcatacatgaaaaccagtttgggcccgaat

SEQ ID NO: 444718 - DNA, 53 bp, Artificial
  Synthetic oligonucleotide
gttgaaggtgagcctttaaactaccagcgggcggacctcctacgggagagtcc

SEQ ID NO: 444719 - DNA, 59 bp, Artificial
  Synthetic oligonucleotide
gttgaagtattcgacacattctgctggggaaatactcgcactgtctgacgcaatacctt

SEQ ID NO: 444720 - DNA, 55 bp, Artificial
  Synthetic oligonucleotide
gttgaagtgctggctctgtaaaaaaccatctcaccaacagactgagcatctgaaa

SEQ ID NO: 444721 - DNA, 60 bp, Artificial
  Synthetic oligonucleotide
gttgaagtgcttgtgtcagaaggattctagtatatggagatcaagatgatgctctagctg

SEQ ID NO: 444722 - DNA, 56 bp, Artificial
  Synthetic oligonucleotide
gttgaagttccaattaatgttgcagaagcctactgtgtagggaaattgaagagatc

SEQ ID NO: 444723 - DNA, 57 bp, Artificial
  Synthetic oligonucleotide
gttgaatacaggttatatagttactgaatcaagtaagggggcaccgttgaatcgatg

SEQ ID NO: 444724 - DNA, 60 bp, Artificial
  Synthetic oligonucleotide
gttgaatcagcttattccagttacttgactagaccagatacgtggaatccatcaacccta

SEQ ID NO: 444725 - DNA, 58 bp, Artificial
  Synthetic oligonucleotide
gttgaatccatagacaatgttatgggaatgattgggatactacctgatttaaccccaa

SEQ ID NO: 444726 - DNA, 59 bp, Artificial
  Synthetic oligonucleotide
gttgaatcgtatttgtgcgtggtataccctggttctggtgaacagcaagtcctctactc

SEQ ID NO: 444727 - DNA, 60 bp, Artificial
  Synthetic oligonucleotide
gttgaatctgatactagagaattgaagagagtaaaggttagtgaatgtaggaatgtggac

SEQ ID NO: 444728 - DNA, 55 bp, Artificial
  Synthetic oligonucleotide
gttgaatgacaaacattccaatggaaccgttaaagacagaagcccttatagaacc

SEQ ID NO: 444729 - DNA, 55 bp, Artificial
  Synthetic oligonucleotide
gttgaatgacccgagtattgtaacagccatgacaatgcagtcacctttacagcta

SEQ ID NO: 444730 - DNA, 55 bp, Artificial
  Synthetic oligonucleotide
gttgaatgatgccatcgcgactattcgtggacaattcccaaccgcggttattgag

SEQ ID NO: 444731 - DNA, 60 bp, Artificial
  Synthetic oligonucleotide
gttgaatgcatcaatcgcatggttactagccgtgataagttgcgctatgggaatgatttt

SEQ ID NO: 444732 - DNA, 60 bp, Artificial
  Synthetic oligonucleotide
gttgaatgcccctaattaccactatgaggagtgctcctgttatccagacgctagcgaggt

SEQ ID NO: 444733 - DNA, 55 bp, Artificial
  Synthetic oligonucleotide
gttgaatggaaaacagtgcgtattttaacgtcaacattacgtgaaacggaagaga

SEQ ID NO: 444734 - DNA, 60 bp, Artificial
  Synthetic oligonucleotide
gttgaatgggagtgtgatactgcaattgaaccagtgatagacatacgcgttccattatgt

SEQ ID NO: 444735 - DNA, 57 bp, Artificial
  Synthetic oligonucleotide
gttgaatgtgggaactctagacttgagggacgaaataaatactctagacttgaggga

SEQ ID NO: 444736 - DNA, 55 bp, Artificial
  Synthetic oligonucleotide
gttgaattcatatgcgcctgtctccttagagaagcgtcgtgctcaaatctctgct

SEQ ID NO: 444737 - DNA, 55 bp, Artificial
  Synthetic oligonucleotide
gttgaattcgtcttttatgaggatacctcggttgaaggtcacataatgcatgggg

SEQ ID NO: 444738 - DNA, 55 bp, Artificial
  Synthetic oligonucleotide
gttgaatttcctcgaggacccatcgagatggctccaggcagggcgggagatcccg

SEQ ID NO: 444739 - DNA, 55 bp, Artificial
  Synthetic oligonucleotide
gttgacaaaacacggcaaacgctggcttctattaagagtgactccaaacatacac

SEQ ID NO: 444740 - DNA, 55 bp, Artificial
  Synthetic oligonucleotide
gttgacaaactccggtgacaacatggggacttataacggattaaggccattatgg

SEQ ID NO: 444741 - DNA, 55 bp, Artificial
  Synthetic oligonucleotide
gttgacaatgaagatggtgtgtgttgtgaaactgtttgagctagcacaacgctcg

SEQ ID NO: 444742 - DNA, 60 bp, Artificial
  Synthetic oligonucleotide
gttgacaatgcacataatactaatttcactatttcacaatataatgggcaatctccactt

SEQ ID NO: 444743 - DNA, 59 bp, Artificial
  Synthetic oligonucleotide
gttgacaatgccagtgtcggggggggcgtcctgttgagtcaggagctgccagttcccaa

SEQ ID NO: 444744 - DNA, 60 bp, Artificial
  Synthetic oligonucleotide
gttgacacaaggatgcattctgttgcagagggaactatatgcaaattttcagctcccgcc

SEQ ID NO: 444745 - DNA, 55 bp, Artificial
  Synthetic oligonucleotide
gttgacacagacagctccagtggtggttccttgtccttatcaagccatggacttc

SEQ ID NO: 444746 - DNA, 54 bp, Artificial
  Synthetic oligonucleotide
gttgacacgctaagacctttacaaagtgtcttaagacgtccataccggttactc

SEQ ID NO: 444747 - DNA, 54 bp, Artificial
  Synthetic oligonucleotide
gttgacactggacttacaccgatgggacggggctaccctgaccagggacgcccc

SEQ ID NO: 444748 - DNA, 55 bp, Artificial
  Synthetic oligonucleotide
gttgacacttcacagtcaagccggtaaggttgacaacatgaacaacgcaagcgag

SEQ ID NO: 444749 - DNA, 55 bp, Artificial
  Synthetic oligonucleotide
gttgacagatatggacagttgcagacaaagatgctgtaatcaaaagcctttattg

SEQ ID NO: 444750 - DNA, 59 bp, Artificial
  Synthetic oligonucleotide
gttgacagcttgataacgctaagagttgttcaagagcgtcctcctttctaagaggacaa

SEQ ID NO: 444751 - DNA, 58 bp, Artificial
  Synthetic oligonucleotide
gttgacagtagtggtgtcgaccgccgacctccacctagcccatttgcaggaggtgaaa

SEQ ID NO: 444752 - DNA, 50 bp, Artificial
  Synthetic oligonucleotide
gttgacataaacccgggccatgcagatcttagtgctaaagaagcacagga

SEQ ID NO: 444753 - DNA, 60 bp, Artificial
  Synthetic oligonucleotide
gttgacatacgtgctgactggtactcgaacaactcagttgaggccgtccctatgttacta

SEQ ID NO: 444754 - DNA, 60 bp, Artificial
  Synthetic oligonucleotide
gttgacatatgagcagtgcgttgataactggaagtcatttgccggtgtgaggttcggttg

SEQ ID NO: 444755 - DNA, 60 bp, Artificial
  Synthetic oligonucleotide
gttgacatgtctacacgctcgtgtagagtgctctacagatcgaccgcaacgaggaaggag

SEQ ID NO: 444756 - DNA, 55 bp, Artificial
  Synthetic oligonucleotide
gttgacattttaaaagagcgtggattactatctgagtccgatgctgttcaaccac

SEQ ID NO: 444757 - DNA, 60 bp, Artificial
  Synthetic oligonucleotide
gttgaccacacaatgccgaatcagcttttggaaagcattcggaattctcccagatcaaca

SEQ ID NO: 444758 - DNA, 54 bp, Artificial
  Synthetic oligonucleotide
gttgaccaccgtggcaaatccttgccccatgccctacaccccttacccgaaggc

SEQ ID NO: 444759 - DNA, 60 bp, Artificial
  Synthetic oligonucleotide
gttgacccaaaaatagtggacctgcccaacacaacgccaccaagcatgtacattgcacga

SEQ ID NO: 444760 - DNA, 59 bp, Artificial
  Synthetic oligonucleotide
gttgaccccactctgtgtcactttgaactgtacaaatgtaaatgttaatgctaccacaa

SEQ ID NO: 444761 - DNA, 58 bp, Artificial
  Synthetic oligonucleotide
gttgacccttcacaacgatttctagatgattctacggaattagtctttcaaatatctc

SEQ ID NO: 444762 - DNA, 51 bp, Artificial
  Synthetic oligonucleotide
gttgaccgaaaggtattacacccagaactcaggacatgctcgtaaccaggt

SEQ ID NO: 444763 - DNA, 56 bp, Artificial
  Synthetic oligonucleotide
gttgaccgaatgtgaaactccactccggagcgtatgcgtcgaaactgggggagaaa

SEQ ID NO: 444764 - DNA, 58 bp, Artificial
  Synthetic oligonucleotide
gttgaccgattcaagctgggtagaacttgatgaaataggggaagacgttgctccaatc

SEQ ID NO: 444765 - DNA, 55 bp, Artificial
  Synthetic oligonucleotide
gttgaccgctacgacggacgggtgttagtcccgacgggcgcagcgatccccgtca

SEQ ID NO: 444766 - DNA, 55 bp, Artificial
  Synthetic oligonucleotide
gttgaccggcatctcccagcctacggaatcaaagtatataacagttcgtcgatca

SEQ ID NO: 444767 - DNA, 60 bp, Artificial
  Synthetic oligonucleotide
gttgaccgtccagatatatacgccattctctgcttgagctgcagtgatgtgttcccctgt

SEQ ID NO: 444768 - DNA, 51 bp, Artificial
  Synthetic oligonucleotide
gttgacctagggtgtcccaaaattccgttactgggcaaaatggctatttat

SEQ ID NO: 444769 - DNA, 55 bp, Artificial
  Synthetic oligonucleotide
gttgacctagtcagaactgcaatggaacgcgagatgaaggtgctgcgtgatgaaa

SEQ ID NO: 444770 - DNA, 50 bp, Artificial
  Synthetic oligonucleotide
gttgacctgggagtggggtttacagctgcttacgagccgcgcgctgccac

SEQ ID NO: 444771 - DNA, 53 bp, Artificial
  Synthetic oligonucleotide
gttgaccttctaaagaagtccttgcggactcaccttgaaggtctagttaaaaa

SEQ ID NO: 444772 - DNA, 55 bp, Artificial
  Synthetic oligonucleotide
gttgacgaccgtaattatgcactgaaaggagaagggagtttaacgctaacccaga

SEQ ID NO: 444773 - DNA, 60 bp, Artificial
  Synthetic oligonucleotide
gttgacgataacttattcatcgtcaatgatgtgggaggttaatggccctgaatcagtgtt

SEQ ID NO: 444774 - DNA, 60 bp, Artificial
  Synthetic oligonucleotide
gttgacgcacgatgcccggtctctaaggagcatagcaacgagttatgccactactcggac

SEQ ID NO: 444775 - DNA, 55 bp, Artificial
  Synthetic oligonucleotide
gttgacgcccttcgcatcgtcggttctaatatgattgcaagcgaccagggcccgc

SEQ ID NO: 444776 - DNA, 60 bp, Artificial
  Synthetic oligonucleotide
gttgacgcttgatgaggaggaatacacactatgggaaagcatccaggaattttcaatgat

SEQ ID NO: 444777 - DNA, 55 bp, Artificial
  Synthetic oligonucleotide
gttgacggcgcgagagcccgtcatgatagtccatcatgccccggagatcgtgcac

SEQ ID NO: 444778 - DNA, 60 bp, Artificial
  Synthetic oligonucleotide
gttgacggtgatgacaactacgccgtactgcaatttaatacagaagtgaccaaacagatg

SEQ ID NO: 444779 - DNA, 55 bp, Artificial
  Synthetic oligonucleotide
gttgacgtcataggtcgtgaaatcagctaggctgttgtagtagttgtggatccct

SEQ ID NO: 444780 - DNA, 55 bp, Artificial
  Synthetic oligonucleotide
gttgacgtcgagcaccaacgtattcccacatccggagtgctcccgacttagttcc

SEQ ID NO: 444781 - DNA, 57 bp, Artificial
  Synthetic oligonucleotide
gttgacgtggaagggtccacaacgctctctaacaggcgatataactgttggtccacg

SEQ ID NO: 444782 - DNA, 52 bp, Artificial
  Synthetic oligonucleotide
gttgacgttagaaacaactctgtcgtacctaacattcttagaaactctgact

SEQ ID NO: 444783 - DNA, 55 bp, Artificial
  Synthetic oligonucleotide
gttgacgttcgatcaggtggtaacccccactagtttggtcgatgaggctaggaat

SEQ ID NO: 444784 - DNA, 60 bp, Artificial
  Synthetic oligonucleotide
gttgactaaatcaggaagcacatacccagtgttgaacgtgactatgccaaataacgacaa

SEQ ID NO: 444785 - DNA, 54 bp, Artificial
  Synthetic oligonucleotide
gttgactacaaaggcacctttctaactagggaggccctagaggcattaagtttg

SEQ ID NO: 444786 - DNA, 60 bp, Artificial
  Synthetic oligonucleotide
gttgactacctcctatctgctctgcgctggccaacaggtgttccttctcttgagtttatc

SEQ ID NO: 444787 - DNA, 60 bp, Artificial
  Synthetic oligonucleotide
gttgactaggtattgtgattactacactcaatttgcagacaactcaggctacagtcaaac

SEQ ID NO: 444788 - DNA, 55 bp, Artificial
  Synthetic oligonucleotide
gttgactataagcaaacacaactgtgcattctgggctgtacgcctcccatgggcg

SEQ ID NO: 444789 - DNA, 57 bp, Artificial
  Synthetic oligonucleotide
gttgactccggatctagattgtaccttcccttggttttaaatctctctgccatagag

SEQ ID NO: 444790 - DNA, 56 bp, Artificial
  Synthetic oligonucleotide
gttgactcggttcgtcctctgctgttccgtctcaaaggcgccgcctctgcgggggg

SEQ ID NO: 444791 - DNA, 56 bp, Artificial
  Synthetic oligonucleotide
gttgactgaagtagtacagaaagtagccctggaaagtatagtcatctggggaaaaa

SEQ ID NO: 444792 - DNA, 60 bp, Artificial
  Synthetic oligonucleotide
gttgactgggttcccactggtcgcacgacctggagcattcatgctagtggagcctggatg

SEQ ID NO: 444793 - DNA, 54 bp, Artificial
  Synthetic oligonucleotide
gttgactggtcaatcggtgtctctcaaagttctatgcaatcggtgtctctggag

SEQ ID NO: 444794 - DNA, 57 bp, Artificial
  Synthetic oligonucleotide
gttgactggtcgaaattttatgctgagatggccggtcgtccccttattgcctttgat

SEQ ID NO: 444795 - DNA, 60 bp, Artificial
  Synthetic oligonucleotide
gttgactgtgaaatccttctgagcaccgaggaagcatttccagtttggcacatatttaat

SEQ ID NO: 444796 - DNA, 55 bp, Artificial
  Synthetic oligonucleotide
gttgacttgtataacgtcgtcacacgctatgcttatgagactccgcctatcaccg

SEQ ID NO: 444797 - DNA, 54 bp, Artificial
  Synthetic oligonucleotide
gttgacttgtttggttcggttaattcctgtcgtggaactcttaaggtggcagaa

SEQ ID NO: 444798 - DNA, 56 bp, Artificial
  Synthetic oligonucleotide
gttgactttcaatctacggtggactttcacaaaggtctattggaccagattgtcga

SEQ ID NO: 444799 - DNA, 55 bp, Artificial
  Synthetic oligonucleotide
gttgagaaactgtctgcagtggtacccctgtgggtccaaattgattcgtcactcc

SEQ ID NO: 444800 - DNA, 52 bp, Artificial
  Synthetic oligonucleotide
gttgagaacactagcacagagtctgattgatttgaaggtgaaggaaatttcg

SEQ ID NO: 444801 - DNA, 53 bp, Artificial
  Synthetic oligonucleotide
gttgagaacggcgattaagtacgacgttttgttaatagacgagtatacgttat

SEQ ID NO: 444802 - DNA, 60 bp, Artificial
  Synthetic oligonucleotide
gttgagaagtcgtgcctcaacagatattgcctccaagagatatgaaaatcctgtgttatg

SEQ ID NO: 444803 - DNA, 57 bp, Artificial
  Synthetic oligonucleotide
gttgagaagttaatcgaaaggattagcgaatttaatggaataaagaggcagttcaga

SEQ ID NO: 444804 - DNA, 55 bp, Artificial
  Synthetic oligonucleotide
gttgagaatcagtcgagccacgccccaaatcagtctctcttatacgtttacaact

SEQ ID NO: 444805 - DNA, 60 bp, Artificial
  Synthetic oligonucleotide
gttgagacaaccgcgtgcaaatggctacgggtatctagtcggacgtgttggcaatgaagc

SEQ ID NO: 444806 - DNA, 60 bp, Artificial
  Synthetic oligonucleotide
gttgagacaccagaagaatggcatctagattacccgtgtgataaacttccaagtgtgctg

SEQ ID NO: 444807 - DNA, 59 bp, Artificial
  Synthetic oligonucleotide
gttgagacatcaccaactgaaaacaggtaccttctcttacacatcaagatactaagaaa

SEQ ID NO: 444808 - DNA, 59 bp, Artificial
  Synthetic oligonucleotide
gttgagaccagtgcgtattttgccactcccgtatttacgaaggtcaactgctgaattca

SEQ ID NO: 444809 - DNA, 60 bp, Artificial
  Synthetic oligonucleotide
gttgagaccgattccattcgagtctttcagtcaccaagccaagtagaattgctggacatt

SEQ ID NO: 444810 - DNA, 55 bp, Artificial
  Synthetic oligonucleotide
gttgagactgacttaccatcaatcgtccagcttgcaggagacacttgggacgcat

SEQ ID NO: 444811 - DNA, 55 bp, Artificial
  Synthetic oligonucleotide
gttgagagaagtggctagaaggattacaggcaatagcggtgatcgtgcaccttgg

SEQ ID NO: 444812 - DNA, 58 bp, Artificial
  Synthetic oligonucleotide
gttgagagcctctccgaacacaacatggcggttcccaatccaaacgacatatcatttt

SEQ ID NO: 444813 - DNA, 55 bp, Artificial
  Synthetic oligonucleotide
gttgagaggccctgatgttcctaaagggtgtgaaggcccatgtaaggtccagtcc

SEQ ID NO: 444814 - DNA, 59 bp, Artificial
  Synthetic oligonucleotide
gttgagagtacgcagagggaggagatccactcggagaaagccctccagaggacgcaccc

SEQ ID NO: 444815 - DNA, 60 bp, Artificial
  Synthetic oligonucleotide
gttgagataacatttgtgaatccccagtaccttcctgatgttgtgattgaatcttatctg

SEQ ID NO: 444816 - DNA, 55 bp, Artificial
  Synthetic oligonucleotide
gttgagataagccttgtggagacccaatactctcctcaagttgtggttgaaccgt

SEQ ID NO: 444817 - DNA, 55 bp, Artificial
  Synthetic oligonucleotide
gttgagataagcgaagttacaatcattacatgtgagaatggttctactgcagatg

SEQ ID NO: 444818 - DNA, 55 bp, Artificial
  Synthetic oligonucleotide
gttgagatcaacaacgttgagggccaaagcggcgttgcacggtaccgcattcccc

SEQ ID NO: 444819 - DNA, 60 bp, Artificial
  Synthetic oligonucleotide
gttgagatgcggagtataacaatcacgcacgctttggagcggataacacagaagcccgat

SEQ ID NO: 444820 - DNA, 60 bp, Artificial
  Synthetic oligonucleotide
gttgagatgtactgactgggtgtgaaatgtaccagtctttatagggttctctgtcagtat

SEQ ID NO: 444821 - DNA, 58 bp, Artificial
  Synthetic oligonucleotide
gttgagatgtttcacgtactacagggggctgcctacaatttgaaagccaattatgaat

SEQ ID NO: 444822 - DNA, 56 bp, Artificial
  Synthetic oligonucleotide
gttgagattttggaacgattcggagtttctaggtgatacgttaatgatgaattttc

SEQ ID NO: 444823 - DNA, 55 bp, Artificial
  Synthetic oligonucleotide
gttgagcactataagctagctgattgtcgcgggtccgagtttaataacgtgagcc

SEQ ID NO: 444824 - DNA, 60 bp, Artificial
  Synthetic oligonucleotide
gttgagcatattgagtcaccatcatcaatatgggtgtttgctggggcccctgataggtgt

SEQ ID NO: 444825 - DNA, 59 bp, Artificial
  Synthetic oligonucleotide
gttgagcattgaagacccaagccatgaaggggagggcatacccctgtatgatgctatca

SEQ ID NO: 444826 - DNA, 57 bp, Artificial
  Synthetic oligonucleotide
gttgagccgcgaccgcctgtaagtggtacaaggtatgcaaaggttccaggtgtccca

SEQ ID NO: 444827 - DNA, 55 bp, Artificial
  Synthetic oligonucleotide
gttgagcgacgataaagttaagaacgtgtcgctacctaacaatgcggtgcaggga

SEQ ID NO: 444828 - DNA, 57 bp, Artificial
  Synthetic oligonucleotide
gttgagcgactttaagacctggttaaaagctaagcttatgccacacctgcctgggat

SEQ ID NO: 444829 - DNA, 55 bp, Artificial
  Synthetic oligonucleotide
gttgagcgcatgtctacaattctcgaattggacaacagcggtgtaacaggcaaag

SEQ ID NO: 444830 - DNA, 55 bp, Artificial
  Synthetic oligonucleotide
gttgagcggctggcgaaagtgtcgcgctgcaagctgctaccccgatgttacatcg

SEQ ID NO: 444831 - DNA, 55 bp, Artificial
  Synthetic oligonucleotide
gttgagcggttcccacttgccgctttgtttgaggtacacgtgcaagattttgttt

SEQ ID NO: 444832 - DNA, 59 bp, Artificial
  Synthetic oligonucleotide
gttgagcgtaaagtgtgccgactttatgcgcccatcgtgtggaattacatgttggtcaa

SEQ ID NO: 444833 - DNA, 55 bp, Artificial
  Synthetic oligonucleotide
gttgagctaactagtcaggaaaggcagtgtagtttaattgaggcaggtacaaggt

SEQ ID NO: 444834 - DNA, 60 bp, Artificial
  Synthetic oligonucleotide
gttgagctatcctctgtggtgcattgcattatgctagattcagcaatcaaactctcagta

SEQ ID NO: 444835 - DNA, 60 bp, Artificial
  Synthetic oligonucleotide
gttgagctcgctgcgagtccagaccgtttggagtgccgcactataatcggaaataagacc

SEQ ID NO: 444836 - DNA, 55 bp, Artificial
  Synthetic oligonucleotide
gttgaggaaccatactaacagcgtcatgttctggctggttagagatcgtagaccg

SEQ ID NO: 444837 - DNA, 60 bp, Artificial
  Synthetic oligonucleotide
gttgaggaagacgaatttcgcattatgtagagtccaggctttgagagctgagttttcagc

SEQ ID NO: 444838 - DNA, 55 bp, Artificial
  Synthetic oligonucleotide
gttgaggaggatctcatggggtaaagaaatctatggtgccacaattccacatcct

SEQ ID NO: 444839 - DNA, 55 bp, Artificial
  Synthetic oligonucleotide
gttgaggaggtggcgcttgtgtctgctagagttaaccaacttgagtctcagctta

SEQ ID NO: 444840 - DNA, 60 bp, Artificial
  Synthetic oligonucleotide
gttgaggcagcccgtctggtggctcaagtttatggagagcaactgtcatttgaccacatc

SEQ ID NO: 444841 - DNA, 58 bp, Artificial
  Synthetic oligonucleotide
gttgaggccgtgctcggtattgacggactcgacgccatggagcccaatactgcccccg

SEQ ID NO: 444842 - DNA, 59 bp, Artificial
  Synthetic oligonucleotide
gttgaggcgaataagaagattttcactacatatctcaactgtatgagtcttggggaaag

SEQ ID NO: 444843 - DNA, 60 bp, Artificial
  Synthetic oligonucleotide
gttgaggcggaggagagaacagttgaaacacaaccttgagcagctaaagaactctcgtgc

SEQ ID NO: 444844 - DNA, 50 bp, Artificial
  Synthetic oligonucleotide
gttgagggcttaacggtaaaatatggtggtaattggatgtctcttatgac

SEQ ID NO: 444845 - DNA, 58 bp, Artificial
  Synthetic oligonucleotide
gttgaggtataggtgtgatgtgatcctaatacagactccgggctacgtcttcggtaac

SEQ ID NO: 444846 - DNA, 59 bp, Artificial
  Synthetic oligonucleotide
gttgaggtctaaaggctctgtgagtgttaatactgtgcatgaagctcagggaaaaactt

SEQ ID NO: 444847 - DNA, 60 bp, Artificial
  Synthetic oligonucleotide
gttgaggtggacgtaaatggagcagccgcagtttaggtcaatgcgtcttcggcgaatcac

SEQ ID NO: 444848 - DNA, 58 bp, Artificial
  Synthetic oligonucleotide
gttgaggtgttaggcgtatcagatagggggtagcgcaaaagggctaggaagcttcagc

SEQ ID NO: 444849 - DNA, 60 bp, Artificial
  Synthetic oligonucleotide
gttgaggttgagaggtatgcagatcacgtcaaggacggtagactcagtcatgcttaacgg

SEQ ID NO: 444850 - DNA, 60 bp, Artificial
  Synthetic oligonucleotide
gttgagtaactctctcatacgccaccacaatctggtgtatgctaccacctcacgtagtgc

SEQ ID NO: 444851 - DNA, 60 bp, Artificial
  Synthetic oligonucleotide
gttgagtaatgttgatgaaagtacaattgataaggtgcttgagttcagatggttgaactt

SEQ ID NO: 444852 - DNA, 60 bp, Artificial
  Synthetic oligonucleotide
gttgagtagcactcagagggaggaatccacacggagtagaacagagaaatcacctccaga

SEQ ID NO: 444853 - DNA, 60 bp, Artificial
  Synthetic oligonucleotide
gttgagtagcactcagagggaggaattcactcggagatgagcagtgatcccacctccaga

SEQ ID NO: 444854 - DNA, 58 bp, Artificial
  Synthetic oligonucleotide
gttgagtagtagcttagatgtgcgaacctccccctggtttcataaccatacagtgtta

SEQ ID NO: 444855 - DNA, 59 bp, Artificial
  Synthetic oligonucleotide
gttgagtatagattcctggttatcatggaatccattagggaatgtgttccaaatgttaa

SEQ ID NO: 444856 - DNA, 60 bp, Artificial
  Synthetic oligonucleotide
gttgagtcacgaatgtctttggatccccagcctttatgatgtcaagagcctctcgtacac

SEQ ID NO: 444857 - DNA, 60 bp, Artificial
  Synthetic oligonucleotide
gttgagtcatattcactgcctagaatagtgggagtgcgaaaccacaaaattcagataggg

SEQ ID NO: 444858 - DNA, 60 bp, Artificial
  Synthetic oligonucleotide
gttgagtctgatgcaccactgacattgcgcaatctagtatctgcttacaaaaccagatat

SEQ ID NO: 444859 - DNA, 55 bp, Artificial
  Synthetic oligonucleotide
gttgagtgccattatgacataaccaactagacaccccacatttggagaagcggct

SEQ ID NO: 444860 - DNA, 58 bp, Artificial
  Synthetic oligonucleotide
gttgagtgtccatactcagtttgctatcaatttatctgaagttattcaaaagccagtc

SEQ ID NO: 444861 - DNA, 56 bp, Artificial
  Synthetic oligonucleotide
gttgagttaattccactcgctgaagttggtaagtcctacttaccacacgacctgat

SEQ ID NO: 444862 - DNA, 55 bp, Artificial
  Synthetic oligonucleotide
gttgagttcaacttgaccaagatgttcgataatctccctcaatcatgctccgtca

SEQ ID NO: 444863 - DNA, 53 bp, Artificial
  Synthetic oligonucleotide
gttgagttgcagtgatgctctcccctgtgcgtgaatccatagtttgcacacct

SEQ ID NO: 444864 - DNA, 60 bp, Artificial
  Synthetic oligonucleotide
gttgagttgttggagagtgctgctaccgcacttgggattttctgtgaaacaacattgttg

SEQ ID NO: 444865 - DNA, 57 bp, Artificial
  Synthetic oligonucleotide
gttgagtttattaagtactataaagggatcagcgagtatctacgactacttgcccca

SEQ ID NO: 444866 - DNA, 52 bp, Artificial
  Synthetic oligonucleotide
gttgagtttccgtctggggacctgccacgtaggatacctggaattcccgtta

SEQ ID NO: 444867 - DNA, 56 bp, Artificial
  Synthetic oligonucleotide
gttgataacgaagctcttttgcactatatgaagatatgggcagatacttttccttg

SEQ ID NO: 444868 - DNA, 60 bp, Artificial
  Synthetic oligonucleotide
gttgataactggaaatcatttgctggagtgagattcggctgttttatgcctcttagcctg

SEQ ID NO: 444869 - DNA, 55 bp, Artificial
  Synthetic oligonucleotide
gttgataagtacaggcatatgattaagtcgcaattgaaacctccccttgaggatg

SEQ ID NO: 444870 - DNA, 58 bp, Artificial
  Synthetic oligonucleotide
gttgataatgtagctaagtttgaaaggatcgtccgtttgtatggtggtcaaggtagca

SEQ ID NO: 444871 - DNA, 60 bp, Artificial
  Synthetic oligonucleotide
gttgataattatgagatattacattaagatccgttatgtactatgcaattactgtggatt

SEQ ID NO: 444872 - DNA, 60 bp, Artificial
  Synthetic oligonucleotide
gttgatacacacgtccgcttgaacgcgtgctcagaatttctatacgcgtcctgcccatgt

SEQ ID NO: 444873 - DNA, 60 bp, Artificial
  Synthetic oligonucleotide
gttgataccacccgcagtactaaccttaccattagtacattatctgcagcatctgcatcc

SEQ ID NO: 444874 - DNA, 57 bp, Artificial
  Synthetic oligonucleotide
gttgataccttgaaaccaattatgtacagaataaattcagattcgaatgacttttac

SEQ ID NO: 444875 - DNA, 57 bp, Artificial
  Synthetic oligonucleotide
gttgatagaagtattctatcacggatttaattaagcgtaaatagccttgccgtagtg

SEQ ID NO: 444876 - DNA, 60 bp, Artificial
  Synthetic oligonucleotide
gttgatagacaatgaattcactgaagttgagaagcaaattggcaacgtgataaactggac

SEQ ID NO: 444877 - DNA, 59 bp, Artificial
  Synthetic oligonucleotide
gttgataggactgcggtgactggtgcttcttattttacttccgtggatcaatcttcagt

SEQ ID NO: 444878 - DNA, 58 bp, Artificial
  Synthetic oligonucleotide
gttgatagtactgaatcggattcaagagcggacccctggaccattcgtcgacttacta

SEQ ID NO: 444879 - DNA, 50 bp, Artificial
  Synthetic oligonucleotide
gttgatagtggttctgtaacgtgcaacaatggcactcttgtctgggctac

SEQ ID NO: 444880 - DNA, 55 bp, Artificial
  Synthetic oligonucleotide
gttgatatacctgtggctgttggcgtcccatccccagccacttcggcagcacccc

SEQ ID NO: 444881 - DNA, 60 bp, Artificial
  Synthetic oligonucleotide
gttgatatactgtcaagcttgtacgatattattatcatgtcaaccaaaaccgcaatcagt

SEQ ID NO: 444882 - DNA, 60 bp, Artificial
  Synthetic oligonucleotide
gttgatatagtgccaattctacagggtctgttggaggtccttcaatgtcaagccacagtg

SEQ ID NO: 444883 - DNA, 55 bp, Artificial
  Synthetic oligonucleotide
gttgatatcaacatgctatgtaggtaatgcaaaccttattggagcatgcgaaatg

SEQ ID NO: 444884 - DNA, 55 bp, Artificial
  Synthetic oligonucleotide
gttgatatgaattctatcacttctactgatgttaggattttagtccagcctggca

SEQ ID NO: 444885 - DNA, 55 bp, Artificial
  Synthetic oligonucleotide
gttgatatgactgcatctcccgttcctaccccatgtttccatgtactttaacact

SEQ ID NO: 444886 - DNA, 60 bp, Artificial
  Synthetic oligonucleotide
gttgatattagtgccctcgcgagagctatcggttaacctcgcagctagcatcgaaggagt

SEQ ID NO: 444887 - DNA, 55 bp, Artificial
  Synthetic oligonucleotide
gttgatcaaactgcaacagctgacgatgataagtggatgttaatgtatgtgcttt

SEQ ID NO: 444888 - DNA, 60 bp, Artificial
  Synthetic oligonucleotide
gttgatcaaattgattcaatcttgcggagtgatgtaatcatgcgaggtttcataacttcg

SEQ ID NO: 444889 - DNA, 60 bp, Artificial
  Synthetic oligonucleotide
gttgatcaatcgcatggaactctactgccgctcagtcaaagccgtctcacttagggacat

SEQ ID NO: 444890 - DNA, 54 bp, Artificial
  Synthetic oligonucleotide
gttgatcacgtgctcagtgtaccaaatggccttgttcagagccgtgattggttg

SEQ ID NO: 444891 - DNA, 53 bp, Artificial
  Synthetic oligonucleotide
gttgatcactggtcagcgatgacacacaattgactggaaatatcattaaccga

SEQ ID NO: 444892 - DNA, 60 bp, Artificial
  Synthetic oligonucleotide
gttgatcattatgctggacaactcttatcccttgatattccaacacaagaactcacgctc

SEQ ID NO: 444893 - DNA, 55 bp, Artificial
  Synthetic oligonucleotide
gttgatccaagtctaactgatgctcttaactcactatcagttacaatggaacctg

SEQ ID NO: 444894 - DNA, 60 bp, Artificial
  Synthetic oligonucleotide
gttgatcccaacatgccatctgaaaagcaagtcattctgaagggtcaggggacaataact

SEQ ID NO: 444895 - DNA, 60 bp, Artificial
  Synthetic oligonucleotide
gttgatcccgtcatgtagctgttcgtgtctccgaacatcgcccatctcatgtttaagccg

SEQ ID NO: 444896 - DNA, 60 bp, Artificial
  Synthetic oligonucleotide
gttgatccggctggttcgtagtgttcctgtgcgctgtgctgtctcaaacccgctggcatg

SEQ ID NO: 444897 - DNA, 59 bp, Artificial
  Synthetic oligonucleotide
gttgatcctaaggagctgcccaagtcgaaggaaactgcagatttcgactttgagagtct

SEQ ID NO: 444898 - DNA, 55 bp, Artificial
  Synthetic oligonucleotide
gttgatcgagttataagcatcctcagaagtgtaggaatgctacagtgtacatacg

SEQ ID NO: 444899 - DNA, 60 bp, Artificial
  Synthetic oligonucleotide
gttgatcgatccaaatagaatgacagttagaaatcttgagaaccaattcgtttgagagca

SEQ ID NO: 444900 - DNA, 56 bp, Artificial
  Synthetic oligonucleotide
gttgatcgccctcgctccaggttacctgggcggggatctgacgacgggtatctccg

SEQ ID NO: 444901 - DNA, 60 bp, Artificial
  Synthetic oligonucleotide
gttgatcgctcgcttgaattgtgcccaattcaaagtgtgattcaaattcaaccggagcgt

SEQ ID NO: 444902 - DNA, 60 bp, Artificial
  Synthetic oligonucleotide
gttgatctgtgactcaagaaagacgtgtgaacgttattctcacgcgtacattggaatact

SEQ ID NO: 444903 - DNA, 60 bp, Artificial
  Synthetic oligonucleotide
gttgatgaatctggccacctgggtgggaagtaatttggaagatccagcatccagagaatt

SEQ ID NO: 444904 - DNA, 58 bp, Artificial
  Synthetic oligonucleotide
gttgatgacatgtgcaccttcgcccaaattaagttaacagacggcagttttgagtctt

SEQ ID NO: 444905 - DNA, 57 bp, Artificial
  Synthetic oligonucleotide
gttgatgaccaagaataccgtgttcttggatagttcagtttggccgttggtatgtag

SEQ ID NO: 444906 - DNA, 55 bp, Artificial
  Synthetic oligonucleotide
gttgatgacttcaataacactttctatgctttgcatcttaaaggtccttggagcg

SEQ ID NO: 444907 - DNA, 55 bp, Artificial
  Synthetic oligonucleotide
gttgatgagaagtttacccgacggatgggtgtattgtcatgcagatggctcacag

SEQ ID NO: 444908 - DNA, 55 bp, Artificial
  Synthetic oligonucleotide
gttgatgagcttgagcatcgaatgtggaaagagatcgaagatgaagtcaatcacg

SEQ ID NO: 444909 - DNA, 55 bp, Artificial
  Synthetic oligonucleotide
gttgatgatttcaacaaccaattctattcacatcatctagagggtccttggacgg

SEQ ID NO: 444910 - DNA, 60 bp, Artificial
  Synthetic oligonucleotide
gttgatgcatatgtttcagttgggtcatcaaagtataaccggagattcacacccgaaata

SEQ ID NO: 444911 - DNA, 60 bp, Artificial
  Synthetic oligonucleotide
gttgatgcatgtggttggtactcattccaggatcggacatgacgaatttgtgtccttgta

SEQ ID NO: 444912 - DNA, 57 bp, Artificial
  Synthetic oligonucleotide
gttgatgcgtaataattccatgccgttacccgtccgattttctacacgtgtatccca

SEQ ID NO: 444913 - DNA, 56 bp, Artificial
  Synthetic oligonucleotide
gttgatggacctatgaagaatcaattagcaaaccgaatccttactagggtggggaa

SEQ ID NO: 444914 - DNA, 51 bp, Artificial
  Synthetic oligonucleotide
gttgatggcacacgcaggaattgtgtacttctgtgctgacattcttggggc

SEQ ID NO: 444915 - DNA, 60 bp, Artificial
  Synthetic oligonucleotide
gttgatggcccacaggtatcaagtctcgatggatgaagctggagttgctcttgatcagat

SEQ ID NO: 444916 - DNA, 60 bp, Artificial
  Synthetic oligonucleotide
gttgatggccctattcgtgttggcatccagtataaacatgaattggtgtctaagtgtgat

SEQ ID NO: 444917 - DNA, 60 bp, Artificial
  Synthetic oligonucleotide
gttgatgggcaccacccaactcttacctagccaaatctgtgctttcaggggcgtgctcac

SEQ ID NO: 444918 - DNA, 55 bp, Artificial
  Synthetic oligonucleotide
gttgatgtcactcctgcacgaccacctattgtggtggagtcagttgggcctacag

SEQ ID NO: 444919 - DNA, 55 bp, Artificial
  Synthetic oligonucleotide
gttgatgttcgtggttggattaagcgcgctcaaagttgtatgcgtgaatccttcc

SEQ ID NO: 444920 - DNA, 60 bp, Artificial
  Synthetic oligonucleotide
gttgatgttgtatatggcatgtactcatgcctctaatcctgtgtatgctacgcttaagat

SEQ ID NO: 444921 - DNA, 59 bp, Artificial
  Synthetic oligonucleotide
gttgattaagtgtgggatgagatttaatacagaacaggtccaaggagtacggcacatgg

SEQ ID NO: 444922 - DNA, 55 bp, Artificial
  Synthetic oligonucleotide
gttgattacgttcctttaagaagcgccacttgtatcacacggtgtaatctaggtg

SEQ ID NO: 444923 - DNA, 55 bp, Artificial
  Synthetic oligonucleotide
gttgattagcgtaaaagcaactcaacgttttaccaacgttgttgactggcggcca

SEQ ID NO: 444924 - DNA, 58 bp, Artificial
  Synthetic oligonucleotide
gttgattcacgtggtgctattttgcgccggcagtataatttatctacgtccccgctta

SEQ ID NO: 444925 - DNA, 55 bp, Artificial
  Synthetic oligonucleotide
gttgattcccagggcattttcgaagggccccttttcggcaccgtgattgctctgg

SEQ ID NO: 444926 - DNA, 55 bp, Artificial
  Synthetic oligonucleotide
gttgattcttcaactttaatagtctcaagcatgttgccaccatcaatgaggcatg

SEQ ID NO: 444927 - DNA, 55 bp, Artificial
  Synthetic oligonucleotide
gttgattgagttattaatcaaacgtgcagagggcgagttgcaaatcttgttctct

SEQ ID NO: 444928 - DNA, 55 bp, Artificial
  Synthetic oligonucleotide
gttgattgccctatgaatgatcatattagagtgtcagttgcacattactcagctc

SEQ ID NO: 444929 - DNA, 60 bp, Artificial
  Synthetic oligonucleotide
gttgattgcctcggcatatgcgtcgttggcagactggcaacctcctctagctgatcttcc

SEQ ID NO: 444930 - DNA, 53 bp, Artificial
  Synthetic oligonucleotide
gttgattgggcaaaaggattgaatttgaatagtgacgggtttacttctccgtt

SEQ ID NO: 444931 - DNA, 58 bp, Artificial
  Synthetic oligonucleotide
gttgattggggacacggagagattaatgattcaactacagtggaaccagttttagatg

SEQ ID NO: 444932 - DNA, 54 bp, Artificial
  Synthetic oligonucleotide
gttgattgggggtccggcgaaataaacgactcaacgactgttgaaccagtatta

SEQ ID NO: 444933 - DNA, 60 bp, Artificial
  Synthetic oligonucleotide
gttgatttaactagattgctagcttacaattatgagacactaatggcatgcattacgatg

SEQ ID NO: 444934 - DNA, 58 bp, Artificial
  Synthetic oligonucleotide
gttgatttcacgatttgcctgttttacattgacggcgaggtacgagatgaggctttta

SEQ ID NO: 444935 - DNA, 55 bp, Artificial
  Synthetic oligonucleotide
gttgatttcggcggttggaatgaatctaaaacaatcgattatgtcggttattacc

SEQ ID NO: 444936 - DNA, 55 bp, Artificial
  Synthetic oligonucleotide
gttgatttgacaaaccaggaggaagttatacggttcccagcaaaggaacttcaga

SEQ ID NO: 444937 - DNA, 56 bp, Artificial
  Synthetic oligonucleotide
gttgcaaagaaacatgtcggggtcacatttcgtgcattgatgtagtgcgcaattct

SEQ ID NO: 444938 - DNA, 60 bp, Artificial
  Synthetic oligonucleotide
gttgcaaagccagagccaacaaatccttatgaccatatcttggttagacttggtagagca

SEQ ID NO: 444939 - DNA, 55 bp, Artificial
  Synthetic oligonucleotide
gttgcaaagccttgtaaaccaggcgctaaaggtgactgtccaccaatacagttgg

SEQ ID NO: 444940 - DNA, 55 bp, Artificial
  Synthetic oligonucleotide
gttgcaaatcgacgtctctacccctcggacgctctcgctacactcgggagtagcg

SEQ ID NO: 444941 - DNA, 59 bp, Artificial
  Synthetic oligonucleotide
gttgcaacctattcgagaaattcttccctagcagctcatacagaagaccagttggaatt

SEQ ID NO: 444942 - DNA, 60 bp, Artificial
  Synthetic oligonucleotide
gttgcaaccttggatagtgacagtagatgtgtgcgctatgtcaagaaacctgtttcatat

SEQ ID NO: 444943 - DNA, 55 bp, Artificial
  Synthetic oligonucleotide
gttgcaacgaatcttggtatttctaagtacacttggagaaattgggaaatcggta

SEQ ID NO: 444944 - DNA, 54 bp, Artificial
  Synthetic oligonucleotide
gttgcaacgtacatttccagactcaaggccaggaataaagttatacctgctttt

SEQ ID NO: 444945 - DNA, 55 bp, Artificial
  Synthetic oligonucleotide
gttgcaactaacgtcagttacatctctatgtatgttaatagggaacgctacagtc

SEQ ID NO: 444946 - DNA, 55 bp, Artificial
  Synthetic oligonucleotide
gttgcaactaatagcttggtgtgtaccgaactaggactcacaccaagtccttctt

SEQ ID NO: 444947 - DNA, 55 bp, Artificial
  Synthetic oligonucleotide
gttgcaacttcgacagcgcctacacgaaccgagatactgcctgcatagtgcgcgc

SEQ ID NO: 444948 - DNA, 60 bp, Artificial
  Synthetic oligonucleotide
gttgcaaggctattggaatcattgctcctgagcacactgtaggctctggcggcaagacga

SEQ ID NO: 444949 - DNA, 60 bp, Artificial
  Synthetic oligonucleotide
gttgcaaggtgcttgctcaattgcagtgaagaaccttttctctgcaatggtcccccttgt

SEQ ID NO: 444950 - DNA, 55 bp, Artificial
  Synthetic oligonucleotide
gttgcaaggttaaattcattggcagtttgcctgattaggtttgccatatgtgact

SEQ ID NO: 444951 - DNA, 51 bp, Artificial
  Synthetic oligonucleotide
gttgcaagtcttaaggaggtatagaatactggacgtagtggtgagcggcca

SEQ ID NO: 444952 - DNA, 60 bp, Artificial
  Synthetic oligonucleotide
gttgcaatcaaaggaggtggaactttagtggctgaagccattcgatttataggaagagca

SEQ ID NO: 444953 - DNA, 52 bp, Artificial
  Synthetic oligonucleotide
gttgcaatcgacaagtgcaacgattatcttcggggctacggaattcgtgaga

SEQ ID NO: 444954 - DNA, 59 bp, Artificial
  Synthetic oligonucleotide
gttgcaatgtcccgttcaacacactccattgaagtccattgttccccattcattcacac

SEQ ID NO: 444955 - DNA, 55 bp, Artificial
  Synthetic oligonucleotide
gttgcacacaggctctgggggacccaagaccccaagtgcaaaattggttgttccc

SEQ ID NO: 444956 - DNA, 55 bp, Artificial
  Synthetic oligonucleotide
gttgcacatactctacagactatggcggagtgctcgtgttgacatacgagtcgga

SEQ ID NO: 444957 - DNA, 60 bp, Artificial
  Synthetic oligonucleotide
gttgcacatagcagcttctggtcattatacctattttgtatattgtcccagagatataat

SEQ ID NO: 444958 - DNA, 55 bp, Artificial
  Synthetic oligonucleotide
gttgcaccacaatgcagccagttagtgttgacaaagcaatacttaggcttgcact

SEQ ID NO: 444959 - DNA, 55 bp, Artificial
  Synthetic oligonucleotide
gttgcaccagagtatgggttcaaaatatcgaaaagaggtagttcagggatcatga

SEQ ID NO: 444960 - DNA, 60 bp, Artificial
  Synthetic oligonucleotide
gttgcacccaaagaattaataggcaattggcaacaccaccttattgcgactgactgctcc

SEQ ID NO: 444961 - DNA, 60 bp, Artificial
  Synthetic oligonucleotide
gttgcacccaattggaattgtgaactcagcctgtttcgaatctccttcgtgcagtcttgt

SEQ ID NO: 444962 - DNA, 57 bp, Artificial
  Synthetic oligonucleotide
gttgcaccctatgggtattgtgaactcagcttgttttgagtccccctcgtgcaacct

SEQ ID NO: 444963 - DNA, 56 bp, Artificial
  Synthetic oligonucleotide
gttgcacgtaattgttcttgagtgtagttctgtcattcaccaaatctttgtttggt

SEQ ID NO: 444964 - DNA, 55 bp, Artificial
  Synthetic oligonucleotide
gttgcactatgaagagcaaccaattccgaacataacatggaatttcacaggtccc

SEQ ID NO: 444965 - DNA, 57 bp, Artificial
  Synthetic oligonucleotide
gttgcactatgtggaagcccagtctcagttgggtccggttctttccccgatggggca

SEQ ID NO: 444966 - DNA, 59 bp, Artificial
  Synthetic oligonucleotide
gttgcactattcactggtaacaaaggcactgactctaagccggacgtagacatactaac

SEQ ID NO: 444967 - DNA, 56 bp, Artificial
  Synthetic oligonucleotide
gttgcactccacacttacgtttgtgaacgcacgggaaccgatggactttcgttcac

SEQ ID NO: 444968 - DNA, 56 bp, Artificial
  Synthetic oligonucleotide
gttgcactcgcaccgtagtggcatcaaaaggtgaccgtgcccggtctgggcgttag

SEQ ID NO: 444969 - DNA, 58 bp, Artificial
  Synthetic oligonucleotide
gttgcacttaccttgcagccaagcagctacggaggttgacgtggggtcgagacctagt

SEQ ID NO: 444970 - DNA, 57 bp, Artificial
  Synthetic oligonucleotide
gttgcacttggtgatgggccaccagcattttacacgaccaactttcaccccatccgg

SEQ ID NO: 444971 - DNA, 60 bp, Artificial
  Synthetic oligonucleotide
gttgcagagactgggcaattattgtctatgggttgcaggatgaaattattgaaggctcaa

SEQ ID NO: 444972 - DNA, 52 bp, Artificial
  Synthetic oligonucleotide
gttgcagagattagaagggaatttgaaggccgttgggcagtcgactagccaa

SEQ ID NO: 444973 - DNA, 57 bp, Artificial
  Synthetic oligonucleotide
gttgcagcaaaacgcgatagtgctctgagactaacgccacgttctaggactgcacac

SEQ ID NO: 444974 - DNA, 58 bp, Artificial
  Synthetic oligonucleotide
gttgcaggacctgcggtccgaccgcaaccagtcgtgaagactacttggaccgtgagag

SEQ ID NO: 444975 - DNA, 57 bp, Artificial
  Synthetic oligonucleotide
gttgcagggacagtagggaaaaagttcaaacagtatagagagttgagacctcagacc

SEQ ID NO: 444976 - DNA, 55 bp, Artificial
  Synthetic oligonucleotide
gttgcaggggttcctgagctaggggctttctttgccatccttcaggacatgcgaa

SEQ ID NO: 444977 - DNA, 55 bp, Artificial
  Synthetic oligonucleotide
gttgcagtctggataatagttcgccatcgttcatcatgtttagttggggagacct

SEQ ID NO: 444978 - DNA, 54 bp, Artificial
  Synthetic oligonucleotide
gttgcataacttaaacttatttcgccggtgtttagtatgcttaagcgcgttcgt

SEQ ID NO: 444979 - DNA, 55 bp, Artificial
  Synthetic oligonucleotide
gttgcatagaaatatttactcggtatttctctacgtgtgcactctcagttgactt

SEQ ID NO: 444980 - DNA, 53 bp, Artificial
  Synthetic oligonucleotide
gttgcatataccctgcaaacagatctctatgctatcccacgcacaattaagat

SEQ ID NO: 444981 - DNA, 60 bp, Artificial
  Synthetic oligonucleotide
gttgcatattgaattgtcatctcgtcccattagtgctgaagtcgagtccgtatcaagagt

SEQ ID NO: 444982 - DNA, 55 bp, Artificial
  Synthetic oligonucleotide
gttgcatccaagtgatgcaccagaggctctttcgaacagaaggcgccaaggcagt

SEQ ID NO: 444983 - DNA, 55 bp, Artificial
  Synthetic oligonucleotide
gttgcatccagcaggggttacattatcaacacagttcacagactacgtgtcactt

SEQ ID NO: 444984 - DNA, 55 bp, Artificial
  Synthetic oligonucleotide
gttgcatgaaagtgatgaaccacgagcagatctgttttatttgaccaatcggtgc

SEQ ID NO: 444985 - DNA, 60 bp, Artificial
  Synthetic oligonucleotide
gttgcatgctttctgtaaagtatttacaggtcgttgaagacacatacgctcctgatactt

SEQ ID NO: 444986 - DNA, 57 bp, Artificial
  Synthetic oligonucleotide
gttgcatgtaaaaagagaccactgagtttgaggtaactcgataaacataccttagtg

SEQ ID NO: 444987 - DNA, 55 bp, Artificial
  Synthetic oligonucleotide
gttgcatgtactttgttaagtgttcgtatggtgagaactgatgcgtatagccgta

SEQ ID NO: 444988 - DNA, 50 bp, Artificial
  Synthetic oligonucleotide
gttgcatgtggcgtgtagtcatcatgatgtgttgacgactccttattcgt

SEQ ID NO: 444989 - DNA, 60 bp, Artificial
  Synthetic oligonucleotide
gttgcatgtttttgcacgccttcgtgcactggcctcacacccccatggatcacaacccca

SEQ ID NO: 444990 - DNA, 60 bp, Artificial
  Synthetic oligonucleotide
gttgcattgcaagtagtgttgtactagtaggactcatactctctttcatcatgtgggcct

SEQ ID NO: 444991 - DNA, 58 bp, Artificial
  Synthetic oligonucleotide
gttgcattggctgaaccccaaaaagataaatttggcggataggatgttgggtctgtca

SEQ ID NO: 444992 - DNA, 55 bp, Artificial
  Synthetic oligonucleotide
gttgccaaccgaaaccattcgtccaaattaaatgataatcctcggaaaccactgc

SEQ ID NO: 444993 - DNA, 55 bp, Artificial
  Synthetic oligonucleotide
gttgccacacaacaccaggccacgtctctagcgagagatttgaaaggcgttgcct

SEQ ID NO: 444994 - DNA, 55 bp, Artificial
  Synthetic oligonucleotide
gttgccacataatgctactgtcgctcttgacttctcccgtggtgtaacttccttc

SEQ ID NO: 444995 - DNA, 55 bp, Artificial
  Synthetic oligonucleotide
gttgccacatcaagagatcattgtgctatatctgaggaaaattggagaagttatg

SEQ ID NO: 444996 - DNA, 59 bp, Artificial
  Synthetic oligonucleotide
gttgccacctgggtacattgacatggtgcacggttacttctgttacgacagtcttctgg

SEQ ID NO: 444997 - DNA, 55 bp, Artificial
  Synthetic oligonucleotide
gttgccacgcattttggtcgatcataatttaaagacgatgcacgtcatagactcg

SEQ ID NO: 444998 - DNA, 60 bp, Artificial
  Synthetic oligonucleotide
gttgccagcttgacaccgagggccataccggtccgacttggcgcgaatgccactaataga

SEQ ID NO: 444999 - DNA, 55 bp, Artificial
  Synthetic oligonucleotide
gttgccatataaggctgcgacagcccatggctactgtggttctgtcgtggtcgca

SEQ ID NO: 445000 - DNA, 56 bp, Artificial
  Synthetic oligonucleotide
gttgccattacaggatcgttaagactctttccttctgaacgcgtattaactacgaa

SEQ ID NO: 445001 - DNA, 54 bp, Artificial
  Synthetic oligonucleotide
gttgccattagaataccctcagggtgttcctttggtcgttccccgtggctttgc

SEQ ID NO: 445002 - DNA, 60 bp, Artificial
  Synthetic oligonucleotide
gttgccattggacactgagggggcgtacagcacgaaagtgagtggggccagacttcgcca

SEQ ID NO: 445003 - DNA, 60 bp, Artificial
  Synthetic oligonucleotide
gttgccattggatatccacgaatgatggcgattgtggcaatccattggttagtgtctccg

SEQ ID NO: 445004 - DNA, 57 bp, Artificial
  Synthetic oligonucleotide
gttgccatttcacattataccgctcagctttctagtttagatattcctaatacagag

SEQ ID NO: 445005 - DNA, 58 bp, Artificial
  Synthetic oligonucleotide
gttgcccatatgggcacgcccggactacaacccaccactgttagagtcttggagagac

SEQ ID NO: 445006 - DNA, 58 bp, Artificial
  Synthetic oligonucleotide
gttgcccatatgggcacggccagattataaccctcctctgctagagtcctggaaaaac

SEQ ID NO: 445007 - DNA, 60 bp, Artificial
  Synthetic oligonucleotide
gttgccccaattgaacacattgcaagcatgaggaggaattactttacagctgaagtgtct

SEQ ID NO: 445008 - DNA, 57 bp, Artificial
  Synthetic oligonucleotide
gttgcccccactgtccgcgtcaccagaagcaaaaatatggggccaacaggccccatg

SEQ ID NO: 445009 - DNA, 52 bp, Artificial
  Synthetic oligonucleotide
gttgcccccccctaccgccagtcttggcgatacctataggtttttacagtcc

SEQ ID NO: 445010 - DNA, 51 bp, Artificial
  Synthetic oligonucleotide
gttgcccccggggtcctactcgaacaagttttacaacactgttaacacgac

SEQ ID NO: 445011 - DNA, 55 bp, Artificial
  Synthetic oligonucleotide
gttgcccgagcggcagccagttatgctgctgaaggacctgttggtattctctgtt

SEQ ID NO: 445012 - DNA, 58 bp, Artificial
  Synthetic oligonucleotide
gttgcccgcccagtctggcatgggtatctatagcaataagccactggatgacttctct

SEQ ID NO: 445013 - DNA, 55 bp, Artificial
  Synthetic oligonucleotide
gttgcccgcctgtcctctaactccaggatcatcaaccaccagcacgggaccctgc

SEQ ID NO: 445014 - DNA, 55 bp, Artificial
  Synthetic oligonucleotide
gttgcccgctggtttgtgggaaagccattcaattcattgataggagaacgcaggt

SEQ ID NO: 445015 - DNA, 59 bp, Artificial
  Synthetic oligonucleotide
gttgcccggcaacggtcaggtctctgccaagtgtttgctgacgcaacccccactggctg

SEQ ID NO: 445016 - DNA, 55 bp, Artificial
  Synthetic oligonucleotide
gttgcccgtttgtcctctaattccaggaaacagcaccggaccatgcaaggcctgc

SEQ ID NO: 445017 - DNA, 55 bp, Artificial
  Synthetic oligonucleotide
gttgccctgccggtccccacctgtggaattaccacctactctccaccgacagacg

SEQ ID NO: 445018 - DNA, 54 bp, Artificial
  Synthetic oligonucleotide
gttgccctgcgttgtacaagtttcgtaacgtagataagttggaaccgccccagc

SEQ ID NO: 445019 - DNA, 57 bp, Artificial
  Synthetic oligonucleotide
gttgccgacgcggcagcctgcccgtactccaacaccggaaccggtgtaatgtggctg

SEQ ID NO: 445020 - DNA, 55 bp, Artificial
  Synthetic oligonucleotide
gttgccgcaagtataattgggattgtgcacctgatattgtggattattgatcgcc

SEQ ID NO: 445021 - DNA, 60 bp, Artificial
  Synthetic oligonucleotide
gttgccgcgatgacagcacacaggtatctcagaagaccgagtttatacctagaagctgct

SEQ ID NO: 445022 - DNA, 50 bp, Artificial
  Synthetic oligonucleotide
gttgccgcgcgcatgttatacacgaatatggtatactcggaatttgatag

SEQ ID NO: 445023 - DNA, 60 bp, Artificial
  Synthetic oligonucleotide
gttgccgcgggattaggattgtacgcataccgaaaggtgtgcatcaacagattagaatta

SEQ ID NO: 445024 - DNA, 54 bp, Artificial
  Synthetic oligonucleotide
gttgccgcgtgcaggttttacacgctagacaccgtgtcctggacaaaggaatcc

SEQ ID NO: 445025 - DNA, 59 bp, Artificial
  Synthetic oligonucleotide
gttgccggttggtatgggttccagcattcaaatgaccagggggttggtatggctgcaga

SEQ ID NO: 445026 - DNA, 60 bp, Artificial
  Synthetic oligonucleotide
gttgccgtgaaaccagtcggcttgttgaggcgacatggtttgtagccagtcttcatcctc

SEQ ID NO: 445027 - DNA, 54 bp, Artificial
  Synthetic oligonucleotide
gttgcctacggtcaagcactcctgtctccccggtacaaagggtgttaagtctta

SEQ ID NO: 445028 - DNA, 56 bp, Artificial
  Synthetic oligonucleotide
gttgcctacttgtggcgtaggtggcctttaacgtgccgttacccatccttgcgcta

SEQ ID NO: 445029 - DNA, 55 bp, Artificial
  Synthetic oligonucleotide
gttgcctatggtgaatggccatcgtacttaagtgatttggatgctaccgctgtag

SEQ ID NO: 445030 - DNA, 55 bp, Artificial
  Synthetic oligonucleotide
gttgcctatggtgatgatgtggtcatctcatacccagatatgctagatgcagcac

SEQ ID NO: 445031 - DNA, 55 bp, Artificial
  Synthetic oligonucleotide
gttgcctcctggtttactggtgaggccattcgcgtcactcttgccgaaaagcgga

SEQ ID NO: 445032 - DNA, 54 bp, Artificial
  Synthetic oligonucleotide
gttgcctcgcgccgaacaagcgaggcagttgaaagcgttcagctggtacgacac

SEQ ID NO: 445033 - DNA, 50 bp, Artificial
  Synthetic oligonucleotide
gttgcctcgtggtataagattgtcagaacgacaggatacccaaccgtttc

SEQ ID NO: 445034 - DNA, 55 bp, Artificial
  Synthetic oligonucleotide
gttgcctctgagcacctgctgcaccagtctcttgttggcaagcaatccccgttcc

SEQ ID NO: 445035 - DNA, 51 bp, Artificial
  Synthetic oligonucleotide
gttgcctctggtcagggcaaggacaatcatcatcttcacatcagtctgcca

SEQ ID NO: 445036 - DNA, 60 bp, Artificial
  Synthetic oligonucleotide
gttgcctggcaggtgtagccagccaaagcagctgtgatcctggagagagtcaaatcatct

SEQ ID NO: 445037 - DNA, 55 bp, Artificial
  Synthetic oligonucleotide
gttgcctgtatgggtgtattgcattttccagttccgaatctgtgtccgtttggcc

SEQ ID NO: 445038 - DNA, 53 bp, Artificial
  Synthetic oligonucleotide
gttgcctgtgcaaaatttgcatgcgcacacgacatgcaactgcatgaaattgg

SEQ ID NO: 445039 - DNA, 53 bp, Artificial
  Synthetic oligonucleotide
gttgccttgcagtttgcttttcgtcttattggtgcaccagaattctccgactt

SEQ ID NO: 445040 - DNA, 56 bp, Artificial
  Synthetic oligonucleotide
gttgcgaaaacttcccccccagcgaaacagctgacgctattaggccaagcgttgcg

SEQ ID NO: 445041 - DNA, 56 bp, Artificial
  Synthetic oligonucleotide
gttgcgaaagtatgcttagccctgtccttaagcatcttatttcacgaggttttaaa

SEQ ID NO: 445042 - DNA, 58 bp, Artificial
  Synthetic oligonucleotide
gttgcgaaatgaacagctctaattacattgttaatggaaataacgcctaactggtcta

SEQ ID NO: 445043 - DNA, 54 bp, Artificial
  Synthetic oligonucleotide
gttgcgaactgaacagctcgaattacattgtttattcctattacgcctaaccta

SEQ ID NO: 445044 - DNA, 58 bp, Artificial
  Synthetic oligonucleotide
gttgcgaatctagaccgtacgtacgtcattcgcagtctcacacggtacggagaggacg

SEQ ID NO: 445045 - DNA, 60 bp, Artificial
  Synthetic oligonucleotide
gttgcgactacacactcatggatccctaagcggaaccgttccattctcaataccagtcaa

SEQ ID NO: 445046 - DNA, 56 bp, Artificial
  Synthetic oligonucleotide
gttgcgagagcgatttaaaactgttcgcggttcgaccgatgaacagttgaaaagag

SEQ ID NO: 445047 - DNA, 57 bp, Artificial
  Synthetic oligonucleotide
gttgcgatcagcactctaccccgagtgtagcttaggtcgatgagtctgggcataccc

SEQ ID NO: 445048 - DNA, 55 bp, Artificial
  Synthetic oligonucleotide
gttgcgatcccgggaagagaccctgaagaatgataatgtggctgcgcgtgcatca

SEQ ID NO: 445049 - DNA, 60 bp, Artificial
  Synthetic oligonucleotide
gttgcgatttcaagatgacaattctatttcttcgaaattcatttctgaggtgaatggaac

SEQ ID NO: 445050 - DNA, 55 bp, Artificial
  Synthetic oligonucleotide
gttgcgattttgtcgcaacagtgactatgtccggttctacttacttgggtggtgt

SEQ ID NO: 445051 - DNA, 53 bp, Artificial
  Synthetic oligonucleotide
gttgcgcacaggcacgcggtgcacccacatgtaccacaattgcggcacgtctt

SEQ ID NO: 445052 - DNA, 59 bp, Artificial
  Synthetic oligonucleotide
gttgcgcagccgtgtaataatccaaatagccggcttctaattgaacctccaatcgagac

SEQ ID NO: 445053 - DNA, 60 bp, Artificial
  Synthetic oligonucleotide
gttgcgcctcatgataacgatgatcagatagtgaagtgtatcaattacgctagatcctta

SEQ ID NO: 445054 - DNA, 60 bp, Artificial
  Synthetic oligonucleotide
gttgcgctcagcactcaaacccagagtgtagcttaggccgatgagtctggacgttcccca

SEQ ID NO: 445055 - DNA, 55 bp, Artificial
  Synthetic oligonucleotide
gttgcgctgtcgaagtccagatacgccagcgacgatttgcttacagacgcgtcac

SEQ ID NO: 445056 - DNA, 57 bp, Artificial
  Synthetic oligonucleotide
gttgcggcagatgcgaccgaatgcggggtctcagtcccctgcggtgtctgcagccgt

SEQ ID NO: 445057 - DNA, 57 bp, Artificial
  Synthetic oligonucleotide
gttgcggctgagacttgcactcgccttggaccgagtcacctttactggacgttccct

SEQ ID NO: 445058 - DNA, 55 bp, Artificial
  Synthetic oligonucleotide
gttgcggctgtttcatacgatgtgctttatagcgagcttaatgtccttcgggcga

SEQ ID NO: 445059 - DNA, 51 bp, Artificial
  Synthetic oligonucleotide
gttgcgggaatcaaggaagcattacaacgagctcatcgcccaaaagtgcgc

SEQ ID NO: 445060 - DNA, 60 bp, Artificial
  Synthetic oligonucleotide
gttgcgggtcggagtattttgatctgtcacacacataaagtgttacatcatgacttgtgt

SEQ ID NO: 445061 - DNA, 58 bp, Artificial
  Synthetic oligonucleotide
gttgcggtagttcaagtaggaggtccaaatgtactagatataacggcagatccaacta

SEQ ID NO: 445062 - DNA, 55 bp, Artificial
  Synthetic oligonucleotide
gttgcggtcacggtcaatgcgacagaagtgttggctcagtacctctcgagaacaa

SEQ ID NO: 445063 - DNA, 60 bp, Artificial
  Synthetic oligonucleotide
gttgcggtgtgccaaacactcaagactcgtcccacagctttggtcgagggcgttgcagta

SEQ ID NO: 445064 - DNA, 55 bp, Artificial
  Synthetic oligonucleotide
gttgcggtgttgtctaccgtagaggatttctctcgtgccttgttacgggtttgaa

SEQ ID NO: 445065 - DNA, 55 bp, Artificial
  Synthetic oligonucleotide
gttgcggtgtttatgcgcaggaaggtgaatacaatttcgtgcaaaccgtaaacgt

SEQ ID NO: 445066 - DNA, 55 bp, Artificial
  Synthetic oligonucleotide
gttgcgtaaatgcggaagtactaatttaactcgtcaattgtcctttgttgcgtcc

SEQ ID NO: 445067 - DNA, 58 bp, Artificial
  Synthetic oligonucleotide
gttgcgtcaactgaagtccgtgtaccgggttcagtggcagcatttgtcgaacaattcg

SEQ ID NO: 445068 - DNA, 60 bp, Artificial
  Synthetic oligonucleotide
gttgcgtcactttggcagggtgtcaactcagcagcgggcaactgtacgcggcattcaact

SEQ ID NO: 445069 - DNA, 55 bp, Artificial
  Synthetic oligonucleotide
gttgcgtccgtttttcgtagcggtaagcacgccccaagccgactcactccgaata

SEQ ID NO: 445070 - DNA, 55 bp, Artificial
  Synthetic oligonucleotide
gttgcgtgttgtccattgatgaaatgtcacgactgccactatgcacacaacggct

SEQ ID NO: 445071 - DNA, 55 bp, Artificial
  Synthetic oligonucleotide
gttgcgttcccgtacctgtccatgacttctctcgatattccgtgtacaaactcgg

SEQ ID NO: 445072 - DNA, 55 bp, Artificial
  Synthetic oligonucleotide
gttgcgttgatgtaccacaatcgcattaggttgatgcccatgtctgcaactgcac

SEQ ID NO: 445073 - DNA, 55 bp, Artificial
  Synthetic oligonucleotide
gttgcgttgttgatgcccttagacatgtttatgaaacagagttctttatgtccag

SEQ ID NO: 445074 - DNA, 56 bp, Artificial
  Synthetic oligonucleotide
gttgcgttttaagaggtgcgatcctgacgtcactcgtgttaagattccccggtaca

SEQ ID NO: 445075 - DNA, 53 bp, Artificial
  Synthetic oligonucleotide
gttgctaaataacatgggattttccaccccagaagagaagttccaaaaggacc

SEQ ID NO: 445076 - DNA, 56 bp, Artificial
  Synthetic oligonucleotide
gttgctaactgatgttgggggggaggctagcgcggcctaccggccgcttacatacc

SEQ ID NO: 445077 - DNA, 58 bp, Artificial
  Synthetic oligonucleotide
gttgctaacttagtaaatagggattatgagggcgaaataaaagcatatggagatacag

SEQ ID NO: 445078 - DNA, 59 bp, Artificial
  Synthetic oligonucleotide
gttgctaaggtgtctcacctttgcacttataagcgcgcattcttagacaaggtagacgg

SEQ ID NO: 445079 - DNA, 60 bp, Artificial
  Synthetic oligonucleotide
gttgctaatacaagtccatacaaagcttggtgtattagaagatcagctgagcaaagttaa

SEQ ID NO: 445080 - DNA, 56 bp, Artificial
  Synthetic oligonucleotide
gttgctaatgaaatcagttttaatagttattggtcacttaaaagaaatcgagacta

SEQ ID NO: 445081 - DNA, 55 bp, Artificial
  Synthetic oligonucleotide
gttgctaatgtcctttcaagagtagtttctattagacatttggaaaacctggtgt

SEQ ID NO: 445082 - DNA, 56 bp, Artificial
  Synthetic oligonucleotide
gttgctacaaactatgccacccactcagacgacagctactaccccggaccctttgg

SEQ ID NO: 445083 - DNA, 55 bp, Artificial
  Synthetic oligonucleotide
gttgctacatatcgttcaacgttgactgtaccgtcgattacgtagtcgcacctat

SEQ ID NO: 445084 - DNA, 56 bp, Artificial
  Synthetic oligonucleotide
gttgctaccctacgttggtcagtagaggtcaacttgctcaggaagttttcctgttg

SEQ ID NO: 445085 - DNA, 55 bp, Artificial
  Synthetic oligonucleotide
gttgctacgggttggacgcttggttgataatgcgctacggcgactagttagtgcg

SEQ ID NO: 445086 - DNA, 55 bp, Artificial
  Synthetic oligonucleotide
gttgctactacgcactcctggatccccaagaggaaccgatccatcctcaacacga

SEQ ID NO: 445087 - DNA, 60 bp, Artificial
  Synthetic oligonucleotide
gttgctactgcagccgcctgcaagtattccagcattggcactggcgtggcctggttggtg

SEQ ID NO: 445088 - DNA, 60 bp, Artificial
  Synthetic oligonucleotide
gttgctagcgtctatgtccacttgaaggccaagatcgatactaagacagcggctggtaag

SEQ ID NO: 445089 - DNA, 52 bp, Artificial
  Synthetic oligonucleotide
gttgctagctcaaggcagaaacgggagctcccaaactctatgtaaccgggtg

SEQ ID NO: 445090 - DNA, 58 bp, Artificial
  Synthetic oligonucleotide
gttgctagtatttcggcaaattcacttaaacaacttagagtttgtctcgaagcattca

SEQ ID NO: 445091 - DNA, 60 bp, Artificial
  Synthetic oligonucleotide
gttgctataccttctagcactcaagaagagcgactcaaattccgcggtagccaaattgag

SEQ ID NO: 445092 - DNA, 60 bp, Artificial
  Synthetic oligonucleotide
gttgctatagcggtcgtgtttcagcggcctttcatgctaactcttccgaaccagcattgc

SEQ ID NO: 445093 - DNA, 50 bp, Artificial
  Synthetic oligonucleotide
gttgctatatctcctagcactcaagaagagcgactcgaattcagcggtgg

SEQ ID NO: 445094 - DNA, 60 bp, Artificial
  Synthetic oligonucleotide
gttgctatccctgataggcctcttatgaagtagttgcgtcatacgtggttagcccgtgtg

SEQ ID NO: 445095 - DNA, 59 bp, Artificial
  Synthetic oligonucleotide
gttgctatgccccgtgttgctaagtaaagagcgccgctgcgcggcgctttttggaacta

SEQ ID NO: 445096 - DNA, 59 bp, Artificial
  Synthetic oligonucleotide
gttgctattactggatcattgaggcttttcccttcagaacgcgtattgactacaaattc

SEQ ID NO: 445097 - DNA, 57 bp, Artificial
  Synthetic oligonucleotide
gttgctattactggatcgctaagactctttccttctgaacgtgtgttaaccacgaac

SEQ ID NO: 445098 - DNA, 59 bp, Artificial
  Synthetic oligonucleotide
gttgctcaaactggtatcacatgtcgatgtcccaaattgataaacgggacaatgatcca

SEQ ID NO: 445099 - DNA, 60 bp, Artificial
  Synthetic oligonucleotide
gttgctcacgtccagtgtgttcggctcctgcaggcagcaaaagaggacatttctagtgct

SEQ ID NO: 445100 - DNA, 55 bp, Artificial
  Synthetic oligonucleotide
gttgctcagagattgtcacatgctcacccaccactgacctgtgcctcgtcaaggg

SEQ ID NO: 445101 - DNA, 59 bp, Artificial
  Synthetic oligonucleotide
gttgctcagcatccctacgaggaacgcgggtccggtatgtgtgtccatccacacctcgt

SEQ ID NO: 445102 - DNA, 55 bp, Artificial
  Synthetic oligonucleotide
gttgctcgcggcttatgacctaccttcgcggtattagccacaaagtcactgtcgg

SEQ ID NO: 445103 - DNA, 55 bp, Artificial
  Synthetic oligonucleotide
gttgctcgggtgaagctccattctgcggttactgttgacccttggtgggtcaaga

SEQ ID NO: 445104 - DNA, 60 bp, Artificial
  Synthetic oligonucleotide
gttgctctcatccacagtatgggccaaatcatcacaatgtttgaggctttgcctcacatc

SEQ ID NO: 445105 - DNA, 55 bp, Artificial
  Synthetic oligonucleotide
gttgctctgaatataattagaaagtcgggtggtgaggtttggcccgtatcgatga

SEQ ID NO: 445106 - DNA, 55 bp, Artificial
  Synthetic oligonucleotide
gttgctctgtccactaccggagagatccctttctacggcaaggctattcccctcg

SEQ ID NO: 445107 - DNA, 55 bp, Artificial
  Synthetic oligonucleotide
gttgctgacaacgagcggtctatctcgcaactgtcaggagacatgggcgcgatca

SEQ ID NO: 445108 - DNA, 56 bp, Artificial
  Synthetic oligonucleotide
gttgctgagtgggtgaaggccggaaaacccaaccccatgacaaaagagttcatgga

SEQ ID NO: 445109 - DNA, 55 bp, Artificial
  Synthetic oligonucleotide
gttgctgcacgttttgatgttgctaggatccggtctttagatgaatttgtagagc

SEQ ID NO: 445110 - DNA, 60 bp, Artificial
  Synthetic oligonucleotide
gttgctgctgctcactacacagctcaactgtcaacattggacattgatccacaaccaatt

SEQ ID NO: 445111 - DNA, 55 bp, Artificial
  Synthetic oligonucleotide
gttgctggagcttacattgaaaaggttgggaatatgcaaattctcgactcactgc

SEQ ID NO: 445112 - DNA, 55 bp, Artificial
  Synthetic oligonucleotide
gttgctggagttgcctacaatgacggtctcacactctttaacggtgcattccgtg

SEQ ID NO: 445113 - DNA, 60 bp, Artificial
  Synthetic oligonucleotide
gttgctggagtttgggctccagtgatggaaactgcaaatctcgaggcgatgttgtcttgg

SEQ ID NO: 445114 - DNA, 55 bp, Artificial
  Synthetic oligonucleotide
gttgctgggtgcttgagctcaatgacacgtggcttagtagaagaagcatctccag

SEQ ID NO: 445115 - DNA, 55 bp, Artificial
  Synthetic oligonucleotide
gttgctggtagccagctgcagcccctctaccaagcactcggcataccttctgatc

SEQ ID NO: 445116 - DNA, 60 bp, Artificial
  Synthetic oligonucleotide
gttgctggtggtaaggacgtgcgccataggatctggaactacaaccaggataccatgttc

SEQ ID NO: 445117 - DNA, 57 bp, Artificial
  Synthetic oligonucleotide
gttgctgttcgtgttgggactcgcaaaaacgacccgcaaaatcgtggcatttataga

SEQ ID NO: 445118 - DNA, 60 bp, Artificial
  Synthetic oligonucleotide
gttgcttaccgagaatttttctgaactatggcagccaaaaatttgcgcatgataatgctt

SEQ ID NO: 445119 - DNA, 50 bp, Artificial
  Synthetic oligonucleotide
gttgcttactacccggggaaccaaattttgtcgaggaactagtgccaacg

SEQ ID NO: 445120 - DNA, 60 bp, Artificial
  Synthetic oligonucleotide
gttgcttatgggctaagcatcatagatctatttcagaagtcatcaacagttgtttcggcc

SEQ ID NO: 445121 - DNA, 60 bp, Artificial
  Synthetic oligonucleotide
gttgcttcatgtgtgccccaatatactgcaatatgatagtccagcagcagcctaaaccac

SEQ ID NO: 445122 - DNA, 58 bp, Artificial
  Synthetic oligonucleotide
gttgcttcgtaatcattgcacgccgttacccgtccgatttgcaacacgtgtatcccac

SEQ ID NO: 445123 - DNA, 57 bp, Artificial
  Synthetic oligonucleotide
gttgcttctcaacaaggtagcgaccaacaatagttatacggtgacggtagacgaaga

SEQ ID NO: 445124 - DNA, 55 bp, Artificial
  Synthetic oligonucleotide
gttgcttgctaaaagttttcgatacgcaatatatgagacgcccgttgactataca

SEQ ID NO: 445125 - DNA, 58 bp, Artificial
  Synthetic oligonucleotide
gttgcttgtctctgcgactacagtgaggacttagtcgcgaggtttttcctcaaccaac

SEQ ID NO: 445126 - DNA, 55 bp, Artificial
  Synthetic oligonucleotide
gttgctttcacggatctaagaccatacagtagcttagcacacacacagggaccaa

SEQ ID NO: 445127 - DNA, 54 bp, Artificial
  Synthetic oligonucleotide
gttgctttcccgcctaaccagtacctttaaagtttcctggcgattctccattca

SEQ ID NO: 445128 - DNA, 55 bp, Artificial
  Synthetic oligonucleotide
gttggaaacagagcccatagcagatgcagaaaccttctatgtagatggggcatct

SEQ ID NO: 445129 - DNA, 55 bp, Artificial
  Synthetic oligonucleotide
gttggaaagcaaatgctcgctgggaatagaggaaaacaaaagacacgtagatcgg

SEQ ID NO: 445130 - DNA, 50 bp, Artificial
  Synthetic oligonucleotide
gttggaaagcgtgcctttcccaccctcgccaaattacctcatatgccatt

SEQ ID NO: 445131 - DNA, 50 bp, Artificial
  Synthetic oligonucleotide
gttggaaatcccagaatactatgatatatgctcaacagtgggagcaattc

SEQ ID NO: 445132 - DNA, 55 bp, Artificial
  Synthetic oligonucleotide
gttggaaatgtggaaaagaaggacaccagatgaaagactgcattgagaggcaggc

SEQ ID NO: 445133 - DNA, 55 bp, Artificial
  Synthetic oligonucleotide
gttggaaatgtggaagggaaggacatcaaatgaaagattgtactgacaaacaggc

SEQ ID NO: 445134 - DNA, 55 bp, Artificial
  Synthetic oligonucleotide
gttggaacaacgtatctaaggctacattggcccctgggggagcgacctagggtga

SEQ ID NO: 445135 - DNA, 55 bp, Artificial
  Synthetic oligonucleotide
gttggaacaatggtaatggaacttattcgaatgataaagcgggggatcaatgata

SEQ ID NO: 445136 - DNA, 55 bp, Artificial
  Synthetic oligonucleotide
gttggaacagtatcgcataatgccacgtctgtaatttacaatgtcggacgcgtct

SEQ ID NO: 445137 - DNA, 53 bp, Artificial
  Synthetic oligonucleotide
gttggaaccccgtgtgccatttggcctttcgacgggtggtagactcggtggtg

SEQ ID NO: 445138 - DNA, 58 bp, Artificial
  Synthetic oligonucleotide
gttggaactaagttaagcataagcgtaagattagtcaaccatgtagaaactgtctcga

SEQ ID NO: 445139 - DNA, 50 bp, Artificial
  Synthetic oligonucleotide
gttggaactgcttttgcggaaatgaacactggaggcgatgtgatccatct

SEQ ID NO: 445140 - DNA, 55 bp, Artificial
  Synthetic oligonucleotide
gttggaagaaggtgtttgacaagatgcaaccgcgagttgatactcatgattgcac

SEQ ID NO: 445141 - DNA, 60 bp, Artificial
  Synthetic oligonucleotide
gttggaagccaatgtgatggaaattctggggatagctatcaataggtacaatggactgac

SEQ ID NO: 445142 - DNA, 59 bp, Artificial
  Synthetic oligonucleotide
gttggaagtctgaccgattcacaagaagggattgagaatgtttggtcactcacattgac

SEQ ID NO: 445143 - DNA, 60 bp, Artificial
  Synthetic oligonucleotide
gttggaatacaggatcagctgttggagtgaatccagatctggcctggacacagatctttt

SEQ ID NO: 445144 - DNA, 60 bp, Artificial
  Synthetic oligonucleotide
gttggaatagtcagcatcctattaagttcactcctcaaaaatgatgtgccgctagctggg

SEQ ID NO: 445145 - DNA, 60 bp, Artificial
  Synthetic oligonucleotide
gttggaatggtactcctcagctgctgtcccagctgtagaagctctctatcggaggattac

SEQ ID NO: 445146 - DNA, 55 bp, Artificial
  Synthetic oligonucleotide
gttggaatgtgaagtaggcacagccgaacttgaagtcacctgccgtagtggtgtc

SEQ ID NO: 445147 - DNA, 52 bp, Artificial
  Synthetic oligonucleotide
gttggaattgggccaatggacaaatctatggaattggtttgatataacaaac

SEQ ID NO: 445148 - DNA, 59 bp, Artificial
  Synthetic oligonucleotide
gttggaatttccagtatggtggaggccatggtgtctagggcccggattgatgcaagaat

SEQ ID NO: 445149 - DNA, 59 bp, Artificial
  Synthetic oligonucleotide
gttggacaaagtacttgacttcgatatatatggagtcacgtactcaatcactccacttg

SEQ ID NO: 445150 - DNA, 57 bp, Artificial
  Synthetic oligonucleotide
gttggacaaggtgccctatttagggtgaggagccttactggcagccccagtgaatcc

SEQ ID NO: 445151 - DNA, 55 bp, Artificial
  Synthetic oligonucleotide
gttggacaatggcctgtgatgagtggtggctcagtatcattgcgttcagctggag

SEQ ID NO: 445152 - DNA, 60 bp, Artificial
  Synthetic oligonucleotide
gttggaccacaacacccaagtgtgtagtgcgaatgtgatgtacacggcactctctagagc

SEQ ID NO: 445153 - DNA, 59 bp, Artificial
  Synthetic oligonucleotide
gttggaccacatatgtagagggaacgtcttcgttcagtaggacttctgtcctgcttaga

SEQ ID NO: 445154 - DNA, 53 bp, Artificial
  Synthetic oligonucleotide
gttggaccagagacgcgccaccgcaggcattgtgttaaacaaacgacgcaacg

SEQ ID NO: 445155 - DNA, 55 bp, Artificial
  Synthetic oligonucleotide
gttggaccagctccatggacagatgaaccacttaaaattgtaccttatgaagtaa

SEQ ID NO: 445156 - DNA, 58 bp, Artificial
  Synthetic oligonucleotide
gttggaccagtttttccaccaggtatgaattggactgatttgatcactaactattcac

SEQ ID NO: 445157 - DNA, 56 bp, Artificial
  Synthetic oligonucleotide
gttggacccggcattcggagccaactcaaacaatccagattgggacttcaacccca

SEQ ID NO: 445158 - DNA, 60 bp, Artificial
  Synthetic oligonucleotide
gttggacctagagtgctgtcatcatagtccctgacggctctaattatctccgcctttagc

SEQ ID NO: 445159 - DNA, 57 bp, Artificial
  Synthetic oligonucleotide
gttggacctcgtcgtactcctgccaaagtacgtcgttctcaagtccctgagtggatc

SEQ ID NO: 445160 - DNA, 55 bp, Artificial
  Synthetic oligonucleotide
gttggacctgctaatgcaaaagtaccccatagtgctagctcagatacactaagcc

SEQ ID NO: 445161 - DNA, 54 bp, Artificial
  Synthetic oligonucleotide
gttggacgaaagaccccaggcatactgaagaccacgttcgttcgctgtgcctat

SEQ ID NO: 445162 - DNA, 55 bp, Artificial
  Synthetic oligonucleotide
gttggacgctgtttgactctacctgcgttctcgacactacgcagaaagtggttgg

SEQ ID NO: 445163 - DNA, 58 bp, Artificial
  Synthetic oligonucleotide
gttggacggaccgtatcagccagcgtcgttcgatctaccagtaggaaattggatgttg

SEQ ID NO: 445164 - DNA, 55 bp, Artificial
  Synthetic oligonucleotide
gttggactagctaccctaccattttaacatgtttggccttttgtacatgaccttc

SEQ ID NO: 445165 - DNA, 55 bp, Artificial
  Synthetic oligonucleotide
gttggactgcgtcctctgtgctgcaacgattgacgctgattctcctgggtctaga

SEQ ID NO: 445166 - DNA, 60 bp, Artificial
  Synthetic oligonucleotide
gttggactgctggtcagggggaaaggcaggggagagcgcgcatgctgatgtcatttgatt

SEQ ID NO: 445167 - DNA, 55 bp, Artificial
  Synthetic oligonucleotide
gttggactgggaagtttttcgtagtgctttagtcgtccgccaacgctcacgagtc

SEQ ID NO: 445168 - DNA, 55 bp, Artificial
  Synthetic oligonucleotide
gttggactgtcagcatgctccggtctacgacaggcgagatgggatcgcgggatta

SEQ ID NO: 445169 - DNA, 51 bp, Artificial
  Synthetic oligonucleotide
gttggacttatcaaagccccttacacatttactccccaatgtcttgcataa

SEQ ID NO: 445170 - DNA, 53 bp, Artificial
  Synthetic oligonucleotide
gttggagactattctcaatgggacaattccaaatgtctcatactttcaggcca

SEQ ID NO: 445171 - DNA, 59 bp, Artificial
  Synthetic oligonucleotide
gttggagagagaactggtccgcaaaacgagattcctcccagtggctggtggaacaagca

SEQ ID NO: 445172 - DNA, 60 bp, Artificial
  Synthetic oligonucleotide
gttggagatgattcaggaggtttttcaacaacagtttctactgagcagaatgttcctgat

SEQ ID NO: 445173 - DNA, 60 bp, Artificial
  Synthetic oligonucleotide
gttggagatgtgccacagtacacagattggtggaataaggatggtagacatccttagaca

SEQ ID NO: 445174 - DNA, 59 bp, Artificial
  Synthetic oligonucleotide
gttggagatgtgccatagcacacaaattggcggtataaggatggtggacatccttaggc

SEQ ID NO: 445175 - DNA, 59 bp, Artificial
  Synthetic oligonucleotide
gttggagccaacgcttccgacagaatggggatgggaacgacgtacctagctctgatggc

SEQ ID NO: 445176 - DNA, 60 bp, Artificial
  Synthetic oligonucleotide
gttggagccagaaagagtagtctcaatccttgaatgggatagagcggcagagcctgaaca

SEQ ID NO: 445177 - DNA, 60 bp, Artificial
  Synthetic oligonucleotide
gttggagctcttacaccatatgttggacattcctcaaaattagccggtgccgctctctca

SEQ ID NO: 445178 - DNA, 55 bp, Artificial
  Synthetic oligonucleotide
gttggagctgatgtacgatctgatgaacgcatgatctgctatacaaaaggagcta

SEQ ID NO: 445179 - DNA, 60 bp, Artificial
  Synthetic oligonucleotide
gttggaggagccagtgaaacatgacgatcacttgttacaagattccgaactagctggact

SEQ ID NO: 445180 - DNA, 55 bp, Artificial
  Synthetic oligonucleotide
gttggaggagccccaccgttggtgacatggggattcgatcgtcctgtgccagctc

SEQ ID NO: 445181 - DNA, 55 bp, Artificial
  Synthetic oligonucleotide
gttggaggcattagaatagctggatatcagtagatacacaatctgagatttgacg

SEQ ID NO: 445182 - DNA, 56 bp, Artificial
  Synthetic oligonucleotide
gttggagggagtggaacaaacaactatggagtgaagggatttggcttcagacaagg

SEQ ID NO: 445183 - DNA, 60 bp, Artificial
  Synthetic oligonucleotide
gttggagggggagattagatctctcaccatcgacaccaatgtggggccccagtgtgaagc

SEQ ID NO: 445184 - DNA, 60 bp, Artificial
  Synthetic oligonucleotide
gttggaggtcaaatgggcatgcttctgacaggatccaacgccaaaagcatggatctaggc

SEQ ID NO: 445185 - DNA, 52 bp, Artificial
  Synthetic oligonucleotide
gttggaggtctggaagtccccgacgtacgaccctcccctcgtgtccggttgc

SEQ ID NO: 445186 - DNA, 60 bp, Artificial
  Synthetic oligonucleotide
gttggagtaacaaatctcaagatgcgatttggaataatatgacctggatgcagtgggata

SEQ ID NO: 445187 - DNA, 55 bp, Artificial
  Synthetic oligonucleotide
gttggagttagagttacaccgtatgatcatgtgtcgcggcggatttgttatctgg

SEQ ID NO: 445188 - DNA, 50 bp, Artificial
  Synthetic oligonucleotide
gttggagttatgaacagtttatgaccaattgcatggttagattccgttcc

SEQ ID NO: 445189 - DNA, 55 bp, Artificial
  Synthetic oligonucleotide
gttggagttgttgggaagcgtcctgtgttagcgaggcatccctggtcagcagatc

SEQ ID NO: 445190 - DNA, 55 bp, Artificial
  Synthetic oligonucleotide
gttggatacttggaaacccccgatgtgacaaattactcggtgatcgaagttggtc

SEQ ID NO: 445191 - DNA, 55 bp, Artificial
  Synthetic oligonucleotide
gttggatagtggcatcaattttggcgtgcacaacaatagtttgaataacttgcgc

SEQ ID NO: 445192 - DNA, 58 bp, Artificial
  Synthetic oligonucleotide
gttggatataaagggtcaccatttttatttcagatgggcatattgcttgctgtgcctg

SEQ ID NO: 445193 - DNA, 58 bp, Artificial
  Synthetic oligonucleotide
gttggatatttagtgatcattagccttatctgtcagcaattaacgaagagtttatcgc

SEQ ID NO: 445194 - DNA, 55 bp, Artificial
  Synthetic oligonucleotide
gttggatcaatgggcatctttgtggaactggtttgacataaccaactggctgtgg

SEQ ID NO: 445195 - DNA, 53 bp, Artificial
  Synthetic oligonucleotide
gttggatcaccttttccgactatataacggggttaggagttcaagttactatc

SEQ ID NO: 445196 - DNA, 55 bp, Artificial
  Synthetic oligonucleotide
gttggatctgtggagatcttaagctcggtgtagataggggaataggggcagattt

SEQ ID NO: 445197 - DNA, 54 bp, Artificial
  Synthetic oligonucleotide
gttggatcttagacatgtctcacaaggtaacactctgggcaactgtattcttga

SEQ ID NO: 445198 - DNA, 60 bp, Artificial
  Synthetic oligonucleotide
gttggatgaagatcctacggtagccatgagctctagcctgggtgcgatttgctctcccca

SEQ ID NO: 445199 - DNA, 55 bp, Artificial
  Synthetic oligonucleotide
gttggatgagacagtgtaaatgagggaacccgtctgaatgttgctctcttgcgac

SEQ ID NO: 445200 - DNA, 60 bp, Artificial
  Synthetic oligonucleotide
gttggatgttagtggcccttacgagatggagtcttttgatacatctgatgtcaatctctt

SEQ ID NO: 445201 - DNA, 55 bp, Artificial
  Synthetic oligonucleotide
gttggattcctctcaataagcctaatgcaatgggtcatgtcccgaatgtgtgacc

SEQ ID NO: 445202 - DNA, 55 bp, Artificial
  Synthetic oligonucleotide
gttggattgccagtccctttgggcccccatgaactccttaaagtgcttgaggaag

SEQ ID NO: 445203 - DNA, 55 bp, Artificial
  Synthetic oligonucleotide
gttggattggcccggattcgattgagtcgttgttattgttcaacccagttatcct

SEQ ID NO: 445204 - DNA, 53 bp, Artificial
  Synthetic oligonucleotide
gttggatttatcaaagctgccttattgaaagccgccggtcccctgcgactata

SEQ ID NO: 445205 - DNA, 55 bp, Artificial
  Synthetic oligonucleotide
gttggatttcacagtggagtcgcgagaaatggagcaggcgagaagttgcgagcag

SEQ ID NO: 445206 - DNA, 54 bp, Artificial
  Synthetic oligonucleotide
gttggatttgctgaagaagggaggtatgtacaacagctttttggggttgttccg

SEQ ID NO: 445207 - DNA, 55 bp, Artificial
  Synthetic oligonucleotide
gttggcaaacattgctaggtactacacccattggtcaggatctatggagatgact

SEQ ID NO: 445208 - DNA, 60 bp, Artificial
  Synthetic oligonucleotide
gttggcaatcgacatcgatgtttcgcggtagtcgttgagagacatggttatattggttac

SEQ ID NO: 445209 - DNA, 55 bp, Artificial
  Synthetic oligonucleotide
gttggcacccgtgtatacggtatgccttttggtgggtcgtctgtacctcgtagac

SEQ ID NO: 445210 - DNA, 55 bp, Artificial
  Synthetic oligonucleotide
gttggcactgaaccaacggaccgacttactgtccccactgctcgacttcgggtcc

SEQ ID NO: 445211 - DNA, 59 bp, Artificial
  Synthetic oligonucleotide
gttggcagatgtcaagaatgtgctgctaattgcggcttgcattggtcgctcaaagctag

SEQ ID NO: 445212 - DNA, 58 bp, Artificial
  Synthetic oligonucleotide
gttggcagcggaactgaactcggtgacttgtaatggtgggagttacaatttcgctcta

SEQ ID NO: 445213 - DNA, 55 bp, Artificial
  Synthetic oligonucleotide
gttggcaggtcaaatactatgtttttagtgccaagtttctatcctacttataaac

SEQ ID NO: 445214 - DNA, 58 bp, Artificial
  Synthetic oligonucleotide
gttggcagtaatacccaccatttcgttagtaaccgcaccataagctcgctgtaagctg

SEQ ID NO: 445215 - DNA, 60 bp, Artificial
  Synthetic oligonucleotide
gttggcagtgctgatcaatctcagaatgatgtggtggctctttcgtctcgaattgatagg

SEQ ID NO: 445216 - DNA, 60 bp, Artificial
  Synthetic oligonucleotide
gttggcagttatgaatgtactcctctatatgtagcattatatcattatctggatttgcac

SEQ ID NO: 445217 - DNA, 55 bp, Artificial
  Synthetic oligonucleotide
gttggcagttctccttgaactacctaagtatattaagggcgtggtaaaatacata

SEQ ID NO: 445218 - DNA, 59 bp, Artificial
  Synthetic oligonucleotide
gttggcatacccacgatacgaaacgtgggtctcttggagccactacctgtgatgcaagg

SEQ ID NO: 445219 - DNA, 60 bp, Artificial
  Synthetic oligonucleotide
gttggccaaaagcctctgcatggtaaaggtgactgattgaaactctgtatgtagacctat

SEQ ID NO: 445220 - DNA, 59 bp, Artificial
  Synthetic oligonucleotide
gttggccaaacagatgtcaactttaatggaggacacattgaagagtgttcttgctaccc

SEQ ID NO: 445221 - DNA, 54 bp, Artificial
  Synthetic oligonucleotide
gttggccaatttcggcccggtcttatcatttcgatgaagggccgatgttttaaa

SEQ ID NO: 445222 - DNA, 60 bp, Artificial
  Synthetic oligonucleotide
gttggccacaagtttttcatttgtgagatcaattgtcgtgttctcccatgctctccccac

SEQ ID NO: 445223 - DNA, 51 bp, Artificial
  Synthetic oligonucleotide
gttggccacacttaaggccacaagcaactttaatgagaattggtatgtcta

SEQ ID NO: 445224 - DNA, 53 bp, Artificial
  Synthetic oligonucleotide
gttggccatcttaatcatctggcaactactctgggtcgtcctccacgtcctgg

SEQ ID NO: 445225 - DNA, 55 bp, Artificial
  Synthetic oligonucleotide
gttggcccaacgttccaatacatggaggctaatgactattacccagctaggtacc

SEQ ID NO: 445226 - DNA, 58 bp, Artificial
  Synthetic oligonucleotide
gttggccctcgcttaccaactgtgctacctatataagtcaacagacttacaccgacag

SEQ ID NO: 445227 - DNA, 55 bp, Artificial
  Synthetic oligonucleotide
gttggccgattcatttatcgcgagctacccgagttaagttcacccgtgtggcctg

SEQ ID NO: 445228 - DNA, 55 bp, Artificial
  Synthetic oligonucleotide
gttggcctagtaacactatacctaggagtcatggttcaggcggattcaggatgcg

SEQ ID NO: 445229 - DNA, 60 bp, Artificial
  Synthetic oligonucleotide
gttggcctataaagtatatcgcttgattcgtaattcagcagaatgcgtggaggcacaagc

SEQ ID NO: 445230 - DNA, 60 bp, Artificial
  Synthetic oligonucleotide
gttggcctgaaagaggctcgaaagcagaaagagttagtttgctcttccaggcaggcagat

SEQ ID NO: 445231 - DNA, 50 bp, Artificial
  Synthetic oligonucleotide
gttggccttggcggaatgcagactagaataattaatcgagcgtcatattc

SEQ ID NO: 445232 - DNA, 55 bp, Artificial
  Synthetic oligonucleotide
gttggcgaatgtaacatcagtacgtcaggagtatgcaataccagtaggaccagtg

SEQ ID NO: 445233 - DNA, 55 bp, Artificial
  Synthetic oligonucleotide
gttggcgacacagaaaatccaaattcttataaagctagttctacagatgacaggc

SEQ ID NO: 445234 - DNA, 55 bp, Artificial
  Synthetic oligonucleotide
gttggcgaccatacactcattgaccgtgtaggtggcgggactttaggtgacttgc

SEQ ID NO: 445235 - DNA, 55 bp, Artificial
  Synthetic oligonucleotide
gttggcgacttagcatataagaaataaacgtaaagctcagagctaaccgccttcg

SEQ ID NO: 445236 - DNA, 54 bp, Artificial
  Synthetic oligonucleotide
gttggcgaggactaattaacggtaagcaaattacattttagcacgtgggtgtta

SEQ ID NO: 445237 - DNA, 54 bp, Artificial
  Synthetic oligonucleotide
gttggcgcagaaactatctcgggtgcggtcgtcaccaccgaggttggtatgcag

SEQ ID NO: 445238 - DNA, 60 bp, Artificial
  Synthetic oligonucleotide
gttggcgcctcagacaagtctgcactgttggggactttccctggttctgacatcactcta

SEQ ID NO: 445239 - DNA, 60 bp, Artificial
  Synthetic oligonucleotide
gttggcgcgacgtccggtctctactgtattgcaacatccagaggcgcgagcgaaggttca

SEQ ID NO: 445240 - DNA, 53 bp, Artificial
  Synthetic oligonucleotide
gttggcggcagcttaccaagaacaactagaccggccggtagtacctcaccctt

SEQ ID NO: 445241 - DNA, 57 bp, Artificial
  Synthetic oligonucleotide
gttggcggcgtttacacctactacagctggcacctatcttgtcactctcatcttgga

SEQ ID NO: 445242 - DNA, 55 bp, Artificial
  Synthetic oligonucleotide
gttggcgggatcacatgcagggcgagtcttattttcattgtatgctgtgcatgcc

SEQ ID NO: 445243 - DNA, 55 bp, Artificial
  Synthetic oligonucleotide
gttggcgtagagaaccttaacggtattatcttgacacctaactgtatcgagttcg

SEQ ID NO: 445244 - DNA, 60 bp, Artificial
  Synthetic oligonucleotide
gttggcgtgttggcactccagaaagctgagtcgcagttgtccttcccgtttacatcacgc

SEQ ID NO: 445245 - DNA, 55 bp, Artificial
  Synthetic oligonucleotide
gttggcgttaatagtcctattgatcgtaatcttttgaggagagaaagtcgtggtg

SEQ ID NO: 445246 - DNA, 56 bp, Artificial
  Synthetic oligonucleotide
gttggctcacatcaaattgaacctttgaaaacctctgttgataaacctggttctaa

SEQ ID NO: 445247 - DNA, 55 bp, Artificial
  Synthetic oligonucleotide
gttggctctgacttgtatgtggtagatccttgttcgagtgaatggtggatcctcc

SEQ ID NO: 445248 - DNA, 55 bp, Artificial
  Synthetic oligonucleotide
gttggctgaggcaatgagccaagcgaacaatacaaacataatgatgcagagaggc

SEQ ID NO: 445249 - DNA, 60 bp, Artificial
  Synthetic oligonucleotide
gttggctggtacattcgaaggagaggtagagcaacacagtccactgatgcacaggagtca

SEQ ID NO: 445250 - DNA, 54 bp, Artificial
  Synthetic oligonucleotide
gttggctggttccagaacgctttcctttgtacggtggtgtacctttagataggc

SEQ ID NO: 445251 - DNA, 53 bp, Artificial
  Synthetic oligonucleotide
gttggctgttaacgtcctggggatgtaaacggttattcataacgtaacacact

SEQ ID NO: 445252 - DNA, 55 bp, Artificial
  Synthetic oligonucleotide
gttggcttcgagacaatccctatggataatcagatctacactcagtcgcgacgtg

SEQ ID NO: 445253 - DNA, 58 bp, Artificial
  Synthetic oligonucleotide
gttggcttgattcattttagtaaccctacctcagtcgaattggattgggtcatactgc

SEQ ID NO: 445254 - DNA, 55 bp, Artificial
  Synthetic oligonucleotide
gttggctttatggactttatcattgcgctgggttggcaaataatacccagcaaca

SEQ ID NO: 445255 - DNA, 60 bp, Artificial
  Synthetic oligonucleotide
gttggcttttcatcttccacgccaggcctacaatcgcctgatgctcccgtttgaggaggc

SEQ ID NO: 445256 - DNA, 55 bp, Artificial
  Synthetic oligonucleotide
gttgggaacatccatctgacttatgtgacccaaggacttgggactatttcctcag

SEQ ID NO: 445257 - DNA, 60 bp, Artificial
  Synthetic oligonucleotide
gttgggaagagtacaagcaattccttttagctcacatgagctgtaataggactgaatggg

SEQ ID NO: 445258 - DNA, 60 bp, Artificial
  Synthetic oligonucleotide
gttgggacaagttgatgagaagtttacccgatggatgggtgtattgtcatgcagatggct

SEQ ID NO: 445259 - DNA, 55 bp, Artificial
  Synthetic oligonucleotide
gttgggaggagagcaacagctattctcaggaaggcaaccaggagattaattcagc

SEQ ID NO: 445260 - DNA, 55 bp, Artificial
  Synthetic oligonucleotide
gttgggaggctgccatgcaatttgaataagtctcgactaactcttgatgaagagg

SEQ ID NO: 445261 - DNA, 57 bp, Artificial
  Synthetic oligonucleotide
gttgggagggtgcagcccgggattcttactttcttatcggagcagtatgtgggagac

SEQ ID NO: 445262 - DNA, 56 bp, Artificial
  Synthetic oligonucleotide
gttgggagtccacgacaacgtggctatcttaccaacccacgcttcacctggtgaaa

SEQ ID NO: 445263 - DNA, 55 bp, Artificial
  Synthetic oligonucleotide
gttgggatactatgcatgctgagcacaataggtttgcttatcactttaacggaga

SEQ ID NO: 445264 - DNA, 58 bp, Artificial
  Synthetic oligonucleotide
gttgggatcagccccatcttattggatatatgatattaaacagtattcggaatttgtg

SEQ ID NO: 445265 - DNA, 59 bp, Artificial
  Synthetic oligonucleotide
gttgggatcgagcaagcatacaaggtagtcaggtatgaggcgttgagactggtaggtgg

SEQ ID NO: 445266 - DNA, 55 bp, Artificial
  Synthetic oligonucleotide
gttgggatggctgaattgggtgcattcttttcgatcctacaggatatgaggaaca

SEQ ID NO: 445267 - DNA, 55 bp, Artificial
  Synthetic oligonucleotide
gttgggatggtaccgatctatgtcaaagtacctctcgtcacgagtagtgacaggc

SEQ ID NO: 445268 - DNA, 59 bp, Artificial
  Synthetic oligonucleotide
gttgggcaacaattgatgttgagtatagagaacccgcgccttacgtacacgctcagcgt

SEQ ID NO: 445269 - DNA, 55 bp, Artificial
  Synthetic oligonucleotide
gttgggcacacatgtagtgtgggatgtaggtttacagtcaacagttgtcatgaac

SEQ ID NO: 445270 - DNA, 51 bp, Artificial
  Synthetic oligonucleotide
gttgggcacattcgcggtgcgcattgttagcaagacgcctgcggagagaga

SEQ ID NO: 445271 - DNA, 55 bp, Artificial
  Synthetic oligonucleotide
gttgggcacgttttcatgtgagatagattatggagaattgtgcggtcacgccatg

SEQ ID NO: 445272 - DNA, 55 bp, Artificial
  Synthetic oligonucleotide
gttgggcagagattagggttaaaactgcttaggtattataccgagttgttgtcaa

SEQ ID NO: 445273 - DNA, 56 bp, Artificial
  Synthetic oligonucleotide
gttgggcagtggataacagtcaaggaatacgaacgtcaaggtgttcaccttaattg

SEQ ID NO: 445274 - DNA, 60 bp, Artificial
  Synthetic oligonucleotide
gttgggcattctggtactctgctctgtgtttctgatatcactcgtggtagtggacttact

SEQ ID NO: 445275 - DNA, 55 bp, Artificial
  Synthetic oligonucleotide
gttgggccctatgaaacagcgtctagttcaaagacagtgcatggtggaacgcgta

SEQ ID NO: 445276 - DNA, 59 bp, Artificial
  Synthetic oligonucleotide
gttgggccgacgatgtagaggcttcgctttcttgctcctggaataatctggttgtttca

SEQ ID NO: 445277 - DNA, 51 bp, Artificial
  Synthetic oligonucleotide
gttgggctaaagcccaatctggttctaaataggcgactgattcaattaaat

SEQ ID NO: 445278 - DNA, 56 bp, Artificial
  Synthetic oligonucleotide
gttgggctagttgggtggcgggtatgcgttacctgggaacgataatcctggctgcc

SEQ ID NO: 445279 - DNA, 57 bp, Artificial
  Synthetic oligonucleotide
gttgggctagttttaaggacttagatcatgactcttgtaagggtgtttatgataata

SEQ ID NO: 445280 - DNA, 55 bp, Artificial
  Synthetic oligonucleotide
gttgggctggcataggacaatatgtgccacccgaagtaatccgtgtgggtcgtgc

SEQ ID NO: 445281 - DNA, 56 bp, Artificial
  Synthetic oligonucleotide
gttgggctttcgcttgttactcctcacgaggcggctatactaatcctaaaggccaa

SEQ ID NO: 445282 - DNA, 55 bp, Artificial
  Synthetic oligonucleotide
gttggggaaaccatttggcaaattgtggatgagggagctggcctggcatcctccg

SEQ ID NO: 445283 - DNA, 55 bp, Artificial
  Synthetic oligonucleotide
gttggggagcgtacaaaaggacctttgattcaggtcccctagagcaactggtgct

SEQ ID NO: 445284 - DNA, 55 bp, Artificial
  Synthetic oligonucleotide
gttggggatagggatcattatctgccgcacgggggtttctatagggacggtacga

SEQ ID NO: 445285 - DNA, 60 bp, Artificial
  Synthetic oligonucleotide
gttggggattggaacagattgacaatgtaatgggaatgattgggatactgcctgacatga

SEQ ID NO: 445286 - DNA, 55 bp, Artificial
  Synthetic oligonucleotide
gttggggcaatgctactatttactatccatactgtccaaaaaagtaccttgtttc

SEQ ID NO: 445287 - DNA, 55 bp, Artificial
  Synthetic oligonucleotide
gttggggccatctcgagtgatgggaaaaccatttatggttcgaatatgtcagccc

SEQ ID NO: 445288 - DNA, 59 bp, Artificial
  Synthetic oligonucleotide
gttggggctactctctcaactttatgggatatgtgattggcagttggggcactttacca

SEQ ID NO: 445289 - DNA, 60 bp, Artificial
  Synthetic oligonucleotide
gttggggctatagaggtcattatggattgcttcacctctcctgatagtaatatttgtggt

SEQ ID NO: 445290 - DNA, 50 bp, Artificial
  Synthetic oligonucleotide
gttgggggaatcagttatttgttactgttcttgataacagcaggaatact

SEQ ID NO: 445291 - DNA, 55 bp, Artificial
  Synthetic oligonucleotide
gttggggggaattaatgactctagctacctgggtgggggtcaatttagaagatca

SEQ ID NO: 445292 - DNA, 56 bp, Artificial
  Synthetic oligonucleotide
gttggggggagctttgcgttatgtgtcttatcgcgatgggggttataatgtgccta

SEQ ID NO: 445293 - DNA, 57 bp, Artificial
  Synthetic oligonucleotide
gttggggggtgctttgcatcatgtctcgtatcgtgatggaggttacaacgtacccaa

SEQ ID NO: 445294 - DNA, 53 bp, Artificial
  Synthetic oligonucleotide
gttgggggtcggggggacattgagggtggtccaaccaaactgcctgaacttga

SEQ ID NO: 445295 - DNA, 55 bp, Artificial
  Synthetic oligonucleotide
gttggggtaccttaccgcaagatcatattgtagaaaagatcaagcattgttttcg

SEQ ID NO: 445296 - DNA, 58 bp, Artificial
  Synthetic oligonucleotide
gttggggtatgacggtttcctgtcatactacagcggcgcgaagctccgtacttacaca

SEQ ID NO: 445297 - DNA, 56 bp, Artificial
  Synthetic oligonucleotide
gttggggtatttaaagactgaagttgggaaagtgcttcttcctttgagagagagca

SEQ ID NO: 445298 - DNA, 55 bp, Artificial
  Synthetic oligonucleotide
gttggggtggttttaaacgtgctggtgattacgcatatgctacaggtggaaaagt

SEQ ID NO: 445299 - DNA, 52 bp, Artificial
  Synthetic oligonucleotide
gttggggttactcccttaacttcatgggatatgtaattggtagttggggtac

SEQ ID NO: 445300 - DNA, 53 bp, Artificial
  Synthetic oligonucleotide
gttgggtaacacattctctgtccccgatcctttacgtgagttacaacgtttag

SEQ ID NO: 445301 - DNA, 50 bp, Artificial
  Synthetic oligonucleotide
gttgggtaactggcgcgtgtggtcatggaattcacgcacaggttccaaca

SEQ ID NO: 445302 - DNA, 60 bp, Artificial
  Synthetic oligonucleotide
gttgggtactaccactcttcccagatggtaacaacgcacacctattgatgcacgctcctg

SEQ ID NO: 445303 - DNA, 55 bp, Artificial
  Synthetic oligonucleotide
gttgggtatagccacgaatacgtagatgcggagtttgattcttgtaggaagagcc

SEQ ID NO: 445304 - DNA, 55 bp, Artificial
  Synthetic oligonucleotide
gttgggtcatacttacaatgattaaattgtttaacgtaatgtacgatttggagac

SEQ ID NO: 445305 - DNA, 60 bp, Artificial
  Synthetic oligonucleotide
gttgggtcctccttgtagtgggatccagccggttctggtgctgttcagccacaatgccgc

SEQ ID NO: 445306 - DNA, 60 bp, Artificial
  Synthetic oligonucleotide
gttgggtgaatggccaaccatgatggatgttgcaacagcttgttggcaattgacagtttg

SEQ ID NO: 445307 - DNA, 60 bp, Artificial
  Synthetic oligonucleotide
gttgggtggaataatgctgatatttgtggcgtggaccttgcagttaagtctcatatagca

SEQ ID NO: 445308 - DNA, 59 bp, Artificial
  Synthetic oligonucleotide
gttgggtggcctgcggtaagggaaagaataaggagaactagaactgagccagcagcaga

SEQ ID NO: 445309 - DNA, 52 bp, Artificial
  Synthetic oligonucleotide
gttgggtgggttgcgattcgagtaacctcgacgcgtaccttgaccgtttaaa

SEQ ID NO: 445310 - DNA, 57 bp, Artificial
  Synthetic oligonucleotide
gttgggttccttgggttgcgagtcagatgcgacggtaggatcaatcaaaactggagg

SEQ ID NO: 445311 - DNA, 55 bp, Artificial
  Synthetic oligonucleotide
gttgggttggtgagcatcagtaggattaatgtccttagtgcagtctcaatgtcaa

SEQ ID NO: 445312 - DNA, 56 bp, Artificial
  Synthetic oligonucleotide
gttggtaaagttttaaccttatcagaatctacatccttgacgttctcatctgctag

SEQ ID NO: 445313 - DNA, 54 bp, Artificial
  Synthetic oligonucleotide
gttggtaacgaagaacttggaagctcaggcaacccaaacgcggttaaatggcca

SEQ ID NO: 445314 - DNA, 59 bp, Artificial
  Synthetic oligonucleotide
gttggtaagcgattttgcgttaagtcagtatatgtcttggggaagatctggatggacga

SEQ ID NO: 445315 - DNA, 55 bp, Artificial
  Synthetic oligonucleotide
gttggtaaggctcttatcattccatcatactcagttctcagacgtaggtggctgg

SEQ ID NO: 445316 - DNA, 50 bp, Artificial
  Synthetic oligonucleotide
gttggtaaggttcttttataggtaagggataaagcgaacattacaaaagg

SEQ ID NO: 445317 - DNA, 55 bp, Artificial
  Synthetic oligonucleotide
gttggtaccatgcctaaggtcaaatcccgtcgcaagcgtgcctctgccacggacc

SEQ ID NO: 445318 - DNA, 55 bp, Artificial
  Synthetic oligonucleotide
gttggtactgtgtattccatgcagcaattctcagaggaggctcagatgattgact

SEQ ID NO: 445319 - DNA, 54 bp, Artificial
  Synthetic oligonucleotide
gttggtagacgcggaaatcaaagtgtcaaagggtatggggatagtaccaccgta

SEQ ID NO: 445320 - DNA, 55 bp, Artificial
  Synthetic oligonucleotide
gttggtagatttgaccgtagtcaaacattttcgggcgcgatgtctgactgggctg

SEQ ID NO: 445321 - DNA, 55 bp, Artificial
  Synthetic oligonucleotide
gttggtagggctgttcttaatatacctgtaagaataagacaaggcttggaaagag

SEQ ID NO: 445322 - DNA, 54 bp, Artificial
  Synthetic oligonucleotide
gttggtaggtcgtaaatcccggtcatcttggtagccactataggtgggtcttaa

SEQ ID NO: 445323 - DNA, 55 bp, Artificial
  Synthetic oligonucleotide
gttggtagttttacatatgacttcaccatggattaggggacctataggagaggga

SEQ ID NO: 445324 - DNA, 55 bp, Artificial
  Synthetic oligonucleotide
gttggtatcaaacatcactcatactcccacccaacactgctggacaggtttacct

SEQ ID NO: 445325 - DNA, 55 bp, Artificial
  Synthetic oligonucleotide
gttggtatcaacatggatggtccaagtgtggaagcgctgtaccaaaggatcagaa

SEQ ID NO: 445326 - DNA, 60 bp, Artificial
  Synthetic oligonucleotide
gttggtatgcatgtggcttttaatggaagagagggaagtgcaagtttcatgccctatcat

SEQ ID NO: 445327 - DNA, 57 bp, Artificial
  Synthetic oligonucleotide
gttggtattcctccggcccctgaatgcggctaatcctaactgcggagcaggtaccca

SEQ ID NO: 445328 - DNA, 59 bp, Artificial
  Synthetic oligonucleotide
gttggtattgcgaatcattattttgatcgcgacccggattaatcagagtttttctctga

SEQ ID NO: 445329 - DNA, 59 bp, Artificial
  Synthetic oligonucleotide
gttggtcacactttcaaagagtggtgggatgcacaactgaacacaaaccgcattgtacc

SEQ ID NO: 445330 - DNA, 55 bp, Artificial
  Synthetic oligonucleotide
gttggtcactctggtaaaatgttatgtatctcagatattacccgtggtaatggtc

SEQ ID NO: 445331 - DNA, 55 bp, Artificial
  Synthetic oligonucleotide
gttggtcagttagcggatttcaactttgtggatttgccggcggtggacgaatata

SEQ ID NO: 445332 - DNA, 57 bp, Artificial
  Synthetic oligonucleotide
gttggtccaaaatgcgaatccagactgtaagtccattttaagagcattaggaccagg

SEQ ID NO: 445333 - DNA, 60 bp, Artificial
  Synthetic oligonucleotide
gttggtccacacctaattccaaattgcagataaataggcaagtcatagttgacagcaata

SEQ ID NO: 445334 - DNA, 59 bp, Artificial
  Synthetic oligonucleotide
gttggtccagaatgggggatcattgcattcaagttatgacgtacggttccgcgctccag

SEQ ID NO: 445335 - DNA, 59 bp, Artificial
  Synthetic oligonucleotide
gttggtccccgagatggcatgacgtctaactacagtattcctaagaagaaaggtgctca

SEQ ID NO: 445336 - DNA, 57 bp, Artificial
  Synthetic oligonucleotide
gttggtccgcagatgtagaggctggggtgtctggttccagcccttccctcgtcctgg

SEQ ID NO: 445337 - DNA, 53 bp, Artificial
  Synthetic oligonucleotide
gttggtcgactctgtggttacggaaagtcccaccacggggaacatcccgcttc

SEQ ID NO: 445338 - DNA, 59 bp, Artificial
  Synthetic oligonucleotide
gttggtcgttatctacgtaggtttgagcattacctctatcgaggaattgatgaaatctg

SEQ ID NO: 445339 - DNA, 51 bp, Artificial
  Synthetic oligonucleotide
gttggtcgttgagtgtgatgacgggactgaggaagttttggcagtgccgaa

SEQ ID NO: 445340 - DNA, 60 bp, Artificial
  Synthetic oligonucleotide
gttggtctgacgatacctcagtgttcaagagggtggcctgcaactctagtttgagtctgt

SEQ ID NO: 445341 - DNA, 58 bp, Artificial
  Synthetic oligonucleotide
gttggtgaatattgggatttagcagaaccttgtgacaaaaacagcttaaataatggca

SEQ ID NO: 445342 - DNA, 55 bp, Artificial
  Synthetic oligonucleotide
gttggtgaatcgggtggatgtttaacgttccgcgataccacaaattttggaatca

SEQ ID NO: 445343 - DNA, 55 bp, Artificial
  Synthetic oligonucleotide
gttggtgaatgaagttggacggatcgagggttactttagcctgcttgagggtcac

SEQ ID NO: 445344 - DNA, 59 bp, Artificial
  Synthetic oligonucleotide
gttggtgatccgagtaaattcacaactctattcaacatggaagctaaggtgatggaacc

SEQ ID NO: 445345 - DNA, 55 bp, Artificial
  Synthetic oligonucleotide
gttggtgatgatgaggtaaccaaagaagttaaggattacatgcctcctgtttatc

SEQ ID NO: 445346 - DNA, 60 bp, Artificial
  Synthetic oligonucleotide
gttggtgatgtgcaggcacatacccctggtgattgccccgctatagaactcgtgtcctca

SEQ ID NO: 445347 - DNA, 51 bp, Artificial
  Synthetic oligonucleotide
gttggtgcaatcgctgcaccccgaggtttacgccgagtgcctcgacaccaa

SEQ ID NO: 445348 - DNA, 55 bp, Artificial
  Synthetic oligonucleotide
gttggtgcaattgggaggttttatatacagatgtgtactgaacttaaactcagcg

SEQ ID NO: 445349 - DNA, 55 bp, Artificial
  Synthetic oligonucleotide
gttggtgcacctttcccacagacccgggcctccgcggccctctccttctttcgca

SEQ ID NO: 445350 - DNA, 55 bp, Artificial
  Synthetic oligonucleotide
gttggtgcatgaccatctaacagcgaaattggttggtagtatccgagctgggact

SEQ ID NO: 445351 - DNA, 60 bp, Artificial
  Synthetic oligonucleotide
gttggtgcatggccagtaatgagtggaggtgcagtgtctttacatttcgcaggagtcact

SEQ ID NO: 445352 - DNA, 55 bp, Artificial
  Synthetic oligonucleotide
gttggtgccaagatcgacctcagtgttgtcccaagctctccctgatatcgatgtc

SEQ ID NO: 445353 - DNA, 60 bp, Artificial
  Synthetic oligonucleotide
gttggtgccatccagagaggagcgctgtatatggttattgcccccggcaatggccttaca

SEQ ID NO: 445354 - DNA, 60 bp, Artificial
  Synthetic oligonucleotide
gttggtgcgatacagagaggagctttgtacatggtcgttgcccctggcaatggccttaca

SEQ ID NO: 445355 - DNA, 52 bp, Artificial
  Synthetic oligonucleotide
gttggtgcgatcgagaggccatatatgtacactatggcctatgcactaagaa

SEQ ID NO: 445356 - DNA, 58 bp, Artificial
  Synthetic oligonucleotide
gttggtgcgatggtttaatggaacacttgactaagaaaatccaatcggattctcaaga

SEQ ID NO: 445357 - DNA, 55 bp, Artificial
  Synthetic oligonucleotide
gttggtgctcacccgaggtctattaatgacaaccccaacgtcctgcaccggtgtt

SEQ ID NO: 445358 - DNA, 60 bp, Artificial
  Synthetic oligonucleotide
gttggtggaatcgggagattctacatacagatgtgcactgaactcaaactcagcgactat

SEQ ID NO: 445359 - DNA, 55 bp, Artificial
  Synthetic oligonucleotide
gttggtggcggggcacgagtctacggtaatacagaattaactggtacattagatc

SEQ ID NO: 445360 - DNA, 55 bp, Artificial
  Synthetic oligonucleotide
gttggtgggacggtaatgcattattctgactctgtgtctagcgctacccactgcg

SEQ ID NO: 445361 - DNA, 60 bp, Artificial
  Synthetic oligonucleotide
gttggtgggatcggaagattctacatacagatgtgtaccgagctcaaactcagtgactat

SEQ ID NO: 445362 - DNA, 60 bp, Artificial
  Synthetic oligonucleotide
gttggtggtacgctacgctattacgatgtaatggctaatggcggcactggtttctgtgca

SEQ ID NO: 445363 - DNA, 55 bp, Artificial
  Synthetic oligonucleotide
gttggtgtactcgcatctattcaacgatatacccgtgattcaaatctcgtcgggc

SEQ ID NO: 445364 - DNA, 55 bp, Artificial
  Synthetic oligonucleotide
gttggtgtattatgagagctgttgttttagagcttatcgcgacatagctgaaacc

SEQ ID NO: 445365 - DNA, 58 bp, Artificial
  Synthetic oligonucleotide
gttggtgtgactgtgatactccttttgctcacctcctggctagtatttttcctcctgg

SEQ ID NO: 445366 - DNA, 55 bp, Artificial
  Synthetic oligonucleotide
gttggtgtgagtacgcatgaatatgtgcaagccctgcataatattagatagcttg

SEQ ID NO: 445367 - DNA, 52 bp, Artificial
  Synthetic oligonucleotide
gttggtgtgttctatctggcctataccttgttcttgaaggattgtatccttt

SEQ ID NO: 445368 - DNA, 60 bp, Artificial
  Synthetic oligonucleotide
gttggtgttaatgcactcttgcacagtcgatctgactagctcgttcaactgcgacatgga

SEQ ID NO: 445369 - DNA, 52 bp, Artificial
  Synthetic oligonucleotide
gttggtgttgttgccatgaagccgtctcccttgagtacccaagtacttgacc

SEQ ID NO: 445370 - DNA, 60 bp, Artificial
  Synthetic oligonucleotide
gttggtgtttaagttgaatcgtgattactttgatgtcgaggttaatccgcagatgctaca

SEQ ID NO: 445371 - DNA, 54 bp, Artificial
  Synthetic oligonucleotide
gttggttacctccaaacttcgttatggtgacgatatacaggtttttgttcattg

SEQ ID NO: 445372 - DNA, 52 bp, Artificial
  Synthetic oligonucleotide
gttggttccgggccattatttgctacgaagtggtacttggcctgttaaaaac

SEQ ID NO: 445373 - DNA, 54 bp, Artificial
  Synthetic oligonucleotide
gttggttcgtacggggcgtttaacagcgcctatggcagtggtacaacggtgtcc

SEQ ID NO: 445374 - DNA, 53 bp, Artificial
  Synthetic oligonucleotide
gttggttctcaattgtgcaggtacaggtgtgttgtttgaaatatgctccaaca

SEQ ID NO: 445375 - DNA, 58 bp, Artificial
  Synthetic oligonucleotide
gttggttcttcttgaaaacgaaaggacattagacctgcatgacgcgaatgtgaagaac

SEQ ID NO: 445376 - DNA, 54 bp, Artificial
  Synthetic oligonucleotide
gttggttgacccgtcgattcccatggacgttttaatggtaacagtacagctccc

SEQ ID NO: 445377 - DNA, 53 bp, Artificial
  Synthetic oligonucleotide
gttggttgggagtgagtttggacgtttaccaaacgtcggagctttcttctcag

SEQ ID NO: 445378 - DNA, 50 bp, Artificial
  Synthetic oligonucleotide
gttggttggtgctaaaacagctgagcagttgggtggcattggtagcctaa

SEQ ID NO: 445379 - DNA, 60 bp, Artificial
  Synthetic oligonucleotide
gttggtttatgcgagctgcgcaggccgtaactgctgtggtgtgtggcccagacatgatcc

SEQ ID NO: 445380 - DNA, 55 bp, Artificial
  Synthetic oligonucleotide
gttggtttcagacggaggaccaaacctatacaacattcggaatctccacattccg

SEQ ID NO: 445381 - DNA, 60 bp, Artificial
  Synthetic oligonucleotide
gttggtttctaatggtctcgtcatccactatgatcgtgctcataatgatcccatacacac

SEQ ID NO: 445382 - DNA, 55 bp, Artificial
  Synthetic oligonucleotide
gttggtttgtaaaatctggggagtggatttcaggaatctttagtggcaactggat

SEQ ID NO: 445383 - DNA, 50 bp, Artificial
  Synthetic oligonucleotide
gttgtaaaatattcgtcagttgcaaatcatgctgatagagtctatgctac

SEQ ID NO: 445384 - DNA, 57 bp, Artificial
  Synthetic oligonucleotide
gttgtaaacaaaccactgacatcgtatcgacatatagtaatgcaatcaagagatagg

SEQ ID NO: 445385 - DNA, 49 bp, Artificial
  Synthetic oligonucleotide
gttgtaaacgggtttgactccaacaaacccgtcacctttccaaaatagg

SEQ ID NO: 445386 - DNA, 55 bp, Artificial
  Synthetic oligonucleotide
gttgtaaactccaatggcactcgtgaaactcatattgaacatttcttctctaggt

SEQ ID NO: 445387 - DNA, 60 bp, Artificial
  Synthetic oligonucleotide
gttgtaaagtactcatcagttgcaaatcatgcggatagagtttacgctacttacaagagt

SEQ ID NO: 445388 - DNA, 60 bp, Artificial
  Synthetic oligonucleotide
gttgtaaccatctggcaccaccttaggcagagttggacagagaatgccaccatcggaaag

SEQ ID NO: 445389 - DNA, 55 bp, Artificial
  Synthetic oligonucleotide
gttgtaacgacaaagcaacttctttacgaaacgtaccttgcatctatatgtgggg

SEQ ID NO: 445390 - DNA, 51 bp, Artificial
  Synthetic oligonucleotide
gttgtaagaggcttatgggaaggtataacgggcatgggtggctggttaaaa

SEQ ID NO: 445391 - DNA, 51 bp, Artificial
  Synthetic oligonucleotide
gttgtaatacatatgataaatctgcgagtactctaagggaattcagaggtg

SEQ ID NO: 445392 - DNA, 52 bp, Artificial
  Synthetic oligonucleotide
gttgtaatccgtatacactagtccgttaccgccatcgcctaaacataactcg

SEQ ID NO: 445393 - DNA, 50 bp, Artificial
  Synthetic oligonucleotide
gttgtacaatagaagagtcagacaggttatgacccagaatttgaacttcc

SEQ ID NO: 445394 - DNA, 58 bp, Artificial
  Synthetic oligonucleotide
gttgtacacaattagaggccctcctgaggctaaatccaccgaggttgttcaatttgca

SEQ ID NO: 445395 - DNA, 54 bp, Artificial
  Synthetic oligonucleotide
gttgtacatactaaacgggcgagagatggcaccaaacgacatggagctagtcga

SEQ ID NO: 445396 - DNA, 55 bp, Artificial
  Synthetic oligonucleotide
gttgtacatactctgttccatctaatacatcgtacaatacgtgatcaactgccct

SEQ ID NO: 445397 - DNA, 58 bp, Artificial
  Synthetic oligonucleotide
gttgtacatggatgaatagcactggattcaccaagacgtgcgggggccccccgtgtaa

SEQ ID NO: 445398 - DNA, 60 bp, Artificial
  Synthetic oligonucleotide
gttgtaccattaactgcgcgagtcataataaattgaccggatttaagcataatgccagag

SEQ ID NO: 445399 - DNA, 55 bp, Artificial
  Synthetic oligonucleotide
gttgtacccactccagaggcccacgtggcggctagcactccggtattacggtacc

SEQ ID NO: 445400 - DNA, 55 bp, Artificial
  Synthetic oligonucleotide
gttgtacctagcctgcaaaatttctgagattcctgaagaagaacgtcacctcctc

SEQ ID NO: 445401 - DNA, 57 bp, Artificial
  Synthetic oligonucleotide
gttgtacctcactactttgttttccgttctactactgatgctttatgtcgatttatg

SEQ ID NO: 445402 - DNA, 58 bp, Artificial
  Synthetic oligonucleotide
gttgtaccttgggttagtgcaagtcacttcagattcaccacccctgacacgtactcta

SEQ ID NO: 445403 - DNA, 53 bp, Artificial
  Synthetic oligonucleotide
gttgtacgaccgaaacaccgtgcaatgacctaagatcgcaaccgaggcccgtt

SEQ ID NO: 445404 - DNA, 55 bp, Artificial
  Synthetic oligonucleotide
gttgtacgttatagtagggtgggcgaaagggccactgtacacacacgtagtggcc

SEQ ID NO: 445405 - DNA, 60 bp, Artificial
  Synthetic oligonucleotide
gttgtacgttgtgcattgatggtgattggatgaaaacacgcactgaaggtgtagtgtgtg

SEQ ID NO: 445406 - DNA, 60 bp, Artificial
  Synthetic oligonucleotide
gttgtactcccagagaggcgttgatcgttgctgatcagcatattctggttcgtgcggtgc

SEQ ID NO: 445407 - DNA, 55 bp, Artificial
  Synthetic oligonucleotide
gttgtactccgctttattcgagtaaaccctagaattgaagtccaggtgtccgctc

SEQ ID NO: 445408 - DNA, 55 bp, Artificial
  Synthetic oligonucleotide
gttgtactgacacgtggcatgagggatgtttactatcattgtcgtggtgggtccg

SEQ ID NO: 445409 - DNA, 60 bp, Artificial
  Synthetic oligonucleotide
gttgtagacgtgttgttcgaggtagtggatgtggcagatgggttgcgcaacgtatctagg

SEQ ID NO: 445410 - DNA, 60 bp, Artificial
  Synthetic oligonucleotide
gttgtagactcgtcatgtctgataatgaacctgcaaatcaagacctatggtcaaggcagt

SEQ ID NO: 445411 - DNA, 59 bp, Artificial
  Synthetic oligonucleotide
gttgtagacttattcgctaacacagtttttagagtatgtagaaaccacgtatcagcaca

SEQ ID NO: 445412 - DNA, 55 bp, Artificial
  Synthetic oligonucleotide
gttgtagagtacgagagaaattgcgtgtggttcgatttatccgcccgtgatgtag

SEQ ID NO: 445413 - DNA, 55 bp, Artificial
  Synthetic oligonucleotide
gttgtagatcgcgtattgtatgaggcttgggaagttgaaagtagaataccaggca

SEQ ID NO: 445414 - DNA, 53 bp, Artificial
  Synthetic oligonucleotide
gttgtagctagttatattagtaaatactcttatgtagcatgccttagtattaa

SEQ ID NO: 445415 - DNA, 55 bp, Artificial
  Synthetic oligonucleotide
gttgtagctatttcgggccacacgcatgctagtgccgctagcttgaggaccgccg

SEQ ID NO: 445416 - DNA, 55 bp, Artificial
  Synthetic oligonucleotide
gttgtaggaccaaacggcggttgatgccatggtatcatgcaatacgctggaacag

SEQ ID NO: 445417 - DNA, 51 bp, Artificial
  Synthetic oligonucleotide
gttgtagtatcgtttgacatactctaatcgtgtttctgtggggtagttttg

SEQ ID NO: 445418 - DNA, 54 bp, Artificial
  Synthetic oligonucleotide
gttgtatagtagggcctatcaacaaattaatgtacgggaccccacctttatgtc

SEQ ID NO: 445419 - DNA, 60 bp, Artificial
  Synthetic oligonucleotide
gttgtatatcgtgtaatatcaaagagtattcctgtcgcgttactagagtcactaagtaga

SEQ ID NO: 445420 - DNA, 60 bp, Artificial
  Synthetic oligonucleotide
gttgtatatggcatgtactcatgcctctaatcctgtgtatgctactttgaaagtgaggag

SEQ ID NO: 445421 - DNA, 55 bp, Artificial
  Synthetic oligonucleotide
gttgtatctaccatatagactgctgtgagccaccctcctgaattctgcggctggc

SEQ ID NO: 445422 - DNA, 60 bp, Artificial
  Synthetic oligonucleotide
gttgtatgggcctcatatacaacaggatgggggctgtgaccaccgaatcagcatttggcc

SEQ ID NO: 445423 - DNA, 57 bp, Artificial
  Synthetic oligonucleotide
gttgtatgggtctcatatacaacagaatgggaacggtaaccacagaagtggcttttg

SEQ ID NO: 445424 - DNA, 60 bp, Artificial
  Synthetic oligonucleotide
gttgtatgtactagagcagagtgtcttgatgtcattgcaccaccacagagacgaatacac

SEQ ID NO: 445425 - DNA, 60 bp, Artificial
  Synthetic oligonucleotide
gttgtatgttaacaatcacgcattccatactgaagcttacgatcggagggcttttgctaa

SEQ ID NO: 445426 - DNA, 52 bp, Artificial
  Synthetic oligonucleotide
gttgtattccacctcgttggaatagacacgtgaattaaagtccaagtgaccg

SEQ ID NO: 445427 - DNA, 57 bp, Artificial
  Synthetic oligonucleotide
gttgtatttagtttcattgggcgttcctaaaatagatgcagatacttatgttgggtc

SEQ ID NO: 445428 - DNA, 55 bp, Artificial
  Synthetic oligonucleotide
gttgtattttgcaggtgtaggagaaggaaagccaggtcctccctccagttagccc

SEQ ID NO: 445429 - DNA, 60 bp, Artificial
  Synthetic oligonucleotide
gttgtcaaaatgatatgccgctgtataatcaagcaagaggaatgcagctctacaaaagta

SEQ ID NO: 445430 - DNA, 53 bp, Artificial
  Synthetic oligonucleotide
gttgtcaacccgaggacgtcaaactgtgaaagaaaataaagggacgaggatcc

SEQ ID NO: 445431 - DNA, 53 bp, Artificial
  Synthetic oligonucleotide
gttgtcaactttctacccgaaaactgtggccactaccaacttggtttcagccg

SEQ ID NO: 445432 - DNA, 59 bp, Artificial
  Synthetic oligonucleotide
gttgtcaagtccatccttggacaaagcctggaacacaagagagctaacctactcctgcc

SEQ ID NO: 445433 - DNA, 55 bp, Artificial
  Synthetic oligonucleotide
gttgtcaatggacttaattcgagtgttacccaattgggtgctcgagtgggacaac

SEQ ID NO: 445434 - DNA, 60 bp, Artificial
  Synthetic oligonucleotide
gttgtcaatggtgattcgagacaatttctcaaagctgggcttcctgaaagatatagaaga

SEQ ID NO: 445435 - DNA, 55 bp, Artificial
  Synthetic oligonucleotide
gttgtcacacaacactaagttgtggtcttgtagttgattaacgagtccgacttca

SEQ ID NO: 445436 - DNA, 59 bp, Artificial
  Synthetic oligonucleotide
gttgtcacacaacgtgttcttatattaaaagtctatgacttcacactgttatttcgtca

SEQ ID NO: 445437 - DNA, 60 bp, Artificial
  Synthetic oligonucleotide
gttgtcacacagttcgtagcccctggtggaaccatcatcctggaatcctgctacggcgca

SEQ ID NO: 445438 - DNA, 55 bp, Artificial
  Synthetic oligonucleotide
gttgtcaccgcagtcctcccagacaccaatggaccgaccacgaactccacttccg

SEQ ID NO: 445439 - DNA, 55 bp, Artificial
  Synthetic oligonucleotide
gttgtcagcactgatgaatatgtgtctcgcacaagcatttattattatgctggta

SEQ ID NO: 445440 - DNA, 55 bp, Artificial
  Synthetic oligonucleotide
gttgtcagctgtagccataaccactgatagtacaaactgcacacagtctaacaac

SEQ ID NO: 445441 - DNA, 60 bp, Artificial
  Synthetic oligonucleotide
gttgtcatctagaataatagcactggatccaactcccctgtcaccctgggtgatcgggga

SEQ ID NO: 445442 - DNA, 51 bp, Artificial
  Synthetic oligonucleotide
gttgtcatggtcgtgtcgccacttacggtcaacaacactagtgcggcacaa

SEQ ID NO: 445443 - DNA, 52 bp, Artificial
  Synthetic oligonucleotide
gttgtcattcttgtgacaatacatctgcgaagtacttcaagagatgcgactg

SEQ ID NO: 445444 - DNA, 60 bp, Artificial
  Synthetic oligonucleotide
gttgtccaatgatattgcgcctggcgagtctagttatccgctccaacttagtgcgcaagt

SEQ ID NO: 445445 - DNA, 60 bp, Artificial
  Synthetic oligonucleotide
gttgtccaatgatttgtggcaaagctgttctctttcgcgatgtggattcaggtgttaggt

SEQ ID NO: 445446 - DNA, 54 bp, Artificial
  Synthetic oligonucleotide
gttgtccacaaggggaaggcaaacagtcaaagagaataagggaacacgaattag

SEQ ID NO: 445447 - DNA, 60 bp, Artificial
  Synthetic oligonucleotide
gttgtccactgagtccatgatgagtagaattgcagctggagacttggagtcatcagtgga

SEQ ID NO: 445448 - DNA, 59 bp, Artificial
  Synthetic oligonucleotide
gttgtccagaaagtaataagatctcgggtatttgctgctggaatagaatcggagactta

SEQ ID NO: 445449 - DNA, 60 bp, Artificial
  Synthetic oligonucleotide
gttgtccagccaaaagtcaggaattgcagatgagatagcggcttcacaaacattcaagaa

SEQ ID NO: 445450 - DNA, 53 bp, Artificial
  Synthetic oligonucleotide
gttgtccagtgggcaactggcgcccattataagctcaagcccattctagacga

SEQ ID NO: 445451 - DNA, 54 bp, Artificial
  Synthetic oligonucleotide
gttgtccatgcgtcgcaatgtggacaacgaatccaattgattagtgttcgcgtt

SEQ ID NO: 445452 - DNA, 55 bp, Artificial
  Synthetic oligonucleotide
gttgtcccaattttcgatctggttgaatcgacgagagagttggtcaagaaagacc

SEQ ID NO: 445453 - DNA, 58 bp, Artificial
  Synthetic oligonucleotide
gttgtcccactgggacttcgacacgtagcgagctgactcccgacgaacggactggcga

SEQ ID NO: 445454 - DNA, 55 bp, Artificial
  Synthetic oligonucleotide
gttgtcccatgctctcccagaaacttgtgatctggagccaatgtatggccaccct

SEQ ID NO: 445455 - DNA, 59 bp, Artificial
  Synthetic oligonucleotide
gttgtccccctctagcagatcgtccgtcgatctgaaactctccccactcgagagtgtcc

SEQ ID NO: 445456 - DNA, 58 bp, Artificial
  Synthetic oligonucleotide
gttgtcccgatacttctgaaagctctgtatatgttaacaacaagggggaggcagacca

SEQ ID NO: 445457 - DNA, 55 bp, Artificial
  Synthetic oligonucleotide
gttgtcccggtcacaggcagagattctgacaaggtcttcaaagcctgaacagtcc

SEQ ID NO: 445458 - DNA, 59 bp, Artificial
  Synthetic oligonucleotide
gttgtccgccataactatgtgggatccgttagtgaacgagtttcccgaatctgtgcatg

SEQ ID NO: 445459 - DNA, 58 bp, Artificial
  Synthetic oligonucleotide
gttgtccgcgaggttggttcagaaccagtttgtctgattagaactagcaccccacagc

SEQ ID NO: 445460 - DNA, 55 bp, Artificial
  Synthetic oligonucleotide
gttgtccggagaattaaggataactgtcacagacctgccgccacctggatcagag

SEQ ID NO: 445461 - DNA, 58 bp, Artificial
  Synthetic oligonucleotide
gttgtcctaacaagctcgcttaattgggctactgacattgtaatgttagattgggccc

SEQ ID NO: 445462 - DNA, 57 bp, Artificial
  Synthetic oligonucleotide
gttgtcctgacgtcctagtgttaacatcgtacatagtttaaataagtctcaatagac

SEQ ID NO: 445463 - DNA, 58 bp, Artificial
  Synthetic oligonucleotide
gttgtcctgtgggtgaggctccctccccatataactcaaggtttgagtctgtcgcttg

SEQ ID NO: 445464 - DNA, 59 bp, Artificial
  Synthetic oligonucleotide
gttgtccttcactaaactgtcactttatatttcagattcgagacttttgatcatggttc

SEQ ID NO: 445465 - DNA, 55 bp, Artificial
  Synthetic oligonucleotide
gttgtccttttatctgtggcaaagcagtcactttcagggatcgcaacacctgcca

SEQ ID NO: 445466 - DNA, 50 bp, Artificial
  Synthetic oligonucleotide
gttgtcgaaaaccacgtcgtacctgaactgtctgtttcccgcttcgaagt

SEQ ID NO: 445467 - DNA, 54 bp, Artificial
  Synthetic oligonucleotide
gttgtcgaagatagacggaccatcgttcggttctggtatcaacccagccgggta

SEQ ID NO: 445468 - DNA, 55 bp, Artificial
  Synthetic oligonucleotide
gttgtcgacacgtgggaggcagactgtgaaggaaaacaaggggacaagaataaga

SEQ ID NO: 445469 - DNA, 57 bp, Artificial
  Synthetic oligonucleotide
gttgtcgactcgttgaatggaatagatccgagaactaacgcctcaagagtattttgg

SEQ ID NO: 445470 - DNA, 60 bp, Artificial
  Synthetic oligonucleotide
gttgtcgagttgctaaatgaccacgaatgccctgaactcgaatacatcacagatagcgag

SEQ ID NO: 445471 - DNA, 60 bp, Artificial
  Synthetic oligonucleotide
gttgtcgattgtcgatacgacgatgattgcttccctcggtcgtaacgatctcgaacgtgc

SEQ ID NO: 445472 - DNA, 55 bp, Artificial
  Synthetic oligonucleotide
gttgtcgccggacaaactattgctggcgcgccgtttattgtcggcgattctcagc

SEQ ID NO: 445473 - DNA, 55 bp, Artificial
  Synthetic oligonucleotide
gttgtcgcgatgtcgtaaacttccaacgctgcatatacacagatgctgatgtcat

SEQ ID NO: 445474 - DNA, 60 bp, Artificial
  Synthetic oligonucleotide
gttgtcgctgcacatgataaacttcgtcccacacggtgacgaggtttcatagcagagtct

SEQ ID NO: 445475 - DNA, 59 bp, Artificial
  Synthetic oligonucleotide
gttgtcggtagcgtgcgaactccttgccgtgcgggcagcgtcccacccacggcgactgc

SEQ ID NO: 445476 - DNA, 52 bp, Artificial
  Synthetic oligonucleotide
gttgtcggtggttggtccaaacccaattacaaatttcagacaaataggcaag

SEQ ID NO: 445477 - DNA, 50 bp, Artificial
  Synthetic oligonucleotide
gttgtcgtcagggataaatcgcctaagatttattctactgcccaaccatt

SEQ ID NO: 445478 - DNA, 55 bp, Artificial
  Synthetic oligonucleotide
gttgtcgtctggaactgctacgttaacgccttgtgtaggtattgcgttggcgacg

SEQ ID NO: 445479 - DNA, 55 bp, Artificial
  Synthetic oligonucleotide
gttgtcgtcttgcgcggcgcacctgggcagggtaagagtgtgtgctctgagatgc

SEQ ID NO: 445480 - DNA, 52 bp, Artificial
  Synthetic oligonucleotide
gttgtcgttttcaccttggaccaaggcgggtatagtattaccccgccttgga

SEQ ID NO: 445481 - DNA, 50 bp, Artificial
  Synthetic oligonucleotide
gttgtctcctgttcgtgacattaccccttatgttgaaaagatccccaata

SEQ ID NO: 445482 - DNA, 60 bp, Artificial
  Synthetic oligonucleotide
gttgtctcgattatactttcaatgtcggctcttgttactggatttgtttgtgcttgtgag

SEQ ID NO: 445483 - DNA, 55 bp, Artificial
  Synthetic oligonucleotide
gttgtctcgctaaagcatcggaatcaaccgtatagccacgggataacactttgct

SEQ ID NO: 445484 - DNA, 56 bp, Artificial
  Synthetic oligonucleotide
gttgtctcgctgattcgtcgaccaaatcgtaggcaggtcctctattaagactgttt

SEQ ID NO: 445485 - DNA, 58 bp, Artificial
  Synthetic oligonucleotide
gttgtctcggtctatttgtacctttgattgtagctttctagacgttgaggtctctaca

SEQ ID NO: 445486 - DNA, 60 bp, Artificial
  Synthetic oligonucleotide
gttgtctctgttattctgaacattatcccaatgtttgttcaatcaacattggcactcaat

SEQ ID NO: 445487 - DNA, 59 bp, Artificial
  Synthetic oligonucleotide
gttgtctggcacacattcagggaagatcgaagtttatttgagtctcagatgccctaatc

SEQ ID NO: 445488 - DNA, 57 bp, Artificial
  Synthetic oligonucleotide
gttgtctggtgcacccagcacagacctcctcatgggatgacccccacggggaaaccc

SEQ ID NO: 445489 - DNA, 60 bp, Artificial
  Synthetic oligonucleotide
gttgtctgtctatgagaatcgtcccgtgattatagctgtttcagatctgattggaacttt

SEQ ID NO: 445490 - DNA, 55 bp, Artificial
  Synthetic oligonucleotide
gttgtcttccggatcaaaattctctctatctccattatcttcgaatccgaaagct

SEQ ID NO: 445491 - DNA, 51 bp, Artificial
  Synthetic oligonucleotide
gttgtcttcttttggtctagagtagttcacatcttccaaacttgtgtatat

SEQ ID NO: 445492 - DNA, 55 bp, Artificial
  Synthetic oligonucleotide
gttgtgaaaatctcaacttataggcgtgaaagttacgcctaggatccactgtgcg

SEQ ID NO: 445493 - DNA, 57 bp, Artificial
  Synthetic oligonucleotide
gttgtgaacaatcacagcaaccaacaatttggttaccgggagtggtatatatagttg

SEQ ID NO: 445494 - DNA, 52 bp, Artificial
  Synthetic oligonucleotide
gttgtgaacgttgtccaggtctggtagctgtcgaatctactacaacagctac

SEQ ID NO: 445495 - DNA, 55 bp, Artificial
  Synthetic oligonucleotide
gttgtgaagaccgctgaggcgttttccgacaacgcagagttgaagactttagcgg

SEQ ID NO: 445496 - DNA, 52 bp, Artificial
  Synthetic oligonucleotide
gttgtgaagtcccgcgtttcaatcaaggtccagtgcctaggatgggacgggg

SEQ ID NO: 445497 - DNA, 55 bp, Artificial
  Synthetic oligonucleotide
gttgtgacaccctttaagatagtaggaggtcataagcgcatagtgcagtggaaac

SEQ ID NO: 445498 - DNA, 60 bp, Artificial
  Synthetic oligonucleotide
gttgtgacgacgaagcagcttctatatgagacataccttgcttcgttatgtgggggtatt

SEQ ID NO: 445499 - DNA, 55 bp, Artificial
  Synthetic oligonucleotide
gttgtgactattaccaggactaaagacacagttctcgttggcatgctcctagctg

SEQ ID NO: 445500 - DNA, 50 bp, Artificial
  Synthetic oligonucleotide
gttgtgacttcatcatttctaagaatccgggacaatttcttctgtctagg

SEQ ID NO: 445501 - DNA, 50 bp, Artificial
  Synthetic oligonucleotide
gttgtgagaagtatactctagcccgaatttaccacaagatcttagaggag

SEQ ID NO: 445502 - DNA, 55 bp, Artificial
  Synthetic oligonucleotide
gttgtgagcacacggggcctgatgaactgtcgttcacccacctacagctggactc

SEQ ID NO: 445503 - DNA, 59 bp, Artificial
  Synthetic oligonucleotide
gttgtgaggcttactctgagcatggtatctttaatattagctcacctacttgtcttgtc

SEQ ID NO: 445504 - DNA, 50 bp, Artificial
  Synthetic oligonucleotide
gttgtgagggcgggccatctccttaatgtcttgcgatcagaagactgcct

SEQ ID NO: 445505 - DNA, 60 bp, Artificial
  Synthetic oligonucleotide
gttgtgagggtcacaggtgcgccggtgaagaaaagatctggtgtaagcaagatatcaatg

SEQ ID NO: 445506 - DNA, 60 bp, Artificial
  Synthetic oligonucleotide
gttgtgagttcactctttgtgtcttcgttgatctctatggtagtgttcttcttgttatct

SEQ ID NO: 445507 - DNA, 60 bp, Artificial
  Synthetic oligonucleotide
gttgtgatagatgtcaactaaaaggggaagctatgcatggacaagtagactgtagtccag

SEQ ID NO: 445508 - DNA, 56 bp, Artificial
  Synthetic oligonucleotide
gttgtgatagtgaaggaggtgaacccgcgagaggtgataaacttagtgggggagcc

SEQ ID NO: 445509 - DNA, 58 bp, Artificial
  Synthetic oligonucleotide
gttgtgatggtggtagccccactcaccgtcaaaactggtggttctgaacagatcaagg

SEQ ID NO: 445510 - DNA, 56 bp, Artificial
  Synthetic oligonucleotide
gttgtgcaaggctttagaaaagggccttggcgtatgcatttttgttacaccgagac

SEQ ID NO: 445511 - DNA, 60 bp, Artificial
  Synthetic oligonucleotide
gttgtgcaagttgtcacgaggatcgtctgttgcgaatgcagatataccaggtgaggagct

SEQ ID NO: 445512 - DNA, 57 bp, Artificial
  Synthetic oligonucleotide
gttgtgcagactcaaggtccttaagcagaaggccgtgtgagaatttactttggtcct

SEQ ID NO: 445513 - DNA, 60 bp, Artificial
  Synthetic oligonucleotide
gttgtgcatgagagatataaagacaatcaagggaagctagatgtaccaaaatcattcaaa

SEQ ID NO: 445514 - DNA, 58 bp, Artificial
  Synthetic oligonucleotide
gttgtgcatgcttattgggaatgcaaccgttatacccagtccgcaaacgttgtttcac

SEQ ID NO: 445515 - DNA, 53 bp, Artificial
  Synthetic oligonucleotide
gttgtgcctgcatatcgaagatctatatatttccggtatatatggaaagccca

SEQ ID NO: 445516 - DNA, 60 bp, Artificial
  Synthetic oligonucleotide
gttgtgctaccttcaggtgaagttacagcacagcagcgtggaaatccatcaggtcagatg

SEQ ID NO: 445517 - DNA, 60 bp, Artificial
  Synthetic oligonucleotide
gttgtgctctgtggagtaattcatggtcagaagagttaggtttctggacacaagtgaccg

SEQ ID NO: 445518 - DNA, 55 bp, Artificial
  Synthetic oligonucleotide
gttgtgctggtaccgttatctcatcagatatgaaatctgcctcggacctcatccc

SEQ ID NO: 445519 - DNA, 57 bp, Artificial
  Synthetic oligonucleotide
gttgtgcttactgcgtttgtggggccacccactgcttgagtcccgtagtgcagcaag

SEQ ID NO: 445520 - DNA, 55 bp, Artificial
  Synthetic oligonucleotide
gttgtgcttggattaccggaaggtaatcatggattacatatacatgagtttggtg

SEQ ID NO: 445521 - DNA, 60 bp, Artificial
  Synthetic oligonucleotide
gttgtgcttgtgatgcaagcatagcaatggacaacattgcgaacacgagtggggcagcta

SEQ ID NO: 445522 - DNA, 50 bp, Artificial
  Synthetic oligonucleotide
gttgtggactatggaggctgtctctttgttagatgtggtatcagtcaaaa

SEQ ID NO: 445523 - DNA, 60 bp, Artificial
  Synthetic oligonucleotide
gttgtggagcaatcaaaagatcagagcagttggcgttgcactcatcggaatggggatccc

SEQ ID NO: 445524 - DNA, 55 bp, Artificial
  Synthetic oligonucleotide
gttgtggaggtgaaagactcaggcactagtcaggacgggtacacggtgtggccca

SEQ ID NO: 445525 - DNA, 51 bp, Artificial
  Synthetic oligonucleotide
gttgtggattggtctaaatttaggtctaactttaaggctaatctgtttttt

SEQ ID NO: 445526 - DNA, 59 bp, Artificial
  Synthetic oligonucleotide
gttgtggcattacccgtgcaccgtaaattacaccatctttaaggtgcgcatgttcatcg

SEQ ID NO: 445527 - DNA, 55 bp, Artificial
  Synthetic oligonucleotide
gttgtggcggcaacctggaatgttagatgcaagcgtagatttatgagctacgtcc

SEQ ID NO: 445528 - DNA, 55 bp, Artificial
  Synthetic oligonucleotide
gttgtggcgttgttgggatggaagtttggcggaaaggcaggcgttagcggtgctg

SEQ ID NO: 445529 - DNA, 55 bp, Artificial
  Synthetic oligonucleotide
gttgtggctcatggaacctacttagatgtgccctggtcccgtaggagtgcgtttg

SEQ ID NO: 445530 - DNA, 50 bp, Artificial
  Synthetic oligonucleotide
gttgtggctctcaaggtgattgggttgacccttacaaggtgaatacttgt

SEQ ID NO: 445531 - DNA, 55 bp, Artificial
  Synthetic oligonucleotide
gttgtggctgcgaaggtaggggagtttcagggtaggcttacgccaaattactctg

SEQ ID NO: 445532 - DNA, 54 bp, Artificial
  Synthetic oligonucleotide
gttgtgggaaatgtgtgacccattcaaacgtctcttagattacacttacaagcc

SEQ ID NO: 445533 - DNA, 55 bp, Artificial
  Synthetic oligonucleotide
gttgtgggaagcttcgaaaataattcccgtgggcaaatctcatttgcggtggttg

SEQ ID NO: 445534 - DNA, 55 bp, Artificial
  Synthetic oligonucleotide
gttgtgggagaagaaagcagattcaaggatatctagattccacacggactatagt

SEQ ID NO: 445535 - DNA, 58 bp, Artificial
  Synthetic oligonucleotide
gttgtgggatacccaggagtacacgtaaaacacccactggctttggagctgtgccaca

SEQ ID NO: 445536 - DNA, 60 bp, Artificial
  Synthetic oligonucleotide
gttgtggggtgacattcattccatacacgaattggcggggagcgatctccataagcgtat

SEQ ID NO: 445537 - DNA, 59 bp, Artificial
  Synthetic oligonucleotide
gttgtggtagaagtacccaatagttagagagaagcaccagtttctctctctagacacca

SEQ ID NO: 445538 - DNA, 60 bp, Artificial
  Synthetic oligonucleotide
gttgtggtatgagattcaagacagagcaagtcaattcttcacgtagtgtagtattgttta

SEQ ID NO: 445539 - DNA, 60 bp, Artificial
  Synthetic oligonucleotide
gttgtggtcacgtcgtctcctgaacacggtcgcagagtgctggacttccttaataagtgc

SEQ ID NO: 445540 - DNA, 59 bp, Artificial
  Synthetic oligonucleotide
gttgtggtgctctgttatcttgaaatagagtggattttgaatctcccaggtaaacacgc

SEQ ID NO: 445541 - DNA, 53 bp, Artificial
  Synthetic oligonucleotide
gttgtggttccgccgcatatctaaattcagtacctgcatacaaaacgtcatgc

SEQ ID NO: 445542 - DNA, 55 bp, Artificial
  Synthetic oligonucleotide
gttgtggttgaaccgtatttgtacatggtatatcctcgttctggtgtatagcggg

SEQ ID NO: 445543 - DNA, 53 bp, Artificial
  Synthetic oligonucleotide
gttgtggttgaattggacttgtacttctatgtagtccatgttggtgttgtacc

SEQ ID NO: 445544 - DNA, 54 bp, Artificial
  Synthetic oligonucleotide
gttgtggttgtactttcaaaagtggtggtactgaggccatcataagttttgtca

SEQ ID NO: 445545 - DNA, 60 bp, Artificial
  Synthetic oligonucleotide
gttgtggtttgccctgatctggatgtggtacactctgctggacgtgtacgccggttcctc

SEQ ID NO: 445546 - DNA, 58 bp, Artificial
  Synthetic oligonucleotide
gttgtggttttcggcgtcatatggtttgaactttaagtgtatttggacagatcacaca

SEQ ID NO: 445547 - DNA, 54 bp, Artificial
  Synthetic oligonucleotide
gttgtgtacacgatagtacatagtgtttatccctccacttaaatcgaagggttt

SEQ ID NO: 445548 - DNA, 59 bp, Artificial
  Synthetic oligonucleotide
gttgtgtatcaaatatctcacgaacgctaccgacaagagatggtggtgttaataatacg

SEQ ID NO: 445549 - DNA, 54 bp, Artificial
  Synthetic oligonucleotide
gttgtgtcacaacagaatcaggcgacccagtcttgtctgaaattaaaatgccaa

SEQ ID NO: 445550 - DNA, 59 bp, Artificial
  Synthetic oligonucleotide
gttgtgtctaaggcatccacatttgtatcttttgaccttgattatgttggttgaataag

SEQ ID NO: 445551 - DNA, 55 bp, Artificial
  Synthetic oligonucleotide
gttgtgtctcgctgcaacgaagcgtcgctggctgccctggaaggtaactgtgttc

SEQ ID NO: 445552 - DNA, 60 bp, Artificial
  Synthetic oligonucleotide
gttgtgtctgttgcgtctgtggggtcacccactgcttgagtcccgtattgccgcaaaggc

SEQ ID NO: 445553 - DNA, 55 bp, Artificial
  Synthetic oligonucleotide
gttgtgtgaccctggtatctagagatccctcagacatttagtccgtgcggtacgg

SEQ ID NO: 445554 - DNA, 55 bp, Artificial
  Synthetic oligonucleotide
gttgtgtgactacataactatagaccatgaggttgcacaccaatcaaagaatccg

SEQ ID NO: 445555 - DNA, 55 bp, Artificial
  Synthetic oligonucleotide
gttgtgtggacctagtgacctggcccacattgtcttgcctgttctactatcgccc

SEQ ID NO: 445556 - DNA, 57 bp, Artificial
  Synthetic oligonucleotide
gttgtgtggatattacacccaatggtcagggtctttggaagtcacttttatgttcac

SEQ ID NO: 445557 - DNA, 60 bp, Artificial
  Synthetic oligonucleotide
gttgtgtggcaagtggacaggatgagagtcaggacatggaatagtttggtaaagcatcac

SEQ ID NO: 445558 - DNA, 57 bp, Artificial
  Synthetic oligonucleotide
gttgtgtggccgaccgacgggtttatccgcttctaaggagcacgcatggcacttccc

SEQ ID NO: 445559 - DNA, 60 bp, Artificial
  Synthetic oligonucleotide
gttgtgtgggatgttggtctgcaatcaacaatgtctatggttgtcccttgggttagtgct

SEQ ID NO: 445560 - DNA, 59 bp, Artificial
  Synthetic oligonucleotide
gttgtgtgggcctagcgatctagcccacattgtcttcccggttcgactatctccctcta

SEQ ID NO: 445561 - DNA, 55 bp, Artificial
  Synthetic oligonucleotide
gttgtgtggtcccagagatcgggcccatatcgtcttccctgtcctactatcgccc

SEQ ID NO: 445562 - DNA, 55 bp, Artificial
  Synthetic oligonucleotide
gttgtgtgttagccttgcttagggaaccatctagtgggataagtgggtactacac

SEQ ID NO: 445563 - DNA, 50 bp, Artificial
  Synthetic oligonucleotide
gttgtgttacaacgctttgttcacattggaccgttgacttatgagacatt

SEQ ID NO: 445564 - DNA, 56 bp, Artificial
  Synthetic oligonucleotide
gttgtgttactttaaagtggttgtatgccaaattgtctttgtttggaaggcatgga

SEQ ID NO: 445565 - DNA, 55 bp, Artificial
  Synthetic oligonucleotide
gttgtgttatgcaggttgaaggcgaccgataatgagatctaccctggtggtagga

SEQ ID NO: 445566 - DNA, 55 bp, Artificial
  Synthetic oligonucleotide
gttgtgttctatatatctatggataaaactttagaccagtactccgctctgactg

SEQ ID NO: 445567 - DNA, 58 bp, Artificial
  Synthetic oligonucleotide
gttgtgttctcccaagctcttccaacaacagatgttctacaagcaatataaggccacc

SEQ ID NO: 445568 - DNA, 56 bp, Artificial
  Synthetic oligonucleotide
gttgtgttggtagtgctgggacttaagctgtggggatgcattaggagataaattgt

SEQ ID NO: 445569 - DNA, 55 bp, Artificial
  Synthetic oligonucleotide
gttgtgtttctgatgtgaccaagggaactgggcttacccatcgtactggaaagcg

SEQ ID NO: 445570 - DNA, 55 bp, Artificial
  Synthetic oligonucleotide
gttgtgtttgcctatcatagttaattgtgtacccggtgctggtaagagtagttgc

SEQ ID NO: 445571 - DNA, 58 bp, Artificial
  Synthetic oligonucleotide
gttgttaaatgaagagcgcgagttatcggaaattacggacaggctcgatgctttaaga

SEQ ID NO: 445572 - DNA, 59 bp, Artificial
  Synthetic oligonucleotide
gttgttacaactagtttcattggcggtgggagcagtttcaagtgcaacatcatcttgtt

SEQ ID NO: 445573 - DNA, 60 bp, Artificial
  Synthetic oligonucleotide
gttgttacataagcaatccagttattgtattgacttgcttccaaatattcttgatatggt

SEQ ID NO: 445574 - DNA, 60 bp, Artificial
  Synthetic oligonucleotide
gttgttacgcatgttgaagcgaccgtgcagacgagttagtgcctcattagcagctacgat

SEQ ID NO: 445575 - DNA, 55 bp, Artificial
  Synthetic oligonucleotide
gttgttagacagtaccttaccttcgaactccaattggcaagacggcaggggttgc

SEQ ID NO: 445576 - DNA, 52 bp, Artificial
  Synthetic oligonucleotide
gttgttagggacgaagtaccgtgacggacgggtgtaccggtcaacggatgaa

SEQ ID NO: 445577 - DNA, 60 bp, Artificial
  Synthetic oligonucleotide
gttgttatgtctaatttgctcccagatttcgagaagattagtcaggatagagtccatgta

SEQ ID NO: 445578 - DNA, 59 bp, Artificial
  Synthetic oligonucleotide
gttgttatttctatctaacacaacgactagaagatacaatgcctagtatattgtgggaa

SEQ ID NO: 445579 - DNA, 60 bp, Artificial
  Synthetic oligonucleotide
gttgttcaaatatagtctagagagtagcactaaccttcggcactgagagcaaaacacaga

SEQ ID NO: 445580 - DNA, 60 bp, Artificial
  Synthetic oligonucleotide
gttgttcaagcattgaaatcgagacgctgacgatcgagatggtgcagcaaaccattggga

SEQ ID NO: 445581 - DNA, 55 bp, Artificial
  Synthetic oligonucleotide
gttgttcaagcgctaacgggtgtacaaaagggacaagcgcagactacagcggttc

SEQ ID NO: 445582 - DNA, 50 bp, Artificial
  Synthetic oligonucleotide
gttgttcacacctacaagattggagagtgtggtcatactcagttctacaa

SEQ ID NO: 445583 - DNA, 52 bp, Artificial
  Synthetic oligonucleotide
gttgttcagagtgaccagtcacaatctggccttaccttcgcatcaagaggta

SEQ ID NO: 445584 - DNA, 60 bp, Artificial
  Synthetic oligonucleotide
gttgttcagcaaacacgtgtagacaaactgacacagggcagacagacctatgactggact

SEQ ID NO: 445585 - DNA, 56 bp, Artificial
  Synthetic oligonucleotide
gttgttcagctacatagattaggtaatatgtataggacacatgacctgtgtagtta

SEQ ID NO: 445586 - DNA, 58 bp, Artificial
  Synthetic oligonucleotide
gttgttcaggcttatgctgatagttcttatcacgttgcggacgaaccgtaccttcgtg

SEQ ID NO: 445587 - DNA, 60 bp, Artificial
  Synthetic oligonucleotide
gttgttcatttctcaaagctctgtgataccagcttatgtctttgctataatgctttatcg

SEQ ID NO: 445588 - DNA, 52 bp, Artificial
  Synthetic oligonucleotide
gttgttcccaaagtgtccggcagtcaatttagggttttcaggctaaaattcc

SEQ ID NO: 445589 - DNA, 55 bp, Artificial
  Synthetic oligonucleotide
gttgttcccaccctagaggcccaagtggcggctagcactctggtattacggtacc

SEQ ID NO: 445590 - DNA, 59 bp, Artificial
  Synthetic oligonucleotide
gttgttccggtgggtgcaccttccacctgccaaattgctgtgctggcctctgttacaaa

SEQ ID NO: 445591 - DNA, 53 bp, Artificial
  Synthetic oligonucleotide
gttgttccgttatgtcctatggtagggatgtatttcccatcagacccaagagt

SEQ ID NO: 445592 - DNA, 58 bp, Artificial
  Synthetic oligonucleotide
gttgttcgttatgccaagacaagtgggcctattccatgaagtgttctcaagatgggag

SEQ ID NO: 445593 - DNA, 59 bp, Artificial
  Synthetic oligonucleotide
gttgttctattgggtttcattatgtgggcttgccaaaaaggcaacatcaggtgcaacat

SEQ ID NO: 445594 - DNA, 55 bp, Artificial
  Synthetic oligonucleotide
gttgttctctcccgcaaatttacatcatatccatggctgctaggctgtgctgcca

SEQ ID NO: 445595 - DNA, 60 bp, Artificial
  Synthetic oligonucleotide
gttgttcttccagccatatctgattgtccctgaaacgctactactccgcagcgtacacgt

SEQ ID NO: 445596 - DNA, 55 bp, Artificial
  Synthetic oligonucleotide
gttgttcttgtgtggttgtgagtgatccattaatatgtgactatgcattaaaggg

SEQ ID NO: 445597 - DNA, 55 bp, Artificial
  Synthetic oligonucleotide
gttgttgaacagagtactcatctcagtaactggaagaatgattccttagtaggca

SEQ ID NO: 445598 - DNA, 55 bp, Artificial
  Synthetic oligonucleotide
gttgttgaatgctgtcctcagtattagatgttgcttcatggaagattggtgggtc

SEQ ID NO: 445599 - DNA, 55 bp, Artificial
  Synthetic oligonucleotide
gttgttgagcgacaacttagtggcgacagacgtgtgtacgttcattcattaaccc

SEQ ID NO: 445600 - DNA, 53 bp, Artificial
  Synthetic oligonucleotide
gttgttgataacacactcatggtcatattagcattcaattacgcaatgttgtc

SEQ ID NO: 445601 - DNA, 55 bp, Artificial
  Synthetic oligonucleotide
gttgttgatgttgtgcatggtcaattagaaccaactaacgagcatggtcccagca

SEQ ID NO: 445602 - DNA, 55 bp, Artificial
  Synthetic oligonucleotide
gttgttgcccggattgttcttggcagccatcatgtacgcatacgtccaataccga

SEQ ID NO: 445603 - DNA, 60 bp, Artificial
  Synthetic oligonucleotide
gttgttgcgacgacacgcgcaatccaaggaggcctaaagctgaaggagataatagataaa

SEQ ID NO: 445604 - DNA, 55 bp, Artificial
  Synthetic oligonucleotide
gttgttgcgtcacgcatgatgatggaaaagctttctattctgagctcaagagtcc

SEQ ID NO: 445605 - DNA, 55 bp, Artificial
  Synthetic oligonucleotide
gttgttgggaatggactacagatgttagcgggctttacaggtgccaataacccac

SEQ ID NO: 445606 - DNA, 52 bp, Artificial
  Synthetic oligonucleotide
gttgttgggtttcacaacctcggagggaagggcgagaattactttacgccag

SEQ ID NO: 445607 - DNA, 55 bp, Artificial
  Synthetic oligonucleotide
gttgttggtctgcgtttaatgatgtagacagagaatcatgtaacggcgtttacgc

SEQ ID NO: 445608 - DNA, 55 bp, Artificial
  Synthetic oligonucleotide
gttgttggtcttcgtttaaggacgttgaccgtgaatcgtgtaacggcgtctatgc

SEQ ID NO: 445609 - DNA, 58 bp, Artificial
  Synthetic oligonucleotide
gttgttggtggttattaccctacagaggtgtggtacaactgctctagaacagctcgaa

SEQ ID NO: 445610 - DNA, 53 bp, Artificial
  Synthetic oligonucleotide
gttgttggttatggtgtatggccacattacttaagtgctgcagatgccactgc

SEQ ID NO: 445611 - DNA, 56 bp, Artificial
  Synthetic oligonucleotide
gttgttgtcattgatgggcaaccggtacccgaacaaagaagttccaaccacgtgca

SEQ ID NO: 445612 - DNA, 55 bp, Artificial
  Synthetic oligonucleotide
gttgttgttaaccaatgatagggcacttgacatcctctcagctagaagattgctc

SEQ ID NO: 445613 - DNA, 54 bp, Artificial
  Synthetic oligonucleotide
gttgttgttcttagacaagcttggcctgggtttaggaaaactgtttggctctgt

SEQ ID NO: 445614 - DNA, 55 bp, Artificial
  Synthetic oligonucleotide
gttgttgtttaaaacctacggcaggaaattgcacttgttggcccatcccttcatc

SEQ ID NO: 445615 - DNA, 55 bp, Artificial
  Synthetic oligonucleotide
gttgtttaacacttcggttacgtcaatcgagtgaagagatcccttgggatccgtg

SEQ ID NO: 445616 - DNA, 54 bp, Artificial
  Synthetic oligonucleotide
gttgtttaggcatattcggattatcaatatctttatcatctaaacccaccggaa

SEQ ID NO: 445617 - DNA, 55 bp, Artificial
  Synthetic oligonucleotide
gttgtttaggtatgtcgacgaacctttcttcgactgggtctacaactcgcctgag

SEQ ID NO: 445618 - DNA, 55 bp, Artificial
  Synthetic oligonucleotide
gttgtttataaccaccaggaagccgctaagtacgaaaatcatacggagaatgctc

SEQ ID NO: 445619 - DNA, 59 bp, Artificial
  Synthetic oligonucleotide
gttgtttatccgaatcaacatttttgtagatgcgtaaagtatggagataaatgcaatag

SEQ ID NO: 445620 - DNA, 60 bp, Artificial
  Synthetic oligonucleotide
gttgtttcgaaatcttccacaagtgtgatgacgactgtatggccagtataagaaacaaca

SEQ ID NO: 445621 - DNA, 54 bp, Artificial
  Synthetic oligonucleotide
gttgtttctaaattggctaaacacctgaagaaatttgccaagacagacccaccc

SEQ ID NO: 445622 - DNA, 60 bp, Artificial
  Synthetic oligonucleotide
gttgtttctgcttgtgtcaatttcacagattatgtggcccatgtgacccaacatacccag

SEQ ID NO: 445623 - DNA, 56 bp, Artificial
  Synthetic oligonucleotide
gttgtttgagaaaccagttttgatgcgtgttatcagggaagtatttcgtaatagtg

SEQ ID NO: 445624 - DNA, 55 bp, Artificial
  Synthetic oligonucleotide
gttgtttgcccacatttgtgttagtgtcccaatactatcacgagcgataacagcg

SEQ ID NO: 445625 - DNA, 57 bp, Artificial
  Synthetic oligonucleotide
gttgtttgccggttttcagggagcatattccggtgctcccaagcaaacactcaagaa

SEQ ID NO: 445626 - DNA, 60 bp, Artificial
  Synthetic oligonucleotide
gttgtttgcttttgattacacagggtatgatgcctccctcagtccagtgtggttcgctgc

SEQ ID NO: 445627 - DNA, 60 bp, Artificial
  Synthetic oligonucleotide
gttgtttggacttgatggtaatgtggcaacaaccagcgagaatactgaaaggcacactgc

SEQ ID NO: 445628 - DNA, 55 bp, Artificial
  Synthetic oligonucleotide
gttgtttgtgtaacaagcagtacatacgcgcgtgtggtcggtactgcgcgcgcgt

SEQ ID NO: 445629 - DNA, 55 bp, Artificial
  Synthetic oligonucleotide
gttgtttgttggtagtggtcataccagagcaccaattggcatcgcatacagaagg

SEQ ID NO: 445630 - DNA, 55 bp, Artificial
  Synthetic oligonucleotide
gttgttttaatggatagtgagcgccactatgaatatggttcgtattcaaactctc

SEQ ID NO: 445631 - DNA, 58 bp, Artificial
  Synthetic oligonucleotide
gttgttttcatagtcatcagtgagtcaacttccttgttcagatccctcaaactgatga

SEQ ID NO: 445632 - DNA, 55 bp, Artificial
  Synthetic oligonucleotide
gttgttttcgatgctaacaccaactgtcattacgcgtatgctacacgacgatctg

SEQ ID NO: 445633 - DNA, 54 bp, Artificial
  Synthetic oligonucleotide
gttgttttgaactttggccaccggatgtggtgttggtaccatactttgtcgtgg

SEQ ID NO: 445634 - DNA, 55 bp, Artificial
  Synthetic oligonucleotide
gttgtttttcaagacccagagacacacttcagactcccgttgcccttatgtccct

SEQ ID NO: 445635 - DNA, 45 bp, Artificial
  Synthetic oligonucleotide
gtttaaaaaataggagggaccgaaaacggttcaaccgaaaacggt

SEQ ID NO: 445636 - DNA, 51 bp, Artificial
  Synthetic oligonucleotide
gtttaaaaagcttctacgcctgaataggtgaccggaggccggcacctttct

SEQ ID NO: 445637 - DNA, 55 bp, Artificial
  Synthetic oligonucleotide
gtttaaaagatggcaactttgtttacccgtgctgttgtgtaacattggatgatgg

SEQ ID NO: 445638 - DNA, 60 bp, Artificial
  Synthetic oligonucleotide
gtttaaaagtaggcatgcttgtgagttaggatgcatattattagttatgaccttatctag

SEQ ID NO: 445639 - DNA, 55 bp, Artificial
  Synthetic oligonucleotide
gtttaaaatgtgatcacatgtatccctttgggctgacgccccttggcgcctaacc

SEQ ID NO: 445640 - DNA, 55 bp, Artificial
  Synthetic oligonucleotide
gtttaaacaagaagagacaagccctcaagccaaactagacaaaatgttggcagac

SEQ ID NO: 445641 - DNA, 53 bp, Artificial
  Synthetic oligonucleotide
gtttaaacacctaagagggaaccctgtgaccctctacggctaacctgaatgga

SEQ ID NO: 445642 - DNA, 60 bp, Artificial
  Synthetic oligonucleotide
gtttaaacactacattgccattccataatatcagtaaatatgcatttggaaactgcccca

SEQ ID NO: 445643 - DNA, 56 bp, Artificial
  Synthetic oligonucleotide
gtttaaacagtattcaaggcacgtagaagagttcgagctgtcttttatttttgagc

SEQ ID NO: 445644 - DNA, 60 bp, Artificial
  Synthetic oligonucleotide
gtttaaagacgccgtcccacgcgactataaattgtctcacaagtgcgattcattcatgga

SEQ ID NO: 445645 - DNA, 56 bp, Artificial
  Synthetic oligonucleotide
gtttaaagcctcggataatgctaagccactcgacatagtcgaaattattccggacg

SEQ ID NO: 445646 - DNA, 56 bp, Artificial
  Synthetic oligonucleotide
gtttaaaggtttcgaaatacgagctaatggactcaccggtaacgctctagatatca

SEQ ID NO: 445647 - DNA, 57 bp, Artificial
  Synthetic oligonucleotide
gtttaaatcaacgtatgattatttatatctgccatctgaagtgtcacgtgaagggac

SEQ ID NO: 445648 - DNA, 52 bp, Artificial
  Synthetic oligonucleotide
gtttaaatcgcgggcgtacgttactttgtcgtctaaacgatcggtgccgatt

SEQ ID NO: 445649 - DNA, 60 bp, Artificial
  Synthetic oligonucleotide
gtttaaatgagttgagagaagagttcaataacttatcacaagagatagctgtgtcacagt

SEQ ID NO: 445650 - DNA, 58 bp, Artificial
  Synthetic oligonucleotide
gtttaacaaggtggcggtgctaatttgtgaagcattgaattcaattaaagtcacgcaa

SEQ ID NO: 445651 - DNA, 51 bp, Artificial
  Synthetic oligonucleotide
gtttaacagaaggaagagtgcaactttctggaggtttccacggacggccgt

SEQ ID NO: 445652 - DNA, 55 bp, Artificial
  Synthetic oligonucleotide
gtttaacagaggttcctctactcgccgctcccttgttgggagcaggggtggctcc

SEQ ID NO: 445653 - DNA, 55 bp, Artificial
  Synthetic oligonucleotide
gtttaacaggaggcggtgcgggctctacatattttgttacaccaactatctcgag

SEQ ID NO: 445654 - DNA, 55 bp, Artificial
  Synthetic oligonucleotide
gtttaacagttgtgtcttaccagatgcagggctgtcaacttgttttgacagtctc

SEQ ID NO: 445655 - DNA, 59 bp, Artificial
  Synthetic oligonucleotide
gtttaacatgtacgacaacgagcccagtaccgctactgtgaagaacgatcttcgtgatc

SEQ ID NO: 445656 - DNA, 57 bp, Artificial
  Synthetic oligonucleotide
gtttaacccatctagtgcagcgtcaagttatgccgtttcgctcggagagatttcggt

SEQ ID NO: 445657 - DNA, 56 bp, Artificial
  Synthetic oligonucleotide
gtttaacccattaacatggcagctgagcgcatctatctcagcggttaatggttgct

SEQ ID NO: 445658 - DNA, 57 bp, Artificial
  Synthetic oligonucleotide
gtttaaccgctgtgtccagcggcattcccttattggaggtttgtggtactatcctga

SEQ ID NO: 445659 - DNA, 54 bp, Artificial
  Synthetic oligonucleotide
gtttaacgccgggattgaattcctacattaggcgaaatcaattccctccacttc

SEQ ID NO: 445660 - DNA, 53 bp, Artificial
  Synthetic oligonucleotide
gtttaacgtgttcgaaccttccgaactttgttgtgaggaaaggcatcatcctt

SEQ ID NO: 445661 - DNA, 55 bp, Artificial
  Synthetic oligonucleotide
gtttaactacagacaccaattcatttgaaatagtagctaatgcggagaaactggc

SEQ ID NO: 445662 - DNA, 55 bp, Artificial
  Synthetic oligonucleotide
gtttaagaaactgggcatgacagctacttctgctgacaagaatgtacctcagctg

SEQ ID NO: 445663 - DNA, 56 bp, Artificial
  Synthetic oligonucleotide
gtttaagaaggagaacataaaaacaactcatgaggcccaaggtgacacgtgggata

SEQ ID NO: 445664 - DNA, 54 bp, Artificial
  Synthetic oligonucleotide
gtttaagacacatcctccttaggtcgttaaggataagggtctttacatactcgc

SEQ ID NO: 445665 - DNA, 58 bp, Artificial
  Synthetic oligonucleotide
gtttaagacgggcattgtataataggagattaacagaacaggtagcagtcacggatcc

SEQ ID NO: 445666 - DNA, 55 bp, Artificial
  Synthetic oligonucleotide
gtttaagagctagattagctgacttagaagatttagtgaggaggaggctaggatt

SEQ ID NO: 445667 - DNA, 53 bp, Artificial
  Synthetic oligonucleotide
gtttaagatagtccacagctcccttctttttgagttctagtctttgttaagtt

SEQ ID NO: 445668 - DNA, 55 bp, Artificial
  Synthetic oligonucleotide
gtttaagccacttcttaccttcaacggcttgagttgccacaagtgcggtgacttc

SEQ ID NO: 445669 - DNA, 60 bp, Artificial
  Synthetic oligonucleotide
gtttaagccgcatatattgttgccacgggccggtgggtctgtgtactgcgcgccatcttc

SEQ ID NO: 445670 - DNA, 57 bp, Artificial
  Synthetic oligonucleotide
gtttaagccggctgttcctaatggaacaattgcgtccgagtccttgttgggacagca

SEQ ID NO: 445671 - DNA, 59 bp, Artificial
  Synthetic oligonucleotide
gtttaagctagagtatgagggataccgttgtggttaccatcatctcactatgtgtaggg

SEQ ID NO: 445672 - DNA, 60 bp, Artificial
  Synthetic oligonucleotide
gtttaaggaaagagtgaagtatgcagcatttgacttcttagacgctgttggttcagacgc

SEQ ID NO: 445673 - DNA, 54 bp, Artificial
  Synthetic oligonucleotide
gtttaaggagaagggatacgccttattcacacgttagtagaagagtatgttatt

SEQ ID NO: 445674 - DNA, 58 bp, Artificial
  Synthetic oligonucleotide
gtttaaggatattgaccgtgaatcatgtaacggtgtttatgcaaacataagcaagaac

SEQ ID NO: 445675 - DNA, 51 bp, Artificial
  Synthetic oligonucleotide
gtttaagggctaccaaaccctcagtttacactgctatgttgacacaggagc

SEQ ID NO: 445676 - DNA, 57 bp, Artificial
  Synthetic oligonucleotide
gtttaagtcacacgcgtccgcaactacggccggcgctatctttgttgaactcgacac

SEQ ID NO: 445677 - DNA, 56 bp, Artificial
  Synthetic oligonucleotide
gtttaagtggggcggtgattcgtcaaacttgtatcttacgaacgcgctcaaactgc

SEQ ID NO: 445678 - DNA, 53 bp, Artificial
  Synthetic oligonucleotide
gtttaagtgttgtcaacaagggggcacccccatttcttataggtatgggctcc

SEQ ID NO: 445679 - DNA, 52 bp, Artificial
  Synthetic oligonucleotide
gtttaagttttaatccttcgattactcttaaatatcgtcctctgttagggcg

SEQ ID NO: 445680 - DNA, 55 bp, Artificial
  Synthetic oligonucleotide
gtttaataacgtggccactcaacgatttgtgcgtggtttggttggagccgatggc

SEQ ID NO: 445681 - DNA, 56 bp, Artificial
  Synthetic oligonucleotide
gtttaatagcacttggaatggtattggagggttaaataacactgaaggagatacag

SEQ ID NO: 445682 - DNA, 55 bp, Artificial
  Synthetic oligonucleotide
gtttaatagcacttggttccctaacggcacgcaggagtcaaatagcacaagtgac

SEQ ID NO: 445683 - DNA, 55 bp, Artificial
  Synthetic oligonucleotide
gtttaataggacaaacccgtttaatagtacagattcaaacatcacaatcccatgc

SEQ ID NO: 445684 - DNA, 54 bp, Artificial
  Synthetic oligonucleotide
gtttaatagtactaatactacagagaatgccacacaaagaaacgaaaccctcac

SEQ ID NO: 445685 - DNA, 52 bp, Artificial
  Synthetic oligonucleotide
gtttaatagtacttggaacagtaacagtaccttaactttaactggtcctgaa

SEQ ID NO: 445686 - DNA, 60 bp, Artificial
  Synthetic oligonucleotide
gtttaatattagccattcgatattattgattgatagtcgtcaatctgacaacgaccatta

SEQ ID NO: 445687 - DNA, 55 bp, Artificial
  Synthetic oligonucleotide
gtttaatattgtaggatgtggacatttaacaatctgacacgtgggtggatcggac

SEQ ID NO: 445688 - DNA, 59 bp, Artificial
  Synthetic oligonucleotide
gtttaatctgttagaccaacgaataatatggcagaattggtatgcatttacgtcttcaa

SEQ ID NO: 445689 - DNA, 53 bp, Artificial
  Synthetic oligonucleotide
gtttaatgagacctacgggtctaatggtacaaaggcaaccatcacactcccat

SEQ ID NO: 445690 - DNA, 57 bp, Artificial
  Synthetic oligonucleotide
gtttaatgagtcataagtacgatcataactacttctcgaactttgatgacgcgtttg

SEQ ID NO: 445691 - DNA, 60 bp, Artificial
  Synthetic oligonucleotide
gtttaatggcacatacagtaatggcacatacagtccgggatataattcaagctcacactc

SEQ ID NO: 445692 - DNA, 60 bp, Artificial
  Synthetic oligonucleotide
gtttaatgtaaatacagagatgtggaaaagtatgtttaatctgcatgaacacattcttct

SEQ ID NO: 445693 - DNA, 55 bp, Artificial
  Synthetic oligonucleotide
gtttaatgtgacgaatcacggaatcaactctgtgatacccgccaccagtgtaatc

SEQ ID NO: 445694 - DNA, 56 bp, Artificial
  Synthetic oligonucleotide
gtttaattcaccatggcgttcgagtttggaatacttcagacggacaaaattagaga

SEQ ID NO: 445695 - DNA, 60 bp, Artificial
  Synthetic oligonucleotide
gtttaattcactatggcttctgagtttggaattttgtacactgatcagatctacgaacaa

SEQ ID NO: 445696 - DNA, 60 bp, Artificial
  Synthetic oligonucleotide
gtttaattgggccatgctcatcgtaatgttggactgggctctctgtaaccctacttgtga

SEQ ID NO: 445697 - DNA, 54 bp, Artificial
  Synthetic oligonucleotide
gtttaattggtggtattggacttggtgctaaaaacctaatagaagaacatgtac

SEQ ID NO: 445698 - DNA, 60 bp, Artificial
  Synthetic oligonucleotide
gtttaatttaagcatagcacataatattttttcaagtcaggagacgaagctctatcatgc

SEQ ID NO: 445699 - DNA, 53 bp, Artificial
  Synthetic oligonucleotide
gtttacaacacccattcgacagcatgcaagaaggcccgtgttcgtttcgtcta

SEQ ID NO: 445700 - DNA, 60 bp, Artificial
  Synthetic oligonucleotide
gtttacaacgacatctttcgatctgagtatctcgcaacactcttacagtggcaggtcaac

SEQ ID NO: 445701 - DNA, 60 bp, Artificial
  Synthetic oligonucleotide
gtttacaagatgagcactccaaggaacaatagtttgatgtcattgatggttggttggata

SEQ ID NO: 445702 - DNA, 58 bp, Artificial
  Synthetic oligonucleotide
gtttacaaggtggatgttgtagacgtgttgttcgagatagtggatgtggccgatgggt

SEQ ID NO: 445703 - DNA, 55 bp, Artificial
  Synthetic oligonucleotide
gtttacacacgccgtacatccaactgtctaaacgtgctttatcccatgagactat

SEQ ID NO: 445704 - DNA, 55 bp, Artificial
  Synthetic oligonucleotide
gtttacagatgactctccagacaaagaccaactgccttgctacagtgtggctaga

SEQ ID NO: 445705 - DNA, 60 bp, Artificial
  Synthetic oligonucleotide
gtttacagccgcgccactagatacattgttaggtgggaaagtctgtgtggatgacttcaa

SEQ ID NO: 445706 - DNA, 53 bp, Artificial
  Synthetic oligonucleotide
gtttacagccgttcccttccctgatttcacttcacttttcggtaccaccgcta

SEQ ID NO: 445707 - DNA, 50 bp, Artificial
  Synthetic oligonucleotide
gtttacattatatatcaaggatccagaccatatatctgcctgaaacttgt

SEQ ID NO: 445708 - DNA, 54 bp, Artificial
  Synthetic oligonucleotide
gtttacatttggtcacctggaataatcccggaacggaatcacactgtatgtgac

SEQ ID NO: 445709 - DNA, 60 bp, Artificial
  Synthetic oligonucleotide
gtttaccacatcagctatgttaacacctgcttcgctgaactcaatggctagtctctcgaa

SEQ ID NO: 445710 - DNA, 55 bp, Artificial
  Synthetic oligonucleotide
gtttaccatgctacctaagtgcaaagggtagagttcttttattggagccaactag

SEQ ID NO: 445711 - DNA, 52 bp, Artificial
  Synthetic oligonucleotide
gtttacccctcgagcaaccccccgtaattatccccgtcgtgtcagtgggcaa

SEQ ID NO: 445712 - DNA, 48 bp, Artificial
  Synthetic oligonucleotide
gtttaccggtcctactaccgtctccaccgtaccgttcgttagtacggt

SEQ ID NO: 445713 - DNA, 55 bp, Artificial
  Synthetic oligonucleotide
gtttacgaaaacactgtagacccattattcaaatcattagctgcatcagtaggtc

SEQ ID NO: 445714 - DNA, 55 bp, Artificial
  Synthetic oligonucleotide
gtttacgacgaccctgaagggagcgcaaaggttggcagctcttggagacaccgcc

SEQ ID NO: 445715 - DNA, 51 bp, Artificial
  Synthetic oligonucleotide
gtttacgaggaagtgacccgattcgcgttccgcgatatcgctcaagtcgcc

SEQ ID NO: 445716 - DNA, 50 bp, Artificial
  Synthetic oligonucleotide
gtttacgattcaagtttcaggtatgtctgcatacccttcccctagacccc

SEQ ID NO: 445717 - DNA, 50 bp, Artificial
  Synthetic oligonucleotide
gtttacggaggatatgatgtacccgccgcatttgaagcgtcgctaggcct

SEQ ID NO: 445718 - DNA, 52 bp, Artificial
  Synthetic oligonucleotide
gtttacgggccgtaggttttaggtacctcggtgcgtctgatctggtgttttg

SEQ ID NO: 445719 - DNA, 60 bp, Artificial
  Synthetic oligonucleotide
gtttacgggctcaaccagtcacgagtgtgggcaactctggtagcgcgatcacaactgatc

SEQ ID NO: 445720 - DNA, 59 bp, Artificial
  Synthetic oligonucleotide
gtttacgtcaattacgttcatccgtggacgttatgtgtaaggacagagtgtcaatcaca

SEQ ID NO: 445721 - DNA, 55 bp, Artificial
  Synthetic oligonucleotide
gtttacgtcccgtcggcgctgaatcctgcggacgacccttctcggaatcgcttgg

SEQ ID NO: 445722 - DNA, 60 bp, Artificial
  Synthetic oligonucleotide
gtttactaaggtggctatgttgatatgtgaagctctaaattcattgaaagtgacgcaagc

SEQ ID NO: 445723 - DNA, 53 bp, Artificial
  Synthetic oligonucleotide
gtttactaatttggggattacgggttcagttattatcatatcagggtttacta

SEQ ID NO: 445724 - DNA, 55 bp, Artificial
  Synthetic oligonucleotide
gtttactagcggaactactatgcccgctctgtgtgccatacattgtgtacggtcc

SEQ ID NO: 445725 - DNA, 59 bp, Artificial
  Synthetic oligonucleotide
gtttactagctaatacaaggtgtaaagtcaccatgtcacagctccgattactaacacca

SEQ ID NO: 445726 - DNA, 58 bp, Artificial
  Synthetic oligonucleotide
gtttactaggtacgacattacttaatcttgatgctaattatgttgaaactgctcgcac

SEQ ID NO: 445727 - DNA, 57 bp, Artificial
  Synthetic oligonucleotide
gtttactctggaaacgtctaatgtgatgactttgtttggattttattagtgcctcga

SEQ ID NO: 445728 - DNA, 60 bp, Artificial
  Synthetic oligonucleotide
gtttactgcgctatttgagcgtttccagagatgccttcgagaacgcattattcttcctgt

SEQ ID NO: 445729 - DNA, 46 bp, Artificial
  Synthetic oligonucleotide
gtttactggataacccggtttcccctcctttttaccggtttcctag

SEQ ID NO: 445730 - DNA, 53 bp, Artificial
  Synthetic oligonucleotide
gtttactggttccaccgattcaaaggcccgctacatggtggcgtacgtccccc

SEQ ID NO: 445731 - DNA, 55 bp, Artificial
  Synthetic oligonucleotide
gtttactgtcattaggtgcggcttgtgctagctcaggtgttgatatgcttagtgg

SEQ ID NO: 445732 - DNA, 59 bp, Artificial
  Synthetic oligonucleotide
gtttacttgctggtaagactaaggaagtcattgatgcaatctggaatgctgccccattc

SEQ ID NO: 445733 - DNA, 60 bp, Artificial
  Synthetic oligonucleotide
gtttagaaaggctggtttgatcaccatatccatccatgagaatcccatataaagatccga

SEQ ID NO: 445734 - DNA, 60 bp, Artificial
  Synthetic oligonucleotide
gtttagaaatgtcctgagcattgcacctataatgttctcgaataaaatggcaagactagg

SEQ ID NO: 445735 - DNA, 56 bp, Artificial
  Synthetic oligonucleotide
gtttagaagctcgtgagagttctcgtaatgcaaataccaacgtagacagctcacag

SEQ ID NO: 445736 - DNA, 58 bp, Artificial
  Synthetic oligonucleotide
gtttagaatgattgcatatggtgatgatgtaattgcatcctacccttggcctatagac

SEQ ID NO: 445737 - DNA, 51 bp, Artificial
  Synthetic oligonucleotide
gtttagaatgttcggggtcagagcttaggtagtgggctgtacctaactcac

SEQ ID NO: 445738 - DNA, 55 bp, Artificial
  Synthetic oligonucleotide
gtttagacgccgtcaggcgtcgaggcgtctttttgccgaaaagctacacgagaaa

SEQ ID NO: 445739 - DNA, 55 bp, Artificial
  Synthetic oligonucleotide
gtttagaggaaaggagctcacctggaaaggtggcaacaaattgccttgattgtgc

SEQ ID NO: 445740 - DNA, 60 bp, Artificial
  Synthetic oligonucleotide
gtttagatatgagtcacattttgttcatggtagagattctcttgttgacattttaaaaga

SEQ ID NO: 445741 - DNA, 58 bp, Artificial
  Synthetic oligonucleotide
gtttagatgaggggtttaatgaaaatcaggctttaagattcactattggcattctgac

SEQ ID NO: 445742 - DNA, 60 bp, Artificial
  Synthetic oligonucleotide
gtttagcaatttgaagactttgactgctaaattgatggcttagtcaattagcatctaaat

SEQ ID NO: 445743 - DNA, 56 bp, Artificial
  Synthetic oligonucleotide
gtttagccagcaccgtaaaatttcctctcaatcgacgtgaccttcggaatcttcgc

SEQ ID NO: 445744 - DNA, 60 bp, Artificial
  Synthetic oligonucleotide
gtttagccgaagattgctggctgtgcttacagtcaggagatcccgttcctcttgccctgc

SEQ ID NO: 445745 - DNA, 57 bp, Artificial
  Synthetic oligonucleotide
gtttagcctttgtgcggccagagtcgaacccttggttcctccagcacaacgctacta

SEQ ID NO: 445746 - DNA, 50 bp, Artificial
  Synthetic oligonucleotide
gtttagcgtgcctaaagaattgagggatgctttacgtgtcaagtacggcc

SEQ ID NO: 445747 - DNA, 57 bp, Artificial
  Synthetic oligonucleotide
gtttagctagatcagtaaataaactcttgtcttctcatacaaggaaaacctgagacg

SEQ ID NO: 445748 - DNA, 60 bp, Artificial
  Synthetic oligonucleotide
gtttagctatatgcaatatgcgttgactttgcacggtgccacgggcacgtgcagcattac

SEQ ID NO: 445749 - DNA, 60 bp, Artificial
  Synthetic oligonucleotide
gtttagctatgttcccatgcggaaagataacctgccctgactgtgtagcagatagtgagc

SEQ ID NO: 445750 - DNA, 59 bp, Artificial
  Synthetic oligonucleotide
gtttagctcaagctatagacggcctaaaggatctgattgaagggcgattgcccgtttgc

SEQ ID NO: 445751 - DNA, 55 bp, Artificial
  Synthetic oligonucleotide
gtttagctctgttactcagaatatgacgaatccaagttttaaccagaagcttgcg

SEQ ID NO: 445752 - DNA, 55 bp, Artificial
  Synthetic oligonucleotide
gtttaggaagaggtatggttacttttgtggtaggtacataattcaccacgacaga

SEQ ID NO: 445753 - DNA, 59 bp, Artificial
  Synthetic oligonucleotide
gtttaggaatgtattgagcattgctcccataatgttttcgaacaaaatggcaaggctag

SEQ ID NO: 445754 - DNA, 56 bp, Artificial
  Synthetic oligonucleotide
gtttaggaatgttttgagcattgcccctataatgttctcaaacaaaatggcaaggt

SEQ ID NO: 445755 - DNA, 52 bp, Artificial
  Synthetic oligonucleotide
gtttaggacagtatatctatagcacttatggagatacatgggaaggagtcga

SEQ ID NO: 445756 - DNA, 55 bp, Artificial
  Synthetic oligonucleotide
gtttagggaaacctggtagtcccgtgaattgacgcggaacagcttctcacgccgc

SEQ ID NO: 445757 - DNA, 56 bp, Artificial
  Synthetic oligonucleotide
gtttagggaaggaactcagaagcctccgggacctcgtgtctcagcagcggttagag

SEQ ID NO: 445758 - DNA, 60 bp, Artificial
  Synthetic oligonucleotide
gtttagggaataacattgtatttgatatccctcgtgataagaaggattatctgcaatata

SEQ ID NO: 445759 - DNA, 55 bp, Artificial
  Synthetic oligonucleotide
gtttagggacgtttgactcgctagaagaagctcggaaatgcatccagtcgcatca

SEQ ID NO: 445760 - DNA, 57 bp, Artificial
  Synthetic oligonucleotide
gtttagggcaacatatctatgaaacttatggggatacttggacaggagtggaagcct

SEQ ID NO: 445761 - DNA, 47 bp, Artificial
  Synthetic oligonucleotide
gtttagggtacgggtgtccccccccgcttcgggggggcttcctgaag

SEQ ID NO: 445762 - DNA, 54 bp, Artificial
  Synthetic oligonucleotide
gtttaggtagtggagtgaccgttcctataccgagggaacggccatttcgcttgc

SEQ ID NO: 445763 - DNA, 59 bp, Artificial
  Synthetic oligonucleotide
gtttagtaccacaaggtgctataatggaaattggaactggatctgtagtacatgtccca

SEQ ID NO: 445764 - DNA, 55 bp, Artificial
  Synthetic oligonucleotide
gtttagtccggattctcggacatttcaatcgctaaatcgtgcggtcaggaccggt

SEQ ID NO: 445765 - DNA, 57 bp, Artificial
  Synthetic oligonucleotide
gtttagtgtagttgtgaccgaacctcaacgaatggttgacatagcaccaggtccatt

SEQ ID NO: 445766 - DNA, 58 bp, Artificial
  Synthetic oligonucleotide
gtttagtgtgcatgcatttatagacttaatgaacagatattttgtgtagatgcgtggc

SEQ ID NO: 445767 - DNA, 60 bp, Artificial
  Synthetic oligonucleotide
gtttagttcaactgtgccagatgtgactgaaccctgttatggtatgactgttgttccacc

SEQ ID NO: 445768 - DNA, 55 bp, Artificial
  Synthetic oligonucleotide
gtttagttgtatgcgttaccacatagacaggaataccccgatgtgctttgcgggg

SEQ ID NO: 445769 - DNA, 60 bp, Artificial
  Synthetic oligonucleotide
gtttataaccagcaagaggctgggaaatatgagaatcattctgagaatgcgttgatgttg

SEQ ID NO: 445770 - DNA, 59 bp, Artificial
  Synthetic oligonucleotide
gtttataaccggtttacgcatagcaccattgctgaccggattttgacatggggcagctc

SEQ ID NO: 445771 - DNA, 55 bp, Artificial
  Synthetic oligonucleotide
gtttataattcatggcctctttaccgaacagtgcaccaatccatcttccgtggag

SEQ ID NO: 445772 - DNA, 54 bp, Artificial
  Synthetic oligonucleotide
gtttatacctataaggttcatggatcttccttttcattttaccctgacggtgta

SEQ ID NO: 445773 - DNA, 51 bp, Artificial
  Synthetic oligonucleotide
gtttatacgcttccgagagggaagggaaagcgccactttcggggacctacc

SEQ ID NO: 445774 - DNA, 60 bp, Artificial
  Synthetic oligonucleotide
gtttatatcgtaaaacgcaaattttcctcagcatgtgagactcttttgcgatatgaagac

SEQ ID NO: 445775 - DNA, 57 bp, Artificial
  Synthetic oligonucleotide
gtttatcaccgactttctcatacacataaacagaagtcaagtgagtaaacttgctag

SEQ ID NO: 445776 - DNA, 60 bp, Artificial
  Synthetic oligonucleotide
gtttatcacgccagacggagacggcatcagaacactgactgccggctgatcttgggcggg

SEQ ID NO: 445777 - DNA, 59 bp, Artificial
  Synthetic oligonucleotide
gtttatcatgtgaatctgccatggtgtaacgtattccaagctcagacaatgcattacgt

SEQ ID NO: 445778 - DNA, 56 bp, Artificial
  Synthetic oligonucleotide
gtttatcgcattttcttatcgccctcgaccccgcaacgtgacttaatttctcaaga

SEQ ID NO: 445779 - DNA, 59 bp, Artificial
  Synthetic oligonucleotide
gtttatcgggcagtctcgtacttacttcaagagcattggttaccagtgatgtaatttgc

SEQ ID NO: 445780 - DNA, 59 bp, Artificial
  Synthetic oligonucleotide
gtttatctcagattttccaaaaagggtcatttttttagagagcatgagtcactcactgc

SEQ ID NO: 445781 - DNA, 51 bp, Artificial
  Synthetic oligonucleotide
gtttatctcgaaataatctcgaagcaacaactggtcctacgagtgattatg

SEQ ID NO: 445782 - DNA, 55 bp, Artificial
  Synthetic oligonucleotide
gtttatcttaacgcttaagggccgcaggcccgtcaagatgaatgaacggtccaga

SEQ ID NO: 445783 - DNA, 58 bp, Artificial
  Synthetic oligonucleotide
gtttatgaacttctggactgtcagtaacgaagacctagacctgtgtagatacgtgagc

SEQ ID NO: 445784 - DNA, 50 bp, Artificial
  Synthetic oligonucleotide
gtttatgaaggacgctatatttttgaagttcctatttctacgcgtgattg

SEQ ID NO: 445785 - DNA, 60 bp, Artificial
  Synthetic oligonucleotide
gtttatgaccatcttactccactgcagcattgggcccactcgggcctacgagatcttgcg

SEQ ID NO: 445786 - DNA, 59 bp, Artificial
  Synthetic oligonucleotide
gtttatgacggcgagggccatgatctgtccatcagtcaaagtgacactcataaccccga

SEQ ID NO: 445787 - DNA, 57 bp, Artificial
  Synthetic oligonucleotide
gtttatgactggcttggtcattttgtcttatttactagtggcgaaagatgagtttaa

SEQ ID NO: 445788 - DNA, 60 bp, Artificial
  Synthetic oligonucleotide
gtttatgatatgtagctgtatctgggttgaaccctgatatgattagatagatgtgttttt

SEQ ID NO: 445789 - DNA, 60 bp, Artificial
  Synthetic oligonucleotide
gtttatgatcgacagtccgtaggacggagtatttgggtgtctgacatggaggaggctata

SEQ ID NO: 445790 - DNA, 55 bp, Artificial
  Synthetic oligonucleotide
gtttatgatgccgacgaactagcgaagataatgagggaaaggggtaacgatggtg

SEQ ID NO: 445791 - DNA, 50 bp, Artificial
  Synthetic oligonucleotide
gtttatgattatatcaatcaagcgcgtgacgcaaatgataaaacttttta

SEQ ID NO: 445792 - DNA, 57 bp, Artificial
  Synthetic oligonucleotide
gtttatgcaaacataagcaagaacgccctgttagtttattattgttggatgtcggac

SEQ ID NO: 445793 - DNA, 59 bp, Artificial
  Synthetic oligonucleotide
gtttatgcctatggcccctagcctatgtaaatacaacatgacgcgaaatttgaatctat

SEQ ID NO: 445794 - DNA, 57 bp, Artificial
  Synthetic oligonucleotide
gtttatggaggggaccttccaccagagccaattatacgcttgattttcggctcaatg

SEQ ID NO: 445795 - DNA, 55 bp, Artificial
  Synthetic oligonucleotide
gtttatggccccggagttgtatgctcctctcgactctgtgtgtctgcagatggag

SEQ ID NO: 445796 - DNA, 55 bp, Artificial
  Synthetic oligonucleotide
gtttatggggagaaattaacgccaatatggacttgtacacgtttgattatgcggg

SEQ ID NO: 445797 - DNA, 50 bp, Artificial
  Synthetic oligonucleotide
gtttatggtcacctactattacacatactaactgttggttgcgttctgtg

SEQ ID NO: 445798 - DNA, 52 bp, Artificial
  Synthetic oligonucleotide
gtttatgtccggcccaatcggctgggtgacgctcggtattggcgctctagtt

SEQ ID NO: 445799 - DNA, 54 bp, Artificial
  Synthetic oligonucleotide
gtttatgtcgcatagagccatcgacatcagtggtatctacatacccaagttgga

SEQ ID NO: 445800 - DNA, 55 bp, Artificial
  Synthetic oligonucleotide
gtttatgtctaaaatcatgggctttcgcttatcgcctatgcgtggtcgtggcctt

SEQ ID NO: 445801 - DNA, 59 bp, Artificial
  Synthetic oligonucleotide
gtttatgtgaggcaatgaacgctcacggaactacgattttgaaagggacgatgatgttc

SEQ ID NO: 445802 - DNA, 57 bp, Artificial
  Synthetic oligonucleotide
gtttatgttgtgcctactcctactttctgtaggggtaggcatctacctgctccccaa

SEQ ID NO: 445803 - DNA, 53 bp, Artificial
  Synthetic oligonucleotide
gtttatgtttaaatagtttaactccgtttacgtgctcacggttccgcctcagc

SEQ ID NO: 445804 - DNA, 50 bp, Artificial
  Synthetic oligonucleotide
gtttattaactcctagaggttctttaatgctacatcctaattacggttca

SEQ ID NO: 445805 - DNA, 60 bp, Artificial
  Synthetic oligonucleotide
gtttattacgcagtatatgacagaaaggctgagatgtactcacaaccctttctagagatt

SEQ ID NO: 445806 - DNA, 60 bp, Artificial
  Synthetic oligonucleotide
gtttattataagcacatgtaatcaataaagcttgctttgctctgcaattagtcttcatgg

SEQ ID NO: 445807 - DNA, 55 bp, Artificial
  Synthetic oligonucleotide
gtttattcatttcagaattgggtgttcgcatagcagaataggcattttgcaacgg

SEQ ID NO: 445808 - DNA, 60 bp, Artificial
  Synthetic oligonucleotide
gtttattccagttctttgtattcttagcgcttgcaggaagatcctgcacagaagaagcct

SEQ ID NO: 445809 - DNA, 55 bp, Artificial
  Synthetic oligonucleotide
gtttattcggaagatcagaagcgtcccagttgggcgttgtttgaccctccctgcg

SEQ ID NO: 445810 - DNA, 60 bp, Artificial
  Synthetic oligonucleotide
gtttattcgtattgggagcgcttctaaatataacacatgctgcgaataggataataattg

SEQ ID NO: 445811 - DNA, 52 bp, Artificial
  Synthetic oligonucleotide
gtttattgcagatgagcaaccaagataaacaaatggagctaatgagggccat

SEQ ID NO: 445812 - DNA, 58 bp, Artificial
  Synthetic oligonucleotide
gtttatttaaacgtgaatcttcatatgatgtccccatcatagaacgcatgttattgcc

SEQ ID NO: 445813 - DNA, 52 bp, Artificial
  Synthetic oligonucleotide
gtttatttacaagagcgtacggttcaacccctgcctcccgtgtaaaactcga

SEQ ID NO: 445814 - DNA, 52 bp, Artificial
  Synthetic oligonucleotide
gtttatttacaagagcgtacggttcaatccctgcctcccctgtaaaactccc

SEQ ID NO: 445815 - DNA, 57 bp, Artificial
  Synthetic oligonucleotide
gtttatttaggatggaaccttacgcaatattgtatgttacgcaggagatcgaatacc

SEQ ID NO: 445816 - DNA, 60 bp, Artificial
  Synthetic oligonucleotide
gtttatttcattgctatgatgtgttctgcaaaaaggattaagtgtcagggtgattccaaa

SEQ ID NO: 445817 - DNA, 53 bp, Artificial
  Synthetic oligonucleotide
gtttatttttccagaagccatgggtaaattcacttcgtttttgaagcgcgcgg

SEQ ID NO: 445818 - DNA, 55 bp, Artificial
  Synthetic oligonucleotide
gtttcaaaaaaggctaaaggatggttttatagacatcactatgacagcccccacc

SEQ ID NO: 445819 - DNA, 57 bp, Artificial
  Synthetic oligonucleotide
gtttcaaacactgagttgtacaacccccagacttatgcaaattttccatttgatgct

SEQ ID NO: 445820 - DNA, 58 bp, Artificial
  Synthetic oligonucleotide
gtttcaaagtcgaggtaggtcgagaactcgaattctgttcacacatcttcagaaatcc

SEQ ID NO: 445821 - DNA, 55 bp, Artificial
  Synthetic oligonucleotide
gtttcaaatagtgaataacaatttaacgttaaagagttcaatattcgatagtata

SEQ ID NO: 445822 - DNA, 59 bp, Artificial
  Synthetic oligonucleotide
gtttcaaatgggactgcattccaaagaactctaccgtcaagttcatttagatatatgcg

SEQ ID NO: 445823 - DNA, 57 bp, Artificial
  Synthetic oligonucleotide
gtttcaacggcatgtacaccctaaccactcccctcattggaccaagtgggacatcag

SEQ ID NO: 445824 - DNA, 55 bp, Artificial
  Synthetic oligonucleotide
gtttcaacgtgacgcgactatcacatgaggggactttccgccgtcatgactgacg

SEQ ID NO: 445825 - DNA, 55 bp, Artificial
  Synthetic oligonucleotide
gtttcaactctcgtgcttaccgctcttggtatgtacgcatcaaggtttaggccaa

SEQ ID NO: 445826 - DNA, 55 bp, Artificial
  Synthetic oligonucleotide
gtttcaacttaactgttacagatgagtacatacaaacgcgtatggataaggtcca

SEQ ID NO: 445827 - DNA, 59 bp, Artificial
  Synthetic oligonucleotide
gtttcaagagtagacgtggatcaaattacattcaagcacgtgtaaactcacgcacccca

SEQ ID NO: 445828 - DNA, 53 bp, Artificial
  Synthetic oligonucleotide
gtttcaagccccggtaaagccgcaaaagcagtgtgcacactgacagatgtgta

SEQ ID NO: 445829 - DNA, 50 bp, Artificial
  Synthetic oligonucleotide
gtttcaagggaggtgtgtcatcgcttcgtggtgaagaggagatgcacttt

SEQ ID NO: 445830 - DNA, 55 bp, Artificial
  Synthetic oligonucleotide
gtttcaagtaccgtgaatactatatcgacacaaacttctactattagcagacgtc

SEQ ID NO: 445831 - DNA, 55 bp, Artificial
  Synthetic oligonucleotide
gtttcaagttctccgtcgattccaggctacggtgactggcggtcagtatgcgtgc

SEQ ID NO: 445832 - DNA, 55 bp, Artificial
  Synthetic oligonucleotide
gtttcaatcattgtatacactacagagctacaacacaccgaggatggtgtgggtc

SEQ ID NO: 445833 - DNA, 55 bp, Artificial
  Synthetic oligonucleotide
gtttcaatttctattgaccgtaacgaaaatcaagtcgaaattaatggtaatgcta

SEQ ID NO: 445834 - DNA, 55 bp, Artificial
  Synthetic oligonucleotide
gtttcacagagatttcgcaccgactactgcaacgaccccggcgccgcatggccga

SEQ ID NO: 445835 - DNA, 59 bp, Artificial
  Synthetic oligonucleotide
gtttcacaggtgtaagtgcaggctacccaacaacgatcacgcgcatagggaagggcaaa

SEQ ID NO: 445836 - DNA, 52 bp, Artificial
  Synthetic oligonucleotide
gtttcaccccaagccctgttgtggtggggaccaccgatcgttccggtgtccc

SEQ ID NO: 445837 - DNA, 60 bp, Artificial
  Synthetic oligonucleotide
gtttcaccctaccgattttgtcatgcgtgagggtcttgctgcatacactctgagcccacg

SEQ ID NO: 445838 - DNA, 56 bp, Artificial
  Synthetic oligonucleotide
gtttcacgctatgcagtcgcaaataaacacacgagaatctttaagattcagggcac

SEQ ID NO: 445839 - DNA, 60 bp, Artificial
  Synthetic oligonucleotide
gtttcactacattcagctggagttacattgtcgacacaatttactgactttgtatcactg

SEQ ID NO: 445840 - DNA, 56 bp, Artificial
  Synthetic oligonucleotide
gtttcactggacacgactctacacccaggaaccaggataacgattttgtctaacga

SEQ ID NO: 445841 - DNA, 56 bp, Artificial
  Synthetic oligonucleotide
gtttcagaagtacccttggaggagcatttgttgtacacagggtgtgaagaattagt

SEQ ID NO: 445842 - DNA, 52 bp, Artificial
  Synthetic oligonucleotide
gtttcagaatgtcctcctattacgtacataacattgtttatggatgccattg

SEQ ID NO: 445843 - DNA, 59 bp, Artificial
  Synthetic oligonucleotide
gtttcagaattggggaattgaacctattgataatgtcatggggatgattggaatattac

SEQ ID NO: 445844 - DNA, 60 bp, Artificial
  Synthetic oligonucleotide
gtttcagacagagattcatgaagcgtgtggttacgagagcagaggcagaaagcggtgaag

SEQ ID NO: 445845 - DNA, 55 bp, Artificial
  Synthetic oligonucleotide
gtttcagaggaatcagagcgttctttattagagctaaaacgaaagtatgttaaaa

SEQ ID NO: 445846 - DNA, 60 bp, Artificial
  Synthetic oligonucleotide
gtttcagatcttcagatcctgatcttgactatatatcaggaataatcaccaagtgtgtga

SEQ ID NO: 445847 - DNA, 57 bp, Artificial
  Synthetic oligonucleotide
gtttcagatggagggccaaatctatacaatatccggaacctccacatcccggaagtc

SEQ ID NO: 445848 - DNA, 55 bp, Artificial
  Synthetic oligonucleotide
gtttcagcaatgacctttagtttcgatgtttttataccattgaatactaaagttg

SEQ ID NO: 445849 - DNA, 60 bp, Artificial
  Synthetic oligonucleotide
gtttcagcataaaatctctggaaacagtctgcattgtacccaaccatctgtcttagattg

SEQ ID NO: 445850 - DNA, 55 bp, Artificial
  Synthetic oligonucleotide
gtttcagcatctgaacagagtagtggggaattttgttttacacctacgggtatcg

SEQ ID NO: 445851 - DNA, 55 bp, Artificial
  Synthetic oligonucleotide
gtttcagccaatttacgtgcatgcttcacagttgttgacttgtggaagacattcc

SEQ ID NO: 445852 - DNA, 58 bp, Artificial
  Synthetic oligonucleotide
gtttcaggaaaagctaagggatggttttatagacatcactatgaaagtactcatccga

SEQ ID NO: 445853 - DNA, 56 bp, Artificial
  Synthetic oligonucleotide
gtttcaggaagaactcatccaaagggagaaaagatgattacaaggagattcggagg

SEQ ID NO: 445854 - DNA, 55 bp, Artificial
  Synthetic oligonucleotide
gtttcagggaggtcacattgaagagtgttcttgctaccccaatttgggtaaagtg

SEQ ID NO: 445855 - DNA, 58 bp, Artificial
  Synthetic oligonucleotide
gtttcagggcagctaatagagggtttatgttttaatcctgtcccggctcttgcactga

SEQ ID NO: 445856 - DNA, 51 bp, Artificial
  Synthetic oligonucleotide
gtttcagggtacgggtgcccctccgctttgcgggggtcctctaaaaggaga

SEQ ID NO: 445857 - DNA, 57 bp, Artificial
  Synthetic oligonucleotide
gtttcaggtaatgccactctcaagagcaaggagagggactaccgtggatttcccctg

SEQ ID NO: 445858 - DNA, 55 bp, Artificial
  Synthetic oligonucleotide
gtttcaggtacatcatcatcaaaccaggcgtattcttttcgaaactatatccgat

SEQ ID NO: 445859 - DNA, 58 bp, Artificial
  Synthetic oligonucleotide
gtttcagtcgtgtgatctgtccaaacctttggaagagtctgagaagtactataacgcg

SEQ ID NO: 445860 - DNA, 55 bp, Artificial
  Synthetic oligonucleotide
gtttcagtgaaattagcgggcagttcttctctctgccctgttagtgggtgggcta

SEQ ID NO: 445861 - DNA, 55 bp, Artificial
  Synthetic oligonucleotide
gtttcagtgagtacctaaactcatacatcttacatccgctactaacgagcaatca

SEQ ID NO: 445862 - DNA, 58 bp, Artificial
  Synthetic oligonucleotide
gtttcagttgtggaggggaattcttctactgtaatacaacacagctgtataatagtaa

SEQ ID NO: 445863 - DNA, 60 bp, Artificial
  Synthetic oligonucleotide
gtttcatacacagggacctggctgctcgcaactgccttgtgtctgagaagcaatatggga

SEQ ID NO: 445864 - DNA, 58 bp, Artificial
  Synthetic oligonucleotide
gtttcatagtcagaaatataatactaggttgaagcaggcctggtgttggttcggagga

SEQ ID NO: 445865 - DNA, 55 bp, Artificial
  Synthetic oligonucleotide
gtttcatgagtggttgcgggacgtttattcggagaagtgctgcaagaggttgtgc

SEQ ID NO: 445866 - DNA, 55 bp, Artificial
  Synthetic oligonucleotide
gtttcatgcttgttgttaaagctgaatgtttctctgttggacgagccatcagaac

SEQ ID NO: 445867 - DNA, 55 bp, Artificial
  Synthetic oligonucleotide
gtttcatgtaggaggccctaaactgaggtattttaatataccagattacaagcct

SEQ ID NO: 445868 - DNA, 56 bp, Artificial
  Synthetic oligonucleotide
gtttccaaaatattagacacggatgactttgttaaacggacggacatctactatca

SEQ ID NO: 445869 - DNA, 52 bp, Artificial
  Synthetic oligonucleotide
gtttccaactacagacactattcgtggtacaaaaccagatcctaatgcaggt

SEQ ID NO: 445870 - DNA, 50 bp, Artificial
  Synthetic oligonucleotide
gtttccaggaaactcttgggattcttcacatgggacatttcagactcatc

SEQ ID NO: 445871 - DNA, 58 bp, Artificial
  Synthetic oligonucleotide
gtttccaggggcaacaacatacttgtatacgtcgctagttacagtgaagtggatacac

SEQ ID NO: 445872 - DNA, 60 bp, Artificial
  Synthetic oligonucleotide
gtttccaggtctcattggattcgtctcgacgagatgaatccgatgataccaatttcaact

SEQ ID NO: 445873 - DNA, 60 bp, Artificial
  Synthetic oligonucleotide
gtttccaggtgatcaggagattccaggctacggtgaccggtggccaatatgcagcgaagg

SEQ ID NO: 445874 - DNA, 54 bp, Artificial
  Synthetic oligonucleotide
gtttccaggttgccccaaagacctgaaacgaccttgcgcctcatttgaactaac

SEQ ID NO: 445875 - DNA, 53 bp, Artificial
  Synthetic oligonucleotide
gtttccatgtgtaagtttggttccaaatggcttttacgacaccttatactccg

SEQ ID NO: 445876 - DNA, 52 bp, Artificial
  Synthetic oligonucleotide
gtttcccagggtttaccagtggagataaaacctgggtcttaccaattcctga

SEQ ID NO: 445877 - DNA, 60 bp, Artificial
  Synthetic oligonucleotide
gtttcccatgacgcattgtttatatgttccagccacgcataacatatgtgatacctacgg

SEQ ID NO: 445878 - DNA, 58 bp, Artificial
  Synthetic oligonucleotide
gtttcccccacgcactatgtgccggagagcgacgcagctgcccgcgttagtgccatac

SEQ ID NO: 445879 - DNA, 56 bp, Artificial
  Synthetic oligonucleotide
gtttccccggactgagtatcaatagactgcttgcgcggttgaaggagaaaacgttc

SEQ ID NO: 445880 - DNA, 53 bp, Artificial
  Synthetic oligonucleotide
gtttcccgccctcaggcgaagacgtcgtttaggctacccaacaaccagatttg

SEQ ID NO: 445881 - DNA, 58 bp, Artificial
  Synthetic oligonucleotide
gtttcccgtattcacacgagccatattgacgctaaagcagtctacgacacgtggtacg

SEQ ID NO: 445882 - DNA, 58 bp, Artificial
  Synthetic oligonucleotide
gtttccctgacacagagtactaaggtttccaccatgtcaagtagaaattgggtcatga

SEQ ID NO: 445883 - DNA, 60 bp, Artificial
  Synthetic oligonucleotide
gtttccctggacccattgctatcgccctcttctacaggccatctcctcagaacactgcaa

SEQ ID NO: 445884 - DNA, 53 bp, Artificial
  Synthetic oligonucleotide
gtttccgaaaactccctgttaaccgtcccattgattggaaagtctgtcaaaga

SEQ ID NO: 445885 - DNA, 57 bp, Artificial
  Synthetic oligonucleotide
gtttccgaggatgagaggtgaaatgacgacatttctgccataccctttgatgcaagt

SEQ ID NO: 445886 - DNA, 55 bp, Artificial
  Synthetic oligonucleotide
gtttccgatgtatttacttcgggaagcggggtcaatgatatcgggaatcttgcca

SEQ ID NO: 445887 - DNA, 55 bp, Artificial
  Synthetic oligonucleotide
gtttccggaagttagttatcgcttactctaactcagagctggcggtaaaagttgc

SEQ ID NO: 445888 - DNA, 54 bp, Artificial
  Synthetic oligonucleotide
gtttccggtcccttcgaatttggggattattgccctagtggatctcacaaacgc

SEQ ID NO: 445889 - DNA, 58 bp, Artificial
  Synthetic oligonucleotide
gtttccgttggaacatcaacactgaaccagagatcggtcccagaaatagctaccaggc

SEQ ID NO: 445890 - DNA, 54 bp, Artificial
  Synthetic oligonucleotide
gtttccgtttcacctatacttcctggtgaaacaatattaccatcgcggtaatac

SEQ ID NO: 445891 - DNA, 57 bp, Artificial
  Synthetic oligonucleotide
gtttccgttttgggtgtcatttaaagatacatctgattctgagccaagtggccttta

SEQ ID NO: 445892 - DNA, 56 bp, Artificial
  Synthetic oligonucleotide
gtttcctaggccacctgggcggaactcaacgcttattgtacagtgtgatttaccca

SEQ ID NO: 445893 - DNA, 54 bp, Artificial
  Synthetic oligonucleotide
gtttcctcaggccggtcggtagggacgtccagcgctggtattctgcccccaccc

SEQ ID NO: 445894 - DNA, 55 bp, Artificial
  Synthetic oligonucleotide
gtttcctcatgcagattgccattctagcaatgactgtaacattgcatttcgggca

SEQ ID NO: 445895 - DNA, 60 bp, Artificial
  Synthetic oligonucleotide
gtttcctctggagttgaatagtgctgataactcagtgagcattcatagaaattaccgcat

SEQ ID NO: 445896 - DNA, 55 bp, Artificial
  Synthetic oligonucleotide
gtttcctgaaacagtggaaatagtagccacttgtaggttggaaaacagctagctc

SEQ ID NO: 445897 - DNA, 54 bp, Artificial
  Synthetic oligonucleotide
gtttcctggtaactccgttaggttctctgatttcgacggttatactgttgctac

SEQ ID NO: 445898 - DNA, 53 bp, Artificial
  Synthetic oligonucleotide
gtttcctggtactctctcggacccctgtatccctgtcgttgacgtactccttg

SEQ ID NO: 445899 - DNA, 59 bp, Artificial
  Synthetic oligonucleotide
gtttcgaaaactgtgatgaaggggcgcacagacgtcgtgaaagaattgatactcaatcg

SEQ ID NO: 445900 - DNA, 57 bp, Artificial
  Synthetic oligonucleotide
gtttcgaatatttgaaccgaaacaattgcctatttatagagctaatggagaaagaga

SEQ ID NO: 445901 - DNA, 55 bp, Artificial
  Synthetic oligonucleotide
gtttcgaccacaattgaccgacaaagtttgcgatcccgtgattatccaggatgca

SEQ ID NO: 445902 - DNA, 59 bp, Artificial
  Synthetic oligonucleotide
gtttcgacctacgtgcggctgagagtatacgatataccatcgtgcaatattgggggacc

SEQ ID NO: 445903 - DNA, 55 bp, Artificial
  Synthetic oligonucleotide
gtttcgactatgtgctttctcatttccgtcatcctatcactgtaaatgctcaccg

SEQ ID NO: 445904 - DNA, 59 bp, Artificial
  Synthetic oligonucleotide
gtttcgagaagttatcactggccctgaaatccaggttcattgtgcctatcggaaagata

SEQ ID NO: 445905 - DNA, 50 bp, Artificial
  Synthetic oligonucleotide
gtttcgagcaatgcggagctctgggatgcggatgctttaacataaacccc

SEQ ID NO: 445906 - DNA, 60 bp, Artificial
  Synthetic oligonucleotide
gtttcgagcatgttcccaccatcaaccaagcaggcacctgccttcacagcagccgagaga

SEQ ID NO: 445907 - DNA, 57 bp, Artificial
  Synthetic oligonucleotide
gtttcgagccccgggaaagccgcgaaagcagtttgcacattgacggatgtgtacctc

SEQ ID NO: 445908 - DNA, 60 bp, Artificial
  Synthetic oligonucleotide
gtttcgagctataccataaatgtgatgaccagtgcatggagacaattcggaacgggacct

SEQ ID NO: 445909 - DNA, 55 bp, Artificial
  Synthetic oligonucleotide
gtttcgataaatcataaacacaggacttaccactcaaaaccttgtaactcgtcga

SEQ ID NO: 445910 - DNA, 56 bp, Artificial
  Synthetic oligonucleotide
gtttcgatgactgatacgaatggtaataaacatacgtttattataccaaccgtata

SEQ ID NO: 445911 - DNA, 57 bp, Artificial
  Synthetic oligonucleotide
gtttcgatgctggtatcatgaataaacactatacagtacatcagtttctgactgtac

SEQ ID NO: 445912 - DNA, 55 bp, Artificial
  Synthetic oligonucleotide
gtttcgattcactcgtggagaatgggcagagacagctagccatcagcgtgatcca

SEQ ID NO: 445913 - DNA, 55 bp, Artificial
  Synthetic oligonucleotide
gtttcgcacgttggaatttaattcgctttcgattctaagatgatgatgacgaagc

SEQ ID NO: 445914 - DNA, 52 bp, Artificial
  Synthetic oligonucleotide
gtttcgccctcagagctgcatataagcagccgctttctgcttgtactgggtc

SEQ ID NO: 445915 - DNA, 60 bp, Artificial
  Synthetic oligonucleotide
gtttcgccctttcactctccagtgttgagttcttcgcaagaagttctctgaagagcacat

SEQ ID NO: 445916 - DNA, 57 bp, Artificial
  Synthetic oligonucleotide
gtttcgcggggcggccaatgtgtcagtgttacactgatcagcttatcagcaggcgtg

SEQ ID NO: 445917 - DNA, 51 bp, Artificial
  Synthetic oligonucleotide
gtttcgcgttcatgtcgggagcatcctgtagatcagccagccgtaaaacgg

SEQ ID NO: 445918 - DNA, 59 bp, Artificial
  Synthetic oligonucleotide
gtttcggatgcatgttgaccaaatagaggacccgattgaccagctcttacaactctccc

SEQ ID NO: 445919 - DNA, 53 bp, Artificial
  Synthetic oligonucleotide
gtttcggatgcatgttgactaaatttgatacccgattgaccggctttgacact

SEQ ID NO: 445920 - DNA, 52 bp, Artificial
  Synthetic oligonucleotide
gtttcggcagttttaccggtaggaaccggtaaatcttccacaatagttctga

SEQ ID NO: 445921 - DNA, 60 bp, Artificial
  Synthetic oligonucleotide
gtttcgggcaaccatcaccaatgatgtgcctatgagtaggtattccaactatgtggagaa

SEQ ID NO: 445922 - DNA, 52 bp, Artificial
  Synthetic oligonucleotide
gtttcggtaatacggttgatagtattatagaccttggaggaaatttcgtttc

SEQ ID NO: 445923 - DNA, 52 bp, Artificial
  Synthetic oligonucleotide
gtttcggtacgccatgcccggtttgctagctgcatttgtgtcttagccatac

SEQ ID NO: 445924 - DNA, 57 bp, Artificial
  Synthetic oligonucleotide
gtttcgtaatttgacacctggcaacacaaatacgcgcgtctctcgttattcgagtag

SEQ ID NO: 445925 - DNA, 50 bp, Artificial
  Synthetic oligonucleotide
gtttcgtatcgcttctaggagggcttcgcgtggcgttgaaactctttccg

SEQ ID NO: 445926 - DNA, 58 bp, Artificial
  Synthetic oligonucleotide
gtttcgtcagttaaatcatccaactcgaataaatcatcgaataagagtaaatacgtca

SEQ ID NO: 445927 - DNA, 55 bp, Artificial
  Synthetic oligonucleotide
gtttcgtccatggcacaatgggacacttcatactggcaacgtgcccaccgggtga

SEQ ID NO: 445928 - DNA, 53 bp, Artificial
  Synthetic oligonucleotide
gtttcgtccggtactacacctccagctacaggaaacctagtgacgtttagtaa

SEQ ID NO: 445929 - DNA, 60 bp, Artificial
  Synthetic oligonucleotide
gtttcgttctatgcttgcaatcaagtatctacaggctgtagaaaatacgtattctccgga

SEQ ID NO: 445930 - DNA, 56 bp, Artificial
  Synthetic oligonucleotide
gtttcgttctttaactggtggatctttgatgttgagtatgtttggccctcctggga

SEQ ID NO: 445931 - DNA, 60 bp, Artificial
  Synthetic oligonucleotide
gtttcgttgaacactcctcatggacatgagtctgtcaacctctttattcaggtccctcaa

SEQ ID NO: 445932 - DNA, 50 bp, Artificial
  Synthetic oligonucleotide
gtttcgttttcgaacaaacaaacagcgaaccctaaaacaatgaccctaaa

SEQ ID NO: 445933 - DNA, 53 bp, Artificial
  Synthetic oligonucleotide
gtttctaaaaacttgatactcttcctcaatctgtaacttcacctcatgagccg

SEQ ID NO: 445934 - DNA, 60 bp, Artificial
  Synthetic oligonucleotide
gtttctaacacatttatgcaaggccttacagactgcggaaacccaccatccgcacatcaa

SEQ ID NO: 445935 - DNA, 59 bp, Artificial
  Synthetic oligonucleotide
gtttctaacatcccagattcttacaatgccatctctaggtggctccctacccagtggac

SEQ ID NO: 445936 - DNA, 59 bp, Artificial
  Synthetic oligonucleotide
gtttctaagaacctccatctgggaggttctgtagaacaatggctccagtgtgtggagga

SEQ ID NO: 445937 - DNA, 54 bp, Artificial
  Synthetic oligonucleotide
gtttctacagcctccaaaccctctaattccctatgcgccccaaacagctcggtt

SEQ ID NO: 445938 - DNA, 53 bp, Artificial
  Synthetic oligonucleotide
gtttctacatacgtcacgttctgaaacgtgttctgtccgtggagaaggatacg

SEQ ID NO: 445939 - DNA, 53 bp, Artificial
  Synthetic oligonucleotide
gtttctagacttaggtctttcttttgtgataagaacgacgcatatgaaagagc

SEQ ID NO: 445940 - DNA, 59 bp, Artificial
  Synthetic oligonucleotide
gtttctagaggaaacggaggatcgtctgacttcacttctggagagtctgacgaaggaca

SEQ ID NO: 445941 - DNA, 57 bp, Artificial
  Synthetic oligonucleotide
gtttctagcaactgctatagcccagttaagattaaaataatgtacgtgtggataacc

SEQ ID NO: 445942 - DNA, 55 bp, Artificial
  Synthetic oligonucleotide
gtttctaggtaatatgcttactgctaactgcccatccttgcgtaatagtaacccg

SEQ ID NO: 445943 - DNA, 55 bp, Artificial
  Synthetic oligonucleotide
gtttctaggtcatgaacattgggccagtgttacctcgggatcggatttttacgac

SEQ ID NO: 445944 - DNA, 60 bp, Artificial
  Synthetic oligonucleotide
gtttctatccgcttgacagcctgcgtaccgtgacgcctaagcgtgtcgcagacaacgggc

SEQ ID NO: 445945 - DNA, 57 bp, Artificial
  Synthetic oligonucleotide
gtttctattactgacctacgtggtagcggtgccttgcgtcagttatctgatactatc

SEQ ID NO: 445946 - DNA, 60 bp, Artificial
  Synthetic oligonucleotide
gtttctattgaatggacagacaattaatacatatcaagcacgatttggaactatcgtagc

SEQ ID NO: 445947 - DNA, 54 bp, Artificial
  Synthetic oligonucleotide
gtttctcaaataggaatttaattcgttatcgatttaagagtgggtatgacaaag

SEQ ID NO: 445948 - DNA, 60 bp, Artificial
  Synthetic oligonucleotide
gtttctcacagactttagacgagcggatacgatatgggtattagcattacagctaccagc

SEQ ID NO: 445949 - DNA, 57 bp, Artificial
  Synthetic oligonucleotide
gtttctcaccaccaaagttaaggagcaatggggagccttatcagttcttgaggcttg

SEQ ID NO: 445950 - DNA, 52 bp, Artificial
  Synthetic oligonucleotide
gtttctcaggggcgcgagtgatggcataaattacagtcgcatcttcagtcgt

SEQ ID NO: 445951 - DNA, 55 bp, Artificial
  Synthetic oligonucleotide
gtttctcctgagaaaccctaatgaagattttgtccgaagggcatgaaatccctag

SEQ ID NO: 445952 - DNA, 55 bp, Artificial
  Synthetic oligonucleotide
gtttctccttgaccgcagcacacatgtgcacacgaacacgaccgcctttgtcgtg

SEQ ID NO: 445953 - DNA, 55 bp, Artificial
  Synthetic oligonucleotide
gtttctcgagtgtccacaggacgcgtgtgagttgctgaactacgatagctggccc

SEQ ID NO: 445954 - DNA, 52 bp, Artificial
  Synthetic oligonucleotide
gtttctcggaatggttgaccgtacagggtactacctggaccaagcgggggtg

SEQ ID NO: 445955 - DNA, 58 bp, Artificial
  Synthetic oligonucleotide
gtttctcgtatgacacccgctgttttgactcgacggttactgagaatgacatccgtgt

SEQ ID NO: 445956 - DNA, 60 bp, Artificial
  Synthetic oligonucleotide
gtttctctctctagaattggtccggtgtctctcaactctctctatataattggtgtctgg

SEQ ID NO: 445957 - DNA, 55 bp, Artificial
  Synthetic oligonucleotide
gtttctgaatactacgcctcggcggctgcaatactcatggacagctgtgcttgtg

SEQ ID NO: 445958 - DNA, 53 bp, Artificial
  Synthetic oligonucleotide
gtttctgagacgttgttcgaaaataaaatagcgtatattttatttgccttaaa

SEQ ID NO: 445959 - DNA, 55 bp, Artificial
  Synthetic oligonucleotide
gtttctgatctcacgagaacattaacgcaaatttgctgcgagacagggataccta

SEQ ID NO: 445960 - DNA, 58 bp, Artificial
  Synthetic oligonucleotide
gtttctgcaatgtccgggaagaggcgactagctgagtactcaaagtaggacagttttg

SEQ ID NO: 445961 - DNA, 53 bp, Artificial
  Synthetic oligonucleotide
gtttctgcacaacaagtgtgcatatgttgattcggagggtgttccccaggggc

SEQ ID NO: 445962 - DNA, 56 bp, Artificial
  Synthetic oligonucleotide
gtttctgcacacagttgcgaaaggttaggcttgttgttacagaaaacctttgtgtg

SEQ ID NO: 445963 - DNA, 60 bp, Artificial
  Synthetic oligonucleotide
gtttctgcccctcgcaaaagacttgctagctccaatggctagacagttttatgataactc

SEQ ID NO: 445964 - DNA, 60 bp, Artificial
  Synthetic oligonucleotide
gtttctggaggagactctagcgtactaggcacgtattctaatgaattagctgtggaagct

SEQ ID NO: 445965 - DNA, 57 bp, Artificial
  Synthetic oligonucleotide
gtttctggcgacgattccctcctagactccaaacctccaatccgcgatgagtggacc

SEQ ID NO: 445966 - DNA, 57 bp, Artificial
  Synthetic oligonucleotide
gtttctgggacaaggtggtttgtgcaacggaacgctgctttgatttgctcaagaggt

SEQ ID NO: 445967 - DNA, 56 bp, Artificial
  Synthetic oligonucleotide
gtttctgtacctctgtaccatgctgtcgtcaataagtaaaaaaacgagaatataag

SEQ ID NO: 445968 - DNA, 60 bp, Artificial
  Synthetic oligonucleotide
gtttctgtctgatgtctgaaagttattagacctagtgtcaacagtacttggcagtggaca

SEQ ID NO: 445969 - DNA, 60 bp, Artificial
  Synthetic oligonucleotide
gtttctgttaatgatgggcacatcgttggaatacatggattaacatccaatgattcagag

SEQ ID NO: 445970 - DNA, 55 bp, Artificial
  Synthetic oligonucleotide
gtttctgttagcgccggtaaggactttgagtttcgcctaccagtggacgcgcgcc

SEQ ID NO: 445971 - DNA, 59 bp, Artificial
  Synthetic oligonucleotide
gtttcttcaagatcaggggatggactcgtattgtctgactttaaactccttgatgacac

SEQ ID NO: 445972 - DNA, 60 bp, Artificial
  Synthetic oligonucleotide
gtttcttcgtgaatcattagtcgcatgcgaattggctataataaacactatagtttatcc

SEQ ID NO: 445973 - DNA, 55 bp, Artificial
  Synthetic oligonucleotide
gtttcttcgtggtggccatctactcagcggagtggagtctcttacgccaaccacc

SEQ ID NO: 445974 - DNA, 55 bp, Artificial
  Synthetic oligonucleotide
gtttcttgctcgccaacagagtgcaggacgttcttccttacccaaggttccctac

SEQ ID NO: 445975 - DNA, 60 bp, Artificial
  Synthetic oligonucleotide
gtttcttgtgagtaatgatgcataccttttgggaagagaaaaggcattgagggaatcaca

SEQ ID NO: 445976 - DNA, 55 bp, Artificial
  Synthetic oligonucleotide
gtttcttttagcaggtttattgcttaacatcgaacaattcgtaaaagcaatcaaa

SEQ ID NO: 445977 - DNA, 50 bp, Artificial
  Synthetic oligonucleotide
gtttgaaacacctaacccagaacgtaagtacatagcaacgctagatagcg

SEQ ID NO: 445978 - DNA, 55 bp, Artificial
  Synthetic oligonucleotide
gtttgaaacgtgcagaacttacggcggttacacctgagattggaggacctgagtc

SEQ ID NO: 445979 - DNA, 60 bp, Artificial
  Synthetic oligonucleotide
gtttgaaagaagcatatcctattggattcatagggatagaagcatcacacaaatcatggc

SEQ ID NO: 445980 - DNA, 60 bp, Artificial
  Synthetic oligonucleotide
gtttgaaatgtttcccaagagcacttgggctggagtggacactagcagtggagtcacgaa

SEQ ID NO: 445981 - DNA, 57 bp, Artificial
  Synthetic oligonucleotide
gtttgaacataggactacacctgaaaccgagctgcaactgctctaactctccttctg

SEQ ID NO: 445982 - DNA, 60 bp, Artificial
  Synthetic oligonucleotide
gtttgaacctacgcatagaaatgagatgctcgagattgctccgctgattgagtctgttta

SEQ ID NO: 445983 - DNA, 59 bp, Artificial
  Synthetic oligonucleotide
gtttgaagaccactggtacactcagccagacttatgcaaagttcctcttgtaactttgc

SEQ ID NO: 445984 - DNA, 56 bp, Artificial
  Synthetic oligonucleotide
gtttgaaggctggccattgtgtaattttcgatgaggttcagttgtttccccctgga

SEQ ID NO: 445985 - DNA, 53 bp, Artificial
  Synthetic oligonucleotide
gtttgaatggcccacgtttggcgtggggtggccgaaggaagggactctagact

SEQ ID NO: 445986 - DNA, 60 bp, Artificial
  Synthetic oligonucleotide
gtttgacaacgagcctagcaccgctactgtgaagaatatgcatcgagatcgttaccaggt

SEQ ID NO: 445987 - DNA, 60 bp, Artificial
  Synthetic oligonucleotide
gtttgacaatagatatagggatgcaaaggctggacaaacattagcttgttttcaccacaa

SEQ ID NO: 445988 - DNA, 60 bp, Artificial
  Synthetic oligonucleotide
gtttgacagcaccctggcactgagacacatagccaaagagagacatccggagttctacca

SEQ ID NO: 445989 - DNA, 60 bp, Artificial
  Synthetic oligonucleotide
gtttgacagccacctagcatttcgccatgtagcccgagagctgcatccggagtactacga

SEQ ID NO: 445990 - DNA, 55 bp, Artificial
  Synthetic oligonucleotide
gtttgacagccgcctggcactaagacacttagcccaacagatgcatccggagttc

SEQ ID NO: 445991 - DNA, 55 bp, Artificial
  Synthetic oligonucleotide
gtttgacagctccctagcacgaagacacgtagcccgagagctgcacccggagttc

SEQ ID NO: 445992 - DNA, 55 bp, Artificial
  Synthetic oligonucleotide
gtttgacagtagcctggcacgtaaacacctagctcgagagaaacatccggagttt

SEQ ID NO: 445993 - DNA, 55 bp, Artificial
  Synthetic oligonucleotide
gtttgacagtcaactagcacacagacacttggcccgcgagctacatccggagtac

SEQ ID NO: 445994 - DNA, 60 bp, Artificial
  Synthetic oligonucleotide
gtttgacataccaacgtgtgagacacccattgacctgtattgctatgaacaattggacag

SEQ ID NO: 445995 - DNA, 55 bp, Artificial
  Synthetic oligonucleotide
gtttgacatgtcccacttgaacctgactatgcccaatgcatgctcagccaacaac

SEQ ID NO: 445996 - DNA, 60 bp, Artificial
  Synthetic oligonucleotide
gtttgacattaatgtcataaaatgtggctcatctttgcggatagtggacgaacctcaagt

SEQ ID NO: 445997 - DNA, 55 bp, Artificial
  Synthetic oligonucleotide
gtttgaccatttggttttgatttcgaatggcgttgggttacgaatacgatcgcag

SEQ ID NO: 445998 - DNA, 53 bp, Artificial
  Synthetic oligonucleotide
gtttgaccggaagtgtccccaattgaccaccctctctaaaactcagggaattg

SEQ ID NO: 445999 - DNA, 60 bp, Artificial
  Synthetic oligonucleotide
gtttgacctcaacaactacatgaatcgcttggataaggattccgctgaggacaagcaaac

SEQ ID NO: 446000 - DNA, 55 bp, Artificial
  Synthetic oligonucleotide
gtttgacgcgaataagggtgaatggtcattggatatggtgttctcagacgccggt

SEQ ID NO: 446001 - DNA, 52 bp, Artificial
  Synthetic oligonucleotide
gtttgacgttcctgaaaaaccgccagagcattatgaaggttgtcaaacaaag

SEQ ID NO: 446002 - DNA, 58 bp, Artificial
  Synthetic oligonucleotide
gtttgactgccagtctctctgggccccaatcagctctttccagtgctttaactttaaa

SEQ ID NO: 446003 - DNA, 58 bp, Artificial
  Synthetic oligonucleotide
gtttgacttccagtatcactacttctgctcgaaatttgtccttaatgtgaatggtcgt

SEQ ID NO: 446004 - DNA, 50 bp, Artificial
  Synthetic oligonucleotide
gtttgacttggtcaaaataagttagggactaaaagtgtaaataggtgggt

SEQ ID NO: 446005 - DNA, 55 bp, Artificial
  Synthetic oligonucleotide
gtttgagcaaaatgagattgtgtcgaaatctttgatgcgacattttctccgtgac

SEQ ID NO: 446006 - DNA, 60 bp, Artificial
  Synthetic oligonucleotide
gtttgaggatcggatacgtagtgtcagcgccggtcgtgcactatatatccctccttatga

SEQ ID NO: 446007 - DNA, 59 bp, Artificial
  Synthetic oligonucleotide
gtttgaggcgggagctgagttggcagtattgctacaaactgtctgaagtcactaaacgt

SEQ ID NO: 446008 - DNA, 55 bp, Artificial
  Synthetic oligonucleotide
gtttgagtgattatgttatgccccagcagaaagatgcccgtattggcatgtggta

SEQ ID NO: 446009 - DNA, 60 bp, Artificial
  Synthetic oligonucleotide
gtttgagtggtgtagtgactcaggcctcgcctcagtgactgagtccatctgaagctgggt

SEQ ID NO: 446010 - DNA, 60 bp, Artificial
  Synthetic oligonucleotide
gtttgataatgaacccagtacagctactatcaagcaggacctaagagatcgtctgcaggt

SEQ ID NO: 446011 - DNA, 60 bp, Artificial
  Synthetic oligonucleotide
gtttgataatgagcccagcactgcaacggttatgaacgacaagcgtgatcgatatcaggt

SEQ ID NO: 446012 - DNA, 60 bp, Artificial
  Synthetic oligonucleotide
gtttgataatgagcccagtacggcgactgtgaagaacgttcatcgtgacaggtatcaggt

SEQ ID NO: 446013 - DNA, 60 bp, Artificial
  Synthetic oligonucleotide
gtttgatccatccttgatagacaggctatgcaagtctaaacacatttttagaaacactta

SEQ ID NO: 446014 - DNA, 53 bp, Artificial
  Synthetic oligonucleotide
gtttgatcggaacgcggacaagggccacttgggcagaaaacatctatgcagca

SEQ ID NO: 446015 - DNA, 60 bp, Artificial
  Synthetic oligonucleotide
gtttgatgcagagaggtttgctgaattggttactgactcgccagtaatatcagcaattat

SEQ ID NO: 446016 - DNA, 55 bp, Artificial
  Synthetic oligonucleotide
gtttgattcaaggaacccagttccgtacccagaatgcaattatgacttgttcagg

SEQ ID NO: 446017 - DNA, 50 bp, Artificial
  Synthetic oligonucleotide
gtttgatttcaagacatattcatctgataaggcctatggagtgccggtat

SEQ ID NO: 446018 - DNA, 55 bp, Artificial
  Synthetic oligonucleotide
gtttgcaaacgtgtgctatctgtggagaaggatacgctgatggtagacgtggaag

SEQ ID NO: 446019 - DNA, 54 bp, Artificial
  Synthetic oligonucleotide
gtttgcaaactgttgacggaccttgacggggagttcgtttataatcagtccaaa

SEQ ID NO: 446020 - DNA, 55 bp, Artificial
  Synthetic oligonucleotide
gtttgcaagataacatgcataagtatcaccaactattggcaagtcagaattcgcc

SEQ ID NO: 446021 - DNA, 55 bp, Artificial
  Synthetic oligonucleotide
gtttgcaataggatatggatcaattctcatcgcaccagggcatctattctcacga

SEQ ID NO: 446022 - DNA, 55 bp, Artificial
  Synthetic oligonucleotide
gtttgcacacaaacgatggtagatagatatatacgtgcgccgacgcagtttacca

SEQ ID NO: 446023 - DNA, 53 bp, Artificial
  Synthetic oligonucleotide
gtttgcacgttcgccacgaccgtaccagccaccaccagtatttgcttggtcga

SEQ ID NO: 446024 - DNA, 57 bp, Artificial
  Synthetic oligonucleotide
gtttgcacttgtttattcagtgctttgcccccaattctgaagcgaaggctcccttag

SEQ ID NO: 446025 - DNA, 60 bp, Artificial
  Synthetic oligonucleotide
gtttgcagactagatggggactgggtaacatttagagaggtacttgcagcagcaaacagt

SEQ ID NO: 446026 - DNA, 59 bp, Artificial
  Synthetic oligonucleotide
gtttgcagcctacaccctaactccccggcccattatccatgctgttgctcccgactatc

SEQ ID NO: 446027 - DNA, 50 bp, Artificial
  Synthetic oligonucleotide
gtttgcaggacacttatagatatttgcagtcccaggctattacgtgtcag

SEQ ID NO: 446028 - DNA, 55 bp, Artificial
  Synthetic oligonucleotide
gtttgcaggaccttactggcaaaatccgtgttcaacagtctgtatgcatccccgc

SEQ ID NO: 446029 - DNA, 55 bp, Artificial
  Synthetic oligonucleotide
gtttgcaggttttggagttgggaaagtgcttcctctttagtaagagagcacttgg

SEQ ID NO: 446030 - DNA, 55 bp, Artificial
  Synthetic oligonucleotide
gtttgcataatgcgcaactacagccaatctatcaaatgctagtggcatgtcgtga

SEQ ID NO: 446031 - DNA, 60 bp, Artificial
  Synthetic oligonucleotide
gtttgcatacgtttgacgaaattttcggtgcaaggatccacagtcatggtaatctcagtg

SEQ ID NO: 446032 - DNA, 59 bp, Artificial
  Synthetic oligonucleotide
gtttgcatcaatggaacctgtacggtagtaatgacggatggaagtgcgtcaggaaaagc

SEQ ID NO: 446033 - DNA, 60 bp, Artificial
  Synthetic oligonucleotide
gtttgcatcaatggaacctgtgcagtagtaatgactgatggaagtgcatcaggaagggct

SEQ ID NO: 446034 - DNA, 60 bp, Artificial
  Synthetic oligonucleotide
gtttgcatcaatggaacttgcacagtggtaatgactgatggaagcgcatcaggaaaggct

SEQ ID NO: 446035 - DNA, 60 bp, Artificial
  Synthetic oligonucleotide
gtttgcatcaatgggacttgcacagtagtaatgactgatggaagcgcatcaggaagggca

SEQ ID NO: 446036 - DNA, 55 bp, Artificial
  Synthetic oligonucleotide
gtttgcatcgaactatttcgttcggtttttggtcgttgattctttttcagcgatg

SEQ ID NO: 446037 - DNA, 51 bp, Artificial
  Synthetic oligonucleotide
gtttgcatcttcgctgaccctatgccggtcaacaagactcaggtcacccaa

SEQ ID NO: 446038 - DNA, 60 bp, Artificial
  Synthetic oligonucleotide
gtttgcatgattggaacaaactttcaagagaagagtcttagagcaacagtttcagagtcc

SEQ ID NO: 446039 - DNA, 58 bp, Artificial
  Synthetic oligonucleotide
gtttgccaagcatagcacgtaagtaatggtcaaagcgaggtgtcaagtttgagtaaat

SEQ ID NO: 446040 - DNA, 55 bp, Artificial
  Synthetic oligonucleotide
gtttgccagaaggatttgagcttggggaggtgactattaatgaggcacttaatgg

SEQ ID NO: 446041 - DNA, 56 bp, Artificial
  Synthetic oligonucleotide
gtttgccattttaatcgaataattatcagcgcaccagatgactaaattatccgtcc

SEQ ID NO: 446042 - DNA, 60 bp, Artificial
  Synthetic oligonucleotide
gtttgcccagtctgagtgctggacaatcggtttgtgtccacaaaaccagcctacataata

SEQ ID NO: 446043 - DNA, 55 bp, Artificial
  Synthetic oligonucleotide
gtttgcccatgtaggtaagtgcccacccgttcatcggccttctacttaccctgct

SEQ ID NO: 446044 - DNA, 58 bp, Artificial
  Synthetic oligonucleotide
gtttgcccgaaagccaattaggatcactactgagttcgttaccgcatacgtggccaga

SEQ ID NO: 446045 - DNA, 54 bp, Artificial
  Synthetic oligonucleotide
gtttgccctgaacctatcaggtttggagtcctccgagcttagggtcgaaatggg

SEQ ID NO: 446046 - DNA, 60 bp, Artificial
  Synthetic oligonucleotide
gtttgccggtttatattacaccaggatctggacagttcatgactacagatgatttacaat

SEQ ID NO: 446047 - DNA, 55 bp, Artificial
  Synthetic oligonucleotide
gtttgccgtaactatgctgctacatcgctatatgatctaaattcacaagccggaa

SEQ ID NO: 446048 - DNA, 57 bp, Artificial
  Synthetic oligonucleotide
gtttgcctatgtatagttctttttcgagccttgtaaggaaagcagaacctgaatatc

SEQ ID NO: 446049 - DNA, 54 bp, Artificial
  Synthetic oligonucleotide
gtttgcctcaaagtggacccggcgcttcactaccgtaacgtagagctagaaccg

SEQ ID NO: 446050 - DNA, 57 bp, Artificial
  Synthetic oligonucleotide
gtttgcgaaaagagagcgcttcacgacgttattaaccaactacctgaggccgtgatg

SEQ ID NO: 446051 - DNA, 60 bp, Artificial
  Synthetic oligonucleotide
gtttgcgattcacggcgtaaatccgatgccagggccgctcacacgtgctattgcacgcgc

SEQ ID NO: 446052 - DNA, 59 bp, Artificial
  Synthetic oligonucleotide
gtttgcgattctagaatgtaagaataaggagttcaatggaacagggctatgcaacaatg

SEQ ID NO: 446053 - DNA, 57 bp, Artificial
  Synthetic oligonucleotide
gtttgcgccggtacacccttctccttctgtacgccatgcctgactgcccgtatatgg

SEQ ID NO: 446054 - DNA, 55 bp, Artificial
  Synthetic oligonucleotide
gtttgcgcctgcgtctgtactagttggctaactagatctgtatctggcggttccg

SEQ ID NO: 446055 - DNA, 60 bp, Artificial
  Synthetic oligonucleotide
gtttgcgctgcgtgatgcagtcacgatgtcccatctgcacattaacgacagactttttgg

SEQ ID NO: 446056 - DNA, 51 bp, Artificial
  Synthetic oligonucleotide
gtttgcgctggtcaacgtacgtttcggcactcgaaattgctcgggtcgaat

SEQ ID NO: 446057 - DNA, 51 bp, Artificial
  Synthetic oligonucleotide
gtttgcggctttgctttggctaggccgcgaacattgcattttgtgccaatg

SEQ ID NO: 446058 - DNA, 58 bp, Artificial
  Synthetic oligonucleotide
gtttgcgtttgtccaatggaatgcgctcctcaaagcttatttatggaatggtccccta

SEQ ID NO: 446059 - DNA, 55 bp, Artificial
  Synthetic oligonucleotide
gtttgctacgagtcttggtgtggacgactgagttactccgggtgttggtagtcgg

SEQ ID NO: 446060 - DNA, 54 bp, Artificial
  Synthetic oligonucleotide
gtttgctagagatctgtatagaaccgggtcttggttttacacacgtggtggttc

SEQ ID NO: 446061 - DNA, 60 bp, Artificial
  Synthetic oligonucleotide
gtttgctatactgcctcctgactgtgcaagagagtgtgaggtcctctttgatgacataag

SEQ ID NO: 446062 - DNA, 60 bp, Artificial
  Synthetic oligonucleotide
gtttgctccccacggcctagctggtgccctccgcttgtgtgaaactctcgattgtctaga

SEQ ID NO: 446063 - DNA, 53 bp, Artificial
  Synthetic oligonucleotide
gtttgctccccgcggcacgtttgtgtgttgctatctatcaacccggggggggt

SEQ ID NO: 446064 - DNA, 53 bp, Artificial
  Synthetic oligonucleotide
gtttgctcgctgtgaactcacctaagttcccacgtaccatcgtaccagtggga

SEQ ID NO: 446065 - DNA, 55 bp, Artificial
  Synthetic oligonucleotide
gtttgctgagactggtactgagcaagctagtcccaagaccgaaatcgtggctgcc

SEQ ID NO: 446066 - DNA, 58 bp, Artificial
  Synthetic oligonucleotide
gtttgctgagatcacgaagatctgttccaccattgaagagctcagacggcaaaaataa

SEQ ID NO: 446067 - DNA, 57 bp, Artificial
  Synthetic oligonucleotide
gtttgctgccaggcggacctgattgaagactgaaaaccgttagattcaaaattgaaa

SEQ ID NO: 446068 - DNA, 60 bp, Artificial
  Synthetic oligonucleotide
gtttgctggggcccctgataggtgtccaccaacatgcttgtttgtcggagggatggctga

SEQ ID NO: 446069 - DNA, 60 bp, Artificial
  Synthetic oligonucleotide
gtttgctgtaatcacacatggtaagggtcattatagaattgtaaagtattcatcagttgc

SEQ ID NO: 446070 - DNA, 55 bp, Artificial
  Synthetic oligonucleotide
gtttgctgttggatatggcacacactttacagcacttagtggtgctgacatgtcg

SEQ ID NO: 446071 - DNA, 60 bp, Artificial
  Synthetic oligonucleotide
gtttgcttgtgcacctgacagatgccctccaacatgcatttacatagcagggatggcaga

SEQ ID NO: 446072 - DNA, 60 bp, Artificial
  Synthetic oligonucleotide
gtttgctttcaacagatcgtttgaacctacgcatagaaatgacatgctcgagattgctcc

SEQ ID NO: 446073 - DNA, 60 bp, Artificial
  Synthetic oligonucleotide
gtttggaaatgctatgggattgagatattatacaacaagtaatacttgtcaaattgcagc

SEQ ID NO: 446074 - DNA, 55 bp, Artificial
  Synthetic oligonucleotide
gtttggaacccagaagagcaagattgggagaactgcatttgatcaggaatgggag

SEQ ID NO: 446075 - DNA, 55 bp, Artificial
  Synthetic oligonucleotide
gtttggacaaatacatgtcattcaattggtgtggaacgttagtccaaatgaacca

SEQ ID NO: 446076 - DNA, 55 bp, Artificial
  Synthetic oligonucleotide
gtttggacatcctagcttagaagcaataactgctgccgataaagtaaggacacat

SEQ ID NO: 446077 - DNA, 58 bp, Artificial
  Synthetic oligonucleotide
gtttggacctttattgcacaggaagatagtgggaattccacctttaatcatggctggc

SEQ ID NO: 446078 - DNA, 53 bp, Artificial
  Synthetic oligonucleotide
gtttggacgaatcgtcgctcggtcacggactagaccgaacggtgcgaatcgat

SEQ ID NO: 446079 - DNA, 52 bp, Artificial
  Synthetic oligonucleotide
gtttggactaagtcttacgttaatggtgaaggttacaccctttccattcttg

SEQ ID NO: 446080 - DNA, 55 bp, Artificial
  Synthetic oligonucleotide
gtttggactcaactcgtatgaaatagcatcgtagcttaagtttcaatgattgcag

SEQ ID NO: 446081 - DNA, 55 bp, Artificial
  Synthetic oligonucleotide
gtttggactgctgtcagcatactgacctaacttattgtagaggttgtaccatgta

SEQ ID NO: 446082 - DNA, 55 bp, Artificial
  Synthetic oligonucleotide
gtttggagaaggatagggacattttcaagcgcggcgggaaatgcacaggagacac

SEQ ID NO: 446083 - DNA, 50 bp, Artificial
  Synthetic oligonucleotide
gtttggagactaaaaggtttagaaattcaaagaggaggtcctttaggaat

SEQ ID NO: 446084 - DNA, 60 bp, Artificial
  Synthetic oligonucleotide
gtttggaggaattgcataatattcttaatgacaaatatgacgagaagaatgtgttgtcga

SEQ ID NO: 446085 - DNA, 60 bp, Artificial
  Synthetic oligonucleotide
gtttggaggcgctctagtccgcaatccactctcaaggaattccacacacgagatgtactg

SEQ ID NO: 446086 - DNA, 57 bp, Artificial
  Synthetic oligonucleotide
gtttggagggggacacaccctaacatgatcgaggtcagaaggaacgccctcgtgaga

SEQ ID NO: 446087 - DNA, 55 bp, Artificial
  Synthetic oligonucleotide
gtttggaggtggattggtacgcgtccccctttctcgtaactccaaccatgagatg

SEQ ID NO: 446088 - DNA, 55 bp, Artificial
  Synthetic oligonucleotide
gtttggattcagaaatttctaccagagactacttctctggataatgctttggccc

SEQ ID NO: 446089 - DNA, 55 bp, Artificial
  Synthetic oligonucleotide
gtttggattggacggaaatgtcagcacaatggaagaaaacacggagagacacaca

SEQ ID NO: 446090 - DNA, 55 bp, Artificial
  Synthetic oligonucleotide
gtttggatttgagagctctcatcatcaatcttggcggtttaccaagcagacactc

SEQ ID NO: 446091 - DNA, 55 bp, Artificial
  Synthetic oligonucleotide
gtttggcaacttgtacgctggcttccatgcaaatccaggcatcctaactgggtca

SEQ ID NO: 446092 - DNA, 60 bp, Artificial
  Synthetic oligonucleotide
gtttggcaaggcgatgctgtgctttgatagaggggggctgtgaaggtgatgaatagcgca

SEQ ID NO: 446093 - DNA, 54 bp, Artificial
  Synthetic oligonucleotide
gtttggccaactatgcccttgaggcaagttacggttacaggttaagcgaacacc

SEQ ID NO: 446094 - DNA, 60 bp, Artificial
  Synthetic oligonucleotide
gtttggccacattatctgacaccagaagatgcaactgctatagataagccctcacaccct

SEQ ID NO: 446095 - DNA, 59 bp, Artificial
  Synthetic oligonucleotide
gtttggccagaacctcaaaactgcctcataattgatactttgggcataagggatgatgg

SEQ ID NO: 446096 - DNA, 55 bp, Artificial
  Synthetic oligonucleotide
gtttggccaggcaggcaggaggatggcaattgcaaaggcttcgtcgaattccctg

SEQ ID NO: 446097 - DNA, 57 bp, Artificial
  Synthetic oligonucleotide
gtttggcgtggcaatgtccctattattcaagcagatttggtcccaattatttccgga

SEQ ID NO: 446098 - DNA, 55 bp, Artificial
  Synthetic oligonucleotide
gtttggctgcgttctcgctccatagttactctcctactgagctcaacagggtggc

SEQ ID NO: 446099 - DNA, 60 bp, Artificial
  Synthetic oligonucleotide
gtttggcttcatggcctaggacaacatatctatgagacttatggggatacctggacagga

SEQ ID NO: 446100 - DNA, 60 bp, Artificial
  Synthetic oligonucleotide
gtttgggaagaagcaagtcatcatagactgctggcattgttaggttgacaatgtttatgt

SEQ ID NO: 446101 - DNA, 55 bp, Artificial
  Synthetic oligonucleotide
gtttgggaatgactttgtcatcaccacaaacaccagacagtggttcgctcccatc

SEQ ID NO: 446102 - DNA, 60 bp, Artificial
  Synthetic oligonucleotide
gtttgggacctcatgccagcttgtaactatggattgtatggctatgcggttgccaaagat

SEQ ID NO: 446103 - DNA, 59 bp, Artificial
  Synthetic oligonucleotide
gtttgggactcatatacggtatggagtgcatgaccactccctgggcaatgttcggaggg

SEQ ID NO: 446104 - DNA, 60 bp, Artificial
  Synthetic oligonucleotide
gtttgggaggcaatggttggttaggactgtgcaacacgcttcaactgtgcaggagttgga

SEQ ID NO: 446105 - DNA, 55 bp, Artificial
  Synthetic oligonucleotide
gtttgggatgtgaatggcgactccacctacactttcaccatacccttctgctcgc

SEQ ID NO: 446106 - DNA, 59 bp, Artificial
  Synthetic oligonucleotide
gtttgggcagctagtgctgacacccctctgatggaatcaggatggtcagacacagctca

SEQ ID NO: 446107 - DNA, 60 bp, Artificial
  Synthetic oligonucleotide
gtttgggccatgggcgcttgagtggcaatgaattttctctcagtcgaaaaagcatcaacg

SEQ ID NO: 446108 - DNA, 58 bp, Artificial
  Synthetic oligonucleotide
gtttgggcctctacctccagggacagctggactacttttggggcgcagcagtgcgtct

SEQ ID NO: 446109 - DNA, 55 bp, Artificial
  Synthetic oligonucleotide
gtttgggcgctcatagtgtcaaagtgtttgcagaatctgtgtatgattcgtcggc

SEQ ID NO: 446110 - DNA, 57 bp, Artificial
  Synthetic oligonucleotide
gtttgggcggagccatttgacttggtcaattggtgacaatccaacttgccaaatgaa

SEQ ID NO: 446111 - DNA, 60 bp, Artificial
  Synthetic oligonucleotide
gtttgggctcgtctggagtgctggttgtggcgagcgtgtctagtcaattctatcctagac

SEQ ID NO: 446112 - DNA, 57 bp, Artificial
  Synthetic oligonucleotide
gtttggggaagtcttacgcccaaatgtggagcctgatgtacttccacagacgtgacc

SEQ ID NO: 446113 - DNA, 56 bp, Artificial
  Synthetic oligonucleotide
gtttgggtatcatggtagacttataaatgtagacggaaggagatattattgtcagc

SEQ ID NO: 446114 - DNA, 55 bp, Artificial
  Synthetic oligonucleotide
gtttgggtgccggtatagctagtgatctctattcatctaggtgcgcaggcgacga

SEQ ID NO: 446115 - DNA, 50 bp, Artificial
  Synthetic oligonucleotide
gtttggtaaagaacggatattgaagacaggtgtagaccgttatggataca

SEQ ID NO: 446116 - DNA, 51 bp, Artificial
  Synthetic oligonucleotide
gtttggtactagaactgttcctatcccattcggtggcgaaatccaacaatc

SEQ ID NO: 446117 - DNA, 60 bp, Artificial
  Synthetic oligonucleotide
gtttggtagaccaccgctagcaaaatacactctgtgtggggcgtgctagtggatagtcat

SEQ ID NO: 446118 - DNA, 55 bp, Artificial
  Synthetic oligonucleotide
gtttggtagtctcattgttaacccatctttaaatggctttctgtctaaggaacaa

SEQ ID NO: 446119 - DNA, 59 bp, Artificial
  Synthetic oligonucleotide
gtttggtatgacccaaccagcttgctcttcaggattcctgagatgagggctgagtggga

SEQ ID NO: 446120 - DNA, 54 bp, Artificial
  Synthetic oligonucleotide
gtttggtcaaaccaaaacccctgggtcaattgtgaggaatgaggatggaggttg

SEQ ID NO: 446121 - DNA, 55 bp, Artificial
  Synthetic oligonucleotide
gtttggtcaagtgtaacaggtgatacacaaggcgtatatgaaggtgggcgacgac

SEQ ID NO: 446122 - DNA, 56 bp, Artificial
  Synthetic oligonucleotide
gtttggtcggataaaaagggatatggatcacaaattgttggtcgaacagtttgaga

SEQ ID NO: 446123 - DNA, 60 bp, Artificial
  Synthetic oligonucleotide
gtttggtctgagctaaatattggaactggtacctccgcttacacatcactgaatgtgctg

SEQ ID NO: 446124 - DNA, 60 bp, Artificial
  Synthetic oligonucleotide
gtttggtgcaattgcaggattcatagaaggaggatggcctggtctgattaatggatggta

SEQ ID NO: 446125 - DNA, 55 bp, Artificial
  Synthetic oligonucleotide
gtttggtgcattgaaaatggaacctcaccaaacataaatggcgtctggaccatga

SEQ ID NO: 446126 - DNA, 59 bp, Artificial
  Synthetic oligonucleotide
gtttggtgctagaatccacagtcatggaaatctggcgataactcctgttcttaaggacc

SEQ ID NO: 446127 - DNA, 59 bp, Artificial
  Synthetic oligonucleotide
gtttggtggcccactcgtaaggtagagctttctgtatcatggagaggtactcttgcttg

SEQ ID NO: 446128 - DNA, 55 bp, Artificial
  Synthetic oligonucleotide
gtttggtgttaaattattcgaagacaggaggtcggctctacagaatggtaacaag

SEQ ID NO: 446129 - DNA, 60 bp, Artificial
  Synthetic oligonucleotide
gtttggttaacaataatgccgtgatatctgatgagaggctgaagtgctggctctgtaaaa

SEQ ID NO: 446130 - DNA, 57 bp, Artificial
  Synthetic oligonucleotide
gtttggttccggcgtgtggattgtgtccgaaaggtgcgaacttcgacagagtggata

SEQ ID NO: 446131 - DNA, 55 bp, Artificial
  Synthetic oligonucleotide
gtttgtaaacacgtcgcagttatagctatagaggtcgctcggaaacacttactca

SEQ ID NO: 446132 - DNA, 55 bp, Artificial
  Synthetic oligonucleotide
gtttgtaaaccacgccaggttaatatatctcttaatggtaacacttcagtgtgtg

SEQ ID NO: 446133 - DNA, 52 bp, Artificial
  Synthetic oligonucleotide
gtttgtaaatagtaagagtcgtttgtaaatagtaagagtcgtttgtaaatag

SEQ ID NO: 446134 - DNA, 50 bp, Artificial
  Synthetic oligonucleotide
gtttgtaaatgctagaagtcaattttggttatctccattagtagaatcta

SEQ ID NO: 446135 - DNA, 60 bp, Artificial
  Synthetic oligonucleotide
gtttgtaacacgtaatcccagctatgtcatgttcgacaatgaaacagcctattcgagtac

SEQ ID NO: 446136 - DNA, 55 bp, Artificial
  Synthetic oligonucleotide
gtttgtaatgctatccagacagcaactgagcaagaattcttaattagaggtgctg

SEQ ID NO: 446137 - DNA, 56 bp, Artificial
  Synthetic oligonucleotide
gtttgtaattgggaaagtgcctcttctttagtaagagagcatttgggataagtgag

SEQ ID NO: 446138 - DNA, 57 bp, Artificial
  Synthetic oligonucleotide
gtttgtacactgggaaaccagctacaagttgtgaactagaagtgtacaataagatcc

SEQ ID NO: 446139 - DNA, 55 bp, Artificial
  Synthetic oligonucleotide
gtttgtactgagtacatctattaaagtttataacaggctaggggcaacacctaga

SEQ ID NO: 446140 - DNA, 51 bp, Artificial
  Synthetic oligonucleotide
gtttgtaggtggcgtaagtattatatgcctagttatgtacctacaattact

SEQ ID NO: 446141 - DNA, 57 bp, Artificial
  Synthetic oligonucleotide
gtttgtatcaagttgaacctgaatcaggggaacacaatctgaagcttattttagtag

SEQ ID NO: 446142 - DNA, 52 bp, Artificial
  Synthetic oligonucleotide
gtttgtcaagggcattcaatgtgtgaacaatgtagtagggcctcgccatggg

SEQ ID NO: 446143 - DNA, 58 bp, Artificial
  Synthetic oligonucleotide
gtttgtcaccaagaccgacgggatctctcggagtttcatgagggactacggagcactc

SEQ ID NO: 446144 - DNA, 50 bp, Artificial
  Synthetic oligonucleotide
gtttgtcaccatgacagacttagtgcctggcatccttgaaaagcagcatg

SEQ ID NO: 446145 - DNA, 50 bp, Artificial
  Synthetic oligonucleotide
gtttgtcaccggcttaggggtaaaaacggagtggaagaacactaccggcg

SEQ ID NO: 446146 - DNA, 55 bp, Artificial
  Synthetic oligonucleotide
gtttgtcacggacgtccatcagaattcgtgtacccgtgtttcgttggggagactc

SEQ ID NO: 446147 - DNA, 55 bp, Artificial
  Synthetic oligonucleotide
gtttgtcagatactcttttagagggtcacgtgaaaatcgtgaggtggtgtttacc

SEQ ID NO: 446148 - DNA, 60 bp, Artificial
  Synthetic oligonucleotide
gtttgtccaggaagtctttataactagccccctctcctggattgcatagcacgattgatg

SEQ ID NO: 446149 - DNA, 56 bp, Artificial
  Synthetic oligonucleotide
gtttgtccagtcggctcacatgatttgtaccggtacttctttgtggtccgtcgacg

SEQ ID NO: 446150 - DNA, 60 bp, Artificial
  Synthetic oligonucleotide
gtttgtccatgttagtgcaatgggcatatgacaatgacataacagatgaaagtgtgctgg

SEQ ID NO: 446151 - DNA, 54 bp, Artificial
  Synthetic oligonucleotide
gtttgtcccatgaagagtgcggaagacccagagaggctagcaaactatgcccgg

SEQ ID NO: 446152 - DNA, 55 bp, Artificial
  Synthetic oligonucleotide
gtttgtccccacaaactttggcagtgtccttgaagggagccttaggactagaggc

SEQ ID NO: 446153 - DNA, 55 bp, Artificial
  Synthetic oligonucleotide
gtttgtccttagaaaattatttggagctgcgaatgacgcaaatggcacctacctg

SEQ ID NO: 446154 - DNA, 54 bp, Artificial
  Synthetic oligonucleotide
gtttgtcgttggtttcttcacggaaaacgttggtgcaacgcaatacgtgtacga

SEQ ID NO: 446155 - DNA, 59 bp, Artificial
  Synthetic oligonucleotide
gtttgtctagccagattttaaatgaggaaccctctcctggattgcagaggaagatagtg

SEQ ID NO: 446156 - DNA, 60 bp, Artificial
  Synthetic oligonucleotide
gtttgtctccgctgactgccttatccgcagaccgtactgtccgccatgttaatgtgtcta

SEQ ID NO: 446157 - DNA, 55 bp, Artificial
  Synthetic oligonucleotide
gtttgtctgatttgcggggctatgtttatcaaggcctaaagtcaggcaacatctc

SEQ ID NO: 446158 - DNA, 60 bp, Artificial
  Synthetic oligonucleotide
gtttgtctggcagccatggtctctaggtcggtcgcgcgtgtgtcggtgaccgtgaggtct

SEQ ID NO: 446159 - DNA, 57 bp, Artificial
  Synthetic oligonucleotide
gtttgtctggtcaaccaccgcggtctcagtggtgtacggtacaaacccatgagagcc

SEQ ID NO: 446160 - DNA, 55 bp, Artificial
  Synthetic oligonucleotide
gtttgtcttgttttcaagatctaacagctggcgcccggacagggacctgagggcg

SEQ ID NO: 446161 - DNA, 60 bp, Artificial
  Synthetic oligonucleotide
gtttgtgaatgaggaagctctgcgccaaatcctcagggaatcaggagggatcaacaagga

SEQ ID NO: 446162 - DNA, 60 bp, Artificial
  Synthetic oligonucleotide
gtttgtgagatttgtaagtatgagtgtgaaacattaaaggaattgaaggcacataatcta

SEQ ID NO: 446163 - DNA, 53 bp, Artificial
  Synthetic oligonucleotide
gtttgtgagctaatccgcggcgcgtacccaaagatccagacggcaagccgtgt

SEQ ID NO: 446164 - DNA, 55 bp, Artificial
  Synthetic oligonucleotide
gtttgtgaggattaacaacaattaacacagtgcgagctgtttcttagcacgaaga

SEQ ID NO: 446165 - DNA, 58 bp, Artificial
  Synthetic oligonucleotide
gtttgtgagttcaatatgttgcgccgttgaattgtacacgtcctcaacaacgttatac

SEQ ID NO: 446166 - DNA, 60 bp, Artificial
  Synthetic oligonucleotide
gtttgtgcaaatctgctgcggactaagtcccaactcccaatctgtatagcttgactgcct

SEQ ID NO: 446167 - DNA, 58 bp, Artificial
  Synthetic oligonucleotide
gtttgtgcatatgccattaagccccaggatagtaaaaacctggataaatgctgtagag

SEQ ID NO: 446168 - DNA, 52 bp, Artificial
  Synthetic oligonucleotide
gtttgtggacggagtacatcctttcagtgttcaactgatgagcatagggcga

SEQ ID NO: 446169 - DNA, 55 bp, Artificial
  Synthetic oligonucleotide
gtttgtggagaacacaagggatattgtgttcacatgggtcatggggtctatgcct

SEQ ID NO: 446170 - DNA, 55 bp, Artificial
  Synthetic oligonucleotide
gtttgtgggctctttcctgcacaaataatgcatagaaacatcataagtcctgtga

SEQ ID NO: 446171 - DNA, 52 bp, Artificial
  Synthetic oligonucleotide
gtttgtgggtatttatttactgtgtgtgcgctcgtacagctagtactgaccc

SEQ ID NO: 446172 - DNA, 60 bp, Artificial
  Synthetic oligonucleotide
gtttgtggtaaagctataagcttggtggatagaacatcaaatgttagatatagtgtagac

SEQ ID NO: 446173 - DNA, 60 bp, Artificial
  Synthetic oligonucleotide
gtttgtggtctcctgcctgatgaaagggctagttgacagtgtcagcaacagctttttccc

SEQ ID NO: 446174 - DNA, 60 bp, Artificial
  Synthetic oligonucleotide
gtttgtggtggaagccatggtacaccaggcaaacaccgatgtgtctagcgatgaggacga

SEQ ID NO: 446175 - DNA, 58 bp, Artificial
  Synthetic oligonucleotide
gtttgtgtaaaaactatgataggagcttggagtggcattttggtaataagtgatgttc

SEQ ID NO: 446176 - DNA, 60 bp, Artificial
  Synthetic oligonucleotide
gtttgtgtactttgtcgaaacgctggcgaggagcatctgtgagaaacttgaacaatctgg

SEQ ID NO: 446177 - DNA, 56 bp, Artificial
  Synthetic oligonucleotide
gtttgtgtatagttgtccctttggtatctccacttactaatcacaaaccataatag

SEQ ID NO: 446178 - DNA, 60 bp, Artificial
  Synthetic oligonucleotide
gtttgtgtcactggggatgataacaatgcgacagctagtttcatttatgatgggatgctt

SEQ ID NO: 446179 - DNA, 54 bp, Artificial
  Synthetic oligonucleotide
gtttgtgtccttgatttaggagaaaagacttattgcggtaaagtggttagagcg

SEQ ID NO: 446180 - DNA, 54 bp, Artificial
  Synthetic oligonucleotide
gtttgtgtcgctacaagggtaagtttgttcaagtaccaaccggaactcaggatc

SEQ ID NO: 446181 - DNA, 56 bp, Artificial
  Synthetic oligonucleotide
gtttgttaaatcaggggaatggatttcagggatattcagtggtaattggattgtac

SEQ ID NO: 446182 - DNA, 55 bp, Artificial
  Synthetic oligonucleotide
gtttgttaattctgtaatggaaaatctacctcagattatagatacgggtattcag

SEQ ID NO: 446183 - DNA, 57 bp, Artificial
  Synthetic oligonucleotide
gtttgttacaccctatgagccaacatgggatagatgacccggagaaagaagtattag

SEQ ID NO: 446184 - DNA, 55 bp, Artificial
  Synthetic oligonucleotide
gtttgttataaatttcgttcgcaattctacgaccgtccgcactagattgtacgta

SEQ ID NO: 446185 - DNA, 57 bp, Artificial
  Synthetic oligonucleotide
gtttgttcaaactacgagaagtaaagcgcatctgtgacttaaacgtgatcaactttc

SEQ ID NO: 446186 - DNA, 60 bp, Artificial
  Synthetic oligonucleotide
gtttgttccaaatactctctcgagtgtctggaagaacatgcgaaaatcactgatggaatg

SEQ ID NO: 446187 - DNA, 55 bp, Artificial
  Synthetic oligonucleotide
gtttgttcgtcggttgtttgacgtattagagcgttaagctcagctagtaccgtta

SEQ ID NO: 446188 - DNA, 58 bp, Artificial
  Synthetic oligonucleotide
gtttgttgatccacgggacccctggcacaggtaaatcagttgctacaggcctcattgg

SEQ ID NO: 446189 - DNA, 54 bp, Artificial
  Synthetic oligonucleotide
gtttgttgcaactggactttcaaaatcccagggtttatgggcaggaagttaaca

SEQ ID NO: 446190 - DNA, 55 bp, Artificial
  Synthetic oligonucleotide
gtttgtttaagcctcaaatggacacagaaaatctgaaagcaatggttagctactg

SEQ ID NO: 446191 - DNA, 59 bp, Artificial
  Synthetic oligonucleotide
gtttgtttatcttaagtcgataaacgcttactgctcgctcagcgatattacggcctatc

SEQ ID NO: 446192 - DNA, 55 bp, Artificial
  Synthetic oligonucleotide
gtttgtttccaacatgctgtactttgtaggttcgccccttacatgcgttacatcg

SEQ ID NO: 446193 - DNA, 56 bp, Artificial
  Synthetic oligonucleotide
gtttgtttgtgcacactgttctaaagagtgtcaaacctgaggctataagggttttc

SEQ ID NO: 446194 - DNA, 56 bp, Artificial
  Synthetic oligonucleotide
gttttaaagcacaatggaggacttgttcaacgccttaccacaaccactacagcaac

SEQ ID NO: 446195 - DNA, 52 bp, Artificial
  Synthetic oligonucleotide
gttttaacgactacgtgagcgggccggggagatttaaagccgtcttagagtc

SEQ ID NO: 446196 - DNA, 60 bp, Artificial
  Synthetic oligonucleotide
gttttaagcgtattatgagcactactctgaagaatccctcagcttttcgcagccaaccat

SEQ ID NO: 446197 - DNA, 56 bp, Artificial
  Synthetic oligonucleotide
gttttaagcttaatgattacagagagtggaattgaggtaacgcaaaaccgatggga

SEQ ID NO: 446198 - DNA, 60 bp, Artificial
  Synthetic oligonucleotide
gttttaaggcaattgcccagcaagacttagatagtaatcggttccagttggcacatgcat

SEQ ID NO: 446199 - DNA, 58 bp, Artificial
  Synthetic oligonucleotide
gttttaatatatgcaaatcagatttgttatgtactgaacgttcaactggaaataagtc

SEQ ID NO: 446200 - DNA, 53 bp, Artificial
  Synthetic oligonucleotide
gttttaatgatgcaatatttgacctatctgaaatggtacaatgggcatatgac

SEQ ID NO: 446201 - DNA, 53 bp, Artificial
  Synthetic oligonucleotide
gttttaattaaccaagagaactgaataaatttgagatttatctcgtttattcg

SEQ ID NO: 446202 - DNA, 53 bp, Artificial
  Synthetic oligonucleotide
gttttaattggtagttattgggctgaggttaagcaattaagttcgtttaatga

SEQ ID NO: 446203 - DNA, 54 bp, Artificial
  Synthetic oligonucleotide
gttttacaaagactgctgacatccggagttacaagggactttccgctggggact

SEQ ID NO: 446204 - DNA, 60 bp, Artificial
  Synthetic oligonucleotide
gttttacaatccattatatatgattggtttgacattagatacatgaggcacacaccaatg

SEQ ID NO: 446205 - DNA, 55 bp, Artificial
  Synthetic oligonucleotide
gttttacattgacggcgaggtacgagatgaggcttttatgtggccatagcacagg

SEQ ID NO: 446206 - DNA, 57 bp, Artificial
  Synthetic oligonucleotide
gttttaccaaccaggaatctgaccgcgtgccagtaggattccactctcttgttagta

SEQ ID NO: 446207 - DNA, 59 bp, Artificial
  Synthetic oligonucleotide
gttttaccaaccaggaatctgaccgcgtgccagtaggattccactgtgtgtgtcgtaga

SEQ ID NO: 446208 - DNA, 55 bp, Artificial
  Synthetic oligonucleotide
gttttaccagtacgactctctccctctatgacaatacttttgggtctccaaggcc

SEQ ID NO: 446209 - DNA, 57 bp, Artificial
  Synthetic oligonucleotide
gttttacgactgtttgactgataaggactgacgctacactattttggagatcgggaa

SEQ ID NO: 446210 - DNA, 53 bp, Artificial
  Synthetic oligonucleotide
gttttacggtgaaaagggtgtctggaatggttctttgaaagcagaacttaggc

SEQ ID NO: 446211 - DNA, 54 bp, Artificial
  Synthetic oligonucleotide
gttttacgtatacggaaacatgccaaagcggaattacgataccgccttctctac

SEQ ID NO: 446212 - DNA, 55 bp, Artificial
  Synthetic oligonucleotide
gttttacgtcatgaccgtggggtcaaagtcattgttggtccacagggaatggttc

SEQ ID NO: 446213 - DNA, 55 bp, Artificial
  Synthetic oligonucleotide
gttttactacaccctggagtgccaaaataccagggcacagattccgtgttccgtg

SEQ ID NO: 446214 - DNA, 59 bp, Artificial
  Synthetic oligonucleotide
gttttactcgcgatggtcgaacaagttactcttgcggttctgcagactttgagtgtctc

SEQ ID NO: 446215 - DNA, 55 bp, Artificial
  Synthetic oligonucleotide
gttttagaatctttccgtccttcaaacagctcaaacaaagagctagtgcctgcag

SEQ ID NO: 446216 - DNA, 55 bp, Artificial
  Synthetic oligonucleotide
gttttagacaccaggctggtagacggggcatcaaggatatctaggaccctcatgg

SEQ ID NO: 446217 - DNA, 59 bp, Artificial
  Synthetic oligonucleotide
gttttagagcacgtgggtggtccctctattacgtggcgcactctggagtctcgctcgaa

SEQ ID NO: 446218 - DNA, 57 bp, Artificial
  Synthetic oligonucleotide
gttttagatacgcttagatatattactgagtgtgaagttgatacgttaaggtcggtg

SEQ ID NO: 446219 - DNA, 60 bp, Artificial
  Synthetic oligonucleotide
gttttaggatcgaatgcaagcgaacgatggaacgtatgaccaatcagcaacttaccaggc

SEQ ID NO: 446220 - DNA, 55 bp, Artificial
  Synthetic oligonucleotide
gttttaggccttccgaactacaaaaaccgccatatttgtgacgtcacagccgcca

SEQ ID NO: 446221 - DNA, 58 bp, Artificial
  Synthetic oligonucleotide
gttttaggtgtatgctagcgattaagtatttacagttagtagagaatacatactctcc

SEQ ID NO: 446222 - DNA, 54 bp, Artificial
  Synthetic oligonucleotide
gttttagtaatggttactgttgtgggtatgtaaaatggcgtctgaacgtcttcc

SEQ ID NO: 446223 - DNA, 52 bp, Artificial
  Synthetic oligonucleotide
gttttagtgatattgcttgttcgtcttttaatggtttggaagaagtatcgtg

SEQ ID NO: 446224 - DNA, 52 bp, Artificial
  Synthetic oligonucleotide
gttttagttgccatggctgttgtggggcatcgactgaccaggactcgttcaa

SEQ ID NO: 446225 - DNA, 57 bp, Artificial
  Synthetic oligonucleotide
gttttagtttccagctgcaaactggatcagcctattacctttataggccaaattatc

SEQ ID NO: 446226 - DNA, 55 bp, Artificial
  Synthetic oligonucleotide
gttttatacaattcagtgtgtacagctacacaacacttgtgagtagggaatttgg

SEQ ID NO: 446227 - DNA, 58 bp, Artificial
  Synthetic oligonucleotide
gttttatacatccacaatgccgcgccgcccacgtcgtaacgctaagacctctgacaaa

SEQ ID NO: 446228 - DNA, 56 bp, Artificial
  Synthetic oligonucleotide
gttttatagaagctcaggagaaacatgtctagacgattccgacttggagatatccg

SEQ ID NO: 446229 - DNA, 60 bp, Artificial
  Synthetic oligonucleotide
gttttatcaaagtaagacagtatgatcagatactaatagaaatctgtggccataaagcta

SEQ ID NO: 446230 - DNA, 54 bp, Artificial
  Synthetic oligonucleotide
gttttatcaagagcgtacggttccaacccctgcctcctctgatttaccaactcc

SEQ ID NO: 446231 - DNA, 57 bp, Artificial
  Synthetic oligonucleotide
gttttatcacctatggcgcgtcgcacttttgtagggttcaccccgagcttctatggc

SEQ ID NO: 446232 - DNA, 57 bp, Artificial
  Synthetic oligonucleotide
gttttatcacgacatggcgaccgtatatggcattcaactcactaacagattgaacac

SEQ ID NO: 446233 - DNA, 54 bp, Artificial
  Synthetic oligonucleotide
gttttatcatgagcgtacggttcaacccctgcctcccctgatttaccaactttc

SEQ ID NO: 446234 - DNA, 58 bp, Artificial
  Synthetic oligonucleotide
gttttatctccggatcgaataaagtcgagtgcaggtttttggctatttgctcgatctg

SEQ ID NO: 446235 - DNA, 55 bp, Artificial
  Synthetic oligonucleotide
gttttatgggcgtgtttatcaaagccaagtaaccatgcttcatcaacatccaatg

SEQ ID NO: 446236 - DNA, 50 bp, Artificial
  Synthetic oligonucleotide
gttttatggttgacctcgctatgcttgacacaatcccagtggttgattca

SEQ ID NO: 446237 - DNA, 57 bp, Artificial
  Synthetic oligonucleotide
gttttatgtcaatcatcctggggaacaccatctcaaacaccgttcagtacacggtac

SEQ ID NO: 446238 - DNA, 55 bp, Artificial
  Synthetic oligonucleotide
gttttattgaccccaaactgttaaaacgtgatggtcatgggattactgtgttaca

SEQ ID NO: 446239 - DNA, 53 bp, Artificial
  Synthetic oligonucleotide
gttttattgacttaggatgataaccatcgtggttattcccaccgaacggtttc

SEQ ID NO: 446240 - DNA, 52 bp, Artificial
  Synthetic oligonucleotide
gttttatttacaagagcgtacggttcaacccctgcctcctctgtaaaactac

SEQ ID NO: 446241 - DNA, 52 bp, Artificial
  Synthetic oligonucleotide
gttttcaaacggtggtaagtatcaagacggaacgaagcgtattaattataac

SEQ ID NO: 446242 - DNA, 55 bp, Artificial
  Synthetic oligonucleotide
gttttcaagtttgtgtaccaagacataaatgatgcctatttcgtcaagcaggaag

SEQ ID NO: 446243 - DNA, 53 bp, Artificial
  Synthetic oligonucleotide
gttttcaataaacaaggccgtgggagtttcacttgtcggtgtcaacctcttaa

SEQ ID NO: 446244 - DNA, 60 bp, Artificial
  Synthetic oligonucleotide
gttttcacaatgccacgcgcttgagggagaatgcacgttaatcatccctccgctagtgat

SEQ ID NO: 446245 - DNA, 55 bp, Artificial
  Synthetic oligonucleotide
gttttcagtcatagttggctaccttccaaacaacagtgtgatatcaaccttcatg

SEQ ID NO: 446246 - DNA, 55 bp, Artificial
  Synthetic oligonucleotide
gttttcatctgcggaggtacaacaggttatgtaaccagaggatgtccaccggagg

SEQ ID NO: 446247 - DNA, 57 bp, Artificial
  Synthetic oligonucleotide
gttttccaagagtgataaattcagccgacggagcaaccacatggtacttcaacccag

SEQ ID NO: 446248 - DNA, 53 bp, Artificial
  Synthetic oligonucleotide
gttttccacaactcttcctgctagaatggaaccatgttatggcttaactccca

SEQ ID NO: 446249 - DNA, 50 bp, Artificial
  Synthetic oligonucleotide
gttttccacgagtttaccggaatatgtgtactggaagccccactgacggg

SEQ ID NO: 446250 - DNA, 58 bp, Artificial
  Synthetic oligonucleotide
gttttccatgctaccccaccggttacaacccagagatcgaatgctgcctctccggcga

SEQ ID NO: 446251 - DNA, 57 bp, Artificial
  Synthetic oligonucleotide
gttttccatttagagatgggttcaccacagcacatccaaacttaactttgggctcaa

SEQ ID NO: 446252 - DNA, 54 bp, Artificial
  Synthetic oligonucleotide
gttttcccaaacgtcggttgctgttgggatcgattggttaggaccgtcatttca

SEQ ID NO: 446253 - DNA, 56 bp, Artificial
  Synthetic oligonucleotide
gttttccccctgacaaaggtggctcgaccaacactagaggcagtttgtgacatgta

SEQ ID NO: 446254 - DNA, 52 bp, Artificial
  Synthetic oligonucleotide
gttttccgggactgtcttaggtagatctcccatccatacgtatgactttggc

SEQ ID NO: 446255 - DNA, 55 bp, Artificial
  Synthetic oligonucleotide
gttttccggtcgttcatacgcttatcatttacattaccgacgaatttgcgcaaac

SEQ ID NO: 446256 - DNA, 56 bp, Artificial
  Synthetic oligonucleotide
gttttccgtactggtgattcgtctaagaagtttaagattgctgagggtcagtggta

SEQ ID NO: 446257 - DNA, 56 bp, Artificial
  Synthetic oligonucleotide
gttttcctaacacattggttcctatggactctgatataaataataggttcaaggtg

SEQ ID NO: 446258 - DNA, 55 bp, Artificial
  Synthetic oligonucleotide
gttttcctccggagccgtgaatgctgctaatcccaacctccgagcgtgtgcgcac

SEQ ID NO: 446259 - DNA, 55 bp, Artificial
  Synthetic oligonucleotide
gttttcctttagattcactctaccaactgagatcaccaaccctcctcctttcgac

SEQ ID NO: 446260 - DNA, 55 bp, Artificial
  Synthetic oligonucleotide
gttttcgaaggacggcatcaatggcagttccaagggaactatcactttcgggccg

SEQ ID NO: 446261 - DNA, 58 bp, Artificial
  Synthetic oligonucleotide
gttttcgacgaacgtcaattgttaaacgccatgatggtaagcgtcgacaacatcaatc

SEQ ID NO: 446262 - DNA, 57 bp, Artificial
  Synthetic oligonucleotide
gttttcgagaccacagatacaccagacacctttaagatggtcgaccaaccagtgact

SEQ ID NO: 446263 - DNA, 55 bp, Artificial
  Synthetic oligonucleotide
gttttcgagccaaccacagacgcaggcgctgtaccagaatggaggcaccctgact

SEQ ID NO: 446264 - DNA, 56 bp, Artificial
  Synthetic oligonucleotide
gttttcgcacgtgaatatcgtacccctgaaaggatattcaaatcacttaaagcgcc

SEQ ID NO: 446265 - DNA, 60 bp, Artificial
  Synthetic oligonucleotide
gttttcgcatcaacaagcaaaggatgagaccctcctctgggcgaccatagatgcgcggct

SEQ ID NO: 446266 - DNA, 60 bp, Artificial
  Synthetic oligonucleotide
gttttcgcatcaggtttgagtgtttgatccacacgactcacgcagtcattccttacggga

SEQ ID NO: 446267 - DNA, 51 bp, Artificial
  Synthetic oligonucleotide
gttttcgctctttggacccctagtagaaaaagctaattgggaagccgcaga

SEQ ID NO: 446268 - DNA, 49 bp, Artificial
  Synthetic oligonucleotide
gttttcggtaagtctaaaattaccactttcggttgccaaagtttaccgc

SEQ ID NO: 446269 - DNA, 51 bp, Artificial
  Synthetic oligonucleotide
gttttcggtgctcttaacaaccggttttggatcagcaaaaactgtaagtag

SEQ ID NO: 446270 - DNA, 56 bp, Artificial
  Synthetic oligonucleotide
gttttcgtataattaacttgaaatcacacagcactatttcgaaactgcaactacct

SEQ ID NO: 446271 - DNA, 51 bp, Artificial
  Synthetic oligonucleotide
gttttcgttaaagtcatataaacacaggggcgttcacgcccctttttggtc

SEQ ID NO: 446272 - DNA, 54 bp, Artificial
  Synthetic oligonucleotide
gttttcgttagattgtctccttctccgtaaattccggtgggtcgcaagcaacaa

SEQ ID NO: 446273 - DNA, 55 bp, Artificial
  Synthetic oligonucleotide
gttttctatgtctcgatggacaaaaccttaaatcaataccccgcgttggcagcag

SEQ ID NO: 446274 - DNA, 60 bp, Artificial
  Synthetic oligonucleotide
gttttctctcactggtctcattgcaaaatggcttctcaatagtttcattatatcgtgttc

SEQ ID NO: 446275 - DNA, 53 bp, Artificial
  Synthetic oligonucleotide
gttttctcttgtgttgactgggttcatagattgacattactcatcactggtcc

SEQ ID NO: 446276 - DNA, 55 bp, Artificial
  Synthetic oligonucleotide
gttttctgcgtccaaccagagaaaggaggccgcaagccagctcgccttatcgtat

SEQ ID NO: 446277 - DNA, 57 bp, Artificial
  Synthetic oligonucleotide
gttttcttatgacccttgtctcactaggacacaattcttcaataagtctttggattc

SEQ ID NO: 446278 - DNA, 52 bp, Artificial
  Synthetic oligonucleotide
gttttcttggtaatagaggagggcgtggtggccctttctttcggaaggtcgc

SEQ ID NO: 446279 - DNA, 55 bp, Artificial
  Synthetic oligonucleotide
gttttgaaacgtgttttatcggtagataaagacacaaccatgatagacgttgagg

SEQ ID NO: 446280 - DNA, 55 bp, Artificial
  Synthetic oligonucleotide
gttttgaacaaggaccaataggcagtaaccacccaggttgctaaaggtcaagcac

SEQ ID NO: 446281 - DNA, 59 bp, Artificial
  Synthetic oligonucleotide
gttttgaaccagatgtatcgttgggccacgattgatggcgtatgggatcctagggtata

SEQ ID NO: 446282 - DNA, 60 bp, Artificial
  Synthetic oligonucleotide
gttttgaacgcgaaaccaggctccgtccaatgatcagagttatgtacctagcgcgtgcga

SEQ ID NO: 446283 - DNA, 55 bp, Artificial
  Synthetic oligonucleotide
gttttgaatgagtacactcgaaatcaccatgaccgagttatcgggtttactaacc

SEQ ID NO: 446284 - DNA, 60 bp, Artificial
  Synthetic oligonucleotide
gttttgacagatccagcagcccttgaaaggagatttccgttccacttgcgcattagagct

SEQ ID NO: 446285 - DNA, 60 bp, Artificial
  Synthetic oligonucleotide
gttttgaccacgtcccatttgaatcgagctcatcagccggctacggctatgacggtaaga

SEQ ID NO: 446286 - DNA, 55 bp, Artificial
  Synthetic oligonucleotide
gttttgacgcttatgatcgtataactagcagtatttctactgttgctagtcctac

SEQ ID NO: 446287 - DNA, 52 bp, Artificial
  Synthetic oligonucleotide
gttttgactagtcaaaagttgtggccgacaagaaacgttacttataacgtaa

SEQ ID NO: 446288 - DNA, 58 bp, Artificial
  Synthetic oligonucleotide
gttttgactcaacggtcactgagaacgacattcgtgttgaggagtcaatttaccaatg

SEQ ID NO: 446289 - DNA, 55 bp, Artificial
  Synthetic oligonucleotide
gttttgactttgaaggtagtgaacacgaggacaaggttgtagagagtccctacga

SEQ ID NO: 446290 - DNA, 60 bp, Artificial
  Synthetic oligonucleotide
gttttgagagatctaggttatgatgatgaggctgtcagtcttatcgagggtataaatcac

SEQ ID NO: 446291 - DNA, 57 bp, Artificial
  Synthetic oligonucleotide
gttttgagtggggaaagcctaatattccttgcattgtatataaaaactgtgcactac

SEQ ID NO: 446292 - DNA, 53 bp, Artificial
  Synthetic oligonucleotide
gttttgatcgtcactatcatcctttattccaaaagtatgcttatgaagctatg

SEQ ID NO: 446293 - DNA, 54 bp, Artificial
  Synthetic oligonucleotide
gttttgcaaggtctaccctttagctatgacactaacgaaagaggtgggttagcg

SEQ ID NO: 446294 - DNA, 59 bp, Artificial
  Synthetic oligonucleotide
gttttgcaagtgaacacgttttatgagaggatgtcagaaattggaggaccggtcgatga

SEQ ID NO: 446295 - DNA, 60 bp, Artificial
  Synthetic oligonucleotide
gttttgcacagttaatgctttgcctgaagctaactgtgacattgtagttgtggatgaggt

SEQ ID NO: 446296 - DNA, 59 bp, Artificial
  Synthetic oligonucleotide
gttttgccactcttgcctttgatgctcaactacaaacaaactatgccacttttgaatgg

SEQ ID NO: 446297 - DNA, 56 bp, Artificial
  Synthetic oligonucleotide
gttttgccagtagttgtgtcgtccgaggcttctagcccaggatgttttacctgtcc

SEQ ID NO: 446298 - DNA, 60 bp, Artificial
  Synthetic oligonucleotide
gttttgcctgtccgtgaaggaccctcgaccactaatgacaatggtctcattggccgcgca

SEQ ID NO: 446299 - DNA, 55 bp, Artificial
  Synthetic oligonucleotide
gttttgcggaaattccatgccactgtggtaggtggtccctcgggcatgaaggagc

SEQ ID NO: 446300 - DNA, 54 bp, Artificial
  Synthetic oligonucleotide
gttttgcggctgcccatcgtctactagaaaccgattttgtttaccgatgtttcg

SEQ ID NO: 446301 - DNA, 54 bp, Artificial
  Synthetic oligonucleotide
gttttgcgtatggattaccggttatggccgagggtgtaacaccaagtttactca

SEQ ID NO: 446302 - DNA, 53 bp, Artificial
  Synthetic oligonucleotide
gttttgctgaaccttgtcatcttgattgtgcgtctaatgtatttgttcggagg

SEQ ID NO: 446303 - DNA, 58 bp, Artificial
  Synthetic oligonucleotide
gttttgctgaaccttgtcatttgattgtgcgtttaatgtatattttcgaaggtgaata

SEQ ID NO: 446304 - DNA, 56 bp, Artificial
  Synthetic oligonucleotide
gttttggaactgataagtttcttcagtttcgagagcaatgccctttaagtcaagtc

SEQ ID NO: 446305 - DNA, 58 bp, Artificial
  Synthetic oligonucleotide
gttttggaagactcacaagtgtaaatgcaacgaaagttagttatacacttagcactga

SEQ ID NO: 446306 - DNA, 60 bp, Artificial
  Synthetic oligonucleotide
gttttggaaggtcaacaatcatgtggtctacaatcaccaggaagctggcaagtacgagaa

SEQ ID NO: 446307 - DNA, 53 bp, Artificial
  Synthetic oligonucleotide
gttttggacaaggaaaggctagtgtttggtctgggtacaaacccttgttgtga

SEQ ID NO: 446308 - DNA, 54 bp, Artificial
  Synthetic oligonucleotide
gttttggactctttggtgcaccccccttagaggagggatatgtggttctggtag

SEQ ID NO: 446309 - DNA, 55 bp, Artificial
  Synthetic oligonucleotide
gttttggagagagaattcaaaggctcggtcgagtggggagacacaaagagggaat

SEQ ID NO: 446310 - DNA, 55 bp, Artificial
  Synthetic oligonucleotide
gttttggatttgctgtaccacaagcagagtcacttagaaaggactggaacgacgg

SEQ ID NO: 446311 - DNA, 55 bp, Artificial
  Synthetic oligonucleotide
gttttggcaacactgctcttgcaaagtgtaacttaaatcatgactctgagttctg

SEQ ID NO: 446312 - DNA, 55 bp, Artificial
  Synthetic oligonucleotide
gttttggcacatgcgggtctcccacttaattgatgagatggtctctcgccgcatt

SEQ ID NO: 446313 - DNA, 60 bp, Artificial
  Synthetic oligonucleotide
gttttggcctccaccaactctagtcgcatcacaccaccaacagtggcacacagtgacgcg

SEQ ID NO: 446314 - DNA, 60 bp, Artificial
  Synthetic oligonucleotide
gttttggcctggacaccgcagggttttaatgcaacagagccaacaactatggctgaggca

SEQ ID NO: 446315 - DNA, 52 bp, Artificial
  Synthetic oligonucleotide
gttttggcgaataagctttcctcctttaagggacggaaggtgacccttgatg

SEQ ID NO: 446316 - DNA, 60 bp, Artificial
  Synthetic oligonucleotide
gttttgggagctggcagctcacagaggaagacgatctttcagtgaaccactaactgtggt

SEQ ID NO: 446317 - DNA, 52 bp, Artificial
  Synthetic oligonucleotide
gttttgggcttctgggctaaatccagaagaccaaaaacaggcgggaaccgtc

SEQ ID NO: 446318 - DNA, 50 bp, Artificial
  Synthetic oligonucleotide
gttttgggggcccgcacttctgagcatcttaccgccatttattcccatat

SEQ ID NO: 446319 - DNA, 55 bp, Artificial
  Synthetic oligonucleotide
gttttggtactatggcacctattatagatgatggtgagagtcctatctttggtag

SEQ ID NO: 446320 - DNA, 55 bp, Artificial
  Synthetic oligonucleotide
gttttggtgaactgcactggggcaaagagacccacatgggtaagagggcccacca

SEQ ID NO: 446321 - DNA, 57 bp, Artificial
  Synthetic oligonucleotide
gttttggtggcgctgacaagacacactacgcgttgtaaatattacaccgtcgtgttg

SEQ ID NO: 446322 - DNA, 56 bp, Artificial
  Synthetic oligonucleotide
gttttgtagaaagaaataaagcctggttaacagtagtttcagctgttaccagtgca

SEQ ID NO: 446323 - DNA, 55 bp, Artificial
  Synthetic oligonucleotide
gttttgtagtaagtgggtttccttgagcatcatagttcccttcagcacaatgagc

SEQ ID NO: 446324 - DNA, 55 bp, Artificial
  Synthetic oligonucleotide
gttttgtccatgtttccctggattcttaagatttgggatcgtgtcacggaatggt

SEQ ID NO: 446325 - DNA, 55 bp, Artificial
  Synthetic oligonucleotide
gttttgtcgtgtagaatatgtacaacctatggaacagatctctacctgtttgcga

SEQ ID NO: 446326 - DNA, 55 bp, Artificial
  Synthetic oligonucleotide
gttttgtgggtggagactgtgttctgacggtttgatcaaggaaccctgtttaata

SEQ ID NO: 446327 - DNA, 52 bp, Artificial
  Synthetic oligonucleotide
gttttgtggtaaaatggggtatataggaggggtaaatatgcaaaatccggta

SEQ ID NO: 446328 - DNA, 55 bp, Artificial
  Synthetic oligonucleotide
gttttgtgtactttggtggccttggtatttcctcaggtaaagtgggcagcacacg

SEQ ID NO: 446329 - DNA, 55 bp, Artificial
  Synthetic oligonucleotide
gttttgtgtcagacgcgtgtaaggagtggtcaaccttacgacacattttaaataa

SEQ ID NO: 446330 - DNA, 57 bp, Artificial
  Synthetic oligonucleotide
gttttgtgtctagacatgtcaaggtttgtataattggcacagtttctaaattctccc

SEQ ID NO: 446331 - DNA, 55 bp, Artificial
  Synthetic oligonucleotide
gttttgttctcagagatggatttatggtctttgagaactcaatcatgaacagccc

SEQ ID NO: 446332 - DNA, 54 bp, Artificial
  Synthetic oligonucleotide
gttttgttcttggagtcccgtgaaggtgatctggtgttgataaatgtccctcgt

SEQ ID NO: 446333 - DNA, 60 bp, Artificial
  Synthetic oligonucleotide
gttttgttggcgatggcgatgttccatatctactgatcaggcagattgcaggatacacgt

SEQ ID NO: 446334 - DNA, 55 bp, Artificial
  Synthetic oligonucleotide
gttttgttgtttggacagatctcgccagagtggacatgctctcatcaccgtaggg

SEQ ID NO: 446335 - DNA, 50 bp, Artificial
  Synthetic oligonucleotide
gtttttaactgtatcgactgggtgcataaactcactctagagatcacaga

SEQ ID NO: 446336 - DNA, 55 bp, Artificial
  Synthetic oligonucleotide
gtttttaagcgaattatcacatgagatgtttgtgactgagcctaaagataccttt

SEQ ID NO: 446337 - DNA, 55 bp, Artificial
  Synthetic oligonucleotide
gtttttacagatgaggagttacgcaaaaagtacaacagtgttgagctttaccaaa

SEQ ID NO: 446338 - DNA, 59 bp, Artificial
  Synthetic oligonucleotide
gtttttacatcttggcataccgcaacatttcgtagacacgtggttcaatgcccacgaga

SEQ ID NO: 446339 - DNA, 54 bp, Artificial
  Synthetic oligonucleotide
gtttttaccctgttcaagacgcccaatacacaaataacaggggaaagagcattc

SEQ ID NO: 446340 - DNA, 60 bp, Artificial
  Synthetic oligonucleotide
gtttttacgctcctttgatgtatcgtgactatatgagcgatccaaactcaccaatgttga

SEQ ID NO: 446341 - DNA, 52 bp, Artificial
  Synthetic oligonucleotide
gtttttagatatattgtacgagggtgcgcagttgatcaatctcgccacatcc

SEQ ID NO: 446342 - DNA, 54 bp, Artificial
  Synthetic oligonucleotide
gtttttagcgcttactgaaaatgcgttaacacgaggcattttaaacagagggta

SEQ ID NO: 446343 - DNA, 52 bp, Artificial
  Synthetic oligonucleotide
gtttttagttcgtggttgaactaatttatcatggaccctgaatctctatcac

SEQ ID NO: 446344 - DNA, 56 bp, Artificial
  Synthetic oligonucleotide
gtttttatgtggagttgataagaggaaggccacaagagactagggtatggtggact

SEQ ID NO: 446345 - DNA, 58 bp, Artificial
  Synthetic oligonucleotide
gtttttatgttgaactcacacgaggagtgccaaacaaaaatgagcccgtctcatggac

SEQ ID NO: 446346 - DNA, 53 bp, Artificial
  Synthetic oligonucleotide
gtttttcaacaaaagcaaactttacaatgactattaaaatcattcttggagaa

SEQ ID NO: 446347 - DNA, 53 bp, Artificial
  Synthetic oligonucleotide
gtttttcacgttttaggagcactaattgggcgattcaaacgtaatgatccggt

SEQ ID NO: 446348 - DNA, 60 bp, Artificial
  Synthetic oligonucleotide
gtttttcccaaggcggcatacaaggatgagggaattctcaagcaagcaatcccgcatcat

SEQ ID NO: 446349 - DNA, 60 bp, Artificial
  Synthetic oligonucleotide
gtttttccgattcgcgtgtaatgggtgagtgagctgatgtggtcgccaagacatgtgccg

SEQ ID NO: 446350 - DNA, 52 bp, Artificial
  Synthetic oligonucleotide
gtttttcggttttgaacgtgagcacgaagtttactgggggcagtactctaag

SEQ ID NO: 446351 - DNA, 51 bp, Artificial
  Synthetic oligonucleotide
gtttttcgtgttcaccttccagaccctaacaaatttgggttgcctgacccc

SEQ ID NO: 446352 - DNA, 49 bp, Artificial
  Synthetic oligonucleotide
gtttttgagggcaacaaggaaccggcggtactcagaaacggggaccccc

SEQ ID NO: 446353 - DNA, 60 bp, Artificial
  Synthetic oligonucleotide
gtttttggaggatcaacaactacgtggtgtataaccatcaagatgcagcgaagtatgaga

SEQ ID NO: 446354 - DNA, 56 bp, Artificial
  Synthetic oligonucleotide
gtttttgtactcgtggttgagttacaatgaatcctctaaatcagctattgtcacat

SEQ ID NO: 446355 - DNA, 52 bp, Artificial
  Synthetic oligonucleotide
gtttttgtgggaactactgtcctacccggacttaccccacatgccgaactaa

SEQ ID NO: 446356 - DNA, 57 bp, Artificial
  Synthetic oligonucleotide
gttttttaatgactatgagtttatgttagccacacgatttaattatgtatacgtcta

SEQ ID NO: 446357 - DNA, 48 bp, Artificial
  Synthetic oligonucleotide
gttttttagggataagcccccggggaaagaagcctcgcaacttccccg

SEQ ID NO: 446358 - DNA, 55 bp, Artificial
  Synthetic oligonucleotide
gttttttcctcgaaactgaagagactttccaacctgggagatggtttatgcgtgc

SEQ ID NO: 446359 - DNA, 59 bp, Artificial
  Synthetic oligonucleotide
gttttttctcacgaagactatttaattgcaagagaactaatagtgctatcatattcaaa

SEQ ID NO: 446360 - DNA, 51 bp, Artificial
  Synthetic oligonucleotide
gttttttgcactgcactatgtgcaactactgaatcactatgtacattgtgt

SEQ ID NO: 446361 - DNA, 59 bp, Artificial
  Synthetic oligonucleotide
gttttttgtatatcacagagctaatacaggtattacgcattcggaaacatgccaaagcg

SEQ ID NO: 446362 - DNA, 52 bp, Artificial
  Synthetic oligonucleotide
gttttttttctaggcaaccgaatccggtcgtgcttttgagccaaaaaactgc

SEQ ID NO: 446363 - DNA, 54 bp, Artificial
  Synthetic oligonucleotide
gtttttttttactctaaacaatcgaaatgaggactctattagatgtttattcaa

SEQ ID NO: 446364 - DNA, 60 bp, Artificial
  Synthetic oligonucleotide
taaaaaaacctgatgtgcaatccgcaattgctaagctgagtcaaatcgtgagtgagccaa

SEQ ID NO: 446365 - DNA, 59 bp, Artificial
  Synthetic oligonucleotide
taaaaaacacttatcttgccaaacccatggccaatcttattaatgcagcaagtagacaa

SEQ ID NO: 446366 - DNA, 59 bp, Artificial
  Synthetic oligonucleotide
taaaaaagagcggtatacaatgagtaaagtgtctgcaatgcctatacattggggcccac

SEQ ID NO: 446367 - DNA, 56 bp, Artificial
  Synthetic oligonucleotide
taaaaaagctgtgggagcaaacccgctcaaaggcaggacttttggtgtcggatgga

SEQ ID NO: 446368 - DNA, 58 bp, Artificial
  Synthetic oligonucleotide
taaaaaatctcgctatcggcaatgtgagcctacagtacaacactacgttggaccgtgt

SEQ ID NO: 446369 - DNA, 54 bp, Artificial
  Synthetic oligonucleotide
taaaaacaacctcttaggtaaagctgtaactattgaccaggcattaaatggaaa

SEQ ID NO: 446370 - DNA, 55 bp, Artificial
  Synthetic oligonucleotide
taaaaaccctagtaagttgataaggctagaaacaggtgattggactttgaccgca

SEQ ID NO: 446371 - DNA, 60 bp, Artificial
  Synthetic oligonucleotide
taaaaaccttgacaataacaactctgtatgctgcatcacagaatggtccaatactcaagg

SEQ ID NO: 446372 - DNA, 53 bp, Artificial
  Synthetic oligonucleotide
taaaaacctttttggctcttacattggaatattttatacgggtatattatgta

SEQ ID NO: 446373 - DNA, 55 bp, Artificial
  Synthetic oligonucleotide
taaaaacgccctactagtttattactgttggatgtcggatgctatgtctaaggca

SEQ ID NO: 446374 - DNA, 51 bp, Artificial
  Synthetic oligonucleotide
taaaaacgttaatggatgtaaccacaaaggcgagtacaaaaatttccccta

SEQ ID NO: 446375 - DNA, 54 bp, Artificial
  Synthetic oligonucleotide
taaaaacgtttttagaaattgccgctaattgtaatcttgtaatgcgaggttgtc

SEQ ID NO: 446376 - DNA, 58 bp, Artificial
  Synthetic oligonucleotide
taaaaactatctataagaagcttgatgataaaatatctactgttgaaattagtaaaca

SEQ ID NO: 446377 - DNA, 60 bp, Artificial
  Synthetic oligonucleotide
taaaaagaggcaagcgctctgtgcaaccttttggattcctgaatccaatcatgagagtgc

SEQ ID NO: 446378 - DNA, 58 bp, Artificial
  Synthetic oligonucleotide
taaaaaggaatactaatcgaggcgttcatagccagtgcgtgtcaattgtcctttctaa

SEQ ID NO: 446379 - DNA, 58 bp, Artificial
  Synthetic oligonucleotide
taaaaaggtaaatgagtatcttggtacgctgacatcaagatcgagacggccctcgtcc

SEQ ID NO: 446380 - DNA, 56 bp, Artificial
  Synthetic oligonucleotide
taaaaaggtcgaactactcattgaccgctacaaatttgtctggactgccgggtata

SEQ ID NO: 446381 - DNA, 53 bp, Artificial
  Synthetic oligonucleotide
taaaaagtctggggaatggttaatggggattttgagtggtaattggatggtag

SEQ ID NO: 446382 - DNA, 59 bp, Artificial
  Synthetic oligonucleotide
taaaaagtgtccccatttggaataacacctatagtgcatccatccttgatccttatgag

SEQ ID NO: 446383 - DNA, 54 bp, Artificial
  Synthetic oligonucleotide
taaaaatatttatgattggacgtttctgccaacagatttcgaacttaaagattc

SEQ ID NO: 446384 - DNA, 55 bp, Artificial
  Synthetic oligonucleotide
taaaaatcacactaatagcgtcatgttttttttggttcgagaccgtcgccctaca

SEQ ID NO: 446385 - DNA, 58 bp, Artificial
  Synthetic oligonucleotide
taaaaatggacaatagtagctataggttgacaagttgtaacacctcagttattacaca

SEQ ID NO: 446386 - DNA, 50 bp, Artificial
  Synthetic oligonucleotide
taaaacaactagtggacttgtgcaccaagtgatggaaaaatctagggaag

SEQ ID NO: 446387 - DNA, 52 bp, Artificial
  Synthetic oligonucleotide
taaaacaatagaatttaagccaccctccccaggaggggacccagaaattgta

SEQ ID NO: 446388 - DNA, 56 bp, Artificial
  Synthetic oligonucleotide
taaaacacgtgcccttagcgataacagggtaggtgattatatcaaacttgtaaata

SEQ ID NO: 446389 - DNA, 57 bp, Artificial
  Synthetic oligonucleotide
taaaacagctggggggtggtacccactcacagggcccacgtggcgctagcactctgg

SEQ ID NO: 446390 - DNA, 56 bp, Artificial
  Synthetic oligonucleotide
taaaacagctgggggtttgtacccacccacagggcccactgggcgctagcactctg

SEQ ID NO: 446391 - DNA, 54 bp, Artificial
  Synthetic oligonucleotide
taaaacagggaccaaaggagccgttccaaagctatgtagatagattctacaaaa

SEQ ID NO: 446392 - DNA, 60 bp, Artificial
  Synthetic oligonucleotide
taaaacagtatgatagcgatgagccagagcctagatcgctagcaagctggatccagagtg

SEQ ID NO: 446393 - DNA, 53 bp, Artificial
  Synthetic oligonucleotide
taaaacataagcttaatttccacctccgtattccacctaagaaatattatttc

SEQ ID NO: 446394 - DNA, 53 bp, Artificial
  Synthetic oligonucleotide
taaaacatatagtatgggcaagcagggaactggggagatttgcacttaaccgt

SEQ ID NO: 446395 - DNA, 60 bp, Artificial
  Synthetic oligonucleotide
taaaacatcagaggctacatcgggatcatcctttaacagcaatcccacctcacccataac

SEQ ID NO: 446396 - DNA, 57 bp, Artificial
  Synthetic oligonucleotide
taaaacatttagtatgggcaagcagggagctggaaagatttgcacttaaccctggcc

SEQ ID NO: 446397 - DNA, 55 bp, Artificial
  Synthetic oligonucleotide
taaaaccataatagtacaatttgacagtcctgtacacattaattgtaccagacct

SEQ ID NO: 446398 - DNA, 54 bp, Artificial
  Synthetic oligonucleotide
taaaaccgcttatgcgccccaccctagccggaaagtccccagccgctacgcaac

SEQ ID NO: 446399 - DNA, 57 bp, Artificial
  Synthetic oligonucleotide
taaaacctattattgctggtgtcctggtgtcccatttatacaactctctggggagga

SEQ ID NO: 446400 - DNA, 58 bp, Artificial
  Synthetic oligonucleotide
taaaacctcattatacaaagtggttcgttatcaatcgtgtcctcaatctgtgttaaga

SEQ ID NO: 446401 - DNA, 50 bp, Artificial
  Synthetic oligonucleotide
taaaacctgggctcttcgtggttacggggttttccacatttatttcaaaa

SEQ ID NO: 446402 - DNA, 58 bp, Artificial
  Synthetic oligonucleotide
taaaacgaaagtatacagacagtatagaaagcagccctttagcaaagtcgccattaca

SEQ ID NO: 446403 - DNA, 52 bp, Artificial
  Synthetic oligonucleotide
taaaacgactgcgttttaagggaactctgaaaattgaacgtggacccggtga

SEQ ID NO: 446404 - DNA, 56 bp, Artificial
  Synthetic oligonucleotide
taaaacgcctgggcaaacggacggtctaagacatgctcgctcgtctctttaacgct

SEQ ID NO: 446405 - DNA, 55 bp, Artificial
  Synthetic oligonucleotide
taaaacggcgggacccaatcaatttatactaataccttccaatgaaatactgcca

SEQ ID NO: 446406 - DNA, 58 bp, Artificial
  Synthetic oligonucleotide
taaaacggtcactgattatatccaccaggtgatttatgatgaaggccagttccccacg

SEQ ID NO: 446407 - DNA, 54 bp, Artificial
  Synthetic oligonucleotide
taaaacgtccaaatatgggaactacggctttagatcctctattcgggtggttca

SEQ ID NO: 446408 - DNA, 55 bp, Artificial
  Synthetic oligonucleotide
taaaactaatgcctaatgtttcacttatagagaattgtaccaaagcagaattagg

SEQ ID NO: 446409 - DNA, 58 bp, Artificial
  Synthetic oligonucleotide
taaaactcctccgatctccgattctggcacttccggtcatcaatttacgacacgcgcg

SEQ ID NO: 446410 - DNA, 53 bp, Artificial
  Synthetic oligonucleotide
taaaactgaattctcgtcaaggcgcctgaatactggagcatcctgtggcatga

SEQ ID NO: 446411 - DNA, 50 bp, Artificial
  Synthetic oligonucleotide
taaaactgagttataagacaacccgatgtttaaaactggtctttccgagg

SEQ ID NO: 446412 - DNA, 53 bp, Artificial
  Synthetic oligonucleotide
taaaactgataatgtttttgttagtccggtctataaggtaaagccaactaata

SEQ ID NO: 446413 - DNA, 51 bp, Artificial
  Synthetic oligonucleotide
taaaactgccaaaagtaacattgtcagtcaagtttacttaaacggagacaa

SEQ ID NO: 446414 - DNA, 60 bp, Artificial
  Synthetic oligonucleotide
taaaactgctgacctgaagattgctgacactgcgggactttccagcggagactgctgaca

SEQ ID NO: 446415 - DNA, 54 bp, Artificial
  Synthetic oligonucleotide
taaaactgttcatggccctggtggcgttccttcgtttcctaacaatcccaccaa

SEQ ID NO: 446416 - DNA, 56 bp, Artificial
  Synthetic oligonucleotide
taaaagaaaagacacaaggagttgtgaagaccgctgaggcgttttccgacaacgca

SEQ ID NO: 446417 - DNA, 56 bp, Artificial
  Synthetic oligonucleotide
taaaagaacaaacattatacctacatacccaatgggttacatgccgatgggggatg

SEQ ID NO: 446418 - DNA, 55 bp, Artificial
  Synthetic oligonucleotide
taaaagaacacaagacttttgggaagtccaattagggataccgcatccagcgggc

SEQ ID NO: 446419 - DNA, 60 bp, Artificial
  Synthetic oligonucleotide
taaaagagccgcatccgttgcatggaaggatcaattcacgtccgatggagtgtttgacgt

SEQ ID NO: 446420 - DNA, 55 bp, Artificial
  Synthetic oligonucleotide
taaaagagtggtggctggcttgatgagagggttgtcttcaaggaaacgccgctcc

SEQ ID NO: 446421 - DNA, 58 bp, Artificial
  Synthetic oligonucleotide
taaaagatggatttatctacactcaattggaaaagttgctgtagaaggtggaagatat

SEQ ID NO: 446422 - DNA, 55 bp, Artificial
  Synthetic oligonucleotide
taaaagatttcttcaaagagtcggcgcgaaatgtaatgagtacaaggatgcactc

SEQ ID NO: 446423 - DNA, 55 bp, Artificial
  Synthetic oligonucleotide
taaaagcaaatgacgatattctcgaagggcgccagtggttatctacattggacac

SEQ ID NO: 446424 - DNA, 60 bp, Artificial
  Synthetic oligonucleotide
taaaagccgagcatatgagtacatggcactatgattgtgaacacccttacaggacgtggg

SEQ ID NO: 446425 - DNA, 57 bp, Artificial
  Synthetic oligonucleotide
taaaagcctcaattgtaacaaacatctaagaacactacattaaccccatgcctggtc

SEQ ID NO: 446426 - DNA, 58 bp, Artificial
  Synthetic oligonucleotide
taaaagcctctaggggcactcagctataatattacctgagtgccccgcgaccggtgta

SEQ ID NO: 446427 - DNA, 57 bp, Artificial
  Synthetic oligonucleotide
taaaagcctgcttgattgagactacactgggctagtctgggttattctcgggggccg

SEQ ID NO: 446428 - DNA, 55 bp, Artificial
  Synthetic oligonucleotide
taaaagctcacaccgcacaaggttagggataccatccctggagagatctcttcgc

SEQ ID NO: 446429 - DNA, 60 bp, Artificial
  Synthetic oligonucleotide
taaaagctctggagaagtgggagattgatctgagagtggctcagacgctgctgcctacga

SEQ ID NO: 446430 - DNA, 55 bp, Artificial
  Synthetic oligonucleotide
taaaagctgacccaaatcacgcaattgatccagtaattcggatggtttcaggggt

SEQ ID NO: 446431 - DNA, 55 bp, Artificial
  Synthetic oligonucleotide
taaaagctggcgttataggtggagagtcatgttttgtaatgaaaggtccaatgga

SEQ ID NO: 446432 - DNA, 55 bp, Artificial
  Synthetic oligonucleotide
taaaagcttacggcgatgagaagacaaaagagttggcgaatagtacgactttcct

SEQ ID NO: 446433 - DNA, 60 bp, Artificial
  Synthetic oligonucleotide
taaaaggagtatgtacaattcccagcaatgtgctcgacggaccatctcgccctgtaacag

SEQ ID NO: 446434 - DNA, 60 bp, Artificial
  Synthetic oligonucleotide
taaaaggatcagccaaacatattgaagaatgctcctgttatggacacaaccagaagataa

SEQ ID NO: 446435 - DNA, 55 bp, Artificial
  Synthetic oligonucleotide
taaaagggatagccccactacaattggggaaatgtaacattgccggatggatctt

SEQ ID NO: 446436 - DNA, 60 bp, Artificial
  Synthetic oligonucleotide
taaaaggggaagccatgcatggacaagtagactgtagtccagggatatggcaattagatt

SEQ ID NO: 446437 - DNA, 57 bp, Artificial
  Synthetic oligonucleotide
taaaaggggatgtggcaactactttcaagtgatttatgattcatctggaaaagttgt

SEQ ID NO: 446438 - DNA, 58 bp, Artificial
  Synthetic oligonucleotide
taaaaggggattctaatcctaactcgcccagatctttatctgaggcagcccttgcgtc

SEQ ID NO: 446439 - DNA, 55 bp, Artificial
  Synthetic oligonucleotide
taaaagggttatggtagattgtacgggagctcttctcacagacttggctgcgtcc

SEQ ID NO: 446440 - DNA, 57 bp, Artificial
  Synthetic oligonucleotide
taaaaggtacaaaagcactagataccaactttataatagcaccagtggatgtacctc

SEQ ID NO: 446441 - DNA, 57 bp, Artificial
  Synthetic oligonucleotide
taaaaggtgatctacgccactttcgagctaggtgggtgtcaaggtgtcaccttccta

SEQ ID NO: 446442 - DNA, 50 bp, Artificial
  Synthetic oligonucleotide
taaaaggttgggtatgacacctgtgccacccaaagctgtttgtgagggga

SEQ ID NO: 446443 - DNA, 60 bp, Artificial
  Synthetic oligonucleotide
taaaagtacttgacgtgaagctcagtgcagagcaggcacgcacctttgaggatgagatct

SEQ ID NO: 446444 - DNA, 52 bp, Artificial
  Synthetic oligonucleotide
taaaagtccagaacacagtgttgctactttgagtccgagactggaagctgtt

SEQ ID NO: 446445 - DNA, 60 bp, Artificial
  Synthetic oligonucleotide
taaaagtgaaccaatccggcacaaatgatagtggtatcaacagagtggatctatccatgc

SEQ ID NO: 446446 - DNA, 53 bp, Artificial
  Synthetic oligonucleotide
taaaagtgatgtacctattgatatttctaacactacctgtaaatacccagatt

SEQ ID NO: 446447 - DNA, 60 bp, Artificial
  Synthetic oligonucleotide
taaaagtgccttgacctgtgaatatcggaagtcctgcaatcatggaaactccatccaaca

SEQ ID NO: 446448 - DNA, 53 bp, Artificial
  Synthetic oligonucleotide
taaaagttgtgaattggctaaaagaaaaagtgtttccatctaagactgacccc

SEQ ID NO: 446449 - DNA, 60 bp, Artificial
  Synthetic oligonucleotide
taaaatacatcctcgtatcgaaagactcctccgctcgaagtatccacagtatctacaata

SEQ ID NO: 446450 - DNA, 56 bp, Artificial
  Synthetic oligonucleotide
taaaataccctcgcttttgtgtctaagaggcgcgtcggagtgcgcctataaagtta

SEQ ID NO: 446451 - DNA, 58 bp, Artificial
  Synthetic oligonucleotide
taaaataccctctatattgccctcatagtttcactacgagggctttttcgcatggcta

SEQ ID NO: 446452 - DNA, 58 bp, Artificial
  Synthetic oligonucleotide
taaaataccgcatttaaccttcggagtattacatatttctgataacatggtgccagac

SEQ ID NO: 446453 - DNA, 55 bp, Artificial
  Synthetic oligonucleotide
taaaataccgtgaattgttttagcgagacattttcgacatcgtgcgttgtttacc

SEQ ID NO: 446454 - DNA, 56 bp, Artificial
  Synthetic oligonucleotide
taaaataccttctagtgtacatgtttcattgggttacatgacattgtaaagtatac

SEQ ID NO: 446455 - DNA, 50 bp, Artificial
  Synthetic oligonucleotide
taaaatacttgtccagttatgtgtccagatacacgttgtggtgcaggact

SEQ ID NO: 446456 - DNA, 60 bp, Artificial
  Synthetic oligonucleotide
taaaatagatctctggtcttacaacgcggagctccttgttgccctggagaatcaacatac

SEQ ID NO: 446457 - DNA, 56 bp, Artificial
  Synthetic oligonucleotide
taaaatagcggcacccaatcattttatactttcactttccaattaaaacatgccac

SEQ ID NO: 446458 - DNA, 55 bp, Artificial
  Synthetic oligonucleotide
taaaatccgtgggtaaagcattcaaaattgtgtctttgaggtacacaaggaaagc

SEQ ID NO: 446459 - DNA, 60 bp, Artificial
  Synthetic oligonucleotide
taaaatctgacgtcaaaccgactgtcacagacacgttgcatgtggaaagagacgttccag

SEQ ID NO: 446460 - DNA, 60 bp, Artificial
  Synthetic oligonucleotide
taaaatgatgacgtcaataatagatgaacacatctctcggggcttccacgcaaactttag

SEQ ID NO: 446461 - DNA, 55 bp, Artificial
  Synthetic oligonucleotide
taaaatgcaagatactatcgactcaccttgtctcttgggaactcgtctcggactg

SEQ ID NO: 446462 - DNA, 60 bp, Artificial
  Synthetic oligonucleotide
taaaatgctacccagggatagagattaaaatggcagacaaggtagctgtttcagatgtgt

SEQ ID NO: 446463 - DNA, 60 bp, Artificial
  Synthetic oligonucleotide
taaaatgctccaaaagctagatggcaccagcacatatttggacgcatttaaagccattgg

SEQ ID NO: 446464 - DNA, 55 bp, Artificial
  Synthetic oligonucleotide
taaaatggagtttgaaccgttccaatccttggtacccaaagctgcaaggagtcta

SEQ ID NO: 446465 - DNA, 53 bp, Artificial
  Synthetic oligonucleotide
taaaatggcgggacccaatcaaatcatactttcactttccaattaaaacccgc

SEQ ID NO: 446466 - DNA, 60 bp, Artificial
  Synthetic oligonucleotide
taaaatgtatgctctacaccaagggactaccatcaggaacaagcattcgaatgggactat

SEQ ID NO: 446467 - DNA, 60 bp, Artificial
  Synthetic oligonucleotide
taaaatgtctctgctacgggtgccatactttgtgagggctcatgctctgctacgggtgtg

SEQ ID NO: 446468 - DNA, 56 bp, Artificial
  Synthetic oligonucleotide
taaaattaggagttaatgatacatggagaccgtcacctccaactaagtataaagga

SEQ ID NO: 446469 - DNA, 55 bp, Artificial
  Synthetic oligonucleotide
taaaattagtcgtccacgctgttgcttcgaccaaagcgaactctgcagtcggtgt

SEQ ID NO: 446470 - DNA, 60 bp, Artificial
  Synthetic oligonucleotide
taaaattccgatgtctggctttctgtccttagttatgggcataacgaaagctcctgatgc

SEQ ID NO: 446471 - DNA, 58 bp, Artificial
  Synthetic oligonucleotide
taaaattgagagagagatggttgttgaatatcgtaacaagattgaagcgttacgaggg

SEQ ID NO: 446472 - DNA, 57 bp, Artificial
  Synthetic oligonucleotide
taaaattggcaactggaatgcgaaatgtacctgagaaacagaccaggggtctgttcg

SEQ ID NO: 446473 - DNA, 55 bp, Artificial
  Synthetic oligonucleotide
taaaattggggggactaggttataaatggtccgaaatatcatataaggcagcaaa

SEQ ID NO: 446474 - DNA, 60 bp, Artificial
  Synthetic oligonucleotide
taaaatttgaagcgtcagataggatgagaatacacagagaatccggattatgtcaaggtt

SEQ ID NO: 446475 - DNA, 51 bp, Artificial
  Synthetic oligonucleotide
taaacaaacgacggtcgtggacttaccggcccagttaccgaaagcccagaa

SEQ ID NO: 446476 - DNA, 60 bp, Artificial
  Synthetic oligonucleotide
taaacaaactaattggggtcaatatagcacaacaccatacagaccatcaaatgagattaa

SEQ ID NO: 446477 - DNA, 58 bp, Artificial
  Synthetic oligonucleotide
taaacaaagcacaaggggaagtggaaagcagccaagggaacatgttttgcgagccaga

SEQ ID NO: 446478 - DNA, 57 bp, Artificial
  Synthetic oligonucleotide
taaacaacacccagcccgatgttacaatgtctggagaaaccaagatagagggtgtat

SEQ ID NO: 446479 - DNA, 56 bp, Artificial
  Synthetic oligonucleotide
taaacaacagaccatcacgtaaattggtcgaaaaattagctgacagtaaattcgga

SEQ ID NO: 446480 - DNA, 59 bp, Artificial
  Synthetic oligonucleotide
taaacaacgttagctcatggcgctatcttttgccgaaccttgctcttaatcaaaatgcg

SEQ ID NO: 446481 - DNA, 55 bp, Artificial
  Synthetic oligonucleotide
taaacaagaaattgcgtgttgccaaccgaaaccattcgtccaaattaaatgataa

SEQ ID NO: 446482 - DNA, 60 bp, Artificial
  Synthetic oligonucleotide
taaacaagaaggatacagcgtttgctgagactggtactgagcaagctagtcccaagaccg

SEQ ID NO: 446483 - DNA, 50 bp, Artificial
  Synthetic oligonucleotide
taaacaagaccgacgcccaaagcgctattaacattcccagtgccaacgga

SEQ ID NO: 446484 - DNA, 60 bp, Artificial
  Synthetic oligonucleotide
taaacaagccttgatcaggaacaataacattgaggctgtgacttttggagttccagagaa

SEQ ID NO: 446485 - DNA, 60 bp, Artificial
  Synthetic oligonucleotide
taaacaaggattggaccacttgtaggatccgtgtattcaaacgatctggcagcactatgg

SEQ ID NO: 446486 - DNA, 55 bp, Artificial
  Synthetic oligonucleotide
taaacaatatggggaccatctatgcgcgtcatgttaatgattccagcccaggcgg

SEQ ID NO: 446487 - DNA, 57 bp, Artificial
  Synthetic oligonucleotide
taaacaatccttgtaacttagaaggtttcgattatcgcacaatagggactattgcaa

SEQ ID NO: 446488 - DNA, 59 bp, Artificial
  Synthetic oligonucleotide
taaacaatcggttgttaggctatccacacaggtcgcgttcattgtcaaagtggtgcgcc

SEQ ID NO: 446489 - DNA, 52 bp, Artificial
  Synthetic oligonucleotide
taaacaatgcaacaaatgacgatagtaaaataattgtcgtaagacaacgatc

SEQ ID NO: 446490 - DNA, 59 bp, Artificial
  Synthetic oligonucleotide
taaacacacagaccttaggaattggctgtctgaccaccgatgtatcgacgtttgaagag

SEQ ID NO: 446491 - DNA, 60 bp, Artificial
  Synthetic oligonucleotide
taaacacagttattcaccaaggaatggacgccacggctgcttgtattggattgcaagggc

SEQ ID NO: 446492 - DNA, 57 bp, Artificial
  Synthetic oligonucleotide
taaacacattaactgagagaggagtggaagtcgttaatgcaactgaaacggtggaac

SEQ ID NO: 446493 - DNA, 58 bp, Artificial
  Synthetic oligonucleotide
taaacacccatggaaagtggctagtggtttgggtctcggcagacgaggtgatcaactc

SEQ ID NO: 446494 - DNA, 57 bp, Artificial
  Synthetic oligonucleotide
taaacacctctgaccccgaggccttagaaaagcagcgcaagacagtaatgggaagcg

SEQ ID NO: 446495 - DNA, 60 bp, Artificial
  Synthetic oligonucleotide
taaacacgccactctgagcttgaagagcagtgatgtgttcccctgtgcgtaaatccatgg

SEQ ID NO: 446496 - DNA, 60 bp, Artificial
  Synthetic oligonucleotide
taaacacgccattcactgcttgagctgcagtgatgggttccccggtgcgtgaatccatga

SEQ ID NO: 446497 - DNA, 55 bp, Artificial
  Synthetic oligonucleotide
taaacactatagccgaggcagtggaaagtgaaataagtccacgattggacgccat

SEQ ID NO: 446498 - DNA, 57 bp, Artificial
  Synthetic oligonucleotide
taaacagaacacaccaatactcagaaaagggaaagtggacgacaaacacagagactg

SEQ ID NO: 446499 - DNA, 60 bp, Artificial
  Synthetic oligonucleotide
taaacagactccgagttgccactggactcaggagctgtgaatcagtaacgaaagtgagtg

SEQ ID NO: 446500 - DNA, 56 bp, Artificial
  Synthetic oligonucleotide
taaacagagctgtgttgaaggtcaatgcccatactgtatgactgtgacagaggcaa

SEQ ID NO: 446501 - DNA, 60 bp, Artificial
  Synthetic oligonucleotide
taaacagatggtgcagtccctgcccgatctagaggttcctcccaaggatagcttcattgt

SEQ ID NO: 446502 - DNA, 57 bp, Artificial
  Synthetic oligonucleotide
taaacagcaactcgctattaaggtaacctgtaatgctgtgtatgggtttacaggagt

SEQ ID NO: 446503 - DNA, 60 bp, Artificial
  Synthetic oligonucleotide
taaacagcacggtgcgcctcatctctctcaggcatctggacaactgggggagggagctta

SEQ ID NO: 446504 - DNA, 50 bp, Artificial
  Synthetic oligonucleotide
taaacagcactgggaatgccaccttaaacagcactaggaacgccactgtg

SEQ ID NO: 446505 - DNA, 51 bp, Artificial
  Synthetic oligonucleotide
taaacaggacccggaagggtaacccgagagggggagtgaggcttcggcctc

SEQ ID NO: 446506 - DNA, 58 bp, Artificial
  Synthetic oligonucleotide
taaacaggactgctttgaattgcaatgattccctccagacggggttcatagcgtcact

SEQ ID NO: 446507 - DNA, 52 bp, Artificial
  Synthetic oligonucleotide
taaacaggagattattgcacctgagaaacaggtgctgaacttcgacctactc

SEQ ID NO: 446508 - DNA, 55 bp, Artificial
  Synthetic oligonucleotide
taaacaggagcaaacgaaagatgtgttgaccttggaaaatctaggacacattctg

SEQ ID NO: 446509 - DNA, 54 bp, Artificial
  Synthetic oligonucleotide
taaacaggcctatagattggaaagtatgtcaacgaattgtgggtcttttggggt

SEQ ID NO: 446510 - DNA, 59 bp, Artificial
  Synthetic oligonucleotide
taaacaggggtcattgtagctgtgtgcgtagttagtatgaccttgaataggctttcgta

SEQ ID NO: 446511 - DNA, 60 bp, Artificial
  Synthetic oligonucleotide
taaacagggtagaccagcaactgaaaatctctgtgctctaacaaagtgacgctgactgaa

SEQ ID NO: 446512 - DNA, 58 bp, Artificial
  Synthetic oligonucleotide
taaacagtagtcttcctttccagaatgtacacccagtcacaataggagagtgtccaaa

SEQ ID NO: 446513 - DNA, 58 bp, Artificial
  Synthetic oligonucleotide
taaacagtataaacatcctagtattctgtccgacttttcttcgctcgtgtcaaatatc

SEQ ID NO: 446514 - DNA, 58 bp, Artificial
  Synthetic oligonucleotide
taaacagtgagtatctctagtgaagcagactcgagctcataatcaagtcactgtttaa

SEQ ID NO: 446515 - DNA, 57 bp, Artificial
  Synthetic oligonucleotide
taaacagtgtcccacatgtgtaacatacttaccaattcctcattttggagttaatcc

SEQ ID NO: 446516 - DNA, 55 bp, Artificial
  Synthetic oligonucleotide
taaacagtgtgtgactgataataagcagcttgcgccgttgtttggatctactccg

SEQ ID NO: 446517 - DNA, 60 bp, Artificial
  Synthetic oligonucleotide
taaacataaacagctaccagcgctctgcagaaaacctacgctcagtcaaagacagctttg

SEQ ID NO: 446518 - DNA, 58 bp, Artificial
  Synthetic oligonucleotide
taaacatacctgagaatgaggcgaaggactttacgaagagagttcgtgatcttgtagg

SEQ ID NO: 446519 - DNA, 60 bp, Artificial
  Synthetic oligonucleotide
taaacatcagaggcacatgcatcctagcatctgatctatatgacacattaaaacgagtta

SEQ ID NO: 446520 - DNA, 59 bp, Artificial
  Synthetic oligonucleotide
taaacatcatgtctgtacttaggggcaaaatgaagcctggtacttgccagaactccaaa

SEQ ID NO: 446521 - DNA, 55 bp, Artificial
  Synthetic oligonucleotide
taaacatcgacttctccaagtggaatacaaacatgagagaagggcccaccagtga

SEQ ID NO: 446522 - DNA, 60 bp, Artificial
  Synthetic oligonucleotide
taaacatgaaagtactagctttaagacacggtgtggctcaggtgtatgcagacacccaaa

SEQ ID NO: 446523 - DNA, 60 bp, Artificial
  Synthetic oligonucleotide
taaacatgaaagtgttagctttaagacatagtgtggctcaggtgtatgcagacactcaag

SEQ ID NO: 446524 - DNA, 60 bp, Artificial
  Synthetic oligonucleotide
taaacatgcttgcagacagaatagatgatgccgtgacggacatttggtcatacaatgcca

SEQ ID NO: 446525 - DNA, 53 bp, Artificial
  Synthetic oligonucleotide
taaacatggttagggaaatgaacagccacgccgcctaccgaagaagggtagcc

SEQ ID NO: 446526 - DNA, 60 bp, Artificial
  Synthetic oligonucleotide
taaacatgtctcagaaagttgtcatgggagccagtgtgataggatggggacaactgaacc

SEQ ID NO: 446527 - DNA, 54 bp, Artificial
  Synthetic oligonucleotide
taaacattactaattcccacgtttccatactacaagaaagaccaccccttgaga

SEQ ID NO: 446528 - DNA, 54 bp, Artificial
  Synthetic oligonucleotide
taaacattgtacttccacagcccccacgtcctccttcggttgttagctatttta

SEQ ID NO: 446529 - DNA, 58 bp, Artificial
  Synthetic oligonucleotide
taaaccaataatcgtttagtaatggcttacctgctttcatcgctcacatgaagcaacg

SEQ ID NO: 446530 - DNA, 57 bp, Artificial
  Synthetic oligonucleotide
taaaccaccctagttgtgtctggctggaagcgcaagaggaaggggatgtaggctttc

SEQ ID NO: 446531 - DNA, 55 bp, Artificial
  Synthetic oligonucleotide
taaaccagtgctgccttgacctgatggataccatggcgtccgaattcagcctctc

SEQ ID NO: 446532 - DNA, 60 bp, Artificial
  Synthetic oligonucleotide
taaaccatccgcaaaggaccatgcatggggggttgttgagactcatgcgaggaaatatca

SEQ ID NO: 446533 - DNA, 55 bp, Artificial
  Synthetic oligonucleotide
taaaccatctccactttgctatcaccactctccaccgtgaccccaactacacccc

SEQ ID NO: 446534 - DNA, 56 bp, Artificial
  Synthetic oligonucleotide
taaaccattttgagaaaattcaaatcatccccaaaagttcctggtccgatcatgaa

SEQ ID NO: 446535 - DNA, 55 bp, Artificial
  Synthetic oligonucleotide
taaacccaacatttacgatgacgaagattcatatgcggaagagaattgtcagacg

SEQ ID NO: 446536 - DNA, 58 bp, Artificial
  Synthetic oligonucleotide
taaacccaagaaatcgagggctgtctgtgtctgaggtggcaagcaccttcgataggcc

SEQ ID NO: 446537 - DNA, 53 bp, Artificial
  Synthetic oligonucleotide
taaaccccacttgggtgcgtctggttgtctgcacaccttcgacgaactattcg

SEQ ID NO: 446538 - DNA, 55 bp, Artificial
  Synthetic oligonucleotide
taaacccggaagtatcctcggtcacgtggcctgtcacgtagttgtacgtcacggc

SEQ ID NO: 446539 - DNA, 60 bp, Artificial
  Synthetic oligonucleotide
taaacccgttatgataggtggtcaatgcgaaccagcctatgatcaggccaagtgggccga

SEQ ID NO: 446540 - DNA, 55 bp, Artificial
  Synthetic oligonucleotide
taaaccctagtctagagccctgggagcacccagggagccggcctaggaccgcttg

SEQ ID NO: 446541 - DNA, 60 bp, Artificial
  Synthetic oligonucleotide
taaaccctatcagtatagaattatcagagctatcgtcggcaataactaggttgtcatatc

SEQ ID NO: 446542 - DNA, 54 bp, Artificial
  Synthetic oligonucleotide
taaaccctcaagtagtttgggatgttcctcggagttcgattgctaaccttatta

SEQ ID NO: 446543 - DNA, 56 bp, Artificial
  Synthetic oligonucleotide
taaaccgaaaatataatactgtgcttgagagtgcgcggtaaaaaaacattagacac

SEQ ID NO: 446544 - DNA, 51 bp, Artificial
  Synthetic oligonucleotide
taaaccgatgtgttaatcggttcatgacacatgtcattgataagactaggt

SEQ ID NO: 446545 - DNA, 53 bp, Artificial
  Synthetic oligonucleotide
taaaccgatttcagaatcacatgtgaaagagctcattgctgagttgcggtggc

SEQ ID NO: 446546 - DNA, 55 bp, Artificial
  Synthetic oligonucleotide
taaaccggaagaatccgacataccctccgagaccgcagccttatggtatggggcc

SEQ ID NO: 446547 - DNA, 57 bp, Artificial
  Synthetic oligonucleotide
taaaccgggacttaatgattgggttgaggttgatgctaacatacataaacctactgc

SEQ ID NO: 446548 - DNA, 55 bp, Artificial
  Synthetic oligonucleotide
taaaccgggtacatatcaatcaaaggcaacgaacttaggcttcatcaagttctac

SEQ ID NO: 446549 - DNA, 51 bp, Artificial
  Synthetic oligonucleotide
taaaccggtggaaaatatcgcagtaagacgtgtcgatgcattgagcgagct

SEQ ID NO: 446550 - DNA, 60 bp, Artificial
  Synthetic oligonucleotide
taaaccgtatgacatcttaattgagaatggaatacttaatagtatagaatatgcagctcc

SEQ ID NO: 446551 - DNA, 57 bp, Artificial
  Synthetic oligonucleotide
taaaccgtcctggtgatcgtttcttgaactgcattagggtacgtaggtcaccacatc

SEQ ID NO: 446552 - DNA, 54 bp, Artificial
  Synthetic oligonucleotide
taaaccgttggtatctgtgtattacgcggataaccactgggataataggccggg

SEQ ID NO: 446553 - DNA, 54 bp, Artificial
  Synthetic oligonucleotide
taaacctacgggtgtcggggaccgttagcgtcacgcaaatgggaggagacgatc

SEQ ID NO: 446554 - DNA, 59 bp, Artificial
  Synthetic oligonucleotide
taaacctagctaaatatgtcgtcccagaagctgtcagagaagtcgtccagacttggaag

SEQ ID NO: 446555 - DNA, 60 bp, Artificial
  Synthetic oligonucleotide
taaacctatatgttgcccaacatattatgttagatgcagcgactggattgacgccatcac

SEQ ID NO: 446556 - DNA, 57 bp, Artificial
  Synthetic oligonucleotide
taaacctcatttgaacccaactggatgtctacatacgtttgacgatttatttggagc

SEQ ID NO: 446557 - DNA, 60 bp, Artificial
  Synthetic oligonucleotide
taaacctcatttgggctcatctggagccctgctgacctttgatgagttattcggagctag

SEQ ID NO: 446558 - DNA, 58 bp, Artificial
  Synthetic oligonucleotide
taaacctccaaatcggaggtcggactctgcttctgaagagtccagttctgtatctttc

SEQ ID NO: 446559 - DNA, 54 bp, Artificial
  Synthetic oligonucleotide
taaacctccaacctccccaagcaattcccggctatccgcaaggccattccgtcc

SEQ ID NO: 446560 - DNA, 55 bp, Artificial
  Synthetic oligonucleotide
taaacctggacaaacagtcaaaatacaaaccaatggtaatcttattgcacctgaa

SEQ ID NO: 446561 - DNA, 51 bp, Artificial
  Synthetic oligonucleotide
taaacctggaccaactattcttatgaatgatcaggaagttggcgtgctgga

SEQ ID NO: 446562 - DNA, 57 bp, Artificial
  Synthetic oligonucleotide
taaacctgtcgaagatacgtctcaattgttcgagagacctttagcggcaactattac

SEQ ID NO: 446563 - DNA, 58 bp, Artificial
  Synthetic oligonucleotide
taaaccttcaacgaattcttgcaagtattgaagataatggccaacaaatcgcgcctat

SEQ ID NO: 446564 - DNA, 60 bp, Artificial
  Synthetic oligonucleotide
taaaccttggcatgttataagaccaaggattgtgcaaatgttagcggacaatttatgcaa

SEQ ID NO: 446565 - DNA, 57 bp, Artificial
  Synthetic oligonucleotide
taaaccttggggcttaagtcaagatggccgcaaaggtaattgtgatgtgggctcaac

SEQ ID NO: 446566 - DNA, 60 bp, Artificial
  Synthetic oligonucleotide
taaacgaacgactcgcatatatctcgaagttaagagaagtaagtaagcgtatgcacactg

SEQ ID NO: 446567 - DNA, 55 bp, Artificial
  Synthetic oligonucleotide
taaacgaagcaaccatcaccgttacttcttctagaatgaaccgccgtacacgcat

SEQ ID NO: 446568 - DNA, 55 bp, Artificial
  Synthetic oligonucleotide
taaacgaaggctatttgaggaggacagcgggctggaattatcggggctcgaacag

SEQ ID NO: 446569 - DNA, 59 bp, Artificial
  Synthetic oligonucleotide
taaacgaccaagccactgtctattgtcaagtcctacacctcccaggtgaatccatcgac

SEQ ID NO: 446570 - DNA, 60 bp, Artificial
  Synthetic oligonucleotide
taaacgagaatgtggctatggccatgtacgaggcaccgaccgcagacaagtgggtggctg

SEQ ID NO: 446571 - DNA, 52 bp, Artificial
  Synthetic oligonucleotide
taaacgagcgtactttcctttgctacgcaagatcatgtataccgtaaaatcc

SEQ ID NO: 446572 - DNA, 56 bp, Artificial
  Synthetic oligonucleotide
taaacgagttccctgagtctgtccacggtttccggtgtatgctcgccgtgaaatac

SEQ ID NO: 446573 - DNA, 60 bp, Artificial
  Synthetic oligonucleotide
taaacgatgcaaatcctcgattgcataaaatttatggaatgccagagataccgccgctat

SEQ ID NO: 446574 - DNA, 51 bp, Artificial
  Synthetic oligonucleotide
taaacgattcaacgccggttatatcgtaacaaatgtcggtaaaaattccgt

SEQ ID NO: 446575 - DNA, 55 bp, Artificial
  Synthetic oligonucleotide
taaacgattggtattcgtacaggtacctccgtcgttaggagatgatagtcatttg

SEQ ID NO: 446576 - DNA, 57 bp, Artificial
  Synthetic oligonucleotide
taaacgcagaaaaaatatttggactaaatcaaactgtatgtatgacctttgtagata

SEQ ID NO: 446577 - DNA, 58 bp, Artificial
  Synthetic oligonucleotide
taaacgcagtttaacgaaacagccataagaccacgagaaaaattgtgatcaatcgaca

SEQ ID NO: 446578 - DNA, 53 bp, Artificial
  Synthetic oligonucleotide
taaacgccaccgagttactccaagtgagaaccaacttcgacgacaagttgttt

SEQ ID NO: 446579 - DNA, 55 bp, Artificial
  Synthetic oligonucleotide
taaacgccattttaccatccaccacattggtgtgcacctgggtagatggacagac

SEQ ID NO: 446580 - DNA, 58 bp, Artificial
  Synthetic oligonucleotide
taaacgccggccggcatgcagaaaactgaaaagtccgcacgacgtgcctgaagcaaag

SEQ ID NO: 446581 - DNA, 56 bp, Artificial
  Synthetic oligonucleotide
taaacgctccaatacgaccacaagtcgtctacgagttccttctcaatcccctccaa

SEQ ID NO: 446582 - DNA, 57 bp, Artificial
  Synthetic oligonucleotide
taaacgctccttccaccatcggacctctagctgtcgtgtgggacccggtcttgtcac

SEQ ID NO: 446583 - DNA, 52 bp, Artificial
  Synthetic oligonucleotide
taaacggacaacttaaacgtacagtaaatgctttaccagaagtgtttgttgg

SEQ ID NO: 446584 - DNA, 55 bp, Artificial
  Synthetic oligonucleotide
taaacggcaccataaacgccgtgaccttccaaggaaacctgagtgaactgtccga

SEQ ID NO: 446585 - DNA, 54 bp, Artificial
  Synthetic oligonucleotide
taaacggcaccctatgtgtccggtataacgttacgataggaacccttcctgcta

SEQ ID NO: 446586 - DNA, 57 bp, Artificial
  Synthetic oligonucleotide
taaacggcactgatgtgccttagtcgctcgactaccgggataagtgatttttttatc

SEQ ID NO: 446587 - DNA, 57 bp, Artificial
  Synthetic oligonucleotide
taaacggcagcgccctcatcgttacatccctacgacttagtgacgccggtacctata

SEQ ID NO: 446588 - DNA, 55 bp, Artificial
  Synthetic oligonucleotide
taaacggccaggagtgtctgtgaggtggaagagataagccccccatgggcccccg

SEQ ID NO: 446589 - DNA, 53 bp, Artificial
  Synthetic oligonucleotide
taaacggtctccctgtctcggctaggagaggtaacctcgtactcctaggcccc

SEQ ID NO: 446590 - DNA, 60 bp, Artificial
  Synthetic oligonucleotide
taaacgtaacagcaagcgtgtgcgagatctggttaactcgcgagaatggcaagagcttta

SEQ ID NO: 446591 - DNA, 52 bp, Artificial
  Synthetic oligonucleotide
taaacgtactaaaaaacgtaaagtgagtacaccagttagaggcggcaataat

SEQ ID NO: 446592 - DNA, 55 bp, Artificial
  Synthetic oligonucleotide
taaacgtattcgataacacgtgcttccaatccaatttcacgagagcctactcgct

SEQ ID NO: 446593 - DNA, 56 bp, Artificial
  Synthetic oligonucleotide
taaacgtctatcgtttaagggaaccgtgaaaattgaacgtgtccatgcggatgtga

SEQ ID NO: 446594 - DNA, 52 bp, Artificial
  Synthetic oligonucleotide
taaacgtggttcgtttaactatcaacgacgaggttattcacgtagccaaggt

SEQ ID NO: 446595 - DNA, 60 bp, Artificial
  Synthetic oligonucleotide
taaacgtgtgcgaccaggtatgatgacagcagccataaaagctgttgagacgaggatcag

SEQ ID NO: 446596 - DNA, 55 bp, Artificial
  Synthetic oligonucleotide
taaacgttctcagaactatgctgctctgcgcaaagctcaactgccgaagcctccg

SEQ ID NO: 446597 - DNA, 60 bp, Artificial
  Synthetic oligonucleotide
taaacgttgtgcaggaacatgcaattcagttgtgtcttttggtacaactaatgaatgatt

SEQ ID NO: 446598 - DNA, 60 bp, Artificial
  Synthetic oligonucleotide
taaactaaatctggtaatgagtgtgaatgccgacgcactaaccaccagcagtagaccatc

SEQ ID NO: 446599 - DNA, 56 bp, Artificial
  Synthetic oligonucleotide
taaactaagagggtcgtacatgaaaatacacaaagtccgtacacagtaattaagca

SEQ ID NO: 446600 - DNA, 55 bp, Artificial
  Synthetic oligonucleotide
taaactaaggtgcggttgtgtccctaggcatttaggtagcaatttaggtggcgtc

SEQ ID NO: 446601 - DNA, 54 bp, Artificial
  Synthetic oligonucleotide
taaactaataacagttgggagttctaactaccagcaatcctttgtaccgagtcc

SEQ ID NO: 446602 - DNA, 57 bp, Artificial
  Synthetic oligonucleotide
taaactacagggtggtgaaccggcatctggcaacccataccgactggcaaaactgtg

SEQ ID NO: 446603 - DNA, 60 bp, Artificial
  Synthetic oligonucleotide
taaactaccatcagcaggccgtgcacgtatggcgttgcggacattgcttctcgctagacg

SEQ ID NO: 446604 - DNA, 58 bp, Artificial
  Synthetic oligonucleotide
taaactagaaatgtagcattataagtacatattaactaataacaatcaatacagggac

SEQ ID NO: 446605 - DNA, 56 bp, Artificial
  Synthetic oligonucleotide
taaactagacgacgggcacgaaatccctgtttacgagtcaatcccgactgagctaa

SEQ ID NO: 446606 - DNA, 54 bp, Artificial
  Synthetic oligonucleotide
taaactagagccctggaaccacccaggaagtcagcctaaaactcccttgtaata

SEQ ID NO: 446607 - DNA, 55 bp, Artificial
  Synthetic oligonucleotide
taaactagatgttacaacaacgacttgtactatacgtaactgcaaaaaattagga

SEQ ID NO: 446608 - DNA, 55 bp, Artificial
  Synthetic oligonucleotide
taaactatgacacttatacgtacaggtgcccattagatacctgttacttgttgtc

SEQ ID NO: 446609 - DNA, 55 bp, Artificial
  Synthetic oligonucleotide
taaactattacacccattggagtggaagcataaaactcacattcatgttctgtgg

SEQ ID NO: 446610 - DNA, 51 bp, Artificial
  Synthetic oligonucleotide
taaactcagggaaggacaaaagtttgcacaattgatcatattacagcatcg

SEQ ID NO: 446611 - DNA, 57 bp, Artificial
  Synthetic oligonucleotide
taaactcattaaaggggctaaagcactaacagacatagtaccattgactagagaagc

SEQ ID NO: 446612 - DNA, 57 bp, Artificial
  Synthetic oligonucleotide
taaactccacatctgtcggcttgaccgagtgtatgggaccttcgacaaaattgttac

SEQ ID NO: 446613 - DNA, 60 bp, Artificial
  Synthetic oligonucleotide
taaactccagttattcgcgtatgaagagatctattggtagtgtgtctcacgatgataatc

SEQ ID NO: 446614 - DNA, 55 bp, Artificial
  Synthetic oligonucleotide
taaactcgccagtgacgcgataaagtctaagctttcaggcgcccgacccggtccc

SEQ ID NO: 446615 - DNA, 55 bp, Artificial
  Synthetic oligonucleotide
taaactcgctatgcaacttaatgatgtgcatctacaccacaaatttgatcagtcc

SEQ ID NO: 446616 - DNA, 56 bp, Artificial
  Synthetic oligonucleotide
taaactgaactggaatgtccgatatttggttcaaacctgttttaaatctgtatgtg

SEQ ID NO: 446617 - DNA, 60 bp, Artificial
  Synthetic oligonucleotide
taaactgattaagaatgaacatcttcccttaatgtctggagaagccaccacaatgcacat

SEQ ID NO: 446618 - DNA, 60 bp, Artificial
  Synthetic oligonucleotide
taaactggaggaatatatggacagctagtaatgtgagcatggagttcgctaggttcttaa

SEQ ID NO: 446619 - DNA, 58 bp, Artificial
  Synthetic oligonucleotide
taaactggggatacctgacaggtaccactatttgcaagcggatttcgttacagattgc

SEQ ID NO: 446620 - DNA, 56 bp, Artificial
  Synthetic oligonucleotide
taaactggtcctatctcaaaaagactgtaatcctaacagaagacagaaacctgtaa

SEQ ID NO: 446621 - DNA, 59 bp, Artificial
  Synthetic oligonucleotide
taaactggttgagcctgatttgacaatggtggacacaaaggtggatccctccagggcag

SEQ ID NO: 446622 - DNA, 54 bp, Artificial
  Synthetic oligonucleotide
taaactgtaatacctcaaccataaaacaagcctgcccaaaggtcacttttgaac

SEQ ID NO: 446623 - DNA, 54 bp, Artificial
  Synthetic oligonucleotide
taaactgtctgaagccactaaacgtttttacggtgaacgggttgtccatccagc

SEQ ID NO: 446624 - DNA, 57 bp, Artificial
  Synthetic oligonucleotide
taaactgtgtgtcattgtgttgccgtggactagtgtccggctgcgccccgtgcagtg

SEQ ID NO: 446625 - DNA, 57 bp, Artificial
  Synthetic oligonucleotide
taaactgttcaagccacgagtcgctaaccatgatcactccccaaacgaaggattacg

SEQ ID NO: 446626 - DNA, 54 bp, Artificial
  Synthetic oligonucleotide
taaacttatctagtttggtacaacttagaaagaaattagagttattcacctatg

SEQ ID NO: 446627 - DNA, 60 bp, Artificial
  Synthetic oligonucleotide
taaacttatgtgtcaattattgaattgtgctgaatgtcaggtaatatgtgatccaccaag

SEQ ID NO: 446628 - DNA, 53 bp, Artificial
  Synthetic oligonucleotide
taaacttccttatacttaatagtataaagaaagactctcaggaaaaacctgta

SEQ ID NO: 446629 - DNA, 53 bp, Artificial
  Synthetic oligonucleotide
taaacttcgaaaccacacaacccgcaaagaaccgtgactttccggcctttgca

SEQ ID NO: 446630 - DNA, 60 bp, Artificial
  Synthetic oligonucleotide
taaacttctgctagaagtccatatggtaaatcagatggtctttcgtctggttcagggctg

SEQ ID NO: 446631 - DNA, 56 bp, Artificial
  Synthetic oligonucleotide
taaacttgcgcctatcctccccgtcaataacctaaatcttgctgtttaccagtgag

SEQ ID NO: 446632 - DNA, 55 bp, Artificial
  Synthetic oligonucleotide
taaacttgggtaaaacgtgtgccgcaataaatcagattgcgacatgtgccaatac

SEQ ID NO: 446633 - DNA, 60 bp, Artificial
  Synthetic oligonucleotide
taaagaaacaacacacagtttgaagacatgcgtcctctagggagatatgagatcccaaac

SEQ ID NO: 446634 - DNA, 58 bp, Artificial
  Synthetic oligonucleotide
taaagaaacaacacaccgtttaaatacatgcgtcttctggggagatatgagatcccca

SEQ ID NO: 446635 - DNA, 51 bp, Artificial
  Synthetic oligonucleotide
taaagaacatttggggtacgttaagaaaatatttttggcttgaactctaaa

SEQ ID NO: 446636 - DNA, 55 bp, Artificial
  Synthetic oligonucleotide
taaagaacccagggccgcaattcgcaaaaccggagtccgtctcgtctgtgcgcgt

SEQ ID NO: 446637 - DNA, 55 bp, Artificial
  Synthetic oligonucleotide
taaagaaccctagattgcgattggtaccgccgggctccgtctcgtctgtgttctg

SEQ ID NO: 446638 - DNA, 54 bp, Artificial
  Synthetic oligonucleotide
taaagaacgtgaagacacactgaatgggagaggaccgtgtgtgccatacttagg

SEQ ID NO: 446639 - DNA, 60 bp, Artificial
  Synthetic oligonucleotide
taaagaactactcggatcaagagcggccgcctatcagtattgggattattcctgctgagg

SEQ ID NO: 446640 - DNA, 60 bp, Artificial
  Synthetic oligonucleotide
taaagaaggttcatacgtgtatgtagactattgggatgattcgcaggcatttaggaatat

SEQ ID NO: 446641 - DNA, 58 bp, Artificial
  Synthetic oligonucleotide
taaagaagttctccaggcagtgtcgatttttaataggaaagaggatatagggcagcaa

SEQ ID NO: 446642 - DNA, 60 bp, Artificial
  Synthetic oligonucleotide
taaagaatactgcagtaaagaagggaacttactgatggaatgtggagctcctagatctca

SEQ ID NO: 446643 - DNA, 60 bp, Artificial
  Synthetic oligonucleotide
taaagaatctacgcattggagctctattgaaacatcagtccaaagagtggcttgaggcat

SEQ ID NO: 446644 - DNA, 55 bp, Artificial
  Synthetic oligonucleotide
taaagaatctgtagcaattatcggggctactgggaacatacggaattaccctaag

SEQ ID NO: 446645 - DNA, 52 bp, Artificial
  Synthetic oligonucleotide
taaagacaagaccagtcctgtcacctctgactaagggaattttaggatttgt

SEQ ID NO: 446646 - DNA, 57 bp, Artificial
  Synthetic oligonucleotide
taaagacatatgcaccacaaagcgaaacttaaaacggtcactgcgaaacgcttttca

SEQ ID NO: 446647 - DNA, 55 bp, Artificial
  Synthetic oligonucleotide
taaagacattacatcctaacgacaaatggttgcttgatcttcaggcgagttggcg

SEQ ID NO: 446648 - DNA, 51 bp, Artificial
  Synthetic oligonucleotide
taaagaccacaaacatgttcttgaaactatcagcaatctcgcagccgaaaa

SEQ ID NO: 446649 - DNA, 60 bp, Artificial
  Synthetic oligonucleotide
taaagaccccccattaatgctgttgcgtggcgacgccaatgtgcttaagtgctatcgctt

SEQ ID NO: 446650 - DNA, 58 bp, Artificial
  Synthetic oligonucleotide
taaagacccttaagaaacgaccagtctgaggctgtgaagtcatccagattcggtagac

SEQ ID NO: 446651 - DNA, 51 bp, Artificial
  Synthetic oligonucleotide
taaagacctacagttgtctaaggatctctttttagtattaggcaggaaccc

SEQ ID NO: 446652 - DNA, 60 bp, Artificial
  Synthetic oligonucleotide
taaagacgaacgcgcagaagcttgtatatgacgaagatttacaaatgcacatattaaggg

SEQ ID NO: 446653 - DNA, 55 bp, Artificial
  Synthetic oligonucleotide
taaagactacgctgacattgcctcattttcagttgatccacaactgtactgcgat

SEQ ID NO: 446654 - DNA, 56 bp, Artificial
  Synthetic oligonucleotide
taaagactacgtcggtctaaagattcccgcgtcacaggatctagttgagtggaaaa

SEQ ID NO: 446655 - DNA, 51 bp, Artificial
  Synthetic oligonucleotide
taaagactatataactatacagaaaactactggcatatacccaacagccag

SEQ ID NO: 446656 - DNA, 56 bp, Artificial
  Synthetic oligonucleotide
taaagactatgttggtctaaagattcccgcgtcgcaagacttggttgaatggaaaa

SEQ ID NO: 446657 - DNA, 59 bp, Artificial
  Synthetic oligonucleotide
taaagactcagccaataaagtatgtaagaacatatatggtcctcatttacacattttat

SEQ ID NO: 446658 - DNA, 55 bp, Artificial
  Synthetic oligonucleotide
taaagactcctccgctcaagaagaaaatgtctggtaccttcgggggaatactagc

SEQ ID NO: 446659 - DNA, 52 bp, Artificial
  Synthetic oligonucleotide
taaagactctaaatggttgaatcctgcatgtatgttcggaggcacaacgaat

SEQ ID NO: 446660 - DNA, 60 bp, Artificial
  Synthetic oligonucleotide
taaagagaatagctattagtccaggcctgtatgggaaaccttcaggctacgcatccacca

SEQ ID NO: 446661 - DNA, 60 bp, Artificial
  Synthetic oligonucleotide
taaagagagaatgaccacatctcttccaattgctagattatcaaatcgtgtacttagaga

SEQ ID NO: 446662 - DNA, 55 bp, Artificial
  Synthetic oligonucleotide
taaagagagcaacggggctagcgagtggatgttccgcctccccagggtcccgagt

SEQ ID NO: 446663 - DNA, 59 bp, Artificial
  Synthetic oligonucleotide
taaagagagcatcttggatatccacgaagaccgcatttttgctagtccacgaacgaagg

SEQ ID NO: 446664 - DNA, 60 bp, Artificial
  Synthetic oligonucleotide
taaagagcacacagaatgccattgacgggatcactaccaaagtaaactctgttattgaga

SEQ ID NO: 446665 - DNA, 55 bp, Artificial
  Synthetic oligonucleotide
taaagagcaggatataggtcatttctgccttagccccaggtgtgccactgttaga

SEQ ID NO: 446666 - DNA, 54 bp, Artificial
  Synthetic oligonucleotide
taaagagcggagtggacgtgttttacaaaccttcggagcccagtgacaccctgt

SEQ ID NO: 446667 - DNA, 57 bp, Artificial
  Synthetic oligonucleotide
taaagaggagagcaattgcaacacccgggatgcaaataagagggttcgtgtactttg

SEQ ID NO: 446668 - DNA, 60 bp, Artificial
  Synthetic oligonucleotide
taaagaggagctatttcactgaggaacaaggagaaattcagtggatgaggccaagcaaag

SEQ ID NO: 446669 - DNA, 57 bp, Artificial
  Synthetic oligonucleotide
taaagagtataaacaaggtgtagactataggctaacaaacgggcagtcagtagactg

SEQ ID NO: 446670 - DNA, 57 bp, Artificial
  Synthetic oligonucleotide
taaagagtcaatgggtttcacctatagtggaataagaaccaatggaacaacaagtgc

SEQ ID NO: 446671 - DNA, 51 bp, Artificial
  Synthetic oligonucleotide
taaagagtggaatgattacccaacatcaactctagaatgtgtactgaccac

SEQ ID NO: 446672 - DNA, 55 bp, Artificial
  Synthetic oligonucleotide
taaagagttgccttctaacatggggtggttcaaatagtactctcttgagccttta

SEQ ID NO: 446673 - DNA, 55 bp, Artificial
  Synthetic oligonucleotide
taaagagtttctccgtgaaacctggacgcgctttatggaagacagtttccctata

SEQ ID NO: 446674 - DNA, 60 bp, Artificial
  Synthetic oligonucleotide
taaagataaactgggtcatacgcacaaattaccgattgccagcatcaagaaacgaggcat

SEQ ID NO: 446675 - DNA, 60 bp, Artificial
  Synthetic oligonucleotide
taaagatacatctgattctgagccaagtggccgttacagcaacgtatctaagaatgctct

SEQ ID NO: 446676 - DNA, 60 bp, Artificial
  Synthetic oligonucleotide
taaagatactagaccagctgttggatcatgccctccaataaaactagtgcacagtactat

SEQ ID NO: 446677 - DNA, 55 bp, Artificial
  Synthetic oligonucleotide
taaagatagaatgcccacatactgtgggtttaggccaaggttatgttacaggatc

SEQ ID NO: 446678 - DNA, 55 bp, Artificial
  Synthetic oligonucleotide
taaagatccctacacacagacacattgttggcaagggctgccccaaaccccacag

SEQ ID NO: 446679 - DNA, 60 bp, Artificial
  Synthetic oligonucleotide
taaagatcctctaaagcttgggtacacctttgagagcatcgcacagttacttgacatcac

SEQ ID NO: 446680 - DNA, 57 bp, Artificial
  Synthetic oligonucleotide
taaagatcttgaccatgattcatgtaacggtgtatatgacaacataagcaagaacgc

SEQ ID NO: 446681 - DNA, 57 bp, Artificial
  Synthetic oligonucleotide
taaagatgactcatcctttgaagaggtcaacggaatccggaaaccaaagcatcttta

SEQ ID NO: 446682 - DNA, 50 bp, Artificial
  Synthetic oligonucleotide
taaagatggattcctatatttagcaccagccgaagatacttcaagtggcc

SEQ ID NO: 446683 - DNA, 52 bp, Artificial
  Synthetic oligonucleotide
taaagatggtacgcaattggctatggtaaacgatgacggtagcgagcattac

SEQ ID NO: 446684 - DNA, 56 bp, Artificial
  Synthetic oligonucleotide
taaagatgtggacctcgaagaaaacccccttggggttctcgtatgacactcgctgc

SEQ ID NO: 446685 - DNA, 54 bp, Artificial
  Synthetic oligonucleotide
taaagattatgttggtttaaagattcccgcgtcgcacgacttggttaagtggaa

SEQ ID NO: 446686 - DNA, 54 bp, Artificial
  Synthetic oligonucleotide
taaagattcagaagtcttgaaaacacacgcactgtgtgctgtcaaattaaggat

SEQ ID NO: 446687 - DNA, 57 bp, Artificial
  Synthetic oligonucleotide
taaagattgagtccagcggaagctggggatttctttggagtgagccatggtttgggt

SEQ ID NO: 446688 - DNA, 53 bp, Artificial
  Synthetic oligonucleotide
taaagcaaacgagtgacttttctgatgaaagcagtcgcagtgattcttcttca

SEQ ID NO: 446689 - DNA, 60 bp, Artificial
  Synthetic oligonucleotide
taaagcaaacttctctcttgtctttcttgcatgagcgatcttcaacgttgtcagatcgtg

SEQ ID NO: 446690 - DNA, 55 bp, Artificial
  Synthetic oligonucleotide
taaagcaactctgtaagctccttaggggagccaaagcattaacagacatcgtacc

SEQ ID NO: 446691 - DNA, 55 bp, Artificial
  Synthetic oligonucleotide
taaagcaaggagctgttagacactttcctagaccatggctccataacttagggca

SEQ ID NO: 446692 - DNA, 56 bp, Artificial
  Synthetic oligonucleotide
taaagcaatacaccaatctgaagaacgtatctgcaggtatacctcaggtagtttta

SEQ ID NO: 446693 - DNA, 55 bp, Artificial
  Synthetic oligonucleotide
taaagcacttatgtaaactcctaaggggagccaagacactgacagacatagtgcc

SEQ ID NO: 446694 - DNA, 60 bp, Artificial
  Synthetic oligonucleotide
taaagcagcccaaacaatactatgtttccaacatgaggtactttgcagatttgcacctta

SEQ ID NO: 446695 - DNA, 60 bp, Artificial
  Synthetic oligonucleotide
taaagcatgcatgaggaacggaggaaacagcttctatgcagagctaaagtggttgatatc

SEQ ID NO: 446696 - DNA, 60 bp, Artificial
  Synthetic oligonucleotide
taaagcatggttgcccaccatcacttgcatgggtatctatcgctctaaatcactggataa

SEQ ID NO: 446697 - DNA, 60 bp, Artificial
  Synthetic oligonucleotide
taaagcatgtatgaggaacggagggaacagcttctatgcagaactaaaatggctagtgtc

SEQ ID NO: 446698 - DNA, 60 bp, Artificial
  Synthetic oligonucleotide
taaagcatttgtcgatggcatcgtcaagtctgttcaaaacatgtggaagggcatgcagaa

SEQ ID NO: 446699 - DNA, 55 bp, Artificial
  Synthetic oligonucleotide
taaagccaagcatgttaaagcatggtgccctagggctcccagagcagtcccttac

SEQ ID NO: 446700 - DNA, 57 bp, Artificial
  Synthetic oligonucleotide
taaagccagccccaagtccttatgcccattgcgcttggtttaaggacactacactcg

SEQ ID NO: 446701 - DNA, 55 bp, Artificial
  Synthetic oligonucleotide
taaagccagggccagtttactaccaagattactcaggccccgtctaccatagggc

SEQ ID NO: 446702 - DNA, 57 bp, Artificial
  Synthetic oligonucleotide
taaagcccaagaaggaactctcgctatcccttgctgtggatttcccttatggctatt

SEQ ID NO: 446703 - DNA, 58 bp, Artificial
  Synthetic oligonucleotide
taaagcccacaatttgagcgacgcattttgttcctcgtcgaggaactctttatatgac

SEQ ID NO: 446704 - DNA, 60 bp, Artificial
  Synthetic oligonucleotide
taaagcccacgatttgagcgatgcgttgtttgcctcgtctagatactctttataggagga

SEQ ID NO: 446705 - DNA, 58 bp, Artificial
  Synthetic oligonucleotide
taaagcccttagacaatatgtgtatgttgggcggtttgaatcgaatgtccgtcgagtg

SEQ ID NO: 446706 - DNA, 56 bp, Artificial
  Synthetic oligonucleotide
taaagccgcgactaacgtggtattggcactcccgtctcgacccaagcccgatagcc

SEQ ID NO: 446707 - DNA, 56 bp, Artificial
  Synthetic oligonucleotide
taaagcctacactacacgggccaacacccctgttgtacaggctaggagccgttcaa

SEQ ID NO: 446708 - DNA, 53 bp, Artificial
  Synthetic oligonucleotide
taaagcctacgttacacgggccaacaccactcctttatagactaggagccgtc

SEQ ID NO: 446709 - DNA, 60 bp, Artificial
  Synthetic oligonucleotide
taaagcctcgacgtcgcatgctcattcggcgggcgatatcacatctggcacgttgaacat

SEQ ID NO: 446710 - DNA, 60 bp, Artificial
  Synthetic oligonucleotide
taaagcctgaagtgagcgattgcgaaaagggtcactttcaccattactgtgcacttcacc

SEQ ID NO: 446711 - DNA, 57 bp, Artificial
  Synthetic oligonucleotide
taaagcctgacgggttagcgctaaaatatccctgaacagtaatcttcgacaaaatga

SEQ ID NO: 446712 - DNA, 55 bp, Artificial
  Synthetic oligonucleotide
taaagcctgggagatactacaggagtcaagaaactcccgttggttctaaagatta

SEQ ID NO: 446713 - DNA, 60 bp, Artificial
  Synthetic oligonucleotide
taaagcgcaaatagatacgttgaagatgaatggcttaacagtcgtatccaagagcagacg

SEQ ID NO: 446714 - DNA, 58 bp, Artificial
  Synthetic oligonucleotide
taaagcggcggagtattgtacgtatgcagaagactacgaccagtgggggctcctccat

SEQ ID NO: 446715 - DNA, 60 bp, Artificial
  Synthetic oligonucleotide
taaagcgtctctgctgcgggtaccatactttgtgagggcccacgccctgctacgagtgtg

SEQ ID NO: 446716 - DNA, 55 bp, Artificial
  Synthetic oligonucleotide
taaagctaccgggtttggcagtccaccgcaagaaggccggagcattgcgaacgcg

SEQ ID NO: 446717 - DNA, 58 bp, Artificial
  Synthetic oligonucleotide
taaagctagatgattaacttgcaaggccgtgggagtttcacttgtcggtgtctacctc

SEQ ID NO: 446718 - DNA, 51 bp, Artificial
  Synthetic oligonucleotide
taaagctccgatccaaattaaattgcctcctatgctggtcacttctaatgt

SEQ ID NO: 446719 - DNA, 60 bp, Artificial
  Synthetic oligonucleotide
taaagctctgcactcaattggtgttgtctaatggagcagcgccagtagttttaagccttg

SEQ ID NO: 446720 - DNA, 55 bp, Artificial
  Synthetic oligonucleotide
taaagctgagatggcacttgaattcaatcgtgagttccttgacaagctgcgtgtg

SEQ ID NO: 446721 - DNA, 53 bp, Artificial
  Synthetic oligonucleotide
taaagctgcagaacgtaaacaaatgactatgtcacaatggattacacatagat

SEQ ID NO: 446722 - DNA, 53 bp, Artificial
  Synthetic oligonucleotide
taaagctggctattgtggacttccactggtgagcactcgcacaaaggcggttg

SEQ ID NO: 446723 - DNA, 60 bp, Artificial
  Synthetic oligonucleotide
taaagcttgccaccggactcagaaatattcctgcaattgccacaagaggcctgtttggtg

SEQ ID NO: 446724 - DNA, 59 bp, Artificial
  Synthetic oligonucleotide
taaagcttgccttgagagctaaagtggtgtgtgcccatccattcggtaactctggtacc

SEQ ID NO: 446725 - DNA, 60 bp, Artificial
  Synthetic oligonucleotide
taaagcttgggtacacctttgagagcattgcccagctacttgacatcactctaccggtag

SEQ ID NO: 446726 - DNA, 55 bp, Artificial
  Synthetic oligonucleotide
taaaggaacaccaattacttacgatgggctaccaacagatctccaacttttggat

SEQ ID NO: 446727 - DNA, 58 bp, Artificial
  Synthetic oligonucleotide
taaaggaagagtccccaacttcggatcctcagagcggagaggtttcgagtatgacgca

SEQ ID NO: 446728 - DNA, 52 bp, Artificial
  Synthetic oligonucleotide
taaaggaatcgcgtgtacgactccggaactatgaagaacgcgtactctgcgc

SEQ ID NO: 446729 - DNA, 54 bp, Artificial
  Synthetic oligonucleotide
taaaggacgaggtaactctcttaacccagaacataagagacaaggcgtacggaa

SEQ ID NO: 446730 - DNA, 57 bp, Artificial
  Synthetic oligonucleotide
taaaggagagaacaccagcttgttacaccctgtgagcctgcatgggatggatgaccc

SEQ ID NO: 446731 - DNA, 60 bp, Artificial
  Synthetic oligonucleotide
taaaggagcccctatcaccactgagcgaaaatggtactcattcgctggatatgccagcac

SEQ ID NO: 446732 - DNA, 52 bp, Artificial
  Synthetic oligonucleotide
taaaggagggttgtcgagttaggtttatgtgggaccagaagggaataagttg

SEQ ID NO: 446733 - DNA, 55 bp, Artificial
  Synthetic oligonucleotide
taaaggataaacttcaagatctgtcagacgatagattgaataagttcttaacatg

SEQ ID NO: 446734 - DNA, 55 bp, Artificial
  Synthetic oligonucleotide
taaaggatggccaacaaattctgtttacttcaaaagttataccgacatagcgtct

SEQ ID NO: 446735 - DNA, 54 bp, Artificial
  Synthetic oligonucleotide
taaaggcaaaggtgggaatcaccgaagaaccaactttttgtgggtggagattga

SEQ ID NO: 446736 - DNA, 50 bp, Artificial
  Synthetic oligonucleotide
taaaggccgtaatgcgcacgtgtaaagacgtataccgatgttagacgtag

SEQ ID NO: 446737 - DNA, 58 bp, Artificial
  Synthetic oligonucleotide
taaaggcctgcttgagactattctgagctagtctgggttattctcgggggtcgtaaga

SEQ ID NO: 446738 - DNA, 60 bp, Artificial
  Synthetic oligonucleotide
taaaggcgcaggcgggtaccaagcagcgtgaggagcgagaggataagaggcctctgggag

SEQ ID NO: 446739 - DNA, 60 bp, Artificial
  Synthetic oligonucleotide
taaaggctgcctaggcgctatggaccaatcatgttgcgcctgacgagtctagatatttgt

SEQ ID NO: 446740 - DNA, 55 bp, Artificial
  Synthetic oligonucleotide
taaaggcttcccactggaagaggagtgtaactacaacgttatgtctgttataccc

SEQ ID NO: 446741 - DNA, 50 bp, Artificial
  Synthetic oligonucleotide
taaaggcttgtcctcttggcttacgagtggagagtataagcggcttggat

SEQ ID NO: 446742 - DNA, 55 bp, Artificial
  Synthetic oligonucleotide
taaagggaataactttcatcaggaccaatgaaattgcgtcctttaagcgtaaata

SEQ ID NO: 446743 - DNA, 57 bp, Artificial
  Synthetic oligonucleotide
taaagggaattggaacgatggtaatggaactgattcgaatgataaagcggggaatca

SEQ ID NO: 446744 - DNA, 57 bp, Artificial
  Synthetic oligonucleotide
taaagggacttgtgttttaaagcacaaaatgatagaagagtcataccgtagcagaaa

SEQ ID NO: 446745 - DNA, 54 bp, Artificial
  Synthetic oligonucleotide
taaagggagtcggaacaatggtgatggaactaattcggatgataaaacggggga

SEQ ID NO: 446746 - DNA, 57 bp, Artificial
  Synthetic oligonucleotide
taaagggagtcgggacgatggtgatggaactaattaggatgataaagcgagggatta

SEQ ID NO: 446747 - DNA, 60 bp, Artificial
  Synthetic oligonucleotide
taaagggagttgggacaatggtgatggaactcatcaggatgataaagagaggagtcaatg

SEQ ID NO: 446748 - DNA, 57 bp, Artificial
  Synthetic oligonucleotide
taaagggagttgggacgatggtgatggagctaattcgaatgataaaacggggaatca

SEQ ID NO: 446749 - DNA, 60 bp, Artificial
  Synthetic oligonucleotide
taaagggataatgaaggctgctgatattcagacaactcatgatgtccatttggcaccagg

SEQ ID NO: 446750 - DNA, 54 bp, Artificial
  Synthetic oligonucleotide
taaagggattctcatttagatacggcaagggtgtttggatagggagaactaaaa

SEQ ID NO: 446751 - DNA, 55 bp, Artificial
  Synthetic oligonucleotide
taaagggccgcccgttaataaggcggacagcgtcgcgcttgaacacgacaaggcc

SEQ ID NO: 446752 - DNA, 58 bp, Artificial
  Synthetic oligonucleotide
taaaggggtgttcgagtcatgtacggcactcgtcggagtgcccactgggactcgcaac

SEQ ID NO: 446753 - DNA, 55 bp, Artificial
  Synthetic oligonucleotide
taaagggtcagagttgtcacaactgagcatgtaccgagtgtttgaagtaggtgtt

SEQ ID NO: 446754 - DNA, 60 bp, Artificial
  Synthetic oligonucleotide
taaagggtggcactttgtgttatgcaatggaaaattcagtgacgcaatcaaccatcattg

SEQ ID NO: 446755 - DNA, 59 bp, Artificial
  Synthetic oligonucleotide
taaagggttgcagtccttggggttatgcaagtcgagcaatgcacgtacgtacgcacgta

SEQ ID NO: 446756 - DNA, 57 bp, Artificial
  Synthetic oligonucleotide
taaaggtaacattgaaatgttaaaaccaatgtatgctgctattactcacaaggtaaa

SEQ ID NO: 446757 - DNA, 57 bp, Artificial
  Synthetic oligonucleotide
taaaggtaagtacgtcaggaattcaattgataagggtcataatctgaccgatctggg

SEQ ID NO: 446758 - DNA, 60 bp, Artificial
  Synthetic oligonucleotide
taaaggtacagataatattgactctgtggacaatgtaaatgactggtgtttaatagaggc

SEQ ID NO: 446759 - DNA, 53 bp, Artificial
  Synthetic oligonucleotide
taaaggtagcgttgaccctaattttggtcgtcgggtacgcaatcgccgccagt

SEQ ID NO: 446760 - DNA, 52 bp, Artificial
  Synthetic oligonucleotide
taaaggtatgtaaagtctacaaccggttttgaacttcgtcactaagaattcg

SEQ ID NO: 446761 - DNA, 55 bp, Artificial
  Synthetic oligonucleotide
taaaggtattgaggtgtgcggaagtgaatcggataatatgcgaactgccatccca

SEQ ID NO: 446762 - DNA, 58 bp, Artificial
  Synthetic oligonucleotide
taaaggtgaaaccgtatttgatatgtctgagtgagctaaaaacttaacacactagtca

SEQ ID NO: 446763 - DNA, 59 bp, Artificial
  Synthetic oligonucleotide
taaaggtggtgagtttgaatcaccgaaggagtggctaaattggatgatccacgattcaa

SEQ ID NO: 446764 - DNA, 58 bp, Artificial
  Synthetic oligonucleotide
taaaggtggtgtgacgataagtgtgatagataagcgtcttgcgaactctaaggagtgc

SEQ ID NO: 446765 - DNA, 59 bp, Artificial
  Synthetic oligonucleotide
taaaggttctcgctgctatcagggtgtagagtattcttcatcgggtgcaaaatacgctt

SEQ ID NO: 446766 - DNA, 57 bp, Artificial
  Synthetic oligonucleotide
taaaggttgattaccgccctatcgggctgtatgctggtgtggtagtggcccctggtc

SEQ ID NO: 446767 - DNA, 53 bp, Artificial
  Synthetic oligonucleotide
taaagtaaacacattaactgaaagaggagtagaagtcgttaacgcaactgaaa

SEQ ID NO: 446768 - DNA, 58 bp, Artificial
  Synthetic oligonucleotide
taaagtaagttatgtgtttagttagatctgatatgtttatatagacaccctatcgtta

SEQ ID NO: 446769 - DNA, 50 bp, Artificial
  Synthetic oligonucleotide
taaagtacccaaaaatttaagactttggggatggattttagattgcgata

SEQ ID NO: 446770 - DNA, 59 bp, Artificial
  Synthetic oligonucleotide
taaagtaccctacttcgtgcgcgtacaaggccttctccggatctgcgcgctagcgcgga

SEQ ID NO: 446771 - DNA, 58 bp, Artificial
  Synthetic oligonucleotide
taaagtagaaccgttttcggtgcagctgtgcaaagtttgcgtgacaaatttatgtgta

SEQ ID NO: 446772 - DNA, 50 bp, Artificial
  Synthetic oligonucleotide
taaagtatggcagcactgctgttttctttggtgggttgggtattagtaca

SEQ ID NO: 446773 - DNA, 60 bp, Artificial
  Synthetic oligonucleotide
taaagtcaataacatcgttgatcggatgaacacaaactttgagtctgttcaacatgaatt

SEQ ID NO: 446774 - DNA, 53 bp, Artificial
  Synthetic oligonucleotide
taaagtcatataaacacaggggcgttcacgcccctttttggtctgtagttggg

SEQ ID NO: 446775 - DNA, 53 bp, Artificial
  Synthetic oligonucleotide
taaagtcatcgatacctttacttgcggtctcgccgatctcatggggtacatcc

SEQ ID NO: 446776 - DNA, 60 bp, Artificial
  Synthetic oligonucleotide
taaagtccaaaggggactggatggcacaacaactgtgtgcaaacaaaagcaggatctggc

SEQ ID NO: 446777 - DNA, 59 bp, Artificial
  Synthetic oligonucleotide
taaagtccagctgtcactattctaatttacataactgtcctgtgtggggattctcgtaa

SEQ ID NO: 446778 - DNA, 51 bp, Artificial
  Synthetic oligonucleotide
taaagtcccctacttcgtgcgcgctcaaggcattctccggatctgtgcact

SEQ ID NO: 446779 - DNA, 59 bp, Artificial
  Synthetic oligonucleotide
taaagtcgaggtgcccactcaaataattatgtggtcctaaagcacgcgcccacatggtc

SEQ ID NO: 446780 - DNA, 58 bp, Artificial
  Synthetic oligonucleotide
taaagtcgcggccgtccgcagtcacgcggatatcaccgattgtgactgggctttccgg

SEQ ID NO: 446781 - DNA, 58 bp, Artificial
  Synthetic oligonucleotide
taaagtcgcgtgtgctacgtggtcgtggcgagtgggagaagtatggagcggggataat

SEQ ID NO: 446782 - DNA, 60 bp, Artificial
  Synthetic oligonucleotide
taaagtctaaaaaagtgtcagaggagctctatgaccttgtaaaacagttccatgacatga

SEQ ID NO: 446783 - DNA, 60 bp, Artificial
  Synthetic oligonucleotide
taaagtctggatccgcttggtggacttacaagctcaacaatgcccatggcactaccgatc

SEQ ID NO: 446784 - DNA, 60 bp, Artificial
  Synthetic oligonucleotide
taaagtgaaagtggaaccagaggagctctctcgacgcaggactcggcttgcttagcgcgc

SEQ ID NO: 446785 - DNA, 55 bp, Artificial
  Synthetic oligonucleotide
taaagtgaatataagtagacgcagtttcgaatggctgagtttatgccgccagcgg

SEQ ID NO: 446786 - DNA, 60 bp, Artificial
  Synthetic oligonucleotide
taaagtgaattgttacgcgcgaaatatccttgcttctacagagcttactgacgatatact

SEQ ID NO: 446787 - DNA, 55 bp, Artificial
  Synthetic oligonucleotide
taaagtgactgcagctgataagagtgagcagattgactggcgcgacatcacacag

SEQ ID NO: 446788 - DNA, 50 bp, Artificial
  Synthetic oligonucleotide
taaagtggaagtttgacagtcgcctggcactaaaacacctggctaaagag

SEQ ID NO: 446789 - DNA, 55 bp, Artificial
  Synthetic oligonucleotide
taaagtgggagccccccgaatgttcacagataagtggtacccccagacagacctc

SEQ ID NO: 446790 - DNA, 60 bp, Artificial
  Synthetic oligonucleotide
taaagtgggagcccgtattgagtgggacctcaattggaggaggactctctgcgagcgcaa

SEQ ID NO: 446791 - DNA, 57 bp, Artificial
  Synthetic oligonucleotide
taaagtggtttcagccactatgccttgggcccatcttgggctctctcttgggggact

SEQ ID NO: 446792 - DNA, 53 bp, Artificial
  Synthetic oligonucleotide
taaagtgtagaataggcaacaccacagtgcaggttatcgctactaacactgac

SEQ ID NO: 446793 - DNA, 52 bp, Artificial
  Synthetic oligonucleotide
taaagtgtgcacggcgcttgtgcaacaaaacacaacccgacttaatggacga

SEQ ID NO: 446794 - DNA, 60 bp, Artificial
  Synthetic oligonucleotide
taaagtgtgtagtccgaatggttactcgttcaggatcctgcgacacattctgagatcatt

SEQ ID NO: 446795 - DNA, 56 bp, Artificial
  Synthetic oligonucleotide
taaagttaatgcaccagcacccagcaagtcgagacccgaacccgtggtcgtttgcc

SEQ ID NO: 446796 - DNA, 54 bp, Artificial
  Synthetic oligonucleotide
taaagttataagcgtcggagttatagtatacggagtgccttttaactacgaata

SEQ ID NO: 446797 - DNA, 56 bp, Artificial
  Synthetic oligonucleotide
taaagttcccgtgaaggggtcttatgtggagttcacgtctaagaagattgtcataa

SEQ ID NO: 446798 - DNA, 59 bp, Artificial
  Synthetic oligonucleotide
taaagttcgtgacggtcaatgttatgtccgtcatgtgttcgacgtggctctctactttg

SEQ ID NO: 446799 - DNA, 57 bp, Artificial
  Synthetic oligonucleotide
taaagttgaccccactctgtgtcactttaaactgcacaaatgttaacagtaatggta

SEQ ID NO: 446800 - DNA, 56 bp, Artificial
  Synthetic oligonucleotide
taaagttgaccccactctgtgtcactttagaatgtagaaatgttagcagtaccggt

SEQ ID NO: 446801 - DNA, 57 bp, Artificial
  Synthetic oligonucleotide
taaagttggtccagaggcggttagaccaccacatgcaaaaacgacatcaggtaggga

SEQ ID NO: 446802 - DNA, 59 bp, Artificial
  Synthetic oligonucleotide
taaagttgtcatactctatgacagcaccttcgtttggactccaatattggtgaaaatta

SEQ ID NO: 446803 - DNA, 59 bp, Artificial
  Synthetic oligonucleotide
taaagttgttagcctggtagtgcgacctttctcttcaggtgctttctctatctctggag

SEQ ID NO: 446804 - DNA, 60 bp, Artificial
  Synthetic oligonucleotide
taaagtttattctgactcacttgtcagtaataagggtctagtgctagttgacacactatc

SEQ ID NO: 446805 - DNA, 59 bp, Artificial
  Synthetic oligonucleotide
taaagtttcaggaaatcagtttagagcatttagactgctattaccagatcccaatagat

SEQ ID NO: 446806 - DNA, 60 bp, Artificial
  Synthetic oligonucleotide
taaagttttatgcaaggctgttgattcatatgaaaacctactcgtcacagagaatgagca

SEQ ID NO: 446807 - DNA, 58 bp, Artificial
  Synthetic oligonucleotide
taaataaacaaccactaagcaaagcttgtgtgagcaagattgatgggggttacgtata

SEQ ID NO: 446808 - DNA, 54 bp, Artificial
  Synthetic oligonucleotide
taaataaagacaaaaacaacttagattttagcaaaagaggactatgtatactta

SEQ ID NO: 446809 - DNA, 55 bp, Artificial
  Synthetic oligonucleotide
taaataacgaagtaaggacagatcagcattgggtaactagaactgatatagccga

SEQ ID NO: 446810 - DNA, 57 bp, Artificial
  Synthetic oligonucleotide
taaataagagggtgtaccccgattgagctctcgttcaaaagtctctatgaatcggtg

SEQ ID NO: 446811 - DNA, 60 bp, Artificial
  Synthetic oligonucleotide
taaataagccgaggtactccagcggagtcctccagcaacttgagtgctatatgctggagg

SEQ ID NO: 446812 - DNA, 58 bp, Artificial
  Synthetic oligonucleotide
taaataaggggtgagacccaatagagaggacccgatagctctcgctctaacttggtga

SEQ ID NO: 446813 - DNA, 59 bp, Artificial
  Synthetic oligonucleotide
taaataagtactattattcgcggaggcacatctcaggggttgtttcgatttgcgtgagc

SEQ ID NO: 446814 - DNA, 60 bp, Artificial
  Synthetic oligonucleotide
taaataatgcgcatcgtctcaaggagttaatgctcatggctaattaccgagagcgcaatg

SEQ ID NO: 446815 - DNA, 60 bp, Artificial
  Synthetic oligonucleotide
taaataattatgtgggcctaatgcacgtgcccacattgtcttgccgcttcgcgaatcacc

SEQ ID NO: 446816 - DNA, 57 bp, Artificial
  Synthetic oligonucleotide
taaatacacaaacgcttggtattggatgtttaacgactgatcctaatacgttcgaga

SEQ ID NO: 446817 - DNA, 56 bp, Artificial
  Synthetic oligonucleotide
taaatacataccagagaaacccattagtatattcctgtatatagcctttaacaatg

SEQ ID NO: 446818 - DNA, 60 bp, Artificial
  Synthetic oligonucleotide
taaatacatcatgacctgtatgtctgcggacttggaggttatcaccagcacatgggtcct

SEQ ID NO: 446819 - DNA, 60 bp, Artificial
  Synthetic oligonucleotide
taaataccatacccttctcgttagtatacttgatcgtcatttgcatgtaattatgaacaa

SEQ ID NO: 446820 - DNA, 59 bp, Artificial
  Synthetic oligonucleotide
taaatacccagactctcgggataggatgttcgactacagacataaattcatttgaaaca

SEQ ID NO: 446821 - DNA, 54 bp, Artificial
  Synthetic oligonucleotide
taaatacccttaagaaacgaccagtctgaggccgtaaggtcgtccagaccctga

SEQ ID NO: 446822 - DNA, 56 bp, Artificial
  Synthetic oligonucleotide
taaataccgtcgagaaatcatgcaggctaaactggctacgtcatttagcggagcgc

SEQ ID NO: 446823 - DNA, 56 bp, Artificial
  Synthetic oligonucleotide
taaataccgttccgctttggaggcatgttgactaaaattgaatcaccgattgaccg

SEQ ID NO: 446824 - DNA, 59 bp, Artificial
  Synthetic oligonucleotide
taaatacgaccttgccgtttcacaatgtcagcaaatacgcatttgggaattgccccatg

SEQ ID NO: 446825 - DNA, 60 bp, Artificial
  Synthetic oligonucleotide
taaatacgatgctctaggacacaagtgtaaggactaccaagtctgtgactccgatggatt

SEQ ID NO: 446826 - DNA, 55 bp, Artificial
  Synthetic oligonucleotide
taaatacgtatgccctagctttatacgtgtataatgtgggatccattgcttaacg

SEQ ID NO: 446827 - DNA, 58 bp, Artificial
  Synthetic oligonucleotide
taaatactcttaagaaatgcgaggtctgaggatgtaaacgagtccagatccggcaggt

SEQ ID NO: 446828 - DNA, 60 bp, Artificial
  Synthetic oligonucleotide
taaatactctttatatgaggaattgggacctggattgcagaggaagattgttgggatgcc

SEQ ID NO: 446829 - DNA, 57 bp, Artificial
  Synthetic oligonucleotide
taaatagaactggttgggcgtatttcatacgcgatgagtgttagactccgaaaaatc

SEQ ID NO: 446830 - DNA, 56 bp, Artificial
  Synthetic oligonucleotide
taaatagatcacaacctgcgcatgataatttaatgggtacgatgtggttgaatgca

SEQ ID NO: 446831 - DNA, 58 bp, Artificial
  Synthetic oligonucleotide
taaatagcaccagacccccgcagggagcttggttcggctgcacttggatgaacgggac

SEQ ID NO: 446832 - DNA, 60 bp, Artificial
  Synthetic oligonucleotide
taaatagcgagtttgtaagcttagctatcagagagtgtgaaaactactcaactgatccta

SEQ ID NO: 446833 - DNA, 60 bp, Artificial
  Synthetic oligonucleotide
taaataggtatgcccaaatggcagttcagcaatatctacgagtcggatacatcgaggaac

SEQ ID NO: 446834 - DNA, 59 bp, Artificial
  Synthetic oligonucleotide
taaataggtgacgtagtagacacgcacctacccatcgccataatgtttccataccctca

SEQ ID NO: 446835 - DNA, 59 bp, Artificial
  Synthetic oligonucleotide
taaataggttcactcgtattcaggcgattagtagcttggtaaaaatgcaagcatttcca

SEQ ID NO: 446836 - DNA, 60 bp, Artificial
  Synthetic oligonucleotide
taaatatatcatttacaggtacagtgtgtataaaaaacagccagatggagtctgacggaa

SEQ ID NO: 446837 - DNA, 55 bp, Artificial
  Synthetic oligonucleotide
taaatatcactgagccctcaacccaggagtattcaaccactaagcacacttatgt

SEQ ID NO: 446838 - DNA, 56 bp, Artificial
  Synthetic oligonucleotide
taaatatgatgttaaagtaccgcatcttacattcggcgtgttaaacgtttctgaac

SEQ ID NO: 446839 - DNA, 59 bp, Artificial
  Synthetic oligonucleotide
taaatatgctcaggacgtagaagatgtcaaagggcttaccaagtttacctgctacgcat

SEQ ID NO: 446840 - DNA, 60 bp, Artificial
  Synthetic oligonucleotide
taaatatggagcacttacaagcagcaacacacccaccactaatgctgcgtgtgcctggct

SEQ ID NO: 446841 - DNA, 60 bp, Artificial
  Synthetic oligonucleotide
taaatatgttctgttcaatcatgaggtaaattgggatgtcattaatttattagttcagag

SEQ ID NO: 446842 - DNA, 58 bp, Artificial
  Synthetic oligonucleotide
taaatcaaccagacattagaaattttggacacgtagctggagagaatataaacccaga

SEQ ID NO: 446843 - DNA, 60 bp, Artificial
  Synthetic oligonucleotide
taaatcacgcgattaaacatggatcatggattagcctgttctgcaattatccgaaatctg

SEQ ID NO: 446844 - DNA, 60 bp, Artificial
  Synthetic oligonucleotide
taaatcactagccgcggagaattggcctaattgctggctgccgctagataataacgtgcc

SEQ ID NO: 446845 - DNA, 55 bp, Artificial
  Synthetic oligonucleotide
taaatcagccgtcctcgccttgctttgaacatggagggcgcctacggtgcgatct

SEQ ID NO: 446846 - DNA, 60 bp, Artificial
  Synthetic oligonucleotide
taaatcaggtgtctggatattacatcccgcagagagatacaattctctgacggcatatca

SEQ ID NO: 446847 - DNA, 50 bp, Artificial
  Synthetic oligonucleotide
taaatcaggttggtgtcctaaacaccagttctaacggtttctttaaaccg

SEQ ID NO: 446848 - DNA, 60 bp, Artificial
  Synthetic oligonucleotide
taaatcatagtataccatctagtcacttgactccggatatgtaaagatattttgggaaca

SEQ ID NO: 446849 - DNA, 60 bp, Artificial
  Synthetic oligonucleotide
taaatcatttcatccctgagctcggccccattagtgtcactacctgtgagctttacgagc

SEQ ID NO: 446850 - DNA, 57 bp, Artificial
  Synthetic oligonucleotide
taaatccatcggtagcggctaccctgggttttggcacgtacatgtcaaaagcctatg

SEQ ID NO: 446851 - DNA, 55 bp, Artificial
  Synthetic oligonucleotide
taaatccatgggtattgatggtaaggtttggatggatgacaacgtcgccaagagg

SEQ ID NO: 446852 - DNA, 56 bp, Artificial
  Synthetic oligonucleotide
taaatcccgctttctatgtggctcacatcgcgttggaaactgggtgggggcgttcc

SEQ ID NO: 446853 - DNA, 50 bp, Artificial
  Synthetic oligonucleotide
taaatcctcatacgccgcactgctcactgttacggacgtgagaccagtct

SEQ ID NO: 446854 - DNA, 53 bp, Artificial
  Synthetic oligonucleotide
taaatcctgtctgcctgcatgtgtatatggacttgttgtggcaagtggatatg

SEQ ID NO: 446855 - DNA, 54 bp, Artificial
  Synthetic oligonucleotide
taaatccttgattcaattcctcgagatgctggacactgagatggctcaacgtat

SEQ ID NO: 446856 - DNA, 60 bp, Artificial
  Synthetic oligonucleotide
taaatcggcggcgactgccttaccttcctgtgtcgctttagccaacatggccatcatgtc

SEQ ID NO: 446857 - DNA, 60 bp, Artificial
  Synthetic oligonucleotide
taaatcgtgtgtcccagccaatctctgtgtcctctaggatcacgactggtgaaccccgtg

SEQ ID NO: 446858 - DNA, 58 bp, Artificial
  Synthetic oligonucleotide
taaatcgttgtcatcccttttcaccctcctcatcatcctttgaacacttgcaacctta

SEQ ID NO: 446859 - DNA, 50 bp, Artificial
  Synthetic oligonucleotide
taaatctggagacgaggtatgtaacaaataaagacatgcgcgtacatcgt

SEQ ID NO: 446860 - DNA, 54 bp, Artificial
  Synthetic oligonucleotide
taaatctgtctaatgaggagatagtttatggtgcaactttgggtgttgaaggaa

SEQ ID NO: 446861 - DNA, 55 bp, Artificial
  Synthetic oligonucleotide
taaatcttttgatgagatatgggacaacatgacttggctgcaatgggagaaggaa

SEQ ID NO: 446862 - DNA, 60 bp, Artificial
  Synthetic oligonucleotide
taaatgaactacttgacactacacagttgcaagtagctaatagtttaatgaatggtgtca

SEQ ID NO: 446863 - DNA, 59 bp, Artificial
  Synthetic oligonucleotide
taaatgaagatttacactcagctttttcgatgccagacgatcagtttaacgtgttattg

SEQ ID NO: 446864 - DNA, 59 bp, Artificial
  Synthetic oligonucleotide
taaatgaatctataacaatgacttgtgtgagaccccacaacaatacaaggaaaagtata

SEQ ID NO: 446865 - DNA, 60 bp, Artificial
  Synthetic oligonucleotide
taaatgaatggttgtgcaaccctatggacatatcactatattattatcaacagagtagtg

SEQ ID NO: 446866 - DNA, 60 bp, Artificial
  Synthetic oligonucleotide
taaatgacaactatggtattggtaaacagcaagcattcaatttactacgatctgacccaa

SEQ ID NO: 446867 - DNA, 57 bp, Artificial
  Synthetic oligonucleotide
taaatgaccacataaatagttatgtggtcctaacgacctggcccacattgtcttccc

SEQ ID NO: 446868 - DNA, 57 bp, Artificial
  Synthetic oligonucleotide
taaatgaccccgattacgggttgcagatggtagtttagggagcggcagctgccgtcc

SEQ ID NO: 446869 - DNA, 57 bp, Artificial
  Synthetic oligonucleotide
taaatgagatacaccgattgtactttttgaggcccatgactcacccggctttaattc

SEQ ID NO: 446870 - DNA, 57 bp, Artificial
  Synthetic oligonucleotide
taaatgaggacccgatatattggggatcaattggggactcataaattggctttccta

SEQ ID NO: 446871 - DNA, 59 bp, Artificial
  Synthetic oligonucleotide
taaatgagtaacttcctctacttgaggttgctaagtaggttgctaagcgccacctagca

SEQ ID NO: 446872 - DNA, 59 bp, Artificial
  Synthetic oligonucleotide
taaatgcctccatcttcaaagcgctgggcttgaccaacccggtgtgacgtaggacaggc

SEQ ID NO: 446873 - DNA, 60 bp, Artificial
  Synthetic oligonucleotide
taaatgcctgctctgtttctaagaatagtgtagccattattgaatgtcatttggacacct

SEQ ID NO: 446874 - DNA, 58 bp, Artificial
  Synthetic oligonucleotide
taaatgcgacatattgcttggcgatcaaaactggtcatacatagtggaaaggcctact

SEQ ID NO: 446875 - DNA, 55 bp, Artificial
  Synthetic oligonucleotide
taaatgcggttgcgtttgacaacatgcgcatcatgaacgaattgtagacgccaac

SEQ ID NO: 446876 - DNA, 57 bp, Artificial
  Synthetic oligonucleotide
taaatgctatagttgaacaagtaagaagctttgttagtggaggaagacaaagagaac

SEQ ID NO: 446877 - DNA, 57 bp, Artificial
  Synthetic oligonucleotide
taaatgctgaaggtacattttcatcgggcagagcggacacttcagcgcatcatactg

SEQ ID NO: 446878 - DNA, 59 bp, Artificial
  Synthetic oligonucleotide
taaatggaaagtttggctcagctatcagaaatagaaattggatgactgattctaaaacg

SEQ ID NO: 446879 - DNA, 54 bp, Artificial
  Synthetic oligonucleotide
taaatggacagtgcagccaataaagctaccagaaaaggaggtatggacagtcaa

SEQ ID NO: 446880 - DNA, 56 bp, Artificial
  Synthetic oligonucleotide
taaatggattggcgggttggagctacatacaccagagttgccatcctataggccct

SEQ ID NO: 446881 - DNA, 57 bp, Artificial
  Synthetic oligonucleotide
taaatggcaacttcactgtacaaagccgtgggagtttcactggtcggtgtctacctc

SEQ ID NO: 446882 - DNA, 58 bp, Artificial
  Synthetic oligonucleotide
taaatgggccttcagatgaaaaggatctaatagtgctatcaggtctgggaacaaagtt

SEQ ID NO: 446883 - DNA, 55 bp, Artificial
  Synthetic oligonucleotide
taaatgggctactttaagtgctaacttagttcttaaaccagacgcacagtacctg

SEQ ID NO: 446884 - DNA, 56 bp, Artificial
  Synthetic oligonucleotide
taaatggggcaaagttcctgattggacagaaaactgggcggagccgaaggtgccga

SEQ ID NO: 446885 - DNA, 56 bp, Artificial
  Synthetic oligonucleotide
taaatggtatcaacagacgtttaaagctgaggagagaaaagaatttgcgaagagtt

SEQ ID NO: 446886 - DNA, 60 bp, Artificial
  Synthetic oligonucleotide
taaatggtgcttcactctgaattattcctccgcagcggagcgagaagactttctcgctct

SEQ ID NO: 446887 - DNA, 58 bp, Artificial
  Synthetic oligonucleotide
taaatgtaacacaagaacgcatgttaattgaacctccaagactacgaagtacaccatg

SEQ ID NO: 446888 - DNA, 56 bp, Artificial
  Synthetic oligonucleotide
taaatgtaagaggatcaggactgagaatactcataagaggtaattcccccgtattt

SEQ ID NO: 446889 - DNA, 54 bp, Artificial
  Synthetic oligonucleotide
taaatgtaatcgcgttgtataaatttcaagtaagccgttcgttcgagctccacg

SEQ ID NO: 446890 - DNA, 55 bp, Artificial
  Synthetic oligonucleotide
taaatgtaattcacctattgccagttggtctgctgcgtttactagtcctgctctg

SEQ ID NO: 446891 - DNA, 60 bp, Artificial
  Synthetic oligonucleotide
taaatgtagctgagccaaatgtccataaggtgcgtgggctcacaatgggtccaccaacac

SEQ ID NO: 446892 - DNA, 60 bp, Artificial
  Synthetic oligonucleotide
taaatgtcagctaaaaggagaagccatgcatggacaagtagactgtagtccaggaatatg

SEQ ID NO: 446893 - DNA, 58 bp, Artificial
  Synthetic oligonucleotide
taaattaaacaggcaggaaatagaatcggtgaagctagagaatcttggtgtgtatcaa

SEQ ID NO: 446894 - DNA, 55 bp, Artificial
  Synthetic oligonucleotide
taaattaccccataccgattatgcctggacttttgttcttgcggagcatactact

SEQ ID NO: 446895 - DNA, 54 bp, Artificial
  Synthetic oligonucleotide
taaattacccgaccatgcaccctcactgtcgatgtacaacggttcctgccttag

SEQ ID NO: 446896 - DNA, 58 bp, Artificial
  Synthetic oligonucleotide
taaattactgggcatgtggcccaatgggtatagagcaaaatgcccaaacgtgacgccc

SEQ ID NO: 446897 - DNA, 60 bp, Artificial
  Synthetic oligonucleotide
taaattatagcgtttcaaattcacagtatccagtaagtggcagtgtgagttacacagcga

SEQ ID NO: 446898 - DNA, 54 bp, Artificial
  Synthetic oligonucleotide
taaattatatgtcggttgtagggacgtcgtgaaggacgttagtaacgcttacag

SEQ ID NO: 446899 - DNA, 56 bp, Artificial
  Synthetic oligonucleotide
taaattatcacttggcaactactgaagaccatgaaagggaaatttggtccgaccca

SEQ ID NO: 446900 - DNA, 56 bp, Artificial
  Synthetic oligonucleotide
taaattatcagtcttgcctactttaaaattatttatcgaagcatatcttttagaag

SEQ ID NO: 446901 - DNA, 60 bp, Artificial
  Synthetic oligonucleotide
taaattcatatgcgccaatttcattagaaaaaaggcgtgcccagatttcagcactattga

SEQ ID NO: 446902 - DNA, 55 bp, Artificial
  Synthetic oligonucleotide
taaattcatctaaaacatgtcgtgtaatggtatacttttcgttggaaattggccg

SEQ ID NO: 446903 - DNA, 53 bp, Artificial
  Synthetic oligonucleotide
taaattccgcctgttttgagtccccttcacccaatctggtgtcgtgcatttca

SEQ ID NO: 446904 - DNA, 57 bp, Artificial
  Synthetic oligonucleotide
taaattcgctgttagcgctaagatcaagggagtacatctgtacgttgagcctgtagg

SEQ ID NO: 446905 - DNA, 55 bp, Artificial
  Synthetic oligonucleotide
taaattcgttaagatttaggttcagtttagcagtagaagaaccgccattctctat

SEQ ID NO: 446906 - DNA, 58 bp, Artificial
  Synthetic oligonucleotide
taaattcgttgagaaccgtgatttgaacaacattcagttggacttctatgacaccagg

SEQ ID NO: 446907 - DNA, 57 bp, Artificial
  Synthetic oligonucleotide
taaattctcttgcagtgaaatctctgctcatgtcagcagaaaacaactcaaagcttc

SEQ ID NO: 446908 - DNA, 60 bp, Artificial
  Synthetic oligonucleotide
taaattctcttgcagtgaaatctctgctcatgtcagcaggaaataacatcatgcctaact

SEQ ID NO: 446909 - DNA, 60 bp, Artificial
  Synthetic oligonucleotide
taaattgaacaccgatatatcggtgatcaattggtgcctcataattggtgttgcctaaaa

SEQ ID NO: 446910 - DNA, 57 bp, Artificial
  Synthetic oligonucleotide
taaattgaatttgtggagccggtgtctttaattcaaaatgcctaagcgggatgctcc

SEQ ID NO: 446911 - DNA, 52 bp, Artificial
  Synthetic oligonucleotide
taaattgagtaccgatatatcggtgacatattgggtcctctggagtcttagg

SEQ ID NO: 446912 - DNA, 60 bp, Artificial
  Synthetic oligonucleotide
taaattgagtaccgattgactcgctctggcaactctctctggtatatcggtacccaatat

SEQ ID NO: 446913 - DNA, 60 bp, Artificial
  Synthetic oligonucleotide
taaattgcagatctgtacgaaggtactcacatgtaaaggcgactgtcatccgcctaaaga

SEQ ID NO: 446914 - DNA, 56 bp, Artificial
  Synthetic oligonucleotide
taaattgcagccgccggcttaggagggggtgtaccacttctccccctcctgcatta

SEQ ID NO: 446915 - DNA, 60 bp, Artificial
  Synthetic oligonucleotide
taaattgcctaacaagtatacaataacatatgatattgtagcagttaaagctgatgggtc

SEQ ID NO: 446916 - DNA, 52 bp, Artificial
  Synthetic oligonucleotide
taaattgcctttacgaaaatacccttgtctttgagtctgtgaagcgcgtgct

SEQ ID NO: 446917 - DNA, 60 bp, Artificial
  Synthetic oligonucleotide
taaattggtcattcccaaaagagagaaatactccaaaacaatgcatgcagctcaatttaa

SEQ ID NO: 446918 - DNA, 57 bp, Artificial
  Synthetic oligonucleotide
taaattggtggcatgcaaaaaatacaccaggatgggaggaaccgagttcttctctta

SEQ ID NO: 446919 - DNA, 58 bp, Artificial
  Synthetic oligonucleotide
taaattgtacctcggaggtatgtcatacttctgtggtaatcataaacctaagttgtca

SEQ ID NO: 446920 - DNA, 59 bp, Artificial
  Synthetic oligonucleotide
taaattgtatctaaagatagggaggcaggcattatcctatagtgaagaggcgtataacc

SEQ ID NO: 446921 - DNA, 54 bp, Artificial
  Synthetic oligonucleotide
taaattgtatgagggggatttaagggtaacatttaacttcggaattgattgtgc

SEQ ID NO: 446922 - DNA, 50 bp, Artificial
  Synthetic oligonucleotide
taaattgtgatggcacgcttttgggtaatattacaatctacccacatcag

SEQ ID NO: 446923 - DNA, 58 bp, Artificial
  Synthetic oligonucleotide
taaattgttaaaacgtgatggtcatgggattactgtgttacatgatggtatttattgt

SEQ ID NO: 446924 - DNA, 55 bp, Artificial
  Synthetic oligonucleotide
taaattgttttgcaagtatctttactgtcggtgcccggaaagggatatcaacgga

SEQ ID NO: 446925 - DNA, 57 bp, Artificial
  Synthetic oligonucleotide
taaatttacatgacaactttgagtctttgtgggatacgataacgacttcaaactata

SEQ ID NO: 446926 - DNA, 60 bp, Artificial
  Synthetic oligonucleotide
taaatttccatcctcatgtgcctctcgggcacatatgatgtacagaggcttccaacgacc

SEQ ID NO: 446927 - DNA, 57 bp, Artificial
  Synthetic oligonucleotide
taaatttcgactttgaatcacggacgaaagacaaatcagaactttggttcatgtcaa

SEQ ID NO: 446928 - DNA, 58 bp, Artificial
  Synthetic oligonucleotide
taaatttcgataattcatcagaatacatagaaaattggaacttacaaaatagaagaca

SEQ ID NO: 446929 - DNA, 58 bp, Artificial
  Synthetic oligonucleotide
taaatttcgttccaactaattatgcttgcttacgctactaactcaacatactacctca

SEQ ID NO: 446930 - DNA, 58 bp, Artificial
  Synthetic oligonucleotide
taaatttgataaggcccatgcctgggttaacaggcccatgtataggaagcccaggata

SEQ ID NO: 446931 - DNA, 52 bp, Artificial
  Synthetic oligonucleotide
taaatttgccacaaaggactttccccttgggactttccaggaaggtgtgccc

SEQ ID NO: 446932 - DNA, 57 bp, Artificial
  Synthetic oligonucleotide
taaatttgggattgtatcaagattggtgaaaccgaattatattttttctagccatga

SEQ ID NO: 446933 - DNA, 54 bp, Artificial
  Synthetic oligonucleotide
taaattttgtcttacgaccgacggttatcaccatttagaacgtgacgtcctcca

SEQ ID NO: 446934 - DNA, 60 bp, Artificial
  Synthetic oligonucleotide
taacaaaataccactgaagttggctagatcatttcgatctcccatgcttgagttggttaa

SEQ ID NO: 446935 - DNA, 60 bp, Artificial
  Synthetic oligonucleotide
taacaaaattacctatggggcatgtcccaaatatgtcaagcagagcactctaaaattggc

SEQ ID NO: 446936 - DNA, 60 bp, Artificial
  Synthetic oligonucleotide
taacaaacaacctagaacatacatgcgagcatgtaactgtaaattgtggtcagaaatcag

SEQ ID NO: 446937 - DNA, 60 bp, Artificial
  Synthetic oligonucleotide
taacaaacccgtttctgtagactgcgcaatgtatgtctgcaatggtaatgaccgttgtaa

SEQ ID NO: 446938 - DNA, 50 bp, Artificial
  Synthetic oligonucleotide
taacaaagttagtaggtgaataaaaacgataaacacccgaaactccctcc

SEQ ID NO: 446939 - DNA, 54 bp, Artificial
  Synthetic oligonucleotide
taacaaatgttgttcttaaggatccggaaaaacatttcaggcttccattgccct

SEQ ID NO: 446940 - DNA, 60 bp, Artificial
  Synthetic oligonucleotide
taacaacaatgccgtgatatctgatgagaggctgaagtgctggctctgtaaaaaaccatc

SEQ ID NO: 446941 - DNA, 60 bp, Artificial
  Synthetic oligonucleotide
taacaacacagcactcagtagatatgtgctagatagaacaaacccgcaaaaatacattaa

SEQ ID NO: 446942 - DNA, 60 bp, Artificial
  Synthetic oligonucleotide
taacaaccatgttgtgtacaaccatcaggaggctggcaaatatgagaaccacacggagaa

SEQ ID NO: 446943 - DNA, 55 bp, Artificial
  Synthetic oligonucleotide
taacaacccaagaggcagctaatgcaatagtggcttatgcagaatggcccagttt

SEQ ID NO: 446944 - DNA, 55 bp, Artificial
  Synthetic oligonucleotide
taacaacctccaaagtgttgaaggtattggcattcttaacgcagtgcagctgcaa

SEQ ID NO: 446945 - DNA, 50 bp, Artificial
  Synthetic oligonucleotide
taacaacgaagcaccttgagtttttaactgaagagaatcgaaaagtcgcg

SEQ ID NO: 446946 - DNA, 56 bp, Artificial
  Synthetic oligonucleotide
taacaacgcgaaaagcagggatactgttcgaaagctgtttgcaagcattctcaatg

SEQ ID NO: 446947 - DNA, 50 bp, Artificial
  Synthetic oligonucleotide
taacaacggagtgtccagcagtggcacgtcgtacgcacccgagttaccga

SEQ ID NO: 446948 - DNA, 55 bp, Artificial
  Synthetic oligonucleotide
taacaactatcaggcgattctctagttctaacacgaacgtttacggtcgttgcca

SEQ ID NO: 446949 - DNA, 58 bp, Artificial
  Synthetic oligonucleotide
taacaactcatagtatggcaatgaataatgtcccttcaatgtttgctgttatggtttc

SEQ ID NO: 446950 - DNA, 50 bp, Artificial
  Synthetic oligonucleotide
taacaactctggcactaccacttggttgaaccgtctgctaaccacacttc

SEQ ID NO: 446951 - DNA, 58 bp, Artificial
  Synthetic oligonucleotide
taacaactgacccgagcacttttgaaacagttgcaacgacagagaaactagctattac

SEQ ID NO: 446952 - DNA, 50 bp, Artificial
  Synthetic oligonucleotide
taacaagaattcgtcccagctgtaccaacatcgataagatgactagtagc

SEQ ID NO: 446953 - DNA, 60 bp, Artificial
  Synthetic oligonucleotide
taacaagagaaccttacgtgtcatgcagttccaataaatgttatcaatttgcactcgggc

SEQ ID NO: 446954 - DNA, 55 bp, Artificial
  Synthetic oligonucleotide
taacaagagatggggggaatactaatgagactgggaatgggactgagaccttcag

SEQ ID NO: 446955 - DNA, 55 bp, Artificial
  Synthetic oligonucleotide
taacaagagatggtggtacgagcgataccaataccaccgagaccttcagacctgg

SEQ ID NO: 446956 - DNA, 54 bp, Artificial
  Synthetic oligonucleotide
taacaagcgtcgttggttgtccaccaatcgccgtaattacttacgatttcctac

SEQ ID NO: 446957 - DNA, 59 bp, Artificial
  Synthetic oligonucleotide
taacaaggaaactggtagactgaacatcaatggaccaactcgcactaagttggagccta

SEQ ID NO: 446958 - DNA, 60 bp, Artificial
  Synthetic oligonucleotide
taacaaggctgagcatctcaagcgctactctccgcctgccgaagggaattgtggttggca

SEQ ID NO: 446959 - DNA, 60 bp, Artificial
  Synthetic oligonucleotide
taacaagggagccttatgtgtcatgcagctccgataaatgttatcaatttgcacttgggc

SEQ ID NO: 446960 - DNA, 55 bp, Artificial
  Synthetic oligonucleotide
taacaagggatggtggtcataacacgaatactactgagatcttcagacctggagg

SEQ ID NO: 446961 - DNA, 60 bp, Artificial
  Synthetic oligonucleotide
taacaagtgatgaaaagtatgctaaaggggttagctttgcatcagtaatgtattcatggg

SEQ ID NO: 446962 - DNA, 55 bp, Artificial
  Synthetic oligonucleotide
taacaagtgcatccctttgtccaagcgaaagtaccctttgtgggctactttcaaa

SEQ ID NO: 446963 - DNA, 55 bp, Artificial
  Synthetic oligonucleotide
taacaataaaactggtaagcaaggggtttatgctcgagatttcttaaacattcga

SEQ ID NO: 446964 - DNA, 60 bp, Artificial
  Synthetic oligonucleotide
taacaataagacattcagtggaaaaggagaatgtacaaatgtcagcacagtacaatgtac

SEQ ID NO: 446965 - DNA, 51 bp, Artificial
  Synthetic oligonucleotide
taacaataagacgttcaatggaacaggaaaatgtaataatgtcagcacagt

SEQ ID NO: 446966 - DNA, 60 bp, Artificial
  Synthetic oligonucleotide
taacaatactaataacgagtctgagatcttcagacctggaggaggagatatgagggacaa

SEQ ID NO: 446967 - DNA, 54 bp, Artificial
  Synthetic oligonucleotide
taacaatagtagaactctcctcgtagaggactatgattccctcgttctatcata

SEQ ID NO: 446968 - DNA, 53 bp, Artificial
  Synthetic oligonucleotide
taacaatcatatatgtaaaaagtaggttggcaccgaaaacggtcggaccgacc

SEQ ID NO: 446969 - DNA, 59 bp, Artificial
  Synthetic oligonucleotide
taacaatcggggtagtgaataccactctgtcaacaatagcccttctcatcggaatagga

SEQ ID NO: 446970 - DNA, 58 bp, Artificial
  Synthetic oligonucleotide
taacaatgaacataccaaaatacgggggctcttgagcgcacaaggaaagggtatcatc

SEQ ID NO: 446971 - DNA, 55 bp, Artificial
  Synthetic oligonucleotide
taacaatgaagctgaagatgttactcctgaggtggaggtaccggctatagactct

SEQ ID NO: 446972 - DNA, 58 bp, Artificial
  Synthetic oligonucleotide
taacaatgcctcaatatgatgtttagaaaaacaaggggggaactgtgggattcatata

SEQ ID NO: 446973 - DNA, 58 bp, Artificial
  Synthetic oligonucleotide
taacaatgggagcgcgcctagaagaataccacgcaagggggcaatggcgtggtctacc

SEQ ID NO: 446974 - DNA, 56 bp, Artificial
  Synthetic oligonucleotide
taacaatgtaattccttatgatcaagtaaacccatactgcgctaagcacgcatcca

SEQ ID NO: 446975 - DNA, 60 bp, Artificial
  Synthetic oligonucleotide
taacaatgtgcccacgaatgccactagcttaatggagaggctgcgcttcccggtctcagc

SEQ ID NO: 446976 - DNA, 57 bp, Artificial
  Synthetic oligonucleotide
taacaattatacgtcgtgtctactctcggtcgacgttagacaaacatgactatttta

SEQ ID NO: 446977 - DNA, 58 bp, Artificial
  Synthetic oligonucleotide
taacaattgcacccatgtacctggaattatctggtataaggtcaaaaacagtaataca

SEQ ID NO: 446978 - DNA, 56 bp, Artificial
  Synthetic oligonucleotide
taacaattgtatagaggggaccacaacccggtcacatcatacaattctaatctaag

SEQ ID NO: 446979 - DNA, 60 bp, Artificial
  Synthetic oligonucleotide
taacacaacatggggaattgaactcactttgacaaacacatccattgcaaatgaaactac

SEQ ID NO: 446980 - DNA, 60 bp, Artificial
  Synthetic oligonucleotide
taacacaactcacccattttgtcatggcgcaaggggacaacgttatcatcaacctcataa

SEQ ID NO: 446981 - DNA, 60 bp, Artificial
  Synthetic oligonucleotide
taacacaagcatgatatgcctagcattcaaaggagatggtatcaacacagggaagtcagg

SEQ ID NO: 446982 - DNA, 60 bp, Artificial
  Synthetic oligonucleotide
taacacaattatcaaacaaaggaaaaggtgtgaaccagttgcagttgctatacatggtga

SEQ ID NO: 446983 - DNA, 55 bp, Artificial
  Synthetic oligonucleotide
taacacacagcgccttgtgtgggcctgtttaggcgtggaggtggggcgtggacag

SEQ ID NO: 446984 - DNA, 54 bp, Artificial
  Synthetic oligonucleotide
taacacacagttgaataagttgtttaacaaatggcacagtacaaagaagtatgg

SEQ ID NO: 446985 - DNA, 55 bp, Artificial
  Synthetic oligonucleotide
taacacacccgctaataatgctgattgtgccaggctgcaagcacaagaggaggac

SEQ ID NO: 446986 - DNA, 57 bp, Artificial
  Synthetic oligonucleotide
taacacacgactggggcatatacagcccctactacctaacgcccaccagaattagcc

SEQ ID NO: 446987 - DNA, 54 bp, Artificial
  Synthetic oligonucleotide
taacacagatgatggtgattaaaatttttcgtctcttgacgttaaacatctatc

SEQ ID NO: 446988 - DNA, 55 bp, Artificial
  Synthetic oligonucleotide
taacacatcttcgtacgccgaaaattgagcccagcgtagtctctacaattttgga

SEQ ID NO: 446989 - DNA, 60 bp, Artificial
  Synthetic oligonucleotide
taacacattatgaaaatgatagtacagacctacgtgaccatatagactattggaaacaaa

SEQ ID NO: 446990 - DNA, 60 bp, Artificial
  Synthetic oligonucleotide
taacaccagaccgccgctaggcaattggttcggatgcacctggatgaactcaactggatt

SEQ ID NO: 446991 - DNA, 52 bp, Artificial
  Synthetic oligonucleotide
taacaccatattggagtgttagtcttgaattacataaaagagttcgtaggca

SEQ ID NO: 446992 - DNA, 54 bp, Artificial
  Synthetic oligonucleotide
taacaccatcatacccggattgattgatcgcgcgttgcagtggcacctcgtact

SEQ ID NO: 446993 - DNA, 60 bp, Artificial
  Synthetic oligonucleotide
taacaccatgaaagttgcgcagtgtttcgctccgcacaaccccagtgtagatcaggtcga

SEQ ID NO: 446994 - DNA, 59 bp, Artificial
  Synthetic oligonucleotide
taacacccagctcaccaagcgtcttcgggctgcctggttgaagtgcataggaaactccg

SEQ ID NO: 446995 - DNA, 57 bp, Artificial
  Synthetic oligonucleotide
taacaccccggtgcctagtcgattacccctacaggctgtggcattatccgtgcacag

SEQ ID NO: 446996 - DNA, 55 bp, Artificial
  Synthetic oligonucleotide
taacaccctcacttgctacatcaaggcccgggcagcctgtagagccgcagggctc

SEQ ID NO: 446997 - DNA, 59 bp, Artificial
  Synthetic oligonucleotide
taacacccttgcagttttatggtgtgttcacagccgtgtagaggtagaggacacacagc

SEQ ID NO: 446998 - DNA, 54 bp, Artificial
  Synthetic oligonucleotide
taacaccggctttggtcagttattcgcagaagtcggcgacgtgcccacttggga

SEQ ID NO: 446999 - DNA, 54 bp, Artificial
  Synthetic oligonucleotide
taacacctctattcggaggagtaaccccatcgggtgttagaagtttcgtcagac

SEQ ID NO: 447000 - DNA, 56 bp, Artificial
  Synthetic oligonucleotide
taacacctgagcggcacgtttgccaaatgctcgcattacatacagcttcctggtac

SEQ ID NO: 447001 - DNA, 56 bp, Artificial
  Synthetic oligonucleotide
taacacctggaaatgacaaaacatactttactgtacccgatggcttatggggagac

SEQ ID NO: 447002 - DNA, 60 bp, Artificial
  Synthetic oligonucleotide
taacacctggtaggtatagaacagcaatttgtggactctaccctgcacagatcaaagcga

SEQ ID NO: 447003 - DNA, 55 bp, Artificial
  Synthetic oligonucleotide
taacacgattgtaggagcagcgtgacatgctatgcagcgataggtaggtacggtg

SEQ ID NO: 447004 - DNA, 55 bp, Artificial
  Synthetic oligonucleotide
taacacgcatgacctagttggtgatgtcaagcttgcaggtgtggtgatggcaggg

SEQ ID NO: 447005 - DNA, 50 bp, Artificial
  Synthetic oligonucleotide
taacacggttccagtagctaacaagcaaggcatagtggaatcaacttatc

SEQ ID NO: 447006 - DNA, 58 bp, Artificial
  Synthetic oligonucleotide
taacacgtttgacgtgaataataggattgtccaagaaactatgaaaatagcttcgata

SEQ ID NO: 447007 - DNA, 50 bp, Artificial
  Synthetic oligonucleotide
taacactaaacgggtgcgtctggcacacactctagcctgaatctcagaca

SEQ ID NO: 447008 - DNA, 55 bp, Artificial
  Synthetic oligonucleotide
taacactaagactcaaatccacaagagcccagtctatggtgcagtggatgtgaag

SEQ ID NO: 447009 - DNA, 59 bp, Artificial
  Synthetic oligonucleotide
taacactacccagctcggagttgggtcctaaagagtcagggctatagctgctagcccta

SEQ ID NO: 447010 - DNA, 58 bp, Artificial
  Synthetic oligonucleotide
taacactatgaccgatgaaaaacaattctgggcgaaagtgaagtgcacgccgtatcta

SEQ ID NO: 447011 - DNA, 55 bp, Artificial
  Synthetic oligonucleotide
taacactcaaggtagcacctgtcggaaagactgacattgtcattatcagaatgcc

SEQ ID NO: 447012 - DNA, 60 bp, Artificial
  Synthetic oligonucleotide
taacactcacatcttggttcatgccgctgacaacagactcacgccaggctgaccacgtgc

SEQ ID NO: 447013 - DNA, 55 bp, Artificial
  Synthetic oligonucleotide
taacactccaatatttgccataaaaagaaggacagtactaagtggagaaaattag

SEQ ID NO: 447014 - DNA, 57 bp, Artificial
  Synthetic oligonucleotide
taacactcgttagttcctcactcgtgaacgttcaatcaccaggtaactcaacgcgta

SEQ ID NO: 447015 - DNA, 60 bp, Artificial
  Synthetic oligonucleotide
taacactgacatggtgcgaagagcctattgagctagttagtagtcctccggcccctgaat

SEQ ID NO: 447016 - DNA, 52 bp, Artificial
  Synthetic oligonucleotide
taacactgcctccgcgtaatcattgggggggtccgggggggcttgcccctgg

SEQ ID NO: 447017 - DNA, 60 bp, Artificial
  Synthetic oligonucleotide
taacactggacgaggtgctgcatacaacgcgagactagccttccgatctgacttggcgtg

SEQ ID NO: 447018 - DNA, 57 bp, Artificial
  Synthetic oligonucleotide
taacacttccactcctcctttaacaagcagttttggaactgaggcaacattagggca

SEQ ID NO: 447019 - DNA, 55 bp, Artificial
  Synthetic oligonucleotide
taacagaaagcgatccaatatctgatgttaccactactggtggtcatcctacagt

SEQ ID NO: 447020 - DNA, 51 bp, Artificial
  Synthetic oligonucleotide
taacagaagggttaaagagacgctcgaaaagtatagacaaacgcaaataaa

SEQ ID NO: 447021 - DNA, 60 bp, Artificial
  Synthetic oligonucleotide
taacagaatgcccaagctttcttacatctattaaagcttgtgatctggctatgtgttatg

SEQ ID NO: 447022 - DNA, 60 bp, Artificial
  Synthetic oligonucleotide
taacagacctgtagtattgctttgtcacacagaggaatttgcttacgaggtaggagcgct

SEQ ID NO: 447023 - DNA, 55 bp, Artificial
  Synthetic oligonucleotide
taacagacctttgtaagagtctggttagttctgtgctctcaaaggatgtattggg

SEQ ID NO: 447024 - DNA, 57 bp, Artificial
  Synthetic oligonucleotide
taacagacgcgagacgtagagcgagtccttacgtgtataaaagcatagctgtagccc

SEQ ID NO: 447025 - DNA, 55 bp, Artificial
  Synthetic oligonucleotide
taacagactttatgcaaataaacgtctcatatccgcgtccacattgcatatgtgg

SEQ ID NO: 447026 - DNA, 60 bp, Artificial
  Synthetic oligonucleotide
taacagagatagtgcatttgaatagcaccactgcagagaaggaaatttgtcctaaagcag

SEQ ID NO: 447027 - DNA, 57 bp, Artificial
  Synthetic oligonucleotide
taacagagatagtgtatttgaataatactaccatagagaaggaaaattgtcctaaag

SEQ ID NO: 447028 - DNA, 60 bp, Artificial
  Synthetic oligonucleotide
taacagagtatcaccttacacaggaaattctggagacaccccaacaatgcaatgtgacat

SEQ ID NO: 447029 - DNA, 60 bp, Artificial
  Synthetic oligonucleotide
taacagatatgtctagtacattaagttcagcatcaacgcaaacatctacgataagtagac

SEQ ID NO: 447030 - DNA, 54 bp, Artificial
  Synthetic oligonucleotide
taacagatggcatcacttgtcctatctgtagaggacgtgctaatagcacagagg

SEQ ID NO: 447031 - DNA, 60 bp, Artificial
  Synthetic oligonucleotide
taacagatttgctttgatagataatggcttttatgactctgaccatgaaaggttagtatg

SEQ ID NO: 447032 - DNA, 55 bp, Artificial
  Synthetic oligonucleotide
taacagcaattccacaacctaaagtagattcaccaccggttgcaccaagagaggt

SEQ ID NO: 447033 - DNA, 53 bp, Artificial
  Synthetic oligonucleotide
taacagcagctgacactaaacctagcagccacaacatttcaacaggtaataca

SEQ ID NO: 447034 - DNA, 55 bp, Artificial
  Synthetic oligonucleotide
taacagcagtgcctcaacctagtaattttggtgaaatgtacacgccgaacacatt

SEQ ID NO: 447035 - DNA, 52 bp, Artificial
  Synthetic oligonucleotide
taacagcattggtgttggcaagaatggctctattggtacttgtggtaactag

SEQ ID NO: 447036 - DNA, 55 bp, Artificial
  Synthetic oligonucleotide
taacagccacaaatgtacgtggccacctctatatgcaaggtgttaagctaggcac

SEQ ID NO: 447037 - DNA, 51 bp, Artificial
  Synthetic oligonucleotide
taacagccaggccgttagctctcttgttgtgtcggttaccgagcagtatga

SEQ ID NO: 447038 - DNA, 60 bp, Artificial
  Synthetic oligonucleotide
taacagcgtgcctatggataacatgttccgccactacaacttcacattaatggtcatccc

SEQ ID NO: 447039 - DNA, 50 bp, Artificial
  Synthetic oligonucleotide
taacagcgttgtgttgcattatgtccccctctgtggcacaaatgaagtag

SEQ ID NO: 447040 - DNA, 57 bp, Artificial
  Synthetic oligonucleotide
taacagcttaatgggtgggtggtaggggacagataagaaataggattaggatgtcaa

SEQ ID NO: 447041 - DNA, 53 bp, Artificial
  Synthetic oligonucleotide
taacagcttcaatgctaaaacctacataggggttacttttgatcctaagcgta

SEQ ID NO: 447042 - DNA, 60 bp, Artificial
  Synthetic oligonucleotide
taacaggaagggcctgggaaaacactgtcgttgatctggaatcagatgggaagccacaga

SEQ ID NO: 447043 - DNA, 60 bp, Artificial
  Synthetic oligonucleotide
taacaggacaggcgtttgaacagataccattgataccaatcgcaggcagtaggacgctta

SEQ ID NO: 447044 - DNA, 58 bp, Artificial
  Synthetic oligonucleotide
taacaggagagacgtcaacgtggggaccagcgcgtcaaccatatgggttctttcttga

SEQ ID NO: 447045 - DNA, 55 bp, Artificial
  Synthetic oligonucleotide
taacaggagtgtttaggttttttaactgtgaaagtgcctcctctttgctgaggga

SEQ ID NO: 447046 - DNA, 60 bp, Artificial
  Synthetic oligonucleotide
taacaggatcctatctaggaattttgtgaggttatatgtcccaggatcaagtctatatac

SEQ ID NO: 447047 - DNA, 60 bp, Artificial
  Synthetic oligonucleotide
taacaggattggactgtatgagaccttgcttctgggttgaattagtcagagggctaccta

SEQ ID NO: 447048 - DNA, 55 bp, Artificial
  Synthetic oligonucleotide
taacaggcataaattcgcaagcagctaacgattgctttaagaccttaatcgcagc

SEQ ID NO: 447049 - DNA, 59 bp, Artificial
  Synthetic oligonucleotide
taacaggcgccgtattgaatgcaattctagagggcaagaagttataccctgcactagtt

SEQ ID NO: 447050 - DNA, 60 bp, Artificial
  Synthetic oligonucleotide
taacaggctgtacagtcttttgcacattagctggccctggggcaagttgtgaggcttact

SEQ ID NO: 447051 - DNA, 55 bp, Artificial
  Synthetic oligonucleotide
taacaggcttttaatagctgttgtgcctgccgtaggaaaaggaacaccaggaacc

SEQ ID NO: 447052 - DNA, 60 bp, Artificial
  Synthetic oligonucleotide
taacagggaatgacaggactgttgctgatggcacttttaattccatgattatgccaagag

SEQ ID NO: 447053 - DNA, 57 bp, Artificial
  Synthetic oligonucleotide
taacagggactcgaaagcggaagttccagagaagttctctcgacgcaggactcggct

SEQ ID NO: 447054 - DNA, 60 bp, Artificial
  Synthetic oligonucleotide
taacagggtagattcaagagtcacgagacctccattaatcatctcagttgatcagacatg

SEQ ID NO: 447055 - DNA, 56 bp, Artificial
  Synthetic oligonucleotide
taacagggtgtacctgtgtacgtggctccccaaggggcactacacattgtctcccg

SEQ ID NO: 447056 - DNA, 58 bp, Artificial
  Synthetic oligonucleotide
taacagggttgctgaatatcttaggtcggtataaagtatatctagtagctagctttgg

SEQ ID NO: 447057 - DNA, 54 bp, Artificial
  Synthetic oligonucleotide
taacaggtaaattcgcttactttaaagaggaagataagactttcgagttcgcaa

SEQ ID NO: 447058 - DNA, 55 bp, Artificial
  Synthetic oligonucleotide
taacaggtactaaaagctaggtgtactcaccacaaccacctaaatcaagaagacc

SEQ ID NO: 447059 - DNA, 60 bp, Artificial
  Synthetic oligonucleotide
taacaggtataaactcacaagcggcaaatgactgtttcaaaactctgattgcagcaatgt

SEQ ID NO: 447060 - DNA, 59 bp, Artificial
  Synthetic oligonucleotide
taacaggtgcgttcgatacaacaaaagaccagtaacatatggtgaacgcatacagagac

SEQ ID NO: 447061 - DNA, 60 bp, Artificial
  Synthetic oligonucleotide
taacaggttctgctgtagggtgtgatcctgagacattttggtcaaaaatacctgtgatgt

SEQ ID NO: 447062 - DNA, 55 bp, Artificial
  Synthetic oligonucleotide
taacagtaacacactccgttaaccttcttgaagacagacataacgggaaactatg

SEQ ID NO: 447063 - DNA, 60 bp, Artificial
  Synthetic oligonucleotide
taacagtatgtcatcctagccaactattattagcaaagcagcatgttattgttcagagtt

SEQ ID NO: 447064 - DNA, 57 bp, Artificial
  Synthetic oligonucleotide
taacagtcccctccggaggtatttgcgacctcatcagcacctatgcccgaggttcag

SEQ ID NO: 447065 - DNA, 51 bp, Artificial
  Synthetic oligonucleotide
taacagtgcgttagacagactacatgtcgaaaacgaggtttcaagacctca

SEQ ID NO: 447066 - DNA, 55 bp, Artificial
  Synthetic oligonucleotide
taacagtgctagatataggggatgcctatttttcagtacccctagacccggaatt

SEQ ID NO: 447067 - DNA, 60 bp, Artificial
  Synthetic oligonucleotide
taacagtgcttgatataggtgatgcctattttaccatacctttagaccctgattatcaac

SEQ ID NO: 447068 - DNA, 59 bp, Artificial
  Synthetic oligonucleotide
taacagtttatatgcatctccacaactggaagggttttcagctgaatctaggaaattac

SEQ ID NO: 447069 - DNA, 54 bp, Artificial
  Synthetic oligonucleotide
taacagtttcaacaaaaagaagccaacaaacgatactccccaacatcgggtcca

SEQ ID NO: 447070 - DNA, 50 bp, Artificial
  Synthetic oligonucleotide
taacatacccacacctaggaccttactcaaaaaaccgtttagttacaata

SEQ ID NO: 447071 - DNA, 55 bp, Artificial
  Synthetic oligonucleotide
taacatagagccctggaatcaaccaggaagtcggcctaagactgcttgtacctca

SEQ ID NO: 447072 - DNA, 60 bp, Artificial
  Synthetic oligonucleotide
taacatagttatagcctatggggagtggcctgaatattgcccagacacggatgcaacggc

SEQ ID NO: 447073 - DNA, 55 bp, Artificial
  Synthetic oligonucleotide
taacatatcggattattcgggcgaacttttagagttacgcctgtccgataaatta

SEQ ID NO: 447074 - DNA, 60 bp, Artificial
  Synthetic oligonucleotide
taacatatgggatattcacaagacgagggctatgtcccggagacaatcgaacaaatcatg

SEQ ID NO: 447075 - DNA, 60 bp, Artificial
  Synthetic oligonucleotide
taacatcaagtatgaggatactacacacaacataaagtatctacacaatacacgtaacat

SEQ ID NO: 447076 - DNA, 57 bp, Artificial
  Synthetic oligonucleotide
taacatcaccctaggtcagcaaagttcgcctgaactgagataaaaactttaaacaca

SEQ ID NO: 447077 - DNA, 60 bp, Artificial
  Synthetic oligonucleotide
taacatcaccttcttgctctgttgagtaatcacttacgcaaggttaccgtacagcttaga

SEQ ID NO: 447078 - DNA, 59 bp, Artificial
  Synthetic oligonucleotide
taacatcacgggggcacgcaaatttgcagcagtggactacttattaggttgtggtgttc

SEQ ID NO: 447079 - DNA, 60 bp, Artificial
  Synthetic oligonucleotide
taacatcactgttctgacgctggatactgactacacagtaaccggcgcagggggatatga

SEQ ID NO: 447080 - DNA, 55 bp, Artificial
  Synthetic oligonucleotide
taacatcagatactaagttagctgggtttttaaaacatggtggacgtgtttggac

SEQ ID NO: 447081 - DNA, 60 bp, Artificial
  Synthetic oligonucleotide
taacatcagatgctccagttcacaattgtgacacaaggtgccaaacccctcatggggctt

SEQ ID NO: 447082 - DNA, 60 bp, Artificial
  Synthetic oligonucleotide
taacatccatgacattgggcccgcatgggcagacaatgtggaacggactgcaagggagac

SEQ ID NO: 447083 - DNA, 56 bp, Artificial
  Synthetic oligonucleotide
taacatcctgcgttattgaaacgaatctagtcaatttaacacgaaacaatcctttc

SEQ ID NO: 447084 - DNA, 55 bp, Artificial
  Synthetic oligonucleotide
taacatccttactctccccatcaggtcgggagggggtgactgttatattcctact

SEQ ID NO: 447085 - DNA, 59 bp, Artificial
  Synthetic oligonucleotide
taacatcgaggaggttgctctgtccactaccggagagatccccttttatggcaaggcta

SEQ ID NO: 447086 - DNA, 59 bp, Artificial
  Synthetic oligonucleotide
taacatcgttagtgacattttttaatcgaagattgtatgatgaccataagtttgaagga

SEQ ID NO: 447087 - DNA, 60 bp, Artificial
  Synthetic oligonucleotide
taacatctcgtacatccacccgcgctcgtgaggcacatattcagatgaaggcagcagcgc

SEQ ID NO: 447088 - DNA, 60 bp, Artificial
  Synthetic oligonucleotide
taacatctctgggacttgtgtacacagtgaagtatccgaacttgtctgacttagagaaat

SEQ ID NO: 447089 - DNA, 60 bp, Artificial
  Synthetic oligonucleotide
taacatctgagctgctcttagctccctgaatgttcggatggaaatgtgctgacctggttt

SEQ ID NO: 447090 - DNA, 59 bp, Artificial
  Synthetic oligonucleotide
taacatcttgctaagtggtactaatactgcacgaatgattaagtaccactacccaacaa

SEQ ID NO: 447091 - DNA, 55 bp, Artificial
  Synthetic oligonucleotide
taacatgactcgccctacatgggaggttcacgttgaggatgcaggaacgttagat

SEQ ID NO: 447092 - DNA, 60 bp, Artificial
  Synthetic oligonucleotide
taacatgataggcactagcgttaaagtattccaccataatgaatatcatatgtatgtgca

SEQ ID NO: 447093 - DNA, 60 bp, Artificial
  Synthetic oligonucleotide
taacatgcattccgccgctctatactgggatgacttctcggtatacacggcattctcgag

SEQ ID NO: 447094 - DNA, 55 bp, Artificial
  Synthetic oligonucleotide
taacatgcctgaggccaggaaataagactattagaaaccttcaaataggagcagg

SEQ ID NO: 447095 - DNA, 55 bp, Artificial
  Synthetic oligonucleotide
taacatggacccaggggtggcaaattatatcaatgagccgtattactcccaagat

SEQ ID NO: 447096 - DNA, 60 bp, Artificial
  Synthetic oligonucleotide
taacatgggatcaggacataccatgtaaaccgctaccatatactaacctacatccatttg

SEQ ID NO: 447097 - DNA, 60 bp, Artificial
  Synthetic oligonucleotide
taacatgtaactcaaatatcacaggactactattgacacgtgatggaggtgtgaatacta

SEQ ID NO: 447098 - DNA, 60 bp, Artificial
  Synthetic oligonucleotide
taacatgtccaacaattcattcgatattcaagaactcatctgcgatgacgccagtattga

SEQ ID NO: 447099 - DNA, 55 bp, Artificial
  Synthetic oligonucleotide
taacatgttggtaccagactaactttgtatttccacccaacactcctaactctgc

SEQ ID NO: 447100 - DNA, 53 bp, Artificial
  Synthetic oligonucleotide
taacattaattaagtgtccaccgctactggttacatcaaatatagacattagc

SEQ ID NO: 447101 - DNA, 60 bp, Artificial
  Synthetic oligonucleotide
taacattagaagtctgcactcttaacctggtcaataggaggtagcaatccatgctatcta

SEQ ID NO: 447102 - DNA, 58 bp, Artificial
  Synthetic oligonucleotide
taacattcactcgccaacagctctctagaatcaaacaagggatagaaacctactccct

SEQ ID NO: 447103 - DNA, 60 bp, Artificial
  Synthetic oligonucleotide
taacattccatggagccaaagaggttgcactcagctactcaactggtgcactcgccagtt

SEQ ID NO: 447104 - DNA, 52 bp, Artificial
  Synthetic oligonucleotide
taacattgtctcttgctctgttgaataactgaataatcacttacgcaaggtt

SEQ ID NO: 447105 - DNA, 55 bp, Artificial
  Synthetic oligonucleotide
taacattgttactttaagctcgaactataggatgagaactggacagtggtcgggg

SEQ ID NO: 447106 - DNA, 60 bp, Artificial
  Synthetic oligonucleotide
taacatttgaggccactggaaatttgatagcaccatggtacgctttcgcactgaataaag

SEQ ID NO: 447107 - DNA, 60 bp, Artificial
  Synthetic oligonucleotide
taacatttgagtcaaatggtgcatttatcgctcctcggtatgcttttgagttggtgtcct

SEQ ID NO: 447108 - DNA, 52 bp, Artificial
  Synthetic oligonucleotide
taaccaaaattgataacatgattaaattcgatccaacacgtattgtgctaga

SEQ ID NO: 447109 - DNA, 56 bp, Artificial
  Synthetic oligonucleotide
taaccaaacttgatagatcataaatgtttgtgcagtgaccacatattgatccttca

SEQ ID NO: 447110 - DNA, 57 bp, Artificial
  Synthetic oligonucleotide
taaccaacaacaagccggcatcgtcagttctcagagtggtcctaacgccgttggtga

SEQ ID NO: 447111 - DNA, 53 bp, Artificial
  Synthetic oligonucleotide
taaccaacgggcgacacagctcgccctattcaaaaagggttacgggataagcc

SEQ ID NO: 447112 - DNA, 60 bp, Artificial
  Synthetic oligonucleotide
taaccaagatcgtgtagagcgcattcccaccatagacaacccagacgatgtgtacgttcc

SEQ ID NO: 447113 - DNA, 56 bp, Artificial
  Synthetic oligonucleotide
taaccaagccggtgatacaatgtccggtgtactccgtgtgaatgccccggttcgtg

SEQ ID NO: 447114 - DNA, 60 bp, Artificial
  Synthetic oligonucleotide
taaccaagcgcgtatcggccacctgacttgtcacctgttgacctgtcatggtacgagcgc

SEQ ID NO: 447115 - DNA, 60 bp, Artificial
  Synthetic oligonucleotide
taaccaatggtctcagcacagatctagctatagccacagtgtcggcagctttgctaacct

SEQ ID NO: 447116 - DNA, 52 bp, Artificial
  Synthetic oligonucleotide
taaccaattgatagaggtcacctaatggctgaccctcgttgtctccttagat

SEQ ID NO: 447117 - DNA, 60 bp, Artificial
  Synthetic oligonucleotide
taaccacaacggcctacctcatcgtgatgagatcactatgctagcccagttctaccacac

SEQ ID NO: 447118 - DNA, 55 bp, Artificial
  Synthetic oligonucleotide
taaccacacaaccagccattcactgctgctacctgtatatacgtattccctgtgt

SEQ ID NO: 447119 - DNA, 57 bp, Artificial
  Synthetic oligonucleotide
taaccacaccccctcgggtgagttcctccgccagttctacggtatgcatggtatcgc

SEQ ID NO: 447120 - DNA, 60 bp, Artificial
  Synthetic oligonucleotide
taaccacactgaagcctttaatcgaacctctgagagtcagtatctggtacctggttatga

SEQ ID NO: 447121 - DNA, 50 bp, Artificial
  Synthetic oligonucleotide
taaccacccctgcccgtctaattacatatgacaaccctgtatatgagggt

SEQ ID NO: 447122 - DNA, 51 bp, Artificial
  Synthetic oligonucleotide
taaccactaaaatcccgaaagggtgggctgtggtgaccttccgaactaaaa

SEQ ID NO: 447123 - DNA, 55 bp, Artificial
  Synthetic oligonucleotide
taaccactatcaagaacgatggtttcccagcattgccccactaccaagagacccc

SEQ ID NO: 447124 - DNA, 53 bp, Artificial
  Synthetic oligonucleotide
taaccactgtagtgcaaaataatgactattcccctatagaggctggcacgcaa

SEQ ID NO: 447125 - DNA, 60 bp, Artificial
  Synthetic oligonucleotide
taaccagcaagaagctggcaagtatgagaatcattctgagaatgcgttaatgttgtatat

SEQ ID NO: 447126 - DNA, 60 bp, Artificial
  Synthetic oligonucleotide
taaccagcatggatggtctaaatacagcttcaacctgagagcattcccaggagaagagtt

SEQ ID NO: 447127 - DNA, 56 bp, Artificial
  Synthetic oligonucleotide
taaccaggatgacaactggttaggtgatcacctttctaataagggccgggatatcc

SEQ ID NO: 447128 - DNA, 58 bp, Artificial
  Synthetic oligonucleotide
taaccaggcagtggtcctgatgggtttagacaaaggatggccgatatcgaaaatggac

SEQ ID NO: 447129 - DNA, 60 bp, Artificial
  Synthetic oligonucleotide
taaccagtgacgcagacgtaccagaagtgagcgcacgccaatacaccttgcctatcgtga

SEQ ID NO: 447130 - DNA, 57 bp, Artificial
  Synthetic oligonucleotide
taaccagttgatctccatgttctaaaactgcccgagcttcccatagggtgggttaga

SEQ ID NO: 447131 - DNA, 50 bp, Artificial
  Synthetic oligonucleotide
taaccatacagtgttacacgagcgacgatttgtcgacaggcgattcaaca

SEQ ID NO: 447132 - DNA, 58 bp, Artificial
  Synthetic oligonucleotide
taaccatccaggttgggagcagggagtaccccgacacagtgtacctgcataaaataga

SEQ ID NO: 447133 - DNA, 60 bp, Artificial
  Synthetic oligonucleotide
taaccatctttggcaacagcgtgcgtgactaatcgaacctagtaattgcatagcatccga

SEQ ID NO: 447134 - DNA, 54 bp, Artificial
  Synthetic oligonucleotide
taaccatgactccagctgacaaatcagcgacctttgagaaagtcacgtgggaga

SEQ ID NO: 447135 - DNA, 60 bp, Artificial
  Synthetic oligonucleotide
taaccatgtcgtcattaatgggatcactatgcgtagtggcagtcctattaagaacgaaga

SEQ ID NO: 447136 - DNA, 60 bp, Artificial
  Synthetic oligonucleotide
taaccattgcaacagtatgtttcctcatgcagattgccatcctagcaatgactgtaacac

SEQ ID NO: 447137 - DNA, 60 bp, Artificial
  Synthetic oligonucleotide
taaccattgtagacctagtagctggacactggacaggcaactatacagaagcctacacaa

SEQ ID NO: 447138 - DNA, 60 bp, Artificial
  Synthetic oligonucleotide
taaccatttaaatgtcatgcgcccctgtggtaagactcggtggcagctccatcacacccc

SEQ ID NO: 447139 - DNA, 60 bp, Artificial
  Synthetic oligonucleotide
taaccattttgctcgagagatacccataatctcgcactcagtgggtcctcttcacagagt

SEQ ID NO: 447140 - DNA, 55 bp, Artificial
  Synthetic oligonucleotide
taacccaacagtagcatctactatattgtcaaatgtagctcctgttgcccaacag

SEQ ID NO: 447141 - DNA, 57 bp, Artificial
  Synthetic oligonucleotide
taacccaagcctgtccaaaggtctcttttgacccaattcctatacattattgtgctc

SEQ ID NO: 447142 - DNA, 60 bp, Artificial
  Synthetic oligonucleotide
taacccaaggtcgccagacctatgattggacattaaacaggaatcagccggctgcaactg

SEQ ID NO: 447143 - DNA, 53 bp, Artificial
  Synthetic oligonucleotide
taacccacactacaggaacacgggacccgctcggtcccactgatacccgaaac

SEQ ID NO: 447144 - DNA, 59 bp, Artificial
  Synthetic oligonucleotide
taacccacactggaagataccagacatttcggctacaaacttctctcaggagataatta

SEQ ID NO: 447145 - DNA, 55 bp, Artificial
  Synthetic oligonucleotide
taacccacgggacgctgcccagcgtgtcgatcatcgtcccaggtctcccttgatg

SEQ ID NO: 447146 - DNA, 57 bp, Artificial
  Synthetic oligonucleotide
taacccacttcatatctatgacgtattctccacatgcggtgtagaaatagccaacag

SEQ ID NO: 447147 - DNA, 56 bp, Artificial
  Synthetic oligonucleotide
taacccagacttggcctggacacagattttttacactgcccctagtcggaatgtat

SEQ ID NO: 447148 - DNA, 60 bp, Artificial
  Synthetic oligonucleotide
taacccagcacaagcaagacaaatgtatagaaggataggtcaaaagtatagaatgcctag

SEQ ID NO: 447149 - DNA, 55 bp, Artificial
  Synthetic oligonucleotide
taacccatacacggcggaagtaggcattcttaccaacgctgtgagcaccaggcat

SEQ ID NO: 447150 - DNA, 60 bp, Artificial
  Synthetic oligonucleotide
taacccatacaggtaattcaagatgtctaagtgatgtcacaagaggtaatgggcttactc

SEQ ID NO: 447151 - DNA, 58 bp, Artificial
  Synthetic oligonucleotide
taacccattacagaacagagggccaatttatggagttcacgagagctaatgcgcaacc

SEQ ID NO: 447152 - DNA, 52 bp, Artificial
  Synthetic oligonucleotide
taacccatttgttacctatgactaggcactaaggctcatcagttcggatcaa

SEQ ID NO: 447153 - DNA, 55 bp, Artificial
  Synthetic oligonucleotide
taaccccaatctgtgtcactttaaattgcactaataatacttggagtgggaatgc

SEQ ID NO: 447154 - DNA, 54 bp, Artificial
  Synthetic oligonucleotide
taaccccaccaggtgtcaagcaatgacccgtcatgcggagtcattacaaaggga

SEQ ID NO: 447155 - DNA, 52 bp, Artificial
  Synthetic oligonucleotide
taaccccagtcgagcaacatttaccccaaccacaggtcattcgtgccttatc

SEQ ID NO: 447156 - DNA, 55 bp, Artificial
  Synthetic oligonucleotide
taaccccagttttcagcctaaaggttttccatctaatagcactcaattcaatggt

SEQ ID NO: 447157 - DNA, 60 bp, Artificial
  Synthetic oligonucleotide
taaccccatagcaagagcgaattcgagcaccagcacctactacagatttcgtggtatgtt

SEQ ID NO: 447158 - DNA, 60 bp, Artificial
  Synthetic oligonucleotide
taacccccactgtggctgcgccatatctgaatgctccgcttgagtccttgcgacgtcatg

SEQ ID NO: 447159 - DNA, 54 bp, Artificial
  Synthetic oligonucleotide
taaccccgaaccctcgtcaagtgtcaacttcaaaccagatggtagggcgaccaa

SEQ ID NO: 447160 - DNA, 59 bp, Artificial
  Synthetic oligonucleotide
taaccccggagccttgcagcacaatccagtgttgttaaggtcgtaatgagcaattctgg

SEQ ID NO: 447161 - DNA, 54 bp, Artificial
  Synthetic oligonucleotide
taaccccggagccttgtggtgtaaaccaacatttgcaaggtcgtaatgagtaat

SEQ ID NO: 447162 - DNA, 55 bp, Artificial
  Synthetic oligonucleotide
taaccccggttgtcacacgccacgtatttggtgagcttgtggatcaagtagccag

SEQ ID NO: 447163 - DNA, 53 bp, Artificial
  Synthetic oligonucleotide
taaccccgtggaggataacgtgccctacctagaaagttaacaggtcttgtaca

SEQ ID NO: 447164 - DNA, 57 bp, Artificial
  Synthetic oligonucleotide
taacccctaggttatctaaatgagacattacaaggcatttgaatctacttaaatatg

SEQ ID NO: 447165 - DNA, 51 bp, Artificial
  Synthetic oligonucleotide
taacccctcaaaatattgggccaggttgttaccgtacactaaatcttttta

SEQ ID NO: 447166 - DNA, 50 bp, Artificial
  Synthetic oligonucleotide
taacccctcgaggcccgtcgcctagtgtcgcgctgattctgaaagacgtg

SEQ ID NO: 447167 - DNA, 55 bp, Artificial
  Synthetic oligonucleotide
taacccctgggaatactaacacccgtgtgtctcgctacactagtacggcccgaca

SEQ ID NO: 447168 - DNA, 53 bp, Artificial
  Synthetic oligonucleotide
taaccccttcgcacagagccccgcggccgcagacaccctcgaactactaggta

SEQ ID NO: 447169 - DNA, 52 bp, Artificial
  Synthetic oligonucleotide
taaccccttggtgaacgatcttgctaatcggagactgtacgaatcagcggtc

SEQ ID NO: 447170 - DNA, 51 bp, Artificial
  Synthetic oligonucleotide
taacccgaaaagcaaaccgcttaaagggaaaattatcaccttcactcaaag

SEQ ID NO: 447171 - DNA, 56 bp, Artificial
  Synthetic oligonucleotide
taacccgaagaagttatacggaaaacaaggcagaagtacacacgacatgttcatag

SEQ ID NO: 447172 - DNA, 55 bp, Artificial
  Synthetic oligonucleotide
taacccgacaatatggatgatctctaacttcggcaagcgtacatcgtttgaaggg

SEQ ID NO: 447173 - DNA, 52 bp, Artificial
  Synthetic oligonucleotide
taacccgaggggtccgaatgccttgtctaggaaggggttcttgaaggaccaa

SEQ ID NO: 447174 - DNA, 57 bp, Artificial
  Synthetic oligonucleotide
taacccggaccttcccaatcgccgatcaacatttgatccctcgtgatacagaattcc

SEQ ID NO: 447175 - DNA, 55 bp, Artificial
  Synthetic oligonucleotide
taacccggtatcctccgcgctcgcaactcctccggtagtccctccgatatgctcc

SEQ ID NO: 447176 - DNA, 58 bp, Artificial
  Synthetic oligonucleotide
taacccggtggtccggccttctatatgccctggcgtggcggtctatagcatcggacag

SEQ ID NO: 447177 - DNA, 60 bp, Artificial
  Synthetic oligonucleotide
taaccctacctttgaagactatgttcatgttgtagagttttgcacgctcgacaattgcaa

SEQ ID NO: 447178 - DNA, 60 bp, Artificial
  Synthetic oligonucleotide
taaccctacctttgaagattactgtgcagttgttgagttctgcaatctggataattgtaa

SEQ ID NO: 447179 - DNA, 56 bp, Artificial
  Synthetic oligonucleotide
taaccctactccgtctattgttgaccagacgattaacgatgtgttcttctttcgta

SEQ ID NO: 447180 - DNA, 59 bp, Artificial
  Synthetic oligonucleotide
taaccctccggctacacttctcccgatgtggctcttctatgaccctcctcatagacgcc

SEQ ID NO: 447181 - DNA, 55 bp, Artificial
  Synthetic oligonucleotide
taaccctgagtttcttacacgtccatcctctttaattacatatgacaacccggcc

SEQ ID NO: 447182 - DNA, 58 bp, Artificial
  Synthetic oligonucleotide
taaccctgatagccgcgtaccgtaaacgtttgatggatacgcgtatagctgtgaaaga

SEQ ID NO: 447183 - DNA, 60 bp, Artificial
  Synthetic oligonucleotide
taaccctgcagccattgcccacaaaccagtgggtctatggttgtaatgagcaattgcggg

SEQ ID NO: 447184 - DNA, 60 bp, Artificial
  Synthetic oligonucleotide
taaccctgtggccaccgaaagatttgggaccgtggcagtcaatttccagagcagcagcac

SEQ ID NO: 447185 - DNA, 59 bp, Artificial
  Synthetic oligonucleotide
taacccttcgagtgtgcctccggatgtgatacttaacatctcgatcactgggtttgtaa

SEQ ID NO: 447186 - DNA, 53 bp, Artificial
  Synthetic oligonucleotide
taacccttcgtggattagtctcttaggtggctctctcaagataaacggagatg

SEQ ID NO: 447187 - DNA, 54 bp, Artificial
  Synthetic oligonucleotide
taaccctttggtgcgtacaccggaggatagatataaaagacaccaaggaagctt

SEQ ID NO: 447188 - DNA, 52 bp, Artificial
  Synthetic oligonucleotide
taaccgaaacttcgcatcaacccccgctcacgttcccctgggcgggggttga

SEQ ID NO: 447189 - DNA, 54 bp, Artificial
  Synthetic oligonucleotide
taaccgaaagaaggacgggtggcaagcgcgggcttacacaggtacggtcttgtc

SEQ ID NO: 447190 - DNA, 58 bp, Artificial
  Synthetic oligonucleotide
taaccgacttattgcagtcggtcagaaccccagaggttatcaaatattgtgaagacaa

SEQ ID NO: 447191 - DNA, 51 bp, Artificial
  Synthetic oligonucleotide
taaccgaggtgataccgtattcgcaatttaacgagaaccgagttctgccta

SEQ ID NO: 447192 - DNA, 55 bp, Artificial
  Synthetic oligonucleotide
taaccgagtttacttcttacaaattgagcaagctgactaacctgtgcaagtgctg

SEQ ID NO: 447193 - DNA, 57 bp, Artificial
  Synthetic oligonucleotide
taaccgcaaaccgcttcctatagaactctgctcgggactttccagttaccatgacta

SEQ ID NO: 447194 - DNA, 52 bp, Artificial
  Synthetic oligonucleotide
taaccgcgaacttgatgtacgtactcgcagtggaacggaagctactgatctg

SEQ ID NO: 447195 - DNA, 51 bp, Artificial
  Synthetic oligonucleotide
taaccgcggtcgctccggcccatgacaccccgccagtgcctgatgttgact

SEQ ID NO: 447196 - DNA, 58 bp, Artificial
  Synthetic oligonucleotide
taaccgcgtgatcccagtcacatctcactgggatttcttacgtggtttaagacaccac

SEQ ID NO: 447197 - DNA, 53 bp, Artificial
  Synthetic oligonucleotide
taaccgcgttgaatccataactttggaatacgccaagttggaaataactaacg

SEQ ID NO: 447198 - DNA, 60 bp, Artificial
  Synthetic oligonucleotide
taaccgctacgtcggcgggttcggatcactgggccagcatcttcgtgccgttctgatcac

SEQ ID NO: 447199 - DNA, 55 bp, Artificial
  Synthetic oligonucleotide
taaccgctatcggtcctggatttctgcccggaacatctatttcggtcgtgctgag

SEQ ID NO: 447200 - DNA, 51 bp, Artificial
  Synthetic oligonucleotide
taaccggaattatcgcaccccttttaaattacgccatagtaattttggtta

SEQ ID NO: 447201 - DNA, 57 bp, Artificial
  Synthetic oligonucleotide
taaccggaccataacgtacaagatggctatcaagtgttgggttgccttggatgggtc

SEQ ID NO: 447202 - DNA, 50 bp, Artificial
  Synthetic oligonucleotide
taaccggagctattaaaccccgtaagtcgttagggtggcgtgaacgcgtg

SEQ ID NO: 447203 - DNA, 60 bp, Artificial
  Synthetic oligonucleotide
taaccggcaggaggtgagcgccgtggtactgctctacatggccacacagatctcatcagc

SEQ ID NO: 447204 - DNA, 58 bp, Artificial
  Synthetic oligonucleotide
taaccggcctagcatcaccaacacaggcaggtttgggcaacagtccggggccatatac

SEQ ID NO: 447205 - DNA, 55 bp, Artificial
  Synthetic oligonucleotide
taaccggcgcagagtccgcagccgtggagggtctgctgctggaagcaacggacct

SEQ ID NO: 447206 - DNA, 56 bp, Artificial
  Synthetic oligonucleotide
taaccggtagaataattaccaagtacactcactggttggacacctttctaggctgc

SEQ ID NO: 447207 - DNA, 60 bp, Artificial
  Synthetic oligonucleotide
taaccggtagtgctgtcggatgtgatccggatctcttttggagcaagataccagtgatgt

SEQ ID NO: 447208 - DNA, 59 bp, Artificial
  Synthetic oligonucleotide
taaccgtcttagacacgcaatactactttatgcaacctaactggggaaatgcagcacaa

SEQ ID NO: 447209 - DNA, 55 bp, Artificial
  Synthetic oligonucleotide
taaccgtgaacgtaagaggctccggaatgagaatactcataaggggtaactctcc

SEQ ID NO: 447210 - DNA, 54 bp, Artificial
  Synthetic oligonucleotide
taaccgtgtcgcacttaccctgggggctgttgtcgcccttctgtggggtgttta

SEQ ID NO: 447211 - DNA, 55 bp, Artificial
  Synthetic oligonucleotide
taaccgtgtggttttccagaagatcaacacaaccctcggtacagttggatccaac

SEQ ID NO: 447212 - DNA, 57 bp, Artificial
  Synthetic oligonucleotide
taacctaatgttagcctcattcctgttaagtttacaggtgataacaggatatggaag

SEQ ID NO: 447213 - DNA, 58 bp, Artificial
  Synthetic oligonucleotide
taacctacatgatagcagagccttagaaaaggagccagatatactagggaaagtaacc

SEQ ID NO: 447214 - DNA, 54 bp, Artificial
  Synthetic oligonucleotide
taacctacggaaattcctgagctcccctgacgtccaggccgtcccctctccgag

SEQ ID NO: 447215 - DNA, 52 bp, Artificial
  Synthetic oligonucleotide
taacctactgtggaggcaggagatgggtaacaacataactcgagtggagtct

SEQ ID NO: 447216 - DNA, 55 bp, Artificial
  Synthetic oligonucleotide
taacctagagccctggaaccatccaggaagccaacctaagactccttgtactaag

SEQ ID NO: 447217 - DNA, 60 bp, Artificial
  Synthetic oligonucleotide
taacctagagccctggaaccatccaggaagccagcctaagactgcttgcaacaactgtta

SEQ ID NO: 447218 - DNA, 55 bp, Artificial
  Synthetic oligonucleotide
taacctagagccctggaaccatccaggaagtaggcctcaaactccttgtactaag

SEQ ID NO: 447219 - DNA, 54 bp, Artificial
  Synthetic oligonucleotide
taacctagagccctggaagcacccgggaagtcagcctagaactccttgtagttc

SEQ ID NO: 447220 - DNA, 60 bp, Artificial
  Synthetic oligonucleotide
taacctagcagaaaaagttatgtctgatatgaatgaggcagcacacctcagcccttggct

SEQ ID NO: 447221 - DNA, 58 bp, Artificial
  Synthetic oligonucleotide
taacctatataaggtgatgaattaaacacgtataacatcttattgcctttgaatttgc

SEQ ID NO: 447222 - DNA, 55 bp, Artificial
  Synthetic oligonucleotide
taacctcaaatacggcgaaaaagatttatagcacaatcggaaaggcggcggagcg

SEQ ID NO: 447223 - DNA, 54 bp, Artificial
  Synthetic oligonucleotide
taacctcacgacgcggaacagtacgctttagtaggcttggtaaaaaggccacaa

SEQ ID NO: 447224 - DNA, 60 bp, Artificial
  Synthetic oligonucleotide
taacctcattgtgtcgcaaaattcctcgttgtgatctttgttgcattttgccattacagt

SEQ ID NO: 447225 - DNA, 59 bp, Artificial
  Synthetic oligonucleotide
taacctcctgtggagacaggagatgggcggtaacatcaccagggttgagtcggagaaca

SEQ ID NO: 447226 - DNA, 58 bp, Artificial
  Synthetic oligonucleotide
taacctctctatggtctggaggaacgggacgccatacggcgcgtgtaaggcgtgtgtg

SEQ ID NO: 447227 - DNA, 58 bp, Artificial
  Synthetic oligonucleotide
taacctgatagatgttggggttgagccaatcttctatggtttcgaagtttatgaggtc

SEQ ID NO: 447228 - DNA, 54 bp, Artificial
  Synthetic oligonucleotide
taacctgatcacggaactaatacgcaccgtgtacctattagtaaggcgtatatg

SEQ ID NO: 447229 - DNA, 50 bp, Artificial
  Synthetic oligonucleotide
taacctgcgggagtgcacttctggtgagaaccaccaaaacacggggcact

SEQ ID NO: 447230 - DNA, 60 bp, Artificial
  Synthetic oligonucleotide
taacctgctaagagcaatacaggcccagcaacacttgctgaagctatctgtataaagtat

SEQ ID NO: 447231 - DNA, 56 bp, Artificial
  Synthetic oligonucleotide
taacctggccttgtctgctaatcaacccgaaactaccataattagtgttggggatg

SEQ ID NO: 447232 - DNA, 59 bp, Artificial
  Synthetic oligonucleotide
taaccttaaattgtgacaggattgaaaagaagggactccagtttgtgtctgatgccata

SEQ ID NO: 447233 - DNA, 60 bp, Artificial
  Synthetic oligonucleotide
taaccttaaccctgcagctagtgcatgcaatccagcatgttgctagtcgtaacgagcaat

SEQ ID NO: 447234 - DNA, 55 bp, Artificial
  Synthetic oligonucleotide
taaccttaccagcacggttcaagtcttctcggactcggagtaccagttgccgtac

SEQ ID NO: 447235 - DNA, 56 bp, Artificial
  Synthetic oligonucleotide
taaccttacggtttgccatgtagcctccataaatgttaacctccgagaatttatgc

SEQ ID NO: 447236 - DNA, 53 bp, Artificial
  Synthetic oligonucleotide
taaccttatgtaacccaaaagactagctcatgttgccaggcaactaaactgtg

SEQ ID NO: 447237 - DNA, 60 bp, Artificial
  Synthetic oligonucleotide
taaccttccgtatcttccacccaatgcgggacgccagtaccaccttgccatggctgcatc

SEQ ID NO: 447238 - DNA, 55 bp, Artificial
  Synthetic oligonucleotide
taaccttcggagacgctaatgcgttagggaaagccgacgaaaccttgatgatagg

SEQ ID NO: 447239 - DNA, 56 bp, Artificial
  Synthetic oligonucleotide
taaccttctacaaaatggttacgcaagcacaggcaccccctatggtacacgatatt

SEQ ID NO: 447240 - DNA, 60 bp, Artificial
  Synthetic oligonucleotide
taaccttgacgcagcggtgagtactcgtgtggctaaagaaggcgacacaatgacaggccg

SEQ ID NO: 447241 - DNA, 55 bp, Artificial
  Synthetic oligonucleotide
taaccttggagatcaaactggggtgttgctaaagtcacttgctggggttcctgtg

SEQ ID NO: 447242 - DNA, 51 bp, Artificial
  Synthetic oligonucleotide
taacctttaacccaccctcaggaggggacttagaaattacaacacatagtt

SEQ ID NO: 447243 - DNA, 55 bp, Artificial
  Synthetic oligonucleotide
taaccttttcacacaatggaggcctaatagcaccagatcgagttagcaaactaat

SEQ ID NO: 447244 - DNA, 57 bp, Artificial
  Synthetic oligonucleotide
taacgaaaaatcactttggtggatgtcccgattcaagtaaatcgaacgtcatggctg

SEQ ID NO: 447245 - DNA, 59 bp, Artificial
  Synthetic oligonucleotide
taacgaaatgcctaaagactggagttcaacttgcgcgaccaacgatttagcagcctgac

SEQ ID NO: 447246 - DNA, 54 bp, Artificial
  Synthetic oligonucleotide
taacgaaattccgttattacctgttgcagatgataactgagttaaacgatggag

SEQ ID NO: 447247 - DNA, 53 bp, Artificial
  Synthetic oligonucleotide
taacgaacttaatgtcaaagagttgaaccttagcaagaatatttttgaaccag

SEQ ID NO: 447248 - DNA, 57 bp, Artificial
  Synthetic oligonucleotide
taacgaagagcctgatgcggaactagttagagtacaccccaagagttcactggccgg

SEQ ID NO: 447249 - DNA, 53 bp, Artificial
  Synthetic oligonucleotide
taacgaagccaaagggctacctctcgtgggccttaagggtgaccggttccatc

SEQ ID NO: 447250 - DNA, 55 bp, Artificial
  Synthetic oligonucleotide
taacgaagctaccagatgggtggattcactgtgatgccgatggttcccagtttga

SEQ ID NO: 447251 - DNA, 59 bp, Artificial
  Synthetic oligonucleotide
taacgaatgtggctcaggtctgtgtggatgttgtttcgcaggtttacggtgtcagcccc

SEQ ID NO: 447252 - DNA, 54 bp, Artificial
  Synthetic oligonucleotide
taacgaattacaccagatctacgggagggaatagcaccggaaccacagcacccc

SEQ ID NO: 447253 - DNA, 51 bp, Artificial
  Synthetic oligonucleotide
taacgacacatccggctaacccaagagctacatgggagacactagttaaat

SEQ ID NO: 447254 - DNA, 60 bp, Artificial
  Synthetic oligonucleotide
taacgacatcgagcaacacacggggcaaccgcgtgaatacatgcgctcaatgtttatgga

SEQ ID NO: 447255 - DNA, 60 bp, Artificial
  Synthetic oligonucleotide
taacgacatctggggaaagtaccacatacacaatagactttgctcatgataaacaagcaa

SEQ ID NO: 447256 - DNA, 53 bp, Artificial
  Synthetic oligonucleotide
taacgacccttcggttcgtggaggtttctatcgcgacttaaaacgctggatag

SEQ ID NO: 447257 - DNA, 55 bp, Artificial
  Synthetic oligonucleotide
taacgacgtccaagccttgtctagcaccattaatgacttacaggaccaactagat

SEQ ID NO: 447258 - DNA, 59 bp, Artificial
  Synthetic oligonucleotide
taacgactcggaccagaggccctactgttggcactacgcgcctcgacagtgcggtatcg

SEQ ID NO: 447259 - DNA, 51 bp, Artificial
  Synthetic oligonucleotide
taacgacttatggttttggacaccaaaacaaagctgtgtacacagctggct

SEQ ID NO: 447260 - DNA, 57 bp, Artificial
  Synthetic oligonucleotide
taacgagaaagggttcaatggaaaaggaccatgtaaaaatgtcagcacagtacagtg

SEQ ID NO: 447261 - DNA, 56 bp, Artificial
  Synthetic oligonucleotide
taacgagatatttaaaagacaacgttcacattttcatgagcgttgtaaagacttcc

SEQ ID NO: 447262 - DNA, 60 bp, Artificial
  Synthetic oligonucleotide
taacgagatttgaattttgtggcgcgatatagattatgccccactgtacgattattatga

SEQ ID NO: 447263 - DNA, 57 bp, Artificial
  Synthetic oligonucleotide
taacgagcccgaccaaagcgtcgccaataaaggaggagtcgtatactggatgtggag

SEQ ID NO: 447264 - DNA, 55 bp, Artificial
  Synthetic oligonucleotide
taacgaggttcgccaagggacttggagtgcgaacggagtggaaggacacaacgac

SEQ ID NO: 447265 - DNA, 56 bp, Artificial
  Synthetic oligonucleotide
taacgaggtttgctacgacaggaccattaatggagttattcatgagagatatcata

SEQ ID NO: 447266 - DNA, 54 bp, Artificial
  Synthetic oligonucleotide
taacgagtatagtctctgagactagtacgataatgccagtggagaatagtcagt

SEQ ID NO: 447267 - DNA, 54 bp, Artificial
  Synthetic oligonucleotide
taacgagtgataatggaatatcactgtcaatagggcttgaatcaagggtctcgg

SEQ ID NO: 447268 - DNA, 51 bp, Artificial
  Synthetic oligonucleotide
taacgataagaggttcgagggaaaagggccgtgtacaaatgtcagcacagt

SEQ ID NO: 447269 - DNA, 55 bp, Artificial
  Synthetic oligonucleotide
taacgatattctgcgtgacataaaaccattcttcgttacttctgaggctagtttg

SEQ ID NO: 447270 - DNA, 55 bp, Artificial
  Synthetic oligonucleotide
taacgatcactggtaatttttctagtgtacctagtttatctttagcgctttcggc

SEQ ID NO: 447271 - DNA, 60 bp, Artificial
  Synthetic oligonucleotide
taacgatctagggccgtaggcccgtgagcaatgaacggcgagatcagatgtcccgagtta

SEQ ID NO: 447272 - DNA, 59 bp, Artificial
  Synthetic oligonucleotide
taacgatgggttgcctctaaggggtccgtcgagttgcgatcctgtatatccacttgcca

SEQ ID NO: 447273 - DNA, 54 bp, Artificial
  Synthetic oligonucleotide
taacgattttgtcacccgtatttacgaggacaaaggtgtatctgacgaagcaag

SEQ ID NO: 447274 - DNA, 57 bp, Artificial
  Synthetic oligonucleotide
taacgcaggggcgcctgaaattgtgccccctgcacacggtgggtttacaattacatc

SEQ ID NO: 447275 - DNA, 55 bp, Artificial
  Synthetic oligonucleotide
taacgcatgccgtaattaaagatgcacctgcgattaatagatttacaataataac

SEQ ID NO: 447276 - DNA, 60 bp, Artificial
  Synthetic oligonucleotide
taacgccacgctctattcatttatgctagggcacggattcaccgctttcttgatactggg

SEQ ID NO: 447277 - DNA, 55 bp, Artificial
  Synthetic oligonucleotide
taacgccatagcacactctttaataaaagggcaagtcatgagcccagcagaacag

SEQ ID NO: 447278 - DNA, 60 bp, Artificial
  Synthetic oligonucleotide
taacgccatcttctaactgttggctaccatccgcagttggtgcgctaaatgcggatctgt

SEQ ID NO: 447279 - DNA, 50 bp, Artificial
  Synthetic oligonucleotide
taacgccccgctgcttaaggggatctcctcgtcctagccgcagttgtacg

SEQ ID NO: 447280 - DNA, 54 bp, Artificial
  Synthetic oligonucleotide
taacgcctacaccaatcaatctacgcaagcgcaaatactcttgcccatacgccg

SEQ ID NO: 447281 - DNA, 58 bp, Artificial
  Synthetic oligonucleotide
taacgcctcctaggatacgtcatagctgaaaacgaaagaagtgcgctgtaagtattac

SEQ ID NO: 447282 - DNA, 55 bp, Artificial
  Synthetic oligonucleotide
taacgccttagttgattacggcatgagtcatcgacacgcgacaagcctcctagag

SEQ ID NO: 447283 - DNA, 54 bp, Artificial
  Synthetic oligonucleotide
taacgcgaatggtctacaaggatggttacttaattgtgttcttcaccggttacc

SEQ ID NO: 447284 - DNA, 59 bp, Artificial
  Synthetic oligonucleotide
taacgcgggcatgggtgtaggagttggcaacctgaccatatacccacaccagtggatta

SEQ ID NO: 447285 - DNA, 55 bp, Artificial
  Synthetic oligonucleotide
taacgcgtactttgtcgtcactacttggcgagccctgagttattttagccgctcg

SEQ ID NO: 447286 - DNA, 54 bp, Artificial
  Synthetic oligonucleotide
taacgctaaaccgtaccatagtaggctgttacctggctcgaacccaggcggacg

SEQ ID NO: 447287 - DNA, 60 bp, Artificial
  Synthetic oligonucleotide
taacgctaagacctctcagactgcagccaagacaagtgagactaacgccaagacgagtga

SEQ ID NO: 447288 - DNA, 50 bp, Artificial
  Synthetic oligonucleotide
taacgctaatggctttgttcttatggctggtgatccttcaggtgtgtcta

SEQ ID NO: 447289 - DNA, 59 bp, Artificial
  Synthetic oligonucleotide
taacgctcccgcacactataagtacttgcgcactaagtttccaattcaaacatgtggga

SEQ ID NO: 447290 - DNA, 59 bp, Artificial
  Synthetic oligonucleotide
taacgctgagtggatcctgaagactctcgtgaacacggagcacgcgtacgaaaacaaac

SEQ ID NO: 447291 - DNA, 59 bp, Artificial
  Synthetic oligonucleotide
taacgctgtatcactacgaaaaattcccagcgtatgatagaatttatcgttgtccgcga

SEQ ID NO: 447292 - DNA, 55 bp, Artificial
  Synthetic oligonucleotide
taacgctgtgtcaaatcttcgtcgcctatgggccattgctggctgcgacgggagg

SEQ ID NO: 447293 - DNA, 58 bp, Artificial
  Synthetic oligonucleotide
taacggactcgtcccagtggaccacgagagtaactccatgttcagagggttgcgcgat

SEQ ID NO: 447294 - DNA, 58 bp, Artificial
  Synthetic oligonucleotide
taacggagaattggcatcgaaacagcaaccacaaacagacaggtatggtccggaataa

SEQ ID NO: 447295 - DNA, 60 bp, Artificial
  Synthetic oligonucleotide
taacggagcagggcaccaaagccaaaatctcgatcccggtgtgtgtagcgatcgcgcgcg

SEQ ID NO: 447296 - DNA, 60 bp, Artificial
  Synthetic oligonucleotide
taacggaggcttatagagagttcctcaatctttcgatttcgagcacgttcagtagcgcaa

SEQ ID NO: 447297 - DNA, 60 bp, Artificial
  Synthetic oligonucleotide
taacggatcagactttctcctacaatggatacacctatggcatagaacgatgtgtaatat

SEQ ID NO: 447298 - DNA, 57 bp, Artificial
  Synthetic oligonucleotide
taacggcaattgtttacatgtgggaagtgcaacctccctagccgatagcccttgacc

SEQ ID NO: 447299 - DNA, 59 bp, Artificial
  Synthetic oligonucleotide
taacggcatacagtcagtggcccaaaagcgtacaggccatagctctagagtacggggtc

SEQ ID NO: 447300 - DNA, 60 bp, Artificial
  Synthetic oligonucleotide
taacggcctcggctacgattacgcaggtggacagcacggatcaaaaggatggccacgctg

SEQ ID NO: 447301 - DNA, 57 bp, Artificial
  Synthetic oligonucleotide
taacggcgacgtacacatcgaacgttaacagagaaatgtatgattcatactactaca

SEQ ID NO: 447302 - DNA, 55 bp, Artificial
  Synthetic oligonucleotide
taacggcggtcagtccatcgttccgttcttccgccagtaatggcgcgcgcacccg

SEQ ID NO: 447303 - DNA, 55 bp, Artificial
  Synthetic oligonucleotide
taacggcgtaacgtgaaagacataaaacacacgctttgaccctctactccagttc

SEQ ID NO: 447304 - DNA, 55 bp, Artificial
  Synthetic oligonucleotide
taacggctacgataggtaatctcgagcggattgtcagatcctcgtggtccgggga

SEQ ID NO: 447305 - DNA, 60 bp, Artificial
  Synthetic oligonucleotide
taacggctactgtcgagcttgttgcaagtccagaccgcttggagtgccgtactgtgctcg

SEQ ID NO: 447306 - DNA, 60 bp, Artificial
  Synthetic oligonucleotide
taacggctactgttgagcttgtcgcgagtccagaccgcttagagtgccgcactgtgcttg

SEQ ID NO: 447307 - DNA, 51 bp, Artificial
  Synthetic oligonucleotide
taacgggatgtaacaataagatctaccttcgcccggaagtaaaacggtaaa

SEQ ID NO: 447308 - DNA, 50 bp, Artificial
  Synthetic oligonucleotide
taacgggcaagtgggtacggttgtgctcaccgctacggacgtaggcgcgt

SEQ ID NO: 447309 - DNA, 57 bp, Artificial
  Synthetic oligonucleotide
taacgggctgcgcttagcttcacaccaaggattaccagtcctcaatacgcccggtag

SEQ ID NO: 447310 - DNA, 59 bp, Artificial
  Synthetic oligonucleotide
taacggggtcaccatcaagcagcagccgaagcctaactaattaggacacactataggga

SEQ ID NO: 447311 - DNA, 55 bp, Artificial
  Synthetic oligonucleotide
taacgggtagggggtggtgcccctaccgacgcatcactccagataccacacgtac

SEQ ID NO: 447312 - DNA, 55 bp, Artificial
  Synthetic oligonucleotide
taacgggtatgacctgtttagagagataggatctctagtctgcctcagactcatc

SEQ ID NO: 447313 - DNA, 58 bp, Artificial
  Synthetic oligonucleotide
taacggtaacacactctgttaatcttctagaagacaaacacaatggaaggttatgcaa

SEQ ID NO: 447314 - DNA, 59 bp, Artificial
  Synthetic oligonucleotide
taacggtaacattctggcgttatctctccaggctgttcagagtgattctaactctaagg

SEQ ID NO: 447315 - DNA, 59 bp, Artificial
  Synthetic oligonucleotide
taacggtaagtcggatggtaacatcactgctggagaaacccagcgtggtggcataccta

SEQ ID NO: 447316 - DNA, 54 bp, Artificial
  Synthetic oligonucleotide
taacggtaagtctattgatacgggcgcggttaaattattactcattcgtacttg

SEQ ID NO: 447317 - DNA, 57 bp, Artificial
  Synthetic oligonucleotide
taacggtatctgatagtcctcaaaagggactttcagcgttggtgcgttgaggcccac

SEQ ID NO: 447318 - DNA, 53 bp, Artificial
  Synthetic oligonucleotide
taacggtcaagcactcctgtttccccggtccacaaggatcgttacccgcccga

SEQ ID NO: 447319 - DNA, 50 bp, Artificial
  Synthetic oligonucleotide
taacggtgctagcaccataaaagtgcgtaggaatggtggagattcacgat

SEQ ID NO: 447320 - DNA, 53 bp, Artificial
  Synthetic oligonucleotide
taacggtggtactggctctaacccgactgcggtgactttgcctgctggcacta

SEQ ID NO: 447321 - DNA, 50 bp, Artificial
  Synthetic oligonucleotide
taacggtgttattggaactcattgcgaaccactccagcacgcttaatatc

SEQ ID NO: 447322 - DNA, 58 bp, Artificial
  Synthetic oligonucleotide
taacggttcacaacatcgcagatggggagggtggatcgcttacttcctcattgtggcc

SEQ ID NO: 447323 - DNA, 58 bp, Artificial
  Synthetic oligonucleotide
taacggttctggatggattgctagacaaccgggtgattggggcaaccaatggcgagta

SEQ ID NO: 447324 - DNA, 55 bp, Artificial
  Synthetic oligonucleotide
taacggtttctgaaggcggggtgtgccaaatatggtcttctccggagaatgtttc

SEQ ID NO: 447325 - DNA, 52 bp, Artificial
  Synthetic oligonucleotide
taacgtaactgagcgtgttatgaatcgcttacctgctaaggatcctagcatt

SEQ ID NO: 447326 - DNA, 58 bp, Artificial
  Synthetic oligonucleotide
taacgtacgcaaatgagcacgcgttgtttacgtctcttgaatcgccggtcacgttgta

SEQ ID NO: 447327 - DNA, 51 bp, Artificial
  Synthetic oligonucleotide
taacgtagtcggagctattgtttccggagtcgtgtatcgcattgaggcaga

SEQ ID NO: 447328 - DNA, 58 bp, Artificial
  Synthetic oligonucleotide
taacgtatagatctcctgttgacgtggctcattatcttaccaaaaaatcgtggtacag

SEQ ID NO: 447329 - DNA, 55 bp, Artificial
  Synthetic oligonucleotide
taacgtatattgcgagaggctcgattcctctctgctctgttgagggagcataaac

SEQ ID NO: 447330 - DNA, 51 bp, Artificial
  Synthetic oligonucleotide
taacgtatctgtcacgcaagtcgttgacttcagcctagaccctacttttac

SEQ ID NO: 447331 - DNA, 60 bp, Artificial
  Synthetic oligonucleotide
taacgtccgggttttgcttgatcttagctctggatatgagtctgatttttccgagatctc

SEQ ID NO: 447332 - DNA, 58 bp, Artificial
  Synthetic oligonucleotide
taacgtcgccagtttttggttgtgactaatgagttcccagtaactgttctgtgtgtga

SEQ ID NO: 447333 - DNA, 57 bp, Artificial
  Synthetic oligonucleotide
taacgtcggacctagaaatgaatctatgtttactttcctagattatccaacaatcaa

SEQ ID NO: 447334 - DNA, 55 bp, Artificial
  Synthetic oligonucleotide
taacgtctatgctcacagacccatcacacatcaccgcagagactgcgaggcggag

SEQ ID NO: 447335 - DNA, 55 bp, Artificial
  Synthetic oligonucleotide
taacgtgaacgtcaaaatggattttataatggatctttatgaccaaaataatttc

SEQ ID NO: 447336 - DNA, 60 bp, Artificial
  Synthetic oligonucleotide
taacgtgcccgagtatataaaagcgtgcttgcaccgagaactgcgtgccagtctcgcgcg

SEQ ID NO: 447337 - DNA, 58 bp, Artificial
  Synthetic oligonucleotide
taacgtgcgcattcaggggtggtggtacaccgtctgatccggtttggtgtcaggtgca

SEQ ID NO: 447338 - DNA, 55 bp, Artificial
  Synthetic oligonucleotide
taacgtgtttccgaggttgggttaagcagttacaacttgactatcgtggacacga

SEQ ID NO: 447339 - DNA, 52 bp, Artificial
  Synthetic oligonucleotide
taacgttaaaacgtttacgggatttaccagagatgttgtaatcagtaggagt

SEQ ID NO: 447340 - DNA, 57 bp, Artificial
  Synthetic oligonucleotide
taacgttagcagtgcttttaggattgggagtggccgcagctggggtaggtactggaa

SEQ ID NO: 447341 - DNA, 56 bp, Artificial
  Synthetic oligonucleotide
taacgttatcaacgcagaaagggcaccaggaggaccctacagacttggaacctcag

SEQ ID NO: 447342 - DNA, 53 bp, Artificial
  Synthetic oligonucleotide
taacgttatttgtgactcggggtttttaggtaatttttgtctcagtgtgagta

SEQ ID NO: 447343 - DNA, 55 bp, Artificial
  Synthetic oligonucleotide
taacgttctggtcgatagacgtgacgttgaaccttgaggtgttctgcatcatgtc

SEQ ID NO: 447344 - DNA, 55 bp, Artificial
  Synthetic oligonucleotide
taacgttgctaatgggaacggcttcttcaacacaatggcttgggttatcccaaaa

SEQ ID NO: 447345 - DNA, 52 bp, Artificial
  Synthetic oligonucleotide
taacgttggacgatttgccgactaaaccttcatcgcccagtaaccaatctag

SEQ ID NO: 447346 - DNA, 54 bp, Artificial
  Synthetic oligonucleotide
taacgtttgaggacttaatgtctaagtgctacaatactcatgggaatgtcatac

SEQ ID NO: 447347 - DNA, 60 bp, Artificial
  Synthetic oligonucleotide
taactaaactagacgagatatgtaatagatggatacgtagcaggtatgaccctggagaaa

SEQ ID NO: 447348 - DNA, 59 bp, Artificial
  Synthetic oligonucleotide
taactaagcctcacagaattaccatcccggctagaccgtttatgcgatatgcttggaac

SEQ ID NO: 447349 - DNA, 55 bp, Artificial
  Synthetic oligonucleotide
taactaagtgcacttccgaatggctgagttttccacgcccgtccgcagcgaggga

SEQ ID NO: 447350 - DNA, 57 bp, Artificial
  Synthetic oligonucleotide
taactaatcttgttaatggtattacctcacaattgccacaacttatgcaaagtggca

SEQ ID NO: 447351 - DNA, 59 bp, Artificial
  Synthetic oligonucleotide
taactacaaagttgaggatagaatgatttcctcaatgtatgtcggaatggttgtccaat

SEQ ID NO: 447352 - DNA, 60 bp, Artificial
  Synthetic oligonucleotide
taactacacaccagggccagggatcagatatccactgacctttggatggtgcttcaagct

SEQ ID NO: 447353 - DNA, 56 bp, Artificial
  Synthetic oligonucleotide
taactacacagtggaaattccaacaggaactctgtcagtttccactgtttaactgg

SEQ ID NO: 447354 - DNA, 55 bp, Artificial
  Synthetic oligonucleotide
taactacagaggtaatggcttatttacacacaatggatcctaccattcttgaaca

SEQ ID NO: 447355 - DNA, 57 bp, Artificial
  Synthetic oligonucleotide
taactacatagactacttgtgcaattcccatcatctgtacagagacaagcactactt

SEQ ID NO: 447356 - DNA, 57 bp, Artificial
  Synthetic oligonucleotide
taactacattatttatactgataactcctagattatctaaatacttaagcacttggg

SEQ ID NO: 447357 - DNA, 52 bp, Artificial
  Synthetic oligonucleotide
taactaccaggcgttttagttgttggtcttcgtttaaggacgttgaccgtga

SEQ ID NO: 447358 - DNA, 60 bp, Artificial
  Synthetic oligonucleotide
taactacgagctatacatatatgttatcagatgaaatatatgtggcgaacgtaagtggag

SEQ ID NO: 447359 - DNA, 60 bp, Artificial
  Synthetic oligonucleotide
taactacgttactagatatgtgtacgtcactgaagatggcgtaaatgtagcgcagttcag

SEQ ID NO: 447360 - DNA, 55 bp, Artificial
  Synthetic oligonucleotide
taactactacacccactggtcgggcagcataaagcttactttcatgttttgtggc

SEQ ID NO: 447361 - DNA, 60 bp, Artificial
  Synthetic oligonucleotide
taactactgcattgattacaaactacacaactgcagatgtcgcagctgcaatagcattta

SEQ ID NO: 447362 - DNA, 60 bp, Artificial
  Synthetic oligonucleotide
taactactgcggagcgaatgaactgactgctagttttatattgccaataactcatccgga

SEQ ID NO: 447363 - DNA, 60 bp, Artificial
  Synthetic oligonucleotide
taactaggatgtttgacaatctgccacaatcctgctctatcaacaatacccaccattact

SEQ ID NO: 447364 - DNA, 58 bp, Artificial
  Synthetic oligonucleotide
taactaggtctgtgtgcttagatgagttcatagggttccttaaacctctttgcgtaga

SEQ ID NO: 447365 - DNA, 60 bp, Artificial
  Synthetic oligonucleotide
taactagtaatgtgcatcccaatgaatggtatccaatgttggatagtgcaactgtggatg

SEQ ID NO: 447366 - DNA, 58 bp, Artificial
  Synthetic oligonucleotide
taactagtttgaaacagctgggtcgtggtctagccaccggaaaatgactagctctgtc

SEQ ID NO: 447367 - DNA, 57 bp, Artificial
  Synthetic oligonucleotide
taactataggcgtgtaggacgacttgccggagtaaacacggcaccaaatgtcgacga

SEQ ID NO: 447368 - DNA, 58 bp, Artificial
  Synthetic oligonucleotide
taactatccaactaaatcaggatactgtgggggtgttctatacaagattgggagtgtc

SEQ ID NO: 447369 - DNA, 59 bp, Artificial
  Synthetic oligonucleotide
taactatgcgcgttacagctcttataacgcttaacaagtatacgagcttcgctcttaaa

SEQ ID NO: 447370 - DNA, 60 bp, Artificial
  Synthetic oligonucleotide
taactatgttacatccagatctagtgattatgtttgaaagtactccgagcgggtctcgaa

SEQ ID NO: 447371 - DNA, 60 bp, Artificial
  Synthetic oligonucleotide
taactatgttgctccttttacgctgtgtggatatgctgctttaatgcctctgtatcatgc

SEQ ID NO: 447372 - DNA, 56 bp, Artificial
  Synthetic oligonucleotide
taactattaaggggacttcggtggattctgttgtgccatccgatttagttggcgct

SEQ ID NO: 447373 - DNA, 55 bp, Artificial
  Synthetic oligonucleotide
taactattcctgcatagattcttaggcatttcttacagagaatacccctccctgg

SEQ ID NO: 447374 - DNA, 60 bp, Artificial
  Synthetic oligonucleotide
taactcaaagtacagatgacagacaaaacatgtctttagatcctaaacagactcagttat

SEQ ID NO: 447375 - DNA, 60 bp, Artificial
  Synthetic oligonucleotide
taactcaagcagaatcgcaccacccacggtcgcacatagcgacgcgttggctaggcgctt

SEQ ID NO: 447376 - DNA, 51 bp, Artificial
  Synthetic oligonucleotide
taactcaatggacctcagtacttcagctggctacagttttgtgaaatctgg

SEQ ID NO: 447377 - DNA, 60 bp, Artificial
  Synthetic oligonucleotide
taactcaatggcacaatgctaatgtagtcgaatatgtgccgtattggaatgggggcactt

SEQ ID NO: 447378 - DNA, 55 bp, Artificial
  Synthetic oligonucleotide
taactcatatcctgcatactttctgtgccaactatttgcacctgggagtgcctga

SEQ ID NO: 447379 - DNA, 53 bp, Artificial
  Synthetic oligonucleotide
taactcatgacgatgaaaaggatcgcaatgagctgtattcactctaactggtg

SEQ ID NO: 447380 - DNA, 51 bp, Artificial
  Synthetic oligonucleotide
taactccagatgtggaaagtctctacttattggcaaactcataagcgattt

SEQ ID NO: 447381 - DNA, 53 bp, Artificial
  Synthetic oligonucleotide
taactcccctgtgttcaattacaataaggtaaccaaaaggcttacagtactcg

SEQ ID NO: 447382 - DNA, 55 bp, Artificial
  Synthetic oligonucleotide
taactcccgcggtgagtcactgtcgtctactgtgactttgggcgctcgggtactc

SEQ ID NO: 447383 - DNA, 55 bp, Artificial
  Synthetic oligonucleotide
taactcctctgactccggacgtagtggaccttgcactggaaccgtggagtactcc

SEQ ID NO: 447384 - DNA, 54 bp, Artificial
  Synthetic oligonucleotide
taactcctggttggatttaatttggtacttcgacaattacctggttgtgtcgac

SEQ ID NO: 447385 - DNA, 55 bp, Artificial
  Synthetic oligonucleotide
taactcgaaagatgatgttgaacgcgctacagcatattttacagctccaacgggg

SEQ ID NO: 447386 - DNA, 52 bp, Artificial
  Synthetic oligonucleotide
taactcgacaattcccgagcctatcgtagggcgtcaaggagataaaaacggc

SEQ ID NO: 447387 - DNA, 60 bp, Artificial
  Synthetic oligonucleotide
taactcgcgtgttgacatgcatacagttcgcgggttactgtatgcataccaacaacgcac

SEQ ID NO: 447388 - DNA, 55 bp, Artificial
  Synthetic oligonucleotide
taactcgcgttagcaaagctgtggctaggaggttcaaggaatccttttttaacgc

SEQ ID NO: 447389 - DNA, 55 bp, Artificial
  Synthetic oligonucleotide
taactcgctgattcccgtatttgctcgcgcattgtgcagctgggcagacgaagct

SEQ ID NO: 447390 - DNA, 56 bp, Artificial
  Synthetic oligonucleotide
taactcggactcatctcagcattcgtgaaacagtttcgcgaaacgttttacaaaac

SEQ ID NO: 447391 - DNA, 55 bp, Artificial
  Synthetic oligonucleotide
taactcggctggctctcccgtacaccgcaccacaccgcgtgttggccacaacgta

SEQ ID NO: 447392 - DNA, 56 bp, Artificial
  Synthetic oligonucleotide
taactcgggtgcaatacacgattacccgtgtaaattcacaaactgcgtatcaggtt

SEQ ID NO: 447393 - DNA, 51 bp, Artificial
  Synthetic oligonucleotide
taactcggttttttacgacgaagacgcccactttcgatacgttgtctttcg

SEQ ID NO: 447394 - DNA, 60 bp, Artificial
  Synthetic oligonucleotide
taactctaatagtgagataccacgcttgtggaacttatgctcacacagccatcctctagt

SEQ ID NO: 447395 - DNA, 55 bp, Artificial
  Synthetic oligonucleotide
taactctaatccagatactgatgcagaaggtacgcaagatactacaacagtacga

SEQ ID NO: 447396 - DNA, 56 bp, Artificial
  Synthetic oligonucleotide
taactctaccaggatacaaataccttggtccaggaaactcactagaccaaggagaa

SEQ ID NO: 447397 - DNA, 59 bp, Artificial
  Synthetic oligonucleotide
taactctcacagcggcagtacttctgctagtcacgcattatgccattataggtccagga

SEQ ID NO: 447398 - DNA, 59 bp, Artificial
  Synthetic oligonucleotide
taactctccacttcagcagatcactttgccggattccatgtacaggaaactttctcgtt

SEQ ID NO: 447399 - DNA, 59 bp, Artificial
  Synthetic oligonucleotide
taactctccgcaaggttcatttagcaacacaaccgtcaatattaatgacttgaggagta

SEQ ID NO: 447400 - DNA, 56 bp, Artificial
  Synthetic oligonucleotide
taactctcctacaggtttgcgaatcgaaatccgacctcccgtcttatatagaagct

SEQ ID NO: 447401 - DNA, 57 bp, Artificial
  Synthetic oligonucleotide
taactctcgtggtcggaagaataatgatatacctttgtcattctacaaccccattac

SEQ ID NO: 447402 - DNA, 60 bp, Artificial
  Synthetic oligonucleotide
taactctgactctcggccatcggacatagacgagacgactggtgaggagttctatccccg

SEQ ID NO: 447403 - DNA, 54 bp, Artificial
  Synthetic oligonucleotide
taactctggccaccaaaggacccctaactgtgtccgaaggcaaacttgtcctag

SEQ ID NO: 447404 - DNA, 60 bp, Artificial
  Synthetic oligonucleotide
taactctgtgcagataggaataagccctgagcatacagctggcatactaggaaagttgaa

SEQ ID NO: 447405 - DNA, 55 bp, Artificial
  Synthetic oligonucleotide
taactcttctggaactgacgtgaacgacgacagttcaaatgggggaacccatggt

SEQ ID NO: 447406 - DNA, 57 bp, Artificial
  Synthetic oligonucleotide
taactgaaaactattgcattagcttccaagttttaggaagtgcttacaacaatctaa

SEQ ID NO: 447407 - DNA, 50 bp, Artificial
  Synthetic oligonucleotide
taactgaatgaccacacgggttacccgcactagcgccataagtcattggg

SEQ ID NO: 447408 - DNA, 55 bp, Artificial
  Synthetic oligonucleotide
taactgacagaggtagacaaaaagttgtccccttaacggacacaacaaatcagaa

SEQ ID NO: 447409 - DNA, 57 bp, Artificial
  Synthetic oligonucleotide
taactgacatttacaggggttgcaagcaggccggcacttgcccccccgatgtaatta

SEQ ID NO: 447410 - DNA, 56 bp, Artificial
  Synthetic oligonucleotide
taactgacgcttggccagcacagttagactttacgatcgcgggaactgatgtcgat

SEQ ID NO: 447411 - DNA, 56 bp, Artificial
  Synthetic oligonucleotide
taactgagaaagagccctttcgtggcatatttgtaaatatgggtgttcccccgata

SEQ ID NO: 447412 - DNA, 60 bp, Artificial
  Synthetic oligonucleotide
taactgagagcgctgagcttctgctccggcgttggggttatggtcttcgattgaggaggc

SEQ ID NO: 447413 - DNA, 55 bp, Artificial
  Synthetic oligonucleotide
taactgaggcggtgaagcattatagtgctaatgtgcgggaccagattcttacgac

SEQ ID NO: 447414 - DNA, 60 bp, Artificial
  Synthetic oligonucleotide
taactgagtggtgctgtagatcatgcacattgccaccactaaggtacagaggagacgacg

SEQ ID NO: 447415 - DNA, 60 bp, Artificial
  Synthetic oligonucleotide
taactgatacaacaaatcagaagactgaattacaagcaatccagctagccttgcaagact

SEQ ID NO: 447416 - DNA, 60 bp, Artificial
  Synthetic oligonucleotide
taactgatgagttagctgtagtccagaaccttgttttaacacttagtgtgactgtttgca

SEQ ID NO: 447417 - DNA, 59 bp, Artificial
  Synthetic oligonucleotide
taactgatggcccagcttcaggggttagtgaatgcagattccttaagattcgagagggc

SEQ ID NO: 447418 - DNA, 58 bp, Artificial
  Synthetic oligonucleotide
taactgattacatccacatgttaggtgaagcttttggaacaggttttgttgatagtgt

SEQ ID NO: 447419 - DNA, 59 bp, Artificial
  Synthetic oligonucleotide
taactgcaacgtgcggatagccaagacgtttggcgcctctaagcgcaaaaacacgacgc

SEQ ID NO: 447420 - DNA, 57 bp, Artificial
  Synthetic oligonucleotide
taactgcagaaagcctatgtttaccactagtcataaccaaaacaaggcctcctccta

SEQ ID NO: 447421 - DNA, 53 bp, Artificial
  Synthetic oligonucleotide
taactgcagaactaaataagtcgatggtccagggtactatcgacagcgctgta

SEQ ID NO: 447422 - DNA, 54 bp, Artificial
  Synthetic oligonucleotide
taactgcagcccaaggtgagtttaattcaattagacctacctgggtaaaacctg

SEQ ID NO: 447423 - DNA, 57 bp, Artificial
  Synthetic oligonucleotide
taactgccacagagttaggtttattaccggaatgggctgcaattttgttatcgtata

SEQ ID NO: 447424 - DNA, 55 bp, Artificial
  Synthetic oligonucleotide
taactgccgccgttccgcgctacgtggcctcccccctgttgaccgtacctattgc

SEQ ID NO: 447425 - DNA, 60 bp, Artificial
  Synthetic oligonucleotide
taactgcggagcagatactcacaaaccagtgggcggtctgtcgtaacgggcaactctgca

SEQ ID NO: 447426 - DNA, 55 bp, Artificial
  Synthetic oligonucleotide
taactgcggagcaggcacccacaagccagtgggcagcctgtcgtaacgggcaact

SEQ ID NO: 447427 - DNA, 57 bp, Artificial
  Synthetic oligonucleotide
taactggactaggggggaaccttgcgatctggagcatcgggaccgtacagaattgtc

SEQ ID NO: 447428 - DNA, 60 bp, Artificial
  Synthetic oligonucleotide
taactggcaatggtactcaagtgtacttagctcccacgctgctatgtgcgggtgtcccga

SEQ ID NO: 447429 - DNA, 58 bp, Artificial
  Synthetic oligonucleotide
taactgggcgttattcgacacgataacgttttaccactcgtcatttggccatgtgcga

SEQ ID NO: 447430 - DNA, 55 bp, Artificial
  Synthetic oligonucleotide
taactggggctactgatgttgatggaatggcttggtttactcccgttgggttggc

SEQ ID NO: 447431 - DNA, 58 bp, Artificial
  Synthetic oligonucleotide
taactggtgttgacaaggctaaaagttgttcaagagcgtcctcctctgtaagaggaca

SEQ ID NO: 447432 - DNA, 59 bp, Artificial
  Synthetic oligonucleotide
taactgtactgatgctacatactattgtaaacacaaaaacagatattatccaattaaag

SEQ ID NO: 447433 - DNA, 59 bp, Artificial
  Synthetic oligonucleotide
taactgtaggagttaagtattggttgacattagtagcctgagcagctccaagtatttta

SEQ ID NO: 447434 - DNA, 58 bp, Artificial
  Synthetic oligonucleotide
taactgtatataatgttgctgacgaggtattacaaagttcaaaaatattactacaaca

SEQ ID NO: 447435 - DNA, 58 bp, Artificial
  Synthetic oligonucleotide
taactgtattggcgaaggttttctgcagtttcccttcgccctcggcaaatgcgataca

SEQ ID NO: 447436 - DNA, 59 bp, Artificial
  Synthetic oligonucleotide
taactgtcgctgctcctacggctccttctgtagctcgtttgttaccttggcgagtcagt

SEQ ID NO: 447437 - DNA, 55 bp, Artificial
  Synthetic oligonucleotide
taactgtgaaagcttaacatcaggtgttatagaggccctatccgcccacctacac

SEQ ID NO: 447438 - DNA, 55 bp, Artificial
  Synthetic oligonucleotide
taactgtgaatgtaagaggctcagggatgagaatactcgtgagaggtaactctcc

SEQ ID NO: 447439 - DNA, 56 bp, Artificial
  Synthetic oligonucleotide
taactgtgtacccccgcccattttcagcgtgttcccaccttaatggaatggtgcaa

SEQ ID NO: 447440 - DNA, 60 bp, Artificial
  Synthetic oligonucleotide
taactgtgtcacttgcagggagaccacgtggtacaccagtgccattgctgtggacctgtg

SEQ ID NO: 447441 - DNA, 60 bp, Artificial
  Synthetic oligonucleotide
taactgtgttgtcccaagctcttcctttgatctgtgatcgtgaagcaatatagggccagc

SEQ ID NO: 447442 - DNA, 55 bp, Artificial
  Synthetic oligonucleotide
taactgttatgatagtgtggttatgggttagatttaagggtggtgggtgtcttac

SEQ ID NO: 447443 - DNA, 59 bp, Artificial
  Synthetic oligonucleotide
taactgttgggcctcgtttaacgatcttgaacatgactcatgtaacggtgtttatgcga

SEQ ID NO: 447444 - DNA, 51 bp, Artificial
  Synthetic oligonucleotide
taacttaccggttaatctttggggccgagatttgctttcccaaatgaaaat

SEQ ID NO: 447445 - DNA, 53 bp, Artificial
  Synthetic oligonucleotide
taacttactaaacagactccgagtcgccatttggccccccctaagctccgccc

SEQ ID NO: 447446 - DNA, 55 bp, Artificial
  Synthetic oligonucleotide
taacttagaagctcaaattgaggggtcaataggaaacccaacacaccagttgggc

SEQ ID NO: 447447 - DNA, 57 bp, Artificial
  Synthetic oligonucleotide
taacttagaagttaaacacacagaccaataggtgatggctatccaagtcattaacgg

SEQ ID NO: 447448 - DNA, 60 bp, Artificial
  Synthetic oligonucleotide
taacttatacttatgctttctcatgaaactctctgttaattggctaacagcactaacaag

SEQ ID NO: 447449 - DNA, 60 bp, Artificial
  Synthetic oligonucleotide
taacttattgtcgaggttgtaccatgtatcatgtatgtcaatggtgtagtcaatatgata

SEQ ID NO: 447450 - DNA, 51 bp, Artificial
  Synthetic oligonucleotide
taacttcaacatgtttatccggtttctaggccggttttcctagaagtttta

SEQ ID NO: 447451 - DNA, 60 bp, Artificial
  Synthetic oligonucleotide
taacttcacgactgtcagtactatcttcatgtgctactaatggtctgcagttattagata

SEQ ID NO: 447452 - DNA, 60 bp, Artificial
  Synthetic oligonucleotide
taacttcatatgatggatgtttaggtatgttcggactatctatatctctggcttcaaaac

SEQ ID NO: 447453 - DNA, 60 bp, Artificial
  Synthetic oligonucleotide
taacttccagttacaacatgaatgccagagccgagtttctctactatcaactgtgtagcg

SEQ ID NO: 447454 - DNA, 60 bp, Artificial
  Synthetic oligonucleotide
taacttccgccttcaacaagaagacctttgaccacacactcatgagcatagtctcaagcc

SEQ ID NO: 447455 - DNA, 54 bp, Artificial
  Synthetic oligonucleotide
taacttcgttcggtccgtcgatccgttaactggtcatactttggatgagaaccc

SEQ ID NO: 447456 - DNA, 60 bp, Artificial
  Synthetic oligonucleotide
taacttgaggagcaacaactcagccacaattatagtcccatatgttaatgcagtaccaat

SEQ ID NO: 447457 - DNA, 54 bp, Artificial
  Synthetic oligonucleotide
taacttggagtctaacgcgcatcgttgtacgtttacacaattgtgatttagtgt

SEQ ID NO: 447458 - DNA, 52 bp, Artificial
  Synthetic oligonucleotide
taacttgggttgggagtgttgattgttacaagtatatactaagccagatatc

SEQ ID NO: 447459 - DNA, 60 bp, Artificial
  Synthetic oligonucleotide
taacttggtgtaatgcacaaagctggagccactatgaaaactgggcaataaactacacat

SEQ ID NO: 447460 - DNA, 60 bp, Artificial
  Synthetic oligonucleotide
taacttgtcgggcagagacaagtcgttgccgtcacgatagacggagccgctgggattgcg

SEQ ID NO: 447461 - DNA, 60 bp, Artificial
  Synthetic oligonucleotide
taacttgtggaaggaaatcaatgcaattacatgcatgtttcaaagaccatatgtcatgca

SEQ ID NO: 447462 - DNA, 56 bp, Artificial
  Synthetic oligonucleotide
taactttaagaagcttgtgtcccttgacgattgctcggtcacgttgtctactgtat

SEQ ID NO: 447463 - DNA, 58 bp, Artificial
  Synthetic oligonucleotide
taactttacagggatataatccttggcaatttggacactggttattatgtgtcctaga

SEQ ID NO: 447464 - DNA, 59 bp, Artificial
  Synthetic oligonucleotide
taactttagagtcttgtcgcagcaactttcgcgacttaataagacgttgtcagctggtc

SEQ ID NO: 447465 - DNA, 60 bp, Artificial
  Synthetic oligonucleotide
taactttcgagtcttgtcgcaacaactctcgcgactcaataagacgttagcagctggtcg

SEQ ID NO: 447466 - DNA, 60 bp, Artificial
  Synthetic oligonucleotide
taactttcgggtgtggcataatagttctgtctgaagaagcaaaattgtgttctgatgccc

SEQ ID NO: 447467 - DNA, 53 bp, Artificial
  Synthetic oligonucleotide
taactttcttccccgagctgggatcctttctaaggtccggaggacctgttcta

SEQ ID NO: 447468 - DNA, 60 bp, Artificial
  Synthetic oligonucleotide
taactttggcgatctgacttcactattgcgtatgcttttgatcaagattgatagtatcac

SEQ ID NO: 447469 - DNA, 54 bp, Artificial
  Synthetic oligonucleotide
taactttgtgtttgactcccctaacatgtaacttagaagtttgaacgataagac

SEQ ID NO: 447470 - DNA, 53 bp, Artificial
  Synthetic oligonucleotide
taacttttaacgctaaaggcggtgtttatgattcgcccgggctcagtaagtac

SEQ ID NO: 447471 - DNA, 53 bp, Artificial
  Synthetic oligonucleotide
taacttttatgcacctagaattaactttcaacctacccagaatattaaggaac

SEQ ID NO: 447472 - DNA, 55 bp, Artificial
  Synthetic oligonucleotide
taacttttctgcttttgtggtacccttatctttagtcgttcaatcagaagcgctc

SEQ ID NO: 447473 - DNA, 53 bp, Artificial
  Synthetic oligonucleotide
taagaaaagaccagtcggagggtgtaaggtcgtccagattcggaaggttagaa

SEQ ID NO: 447474 - DNA, 60 bp, Artificial
  Synthetic oligonucleotide
taagaaaagccatattaggacacagagttattcctaggtgtgactatcaagcaggacata

SEQ ID NO: 447475 - DNA, 54 bp, Artificial
  Synthetic oligonucleotide
taagaaaaggtattcgccctctgctggtcaaggctcagcaatgcctatagaggg

SEQ ID NO: 447476 - DNA, 55 bp, Artificial
  Synthetic oligonucleotide
taagaaaccggtgctacgtacagcaactgtacagggaccgagcttggacttcgcc

SEQ ID NO: 447477 - DNA, 53 bp, Artificial
  Synthetic oligonucleotide
taagaaactactcttccaaaagatgaaacaagagaaaaatccatttaaaggat

SEQ ID NO: 447478 - DNA, 50 bp, Artificial
  Synthetic oligonucleotide
taagaaacttttgtataagtggggaggtcaagatatgcagtccaaacggg

SEQ ID NO: 447479 - DNA, 57 bp, Artificial
  Synthetic oligonucleotide
taagaaagaggacttcatcattacccggcctcccttccatgtgaggactttccaggc

SEQ ID NO: 447480 - DNA, 60 bp, Artificial
  Synthetic oligonucleotide
taagaaagcaaaggatctcatgtacctgatgtcaacattgcacatggcaggcatggaggg

SEQ ID NO: 447481 - DNA, 54 bp, Artificial
  Synthetic oligonucleotide
taagaaagccttagaacagatggccccgtgtagccctcctgaggccattctatt

SEQ ID NO: 447482 - DNA, 60 bp, Artificial
  Synthetic oligonucleotide
taagaaaggcctactcctcagactggcggcaggtctagcgttagctcctatatgcgcgct

SEQ ID NO: 447483 - DNA, 52 bp, Artificial
  Synthetic oligonucleotide
taagaaaggcttgcgccggaccgacctgtggaacccaaaaaccggacctaca

SEQ ID NO: 447484 - DNA, 58 bp, Artificial
  Synthetic oligonucleotide
taagaaatcagtacctgccattattcggtttcctattaactgtgcacacagtgaaaat

SEQ ID NO: 447485 - DNA, 58 bp, Artificial
  Synthetic oligonucleotide
taagaaatcccggttgggagccgactctgcaccaactccttcagaagtgggatcacga

SEQ ID NO: 447486 - DNA, 55 bp, Artificial
  Synthetic oligonucleotide
taagaaatgatgttcattccaatcttgttgctgctcttgagcccatgtgtgctcg

SEQ ID NO: 447487 - DNA, 59 bp, Artificial
  Synthetic oligonucleotide
taagaaatggaacgtatgactatccacaatactcagaagaatcaaggttgaacagggag

SEQ ID NO: 447488 - DNA, 57 bp, Artificial
  Synthetic oligonucleotide
taagaaatgtccctaaggtagagactagaggacttttcggagccattgcaggtttca

SEQ ID NO: 447489 - DNA, 60 bp, Artificial
  Synthetic oligonucleotide
taagaaatgttccacagattgagactagaggacttttcggagctatcgcaggatttattg

SEQ ID NO: 447490 - DNA, 60 bp, Artificial
  Synthetic oligonucleotide
taagaaatttcttcagtagactggacctcaaggggagagacatcagaattataggagctc

SEQ ID NO: 447491 - DNA, 55 bp, Artificial
  Synthetic oligonucleotide
taagaacacccgcacgttagatcaattctacgcctgcgaactggcctcctcttgg

SEQ ID NO: 447492 - DNA, 60 bp, Artificial
  Synthetic oligonucleotide
taagaacatcagtcagcgacagtattgacagtatgattaggtacgttggtgagcagggaa

SEQ ID NO: 447493 - DNA, 57 bp, Artificial
  Synthetic oligonucleotide
taagaaccaaattacttttggtcaatcaagaatgttcattccacacataacattaag

SEQ ID NO: 447494 - DNA, 53 bp, Artificial
  Synthetic oligonucleotide
taagaacgacggtgtttacaataagcaccacgtgttattcgatttgatggtca

SEQ ID NO: 447495 - DNA, 57 bp, Artificial
  Synthetic oligonucleotide
taagaactgctcctaatgaggtcgcttttaacgtgtttcctttcacacgtgcgacca

SEQ ID NO: 447496 - DNA, 55 bp, Artificial
  Synthetic oligonucleotide
taagaacttccactacgagaatactgagataccagcagcttctgtccagaaagtg

SEQ ID NO: 447497 - DNA, 60 bp, Artificial
  Synthetic oligonucleotide
taagaacttgaccaatttctgtgatggcactctggtatctatcggaaagacttgcaacgc

SEQ ID NO: 447498 - DNA, 55 bp, Artificial
  Synthetic oligonucleotide
taagaagaacattaggacagtcaaaacaggtgcaggcgagtttaccgccctgggg

SEQ ID NO: 447499 - DNA, 60 bp, Artificial
  Synthetic oligonucleotide
taagaagaagcaagtacatgcacttttttatagacttgatgtggtacaaatagataatga

SEQ ID NO: 447500 - DNA, 60 bp, Artificial
  Synthetic oligonucleotide
taagaagacattcgacaatgttgagactaaattcagatcaggtacatcgtagaccagaca

SEQ ID NO: 447501 - DNA, 55 bp, Artificial
  Synthetic oligonucleotide
taagaagatcgccgagaaaacacccagggtctagaccaccaggaaaaagacctgc

SEQ ID NO: 447502 - DNA, 60 bp, Artificial
  Synthetic oligonucleotide
taagaagccgtacatgcgtttcgcggacttcgatattgtcaccgagtctctgtctaagat

SEQ ID NO: 447503 - DNA, 60 bp, Artificial
  Synthetic oligonucleotide
taagaagcgcaattgagatagaatcagaggggatgcaggaggaagcgatacaggagatag

SEQ ID NO: 447504 - DNA, 60 bp, Artificial
  Synthetic oligonucleotide
taagaaggacacaatctatggggattcaactggaccagaaaatcataattctctacatgc

SEQ ID NO: 447505 - DNA, 55 bp, Artificial
  Synthetic oligonucleotide
taagaaggacctagacaacaccatcgactacaatagagacagactggttcaggac

SEQ ID NO: 447506 - DNA, 55 bp, Artificial
  Synthetic oligonucleotide
taagaaggagagttgacataaaccctggccacgcagatctcagtgccaaggaggc

SEQ ID NO: 447507 - DNA, 60 bp, Artificial
  Synthetic oligonucleotide
taagaaggctggagcattgcgaacacgcatgctccggtcgcgcggttgggctgagctggc

SEQ ID NO: 447508 - DNA, 55 bp, Artificial
  Synthetic oligonucleotide
taagaaggtgtctccaaatgagtttgggagtgtctccaattgaggctcctcaaac

SEQ ID NO: 447509 - DNA, 50 bp, Artificial
  Synthetic oligonucleotide
taagaagtctcatagaagcaggcagactaaatgaacattcgtctgatgat

SEQ ID NO: 447510 - DNA, 57 bp, Artificial
  Synthetic oligonucleotide
taagaatcacatgcaggcaaccctccctggcgggacgccgttcaattggggcagcaa

SEQ ID NO: 447511 - DNA, 60 bp, Artificial
  Synthetic oligonucleotide
taagaatcagttcatgatccgagcttcatcttatccgacattagtatcaccagtttcaac

SEQ ID NO: 447512 - DNA, 60 bp, Artificial
  Synthetic oligonucleotide
taagaatcctgcaacaactgctgtttattcatttcagaattgggtgtcaacatagcagaa

SEQ ID NO: 447513 - DNA, 58 bp, Artificial
  Synthetic oligonucleotide
taagaatcggtcctggacaagcgttctacgcaacaggtgacataataggagatataag

SEQ ID NO: 447514 - DNA, 60 bp, Artificial
  Synthetic oligonucleotide
taagaatgcgagatgaagctagtagaactttaagacaagttagagatgctactagagctc

SEQ ID NO: 447515 - DNA, 52 bp, Artificial
  Synthetic oligonucleotide
taagaatgctcctagttacgtcacgacttcagaaatagtagtcggtgcgatg

SEQ ID NO: 447516 - DNA, 60 bp, Artificial
  Synthetic oligonucleotide
taagaatggacttactcggagaggatgagctagacccaaatgaaatacgtgtgaataaga

SEQ ID NO: 447517 - DNA, 60 bp, Artificial
  Synthetic oligonucleotide
taagaatggttggcggcgcttttgctacaatttgtggtgtcacgattatggtgatgttat

SEQ ID NO: 447518 - DNA, 60 bp, Artificial
  Synthetic oligonucleotide
taagaattgaatctgcggtgtgtgaatctgtacttgctgacgcgagcgaaacaatgctag

SEQ ID NO: 447519 - DNA, 60 bp, Artificial
  Synthetic oligonucleotide
taagaattggagagaactcagatgttttagtcacaagagaaccctatgtttcatgcgacc

SEQ ID NO: 447520 - DNA, 58 bp, Artificial
  Synthetic oligonucleotide
taagaattgtcatgatagtacttaacctagtaaagaacattaggcagggatatcaacc

SEQ ID NO: 447521 - DNA, 60 bp, Artificial
  Synthetic oligonucleotide
taagaattttaatccctatacctacatgctgatgctatccccctcttctcgcactacgac

SEQ ID NO: 447522 - DNA, 60 bp, Artificial
  Synthetic oligonucleotide
taagacaaagttgtatgaggcagcccattcagacgtccgagaatccctagctaggtatat

SEQ ID NO: 447523 - DNA, 55 bp, Artificial
  Synthetic oligonucleotide
taagacacacacgtgcacaaatgaatgaagatatagtggtatcaaaaacatcgtt

SEQ ID NO: 447524 - DNA, 50 bp, Artificial
  Synthetic oligonucleotide
taagacacatagccagagagcaacatccggagtactacaaagactgaact

SEQ ID NO: 447525 - DNA, 59 bp, Artificial
  Synthetic oligonucleotide
taagacacgtgttcaaacgtgtattgtccgtggagaaggatacgatgatggttgacgtg

SEQ ID NO: 447526 - DNA, 53 bp, Artificial
  Synthetic oligonucleotide
taagacactgtgagatatttgatgtgtcccttgtattgcagttggggagagtg

SEQ ID NO: 447527 - DNA, 60 bp, Artificial
  Synthetic oligonucleotide
taagacacttccctcgagattggctccatcagctaggacagcatatctataccacttatg

SEQ ID NO: 447528 - DNA, 56 bp, Artificial
  Synthetic oligonucleotide
taagacacttcgacccgggacgatggtatccggtcaccggtacgtgacgatcgcgc

SEQ ID NO: 447529 - DNA, 60 bp, Artificial
  Synthetic oligonucleotide
taagacacttgcagttgcgattaaatcgaaagtagatgcggtcgacgaaatgaatcagga

SEQ ID NO: 447530 - DNA, 54 bp, Artificial
  Synthetic oligonucleotide
taagacagcaacggggcaccggtaacccctccgtctaccgccaattggagcgtg

SEQ ID NO: 447531 - DNA, 60 bp, Artificial
  Synthetic oligonucleotide
taagacaggtacaagcggattacatgacggcaacgcgcgaagttgattttacagtgccag

SEQ ID NO: 447532 - DNA, 60 bp, Artificial
  Synthetic oligonucleotide
taagacatggtttggggcatatgcagcctctccctattgtgaggtagaacggaagcttgg

SEQ ID NO: 447533 - DNA, 56 bp, Artificial
  Synthetic oligonucleotide
taagacatttggtgatataaagacctcacacaatttccatttttccgtgaggaccc

SEQ ID NO: 447534 - DNA, 55 bp, Artificial
  Synthetic oligonucleotide
taagaccaatgcacagattttcctaggcacattgtcaattatgcgcctaactggt

SEQ ID NO: 447535 - DNA, 60 bp, Artificial
  Synthetic oligonucleotide
taagaccattctaagagcattaggaccaggggcttcattagaagaaatgatgacagcatg

SEQ ID NO: 447536 - DNA, 50 bp, Artificial
  Synthetic oligonucleotide
taagacccaggctatgacttattgtcgtaccggtgaatgcatcgactccc

SEQ ID NO: 447537 - DNA, 57 bp, Artificial
  Synthetic oligonucleotide
taagaccctagccggctcacggggcccggtcacacagatgtattcaagtgccgaagg

SEQ ID NO: 447538 - DNA, 60 bp, Artificial
  Synthetic oligonucleotide
taagaccgcaggagctgcgtggcaggctattaccagcttcgcaagcacggcgtggggtta

SEQ ID NO: 447539 - DNA, 57 bp, Artificial
  Synthetic oligonucleotide
taagacgaatttcgccgctggagcgaaagtctttatgagggatttgtacgtgataac

SEQ ID NO: 447540 - DNA, 58 bp, Artificial
  Synthetic oligonucleotide
taagacgataaacgagaatatactcggttacgatacagaaatgcgtagagtgcgatat

SEQ ID NO: 447541 - DNA, 59 bp, Artificial
  Synthetic oligonucleotide
taagacggatattgaacaacaactaaattccattgacgtaatcaatccaattaatgcta

SEQ ID NO: 447542 - DNA, 55 bp, Artificial
  Synthetic oligonucleotide
taagacgggcgtgcttctgtccgtaggagacacgggcctaaagtttgtagcgtct

SEQ ID NO: 447543 - DNA, 54 bp, Artificial
  Synthetic oligonucleotide
taagacgggtagagattacgcaaggtaagagaccagatccttggacccaaaaaa

SEQ ID NO: 447544 - DNA, 57 bp, Artificial
  Synthetic oligonucleotide
taagacggtcttgtaccaatcaacggtacgtgacgttagctccatgagtaacttaca

SEQ ID NO: 447545 - DNA, 60 bp, Artificial
  Synthetic oligonucleotide
taagacgtgcggatgcgaaatacgattatgaggtgctcatgcaatcagccgtatcatgtg

SEQ ID NO: 447546 - DNA, 60 bp, Artificial
  Synthetic oligonucleotide
taagacgttgagtgcttacaagcaatcaagacacgtatcccgagactctctgtcgggtgc

SEQ ID NO: 447547 - DNA, 60 bp, Artificial
  Synthetic oligonucleotide
taagacgttgatcacaactagcaacaaagagccccgtgattggtatagaagtgagttcga

SEQ ID NO: 447548 - DNA, 60 bp, Artificial
  Synthetic oligonucleotide
taagactcagcactctgatgagtcagattgaaagttggcaggctacgagggcgagtgtac

SEQ ID NO: 447549 - DNA, 60 bp, Artificial
  Synthetic oligonucleotide
taagactcgcactttcacggcagcaccaatagacacactattgggtgccaaggtctgtgt

SEQ ID NO: 447550 - DNA, 55 bp, Artificial
  Synthetic oligonucleotide
taagactgtgaatgacaggggattgaatgtcttcgtatacactgaccaggagagg

SEQ ID NO: 447551 - DNA, 60 bp, Artificial
  Synthetic oligonucleotide
taagacttgacatagcgcccgatcttatccataatggtgtgcctcaaagactttcagata

SEQ ID NO: 447552 - DNA, 53 bp, Artificial
  Synthetic oligonucleotide
taagagaaaaggggggactggatgggctaatttactccaagaaaagacaagaa

SEQ ID NO: 447553 - DNA, 59 bp, Artificial
  Synthetic oligonucleotide
taagagaaccaagggggagtgacatagcaggaactactagtactcttcaggagcaaata

SEQ ID NO: 447554 - DNA, 59 bp, Artificial
  Synthetic oligonucleotide
taagagaaccatttgtggcatgtggtcccacagaatgtaggacatttttcctaacgcaa

SEQ ID NO: 447555 - DNA, 58 bp, Artificial
  Synthetic oligonucleotide
taagagaacgagttaactgttaagtcaactcacgctcacgcactcggagtaagagaac

SEQ ID NO: 447556 - DNA, 60 bp, Artificial
  Synthetic oligonucleotide
taagagaaggtaatgacactaggtataggatgacaaattgtaacacctctatcattacac

SEQ ID NO: 447557 - DNA, 60 bp, Artificial
  Synthetic oligonucleotide
taagagaataagagaaagagcagaagacagtggaaatgagagtgagggagacacagatga

SEQ ID NO: 447558 - DNA, 59 bp, Artificial
  Synthetic oligonucleotide
taagagaatagtgatggagtccataactagaggatttggtcacaaagactttccaggga

SEQ ID NO: 447559 - DNA, 60 bp, Artificial
  Synthetic oligonucleotide
taagagacaaatcgaaagggctaattccgatgccagaattggaagaagttcatgatccac

SEQ ID NO: 447560 - DNA, 58 bp, Artificial
  Synthetic oligonucleotide
taagagactgcagtataccatgttgggggagattcttaactactacacccactggacc

SEQ ID NO: 447561 - DNA, 59 bp, Artificial
  Synthetic oligonucleotide
taagagacttgtacttactcagtggcagccccagacccgtagaaagtgcaccatcaccg

SEQ ID NO: 447562 - DNA, 57 bp, Artificial
  Synthetic oligonucleotide
taagagagaagaagaagtgcttacgggcaaccttcaaacattgaaaataagagtaca

SEQ ID NO: 447563 - DNA, 53 bp, Artificial
  Synthetic oligonucleotide
taagagagaattcgtgaaacgcgactcattatggatcgctccactatctaaaa

SEQ ID NO: 447564 - DNA, 60 bp, Artificial
  Synthetic oligonucleotide
taagagagcagaaatcctggatctttgggtccatcacactcagggattcttccctgattg

SEQ ID NO: 447565 - DNA, 60 bp, Artificial
  Synthetic oligonucleotide
taagagaggagttactagtcaagatggagctgatgacacaaacaaacacgataatatgca

SEQ ID NO: 447566 - DNA, 57 bp, Artificial
  Synthetic oligonucleotide
taagagagtgggggatagccacttcgtggtaggtgccactacggacaatctaaagtg

SEQ ID NO: 447567 - DNA, 58 bp, Artificial
  Synthetic oligonucleotide
taagagataacaccccaatggtggtcgcaatacagaacggaatcgacagattacgtag

SEQ ID NO: 447568 - DNA, 57 bp, Artificial
  Synthetic oligonucleotide
taagagatcatccgcgtttgtttcttaggcggttaagagagcacatttatcctcata

SEQ ID NO: 447569 - DNA, 55 bp, Artificial
  Synthetic oligonucleotide
taagagatcgattgcaggttttacacaggttcagtgcaacggttactggtggaca

SEQ ID NO: 447570 - DNA, 53 bp, Artificial
  Synthetic oligonucleotide
taagagatctggatttttgacatcccacaccctaacaactccgtctcttccag

SEQ ID NO: 447571 - DNA, 60 bp, Artificial
  Synthetic oligonucleotide
taagagattggatagtccgtattctatacccatcatgtaacactcgacacaatattcctt

SEQ ID NO: 447572 - DNA, 60 bp, Artificial
  Synthetic oligonucleotide
taagagcacaacatatataaccctagaccaaacatgtgagcatctaaaagtctcttgtgg

SEQ ID NO: 447573 - DNA, 60 bp, Artificial
  Synthetic oligonucleotide
taagagcagcttctctcaccatttgatttcaattaccaagggagaggctataggccaaaa

SEQ ID NO: 447574 - DNA, 60 bp, Artificial
  Synthetic oligonucleotide
taagagcattgacactgaacacaatgacaaaagacgctgaaagaggcaaattaaagagaa

SEQ ID NO: 447575 - DNA, 51 bp, Artificial
  Synthetic oligonucleotide
taagagcccagcatgtagaattggttcacggccttgtagggacaacagccc

SEQ ID NO: 447576 - DNA, 55 bp, Artificial
  Synthetic oligonucleotide
taagagctagggcccgcagggacctagagttggagggatcggagcatggcagcca

SEQ ID NO: 447577 - DNA, 60 bp, Artificial
  Synthetic oligonucleotide
taagagctgcaagagtaatgtgtaagtcaaaaggcccagcatcgattctgtcggtactaa

SEQ ID NO: 447578 - DNA, 60 bp, Artificial
  Synthetic oligonucleotide
taagagctgcagtagagaggacacacgaaaatgtgttaacactaagcttgatcgaccaca

SEQ ID NO: 447579 - DNA, 51 bp, Artificial
  Synthetic oligonucleotide
taagaggaaaattctacttcttcagacatccctggagaagctacatagtaa

SEQ ID NO: 447580 - DNA, 56 bp, Artificial
  Synthetic oligonucleotide
taagaggaaagccgcattgcaattagccgtcgcgaaagcaacaatagcaagggaag

SEQ ID NO: 447581 - DNA, 60 bp, Artificial
  Synthetic oligonucleotide
taagaggaaggccacaagagactagagtatggtggacctcgaacagcatcgtcgcatttt

SEQ ID NO: 447582 - DNA, 60 bp, Artificial
  Synthetic oligonucleotide
taagaggacgctgctacgactgctgcagacatggttcaaggtccaactacccatagaaac

SEQ ID NO: 447583 - DNA, 60 bp, Artificial
  Synthetic oligonucleotide
taagaggactcttggactcttgcataagaggactcttggacttttagcaatgtcaacgac

SEQ ID NO: 447584 - DNA, 59 bp, Artificial
  Synthetic oligonucleotide
taagaggcagtaataaaaggggcatagaccattggcaagtagactatacccactatgaa

SEQ ID NO: 447585 - DNA, 57 bp, Artificial
  Synthetic oligonucleotide
taagaggcctgtattttcctgctggtggctccagttcagaaacagtaaaccctgttc

SEQ ID NO: 447586 - DNA, 55 bp, Artificial
  Synthetic oligonucleotide
taagaggtcacgcgtgtctcataaataaggtgataattcagttctggtgacctgt

SEQ ID NO: 447587 - DNA, 54 bp, Artificial
  Synthetic oligonucleotide
taagaggtctaatgttctcttctgaatgtggttcaccaaagagactgggacacc

SEQ ID NO: 447588 - DNA, 57 bp, Artificial
  Synthetic oligonucleotide
taagaggttctgtattaagtcagtttatgtttttggggtaagatctgggatggatga

SEQ ID NO: 447589 - DNA, 60 bp, Artificial
  Synthetic oligonucleotide
taagagtacatgaaggatatgaggaattcacaatggttgggcgaagagcaacagctatcc

SEQ ID NO: 447590 - DNA, 60 bp, Artificial
  Synthetic oligonucleotide
taagagtacatgaggggtatgaggagttcacaatggttggacggagggcaacagctatcc

SEQ ID NO: 447591 - DNA, 53 bp, Artificial
  Synthetic oligonucleotide
taagagtcctctccgagtggtctagcagtgaagttctcagcacgatggcgagc

SEQ ID NO: 447592 - DNA, 54 bp, Artificial
  Synthetic oligonucleotide
taagagtggaggaaagttcggagggaaatcccaagagggtcactcgagattcaa

SEQ ID NO: 447593 - DNA, 58 bp, Artificial
  Synthetic oligonucleotide
taagagttagaaatgctccgccggtagtatggaagttctctgatcttattaagttgtc

SEQ ID NO: 447594 - DNA, 54 bp, Artificial
  Synthetic oligonucleotide
taagagttagtgtgatcgagtccgtggtagggtctgatgcctccgtgtcgttgg

SEQ ID NO: 447595 - DNA, 60 bp, Artificial
  Synthetic oligonucleotide
taagagttggtgtatctacaatcagagaacgtggtatctctacatcagtctacaaccctg

SEQ ID NO: 447596 - DNA, 60 bp, Artificial
  Synthetic oligonucleotide
taagagtttgagagctgctagagttatgtgtaaatctaaaggaccagcatcaaacctatc

SEQ ID NO: 447597 - DNA, 52 bp, Artificial
  Synthetic oligonucleotide
taagatacaggcgctgtcaagccgcccgtctaacctgcgtggtttgcagggg

SEQ ID NO: 447598 - DNA, 60 bp, Artificial
  Synthetic oligonucleotide
taagatagatctatggtcttataatgcagaacttctggtggccttggaaaaccaacatac

SEQ ID NO: 447599 - DNA, 55 bp, Artificial
  Synthetic oligonucleotide
taagatagtagctatcctggagtatgctcgagtccctcacgcttacagcctggag

SEQ ID NO: 447600 - DNA, 55 bp, Artificial
  Synthetic oligonucleotide
taagatagtagggacacgtttatattcgcattacccaattaagttacggataata

SEQ ID NO: 447601 - DNA, 60 bp, Artificial
  Synthetic oligonucleotide
taagatatgggaatgtactggatgtcaattctattgaccttgaggagccaagcggccaga

SEQ ID NO: 447602 - DNA, 54 bp, Artificial
  Synthetic oligonucleotide
taagatattaagagttaggcaagtccaaggttacaattggttttctaaattcga

SEQ ID NO: 447603 - DNA, 59 bp, Artificial
  Synthetic oligonucleotide
taagatattgggaggttacggactcggcttggctgaggatctattgacccacctatcca

SEQ ID NO: 447604 - DNA, 55 bp, Artificial
  Synthetic oligonucleotide
taagatcaagcctggtgagataatcgaccgttctagagcaccgagatgtaaggct

SEQ ID NO: 447605 - DNA, 60 bp, Artificial
  Synthetic oligonucleotide
taagatcataaaagttgttcagggcgagctgaaaattgcatcgctagacagtaacagatt

SEQ ID NO: 447606 - DNA, 60 bp, Artificial
  Synthetic oligonucleotide
taagatcgaagagcatgtgggtaatgattcagtgtttaagacaaagctggttcgtgatga

SEQ ID NO: 447607 - DNA, 60 bp, Artificial
  Synthetic oligonucleotide
taagatgattctcgattggtctgcgcaaagcaaggaacaaaaattacgtgatctaaagag

SEQ ID NO: 447608 - DNA, 55 bp, Artificial
  Synthetic oligonucleotide
taagatggaaaacaacactcctctggctaaccctagcggccccaatgtaccctcc

SEQ ID NO: 447609 - DNA, 60 bp, Artificial
  Synthetic oligonucleotide
taagatggaatttgagccatttcagtccttggtacctaaagctgccagaggtcaatatag

SEQ ID NO: 447610 - DNA, 59 bp, Artificial
  Synthetic oligonucleotide
taagatggagttcgaaccttttcagtccttagtactcaaagctgctagaggccaataca

SEQ ID NO: 447611 - DNA, 57 bp, Artificial
  Synthetic oligonucleotide
taagatggctgtttaaaccgagtgcgtgtgacgggtctacctctctaaaagtcacac

SEQ ID NO: 447612 - DNA, 55 bp, Artificial
  Synthetic oligonucleotide
taagatgggaggcaagtggtcaaaaggttgtatggctggatggcctagtgtgagg

SEQ ID NO: 447613 - DNA, 55 bp, Artificial
  Synthetic oligonucleotide
taagatggtgactcgaggtagcttggattaaagagaacctagtattaggttgttt

SEQ ID NO: 447614 - DNA, 52 bp, Artificial
  Synthetic oligonucleotide
taagatggttaacttactataaactaaacacttatccttccttgttggaact

SEQ ID NO: 447615 - DNA, 52 bp, Artificial
  Synthetic oligonucleotide
taagattagcgtcagctatggggaaagaatccagaggttgggccgtgttgga

SEQ ID NO: 447616 - DNA, 60 bp, Artificial
  Synthetic oligonucleotide
taagattgaacgtgttggggctgagctaaatatggcatgctcaaaccctaagatagaggg

SEQ ID NO: 447617 - DNA, 59 bp, Artificial
  Synthetic oligonucleotide
taagattgaatgtaccagccacacacgccacacccatggttacacactttccgtggaaa

SEQ ID NO: 447618 - DNA, 57 bp, Artificial
  Synthetic oligonucleotide
taagattgacggagtgttttctctggttattgtgattgaccgtaaacctcatcttaa

SEQ ID NO: 447619 - DNA, 60 bp, Artificial
  Synthetic oligonucleotide
taagattgatgtgcacagagacttatttggacacccccagaccggatgatggaagcataa

SEQ ID NO: 447620 - DNA, 60 bp, Artificial
  Synthetic oligonucleotide
taagattgttgaaggtacattatattctaatgttagcgatctcattcaacaatttaatca

SEQ ID NO: 447621 - DNA, 54 bp, Artificial
  Synthetic oligonucleotide
taagatttagattcagtttaaccgttgaagagccaccgttttcaattttacgca

SEQ ID NO: 447622 - DNA, 56 bp, Artificial
  Synthetic oligonucleotide
taagcaaaccactcccgtgttgagagaccccgaagtctggactgggttcattcagg

SEQ ID NO: 447623 - DNA, 54 bp, Artificial
  Synthetic oligonucleotide
taagcaaataggaagagaaaccatggcagggattgcaatgacagtccttccagc

SEQ ID NO: 447624 - DNA, 60 bp, Artificial
  Synthetic oligonucleotide
taagcaaccccctgatcgctggctctccaacgcccgaatgacccactaccaggctctgct

SEQ ID NO: 447625 - DNA, 60 bp, Artificial
  Synthetic oligonucleotide
taagcaagaacgccctgttagtttattactgttggatgtctgataatgtgtctaaggcat

SEQ ID NO: 447626 - DNA, 55 bp, Artificial
  Synthetic oligonucleotide
taagcaagaacgccttattggtttattattgttggatgtcggatactgtgtctaa

SEQ ID NO: 447627 - DNA, 60 bp, Artificial
  Synthetic oligonucleotide
taagcaagaacgccttgttaatctattattgctggatgtccgatacgccctctaaggcat

SEQ ID NO: 447628 - DNA, 58 bp, Artificial
  Synthetic oligonucleotide
taagcaagaacgctctgctaatttattattgctgggtgtccgaaacgccttcaaaggc

SEQ ID NO: 447629 - DNA, 50 bp, Artificial
  Synthetic oligonucleotide
taagcaagatagtcggccagaatactgcaaattacaagaccaatgtggcc

SEQ ID NO: 447630 - DNA, 59 bp, Artificial
  Synthetic oligonucleotide
taagcaagcgctcacttacacacgccgctaacttgaaacgtaacgaggagttacatggc

SEQ ID NO: 447631 - DNA, 58 bp, Artificial
  Synthetic oligonucleotide
taagcaagctggggagacccccgacagccgtttggatcagcgctcgcgtctcgtttgg

SEQ ID NO: 447632 - DNA, 60 bp, Artificial
  Synthetic oligonucleotide
taagcaatatggctgggaggtgactagaggcgtcattcttgatgttgaaagaccttttgc

SEQ ID NO: 447633 - DNA, 51 bp, Artificial
  Synthetic oligonucleotide
taagcacaaatgccacacatgtagaagagacactcagaaacattacagact

SEQ ID NO: 447634 - DNA, 60 bp, Artificial
  Synthetic oligonucleotide
taagcacaatagtgcctccaatatatttaccgttgacacttacgcaaatggatttgcgtg

SEQ ID NO: 447635 - DNA, 60 bp, Artificial
  Synthetic oligonucleotide
taagcaccacatggcattggacagatagaaaaaacaccgagaggataggtagtgctagaa

SEQ ID NO: 447636 - DNA, 56 bp, Artificial
  Synthetic oligonucleotide
taagcaccagtagtcttaaaagagggtccacttctctagctaattcctcacaaaaa

SEQ ID NO: 447637 - DNA, 56 bp, Artificial
  Synthetic oligonucleotide
taagcacctcagcccaacggcgcttaaccaatgcagtcgcatacgctttcaaccac

SEQ ID NO: 447638 - DNA, 53 bp, Artificial
  Synthetic oligonucleotide
taagcacgatgtaccagtagctgaaggagtgttgacgcccatgtcgacagtgt

SEQ ID NO: 447639 - DNA, 51 bp, Artificial
  Synthetic oligonucleotide
taagcacgttctaaatctacgtgatgtaaaacgtatatgcgatctgaatgt

SEQ ID NO: 447640 - DNA, 57 bp, Artificial
  Synthetic oligonucleotide
taagcagaaaggaagcgatgaaattctaactaacacaatgccagttagcgaaggggg

SEQ ID NO: 447641 - DNA, 60 bp, Artificial
  Synthetic oligonucleotide
taagcagacacaagatggtaattattcacagcatggtcctctactgtcaacaccgaaact

SEQ ID NO: 447642 - DNA, 57 bp, Artificial
  Synthetic oligonucleotide
taagcagacccagttgttaattgtggggtgtaagccccctataggagagcactggac

SEQ ID NO: 447643 - DNA, 60 bp, Artificial
  Synthetic oligonucleotide
taagcagagtttattatttgcactacacaaaagagcttcggtatggcattctggaaaata

SEQ ID NO: 447644 - DNA, 59 bp, Artificial
  Synthetic oligonucleotide
taagcagccggcagttcggtaacagggaccagcggccatacattatggaaggtctcgac

SEQ ID NO: 447645 - DNA, 60 bp, Artificial
  Synthetic oligonucleotide
taagcagctgcttctcgcttgtactgggtctctcttgctagaccagatttgagcctggga

SEQ ID NO: 447646 - DNA, 59 bp, Artificial
  Synthetic oligonucleotide
taagcaggatattcctaaggtttctgcataccaatatagagtatttcgggtgcagttac

SEQ ID NO: 447647 - DNA, 60 bp, Artificial
  Synthetic oligonucleotide
taagcagtgcttactcattttgcacctggactgttaaaccgttttggatcacacagtgta

SEQ ID NO: 447648 - DNA, 60 bp, Artificial
  Synthetic oligonucleotide
taagcagtggtgcactaccacatgtcagcttggggaccctggtgatattatgagtacccc

SEQ ID NO: 447649 - DNA, 57 bp, Artificial
  Synthetic oligonucleotide
taagcatacgcccaacattatccatgcagtcgggccgaatttctcccgcgtatccga

SEQ ID NO: 447650 - DNA, 59 bp, Artificial
  Synthetic oligonucleotide
taagcatattaggttaagctaagtgtgttcaattatggaaactgtgctcagtttgttaa

SEQ ID NO: 447651 - DNA, 60 bp, Artificial
  Synthetic oligonucleotide
taagcatcccaagcgtgatatcaatagtgaacggggtttccccacagacgctcagggaga

SEQ ID NO: 447652 - DNA, 58 bp, Artificial
  Synthetic oligonucleotide
taagcatcgaattggagaactgcacagtacaacccaacaaaaacgttagggtgtggca

SEQ ID NO: 447653 - DNA, 59 bp, Artificial
  Synthetic oligonucleotide
taagcatcgagtgtatcaacaattgagcgccgtaactttgcttaacttgactgggtttg

SEQ ID NO: 447654 - DNA, 59 bp, Artificial
  Synthetic oligonucleotide
taagcatctattggacaatagtaaaaccgggagacatacttttgattaccagcacagga

SEQ ID NO: 447655 - DNA, 60 bp, Artificial
  Synthetic oligonucleotide
taagcatgaaagtattagctttaagacacagtgtggctcaggtgtatgccgatacacaaa

SEQ ID NO: 447656 - DNA, 55 bp, Artificial
  Synthetic oligonucleotide
taagcatgggttacacttatgaggaggcaataaggactgttaggccacatgctgc

SEQ ID NO: 447657 - DNA, 55 bp, Artificial
  Synthetic oligonucleotide
taagcattgaaataaacagaggaaagagtcgagccgagcaggtaggtatgccccg

SEQ ID NO: 447658 - DNA, 54 bp, Artificial
  Synthetic oligonucleotide
taagcattgaggatccaaaccatgaaggggagggaataccactatatgatgcaa

SEQ ID NO: 447659 - DNA, 51 bp, Artificial
  Synthetic oligonucleotide
taagcattgctaatgctaatcctgaatgtaaacgagcaatgtcacatttaa

SEQ ID NO: 447660 - DNA, 56 bp, Artificial
  Synthetic oligonucleotide
taagccaacgcctatcgttgtccttagggaagaaggtgactatgcagcggctaagt

SEQ ID NO: 447661 - DNA, 60 bp, Artificial
  Synthetic oligonucleotide
taagccaacgttcattatgaattgcgatataatcaacgaatgttatataagaagacctag

SEQ ID NO: 447662 - DNA, 58 bp, Artificial
  Synthetic oligonucleotide
taagccacaaagtcctcgcagagtacaaagtccctggcgaaatcgtaatgtccgtcaa

SEQ ID NO: 447663 - DNA, 56 bp, Artificial
  Synthetic oligonucleotide
taagccaccaaacaattactggatattattgaacccaactaatcaacaagttgtat

SEQ ID NO: 447664 - DNA, 56 bp, Artificial
  Synthetic oligonucleotide
taagccagaaaaggttaaagtctcagagtccttggaggggctctcattctgtggtt

SEQ ID NO: 447665 - DNA, 60 bp, Artificial
  Synthetic oligonucleotide
taagccagtatctcgccggaaaactcgcgattgatgaggaatacctcttgtcttggacga

SEQ ID NO: 447666 - DNA, 55 bp, Artificial
  Synthetic oligonucleotide
taagccattttgcctgacaaaacagtctgaagatgatgcaatccctttgtgtttt

SEQ ID NO: 447667 - DNA, 57 bp, Artificial
  Synthetic oligonucleotide
taagcccagggcccattcctacaagtttcattagttcagctctctggtttagttgtg

SEQ ID NO: 447668 - DNA, 57 bp, Artificial
  Synthetic oligonucleotide
taagccccaaaaggagttacagcgatgttaggtgccgttgtaggtggtattgcttca

SEQ ID NO: 447669 - DNA, 49 bp, Artificial
  Synthetic oligonucleotide
taagcccccctcaaaaacgaacggggggtacatttttaaagactcgaga

SEQ ID NO: 447670 - DNA, 57 bp, Artificial
  Synthetic oligonucleotide
taagcccgctgaccctgtaccatcacgtaaggagcgagtaggaaatgacggactccc

SEQ ID NO: 447671 - DNA, 55 bp, Artificial
  Synthetic oligonucleotide
taagcccggacaaactattgcctccttccaccaggccactgtcatgctgtttggc

SEQ ID NO: 447672 - DNA, 57 bp, Artificial
  Synthetic oligonucleotide
taagccgaacgtcctctgttggtacgacggagacaaggcaggaattgacggagcacg

SEQ ID NO: 447673 - DNA, 54 bp, Artificial
  Synthetic oligonucleotide
taagccggaagctcagatcacgaatgatgttctggctcgggcgcttacgggcga

SEQ ID NO: 447674 - DNA, 59 bp, Artificial
  Synthetic oligonucleotide
taagcctatcgtcagccgactcatctctaagaattgtactctaacttactccgaaggta

SEQ ID NO: 447675 - DNA, 59 bp, Artificial
  Synthetic oligonucleotide
taagcctcagattaataagcgcatccaaccggtgattgttgaaccgcctacttctggct

SEQ ID NO: 447676 - DNA, 56 bp, Artificial
  Synthetic oligonucleotide
taagcctgaactacctgggctggcaccttaaagggttatcaacactggaaggaggc

SEQ ID NO: 447677 - DNA, 60 bp, Artificial
  Synthetic oligonucleotide
taagcctttcgcactaggataaactgctgacattgtaggtgaggatactttgtctggtgt

SEQ ID NO: 447678 - DNA, 60 bp, Artificial
  Synthetic oligonucleotide
taagcgaccagaacaaagcccttgaattgctaggcaagcatcacaagttattcactgatg

SEQ ID NO: 447679 - DNA, 55 bp, Artificial
  Synthetic oligonucleotide
taagcgacctcaagctccctggcttagcggtccaccgtaagaaggccggggcact

SEQ ID NO: 447680 - DNA, 60 bp, Artificial
  Synthetic oligonucleotide
taagcgagatgccccatggcgattaatggcggggacctctaaggtcagtcgtaatgtcaa

SEQ ID NO: 447681 - DNA, 60 bp, Artificial
  Synthetic oligonucleotide
taagcgatggatacacttacactcaacaggtaaggctagtattgaaggcggtagatatta

SEQ ID NO: 447682 - DNA, 50 bp, Artificial
  Synthetic oligonucleotide
taagcgatttaaatcattaaccctcgataactgcaaaaaatagttagctc

SEQ ID NO: 447683 - DNA, 60 bp, Artificial
  Synthetic oligonucleotide
taagcgcaccacaccaacgcacggctatgacgcggattatatagcagaactgagcaataa

SEQ ID NO: 447684 - DNA, 60 bp, Artificial
  Synthetic oligonucleotide
taagcgcaccacttacactcttatcgaccactgtcgttaccgctatgtggaagtagcaat

SEQ ID NO: 447685 - DNA, 58 bp, Artificial
  Synthetic oligonucleotide
taagcgcgcacggcaaaaggcgaggggcggcgactggtgagtacgccaattttgacta

SEQ ID NO: 447686 - DNA, 55 bp, Artificial
  Synthetic oligonucleotide
taagcgcgtgggagtggactgtaaaagtagatattctctctccaaaactccccgg

SEQ ID NO: 447687 - DNA, 51 bp, Artificial
  Synthetic oligonucleotide
taagcgctgccatgatagaggcatggggtgacgacgaactcttataccaga

SEQ ID NO: 447688 - DNA, 57 bp, Artificial
  Synthetic oligonucleotide
taagcggaagatggaagaaggtgaatccagcggaaggtggaagggggctgtgtataa

SEQ ID NO: 447689 - DNA, 59 bp, Artificial
  Synthetic oligonucleotide
taagcggaatccctccgttggtactgggggactgcagcattgcaggttggctccttgga

SEQ ID NO: 447690 - DNA, 56 bp, Artificial
  Synthetic oligonucleotide
taagcgggaggttagataaaggttgtaatttgtcgaaagaagagactgagatagta

SEQ ID NO: 447691 - DNA, 57 bp, Artificial
  Synthetic oligonucleotide
taagcgggatgccccgtggcgttcaatggcggggacttctaaggtgtcccgcaatgc

SEQ ID NO: 447692 - DNA, 54 bp, Artificial
  Synthetic oligonucleotide
taagcgtcgcatcccataccataccgttcgtcaccgcgttatcagatacactct

SEQ ID NO: 447693 - DNA, 58 bp, Artificial
  Synthetic oligonucleotide
taagcgtcgttagcggattgctttccgcctcttgaagatcttccatctatttggaagg

SEQ ID NO: 447694 - DNA, 60 bp, Artificial
  Synthetic oligonucleotide
taagcgtggaacagtgttaaagattggcgagacagagaaagctagctggcgtgtgccgcc

SEQ ID NO: 447695 - DNA, 59 bp, Artificial
  Synthetic oligonucleotide
taagcgtggagggcgtgaacgggtcgctgccacgcgctttaggtagcatatgttcggga

SEQ ID NO: 447696 - DNA, 60 bp, Artificial
  Synthetic oligonucleotide
taagcgtgtatatgtcggactagatgcttcgatgtttagcgataacacagctcttggttt

SEQ ID NO: 447697 - DNA, 59 bp, Artificial
  Synthetic oligonucleotide
taagcgtgtggtcggaacacgcaggaagacgaatggaacactcatttacaaaaggatga

SEQ ID NO: 447698 - DNA, 56 bp, Artificial
  Synthetic oligonucleotide
taagcgtgttaatggagcgtttgttacgctacctaacacactaaatacacaaggtc

SEQ ID NO: 447699 - DNA, 60 bp, Artificial
  Synthetic oligonucleotide
taagcgtgtttgtattaagtccatgggtatagatggtaaggtatggatggatgacaatgt

SEQ ID NO: 447700 - DNA, 55 bp, Artificial
  Synthetic oligonucleotide
taagctaaaacgacttcggttcaagggtattgtgaaggtggaacgtgtacatgta

SEQ ID NO: 447701 - DNA, 55 bp, Artificial
  Synthetic oligonucleotide
taagctaaagagtctgaacatatctgggacatttgctgttcgtaagtccgatctg

SEQ ID NO: 447702 - DNA, 56 bp, Artificial
  Synthetic oligonucleotide
taagctaagcaagctaaccaacctttgcaagtgtttcccccttatggaaagtgcaa

SEQ ID NO: 447703 - DNA, 60 bp, Artificial
  Synthetic oligonucleotide
taagctaatcaacagatctgaaggcgagagagacaccatgtatggaattgggtttggacc

SEQ ID NO: 447704 - DNA, 55 bp, Artificial
  Synthetic oligonucleotide
taagctaccattagaacagattacgaaaccggatgacattatgggtatcgtagag

SEQ ID NO: 447705 - DNA, 60 bp, Artificial
  Synthetic oligonucleotide
taagctacccacatgcaatcgggaccacgagcaactgtgcgaagtggtcgagctattaga

SEQ ID NO: 447706 - DNA, 60 bp, Artificial
  Synthetic oligonucleotide
taagctacctcccagcattatggcaagcctcacagactttgcatcatcaagaggtaaccc

SEQ ID NO: 447707 - DNA, 60 bp, Artificial
  Synthetic oligonucleotide
taagctactttttctgtctggctttcagccaagaccactcagaaagcaacaacagcactg

SEQ ID NO: 447708 - DNA, 55 bp, Artificial
  Synthetic oligonucleotide
taagctatctgatgttgagtcctcgtcagactctagttcgctcttgagtatgaga

SEQ ID NO: 447709 - DNA, 60 bp, Artificial
  Synthetic oligonucleotide
taagctcttaagcgacatgcctgtgaggcgttttatgtgtctgttggtacgccaagtaac

SEQ ID NO: 447710 - DNA, 55 bp, Artificial
  Synthetic oligonucleotide
taagctcttcactgtttgacatgagtatgagaccagctcattaccacagtgtagc

SEQ ID NO: 447711 - DNA, 56 bp, Artificial
  Synthetic oligonucleotide
taagctcttggtcgggaggcctttaaagtggtacaaccttacatccagtgtgcaac

SEQ ID NO: 447712 - DNA, 58 bp, Artificial
  Synthetic oligonucleotide
taagctctttgctaacattacgaatggaaacgcaagtaagaataattatgccagtaac

SEQ ID NO: 447713 - DNA, 59 bp, Artificial
  Synthetic oligonucleotide
taagctgcatggtcgggggtatatcaatgcctcgaaaaccactgcgacacacctcctcc

SEQ ID NO: 447714 - DNA, 55 bp, Artificial
  Synthetic oligonucleotide
taagctgcgtattcggcggcggcggaacgagtctgcaaaataaaaacccccacca

SEQ ID NO: 447715 - DNA, 55 bp, Artificial
  Synthetic oligonucleotide
taagctgctggtaagcgaggtgcccagtacagaggtgtaccagtctgggcctcac

SEQ ID NO: 447716 - DNA, 58 bp, Artificial
  Synthetic oligonucleotide
taagctggggtcttgttatcattggattgttgatcgggctgctttttaagaaatacca

SEQ ID NO: 447717 - DNA, 59 bp, Artificial
  Synthetic oligonucleotide
taagctgtacacaatacagtttggaagccttgacccagtagtcgtcaagggtggagcag

SEQ ID NO: 447718 - DNA, 55 bp, Artificial
  Synthetic oligonucleotide
taagctgtgagcagccctttggttaaggttaaaaactcctggtcaggtagaccac

SEQ ID NO: 447719 - DNA, 54 bp, Artificial
  Synthetic oligonucleotide
taagcttacaggtaataacaggttatgggcgtgcgtgggtgaaaaacgttggta

SEQ ID NO: 447720 - DNA, 60 bp, Artificial
  Synthetic oligonucleotide
taagcttagtgggcgtctcgcgactgcgtctaggcaggctgagactagggctcacgcgtt

SEQ ID NO: 447721 - DNA, 55 bp, Artificial
  Synthetic oligonucleotide
taagcttatcgaaaggctgacagggcttctgagtttatttccggatggtctctac

SEQ ID NO: 447722 - DNA, 54 bp, Artificial
  Synthetic oligonucleotide
taagcttatgggcaaatactcccactataagtccaggtgcctaaacttcaaatt

SEQ ID NO: 447723 - DNA, 57 bp, Artificial
  Synthetic oligonucleotide
taagcttattctccacacacaaatacaaccttaatttccactaccacatggtccacc

SEQ ID NO: 447724 - DNA, 50 bp, Artificial
  Synthetic oligonucleotide
taagcttcagcggaaataataggaatgttcgtggatttctctacgtatcg

SEQ ID NO: 447725 - DNA, 59 bp, Artificial
  Synthetic oligonucleotide
taagcttgatgtcactacaactacttgcactattagaaattgcaaaaagttggggccgc

SEQ ID NO: 447726 - DNA, 57 bp, Artificial
  Synthetic oligonucleotide
taagcttgcacccaccgtggcccacggtgtgttcaaccctgaatacggccccgctgc

SEQ ID NO: 447727 - DNA, 60 bp, Artificial
  Synthetic oligonucleotide
taagcttgcgctgagggctgttgcacctctcgcagaaggtgaggttgtcaaggtcagggt

SEQ ID NO: 447728 - DNA, 60 bp, Artificial
  Synthetic oligonucleotide
taagcttgcggacaccctgaccaaagttggttggcgtgtcgatgtgtcggcagatcctct

SEQ ID NO: 447729 - DNA, 55 bp, Artificial
  Synthetic oligonucleotide
taagcttggattatggatttccagttatgggcaaaactacatcttactggagaga

SEQ ID NO: 447730 - DNA, 60 bp, Artificial
  Synthetic oligonucleotide
taagctttctccttgatcttaccattaggccaacgagatcgcacaatagcacaaaatgct

SEQ ID NO: 447731 - DNA, 60 bp, Artificial
  Synthetic oligonucleotide
taagctttgatgacatctctgcagctgtattgaagacgaaactagacaaatcgacgcaaa

SEQ ID NO: 447732 - DNA, 52 bp, Artificial
  Synthetic oligonucleotide
taaggaaaacatatttggtttgaaggcggaaattgttttgacgtttcgacga

SEQ ID NO: 447733 - DNA, 58 bp, Artificial
  Synthetic oligonucleotide
taaggaaatttatcccagatagagaagatgattaccctgaatgtcacttggcactaac

SEQ ID NO: 447734 - DNA, 51 bp, Artificial
  Synthetic oligonucleotide
taaggaacgggacatatgaccacgatatttacagagacgaggctataaata

SEQ ID NO: 447735 - DNA, 60 bp, Artificial
  Synthetic oligonucleotide
taaggaactgaacctacccaaggcattctacactgataggataaagactgtccatgaatc

SEQ ID NO: 447736 - DNA, 55 bp, Artificial
  Synthetic oligonucleotide
taaggaagaacgatgactggcccgaaccgtcccgtgtattgcaccgagggtgcaa

SEQ ID NO: 447737 - DNA, 60 bp, Artificial
  Synthetic oligonucleotide
taaggaaggcgtttggcgacattctacgcagctacgcatataggaaagcgattgtattac

SEQ ID NO: 447738 - DNA, 59 bp, Artificial
  Synthetic oligonucleotide
taaggaaggtgttaggagatctatgtgagaacggacggttggatgaggaggaggccata

SEQ ID NO: 447739 - DNA, 59 bp, Artificial
  Synthetic oligonucleotide
taaggaagtcattggcagcttatgaaccaaagcaaggatgttatcggacattatccctt

SEQ ID NO: 447740 - DNA, 59 bp, Artificial
  Synthetic oligonucleotide
taaggaatagaattgaacagttaattctacaatgtaagttgtgagaaagctattgagga

SEQ ID NO: 447741 - DNA, 57 bp, Artificial
  Synthetic oligonucleotide
taaggaatccgccgcgatgataaggaggcgagccaacgccaagttcagaggttgcgt

SEQ ID NO: 447742 - DNA, 52 bp, Artificial
  Synthetic oligonucleotide
taaggaatgtctagaaaggtattcaacactacgtgatcaaactgacccaata

SEQ ID NO: 447743 - DNA, 57 bp, Artificial
  Synthetic oligonucleotide
taaggacaacaatatttccgaaatctttagacctgcaggaggagatatgagggacaa

SEQ ID NO: 447744 - DNA, 56 bp, Artificial
  Synthetic oligonucleotide
taaggacaatgcaatacgattgggtgaaaacaaggacgtaatagtcacaagggaac

SEQ ID NO: 447745 - DNA, 55 bp, Artificial
  Synthetic oligonucleotide
taaggacaatttgccctttaccgttcctagtgtcaaggggtttcctccagatgca

SEQ ID NO: 447746 - DNA, 58 bp, Artificial
  Synthetic oligonucleotide
taaggacactgtttgaagattatttatatggaaagttagagagaagttgcaccttctc

SEQ ID NO: 447747 - DNA, 59 bp, Artificial
  Synthetic oligonucleotide
taaggacagaactccatacagatccctaatcagattcccaattgggacagctcccgttc

SEQ ID NO: 447748 - DNA, 54 bp, Artificial
  Synthetic oligonucleotide
taaggacatcgttaaagtcagaactgcgcttgttaaaaccaagcacgaaccgag

SEQ ID NO: 447749 - DNA, 58 bp, Artificial
  Synthetic oligonucleotide
taaggaccagaagtggaggaaataccaatcaacagaaggcttccgcgggccagatcag

SEQ ID NO: 447750 - DNA, 60 bp, Artificial
  Synthetic oligonucleotide
taaggacctgcacacgacttccctacctccatgtgcttgacatgaggataagtctcctag

SEQ ID NO: 447751 - DNA, 60 bp, Artificial
  Synthetic oligonucleotide
taaggacgcgatgctgggtacgcatgtcgtatgggacgtgggtctgcagtcctcatgcgt

SEQ ID NO: 447752 - DNA, 55 bp, Artificial
  Synthetic oligonucleotide
taaggactaaaaactgttatattcccaattgtagaagctactgtagaaacacgga

SEQ ID NO: 447753 - DNA, 51 bp, Artificial
  Synthetic oligonucleotide
taaggactggccatgttatggagacaggacacagatatatctgggtgatcg

SEQ ID NO: 447754 - DNA, 55 bp, Artificial
  Synthetic oligonucleotide
taaggagatggcgacgaaggaggagggcgtggggcaggagacggtacataaggcg

SEQ ID NO: 447755 - DNA, 53 bp, Artificial
  Synthetic oligonucleotide
taaggaggcgccgcgttagacgactaaggaggagggggtgggctaggagacgg

SEQ ID NO: 447756 - DNA, 55 bp, Artificial
  Synthetic oligonucleotide
taaggaggtagtggatggatacaccgaatcctaatccgaacaacggtcctggtac

SEQ ID NO: 447757 - DNA, 56 bp, Artificial
  Synthetic oligonucleotide
taaggagtaccaagtacgtggagaccgctcatatgttcgtacagctaacccacgag

SEQ ID NO: 447758 - DNA, 53 bp, Artificial
  Synthetic oligonucleotide
taaggagtacgttttggacccctccggtaggaaccatcagtcccggagagctc

SEQ ID NO: 447759 - DNA, 55 bp, Artificial
  Synthetic oligonucleotide
taaggagtgtgtgatcggtacgtacagagctgcagccaaaagtaagaggttccag

SEQ ID NO: 447760 - DNA, 55 bp, Artificial
  Synthetic oligonucleotide
taaggagttcggactgggtgaatgttggcttctctcgccgaactactactaaggt

SEQ ID NO: 447761 - DNA, 55 bp, Artificial
  Synthetic oligonucleotide
taaggatacatggctatatgacactcttagcacttcgttcgctgaacttggtctc

SEQ ID NO: 447762 - DNA, 54 bp, Artificial
  Synthetic oligonucleotide
taaggatagaactccttacaggtccttaattaggttccccattggaacagctcc

SEQ ID NO: 447763 - DNA, 54 bp, Artificial
  Synthetic oligonucleotide
taaggatagattaatagttagtaataagtacgagccccttatggctcctttaat

SEQ ID NO: 447764 - DNA, 59 bp, Artificial
  Synthetic oligonucleotide
taaggatcaggtcaacttctacataggtcaagttgtctcagcgtacagtaaccttcctc

SEQ ID NO: 447765 - DNA, 58 bp, Artificial
  Synthetic oligonucleotide
taaggatcatcaaaatcctgtaccaaagcagtaagtattgacaattagtataaaggta

SEQ ID NO: 447766 - DNA, 55 bp, Artificial
  Synthetic oligonucleotide
taaggatccgcttaactttggtcaggttttcactatgtacgacaatgagcccact

SEQ ID NO: 447767 - DNA, 55 bp, Artificial
  Synthetic oligonucleotide
taaggatgattgcgaagcatatggatggagatttcccagtataccccgcctctac

SEQ ID NO: 447768 - DNA, 60 bp, Artificial
  Synthetic oligonucleotide
taaggatgcagcaagctcatcatctgctggtcaatctttttcaatggacccttctaagtt

SEQ ID NO: 447769 - DNA, 57 bp, Artificial
  Synthetic oligonucleotide
taaggatgggatcgaaagcgttgaaaagacggcagtatcggagtttatgtgccaatt

SEQ ID NO: 447770 - DNA, 56 bp, Artificial
  Synthetic oligonucleotide
taaggatgttatcatgagtaattctgttcgggaggtagatttagtccttattggag

SEQ ID NO: 447771 - DNA, 60 bp, Artificial
  Synthetic oligonucleotide
taaggattgagaaggtaacacagcggcacaatactaatgtcattgagtatatagaaagac

SEQ ID NO: 447772 - DNA, 53 bp, Artificial
  Synthetic oligonucleotide
taaggatttatgcttaagattgcagcatgtcttaaataagctccaccaggtca

SEQ ID NO: 447773 - DNA, 58 bp, Artificial
  Synthetic oligonucleotide
taaggattttgcagcgggcaagagatcagccgtcagtttcatagaggtgctcggtcgc

SEQ ID NO: 447774 - DNA, 58 bp, Artificial
  Synthetic oligonucleotide
taaggcaagctattctgtgttggggtgagttggtgaatctggccacctgggtgggaag

SEQ ID NO: 447775 - DNA, 55 bp, Artificial
  Synthetic oligonucleotide
taaggcagtccggggcgatctgaactttgtcaatagggcaaaccagcgactgaat

SEQ ID NO: 447776 - DNA, 60 bp, Artificial
  Synthetic oligonucleotide
taaggccactcctgattgatggcacggcctcattgagtcctgggatgatgatgggcatgt

SEQ ID NO: 447777 - DNA, 60 bp, Artificial
  Synthetic oligonucleotide
taaggccatcttaagagcattaggaccaggagctacactagaagaaatgatgacagcatg

SEQ ID NO: 447778 - DNA, 56 bp, Artificial
  Synthetic oligonucleotide
taaggcccaactaggactggactcaaggcccaagttggactgatccctcgctttcg

SEQ ID NO: 447779 - DNA, 56 bp, Artificial
  Synthetic oligonucleotide
taaggcccaggcccaaacgcatttagttttgaggggaccacacacagataactata

SEQ ID NO: 447780 - DNA, 54 bp, Artificial
  Synthetic oligonucleotide
taaggcccccgagacctggtacaaggaggactgtgacccgaagccactgttccg

SEQ ID NO: 447781 - DNA, 59 bp, Artificial
  Synthetic oligonucleotide
taaggccctcacggctggcgatgatcttttgtgcgacaaccgtcttcgcctccctgtgt

SEQ ID NO: 447782 - DNA, 60 bp, Artificial
  Synthetic oligonucleotide
taaggcctatcaacttttcaccaatgacaccataacatggagtaacaacactttgatgcc

SEQ ID NO: 447783 - DNA, 58 bp, Artificial
  Synthetic oligonucleotide
taaggcctggaaagggtcctaatgttgcaagaccaactgtaatagtagatgcacttgg

SEQ ID NO: 447784 - DNA, 56 bp, Artificial
  Synthetic oligonucleotide
taaggcctttaacttctgggtccgtatgagagccgccattttagcttcggccgcca

SEQ ID NO: 447785 - DNA, 58 bp, Artificial
  Synthetic oligonucleotide
taaggcgaatcctcaccttaagtgacccagtacaggggtcaacagctatacaggacca

SEQ ID NO: 447786 - DNA, 53 bp, Artificial
  Synthetic oligonucleotide
taaggcgagtaaatggagtccgtttattgcaagttgaaacgaagcatcataaa

SEQ ID NO: 447787 - DNA, 55 bp, Artificial
  Synthetic oligonucleotide
taaggcgcaacctaaacagaagcttgatctcagtcctcaagatgagtatgctgca

SEQ ID NO: 447788 - DNA, 60 bp, Artificial
  Synthetic oligonucleotide
taaggcggtcctagcacgcccccaagcaatggtggagtataatgtgttctctgagcccac

SEQ ID NO: 447789 - DNA, 57 bp, Artificial
  Synthetic oligonucleotide
taaggcggtcttgtcgactctcgttggcaggtacggtcgtcgtacgaagctgtacga

SEQ ID NO: 447790 - DNA, 51 bp, Artificial
  Synthetic oligonucleotide
taaggcggttaaggcgtaccgggcgagtcactacatgtacagctgggtgcg

SEQ ID NO: 447791 - DNA, 60 bp, Artificial
  Synthetic oligonucleotide
taaggcgtactacatttagagctcatattctgtgagttcttcaccatgcttcaaatgaca

SEQ ID NO: 447792 - DNA, 58 bp, Artificial
  Synthetic oligonucleotide
taaggcgtcaagtgtcggctcgtctatgacgcggtcattaaccgcaccgattgtggcc

SEQ ID NO: 447793 - DNA, 53 bp, Artificial
  Synthetic oligonucleotide
taaggctaacccgcaaggccccctagtccccttaatccttttgattctcagag

SEQ ID NO: 447794 - DNA, 60 bp, Artificial
  Synthetic oligonucleotide
taaggctcatcaatatcgtatgttcgtattcccggtatttctgtgtcctgagcttaccca

SEQ ID NO: 447795 - DNA, 53 bp, Artificial
  Synthetic oligonucleotide
taaggctcgaaaaccgattttagtcccgactcaaatattttccgctttcacta

SEQ ID NO: 447796 - DNA, 55 bp, Artificial
  Synthetic oligonucleotide
taaggctcttcaagcaagcccactcgcatccactagcgctacaggattggccgat

SEQ ID NO: 447797 - DNA, 54 bp, Artificial
  Synthetic oligonucleotide
taaggctgagataatatgagcatccacaatctaaatcaattcgtcttcgcctcg

SEQ ID NO: 447798 - DNA, 51 bp, Artificial
  Synthetic oligonucleotide
taaggctggcatctcagtagaggaagatatggcacgtgcgagctacaaaaa

SEQ ID NO: 447799 - DNA, 57 bp, Artificial
  Synthetic oligonucleotide
taaggctgtacaaatctaagggggagaatgctgcatacatggcgttccttgaagatg

SEQ ID NO: 447800 - DNA, 57 bp, Artificial
  Synthetic oligonucleotide
taaggcttatcgcggagctaggggcggtgcgtcggcagacccctatatattggtaaa

SEQ ID NO: 447801 - DNA, 50 bp, Artificial
  Synthetic oligonucleotide
taaggcttctgtaatcggagcagtcttggggctgattacccgccttacca

SEQ ID NO: 447802 - DNA, 54 bp, Artificial
  Synthetic oligonucleotide
taaggcttgcaacattgcttcaaatgacaaatacgatgctgatctctttgtgga

SEQ ID NO: 447803 - DNA, 60 bp, Artificial
  Synthetic oligonucleotide
taaggcttgcgtggatagtgtgattacaaagcaaatggcatcggttgtctacactggctc

SEQ ID NO: 447804 - DNA, 57 bp, Artificial
  Synthetic oligonucleotide
taagggaaaattacgacaccctagaccttcctatgcataccattatcaatggtataa

SEQ ID NO: 447805 - DNA, 58 bp, Artificial
  Synthetic oligonucleotide
taagggaaccatttgtttcttgctcgccaacagagtgcaggacgttcttccttactca

SEQ ID NO: 447806 - DNA, 57 bp, Artificial
  Synthetic oligonucleotide
taagggaacccccattacttatgatggagaacccactgatctccagttattagaatg

SEQ ID NO: 447807 - DNA, 58 bp, Artificial
  Synthetic oligonucleotide
taagggacgaattgctcacaaagcatccgaccttaggttctggtaatgacgaggcgac

SEQ ID NO: 447808 - DNA, 53 bp, Artificial
  Synthetic oligonucleotide
taagggactacctatagttagaccggagccagtcttagaggctagccatttat

SEQ ID NO: 447809 - DNA, 54 bp, Artificial
  Synthetic oligonucleotide
taagggactccagccacttgtttctaagggtagtgatcgtttcaagctttacgt

SEQ ID NO: 447810 - DNA, 53 bp, Artificial
  Synthetic oligonucleotide
taagggactttccgctggggactttccagagagggcggtccagtgggcgggac

SEQ ID NO: 447811 - DNA, 54 bp, Artificial
  Synthetic oligonucleotide
taagggaggacaatgggcaggtacaggtgttaaaaagaaagtacaccagtccga

SEQ ID NO: 447812 - DNA, 58 bp, Artificial
  Synthetic oligonucleotide
taagggagtataaagaacactagccgagcaaacgaaagttgcaagcatcggaagtcaa

SEQ ID NO: 447813 - DNA, 55 bp, Artificial
  Synthetic oligonucleotide
taagggataacgaaattgaggttctcgacacgggtgacaataggtggaagtccga

SEQ ID NO: 447814 - DNA, 58 bp, Artificial
  Synthetic oligonucleotide
taagggatcaacagctcctagggatttggggttgctctggaaaactcatttgcaccac

SEQ ID NO: 447815 - DNA, 56 bp, Artificial
  Synthetic oligonucleotide
taagggatggacccggtagatcctaacctagagccctggaatcatccggggagtca

SEQ ID NO: 447816 - DNA, 58 bp, Artificial
  Synthetic oligonucleotide
taagggatgtgataaccctcatcagtagcttcaccaaatggaacgaatttacggacag

SEQ ID NO: 447817 - DNA, 51 bp, Artificial
  Synthetic oligonucleotide
taagggatgttattgtgccaatgttaggaaagtggccgacaatgttcgatg

SEQ ID NO: 447818 - DNA, 60 bp, Artificial
  Synthetic oligonucleotide
taagggccatatcaataggtgcactattataatcagttaagtcataatttgagtaagtta

SEQ ID NO: 447819 - DNA, 55 bp, Artificial
  Synthetic oligonucleotide
taagggcccgaaaagaagtattaagtgtttcaactgtggcagggaaggacatcta

SEQ ID NO: 447820 - DNA, 51 bp, Artificial
  Synthetic oligonucleotide
taagggctacaacgcggaaccatacgcgttcctgtcacagaccgcagtggt

SEQ ID NO: 447821 - DNA, 52 bp, Artificial
  Synthetic oligonucleotide
taagggctaccatctcgttcaccggggaagggccccccgaaatacggacaga

SEQ ID NO: 447822 - DNA, 56 bp, Artificial
  Synthetic oligonucleotide
taagggctggtcgaaagccacgaatggtcggtcctgggatgttctcgggtcactgt

SEQ ID NO: 447823 - DNA, 54 bp, Artificial
  Synthetic oligonucleotide
taaggggaagaatattctattcatgtggggcatacaccatccacctactgatac

SEQ ID NO: 447824 - DNA, 55 bp, Artificial
  Synthetic oligonucleotide
taaggggaagacatcattaagcaaatacctcgtggtgaaacacgatgccttaatg

SEQ ID NO: 447825 - DNA, 53 bp, Artificial
  Synthetic oligonucleotide
taaggggaatgacatcataagtgtggaaccctcttcacaaatcagagatgctt

SEQ ID NO: 447826 - DNA, 54 bp, Artificial
  Synthetic oligonucleotide
taaggggacatcaagggacttaaggggagacctacagaccattacgtctccttg

SEQ ID NO: 447827 - DNA, 53 bp, Artificial
  Synthetic oligonucleotide
taagggggaccaaagagtaaagaccagagacgcattttacaatttcgttgtac

SEQ ID NO: 447828 - DNA, 59 bp, Artificial
  Synthetic oligonucleotide
taagggggcccgatgagcacatttgccccgcctcaatcgctctacgagcggattcggta

SEQ ID NO: 447829 - DNA, 50 bp, Artificial
  Synthetic oligonucleotide
taagggggcccttgggctactttgggatttttcccttccctcgcctagta

SEQ ID NO: 447830 - DNA, 53 bp, Artificial
  Synthetic oligonucleotide
taagggggggaggagtctaaactgatcgaaaaataactcacgtaattaatgga

SEQ ID NO: 447831 - DNA, 55 bp, Artificial
  Synthetic oligonucleotide
taagggggtgatcgtccaccggctagagggggtctcgtacaacataggatcccaa

SEQ ID NO: 447832 - DNA, 57 bp, Artificial
  Synthetic oligonucleotide
taaggggtcagtctggtagaataagcatctattggacagtagttaagccgggggatg

SEQ ID NO: 447833 - DNA, 60 bp, Artificial
  Synthetic oligonucleotide
taaggggtctgactctggaattataacatcagatgctccagttcacaattgtgacacaag

SEQ ID NO: 447834 - DNA, 60 bp, Artificial
  Synthetic oligonucleotide
taaggggtggtggccactgatccaatgcatggagggtatggagtacctgagatacagacc

SEQ ID NO: 447835 - DNA, 55 bp, Artificial
  Synthetic oligonucleotide
taagggtaagactctcgtgaagggaggtccatccgtgaggaggacggcttgggag

SEQ ID NO: 447836 - DNA, 60 bp, Artificial
  Synthetic oligonucleotide
taagggtattagagaagcaatcagaagacgaaatcaggtatattagcaatacaataaaga

SEQ ID NO: 447837 - DNA, 50 bp, Artificial
  Synthetic oligonucleotide
taagggtattgcaatcccgcatgacattgacctcggagaatctcgtgtgg

SEQ ID NO: 447838 - DNA, 57 bp, Artificial
  Synthetic oligonucleotide
taagggtcctatgggcttgattatgcctgagttaaatgggagagtattaacgaacaa

SEQ ID NO: 447839 - DNA, 60 bp, Artificial
  Synthetic oligonucleotide
taagggtgacaaggtagtacgtcctgcgaagcctgagaagggtcctgagcgcactatgga

SEQ ID NO: 447840 - DNA, 60 bp, Artificial
  Synthetic oligonucleotide
taagggtgccataagcaacattacattaatgttgtgacatctccagtcgggggtattggc

SEQ ID NO: 447841 - DNA, 60 bp, Artificial
  Synthetic oligonucleotide
taagggtggcacgcaggaagggcgtgcctacaaattacctgctgcactcactgacctggg

SEQ ID NO: 447842 - DNA, 60 bp, Artificial
  Synthetic oligonucleotide
taagggtgggcattctggttcaaaatttatgtgttgtcatgacacaaaatgttctagcac

SEQ ID NO: 447843 - DNA, 51 bp, Artificial
  Synthetic oligonucleotide
taagggtggggcatatgacagtaatgctgtaattttgttatctgaatacga

SEQ ID NO: 447844 - DNA, 60 bp, Artificial
  Synthetic oligonucleotide
taagggttactgctcgtaatgagagcacatgacaatttgtcgagactacggcaactgtca

SEQ ID NO: 447845 - DNA, 56 bp, Artificial
  Synthetic oligonucleotide
taagggttatagcgggcctgagtgcccggtagaacgtccttgatacgcgggtcatc

SEQ ID NO: 447846 - DNA, 54 bp, Artificial
  Synthetic oligonucleotide
taagggttggtatggtttgaagtcttggagtatttcctcttatagagacgttta

SEQ ID NO: 447847 - DNA, 56 bp, Artificial
  Synthetic oligonucleotide
taagggtttggctgaacaaggacctccaatccaagaacagaggccatctcctaacc

SEQ ID NO: 447848 - DNA, 55 bp, Artificial
  Synthetic oligonucleotide
taaggtaatgcacttgcctagcagtaccatcccagccgctctggccgaattatcc

SEQ ID NO: 447849 - DNA, 60 bp, Artificial
  Synthetic oligonucleotide
taaggtacagtcatttgaacagcgtcatgatatatcccatgtgggcaaggtattatgtgt

SEQ ID NO: 447850 - DNA, 50 bp, Artificial
  Synthetic oligonucleotide
taaggtacagtccttcgatgctaaagacgatattggtcacatgggtaagg

SEQ ID NO: 447851 - DNA, 52 bp, Artificial
  Synthetic oligonucleotide
taaggtaccctctaagcgccgaagaaggggcacctaaggacactgtcctagc

SEQ ID NO: 447852 - DNA, 53 bp, Artificial
  Synthetic oligonucleotide
taaggtacttaggagataaggcacgtcacgtcatccatgaggtgcgtcatcca

SEQ ID NO: 447853 - DNA, 60 bp, Artificial
  Synthetic oligonucleotide
taaggtagctactaagttgattattgcactacagcttggtcattgaccactcaggtaatc

SEQ ID NO: 447854 - DNA, 59 bp, Artificial
  Synthetic oligonucleotide
taaggtagcttgcttctgagctatacactgcccccgcgcaatcggggtaaacaactata

SEQ ID NO: 447855 - DNA, 58 bp, Artificial
  Synthetic oligonucleotide
taaggtaggatccctacaatatctggcactaacagcattaatacacccaaaaaagaca

SEQ ID NO: 447856 - DNA, 54 bp, Artificial
  Synthetic oligonucleotide
taaggtaggatccttacaatatctggcactaacagtattagtaactccaaaacg

SEQ ID NO: 447857 - DNA, 58 bp, Artificial
  Synthetic oligonucleotide
taaggtaggatctctacaatacttggcactgacagcattggtaaaaccaaaaacgaga

SEQ ID NO: 447858 - DNA, 52 bp, Artificial
  Synthetic oligonucleotide
taaggtaggccaagtctttgtcactcctgaacttgtcgttgtgacgcatacg

SEQ ID NO: 447859 - DNA, 59 bp, Artificial
  Synthetic oligonucleotide
taaggtagggtctgtacagtacttggcactagcagcattaataacaccaaaacagataa

SEQ ID NO: 447860 - DNA, 60 bp, Artificial
  Synthetic oligonucleotide
taaggtagtagcagatgtgagagagttacatgaaatagactattcgtcttacatgtatat

SEQ ID NO: 447861 - DNA, 56 bp, Artificial
  Synthetic oligonucleotide
taaggtatgtgagtaatttttgaaccgcccctgactaatctaaacatgctaaccgc

SEQ ID NO: 447862 - DNA, 60 bp, Artificial
  Synthetic oligonucleotide
taaggtcaaggcggacgctgcacgtagtgtcttccatcgagagctggtagcgttgagttc

SEQ ID NO: 447863 - DNA, 54 bp, Artificial
  Synthetic oligonucleotide
taaggtcacggttcacgctgttgtcgagcctatcccaagtaccccccctgtacg

SEQ ID NO: 447864 - DNA, 60 bp, Artificial
  Synthetic oligonucleotide
taaggtcactttggatggtcgacctcttaccactgttcagcagtactctaagacattcta

SEQ ID NO: 447865 - DNA, 58 bp, Artificial
  Synthetic oligonucleotide
taaggtcatcattgcaaccaccaatctgtactcgggtttcaccccaaggactatggtg

SEQ ID NO: 447866 - DNA, 55 bp, Artificial
  Synthetic oligonucleotide
taaggtcatggttaagagagggacttcagagtctaggagtagtcaaggtgccgag

SEQ ID NO: 447867 - DNA, 55 bp, Artificial
  Synthetic oligonucleotide
taaggtcattgctaaatggttggctgtgaatgtcttgtacttcacagacgtaccg

SEQ ID NO: 447868 - DNA, 60 bp, Artificial
  Synthetic oligonucleotide
taaggtccaatcattcgagcagaggcatgacatagcccacactgggaaggtcatttgtat

SEQ ID NO: 447869 - DNA, 53 bp, Artificial
  Synthetic oligonucleotide
taaggtccaatcctatgagcagcgtcatgacatttcccatgttggtaaggtca

SEQ ID NO: 447870 - DNA, 51 bp, Artificial
  Synthetic oligonucleotide
taaggtccacccgaagtcgggacaggctgagcgtttttaaacgctttttcc

SEQ ID NO: 447871 - DNA, 50 bp, Artificial
  Synthetic oligonucleotide
taaggtccagtcattcgagtcgagacacgatgtggtccatataggtaagg

SEQ ID NO: 447872 - DNA, 59 bp, Artificial
  Synthetic oligonucleotide
taaggtccagttttttgagtctagacgtgatatccaacacattggtaaagtcatgtgtg

SEQ ID NO: 447873 - DNA, 55 bp, Artificial
  Synthetic oligonucleotide
taaggtccgcgttgaggcagcgacaaccggtgcgaaagcgctgcaagtcgcgaag

SEQ ID NO: 447874 - DNA, 55 bp, Artificial
  Synthetic oligonucleotide
taaggtcctgttggccttaagatcacccaagggcatcttgccagatggtaccgtc

SEQ ID NO: 447875 - DNA, 58 bp, Artificial
  Synthetic oligonucleotide
taaggtcgctcacagagcggctttatatcgggggtcccctgactaattcaagagggca

SEQ ID NO: 447876 - DNA, 54 bp, Artificial
  Synthetic oligonucleotide
taaggtcgctcacggagcggctttatgtcgggggtcccctgactaactccaagg

SEQ ID NO: 447877 - DNA, 53 bp, Artificial
  Synthetic oligonucleotide
taaggtcgtcgtcatcctcctactggttgcaggcgtggacgcgaacacgcgta

SEQ ID NO: 447878 - DNA, 53 bp, Artificial
  Synthetic oligonucleotide
taaggtctattagagacattagtatgatccggctaatagtcgctttggacgac

SEQ ID NO: 447879 - DNA, 55 bp, Artificial
  Synthetic oligonucleotide
taaggtctctaccatgtcaagcagaaactgggttatgaaagatccttcatcgtgg

SEQ ID NO: 447880 - DNA, 60 bp, Artificial
  Synthetic oligonucleotide
taaggtcttctggatcatctactttgtacctatcttgtatccttctcaactggacattgt

SEQ ID NO: 447881 - DNA, 59 bp, Artificial
  Synthetic oligonucleotide
taaggtcttcttggccttgtttgcaaagacacgccagtgtcaaactcggcattgtccca

SEQ ID NO: 447882 - DNA, 53 bp, Artificial
  Synthetic oligonucleotide
taaggtgaaagagatttctaatcaggaaccactgaagatttgaggtttgtcag

SEQ ID NO: 447883 - DNA, 55 bp, Artificial
  Synthetic oligonucleotide
taaggtgatatgggagaacataagcggttatcttcaatggattgtacctagctta

SEQ ID NO: 447884 - DNA, 60 bp, Artificial
  Synthetic oligonucleotide
taaggtgatcctctcttggaaaccgcatgtggccaccggactcgcaagaggccagatcgc

SEQ ID NO: 447885 - DNA, 60 bp, Artificial
  Synthetic oligonucleotide
taaggtgcagtcgtttgaacagcgtcatgatattgctcatactggcaaggtgatatgtgt

SEQ ID NO: 447886 - DNA, 60 bp, Artificial
  Synthetic oligonucleotide
taaggtgcagtcttttgaatctaggcacgatgtctctcatattggcaaagtcatgtgcgt

SEQ ID NO: 447887 - DNA, 55 bp, Artificial
  Synthetic oligonucleotide
taaggtggtggaactgtaatacataatcctttggacatggttcctttaataactg

SEQ ID NO: 447888 - DNA, 54 bp, Artificial
  Synthetic oligonucleotide
taaggtgtaattttacgtacgattatgagaataacatagtttatttacatgatt

SEQ ID NO: 447889 - DNA, 60 bp, Artificial
  Synthetic oligonucleotide
taaggtgtagttctgaatccgcagctatatcagctcataagtcttgtattagagctcctg

SEQ ID NO: 447890 - DNA, 54 bp, Artificial
  Synthetic oligonucleotide
taaggtgtatcttccaccatcacgtcctgttgctcgagtgctgagtacagatga

SEQ ID NO: 447891 - DNA, 60 bp, Artificial
  Synthetic oligonucleotide
taaggtgtatgaagatttctctagtaagatacgcagtgtcagcgctggacgtgcactgta

SEQ ID NO: 447892 - DNA, 53 bp, Artificial
  Synthetic oligonucleotide
taaggtgtcggacggaccaacgtatgtggtcccttcggttaacggcaacgagc

SEQ ID NO: 447893 - DNA, 57 bp, Artificial
  Synthetic oligonucleotide
taaggtgtgtttgtagagacaattggaagggctccaataggcccgttctatatataa

SEQ ID NO: 447894 - DNA, 57 bp, Artificial
  Synthetic oligonucleotide
taaggttacccagctcggagttgggtcagggctatagctgctagccctagggaagaa

SEQ ID NO: 447895 - DNA, 60 bp, Artificial
  Synthetic oligonucleotide
taaggttcagtcgtatgaacagggggatgatgttaagcacactggtatggttcgatgtgt

SEQ ID NO: 447896 - DNA, 60 bp, Artificial
  Synthetic oligonucleotide
taaggttcagtcttatgaacagagagatgatgttaagcatacgggtatggtccgatgtgt

SEQ ID NO: 447897 - DNA, 51 bp, Artificial
  Synthetic oligonucleotide
taaggttgataacgctactgtattgcatggtaaaatcacaggtaagcagat

SEQ ID NO: 447898 - DNA, 60 bp, Artificial
  Synthetic oligonucleotide
taaggttgatgtctgctagtaattttgaattcgacccagatcgaattcttcataatgcga

SEQ ID NO: 447899 - DNA, 57 bp, Artificial
  Synthetic oligonucleotide
taaggttggtaatgtcctctcctatgcacacaacctctatctgagtaaatctagtct

SEQ ID NO: 447900 - DNA, 55 bp, Artificial
  Synthetic oligonucleotide
taaggttgtggagtatagatagtggatatgagtcaagtcaggaggacccttaagg

SEQ ID NO: 447901 - DNA, 52 bp, Artificial
  Synthetic oligonucleotide
taaggtttgcttcgagcatacattaccgaacccaaaggaagattacctagta

SEQ ID NO: 447902 - DNA, 52 bp, Artificial
  Synthetic oligonucleotide
taagtaaaccctttgcaggagggattccacttgaaaccctggaaacaatagg

SEQ ID NO: 447903 - DNA, 57 bp, Artificial
  Synthetic oligonucleotide
taagtaacctgctaaatcctcggggatactgtctgtaagctcccttgtgtcccacaa

SEQ ID NO: 447904 - DNA, 58 bp, Artificial
  Synthetic oligonucleotide
taagtaagactgacaaaatcttacataactactcggttagagtaggagagtaatatca

SEQ ID NO: 447905 - DNA, 60 bp, Artificial
  Synthetic oligonucleotide
taagtaaggatgcgtttacgcattcgctacatagagtaatcattcagatgatgtagtgag

SEQ ID NO: 447906 - DNA, 56 bp, Artificial
  Synthetic oligonucleotide
taagtaagtatgcatttggaaactgcccaaaatatattggggtaaagagtctcaaa

SEQ ID NO: 447907 - DNA, 60 bp, Artificial
  Synthetic oligonucleotide
taagtaagtgcagttccgaatggctgagtttatgccgccagcggtagacagaactgtcta

SEQ ID NO: 447908 - DNA, 60 bp, Artificial
  Synthetic oligonucleotide
taagtaatctcttaagcaatcaaggttgcttatgccatgccctgaaggtaaatcccttga

SEQ ID NO: 447909 - DNA, 60 bp, Artificial
  Synthetic oligonucleotide
taagtaatgccatatttctggatgtgatctctctagaatccttgaacaattcttgaccca

SEQ ID NO: 447910 - DNA, 55 bp, Artificial
  Synthetic oligonucleotide
taagtaattatgtggccctaacgacctagcccacattgtttttccagtacgacta

SEQ ID NO: 447911 - DNA, 56 bp, Artificial
  Synthetic oligonucleotide
taagtacacgttttcctacccattcgggcactggtgtttgcgtgacaccaactcga

SEQ ID NO: 447912 - DNA, 57 bp, Artificial
  Synthetic oligonucleotide
taagtacatgtaatgtttagtttaacagaaagagtagattatagattaggagtagga

SEQ ID NO: 447913 - DNA, 55 bp, Artificial
  Synthetic oligonucleotide
taagtaccatgagtttgtggccaagataaggagcgttagcgctggtcgtgcgctc

SEQ ID NO: 447914 - DNA, 56 bp, Artificial
  Synthetic oligonucleotide
taagtacctgtaatgctggatttattagcaagagtagattatagattaggagtagg

SEQ ID NO: 447915 - DNA, 59 bp, Artificial
  Synthetic oligonucleotide
taagtacgcagacctcacacctattagcgcggttctagaggtatacactcgccgtatcg

SEQ ID NO: 447916 - DNA, 54 bp, Artificial
  Synthetic oligonucleotide
taagtacgccgtcctggtttactcgaaagacgataaactagagaaggacgagat

SEQ ID NO: 447917 - DNA, 57 bp, Artificial
  Synthetic oligonucleotide
taagtactacgctaatactacggtatatgatgggggagtcaactacaacgtcgtgac

SEQ ID NO: 447918 - DNA, 56 bp, Artificial
  Synthetic oligonucleotide
taagtactcttgaagtggtgatggttacaaggcatagaagggttagacccttccgc

SEQ ID NO: 447919 - DNA, 53 bp, Artificial
  Synthetic oligonucleotide
taagtaggtgccgtccaggactgcagttccgggtcagagtgcatcctcggcgg

SEQ ID NO: 447920 - DNA, 55 bp, Artificial
  Synthetic oligonucleotide
taagtagttgcaatcgagacgaacgaagcttgaggagcgaacgatccgcggtgac

SEQ ID NO: 447921 - DNA, 55 bp, Artificial
  Synthetic oligonucleotide
taagtagttgtgtggacccaaagagcgggcccacagtgtcttccccgtcctacta

SEQ ID NO: 447922 - DNA, 51 bp, Artificial
  Synthetic oligonucleotide
taagtagtttggaatcaggctctaatttaggttcaagagttttggggggct

SEQ ID NO: 447923 - DNA, 58 bp, Artificial
  Synthetic oligonucleotide
taagtataggcgtggatggtcgaccagttatcgtcgaaattacagtcgtaatgccgtg

SEQ ID NO: 447924 - DNA, 59 bp, Artificial
  Synthetic oligonucleotide
taagtatatggagcacccgcactccagatcaatccgcctcctcctgatggctctcctct

SEQ ID NO: 447925 - DNA, 60 bp, Artificial
  Synthetic oligonucleotide
taagtatatgtaatgttggatttcttagcacaagtagattatagaataggtgtaggagca

SEQ ID NO: 447926 - DNA, 55 bp, Artificial
  Synthetic oligonucleotide
taagtatgacatggtgtgaagactcgcgtgtgcttagctgtgagtcctccggccc

SEQ ID NO: 447927 - DNA, 60 bp, Artificial
  Synthetic oligonucleotide
taagtatgagctcactgaggactgcaacttttgtaggcagatgacaggtgctagcctgaa

SEQ ID NO: 447928 - DNA, 59 bp, Artificial
  Synthetic oligonucleotide
taagtatgtgagaaagcgagctgagggtttctcacattgcgccgacccataccccccta

SEQ ID NO: 447929 - DNA, 58 bp, Artificial
  Synthetic oligonucleotide
taagtatgttacagcgaaggttagtcccggtttgtgcattgctggtgataaaggtata

SEQ ID NO: 447930 - DNA, 58 bp, Artificial
  Synthetic oligonucleotide
taagtattgaagacccaagtcatgaaggggaggggataccgctatacgatgcaattaa

SEQ ID NO: 447931 - DNA, 54 bp, Artificial
  Synthetic oligonucleotide
taagtcaaagctgtttttacgacgcaccgcttgacatcccgtaaaacttaattc

SEQ ID NO: 447932 - DNA, 55 bp, Artificial
  Synthetic oligonucleotide
taagtcaactcacgctcacgcactcggagtaagagaacgagttaacgagataacg

SEQ ID NO: 447933 - DNA, 60 bp, Artificial
  Synthetic oligonucleotide
taagtcaactggcctgccctatcatctctctagaaaagggaacgtattgctccttgagcc

SEQ ID NO: 447934 - DNA, 60 bp, Artificial
  Synthetic oligonucleotide
taagtcaagcgtttgcttactggtaaagccacgcacgtcacaacgataatcgctcgtgtc

SEQ ID NO: 447935 - DNA, 52 bp, Artificial
  Synthetic oligonucleotide
taagtcaatcctaggtggaagtgtctgtctggggaatcttaacctatccaac

SEQ ID NO: 447936 - DNA, 60 bp, Artificial
  Synthetic oligonucleotide
taagtcaccaaatgttgaggaattaggctattcagataggttaatgcaactcaccgctgg

SEQ ID NO: 447937 - DNA, 59 bp, Artificial
  Synthetic oligonucleotide
taagtcactgaaccggaccatcaggcgtcccagcaaacacttctccaaattgttggagc

SEQ ID NO: 447938 - DNA, 55 bp, Artificial
  Synthetic oligonucleotide
taagtcagcagctgccggtaagactctagttctaccttacaacagattatctgag

SEQ ID NO: 447939 - DNA, 60 bp, Artificial
  Synthetic oligonucleotide
taagtcaggagattggcgagacatgcagttctattatgacactcttcttcccggaaacag

SEQ ID NO: 447940 - DNA, 53 bp, Artificial
  Synthetic oligonucleotide
taagtcagtctgaccttgtttgcacatgcatgctattgttagacttggcatcg

SEQ ID NO: 447941 - DNA, 60 bp, Artificial
  Synthetic oligonucleotide
taagtccaagaaggatgctagctgatgaagttgaggtccagcttaaagggacagcctgtc

SEQ ID NO: 447942 - DNA, 51 bp, Artificial
  Synthetic oligonucleotide
taagtccaccaaggttagagacgctgacatacggcagattatctgctctga

SEQ ID NO: 447943 - DNA, 60 bp, Artificial
  Synthetic oligonucleotide
taagtccactgactgcagagttgtccacctttctacacctcaagtcaaaatggatgtggt

SEQ ID NO: 447944 - DNA, 55 bp, Artificial
  Synthetic oligonucleotide
taagtcccttgaaccatgcacctgcgggtctgcagacttatacttggttacccgc

SEQ ID NO: 447945 - DNA, 51 bp, Artificial
  Synthetic oligonucleotide
taagtccgtcaaggaggctaaagagcgtgacatctgggcaaaattcagaca

SEQ ID NO: 447946 - DNA, 60 bp, Artificial
  Synthetic oligonucleotide
taagtcctgcttgcctgcttgtgtatatggacttgctgtggccagtggatacgactttga

SEQ ID NO: 447947 - DNA, 60 bp, Artificial
  Synthetic oligonucleotide
taagtcctgtctgcctgcttgtgtatacggacttgctgtagccggtggatatgactttga

SEQ ID NO: 447948 - DNA, 60 bp, Artificial
  Synthetic oligonucleotide
taagtcgataaatgcatattgttctcttagcgatattgcggcctatcacgccgatggcgt

SEQ ID NO: 447949 - DNA, 54 bp, Artificial
  Synthetic oligonucleotide
taagtcggtcaaagttgacttcactcagaccgtggtcactcgatagaagtagag

SEQ ID NO: 447950 - DNA, 57 bp, Artificial
  Synthetic oligonucleotide
taagtcgtcccagaagccgtcagggatgtcgtccagacttggaaatttaggtatgcc

SEQ ID NO: 447951 - DNA, 55 bp, Artificial
  Synthetic oligonucleotide
taagtcgtcccagaagctcgaatcgattccgtccagacttggaagttcaggtacg

SEQ ID NO: 447952 - DNA, 56 bp, Artificial
  Synthetic oligonucleotide
taagtcgttttcgtcgttgctgacgtgtatcacatcgggataataggatatcctaa

SEQ ID NO: 447953 - DNA, 60 bp, Artificial
  Synthetic oligonucleotide
taagtctatcacctggaatgctgaatcccggaggggtaccatggattgctattggagatg

SEQ ID NO: 447954 - DNA, 54 bp, Artificial
  Synthetic oligonucleotide
taagtctctattccccgaattacgataccaccccttggctctgcctaaggcccg

SEQ ID NO: 447955 - DNA, 60 bp, Artificial
  Synthetic oligonucleotide
taagtctggatatgatgctggtgaattacgctctaaaggatatatgagcgtccctcaagt

SEQ ID NO: 447956 - DNA, 59 bp, Artificial
  Synthetic oligonucleotide
taagtctggattaagcgggaatatgaatcgttggcattttgataactgcccaaatcacc

SEQ ID NO: 447957 - DNA, 57 bp, Artificial
  Synthetic oligonucleotide
taagtctgggcagtatcgataatcgtgggtgcgacattgtttaaaaggcccgcgtgg

SEQ ID NO: 447958 - DNA, 60 bp, Artificial
  Synthetic oligonucleotide
taagtctgtgtatatactaggtaagatatggatggacgagaatatcaagctcaagaacca

SEQ ID NO: 447959 - DNA, 57 bp, Artificial
  Synthetic oligonucleotide
taagtctttgattactatgcccactttgagtggaagcaaagtcgtactgccggtacc

SEQ ID NO: 447960 - DNA, 60 bp, Artificial
  Synthetic oligonucleotide
taagtgaaacacaagggacggagaaactgacaataacatattcatcgtcaatgatgtggg

SEQ ID NO: 447961 - DNA, 58 bp, Artificial
  Synthetic oligonucleotide
taagtgaagatgtattccagcatgatcgattaggtgagtttagttttgtaggtaaagt

SEQ ID NO: 447962 - DNA, 53 bp, Artificial
  Synthetic oligonucleotide
taagtgaccaaatagtttttggactgaactctaaatttctttggcggtggcat

SEQ ID NO: 447963 - DNA, 60 bp, Artificial
  Synthetic oligonucleotide
taagtgacgagttgttagatatcgagaatcgactggatcaccttgagagacaattcgaaa

SEQ ID NO: 447964 - DNA, 58 bp, Artificial
  Synthetic oligonucleotide
taagtgactactggtacttatcatgtgggcttttgtttcccaaggctgagaggtacga

SEQ ID NO: 447965 - DNA, 57 bp, Artificial
  Synthetic oligonucleotide
taagtgactctgctgtacgcggggcgaggcagagggtaattccttctataaaaggaa

SEQ ID NO: 447966 - DNA, 59 bp, Artificial
  Synthetic oligonucleotide
taagtgatcgtttgctctggctgggggaagctgaaggcaatgccgtagtgccggacctt

SEQ ID NO: 447967 - DNA, 51 bp, Artificial
  Synthetic oligonucleotide
taagtgatggcctagagttcctgtctgatgatcctatgaactttacagaag

SEQ ID NO: 447968 - DNA, 51 bp, Artificial
  Synthetic oligonucleotide
taagtgattgtcacttcaggctgagggaagctgaatgcaaggccgtagtgc

SEQ ID NO: 447969 - DNA, 59 bp, Artificial
  Synthetic oligonucleotide
taagtgctcatttcaagtgaagaaggcattgtatgtcgagatttacaaaaggtacgttc

SEQ ID NO: 447970 - DNA, 51 bp, Artificial
  Synthetic oligonucleotide
taagtgctggcacgaaaagttgtggcctgactccgtcaagtgcgcaccgtc

SEQ ID NO: 447971 - DNA, 55 bp, Artificial
  Synthetic oligonucleotide
taagtggcccttcagcaagcccgctagtccactcaggcacacgcaccacctgcga

SEQ ID NO: 447972 - DNA, 50 bp, Artificial
  Synthetic oligonucleotide
taagtggcgaaacgctgttggttcaagaataaacggcccagttcacatgg

SEQ ID NO: 447973 - DNA, 57 bp, Artificial
  Synthetic oligonucleotide
taagtgggaaggccagccataccatgtatggtctgtcaacaaaggcgagtcttgcct

SEQ ID NO: 447974 - DNA, 55 bp, Artificial
  Synthetic oligonucleotide
taagtgggatttggttccgatagagcgagatgtaaacacgacgtggatggatggg

SEQ ID NO: 447975 - DNA, 55 bp, Artificial
  Synthetic oligonucleotide
taagtgggccaaaaggatgattgcgtcaaaagtcagcattagttttcttctggtg

SEQ ID NO: 447976 - DNA, 57 bp, Artificial
  Synthetic oligonucleotide
taagtggggttagaattcaagcattatcagaacgaactacagagggcccatacgatt

SEQ ID NO: 447977 - DNA, 55 bp, Artificial
  Synthetic oligonucleotide
taagtgggtgcccggagcggtctacgccttctacgggatgtggcccctcctcttg

SEQ ID NO: 447978 - DNA, 53 bp, Artificial
  Synthetic oligonucleotide
taagtggtaccccatgattacacaccagaaaaccgcaattgaggcaatagttt

SEQ ID NO: 447979 - DNA, 54 bp, Artificial
  Synthetic oligonucleotide
taagtggtcccctatttatacttattctccaagtattattttaaacatgtggga

SEQ ID NO: 447980 - DNA, 55 bp, Artificial
  Synthetic oligonucleotide
taagtggtgcaccataaagtctaatgagttcctcggtaactgatccgctcagatc

SEQ ID NO: 447981 - DNA, 55 bp, Artificial
  Synthetic oligonucleotide
taagtggtgtaaaaccaaaggttatgtgaattattgtggattgtattatataaag

SEQ ID NO: 447982 - DNA, 57 bp, Artificial
  Synthetic oligonucleotide
taagtgtaaataagagaactttaacttgaacctcacacgacaaggctagcgcggcca

SEQ ID NO: 447983 - DNA, 55 bp, Artificial
  Synthetic oligonucleotide
taagtgtaaattctataccgaatcacaaaaatcgaattcggagaaggtcgaagaa

SEQ ID NO: 447984 - DNA, 53 bp, Artificial
  Synthetic oligonucleotide
taagtgtacgccatgcgttctttcgggtttcacctcgcacgcatgtctggagc

SEQ ID NO: 447985 - DNA, 59 bp, Artificial
  Synthetic oligonucleotide
taagtgtagtaatcattatctatgtttaaaatgtctcacattgatgcttgggagatctg

SEQ ID NO: 447986 - DNA, 59 bp, Artificial
  Synthetic oligonucleotide
taagtgtgacaacgaatgcatcgaaagggttagaaacggaacatatgatcacaaagaat

SEQ ID NO: 447987 - DNA, 60 bp, Artificial
  Synthetic oligonucleotide
taagtgtgataatcagtgcatggagacaatccggaacgggacctataacaggaggaagta

SEQ ID NO: 447988 - DNA, 51 bp, Artificial
  Synthetic oligonucleotide
taagtgtgcagacaatgttgtacaacccggtcctgaagacccctatgctgg

SEQ ID NO: 447989 - DNA, 60 bp, Artificial
  Synthetic oligonucleotide
taagtgttgcatgcactctgctaagtgttcgtatggttagaactgatgcatatagtcgca

SEQ ID NO: 447990 - DNA, 55 bp, Artificial
  Synthetic oligonucleotide
taagttaagactggcacagtgtaaatttgtaggacaatggggaagagcctttgcc

SEQ ID NO: 447991 - DNA, 57 bp, Artificial
  Synthetic oligonucleotide
taagttaatcctaagggagggagtggaacgtcctgatagaaaacagacatgacgctc

SEQ ID NO: 447992 - DNA, 57 bp, Artificial
  Synthetic oligonucleotide
taagttaggccctggttaaccattgaagccactaatgagaaatttgcaaactgttca

SEQ ID NO: 447993 - DNA, 60 bp, Artificial
  Synthetic oligonucleotide
taagttagtttcacgatttgcatgttttacattgacggcgaagtacgagatgaggctggc

SEQ ID NO: 447994 - DNA, 51 bp, Artificial
  Synthetic oligonucleotide
taagttattaagtttcgtgggatggatacccttatttgggtccccccgaga

SEQ ID NO: 447995 - DNA, 55 bp, Artificial
  Synthetic oligonucleotide
taagttcacttccaatctagaaaccactctgttgccctctttgatcaacccaccc

SEQ ID NO: 447996 - DNA, 54 bp, Artificial
  Synthetic oligonucleotide
taagttccccatatagactccagaagcttgaggtctctcagacctcatgatttt

SEQ ID NO: 447997 - DNA, 55 bp, Artificial
  Synthetic oligonucleotide
taagttcccgggtggcggacagatcgtcggtggagtttacttactgccgcgcagg

SEQ ID NO: 447998 - DNA, 53 bp, Artificial
  Synthetic oligonucleotide
taagttccctcctgctctcccgatttgggccagacctgactacaatccacctc

SEQ ID NO: 447999 - DNA, 55 bp, Artificial
  Synthetic oligonucleotide
taagttccgaggcatcgggctccgagcaaggattgataatccctgttcagggtcc

SEQ ID NO: 448000 - DNA, 57 bp, Artificial
  Synthetic oligonucleotide
taagttcggcatttcgccaagggtagcagtagatgcgctaagctttgcttcagtagg

SEQ ID NO: 448001 - DNA, 55 bp, Artificial
  Synthetic oligonucleotide
taagttctcaggatggcagtctgaaggaaagccatggggactattaccaaagcca

SEQ ID NO: 448002 - DNA, 57 bp, Artificial
  Synthetic oligonucleotide
taagttctgcgatacatttgaagactttgattgcggtccgaccgagtttggaataaa

SEQ ID NO: 448003 - DNA, 56 bp, Artificial
  Synthetic oligonucleotide
taagttctgcgttgaaggaccgtttttacattcggcatgtgtttaaacgagtgata

SEQ ID NO: 448004 - DNA, 60 bp, Artificial
  Synthetic oligonucleotide
taagttgagtgccttgctcatgacggcatttactgtcggagctttgattacctattattc

SEQ ID NO: 448005 - DNA, 55 bp, Artificial
  Synthetic oligonucleotide
taagttgatcttccctgcatatggtggtgtcttgcccaatagtacactcggggtt

SEQ ID NO: 448006 - DNA, 55 bp, Artificial
  Synthetic oligonucleotide
taagttggaggcaaagccctagcacaatggacttcctccagcatccggccttctg

SEQ ID NO: 448007 - DNA, 55 bp, Artificial
  Synthetic oligonucleotide
taagttggccgtcaactctctggaattagacgctggtgtgggagtcccttttgtc

SEQ ID NO: 448008 - DNA, 57 bp, Artificial
  Synthetic oligonucleotide
taagttggtaggacctcacaaattgaacttcgtcaatgtcctgtcaaataccgagcc

SEQ ID NO: 448009 - DNA, 53 bp, Artificial
  Synthetic oligonucleotide
taagttgtggtccctatatatttaggaccattattgacagagttataacttta

SEQ ID NO: 448010 - DNA, 55 bp, Artificial
  Synthetic oligonucleotide
taagtttaaaatcgaatgagattcctacaaacatggggggatggttgacttctcc

SEQ ID NO: 448011 - DNA, 60 bp, Artificial
  Synthetic oligonucleotide
taagtttaattgcaccatttatcgtaatatgccgaccactcgcgactctattatgacctc

SEQ ID NO: 448012 - DNA, 51 bp, Artificial
  Synthetic oligonucleotide
taagtttaggcaagcacgtgacaacaagtatgcttacgatgtcactggatc

SEQ ID NO: 448013 - DNA, 55 bp, Artificial
  Synthetic oligonucleotide
taagtttctccagattctcaacgggcgctatcctcgcatctggtaagctcgtttt

SEQ ID NO: 448014 - DNA, 60 bp, Artificial
  Synthetic oligonucleotide
taagtttgaacacgcttacgcattgcattatgtacaccataagcctagggatggaaagga

SEQ ID NO: 448015 - DNA, 59 bp, Artificial
  Synthetic oligonucleotide
taagtttgcaacccactcagtgtctctccgcggtgtacatcctctcggtcctgttgcgg

SEQ ID NO: 448016 - DNA, 59 bp, Artificial
  Synthetic oligonucleotide
taagtttgcactaatgttgtgtgaattcactcttcctaaatggtggccaataattatac

SEQ ID NO: 448017 - DNA, 54 bp, Artificial
  Synthetic oligonucleotide
taagtttgctggattaacctttagacagttatgtgagccattcgctgaacaagc

SEQ ID NO: 448018 - DNA, 60 bp, Artificial
  Synthetic oligonucleotide
taagtttggcaccaaagcgattcatctaaactcaatgggatctatgaatgtcctagttaa

SEQ ID NO: 448019 - DNA, 60 bp, Artificial
  Synthetic oligonucleotide
taagtttgtaagacgtctgatgacgtgtgggaacttattggaagtgacattttgctgcaa

SEQ ID NO: 448020 - DNA, 57 bp, Artificial
  Synthetic oligonucleotide
taagtttgttaacataacatccagcttgtcaaacagtaatagacgtggttttcagat

SEQ ID NO: 448021 - DNA, 53 bp, Artificial
  Synthetic oligonucleotide
taagttttgattccgctgaaggtgcaccagcgagcgaagcgagcgatggcgaa

SEQ ID NO: 448022 - DNA, 60 bp, Artificial
  Synthetic oligonucleotide
taataaaagacgacgtggcttgatggacagccgtaggatgtgttctgagatgtggactcc

SEQ ID NO: 448023 - DNA, 53 bp, Artificial
  Synthetic oligonucleotide
taataaagggggccttggaggggtcaaatgcgtttggcccacgctactgccgg

SEQ ID NO: 448024 - DNA, 57 bp, Artificial
  Synthetic oligonucleotide
taataaatattcataaaggaaaccgctaatttgaattgccgaccacaaactgacata

SEQ ID NO: 448025 - DNA, 60 bp, Artificial
  Synthetic oligonucleotide
taataaatggatatcaatgggtacatcatgtacgattaaagtatgtcctctaaataccca

SEQ ID NO: 448026 - DNA, 59 bp, Artificial
  Synthetic oligonucleotide
taataacaatggagtcaaaggattctcatacctggatggaagtaacacttggctagggc

SEQ ID NO: 448027 - DNA, 60 bp, Artificial
  Synthetic oligonucleotide
taataacacctccaaacacagccccagtagctgacatgatatgttttgtgtcaggatgta

SEQ ID NO: 448028 - DNA, 59 bp, Artificial
  Synthetic oligonucleotide
taataacactgcacgtttagaagatggttgtattctctactatcgcgtattgtgaagtt

SEQ ID NO: 448029 - DNA, 56 bp, Artificial
  Synthetic oligonucleotide
taataacatgggcctttggcgttgtagcccgtcgggaccacatcctggcgttggtg

SEQ ID NO: 448030 - DNA, 60 bp, Artificial
  Synthetic oligonucleotide
taataaccagctatcaggtgccaggtacgctgcaaacacaagacatgccagtgttaacac

SEQ ID NO: 448031 - DNA, 55 bp, Artificial
  Synthetic oligonucleotide
taataaccttatggagcttagtagctcaggtttgcgagtagaccaaaattcgggg

SEQ ID NO: 448032 - DNA, 60 bp, Artificial
  Synthetic oligonucleotide
taataagaactctgcaaccaactgctgtttattcatttcagaattgggtgtcaaacatag

SEQ ID NO: 448033 - DNA, 52 bp, Artificial
  Synthetic oligonucleotide
taataagaatggttactctagatgaggtgctccagttgaggctcctcaaact

SEQ ID NO: 448034 - DNA, 50 bp, Artificial
  Synthetic oligonucleotide
taataagacctagtttacctgtgacaaatgactcattggaccattggcac

SEQ ID NO: 448035 - DNA, 60 bp, Artificial
  Synthetic oligonucleotide
taataagagcgacccgaagtcgtcagaattggcgcacgcggctcagatgaattccctacc

SEQ ID NO: 448036 - DNA, 60 bp, Artificial
  Synthetic oligonucleotide
taataagatgcccatacactgaacccatgctaatagaccactcagacccaaacaaaggct

SEQ ID NO: 448037 - DNA, 55 bp, Artificial
  Synthetic oligonucleotide
taataagcgtgtcactgatagtattagagagtccttacgggaaaggaaaccaatc

SEQ ID NO: 448038 - DNA, 60 bp, Artificial
  Synthetic oligonucleotide
taataagctagcaataccctaccagtttgttggtcagtggatcactgtcaaggaatatga

SEQ ID NO: 448039 - DNA, 55 bp, Artificial
  Synthetic oligonucleotide
taataagctataaaacatagttttatgagttataaattaaactatttcgatgaat

SEQ ID NO: 448040 - DNA, 55 bp, Artificial
  Synthetic oligonucleotide
taataagctttaaaaacgcatcaggaggggatctagaaattacaacacatagttt

SEQ ID NO: 448041 - DNA, 58 bp, Artificial
  Synthetic oligonucleotide
taataagtggatctccatgggttcttcgtgtacaattaaagtatgtccactaaacaca

SEQ ID NO: 448042 - DNA, 51 bp, Artificial
  Synthetic oligonucleotide
taataataaaacgttcatgggaaaaggaccatgtacaaatgttagcacagt

SEQ ID NO: 448043 - DNA, 58 bp, Artificial
  Synthetic oligonucleotide
taataataaacgaatgacatcaccacggtcgcttgcgtggaacattctaggcggttaa

SEQ ID NO: 448044 - DNA, 52 bp, Artificial
  Synthetic oligonucleotide
taataataatgtaagctttagaaaagaggagggaccgaattcggttccaacc

SEQ ID NO: 448045 - DNA, 59 bp, Artificial
  Synthetic oligonucleotide
taataatgtagtgagtgaaggttacaagcaataggaattgcagctgtgcatatgtggct

SEQ ID NO: 448046 - DNA, 59 bp, Artificial
  Synthetic oligonucleotide
taataattgggtgttaaaggcgagaaaaatgaatgaaaatatgcattctcttcagaatg

SEQ ID NO: 448047 - DNA, 54 bp, Artificial
  Synthetic oligonucleotide
taatacaatagtaaccctcttgtgcgtgcaccagaggatagaggtaaaggacac

SEQ ID NO: 448048 - DNA, 60 bp, Artificial
  Synthetic oligonucleotide
taatacaatgtatcgagtccatggatatgaatctatcgttagcagtcgaatggaaacagt

SEQ ID NO: 448049 - DNA, 54 bp, Artificial
  Synthetic oligonucleotide
taatacacaactggtactgcagagaccgtccgcgggtacggtgcacgtgccgta

SEQ ID NO: 448050 - DNA, 56 bp, Artificial
  Synthetic oligonucleotide
taatacagacatagaaagaatgggtgaaacttttaagtatatgggaagtgttggag

SEQ ID NO: 448051 - DNA, 50 bp, Artificial
  Synthetic oligonucleotide
taatacagatccggaatcccttagcattatatgttcctatgggttggaat

SEQ ID NO: 448052 - DNA, 58 bp, Artificial
  Synthetic oligonucleotide
taatacagtagcaaccctctattgcgtacatcgccggatgggcataaaagacaccaag

SEQ ID NO: 448053 - DNA, 60 bp, Artificial
  Synthetic oligonucleotide
taatacatagaagaaataggcgcactacgctacagcgtcgtgtcaacgtctcagtgttac

SEQ ID NO: 448054 - DNA, 57 bp, Artificial
  Synthetic oligonucleotide
taataccaacgctagggtgactcgcgtcaaggttacagccccgcacactattaaggc

SEQ ID NO: 448055 - DNA, 60 bp, Artificial
  Synthetic oligonucleotide
taataccaagatcgcaaactgaattgtgtgcgcaatatataaataatgggctgcctccaa

SEQ ID NO: 448056 - DNA, 57 bp, Artificial
  Synthetic oligonucleotide
taataccaagtaatccgaactaccaaactccaatagcttcatctagtactgtaagaa

SEQ ID NO: 448057 - DNA, 58 bp, Artificial
  Synthetic oligonucleotide
taataccacaatttgcaggagaacccgcacgagatttttcagataaaccacaagagaa

SEQ ID NO: 448058 - DNA, 54 bp, Artificial
  Synthetic oligonucleotide
taatacccaccccctcgtgatgcaattggggggtggagtctaaccctatgggtc

SEQ ID NO: 448059 - DNA, 50 bp, Artificial
  Synthetic oligonucleotide
taatacccggggggaggcggggtaaacccatactatgggaactgctgggt

SEQ ID NO: 448060 - DNA, 54 bp, Artificial
  Synthetic oligonucleotide
taatacccgtagatcaaattttgttggtacacgtaaaggacttgactgggataa

SEQ ID NO: 448061 - DNA, 55 bp, Artificial
  Synthetic oligonucleotide
taatacccttgggaagcagtgtcagcatctttaattcaagacaggcttttggcga

SEQ ID NO: 448062 - DNA, 58 bp, Artificial
  Synthetic oligonucleotide
taataccggattaaatgataagccgattttgttaatgcatcaatatagagaggatgaa

SEQ ID NO: 448063 - DNA, 59 bp, Artificial
  Synthetic oligonucleotide
taatacctccaacaaaaggtcacttgacaattggcaactctgtggattcaaagattgtg

SEQ ID NO: 448064 - DNA, 60 bp, Artificial
  Synthetic oligonucleotide
taatacgaccaaatgagaacccggcgcacaagagtcaattggtgtggatggcatgccatt

SEQ ID NO: 448065 - DNA, 57 bp, Artificial
  Synthetic oligonucleotide
taatacgacgactaatgagaccttcagacctgggggaggaaatatgagggacaattg

SEQ ID NO: 448066 - DNA, 54 bp, Artificial
  Synthetic oligonucleotide
taatacgctaaataaagccagaagcgaatacacacccgagcttattaacaccgt

SEQ ID NO: 448067 - DNA, 53 bp, Artificial
  Synthetic oligonucleotide
taatacgctggagcccagcctacttaggtgtctgtatgggtgcaattcgttta

SEQ ID NO: 448068 - DNA, 55 bp, Artificial
  Synthetic oligonucleotide
taatacgcttcttccaccgacaacagccccgccgcatacgcatccgccttgcccg

SEQ ID NO: 448069 - DNA, 58 bp, Artificial
  Synthetic oligonucleotide
taatacggaagtgacaaaacaaatggtgcaagacgtgtcaaatgacgttagagatacg

SEQ ID NO: 448070 - DNA, 57 bp, Artificial
  Synthetic oligonucleotide
taatacgtgatttaattttagttatacgtgctagagattatggcgaagcgtcccgcc

SEQ ID NO: 448071 - DNA, 55 bp, Artificial
  Synthetic oligonucleotide
taatactacaagaatagcctttaaccactcctcaggaggggacccagaaattgta

SEQ ID NO: 448072 - DNA, 60 bp, Artificial
  Synthetic oligonucleotide
taatactcagatcatcgagttatttgataaggatttggaagatgtatataaattcgcaac

SEQ ID NO: 448073 - DNA, 60 bp, Artificial
  Synthetic oligonucleotide
taatactctgagtgctgaaactttcacaagcttaaatcttcgactacgtaattagctcaa

SEQ ID NO: 448074 - DNA, 55 bp, Artificial
  Synthetic oligonucleotide
taatactctgatcccatagtgcctcattaggccccatgaggttacacctacaatc

SEQ ID NO: 448075 - DNA, 58 bp, Artificial
  Synthetic oligonucleotide
taatacttcctgcactaactctactgacgatcgcttgggagacatgagaaattgtagc

SEQ ID NO: 448076 - DNA, 51 bp, Artificial
  Synthetic oligonucleotide
taatagaaaaaacgccctttcgtggcatttttgtaaatatagggtgttccc

SEQ ID NO: 448077 - DNA, 57 bp, Artificial
  Synthetic oligonucleotide
taatagacgatgcgaccctcacgttttggaggtacgcggaccaaaacatgagggcac

SEQ ID NO: 448078 - DNA, 55 bp, Artificial
  Synthetic oligonucleotide
taatagactggcatacttcctcctaggactccttagcttggctggacttgtgacg

SEQ ID NO: 448079 - DNA, 60 bp, Artificial
  Synthetic oligonucleotide
taatagagaagatgtgataaaattagttgacagtcaaaagaatgcgttaatgactgtaag

SEQ ID NO: 448080 - DNA, 60 bp, Artificial
  Synthetic oligonucleotide
taatagagccctgcttaacactgctaagtttgcagacacgttagtggaggcaggcttagt

SEQ ID NO: 448081 - DNA, 55 bp, Artificial
  Synthetic oligonucleotide
taatagatgaaggatatcgaggtgaaattggagtaataatgattaatgtatcaag

SEQ ID NO: 448082 - DNA, 56 bp, Artificial
  Synthetic oligonucleotide
taatagcacagggaatctaattgcccctcggggatacttcaaaatacggagtggga

SEQ ID NO: 448083 - DNA, 60 bp, Artificial
  Synthetic oligonucleotide
taatagcaccatggcacgcatttgcattgaataagggctctagttctggaattatgatgt

SEQ ID NO: 448084 - DNA, 53 bp, Artificial
  Synthetic oligonucleotide
taatagcacctctcgcatggtgtccacgagagctctgctgtgtgaagttctta

SEQ ID NO: 448085 - DNA, 58 bp, Artificial
  Synthetic oligonucleotide
taatagccttgggtatctaatgtgcaaaccattcctcactggaacaactacagggaaa

SEQ ID NO: 448086 - DNA, 60 bp, Artificial
  Synthetic oligonucleotide
taatagcgtacgatggagagcgttacgcactgatgcaaactggacaactgtttcgtcagg

SEQ ID NO: 448087 - DNA, 60 bp, Artificial
  Synthetic oligonucleotide
taatagctaacagaagatctgtggtatttgatagaatgtgtgaattgtcagggcctttat

SEQ ID NO: 448088 - DNA, 51 bp, Artificial
  Synthetic oligonucleotide
taataggaatgccagtatcgagttgcgagaagtgatcaaagcctcacctct

SEQ ID NO: 448089 - DNA, 55 bp, Artificial
  Synthetic oligonucleotide
taataggagctgttgtgtacttttcagaaacttcataatgtactcctgtgctcct

SEQ ID NO: 448090 - DNA, 60 bp, Artificial
  Synthetic oligonucleotide
taataggccacggtttcgcatcacctggagactgcggcggcattcttagatgccaacacg

SEQ ID NO: 448091 - DNA, 60 bp, Artificial
  Synthetic oligonucleotide
taataggcctattgtaaatataaatatggcagattatagcattgattccagttatgtgtg

SEQ ID NO: 448092 - DNA, 60 bp, Artificial
  Synthetic oligonucleotide
taataggctggcagaatgaagagcaagcggtgctaagggaagttagggtcagaagggcta

SEQ ID NO: 448093 - DNA, 59 bp, Artificial
  Synthetic oligonucleotide
taataggctggttatcgtgggtgaaactacaacaccgatcagtaatacattgtcgacag

SEQ ID NO: 448094 - DNA, 51 bp, Artificial
  Synthetic oligonucleotide
taatagggaaccagtatgtcaccatctattatggagtaccagtgtggaaaa

SEQ ID NO: 448095 - DNA, 55 bp, Artificial
  Synthetic oligonucleotide
taataggtattcatgtaggaggaaatggtagagttggttattgtgcatcactgac

SEQ ID NO: 448096 - DNA, 60 bp, Artificial
  Synthetic oligonucleotide
taataggtctacgttagctaaattggtatcatctcctatgtcaatattagtcgcattgat

SEQ ID NO: 448097 - DNA, 60 bp, Artificial
  Synthetic oligonucleotide
taataggtctgtctggccgcgcagcgggatctctcacatttctttcagcccatgaagaaa

SEQ ID NO: 448098 - DNA, 57 bp, Artificial
  Synthetic oligonucleotide
taataggtgttcctggcgtgtgcccgcccgaaatcattcgacactgtgtttggttcc

SEQ ID NO: 448099 - DNA, 53 bp, Artificial
  Synthetic oligonucleotide
taataggttagatatcttattcaagggtggcacatcatcagctagtagtacaa

SEQ ID NO: 448100 - DNA, 51 bp, Artificial
  Synthetic oligonucleotide
taataggttccgaaataggcagggtgcattaactgtttatacgggcactgt

SEQ ID NO: 448101 - DNA, 58 bp, Artificial
  Synthetic oligonucleotide
taatagtacatacaacaaccatacatacacgaataatgggacaggaaattcaaacatc

SEQ ID NO: 448102 - DNA, 56 bp, Artificial
  Synthetic oligonucleotide
taatagtactcgtcacacgtttcggatacatttgggactgtagaaattaaatcctc

SEQ ID NO: 448103 - DNA, 55 bp, Artificial
  Synthetic oligonucleotide
taatagtactgcttggaatggtaccacagggttaaataaaactaatggcacactc

SEQ ID NO: 448104 - DNA, 60 bp, Artificial
  Synthetic oligonucleotide
taatagtagtctgtctaatagtggtaacctgactaatagtagtaatgacactatcacact

SEQ ID NO: 448105 - DNA, 58 bp, Artificial
  Synthetic oligonucleotide
taatagtcagtcaagtaattatagtcagtatagggtaataaattgtaataccctcagc

SEQ ID NO: 448106 - DNA, 60 bp, Artificial
  Synthetic oligonucleotide
taatagtgagtgggagagacgagcagtcaattgctgaagcaataattgtggccatggtat

SEQ ID NO: 448107 - DNA, 60 bp, Artificial
  Synthetic oligonucleotide
taatagtgccatacatgaacacactaccttttgattccgcattgaaccactgtaatttcg

SEQ ID NO: 448108 - DNA, 54 bp, Artificial
  Synthetic oligonucleotide
taatagttataagtcacctagggtaagtggtaaaagtggtgttggtagtatgaa

SEQ ID NO: 448109 - DNA, 60 bp, Artificial
  Synthetic oligonucleotide
taatagtttagcttcaagtgacacaccagcttcagccgaccacattatgacaactgttcc

SEQ ID NO: 448110 - DNA, 50 bp, Artificial
  Synthetic oligonucleotide
taatataagaaggcgcacttccgaatggctgagttttccacgcccgtccg

SEQ ID NO: 448111 - DNA, 60 bp, Artificial
  Synthetic oligonucleotide
taatataatatataagcataaggagtggtcggttcccgtgctaatatattcagatggcct

SEQ ID NO: 448112 - DNA, 58 bp, Artificial
  Synthetic oligonucleotide
taatataatcatgcaaagtgattgtctcttattctcgtggtatgttattcgttgttaa

SEQ ID NO: 448113 - DNA, 60 bp, Artificial
  Synthetic oligonucleotide
taatatacgcaaaacacactagagaatatgctgaattttattcacaatcgaatcagctac

SEQ ID NO: 448114 - DNA, 60 bp, Artificial
  Synthetic oligonucleotide
taatatataggaatgttatcatggcatcgacacaagagaagttctcttggagtgattgtc

SEQ ID NO: 448115 - DNA, 59 bp, Artificial
  Synthetic oligonucleotide
taatatcacgcttcgatcgatttcgcaggcggaaaccacgtatctatcgaagcgtttcg

SEQ ID NO: 448116 - DNA, 59 bp, Artificial
  Synthetic oligonucleotide
taatatcattggaacctctgtgactgaccaggtacgccaatagaaaatagtatcccgga

SEQ ID NO: 448117 - DNA, 53 bp, Artificial
  Synthetic oligonucleotide
taatatcgcgatgggtaaagctgtttacggtgatgcaacgagttctgatccat

SEQ ID NO: 448118 - DNA, 57 bp, Artificial
  Synthetic oligonucleotide
taatatcgctgtaactaatccagctataaagttaactggactatctgctccaataga

SEQ ID NO: 448119 - DNA, 58 bp, Artificial
  Synthetic oligonucleotide
taatatgaaccggcgtcttttacagactgaatttgcaaagagcgaaaatgaggcgaaa

SEQ ID NO: 448120 - DNA, 51 bp, Artificial
  Synthetic oligonucleotide
taatatgactctgtgagtcacgatttaggggtggagtgaattcctgtaccg

SEQ ID NO: 448121 - DNA, 60 bp, Artificial
  Synthetic oligonucleotide
taatatgagcagccgcagtctaagtcaatacgtctcctgcggattattttcttcttcgca

SEQ ID NO: 448122 - DNA, 60 bp, Artificial
  Synthetic oligonucleotide
taatatggcctgggtgggcacggctaccatccccagcatttctgtgtgctgtgctgatgg

SEQ ID NO: 448123 - DNA, 60 bp, Artificial
  Synthetic oligonucleotide
taatatgtattggtgtactggagtcctatatatatggagactccaaatggcataattgta

SEQ ID NO: 448124 - DNA, 60 bp, Artificial
  Synthetic oligonucleotide
taatatgtcgtggttcgagttgaacggcctctctatgtggtcgactatcttgaaatagag

SEQ ID NO: 448125 - DNA, 59 bp, Artificial
  Synthetic oligonucleotide
taatatgtctgtatgacgttacccgtggtattgggcttactcatcgagttggcaagcgt

SEQ ID NO: 448126 - DNA, 55 bp, Artificial
  Synthetic oligonucleotide
taatattaatgaactgagttggggagctctcaaagtgtgggaaagtcggcccgaa

SEQ ID NO: 448127 - DNA, 54 bp, Artificial
  Synthetic oligonucleotide
taatattacagcgtcccctttggcgaggggcccatgctaaaccgggccccgagc

SEQ ID NO: 448128 - DNA, 58 bp, Artificial
  Synthetic oligonucleotide
taatattacagctcacactccatgcgaggggcccaagccccgagcggtccccgtttgc

SEQ ID NO: 448129 - DNA, 59 bp, Artificial
  Synthetic oligonucleotide
taatattacccgctcacaccccatgcgagccgcggctctgtgcggcgagcggtccccgt

SEQ ID NO: 448130 - DNA, 54 bp, Artificial
  Synthetic oligonucleotide
taatattaccgaaaggccgcgaaaattttgccccttatcttgaccgttgctgcg

SEQ ID NO: 448131 - DNA, 53 bp, Artificial
  Synthetic oligonucleotide
taatattaccgaatggcccgcgaaatttttaggtgggccctgaacgaatgaaa

SEQ ID NO: 448132 - DNA, 54 bp, Artificial
  Synthetic oligonucleotide
taatattaccgaatggccgcgcaaatttttaggtgggccctcaaccaatgaaat

SEQ ID NO: 448133 - DNA, 55 bp, Artificial
  Synthetic oligonucleotide
taatattaccgaatggccgcgcgatttttttatgtgggccctcgaccaatgaaat

SEQ ID NO: 448134 - DNA, 54 bp, Artificial
  Synthetic oligonucleotide
taatattaccgcatccccttttgcgagggccccaaaggcccgagcggtcctagc

SEQ ID NO: 448135 - DNA, 56 bp, Artificial
  Synthetic oligonucleotide
taatattaccgcgccttctttatctgcgagggcccgtagggaccgagcgtctttga

SEQ ID NO: 448136 - DNA, 53 bp, Artificial
  Synthetic oligonucleotide
taatattaccgcgccttcttttcctgcgagggcccggtagggcccgagtgatt

SEQ ID NO: 448137 - DNA, 59 bp, Artificial
  Synthetic oligonucleotide
taatattaccgctcacaccccatgcgagccacggccctgtgtggcgagcggtccccgga

SEQ ID NO: 448138 - DNA, 60 bp, Artificial
  Synthetic oligonucleotide
taatattaccgctcacaccccatgcgagccacggctctgtgtggcgagcggtcctactct

SEQ ID NO: 448139 - DNA, 54 bp, Artificial
  Synthetic oligonucleotide
taatattaccggaaggccgcgcaaatttttcctctccccacagtcgttgatttg

SEQ ID NO: 448140 - DNA, 54 bp, Artificial
  Synthetic oligonucleotide
taatattaccggatggcccccaaaaaatacgtggcccaatgaaaatatgccacg

SEQ ID NO: 448141 - DNA, 51 bp, Artificial
  Synthetic oligonucleotide
taatattaccggatggccgcgaaaaaataaagtggtccccccccacgtgat

SEQ ID NO: 448142 - DNA, 55 bp, Artificial
  Synthetic oligonucleotide
taatattaccggatggccgcgaaaaaataaagtggtccccctcacgtgaatgatg

SEQ ID NO: 448143 - DNA, 57 bp, Artificial
  Synthetic oligonucleotide
taatattaccggatggccgcgaattcttttgtgggccctcaacgcaataactgacaa

SEQ ID NO: 448144 - DNA, 55 bp, Artificial
  Synthetic oligonucleotide
taatattaccggatggccgcgattttttttaaagtggtccccttgatgtgatgtg

SEQ ID NO: 448145 - DNA, 52 bp, Artificial
  Synthetic oligonucleotide
taatattaccggatggccgcgattttttttaaggtgggccctccgcactagg

SEQ ID NO: 448146 - DNA, 56 bp, Artificial
  Synthetic oligonucleotide
taatattaccggatggccgcgattttttttcaagtggtcccaccactaacatctca

SEQ ID NO: 448147 - DNA, 54 bp, Artificial
  Synthetic oligonucleotide
taatattaccggatggccgcgcccgaaaaagcagggtgaccccacaatggcccc

SEQ ID NO: 448148 - DNA, 55 bp, Artificial
  Synthetic oligonucleotide
taatattaccggatggccgcgctacccgataaagaagtgggccctacgcagtaat

SEQ ID NO: 448149 - DNA, 59 bp, Artificial
  Synthetic oligonucleotide
taatattaccggatggccgcgctttggtgcccccctggtgctctctctcacgagcctta

SEQ ID NO: 448150 - DNA, 57 bp, Artificial
  Synthetic oligonucleotide
taatattaccggatggccgctttggtggacgcgtggacgttgtcgcagttgtgggtc

SEQ ID NO: 448151 - DNA, 52 bp, Artificial
  Synthetic oligonucleotide
taatattaccggtggcgagcggattttttgggggtttgtgtgggccccacaa

SEQ ID NO: 448152 - DNA, 50 bp, Artificial
  Synthetic oligonucleotide
taatattaccggttggccccgccccctttaaacgtgggtccgcgcactac

SEQ ID NO: 448153 - DNA, 53 bp, Artificial
  Synthetic oligonucleotide
taatattaccggttggccccgcccctctttaaatgtggtccccgcgcacttga

SEQ ID NO: 448154 - DNA, 60 bp, Artificial
  Synthetic oligonucleotide
taatattccggtattgtatattgaatgatccactaatgatcacagctgcaaacacttcct

SEQ ID NO: 448155 - DNA, 53 bp, Artificial
  Synthetic oligonucleotide
taatattcggaatatcaatgtcaagacattgtggaaggacactggaggtggca

SEQ ID NO: 448156 - DNA, 60 bp, Artificial
  Synthetic oligonucleotide
taatattgacaagagatggggggaaagataagaatgatactgagatcttcagacctggag

SEQ ID NO: 448157 - DNA, 55 bp, Artificial
  Synthetic oligonucleotide
taatattgccacgtgtccgtaacgaacaatccagctcaaagtgcacaggcatacg

SEQ ID NO: 448158 - DNA, 55 bp, Artificial
  Synthetic oligonucleotide
taatattgctagcaactgcagagaccctcctgtcgttaaaagtacggtatggtga

SEQ ID NO: 448159 - DNA, 55 bp, Artificial
  Synthetic oligonucleotide
taatattgttgaacccacttattctactacaccctttaccaccatacagtctatt

SEQ ID NO: 448160 - DNA, 57 bp, Artificial
  Synthetic oligonucleotide
taatatttactaaatgtttgatgcactatgtatttggaaatgcccaattggaggggt

SEQ ID NO: 448161 - DNA, 60 bp, Artificial
  Synthetic oligonucleotide
taatcaacagattcgtcagcaagactatgttgatgtgcagtttgcagatcgtgttacggc

SEQ ID NO: 448162 - DNA, 60 bp, Artificial
  Synthetic oligonucleotide
taatcaacagattcgtcatcaggattacgtcgatgtacagttcgcagatcgtgttactgc

SEQ ID NO: 448163 - DNA, 59 bp, Artificial
  Synthetic oligonucleotide
taatcaacatgaggaactatactgaatttggatcccttgagtcctgtaaattaatccga

SEQ ID NO: 448164 - DNA, 60 bp, Artificial
  Synthetic oligonucleotide
taatcaacatgattatgtcgttgggacctactaccttggtatagcctgtggcaaccaatc

SEQ ID NO: 448165 - DNA, 59 bp, Artificial
  Synthetic oligonucleotide
taatcaactacatggattccaagtaagacgaatggtgaccgaattctgtgataggttaa

SEQ ID NO: 448166 - DNA, 58 bp, Artificial
  Synthetic oligonucleotide
taatcaagatcaattctaggatcaaagctctagttatctttacgaagggtcataccgt

SEQ ID NO: 448167 - DNA, 57 bp, Artificial
  Synthetic oligonucleotide
taatcaagtcagggagaggcactgtctcacttccccgcctcagaaactttctttaac

SEQ ID NO: 448168 - DNA, 59 bp, Artificial
  Synthetic oligonucleotide
taatcaatgaataccataacgatttggactccccaacgtcagatatcctgaccaaggtg

SEQ ID NO: 448169 - DNA, 60 bp, Artificial
  Synthetic oligonucleotide
taatcaatggttggtatggattccaacataggaatgaagaaggtacagggattgctgcag

SEQ ID NO: 448170 - DNA, 52 bp, Artificial
  Synthetic oligonucleotide
taatcacaaaggacttgttgatagttgggggagtgtgtgttggtgcagcgtg

SEQ ID NO: 448171 - DNA, 55 bp, Artificial
  Synthetic oligonucleotide
taatcacaccgagcaatcaccgcagtatcgagctttcttggcgatggggctgcgg

SEQ ID NO: 448172 - DNA, 55 bp, Artificial
  Synthetic oligonucleotide
taatcacacggcatgtgtctcgtgcctgacaacctggatatcccaacggccctcg

SEQ ID NO: 448173 - DNA, 58 bp, Artificial
  Synthetic oligonucleotide
taatcacaggaccacaacagctggagaaaggacttagtaacctacatcgaattgtaac

SEQ ID NO: 448174 - DNA, 60 bp, Artificial
  Synthetic oligonucleotide
taatcacagggaacatgtcctttagagacctgggaagagtgatggttatggtgggcgcta

SEQ ID NO: 448175 - DNA, 60 bp, Artificial
  Synthetic oligonucleotide
taatcacagtaatgcgcgtaaacgacatgcacaaacgtctcacgcttcaacagcaaccgg

SEQ ID NO: 448176 - DNA, 60 bp, Artificial
  Synthetic oligonucleotide
taatcacgcagatagagtattcgctacatacaaaaataatgctaaaagcggtaatgtcac

SEQ ID NO: 448177 - DNA, 60 bp, Artificial
  Synthetic oligonucleotide
taatcacgctgggtcatctggatacgctacaagcacggggccgatggattaccgtggcat

SEQ ID NO: 448178 - DNA, 58 bp, Artificial
  Synthetic oligonucleotide
taatcacgtgattgttacgtcatcggcgccatcttatattacaaaatggcggctgact

SEQ ID NO: 448179 - DNA, 58 bp, Artificial
  Synthetic oligonucleotide
taatcactaaagaacttcctgtgtcagccaaaaacttaccttctatccatgtgtcgtc

SEQ ID NO: 448180 - DNA, 60 bp, Artificial
  Synthetic oligonucleotide
taatcactacctgctgggcactctgactcagatggtcagcgcgcctccttatattatcaa

SEQ ID NO: 448181 - DNA, 54 bp, Artificial
  Synthetic oligonucleotide
taatcagaaatatgggcatttatacctgtgctgtagctctgtctttcggtggtt

SEQ ID NO: 448182 - DNA, 53 bp, Artificial
  Synthetic oligonucleotide
taatcagaccgctcgcgacgagattaggagggcagtggtaaagaatattccat

SEQ ID NO: 448183 - DNA, 54 bp, Artificial
  Synthetic oligonucleotide
taatcagagagaaccagatgttacaacacagaatttctaatttgactggagttg

SEQ ID NO: 448184 - DNA, 60 bp, Artificial
  Synthetic oligonucleotide
taatcagagtctatttatacatttggaattgtcatgactttctgagtcatccctaatcat

SEQ ID NO: 448185 - DNA, 59 bp, Artificial
  Synthetic oligonucleotide
taatcagcgcactaataatatcgtggctgtgcagctattcagaccgctacaaggtttag

SEQ ID NO: 448186 - DNA, 60 bp, Artificial
  Synthetic oligonucleotide
taatcagcttagagggactattcaatgaaaacagactgtggagaaatatatggtcaaaaa

SEQ ID NO: 448187 - DNA, 59 bp, Artificial
  Synthetic oligonucleotide
taatcagttttgaaaatatgacagacaatgccaaaacaataatagtacaccttaatgaa

SEQ ID NO: 448188 - DNA, 60 bp, Artificial
  Synthetic oligonucleotide
taatcatacattaaccaaaagatattcaagattgccacatttggtgattcgaggtagaga

SEQ ID NO: 448189 - DNA, 50 bp, Artificial
  Synthetic oligonucleotide
taatcatacgatgggtgtttatcttcgtccaagtaccatttccatctacg

SEQ ID NO: 448190 - DNA, 52 bp, Artificial
  Synthetic oligonucleotide
taatcatagacaaaaagtgacgtaggggacattcgctacggtcgagagatcg

SEQ ID NO: 448191 - DNA, 60 bp, Artificial
  Synthetic oligonucleotide
taatcatagcgtccgtacatatatgagagataagaattccggcacaaggcttcggggtct

SEQ ID NO: 448192 - DNA, 60 bp, Artificial
  Synthetic oligonucleotide
taatcatatgtagaaatcatgatgatttggtcactgttactgccactttggcattgttag

SEQ ID NO: 448193 - DNA, 50 bp, Artificial
  Synthetic oligonucleotide
taatcatattggggctaagggccatcagagacttaactaggatatggtac

SEQ ID NO: 448194 - DNA, 55 bp, Artificial
  Synthetic oligonucleotide
taatcatcaccttgacgacacaggttacggggaaattgataactcgcaatctgaa

SEQ ID NO: 448195 - DNA, 60 bp, Artificial
  Synthetic oligonucleotide
taatcatcaggaggcagcgaagtatgacaatcatactgagaatgcgttgttgttgtatat

SEQ ID NO: 448196 - DNA, 60 bp, Artificial
  Synthetic oligonucleotide
taatcatgacaggactcatgcatttgtacttccgagatttgggagtccaggctgagctgt

SEQ ID NO: 448197 - DNA, 60 bp, Artificial
  Synthetic oligonucleotide
taatcatgggttagctctcattatagacccagatctcagagctgccgtgtcatttggttg

SEQ ID NO: 448198 - DNA, 60 bp, Artificial
  Synthetic oligonucleotide
taatcatgtttgcccccacactgtgggtgagaatgatactgttgacccacttcttcagtg

SEQ ID NO: 448199 - DNA, 60 bp, Artificial
  Synthetic oligonucleotide
taatcatttatactctggtaagcaccctataatgggagcttgccatggactcgtggcttt

SEQ ID NO: 448200 - DNA, 60 bp, Artificial
  Synthetic oligonucleotide
taatccaaaggttgcagacttcattaaatcgtggatattcggtgttaatttgtcagatga

SEQ ID NO: 448201 - DNA, 60 bp, Artificial
  Synthetic oligonucleotide
taatccaaatagatccaatggcgatgacacatactagtcagtatatatgtagccctgttc

SEQ ID NO: 448202 - DNA, 60 bp, Artificial
  Synthetic oligonucleotide
taatccaaatggttatgctaattgggatatagacataactggttacgcacaaatgcgcag

SEQ ID NO: 448203 - DNA, 59 bp, Artificial
  Synthetic oligonucleotide
taatccaacatgttgctagtcgtaatgagcaattgcgggatgggaccaactactttggg

SEQ ID NO: 448204 - DNA, 57 bp, Artificial
  Synthetic oligonucleotide
taatccaaccccacagccaatgcatgtaaaccaacatgtatttggtcgtaacgggta

SEQ ID NO: 448205 - DNA, 57 bp, Artificial
  Synthetic oligonucleotide
taatccaatctggatggttcgtacgcccttagaaagtacagcccaacagaattttgc

SEQ ID NO: 448206 - DNA, 60 bp, Artificial
  Synthetic oligonucleotide
taatccacaaccccgtcgacgcaacaacaaccgtcggcgtggcatgagagcggatgcacc

SEQ ID NO: 448207 - DNA, 54 bp, Artificial
  Synthetic oligonucleotide
taatccacgttgtcgattcatacggatcactgtccacagggtatcacatcctca

SEQ ID NO: 448208 - DNA, 53 bp, Artificial
  Synthetic oligonucleotide
taatccagtgtatgcaactttgaagatcagaatctacttctatgactctgtac

SEQ ID NO: 448209 - DNA, 57 bp, Artificial
  Synthetic oligonucleotide
taatccagtttcctcacgagcaacgctcgtaaactggaacattccgagagcgccacc

SEQ ID NO: 448210 - DNA, 55 bp, Artificial
  Synthetic oligonucleotide
taatccataccatcgtcaatagagtcatcggcggtttctactttatacattccac

SEQ ID NO: 448211 - DNA, 55 bp, Artificial
  Synthetic oligonucleotide
taatccatacttgcacatcctttaaatcaggtttaccccagtctaaatcgcctgc

SEQ ID NO: 448212 - DNA, 53 bp, Artificial
  Synthetic oligonucleotide
taatccattgtagcagccgtagactcctgtgctatatcatctacagtccagac

SEQ ID NO: 448213 - DNA, 60 bp, Artificial
  Synthetic oligonucleotide
taatcccaatgctctccgtgactatttccgtgatattggtcgtatggttctcactgccga

SEQ ID NO: 448214 - DNA, 59 bp, Artificial
  Synthetic oligonucleotide
taatccccaacatcgggtccagaccgtgggtcaggggtcaatcaggcaggataagcata

SEQ ID NO: 448215 - DNA, 53 bp, Artificial
  Synthetic oligonucleotide
taatcccccttcgatacaaaaaggtttctgactactttcttcaagctggccta

SEQ ID NO: 448216 - DNA, 57 bp, Artificial
  Synthetic oligonucleotide
taatcccgcacgttatattctgccaccccgaacagcttggggctttcctcactagag

SEQ ID NO: 448217 - DNA, 54 bp, Artificial
  Synthetic oligonucleotide
taatccctaccctggcgtcccggatagtccgaacgtcaagccgcctggcggtac

SEQ ID NO: 448218 - DNA, 57 bp, Artificial
  Synthetic oligonucleotide
taatccgcgataacgagtggacgccaatcgagtcgagcgaccttagctggggtccgg

SEQ ID NO: 448219 - DNA, 55 bp, Artificial
  Synthetic oligonucleotide
taatccgcgatctaatatcaatattgcgttctaggaattatgtcgaagcgtcctg

SEQ ID NO: 448220 - DNA, 54 bp, Artificial
  Synthetic oligonucleotide
taatccgctgaggtttttatatggtctgctggttacagaacccattccaatttc

SEQ ID NO: 448221 - DNA, 59 bp, Artificial
  Synthetic oligonucleotide
taatccgcttaggtttttgtatggtctactgcacaccgatgtctgtccaacctcggatc

SEQ ID NO: 448222 - DNA, 60 bp, Artificial
  Synthetic oligonucleotide
taatcctcacatgataactccattacaacgcgcggagcgattatattaccgttataaagc

SEQ ID NO: 448223 - DNA, 58 bp, Artificial
  Synthetic oligonucleotide
taatcctcctcatggattgccttcaactctgagatggttctttaacctttttcagctt

SEQ ID NO: 448224 - DNA, 55 bp, Artificial
  Synthetic oligonucleotide
taatcctgaaaagaagcgccgatttaggcgctgtgtacaatataccagttacgca

SEQ ID NO: 448225 - DNA, 60 bp, Artificial
  Synthetic oligonucleotide
taatcctgagcagctctctaagtacagtgaaaagatgcttttgggtgcttatgaatttct

SEQ ID NO: 448226 - DNA, 59 bp, Artificial
  Synthetic oligonucleotide
taatcctggcatcgctatggcaacacacaaagacgacgaggagcgtttttttcccagta

SEQ ID NO: 448227 - DNA, 60 bp, Artificial
  Synthetic oligonucleotide
taatcctggccctagcgcaccaacagtgagtaaaggtgctgatcagccagaagacgagga

SEQ ID NO: 448228 - DNA, 60 bp, Artificial
  Synthetic oligonucleotide
taatccttatggggtggcactttgtgttatgcaatggacaattcaatgacgcaatcaacc

SEQ ID NO: 448229 - DNA, 53 bp, Artificial
  Synthetic oligonucleotide
taatccttcgaacgcaatagctgtcaatgttagagcgcctttaaactatagcg

SEQ ID NO: 448230 - DNA, 60 bp, Artificial
  Synthetic oligonucleotide
taatccttgattctgtcaatatatttcatccttatcacagaatccaacctgctccaagta

SEQ ID NO: 448231 - DNA, 57 bp, Artificial
  Synthetic oligonucleotide
taatcctttcatcctttgtcggacttgcgtttcgtctccaaacgtcaaacagagcga

SEQ ID NO: 448232 - DNA, 54 bp, Artificial
  Synthetic oligonucleotide
taatcctttgacgtggttcaagaaggcacgatgaaatgataaggaactcgaatg

SEQ ID NO: 448233 - DNA, 59 bp, Artificial
  Synthetic oligonucleotide
taatcctttggcaaccctacatcctgcctaggcagctgcaaacgttccacacctaggtg

SEQ ID NO: 448234 - DNA, 55 bp, Artificial
  Synthetic oligonucleotide
taatcgaactgctcagactaatgatttcactgcatttgatcaatcccaagatgga

SEQ ID NO: 448235 - DNA, 57 bp, Artificial
  Synthetic oligonucleotide
taatcgactacattcggactggcgactctagactgttgaaagtcttcaaaaccgccg

SEQ ID NO: 448236 - DNA, 58 bp, Artificial
  Synthetic oligonucleotide
taatcgagcaaatggaagctttcatagagccaaagcctagtgtcttcaagtgttttgc

SEQ ID NO: 448237 - DNA, 55 bp, Artificial
  Synthetic oligonucleotide
taatcgcatatcaatgtcctcattacgatatcaatagtctccgaaagaattgcgc

SEQ ID NO: 448238 - DNA, 60 bp, Artificial
  Synthetic oligonucleotide
taatcgccaccgtgaagggtgaaagcgaaggtaagagcagcatgcgcattaacgaaatta

SEQ ID NO: 448239 - DNA, 57 bp, Artificial
  Synthetic oligonucleotide
taatcgccctcagccgggagaagtagttagagatacgtttgttgcggaaatctcggc

SEQ ID NO: 448240 - DNA, 53 bp, Artificial
  Synthetic oligonucleotide
taatcgccctggatggttgcacggcagtggagatggttctaggttcgatagtt

SEQ ID NO: 448241 - DNA, 60 bp, Artificial
  Synthetic oligonucleotide
taatcgcggaacagcatatgcctcagacggcgcgttcaactaccaggtggatggtaaacg

SEQ ID NO: 448242 - DNA, 55 bp, Artificial
  Synthetic oligonucleotide
taatcgcgttttgctgtagctaattcagtagatggaaggattaagcgtcaaacat

SEQ ID NO: 448243 - DNA, 60 bp, Artificial
  Synthetic oligonucleotide
taatcgctaaagttcacggtgtttccatcaataaagagtgcccatactcaatccatcacc

SEQ ID NO: 448244 - DNA, 57 bp, Artificial
  Synthetic oligonucleotide
taatcggaaagcaatacattgaaaagggattaagctcgccattggtcattggtttgg

SEQ ID NO: 448245 - DNA, 55 bp, Artificial
  Synthetic oligonucleotide
taatcggcgcaggtatggccactgctgtagcaaccggcagagcgatagaaggcgc

SEQ ID NO: 448246 - DNA, 52 bp, Artificial
  Synthetic oligonucleotide
taatcggcttataaaggcggttgaggggtcagatctcccgccttccgcacga

SEQ ID NO: 448247 - DNA, 54 bp, Artificial
  Synthetic oligonucleotide
taatcgggtattcaccagtgacatagtaccaagccagtaagtgtgcgcggtaag

SEQ ID NO: 448248 - DNA, 60 bp, Artificial
  Synthetic oligonucleotide
taatcggtaatacacttgtggagatagccaaaagttaggcatgatgagtgggcgtcctct

SEQ ID NO: 448249 - DNA, 60 bp, Artificial
  Synthetic oligonucleotide
taatcgtaaatcacaagaacatattgccagcatgcaagtcttgggtagcatggccaatac

SEQ ID NO: 448250 - DNA, 60 bp, Artificial
  Synthetic oligonucleotide
taatcgtaaggtagctactaagttgattattgcactacagcttggtcatggaccactcag

SEQ ID NO: 448251 - DNA, 57 bp, Artificial
  Synthetic oligonucleotide
taatcgtcaggatgaagcggattccaaggaagacaaaaggcaagtccagcggaaaag

SEQ ID NO: 448252 - DNA, 57 bp, Artificial
  Synthetic oligonucleotide
taatcgttctaccgctttcttatcgtacgctgtcttatagcacgaaccaaactgtag

SEQ ID NO: 448253 - DNA, 55 bp, Artificial
  Synthetic oligonucleotide
taatcgttctcggaagagaacataccaacatacactttagcgcccaccccagaac

SEQ ID NO: 448254 - DNA, 55 bp, Artificial
  Synthetic oligonucleotide
taatcgttctctttccaaactcaccatcaggcctactgggggcacattacaccaa

SEQ ID NO: 448255 - DNA, 60 bp, Artificial
  Synthetic oligonucleotide
taatctacccgaagtcatggataaagattcacagagtctgctatactctgactcttcaaa

SEQ ID NO: 448256 - DNA, 58 bp, Artificial
  Synthetic oligonucleotide
taatctagaaagatctttgacctccttgtccgaagtagtgttacagaatcgtagaggc

SEQ ID NO: 448257 - DNA, 50 bp, Artificial
  Synthetic oligonucleotide
taatctagcgatttacaaacagatctgttccgtttctgacgagatgcatt

SEQ ID NO: 448258 - DNA, 55 bp, Artificial
  Synthetic oligonucleotide
taatctcagaacttggtattgatgtgggtgatggatactcatgggtttcccagta

SEQ ID NO: 448259 - DNA, 57 bp, Artificial
  Synthetic oligonucleotide
taatctccgctttaaagctgacaaccaaaccttggcgctctttaaaatcacgcggca

SEQ ID NO: 448260 - DNA, 55 bp, Artificial
  Synthetic oligonucleotide
taatctcgcatacggtaagtttatgtttactgtataccccaagtttggaataagc

SEQ ID NO: 448261 - DNA, 59 bp, Artificial
  Synthetic oligonucleotide
taatctcgtccctcgtaatactccctgcatgtgaagccgacggacctgggtcgattgcc

SEQ ID NO: 448262 - DNA, 55 bp, Artificial
  Synthetic oligonucleotide
taatctcttcgggcacttcaatggacgacattgctcgtggattgttgcatcggga

SEQ ID NO: 448263 - DNA, 60 bp, Artificial
  Synthetic oligonucleotide
taatctgaatcaacatgtgtttgcaaggactaagagtgagggattgtcatggtctcttat

SEQ ID NO: 448264 - DNA, 59 bp, Artificial
  Synthetic oligonucleotide
taatctgagagtgtaaattctattggtcgagaaacggcgtctgcggaagtatgtacgtc

SEQ ID NO: 448265 - DNA, 59 bp, Artificial
  Synthetic oligonucleotide
taatctgggtcccaggcaacttcccaactgttacagagatagtatgtgtccccgtatga

SEQ ID NO: 448266 - DNA, 50 bp, Artificial
  Synthetic oligonucleotide
taatctgggtgcacgtgtatggtcccctaccgcagccgaccttgagggtt

SEQ ID NO: 448267 - DNA, 60 bp, Artificial
  Synthetic oligonucleotide
taatcttcgtcgatgaaaatcgatatgagcttgcaaaccttcacaggttttcaggcggtg

SEQ ID NO: 448268 - DNA, 50 bp, Artificial
  Synthetic oligonucleotide
taatcttgactcctgccggaatgccgcccggttcagtgaacaaacagcta

SEQ ID NO: 448269 - DNA, 55 bp, Artificial
  Synthetic oligonucleotide
taatcttggcccggtcggggttctcctttagcgcgcgttgcccgttctcgcttgc

SEQ ID NO: 448270 - DNA, 51 bp, Artificial
  Synthetic oligonucleotide
taatcttgtacgccagttttatattccctaccccttttgtaacttagaagt

SEQ ID NO: 448271 - DNA, 60 bp, Artificial
  Synthetic oligonucleotide
taatctttccctgatggtgatcccgatagtgggtataacagcaactagcggatctgcacc

SEQ ID NO: 448272 - DNA, 55 bp, Artificial
  Synthetic oligonucleotide
taatcttttcattgcttgtccaaatgactagtgtactgcaaggcattgtcaacac

SEQ ID NO: 448273 - DNA, 59 bp, Artificial
  Synthetic oligonucleotide
taatgaaatttggaacaacatgacctggatagaatgggagagggaaattgacaattaca

SEQ ID NO: 448274 - DNA, 50 bp, Artificial
  Synthetic oligonucleotide
taatgaacacccagcaagaatcccagggaactcaaacaacagaattagtg

SEQ ID NO: 448275 - DNA, 60 bp, Artificial
  Synthetic oligonucleotide
taatgaagcacgtctcatgccagctgaagtgatggctattatgaggtcggctctcattgt

SEQ ID NO: 448276 - DNA, 54 bp, Artificial
  Synthetic oligonucleotide
taatgaagctgctacgaactttgttaacaaagggacctcttcaccccaaacaaa

SEQ ID NO: 448277 - DNA, 60 bp, Artificial
  Synthetic oligonucleotide
taatgaagctggaactccaacacacatcctccagaggagcatcagcgcctctgttgggcg

SEQ ID NO: 448278 - DNA, 50 bp, Artificial
  Synthetic oligonucleotide
taatgaaggatcttacttcttcggagacaatgcagaggagtttgagaatt

SEQ ID NO: 448279 - DNA, 60 bp, Artificial
  Synthetic oligonucleotide
taatgaagtcgttggaatagcagacaaggcaacaaagtgtgtagataagtttcaagctca

SEQ ID NO: 448280 - DNA, 60 bp, Artificial
  Synthetic oligonucleotide
taatgaatgagcactttaacggtgctagcaccataaaagtgcgtaggaatggtggagatt

SEQ ID NO: 448281 - DNA, 60 bp, Artificial
  Synthetic oligonucleotide
taatgaatgccaattgctatgtgatccaccgaaacatagaagtactgcagcagctttgtt

SEQ ID NO: 448282 - DNA, 58 bp, Artificial
  Synthetic oligonucleotide
taatgaattaggtggtgctagtaatacaaatcaaggaaggtatggacaatcaaataat

SEQ ID NO: 448283 - DNA, 53 bp, Artificial
  Synthetic oligonucleotide
taatgaattcgtgtctggtgaacgacattaagattatcgacattgacgttcga

SEQ ID NO: 448284 - DNA, 59 bp, Artificial
  Synthetic oligonucleotide
taatgacaacaagcatcgaacgtttccaaccggtaagacaacggatgtttccatgatga

SEQ ID NO: 448285 - DNA, 60 bp, Artificial
  Synthetic oligonucleotide
taatgacacctttggaaatctatgccataatagcactggtagtagcgcttatcatagcaa

SEQ ID NO: 448286 - DNA, 59 bp, Artificial
  Synthetic oligonucleotide
taatgacagtgttttgaggtagaagcccgatgatgtaacttagaagtccaggttgggca

SEQ ID NO: 448287 - DNA, 57 bp, Artificial
  Synthetic oligonucleotide
taatgacgcaagtcactacttgggcctcacaaccccgtgaaaacgacgatggattgg

SEQ ID NO: 448288 - DNA, 60 bp, Artificial
  Synthetic oligonucleotide
taatgacggatggtcctgcgaacaatcaggctagttacaggattttcaagtctcataagg

SEQ ID NO: 448289 - DNA, 50 bp, Artificial
  Synthetic oligonucleotide
taatgactgatggaagtgcatcaggaagagccgatacaaggatactattc

SEQ ID NO: 448290 - DNA, 60 bp, Artificial
  Synthetic oligonucleotide
taatgacttcaactatagatggggcatggggttcaggagttggattcaatcttgtctgta

SEQ ID NO: 448291 - DNA, 60 bp, Artificial
  Synthetic oligonucleotide
taatgacttcagtgtgcgcttgttgcgagacactacacacatagagcaaaaagcgctagc

SEQ ID NO: 448292 - DNA, 54 bp, Artificial
  Synthetic oligonucleotide
taatgactttaataacagagaagacgtggttaaactagttaacaaccagaagaa

SEQ ID NO: 448293 - DNA, 52 bp, Artificial
  Synthetic oligonucleotide
taatgagaagaaagtagagtcaattattccgcggaataatttcgcgggaatt

SEQ ID NO: 448294 - DNA, 56 bp, Artificial
  Synthetic oligonucleotide
taatgagacaccaggggtaaggtatcagtacaatgtactaccccagggatggaaag

SEQ ID NO: 448295 - DNA, 60 bp, Artificial
  Synthetic oligonucleotide
taatgagacagtagtgagggaatacaacgagacagttaggatcgagaaggtaactcaatg

SEQ ID NO: 448296 - DNA, 60 bp, Artificial
  Synthetic oligonucleotide
taatgaggactcggcgtgaccgaatattggtgcagtgcatgcggaaagatcatccgcttc

SEQ ID NO: 448297 - DNA, 56 bp, Artificial
  Synthetic oligonucleotide
taatgaggcaccatatatgcaagatttagaacattgctttgcccaaacagcctata

SEQ ID NO: 448298 - DNA, 60 bp, Artificial
  Synthetic oligonucleotide
taatgagggcgcgatgatttcccaactcgcaccttctaccagtgaatttggacagtattg

SEQ ID NO: 448299 - DNA, 60 bp, Artificial
  Synthetic oligonucleotide
taatgagtggctttgtaatccaatggacataacgttgtattattatcaacagacggacga

SEQ ID NO: 448300 - DNA, 57 bp, Artificial
  Synthetic oligonucleotide
taatgagttacgagctcaaaatactttagcacttgtgaaaacgaggtatcgaacgtg

SEQ ID NO: 448301 - DNA, 60 bp, Artificial
  Synthetic oligonucleotide
taatgataaatgtcaggactgcaaagtagaaagacagaatatcgtcgccgttgaggttta

SEQ ID NO: 448302 - DNA, 51 bp, Artificial
  Synthetic oligonucleotide
taatgataccacctggtcaagtacagttgaatagaaaaccactggagctat

SEQ ID NO: 448303 - DNA, 51 bp, Artificial
  Synthetic oligonucleotide
taatgatactatcacactcccatgtaagataaaacagattgtgagaatgtg

SEQ ID NO: 448304 - DNA, 60 bp, Artificial
  Synthetic oligonucleotide
taatgatactttgtccgtaataggaggcattaaccataagtggattgatttacatatgca

SEQ ID NO: 448305 - DNA, 60 bp, Artificial
  Synthetic oligonucleotide
taatgatatgcgaaccaacccgtgtgctagtcacaaacctgcaggattcaatgctagcaa

SEQ ID NO: 448306 - DNA, 60 bp, Artificial
  Synthetic oligonucleotide
taatgatctagggaatggatgctttgaattttggcacaaatgtgacaatgaatgcataga

SEQ ID NO: 448307 - DNA, 52 bp, Artificial
  Synthetic oligonucleotide
taatgatcttgcggaacgttttgaaacttattactttgaccctagatgtgaa

SEQ ID NO: 448308 - DNA, 53 bp, Artificial
  Synthetic oligonucleotide
taatgatctttgatagggtcggagtgggaaccactggacctggtgaagcaaca

SEQ ID NO: 448309 - DNA, 60 bp, Artificial
  Synthetic oligonucleotide
taatgatgagcatctcatatccgtcgtagccgagatgtgctcctatcgttatcttaggaa

SEQ ID NO: 448310 - DNA, 55 bp, Artificial
  Synthetic oligonucleotide
taatgatggtaacatttgtcggttcagtgactcaatatgtttgccctgaatggat

SEQ ID NO: 448311 - DNA, 55 bp, Artificial
  Synthetic oligonucleotide
taatgattactgagagtggaattgaggtaacgcaaaaccgatgggaggagtggag

SEQ ID NO: 448312 - DNA, 60 bp, Artificial
  Synthetic oligonucleotide
taatgattctaagaatttattgtcaagaacggcaatgtttaatcccgatcatgcttatac

SEQ ID NO: 448313 - DNA, 60 bp, Artificial
  Synthetic oligonucleotide
taatgattgatcagagtctgattgatatcatagactcccacaccacactggagacatctg

SEQ ID NO: 448314 - DNA, 58 bp, Artificial
  Synthetic oligonucleotide
taatgcaaggtggtgaaggtgcgttgcttggaacgggaggaaaaagagcagaacagta

SEQ ID NO: 448315 - DNA, 60 bp, Artificial
  Synthetic oligonucleotide
taatgcaataaaggacaaagaggggaaaattgtaggcatcagatgcacattaggcatgtt

SEQ ID NO: 448316 - DNA, 56 bp, Artificial
  Synthetic oligonucleotide
taatgcacagttttaattgtggaggggaatttctctattgttattccacaggattg

SEQ ID NO: 448317 - DNA, 53 bp, Artificial
  Synthetic oligonucleotide
taatgcacgtaggcaagagaacataacaaaatcagctggtggagctatcatcc

SEQ ID NO: 448318 - DNA, 60 bp, Artificial
  Synthetic oligonucleotide
taatgcagcatcgcggattagtacagccattcaagctagtgatgatctgagaacagtagc

SEQ ID NO: 448319 - DNA, 60 bp, Artificial
  Synthetic oligonucleotide
taatgcagctagaggtttggagtggataggtaacaagatatctaaattcatagaatggat

SEQ ID NO: 448320 - DNA, 55 bp, Artificial
  Synthetic oligonucleotide
taatgcagtcgggagtgatatcagtggtcgtgtgaaacgcttgcgacctcgtttt

SEQ ID NO: 448321 - DNA, 60 bp, Artificial
  Synthetic oligonucleotide
taatgcagtttgggctaggaataatgtagctgatgtaactcgtatgtctttcgaagttaa

SEQ ID NO: 448322 - DNA, 55 bp, Artificial
  Synthetic oligonucleotide
taatgcatacgaaaccctaaagaatatcatagcattgccgactaacccttcttcc

SEQ ID NO: 448323 - DNA, 60 bp, Artificial
  Synthetic oligonucleotide
taatgcatatgtggtccccatatgtcttttcgtacatctattatgtgcgtatatggtccc

SEQ ID NO: 448324 - DNA, 60 bp, Artificial
  Synthetic oligonucleotide
taatgcatcattttagtgatgcagctgaagcgtatatagagtaccgaaactctacagagc

SEQ ID NO: 448325 - DNA, 60 bp, Artificial
  Synthetic oligonucleotide
taatgcatgtgctgtacctgaaccagtgtctatgcagaaagtacttacgggtattgggcg

SEQ ID NO: 448326 - DNA, 55 bp, Artificial
  Synthetic oligonucleotide
taatgcattggcgggaccggtgctcgacattccacgcatgaaaatatgataggac

SEQ ID NO: 448327 - DNA, 55 bp, Artificial
  Synthetic oligonucleotide
taatgccactccggtgaccgatgggcgctccgtcttggccacaaccatgccttct

SEQ ID NO: 448328 - DNA, 60 bp, Artificial
  Synthetic oligonucleotide
taatgccagacaaaatatccattccacccatagcatggagaggcaagtggtacccacaca

SEQ ID NO: 448329 - DNA, 60 bp, Artificial
  Synthetic oligonucleotide
taatgccatcaatgtcagctcttttaggtgttccttacgtccagggagcttttagacatg

SEQ ID NO: 448330 - DNA, 54 bp, Artificial
  Synthetic oligonucleotide
taatgccatccatagagcctcctgtaatgaactccatacggcctgacttatact

SEQ ID NO: 448331 - DNA, 55 bp, Artificial
  Synthetic oligonucleotide
taatgccccgactggaagtcgtggaggccgtcgtcaacccactgctcgttctcgg

SEQ ID NO: 448332 - DNA, 58 bp, Artificial
  Synthetic oligonucleotide
taatgccgcttctttcgagagagtgcatttcggatacgtgaggaaataatttttggct

SEQ ID NO: 448333 - DNA, 54 bp, Artificial
  Synthetic oligonucleotide
taatgccggtaagggtagatcattacgttcgtaccgtcgtcgtggacctgttcg

SEQ ID NO: 448334 - DNA, 57 bp, Artificial
  Synthetic oligonucleotide
taatgccgtcacgtggtaccgcacgtgaataggaaatctcgcgagaacgtaaacaaa

SEQ ID NO: 448335 - DNA, 55 bp, Artificial
  Synthetic oligonucleotide
taatgccgtcgctttctacaggggtgtggacgtgtcagtgatccctacagcgggg

SEQ ID NO: 448336 - DNA, 59 bp, Artificial
  Synthetic oligonucleotide
taatgcgaaacgttgcaccgcatgcttcgaccggatagaataagtaactataatgtttc

SEQ ID NO: 448337 - DNA, 60 bp, Artificial
  Synthetic oligonucleotide
taatgcgacgtagatagaacacccgcagtttatgtcaatcctcctcctgcgtggttgtct

SEQ ID NO: 448338 - DNA, 60 bp, Artificial
  Synthetic oligonucleotide
taatgcgcagttcagctatgagtcagtgcggaacacttgctcgctaaacgctcagcttag

SEQ ID NO: 448339 - DNA, 60 bp, Artificial
  Synthetic oligonucleotide
taatgcgctcgtagtggcgcaactgaaaggagacttcgtggcgttcctattcgtcttatg

SEQ ID NO: 448340 - DNA, 58 bp, Artificial
  Synthetic oligonucleotide
taatgcggaggtctgataagaataaaccttattattcagattaggccccaagaggcat

SEQ ID NO: 448341 - DNA, 55 bp, Artificial
  Synthetic oligonucleotide
taatgcggcagccttgattgcgggctgtgggctcaaacttaaggttgattaccgc

SEQ ID NO: 448342 - DNA, 56 bp, Artificial
  Synthetic oligonucleotide
taatgcgggatgataatcatcctgttcatgtaattgtgtttgcaaatgtactccca

SEQ ID NO: 448343 - DNA, 56 bp, Artificial
  Synthetic oligonucleotide
taatgcgggcgatattgggttcaacggttttggctggctttggattgacggtagtg

SEQ ID NO: 448344 - DNA, 58 bp, Artificial
  Synthetic oligonucleotide
taatgcggtattgcttaaactcggtggtattccaatgggaggtggacgctttcagatc

SEQ ID NO: 448345 - DNA, 58 bp, Artificial
  Synthetic oligonucleotide
taatgcgtatcggataacgtttgacacatcagttcctaggttggacaatctatttaaa

SEQ ID NO: 448346 - DNA, 51 bp, Artificial
  Synthetic oligonucleotide
taatgcgtccaaattccaccagggttgcctactggtcgtgtgcgtaccaga

SEQ ID NO: 448347 - DNA, 60 bp, Artificial
  Synthetic oligonucleotide
taatgcgtcctgaacttgttgcagtgttagatagatactttacagaagtcataagttgtt

SEQ ID NO: 448348 - DNA, 56 bp, Artificial
  Synthetic oligonucleotide
taatgcgtggatactcacgagaaacgagcctatgcatgtcacccaatgcattattc

SEQ ID NO: 448349 - DNA, 60 bp, Artificial
  Synthetic oligonucleotide
taatgctaaccctggagagacaggtggaacatttaagtcacagtacacacctggagcctc

SEQ ID NO: 448350 - DNA, 51 bp, Artificial
  Synthetic oligonucleotide
taatgctaagaagttcaatggaaaaggagaatgtacaaatgtcagcacagt

SEQ ID NO: 448351 - DNA, 60 bp, Artificial
  Synthetic oligonucleotide
taatgctaggaaatgtgatacatggacttgaatcatttacgtggttcattgttgttcgta

SEQ ID NO: 448352 - DNA, 54 bp, Artificial
  Synthetic oligonucleotide
taatgctcagaacaaatgcagtcccttactcgaacgtccacaactggttaaccg

SEQ ID NO: 448353 - DNA, 54 bp, Artificial
  Synthetic oligonucleotide
taatgctcgttcgtaagggttaagaggaggaccccaaggcatagggtgtgtaag

SEQ ID NO: 448354 - DNA, 55 bp, Artificial
  Synthetic oligonucleotide
taatgctgactgatcaggtatatatgcacagagatatgcttccggaacctcggct

SEQ ID NO: 448355 - DNA, 58 bp, Artificial
  Synthetic oligonucleotide
taatgctggatcagagattcaagtggctggatttgattattcatgtgctataaatgca

SEQ ID NO: 448356 - DNA, 58 bp, Artificial
  Synthetic oligonucleotide
taatgctgtccaagaaatcgtcttagatgcaatcgtatatgaagacgaacatccagta

SEQ ID NO: 448357 - DNA, 58 bp, Artificial
  Synthetic oligonucleotide
taatgcttacagccactttcacgacgggtttgcacgtgttcccattaaggacgaatca

SEQ ID NO: 448358 - DNA, 60 bp, Artificial
  Synthetic oligonucleotide
taatgcttattgactggctgatatagtgccaattccacagggtctgttggaggtccttca

SEQ ID NO: 448359 - DNA, 60 bp, Artificial
  Synthetic oligonucleotide
taatgcttcaaggctgcggtgtcaggaggtagaaaagagcccagggggatgtatgcaggg

SEQ ID NO: 448360 - DNA, 52 bp, Artificial
  Synthetic oligonucleotide
taatgcttgggttatatctgtgtatgcagttcatgatgatctgcttgaaagc

SEQ ID NO: 448361 - DNA, 58 bp, Artificial
  Synthetic oligonucleotide
taatggaaagaggctgagcaaaaggtcccaatgtaccaggacgccactgcgactgggg

SEQ ID NO: 448362 - DNA, 59 bp, Artificial
  Synthetic oligonucleotide
taatggaaatgccggattatctattacttaaagatatggctgtagagaataaaaattca

SEQ ID NO: 448363 - DNA, 55 bp, Artificial
  Synthetic oligonucleotide
taatggaagagagggaagtgcaagtttcatgccctatcatgctagtctggatcag

SEQ ID NO: 448364 - DNA, 55 bp, Artificial
  Synthetic oligonucleotide
taatggaatttagtacctttaaacagatggtgggatcaacacgtttattggatac

SEQ ID NO: 448365 - DNA, 60 bp, Artificial
  Synthetic oligonucleotide
taatggactaaggataaaggattatggacttatatgatgtgcccgacatggaattcggga

SEQ ID NO: 448366 - DNA, 55 bp, Artificial
  Synthetic oligonucleotide
taatggactcctgggccagcggcggacccgacgggaagttctcccaggctctaaa

SEQ ID NO: 448367 - DNA, 60 bp, Artificial
  Synthetic oligonucleotide
taatggacttggtacggatatagccatagctacagtgttaacagcgttgctaacctggac

SEQ ID NO: 448368 - DNA, 55 bp, Artificial
  Synthetic oligonucleotide
taatggagaagccggatcctattaacgtgttccaaaacaaggccaacgtgtgctg

SEQ ID NO: 448369 - DNA, 54 bp, Artificial
  Synthetic oligonucleotide
taatggagatcaatgttgcatcttagtggaaatgtccaggaagcttgtaatgat

SEQ ID NO: 448370 - DNA, 56 bp, Artificial
  Synthetic oligonucleotide
taatggagatcgacgttacatgctatagggaaagtgaaagcagcttgtgctgcttg

SEQ ID NO: 448371 - DNA, 60 bp, Artificial
  Synthetic oligonucleotide
taatggagatgatccctgaaagaaatgaacaaggacagaagctttggagtaagacaagtg

SEQ ID NO: 448372 - DNA, 56 bp, Artificial
  Synthetic oligonucleotide
taatggagcatacggggtgaaaggattttcatttaggtatggtaatggcgtttgga

SEQ ID NO: 448373 - DNA, 52 bp, Artificial
  Synthetic oligonucleotide
taatggagtactgtgtggaacagggttggatgggaaaggcacactccaccat

SEQ ID NO: 448374 - DNA, 54 bp, Artificial
  Synthetic oligonucleotide
taatggagttcctgaatgtatgccgattggaagatgtcgttatgtctggcaatg

SEQ ID NO: 448375 - DNA, 52 bp, Artificial
  Synthetic oligonucleotide
taatggatccagcgattctgacatccctatcatctaatttaaatgcagttat

SEQ ID NO: 448376 - DNA, 57 bp, Artificial
  Synthetic oligonucleotide
taatggatcctttacctctcctcctatgctcttcttataagtcactcaaccggtgaa

SEQ ID NO: 448377 - DNA, 60 bp, Artificial
  Synthetic oligonucleotide
taatggatgtgatctctaggagagatcagagaggatctggtcaagttgtaacatatgcac

SEQ ID NO: 448378 - DNA, 60 bp, Artificial
  Synthetic oligonucleotide
taatggatgttacttcctcttcagtgctgtcaccttcttgtaaagccttgatgcagtgtc

SEQ ID NO: 448379 - DNA, 55 bp, Artificial
  Synthetic oligonucleotide
taatggatgttgagatccctttctttcacataacgaagtgtgacggtttcatgag

SEQ ID NO: 448380 - DNA, 52 bp, Artificial
  Synthetic oligonucleotide
taatggattcgacgtttacactgttcgacaccacaccttttgcgagattaat

SEQ ID NO: 448381 - DNA, 59 bp, Artificial
  Synthetic oligonucleotide
taatggcaaaattttaatggatgtttccatgcactcaacgatcggaatcaaacctgctt

SEQ ID NO: 448382 - DNA, 60 bp, Artificial
  Synthetic oligonucleotide
taatggcaacatcgctgttatccctgaaaccgtgaagccgcaaacgttatggacgactgc

SEQ ID NO: 448383 - DNA, 55 bp, Artificial
  Synthetic oligonucleotide
taatggcaatatggtaatttggttaagagcattttactttaattcgaaattggaa

SEQ ID NO: 448384 - DNA, 59 bp, Artificial
  Synthetic oligonucleotide
taatggcaggtccaatggcttggtacagcatggcccttagtaatacaaagggggataca

SEQ ID NO: 448385 - DNA, 60 bp, Artificial
  Synthetic oligonucleotide
taatggcgagcgtggcagcaatggcgagccattctaatcctagattaactatagatctca

SEQ ID NO: 448386 - DNA, 53 bp, Artificial
  Synthetic oligonucleotide
taatggcggggaccactaaagtatcccgctcttctaatttttcacctcgggga

SEQ ID NO: 448387 - DNA, 55 bp, Artificial
  Synthetic oligonucleotide
taatggcggggaccactaaagtgtcccgctcttccaattattcacctcgtggagg

SEQ ID NO: 448388 - DNA, 55 bp, Artificial
  Synthetic oligonucleotide
taatggcggggacctccaaggtttcccgctctgctaactattcgcctcgtggagg

SEQ ID NO: 448389 - DNA, 57 bp, Artificial
  Synthetic oligonucleotide
taatggctaacttcctgccgaaggaaggaatcttttctgaagatcgaataaagctag

SEQ ID NO: 448390 - DNA, 55 bp, Artificial
  Synthetic oligonucleotide
taatggctagtgcaagcgttaaagggagcatggcaggtactgcacttagaggtgg

SEQ ID NO: 448391 - DNA, 54 bp, Artificial
  Synthetic oligonucleotide
taatgggagtaccgaaacgattagttccgaccaggagactgtgtcaccaaaaat

SEQ ID NO: 448392 - DNA, 57 bp, Artificial
  Synthetic oligonucleotide
taatgggcaatttaagcgtaaattgcgtccatataatagaggtctaaatacgtatcg

SEQ ID NO: 448393 - DNA, 59 bp, Artificial
  Synthetic oligonucleotide
taatgggcagtttccctcgagtggacatgtccggctggaatggtagtagctaaatgacc

SEQ ID NO: 448394 - DNA, 59 bp, Artificial
  Synthetic oligonucleotide
taatgggcctaactttactagtgccacagttaaggctgcctgttggtggctcaatgtaa

SEQ ID NO: 448395 - DNA, 55 bp, Artificial
  Synthetic oligonucleotide
taatgggcgggttgaaccttatataacaatggcgcaattccaacaattgctgtcg

SEQ ID NO: 448396 - DNA, 57 bp, Artificial
  Synthetic oligonucleotide
taatgggctcggcgcgagattcctctacagttttctgaaggatttcgtgggacctcg

SEQ ID NO: 448397 - DNA, 60 bp, Artificial
  Synthetic oligonucleotide
taatggggaggacgcaactgctggtctaacccatctaatgatatggcattccaacctcaa

SEQ ID NO: 448398 - DNA, 60 bp, Artificial
  Synthetic oligonucleotide
taatggggatctatggtatgtcacaagtggtattccttcgggattccctctgactgtcat

SEQ ID NO: 448399 - DNA, 60 bp, Artificial
  Synthetic oligonucleotide
taatgggggctaatgacgtaagtgaattagaatcacaagcacagctgatgataacatatg

SEQ ID NO: 448400 - DNA, 56 bp, Artificial
  Synthetic oligonucleotide
taatgggggctctgccatccaaagatctgataggttcacgtaatacagacgttaaa

SEQ ID NO: 448401 - DNA, 59 bp, Artificial
  Synthetic oligonucleotide
taatgggtatgcaattgggccttcttgttgggctctatcaatttaggtctacacagtac

SEQ ID NO: 448402 - DNA, 58 bp, Artificial
  Synthetic oligonucleotide
taatgggtgcgtaccagccaagtaagctgaataaggaggcatttacaaaggacttgta

SEQ ID NO: 448403 - DNA, 56 bp, Artificial
  Synthetic oligonucleotide
taatgggtttactagaatcgatgctgctaatggccccctaatggcttttccccaac

SEQ ID NO: 448404 - DNA, 60 bp, Artificial
  Synthetic oligonucleotide
taatggtaataggaatggccatgacaacggtgctttcaattccacatgaccttatggaac

SEQ ID NO: 448405 - DNA, 60 bp, Artificial
  Synthetic oligonucleotide
taatggtagtagtaccatagaggatggagacatgagaaactgctctttcaatatttccac

SEQ ID NO: 448406 - DNA, 55 bp, Artificial
  Synthetic oligonucleotide
taatggtagttggcatatcaacaggacagcactcaattgtaatgactctctccac

SEQ ID NO: 448407 - DNA, 52 bp, Artificial
  Synthetic oligonucleotide
taatggtatccagcatgctatgtaccttagaggggttaacagaagcttggac

SEQ ID NO: 448408 - DNA, 60 bp, Artificial
  Synthetic oligonucleotide
taatggtgctgactctgtcaccgtattacaagcactatgtcagctggtgcttatggtggc

SEQ ID NO: 448409 - DNA, 50 bp, Artificial
  Synthetic oligonucleotide
taatggtggcgtgctctctgccaaataccgggggcatgacgcttaggctc

SEQ ID NO: 448410 - DNA, 60 bp, Artificial
  Synthetic oligonucleotide
taatggttgggcgacgattgatgttgagtatagagagcccgcgccttacgtgcacgctca

SEQ ID NO: 448411 - DNA, 55 bp, Artificial
  Synthetic oligonucleotide
taatggttggtatcaactatgtgttaagatacaacgcgctatcgataacggattg

SEQ ID NO: 448412 - DNA, 57 bp, Artificial
  Synthetic oligonucleotide
taatggtttaggtattggatacgcgatttgggcctgtcatcgaagttctcgttatat

SEQ ID NO: 448413 - DNA, 60 bp, Artificial
  Synthetic oligonucleotide
taatgtaaatctatgttacatctaattgggaatgtccatgaggcctgtaatgactcgttg

SEQ ID NO: 448414 - DNA, 60 bp, Artificial
  Synthetic oligonucleotide
taatgtacaaccagaagataccattgagactcgatatgtacaaacctcacaaactagaga

SEQ ID NO: 448415 - DNA, 57 bp, Artificial
  Synthetic oligonucleotide
taatgtaccacaattaaaggacatagtgttggagttaacaccacaacctgaaattga

SEQ ID NO: 448416 - DNA, 50 bp, Artificial
  Synthetic oligonucleotide
taatgtaccgtatttgcagcgactaatacttaatatagcttaactggaga

SEQ ID NO: 448417 - DNA, 60 bp, Artificial
  Synthetic oligonucleotide
taatgtacttcacaccagcacaagtgctggatctgttcatcaaggcgcctcatcttcagc

SEQ ID NO: 448418 - DNA, 60 bp, Artificial
  Synthetic oligonucleotide
taatgtagaatgtgaattgcgcctctatgtcatactgcgcgttcactcctgttgtgttgt

SEQ ID NO: 448419 - DNA, 55 bp, Artificial
  Synthetic oligonucleotide
taatgtattcgaccagtacgggcgggcctgcaagtattgcggccaatgcgcttac

SEQ ID NO: 448420 - DNA, 58 bp, Artificial
  Synthetic oligonucleotide
taatgtcacagaccgtgatatggaaaaacgacactcaatactttggtaataccgtcga

SEQ ID NO: 448421 - DNA, 60 bp, Artificial
  Synthetic oligonucleotide
taatgtccaatacgttatacaatgcataggatcgaggacgtatcaaatagaagatagtgg

SEQ ID NO: 448422 - DNA, 55 bp, Artificial
  Synthetic oligonucleotide
taatgtcccactacctggagtaacgtaaaggttcttaaacatcaatatagactta

SEQ ID NO: 448423 - DNA, 56 bp, Artificial
  Synthetic oligonucleotide
taatgtcccagatttttacgactccaccccttctgttcagcccgggtctctggata

SEQ ID NO: 448424 - DNA, 55 bp, Artificial
  Synthetic oligonucleotide
taatgtcgaacggttgctgaagttgcttggtgaggtgcacggtgtctacgaccgt

SEQ ID NO: 448425 - DNA, 59 bp, Artificial
  Synthetic oligonucleotide
taatgtcggacggtgttaacacagcacgtctcgacgttgttgctccggcgtactatgcg

SEQ ID NO: 448426 - DNA, 54 bp, Artificial
  Synthetic oligonucleotide
taatgtcgggttggtcttaggggctttccacgaatctataatctcccaaggaac

SEQ ID NO: 448427 - DNA, 55 bp, Artificial
  Synthetic oligonucleotide
taatgtcggtacgtttccatcaattgctacaccaaaatgttttgtcatgagcggt

SEQ ID NO: 448428 - DNA, 60 bp, Artificial
  Synthetic oligonucleotide
taatgtctagtctacccctgaacactcctatataaggagaagtagtctgcatgtaatagg

SEQ ID NO: 448429 - DNA, 60 bp, Artificial
  Synthetic oligonucleotide
taatgtctcctttcaaaccaataaataatgactcattcaacctctcatcataatctaggg

SEQ ID NO: 448430 - DNA, 59 bp, Artificial
  Synthetic oligonucleotide
taatgtgagcaagttagtgaattgggttagatgtgaagctatgatgctagcacaaagag

SEQ ID NO: 448431 - DNA, 55 bp, Artificial
  Synthetic oligonucleotide
taatgtgattgtcagccgtgatctttccttccaggatttgagtgaaacaccatgt

SEQ ID NO: 448432 - DNA, 56 bp, Artificial
  Synthetic oligonucleotide
taatgtgcaggaagcccaaagggatgcacgggaaatgcatgttttaaaacgaaagt

SEQ ID NO: 448433 - DNA, 60 bp, Artificial
  Synthetic oligonucleotide
taatgtggaggttgagtttctattgaatggacagacaattaatacatatcaagcacgatt

SEQ ID NO: 448434 - DNA, 50 bp, Artificial
  Synthetic oligonucleotide
taatgtggcaactggtgcacagggggtctctcgctccctggattggtcta

SEQ ID NO: 448435 - DNA, 50 bp, Artificial
  Synthetic oligonucleotide
taatgtggggccccgagtccctataggacccaacccggtattacccgacc

SEQ ID NO: 448436 - DNA, 55 bp, Artificial
  Synthetic oligonucleotide
taatgtggtccattgtttggtgataaggttttggatgtgacattggggtgtgtct

SEQ ID NO: 448437 - DNA, 60 bp, Artificial
  Synthetic oligonucleotide
taatgtggtccccgcgcactacttatgtcggccaatcatgatgtagctttaaaggttatg

SEQ ID NO: 448438 - DNA, 52 bp, Artificial
  Synthetic oligonucleotide
taatgtgtccaaccgattgctttcgtaagcatccggatgctacctacgcaaa

SEQ ID NO: 448439 - DNA, 60 bp, Artificial
  Synthetic oligonucleotide
taatgtgtctatgtctttcatttggcagtctgccccagacattgggagaaagttagagag

SEQ ID NO: 448440 - DNA, 56 bp, Artificial
  Synthetic oligonucleotide
taatgtgtgattctcaactgactttaaacgacctatcatattggcgacagtggact

SEQ ID NO: 448441 - DNA, 60 bp, Artificial
  Synthetic oligonucleotide
taatgtgtgtgtgcagagataattggcatggctccaatcgaccatgggtgtctttcaatc

SEQ ID NO: 448442 - DNA, 58 bp, Artificial
  Synthetic oligonucleotide
taatgtgttgtgcgatttacccagttcactgaaagtagaactttggatatccttctcg

SEQ ID NO: 448443 - DNA, 60 bp, Artificial
  Synthetic oligonucleotide
taatgttaacaacatcagcagctagctttgatcaattctggctacctaacgatgaaatta

SEQ ID NO: 448444 - DNA, 58 bp, Artificial
  Synthetic oligonucleotide
taatgttatagaagatagccgggacaatatatctgttgattgtaaacaaacccagtta

SEQ ID NO: 448445 - DNA, 59 bp, Artificial
  Synthetic oligonucleotide
taatgttatcttgtccgcagctattctacaatgtaaatcattaggttatttgcctagag

SEQ ID NO: 448446 - DNA, 60 bp, Artificial
  Synthetic oligonucleotide
taatgttatgttctctacctcgtttgtgtaacatccctatcaatggatctcacggctttg

SEQ ID NO: 448447 - DNA, 60 bp, Artificial
  Synthetic oligonucleotide
taatgttcgactgcgaccgttgtattccaactattgatgctgaatcgcctgggtctaata

SEQ ID NO: 448448 - DNA, 59 bp, Artificial
  Synthetic oligonucleotide
taatgttgaaggttgtcacaacatgtttattacacgtgatgaggcaatccgtaacgtaa

SEQ ID NO: 448449 - DNA, 59 bp, Artificial
  Synthetic oligonucleotide
taatgttgaatcattgtgtatttactttccaaacgctgcaataggttcaccaggtccag

SEQ ID NO: 448450 - DNA, 60 bp, Artificial
  Synthetic oligonucleotide
taatgttgacggtgaagactgtctgagagcttctatggatgtcatgactaagtgtcttga

SEQ ID NO: 448451 - DNA, 60 bp, Artificial
  Synthetic oligonucleotide
taatgttgagtcaaactccaatagttcgtgattctagtgttatggttggattgctgcaag

SEQ ID NO: 448452 - DNA, 57 bp, Artificial
  Synthetic oligonucleotide
taatgttggctatgtaacctgtttcatgcagaccaacctgatagtccccagtgagtc

SEQ ID NO: 448453 - DNA, 54 bp, Artificial
  Synthetic oligonucleotide
taatgtttcagcgtttttgcgagatatggtagatcctattagttttttgtggac

SEQ ID NO: 448454 - DNA, 53 bp, Artificial
  Synthetic oligonucleotide
taatgtttccgggttttccaaatggatcattttacccgaataggatccgcgtg

SEQ ID NO: 448455 - DNA, 54 bp, Artificial
  Synthetic oligonucleotide
taatgttttagcgttatccattcaggcggtaaaaaatgactctaattcaaaagt

SEQ ID NO: 448456 - DNA, 54 bp, Artificial
  Synthetic oligonucleotide
taattaaaaaccatgtagtcctggaaaaagcccaactaaatacacggcccatga

SEQ ID NO: 448457 - DNA, 60 bp, Artificial
  Synthetic oligonucleotide
taattaaaggcatttggaggatttgctaactgagactccatatatcaaagaaatgcccgc

SEQ ID NO: 448458 - DNA, 56 bp, Artificial
  Synthetic oligonucleotide
taattaacaggtttacatctgcagaggtcgcggttaaaacgtgcaacttagttatc

SEQ ID NO: 448459 - DNA, 55 bp, Artificial
  Synthetic oligonucleotide
taattaacgccccatctaagaccaaattggaacccagtgcattccactacgtatt

SEQ ID NO: 448460 - DNA, 56 bp, Artificial
  Synthetic oligonucleotide
taattaaggcccaagttgacacccagaccagtcacccgaggaccatcgaagcctta

SEQ ID NO: 448461 - DNA, 60 bp, Artificial
  Synthetic oligonucleotide
taattaaggtgccgtacttcgtacgtgcacaagggctcattcgtgcatgcatgttggtgc

SEQ ID NO: 448462 - DNA, 51 bp, Artificial
  Synthetic oligonucleotide
taattaagtgttggtcggtaattagagttatcaccaaaccctaacctcggt

SEQ ID NO: 448463 - DNA, 58 bp, Artificial
  Synthetic oligonucleotide
taattaattgtatacatgtagttgttatgtctaattttctcccagatttcgagaagat

SEQ ID NO: 448464 - DNA, 60 bp, Artificial
  Synthetic oligonucleotide
taattacaaaaatgctgcaatcaacttggctcttagtgatctagtaagaatggggaagtc

SEQ ID NO: 448465 - DNA, 55 bp, Artificial
  Synthetic oligonucleotide
taattacaagccagccgccgcaggtaagactctagtactaccctatgacagatta

SEQ ID NO: 448466 - DNA, 58 bp, Artificial
  Synthetic oligonucleotide
taattacattgttcaatgaaattacacctaattgatctaaatacacgataactaaatg

SEQ ID NO: 448467 - DNA, 57 bp, Artificial
  Synthetic oligonucleotide
taattaccttctggagttttcgtcgatgtatggcaccgcgctaggcacgaattttta

SEQ ID NO: 448468 - DNA, 54 bp, Artificial
  Synthetic oligonucleotide
taattacgcgctaaacaccatagctgcgtataaaagtatacccctaaacttggg

SEQ ID NO: 448469 - DNA, 60 bp, Artificial
  Synthetic oligonucleotide
taattacgggcaactagccatgtcaaatcaagacatatcaatccatctgcattcaccgta

SEQ ID NO: 448470 - DNA, 55 bp, Artificial
  Synthetic oligonucleotide
taattacgggcgatgactctgaagatagcttactggcatatgctagaactgtcca

SEQ ID NO: 448471 - DNA, 55 bp, Artificial
  Synthetic oligonucleotide
taattacgtatgtactttaagtgtgaaccagtctgcaggatacagggttggaccc

SEQ ID NO: 448472 - DNA, 60 bp, Artificial
  Synthetic oligonucleotide
taattacgtcttttggcgtaatagcactgttatgcaattgtctagttatagtctgtatga

SEQ ID NO: 448473 - DNA, 57 bp, Artificial
  Synthetic oligonucleotide
taattacgttttagcctccaccaactccagtcggatcacaccacccacggtggctca

SEQ ID NO: 448474 - DNA, 58 bp, Artificial
  Synthetic oligonucleotide
taattactaagtatactcactggttggacacctttctaagctgttctgtttccatcaa

SEQ ID NO: 448475 - DNA, 57 bp, Artificial
  Synthetic oligonucleotide
taattactatagacagctcccccctctaaatcccccacagtccagagagttagcaag

SEQ ID NO: 448476 - DNA, 55 bp, Artificial
  Synthetic oligonucleotide
taattactcgaggttgtcaggatataggaaaatcataccaagtcttacaggtagg

SEQ ID NO: 448477 - DNA, 54 bp, Artificial
  Synthetic oligonucleotide
taattactgcgatgatggaccataaccctttaggtgactacggaaataccagcg

SEQ ID NO: 448478 - DNA, 59 bp, Artificial
  Synthetic oligonucleotide
taattacttactcacaataccacaagccctactccctgtatgtattccctcattggata

SEQ ID NO: 448479 - DNA, 58 bp, Artificial
  Synthetic oligonucleotide
taattaggaagttttatcgtgttaataatcatgttgtgtacaatcaccaagaagctgg

SEQ ID NO: 448480 - DNA, 55 bp, Artificial
  Synthetic oligonucleotide
taattaggaccttaacgctttagcgttcaggggttcgtaaacatctcagtgtgtg

SEQ ID NO: 448481 - DNA, 59 bp, Artificial
  Synthetic oligonucleotide
taattagggatttaatctcagttattagggctagaaattatgtcgaagcgaccagcaga

SEQ ID NO: 448482 - DNA, 54 bp, Artificial
  Synthetic oligonucleotide
taattagggtggggtggcgacggtgtattgtggaaagttcgtggacgttggatc

SEQ ID NO: 448483 - DNA, 56 bp, Artificial
  Synthetic oligonucleotide
taattataccccccctgtcaataaagaagttcatcgatggtatgaggcaggatggg

SEQ ID NO: 448484 - DNA, 60 bp, Artificial
  Synthetic oligonucleotide
taattatacgaggttgctctatgttcacaaacaagtatatgatgatgaacatgagatata

SEQ ID NO: 448485 - DNA, 58 bp, Artificial
  Synthetic oligonucleotide
taattatataaggatatttgaccgcatgcctcctggctttcagccgtcaaaacacctt

SEQ ID NO: 448486 - DNA, 60 bp, Artificial
  Synthetic oligonucleotide
taattatatcttgacccttaacacagctaaacatgggttcgcaggtgtctacacagcgct

SEQ ID NO: 448487 - DNA, 60 bp, Artificial
  Synthetic oligonucleotide
taattatggtatcactcgtacacaagcactagatctaattagatcagacccaaaagtgtt

SEQ ID NO: 448488 - DNA, 60 bp, Artificial
  Synthetic oligonucleotide
taattatgtcgtttataatcaacaagaggccggcaagtatgagaatcatactgaaaacgc

SEQ ID NO: 448489 - DNA, 50 bp, Artificial
  Synthetic oligonucleotide
taattatttgaatccggttttaactacgggtagtgggtcaaaaaagctag

SEQ ID NO: 448490 - DNA, 60 bp, Artificial
  Synthetic oligonucleotide
taattcaaaacccatcgatcgtgagctcagcttccagtgccttactaggcacagacgttc

SEQ ID NO: 448491 - DNA, 58 bp, Artificial
  Synthetic oligonucleotide
taattcaaattgcactgacaacgtttctttttattgatcggccaagatcaatcggtaa

SEQ ID NO: 448492 - DNA, 60 bp, Artificial
  Synthetic oligonucleotide
taattcaaccaccaaaattgcgaagtagtgttgcagcactatattggtatagaacaggaa

SEQ ID NO: 448493 - DNA, 55 bp, Artificial
  Synthetic oligonucleotide
taattcaactacaattacgtacgctatatcttcaagcggaacagttaccccaacg

SEQ ID NO: 448494 - DNA, 60 bp, Artificial
  Synthetic oligonucleotide
taattcaagttcccttgcagccagttcatagacactgggaatgtgttagtctccagatta

SEQ ID NO: 448495 - DNA, 55 bp, Artificial
  Synthetic oligonucleotide
taattcacataagaaattcatacccttacggtccaaaaagcggccatccgtataa

SEQ ID NO: 448496 - DNA, 59 bp, Artificial
  Synthetic oligonucleotide
taattcacgctggtattatgacgtacaagattatcggcgtacctgggatgtgcccaccc

SEQ ID NO: 448497 - DNA, 55 bp, Artificial
  Synthetic oligonucleotide
taattcagaccattaaactgtgtaaagataactgtgttctgtgtttccagcgtaa

SEQ ID NO: 448498 - DNA, 58 bp, Artificial
  Synthetic oligonucleotide
taattcagagagcagacaatactctctatttggagtaaacaagcaaattaccgtagtt

SEQ ID NO: 448499 - DNA, 60 bp, Artificial
  Synthetic oligonucleotide
taattcagataccagagggctttggtgacattcagatcgactgtccaggagggacacagc

SEQ ID NO: 448500 - DNA, 57 bp, Artificial
  Synthetic oligonucleotide
taattcaggatggtgatatggttgatacaggctttggagccatggattttgcacaat

SEQ ID NO: 448501 - DNA, 56 bp, Artificial
  Synthetic oligonucleotide
taattcatggaaagatacgctttctcaactgtttttgactaaagggtggccaacag

SEQ ID NO: 448502 - DNA, 54 bp, Artificial
  Synthetic oligonucleotide
taattcattacccagaatcacgccaaggtattttggaaccccaggtagctcggt

SEQ ID NO: 448503 - DNA, 56 bp, Artificial
  Synthetic oligonucleotide
taattcccatgataagcaagtgtagaactaaagagggaagacgaaagaccaatttg

SEQ ID NO: 448504 - DNA, 60 bp, Artificial
  Synthetic oligonucleotide
taattcctgtgtgcgatgtggattcacacctcgacgtattgtagatcaatacatttggaa

SEQ ID NO: 448505 - DNA, 57 bp, Artificial
  Synthetic oligonucleotide
taattcgaagtccggtgagaatggctgaggaaaatccgtctgtcttccgacgagtta

SEQ ID NO: 448506 - DNA, 60 bp, Artificial
  Synthetic oligonucleotide
taattcgatctcttctatgtttgccccgtagtatgcgaataggaaattcgctatgatatt

SEQ ID NO: 448507 - DNA, 56 bp, Artificial
  Synthetic oligonucleotide
taattcggcccctgtgttgagccccttgttgaagtgccttcccccattgtgacgtg

SEQ ID NO: 448508 - DNA, 58 bp, Artificial
  Synthetic oligonucleotide
taattcggtccgatcgtgtatgttgccatcgacggtacttgacacgtatccaccgccg

SEQ ID NO: 448509 - DNA, 55 bp, Artificial
  Synthetic oligonucleotide
taattcgtaaatcggatgtcactgaaaatcctacggcaaaccccttatgtttcac

SEQ ID NO: 448510 - DNA, 60 bp, Artificial
  Synthetic oligonucleotide
taattcgtgcgcgcctttgtcacacagtaccatcgtataagggttcagtcagttttatga

SEQ ID NO: 448511 - DNA, 56 bp, Artificial
  Synthetic oligonucleotide
taattcgttacaaatgcgccacttaaggcgttccaaaataccagtccaactgtgaa

SEQ ID NO: 448512 - DNA, 60 bp, Artificial
  Synthetic oligonucleotide
taattcgttatcgatttgagagtgggtatgacaaagcaagaatagaaagcgcttatgtga

SEQ ID NO: 448513 - DNA, 59 bp, Artificial
  Synthetic oligonucleotide
taattctaggcaagggggacaaaagatatggaccagcattgagcatcagtgagctgagc

SEQ ID NO: 448514 - DNA, 55 bp, Artificial
  Synthetic oligonucleotide
taattctcagccgcagaacaagcaattacagatgctcagatttggcatgttatgc

SEQ ID NO: 448515 - DNA, 59 bp, Artificial
  Synthetic oligonucleotide
taattctccgataggggcagcacgtttcttggtgggtacagagtataaccagtccagca

SEQ ID NO: 448516 - DNA, 60 bp, Artificial
  Synthetic oligonucleotide
taattctgtgtctgcatggcgcgtgggagtgcgcctaaaaaggtgaccttctctctccaa

SEQ ID NO: 448517 - DNA, 60 bp, Artificial
  Synthetic oligonucleotide
taattgaaatccgaagataagattcccacacacttgtggctgatatcaaaaggctactgc

SEQ ID NO: 448518 - DNA, 60 bp, Artificial
  Synthetic oligonucleotide
taattgacgaacgcgatacgtgcacttttacaagcaatggtctagaagcgccacaattgc

SEQ ID NO: 448519 - DNA, 60 bp, Artificial
  Synthetic oligonucleotide
taattgacgagactgagcatgtgcgactaacgtatagatctcctgttgacgtggctcact

SEQ ID NO: 448520 - DNA, 55 bp, Artificial
  Synthetic oligonucleotide
taattgacttagcattgctgccacttgacatgttctcaatgtttgcaggtatcaa

SEQ ID NO: 448521 - DNA, 58 bp, Artificial
  Synthetic oligonucleotide
taattgatcctttagtcataaggaaattactcttagaagatttgcccacttctacatc

SEQ ID NO: 448522 - DNA, 58 bp, Artificial
  Synthetic oligonucleotide
taattgatgtctgggatagcgcccagcaatcttatgaaccacaggatagcgcctgtgg

SEQ ID NO: 448523 - DNA, 60 bp, Artificial
  Synthetic oligonucleotide
taattgcgtttgtttttgcaggaggaaagagtcagcttgctaatgctgttttacttgcat

SEQ ID NO: 448524 - DNA, 60 bp, Artificial
  Synthetic oligonucleotide
taattgctcctcgaggttatttcaaaatgcgcactgggaaaagctcaataatgaggtcag

SEQ ID NO: 448525 - DNA, 60 bp, Artificial
  Synthetic oligonucleotide
taattgcttcctcaggaaccctggagttcatcacagaaggattcacatggacaggagtca

SEQ ID NO: 448526 - DNA, 60 bp, Artificial
  Synthetic oligonucleotide
taattggagagattgccagttattacacacattggactggtagtttgagatttagcctca

SEQ ID NO: 448527 - DNA, 60 bp, Artificial
  Synthetic oligonucleotide
taattggatgttcgcccttcagaatggttaagatcggagagcatgtaggtaatgattcag

SEQ ID NO: 448528 - DNA, 55 bp, Artificial
  Synthetic oligonucleotide
taattggctaaccttctctcgtgaacatactagcacctggggttgtgaggagtgg

SEQ ID NO: 448529 - DNA, 60 bp, Artificial
  Synthetic oligonucleotide
taattgggaacagcagtaccttgtcaatcaacatcttaagccagatggggcaacatcccg

SEQ ID NO: 448530 - DNA, 51 bp, Artificial
  Synthetic oligonucleotide
taattgggaacttcgataccttgtcaatcaacatcaagttcctgatgggtc

SEQ ID NO: 448531 - DNA, 51 bp, Artificial
  Synthetic oligonucleotide
taattgggaagttagaggtttaattttacagtgtatgaatggaaatattcc

SEQ ID NO: 448532 - DNA, 60 bp, Artificial
  Synthetic oligonucleotide
taattgggcaaattgattactgccactatggtcccttcaatggattctcaagtggacctc

SEQ ID NO: 448533 - DNA, 60 bp, Artificial
  Synthetic oligonucleotide
taattgggcactgacgggaggtatggaagtgacgagagaccccaccgttgctgaacatgc

SEQ ID NO: 448534 - DNA, 58 bp, Artificial
  Synthetic oligonucleotide
taattgggcgggtcagttggatcatgataggggtcgtcgtgtgaaacaattaccacca

SEQ ID NO: 448535 - DNA, 60 bp, Artificial
  Synthetic oligonucleotide
taattggggacactgagcctgctttccataatgatatagttacgtatggcgcacggacta

SEQ ID NO: 448536 - DNA, 57 bp, Artificial
  Synthetic oligonucleotide
taattggtcacaacatattgaggccaataccctaatctcttcacagcaatcccaatt

SEQ ID NO: 448537 - DNA, 55 bp, Artificial
  Synthetic oligonucleotide
taattggtcgaaatatagtttgctgtcggtcacatatacgtatctcccctcttgt

SEQ ID NO: 448538 - DNA, 55 bp, Artificial
  Synthetic oligonucleotide
taattggtggtgactatagccaacaggaaccacgaagtttggcacatatgagtgg

SEQ ID NO: 448539 - DNA, 58 bp, Artificial
  Synthetic oligonucleotide
taattggtttactccgttgaaaggtatcggactcatagtattgccgaatcaagctcca

SEQ ID NO: 448540 - DNA, 50 bp, Artificial
  Synthetic oligonucleotide
taattgtaacgagtacacctgtaaagcgcatcgcaacctctctagtccat

SEQ ID NO: 448541 - DNA, 58 bp, Artificial
  Synthetic oligonucleotide
taattgtacaagacccagcaacaatacaaggaaaagtatgtctctaggaccagggcga

SEQ ID NO: 448542 - DNA, 55 bp, Artificial
  Synthetic oligonucleotide
taattgtacaagacctaacaataatacaagaagaggtatacatatgggaccaggg

SEQ ID NO: 448543 - DNA, 60 bp, Artificial
  Synthetic oligonucleotide
taattgtattggatggtcacaaggtcagatgtttattgatgacatacattataatggaaa

SEQ ID NO: 448544 - DNA, 57 bp, Artificial
  Synthetic oligonucleotide
taattgtcaatctggttttaagataaagtttaatgtggtagcagttaggactgatgg

SEQ ID NO: 448545 - DNA, 51 bp, Artificial
  Synthetic oligonucleotide
taattgtcattctagccggaccgatgccagtgaccgtggctagtgccgccc

SEQ ID NO: 448546 - DNA, 55 bp, Artificial
  Synthetic oligonucleotide
taattgtcccccatcattactattaagaaataagtgccgcgcagcggccataaac

SEQ ID NO: 448547 - DNA, 55 bp, Artificial
  Synthetic oligonucleotide
taattgtggaggggaatttttctactgtaatacatcaccactgtttaatagtact

SEQ ID NO: 448548 - DNA, 55 bp, Artificial
  Synthetic oligonucleotide
taattgtggggtcccaaactacgcgcccacatagttttgcccgtacgactatcgc

SEQ ID NO: 448549 - DNA, 56 bp, Artificial
  Synthetic oligonucleotide
taattgtgtggtcctaaagaacgcgcccacgcagttttgcccgttctactatcacc

SEQ ID NO: 448550 - DNA, 55 bp, Artificial
  Synthetic oligonucleotide
taattgttgacttggtcaacatgctatagtgtgttcctttaccccaataccccga

SEQ ID NO: 448551 - DNA, 56 bp, Artificial
  Synthetic oligonucleotide
taatttaaacatcgcttataaatacttgtctacgggaagagctaagttatgttgcg

SEQ ID NO: 448552 - DNA, 56 bp, Artificial
  Synthetic oligonucleotide
taatttaaattcagtgaaatgtacaggtggaagttatgactttagtatacctgtgg

SEQ ID NO: 448553 - DNA, 55 bp, Artificial
  Synthetic oligonucleotide
taatttacagggtctcatctctccaatggagaggttaccgaattatggccagtta

SEQ ID NO: 448554 - DNA, 59 bp, Artificial
  Synthetic oligonucleotide
taatttacataggatttgtccgtcgcaaaacgaacagctctgattacattgtttatgcc

SEQ ID NO: 448555 - DNA, 56 bp, Artificial
  Synthetic oligonucleotide
taatttacatagtaaccgtccgtcgcaaaacgcacagctctaattacattgtttaa

SEQ ID NO: 448556 - DNA, 60 bp, Artificial
  Synthetic oligonucleotide
taatttactacaggtacaactatgcatttgatcttaaaagatggatttatctacattcaa

SEQ ID NO: 448557 - DNA, 60 bp, Artificial
  Synthetic oligonucleotide
taatttagatggtatgagagtcaccattactacgcttcaagattctgtgtccactctctc

SEQ ID NO: 448558 - DNA, 60 bp, Artificial
  Synthetic oligonucleotide
taatttagtctgctctgtcagccttacagaatgtgcatcgtttctcacatcaatcaaagc

SEQ ID NO: 448559 - DNA, 55 bp, Artificial
  Synthetic oligonucleotide
taatttatattgtgctacccatatgcttcaagctgagagatactctcaggaagca

SEQ ID NO: 448560 - DNA, 49 bp, Artificial
  Synthetic oligonucleotide
taatttatggtaaggtaaaacctcctattacgaaacccgctattttacg

SEQ ID NO: 448561 - DNA, 59 bp, Artificial
  Synthetic oligonucleotide
taatttcactaggtataccaaaaatagacgctgatacgtatgtaggatcaaagatctat

SEQ ID NO: 448562 - DNA, 60 bp, Artificial
  Synthetic oligonucleotide
taatttcataatgggtaatctggatgaggatgaattcataatgtgcatgaataattatct

SEQ ID NO: 448563 - DNA, 58 bp, Artificial
  Synthetic oligonucleotide
taatttccattagttgtagcattatttccattagttgtagcattatttccattagttg

SEQ ID NO: 448564 - DNA, 59 bp, Artificial
  Synthetic oligonucleotide
taatttcccttgcatcctgcagaagtgaactccatttaccacgttagtgtcgtccactc

SEQ ID NO: 448565 - DNA, 55 bp, Artificial
  Synthetic oligonucleotide
taatttcgtttaactggaccaacgacattgtgatattggactgagtcctctctgc

SEQ ID NO: 448566 - DNA, 55 bp, Artificial
  Synthetic oligonucleotide
taatttctagatcacaggagtcagcgtgtactgagtatataaataacgggctgcc

SEQ ID NO: 448567 - DNA, 58 bp, Artificial
  Synthetic oligonucleotide
taatttctagtccttctcagttacttaatctacaattttgcttagattctcagtgtaa

SEQ ID NO: 448568 - DNA, 57 bp, Artificial
  Synthetic oligonucleotide
taatttcttcgggaagaatgtgtatgaagttaaaggacgaaagtatccatatccata

SEQ ID NO: 448569 - DNA, 55 bp, Artificial
  Synthetic oligonucleotide
taatttgaacgggtttcccgtatttgcagtttgattgccagtccttttgagctcc

SEQ ID NO: 448570 - DNA, 55 bp, Artificial
  Synthetic oligonucleotide
taatttgaatgggtctaccatactttgtattgctttgccagtccatctgggcccc

SEQ ID NO: 448571 - DNA, 58 bp, Artificial
  Synthetic oligonucleotide
taatttgagagagagcctcttctttagttaaggagcatcgagggtaagtgaggaaata

SEQ ID NO: 448572 - DNA, 60 bp, Artificial
  Synthetic oligonucleotide
taatttgcgtggacacttgcctgtccgtgtcgtggcgctcgggactctcgactcccctca

SEQ ID NO: 448573 - DNA, 58 bp, Artificial
  Synthetic oligonucleotide
taatttgcgttgttctattgggtttcattatgtgggcttgccaaaaaggcaacatcag

SEQ ID NO: 448574 - DNA, 55 bp, Artificial
  Synthetic oligonucleotide
taatttggacatgtcggtgtttaacgactggtccaagggaaccgacacgagactc

SEQ ID NO: 448575 - DNA, 54 bp, Artificial
  Synthetic oligonucleotide
taatttggccatccggctacccggtagtacaggtttaaacatacagaatggcgg

SEQ ID NO: 448576 - DNA, 53 bp, Artificial
  Synthetic oligonucleotide
taatttggccgtacgattcgacttcacccgtatctacacccggtgggaatacg

SEQ ID NO: 448577 - DNA, 56 bp, Artificial
  Synthetic oligonucleotide
taatttggttggatgaaaatggtttgttgctaggagttcatccaagattggcccag

SEQ ID NO: 448578 - DNA, 56 bp, Artificial
  Synthetic oligonucleotide
taatttgtctaggaaataaccgtcaggattgacaccctcccaattgtatgttttca

SEQ ID NO: 448579 - DNA, 60 bp, Artificial
  Synthetic oligonucleotide
taatttgtgtcaactctacattgcgggagacaaggtattgtctgcatgtggaaactccgg

SEQ ID NO: 448580 - DNA, 56 bp, Artificial
  Synthetic oligonucleotide
taatttgttagaccaaagaataatttggcagaactggtatgcgtttacatcttcca

SEQ ID NO: 448581 - DNA, 54 bp, Artificial
  Synthetic oligonucleotide
taatttgttccagctatatagaggtccattagacttgacaattataattactgg

SEQ ID NO: 448582 - DNA, 60 bp, Artificial
  Synthetic oligonucleotide
taatttgtttaagcgatcaaccatctccaaacgagatgatgggagacgtcgatctgttaa

SEQ ID NO: 448583 - DNA, 55 bp, Artificial
  Synthetic oligonucleotide
taattttcaacggagaacgggtgatgccgtgacatatttgggaaatacagtcgtg

SEQ ID NO: 448584 - DNA, 54 bp, Artificial
  Synthetic oligonucleotide
taattttccatggttattaaataacaattgcgatgcggtacaaaacctgcgtaa

SEQ ID NO: 448585 - DNA, 59 bp, Artificial
  Synthetic oligonucleotide
taattttcctaatgacatgttgtagaaaagtcgatcggccagaatctacacaacgcagt

SEQ ID NO: 448586 - DNA, 55 bp, Artificial
  Synthetic oligonucleotide
taattttctgactcccctctagtattcggtcagtctcaacaatcttagagatgac

SEQ ID NO: 448587 - DNA, 59 bp, Artificial
  Synthetic oligonucleotide
taattttggtcacagatggcagcctatgaccccgtcaagaggacgtttacgtcttcata

SEQ ID NO: 448588 - DNA, 58 bp, Artificial
  Synthetic oligonucleotide
taattttgtctggggagagcgtggcaggcattcaaagcgattctttgcgaactatttt

SEQ ID NO: 448589 - DNA, 59 bp, Artificial
  Synthetic oligonucleotide
tacaaaaacgtgtgggatgtggactattcggcctttgacgctaaccactgcagtgacgc

SEQ ID NO: 448590 - DNA, 60 bp, Artificial
  Synthetic oligonucleotide
tacaaaaactcgtctgcacttcgtgcacagggtgcacagattgacactgctttcagctca

SEQ ID NO: 448591 - DNA, 52 bp, Artificial
  Synthetic oligonucleotide
tacaaaacagtcttcggaatgtgggttaaaccagagaaggttaaggtaacaa

SEQ ID NO: 448592 - DNA, 51 bp, Artificial
  Synthetic oligonucleotide
tacaaaacctgctgtacctattgcatcttaccgcaaaaccttcaacccctt

SEQ ID NO: 448593 - DNA, 60 bp, Artificial
  Synthetic oligonucleotide
tacaaaagcggactatactcttgatgaagagagtagagccaggatcaagaccagactatt

SEQ ID NO: 448594 - DNA, 57 bp, Artificial
  Synthetic oligonucleotide
tacaaaagggattagggtggaggttccatcgcctgtactggtatcggccaaatgcaa

SEQ ID NO: 448595 - DNA, 55 bp, Artificial
  Synthetic oligonucleotide
tacaaaatctacactcgttagccacaatcgcaataaacgcaaactacacaatggg

SEQ ID NO: 448596 - DNA, 53 bp, Artificial
  Synthetic oligonucleotide
tacaaaattatccatatcctctatgggcctcttgccctgctagctacctaaca

SEQ ID NO: 448597 - DNA, 60 bp, Artificial
  Synthetic oligonucleotide
tacaaaattctcaccatttattcgactgtcgcctcatctcttgtgcttgcaatggggttt

SEQ ID NO: 448598 - DNA, 57 bp, Artificial
  Synthetic oligonucleotide
tacaaacacgactcacacaggttcccacaaccgacacaaaacgtgcaacttgaaatc

SEQ ID NO: 448599 - DNA, 56 bp, Artificial
  Synthetic oligonucleotide
tacaaacacgatccacgcaggtttccccaactgacacaaaccgtgcaactcgaaac

SEQ ID NO: 448600 - DNA, 57 bp, Artificial
  Synthetic oligonucleotide
tacaaacacgatctacgcaggtctccacaactgacacaaaacgtgcaacttgaaacc

SEQ ID NO: 448601 - DNA, 55 bp, Artificial
  Synthetic oligonucleotide
tacaaacacgatctattcaggttcccacaaccgacacaaaccgtacaacttgaaa

SEQ ID NO: 448602 - DNA, 60 bp, Artificial
  Synthetic oligonucleotide
tacaaacagagatcaaacaaacttcgactggtctctaagagcactatgcctattaagaga

SEQ ID NO: 448603 - DNA, 53 bp, Artificial
  Synthetic oligonucleotide
tacaaaccacgcggcctctggtgggacgggtacgaacaacaagattccgttat

SEQ ID NO: 448604 - DNA, 60 bp, Artificial
  Synthetic oligonucleotide
tacaaacgagaagatcatttgagctgaagaagctatgggagcaaacccattcaaagacag

SEQ ID NO: 448605 - DNA, 55 bp, Artificial
  Synthetic oligonucleotide
tacaaacgatgacgcccagacatcgggctatataccctgaaggttggatgctaag

SEQ ID NO: 448606 - DNA, 55 bp, Artificial
  Synthetic oligonucleotide
tacaaacggctctctccccgaaagcatgtatggttggtgggtgtcctcttgctgg

SEQ ID NO: 448607 - DNA, 58 bp, Artificial
  Synthetic oligonucleotide
tacaaactattctgctctttgcaaggaccatattcaggagaaccaaaaccagtaacga

SEQ ID NO: 448608 - DNA, 55 bp, Artificial
  Synthetic oligonucleotide
tacaaactctgctatccacctgtttaagattttgggattaggatctagaccatca

SEQ ID NO: 448609 - DNA, 56 bp, Artificial
  Synthetic oligonucleotide
tacaaagactcggcaagttcaggattaagtaaacaggatttctcccaagacccatc

SEQ ID NO: 448610 - DNA, 59 bp, Artificial
  Synthetic oligonucleotide
tacaaagactgttgacatttctacaagactgctgacatcgagctttttacaagggactt

SEQ ID NO: 448611 - DNA, 55 bp, Artificial
  Synthetic oligonucleotide
tacaaagctaaccaaggcaagataattggtcagatggatattaactttgatgggg

SEQ ID NO: 448612 - DNA, 58 bp, Artificial
  Synthetic oligonucleotide
tacaaagctaccaacagccaacaacaccaccacatcgaattccaaaacctgcgccttg

SEQ ID NO: 448613 - DNA, 55 bp, Artificial
  Synthetic oligonucleotide
tacaaagctgggagatctagagttgttatagtggaaggcaacgtagagggcacag

SEQ ID NO: 448614 - DNA, 60 bp, Artificial
  Synthetic oligonucleotide
tacaaaggcccgatgagagagatgccgtgctcggattgttagcggtgagaaatgatcaga

SEQ ID NO: 448615 - DNA, 58 bp, Artificial
  Synthetic oligonucleotide
tacaaagtataggattctatacattggtacaaacgactgcactgagggccctaacgac

SEQ ID NO: 448616 - DNA, 54 bp, Artificial
  Synthetic oligonucleotide
tacaaagtgctcgtcctgaacccatccgttgccgccactttaggttttggggcg

SEQ ID NO: 448617 - DNA, 57 bp, Artificial
  Synthetic oligonucleotide
tacaaataatctggagagctgtctgcaacatacctagaagaataagacagggcttgg

SEQ ID NO: 448618 - DNA, 50 bp, Artificial
  Synthetic oligonucleotide
tacaaatactcctagcaacaattggcgatctccctttcgtcgcaacacta

SEQ ID NO: 448619 - DNA, 56 bp, Artificial
  Synthetic oligonucleotide
tacaaatagatacagctaatacaagcttaccaagctatacgttgacacattgtaac

SEQ ID NO: 448620 - DNA, 60 bp, Artificial
  Synthetic oligonucleotide
tacaaatatgctgcagaaataggaatacaatatattagcacagctctagggtcagagaga

SEQ ID NO: 448621 - DNA, 52 bp, Artificial
  Synthetic oligonucleotide
tacaaatccaacaaatcaaaaccttttaacgcccgataaacagcctttcgtc

SEQ ID NO: 448622 - DNA, 60 bp, Artificial
  Synthetic oligonucleotide
tacaaatgaacagcaaaccctctatcagaatactgacgcatatgtctcagttgggtcatc

SEQ ID NO: 448623 - DNA, 60 bp, Artificial
  Synthetic oligonucleotide
tacaaatgaagatgtagcattgagattaccttgcaaccaattagatctaataacttgtct

SEQ ID NO: 448624 - DNA, 58 bp, Artificial
  Synthetic oligonucleotide
tacaaatgaagcccaattcgatgcccatgttagatcaagcttagttgagattatcaac

SEQ ID NO: 448625 - DNA, 57 bp, Artificial
  Synthetic oligonucleotide
tacaaatgaagtgggtgattttgggggctgtgcttacgtttctatcattaatacctg

SEQ ID NO: 448626 - DNA, 60 bp, Artificial
  Synthetic oligonucleotide
tacaaatggattcatgcaaagctgctgctaaaagattcaaaaacgctacatgggaactca

SEQ ID NO: 448627 - DNA, 54 bp, Artificial
  Synthetic oligonucleotide
tacaaattcgacaggcagaggcgaacactaacgatagagtttacagccagcacg

SEQ ID NO: 448628 - DNA, 56 bp, Artificial
  Synthetic oligonucleotide
tacaaattcgagttaatcctttgccgaaatttgattctaccgtgtgggtgacagtc

SEQ ID NO: 448629 - DNA, 50 bp, Artificial
  Synthetic oligonucleotide
tacaacaaattcgacatttaaagtattcgattctgaggactttataatag

SEQ ID NO: 448630 - DNA, 60 bp, Artificial
  Synthetic oligonucleotide
tacaacaacattattgaccagaacttccacagaaatatccggattgccttctggatacaa

SEQ ID NO: 448631 - DNA, 51 bp, Artificial
  Synthetic oligonucleotide
tacaacaactggaggttcacgggcttgcgcagtatctggtaatccgtcatt

SEQ ID NO: 448632 - DNA, 55 bp, Artificial
  Synthetic oligonucleotide
tacaacaaggctgcactcaccaagttcaaagaggatgttgagtccgctcttcacc

SEQ ID NO: 448633 - DNA, 60 bp, Artificial
  Synthetic oligonucleotide
tacaacaaggtgagtgttagctatggtgagagaattcaaaggctgggtcgtgttggacgc

SEQ ID NO: 448634 - DNA, 57 bp, Artificial
  Synthetic oligonucleotide
tacaacaccactgtttaatagtacttgggttaatggtactaggaatgatactgcaag

SEQ ID NO: 448635 - DNA, 51 bp, Artificial
  Synthetic oligonucleotide
tacaacaccctcggtgcctgataattatgaggagagagtgattactatgta

SEQ ID NO: 448636 - DNA, 51 bp, Artificial
  Synthetic oligonucleotide
tacaacacgtcaaagaaaataatctcgttcacggagatttcggaaaatggc

SEQ ID NO: 448637 - DNA, 55 bp, Artificial
  Synthetic oligonucleotide
tacaacactcaactcgctgtccactcgatggcgggaggtcttcgagcactcgagc

SEQ ID NO: 448638 - DNA, 60 bp, Artificial
  Synthetic oligonucleotide
tacaacagaagattcatcccagaaatcagcactaggcccaaggttaatggacaggctgga

SEQ ID NO: 448639 - DNA, 59 bp, Artificial
  Synthetic oligonucleotide
tacaacagaatgggaactgtgaccaccgaggtggcgtttggcctggtatgcgccacgtg

SEQ ID NO: 448640 - DNA, 58 bp, Artificial
  Synthetic oligonucleotide
tacaacagacaccacgtgctgtttgacctaatggtcatgtataagacgtatgtgcaat

SEQ ID NO: 448641 - DNA, 60 bp, Artificial
  Synthetic oligonucleotide
tacaacagagatctacttgtagccagaactactgctcatggtgctgacaagcttgccagg

SEQ ID NO: 448642 - DNA, 56 bp, Artificial
  Synthetic oligonucleotide
tacaacaggaagtgtttcgcaggatgaccaagatggagtacaagataacggatcca

SEQ ID NO: 448643 - DNA, 59 bp, Artificial
  Synthetic oligonucleotide
tacaacaggatgggaacggtgaccacagaagtggcttttggtctagtgtgtgccacttg

SEQ ID NO: 448644 - DNA, 52 bp, Artificial
  Synthetic oligonucleotide
tacaacaggtcatgcgtgatcagctcaagccctactcagagccgcgtggcct

SEQ ID NO: 448645 - DNA, 53 bp, Artificial
  Synthetic oligonucleotide
tacaacatgtcagcttcagacaaagggggtgaggtaggagcacatttggttgc

SEQ ID NO: 448646 - DNA, 59 bp, Artificial
  Synthetic oligonucleotide
tacaaccaaactccgccgaagtgcatgcgataaatgggaagcggctagacttagggcga

SEQ ID NO: 448647 - DNA, 55 bp, Artificial
  Synthetic oligonucleotide
tacaaccaaccttcgcaggatgtagttttcagcaattccctagatctcacgctcc

SEQ ID NO: 448648 - DNA, 60 bp, Artificial
  Synthetic oligonucleotide
tacaaccacaaaggtcaatgtgccactagctctcaaccaccaaaacttctggcaatggac

SEQ ID NO: 448649 - DNA, 60 bp, Artificial
  Synthetic oligonucleotide
tacaaccacaggcattatatttctcggtggccagaataggtcaggtggggccatacacac

SEQ ID NO: 448650 - DNA, 52 bp, Artificial
  Synthetic oligonucleotide
tacaaccagtaacacagtcaccaataatgctgcttgtgcctgggtggaagca

SEQ ID NO: 448651 - DNA, 56 bp, Artificial
  Synthetic oligonucleotide
tacaaccagtacggtagccaccaaaggagcttactcaaccaacgcgtccaacgctg

SEQ ID NO: 448652 - DNA, 58 bp, Artificial
  Synthetic oligonucleotide
tacaaccataaacgatagtggagaaattcttaatttagattgcacaacaccagaggaa

SEQ ID NO: 448653 - DNA, 55 bp, Artificial
  Synthetic oligonucleotide
tacaacccacacgacagagtcgaacacataatcaacaacaggactagagtgacgc

SEQ ID NO: 448654 - DNA, 55 bp, Artificial
  Synthetic oligonucleotide
tacaaccccatatggtttcggagagttattcaacatgtatgacaacgagcccagt

SEQ ID NO: 448655 - DNA, 54 bp, Artificial
  Synthetic oligonucleotide
tacaaccccgttcatgtataatgccatggcaggtgcatacccctcgtactcgac

SEQ ID NO: 448656 - DNA, 55 bp, Artificial
  Synthetic oligonucleotide
tacaaccctgattccgagcgcttggtgtgggccgtggtgggcctcgatgtttccc

SEQ ID NO: 448657 - DNA, 50 bp, Artificial
  Synthetic oligonucleotide
tacaacctaacgtagggcagggttccggcgccatacgggtcgcaagaaac

SEQ ID NO: 448658 - DNA, 55 bp, Artificial
  Synthetic oligonucleotide
tacaacctttggaggttagtgaaactgcatgtgaggctggtcccacttgcaggta

SEQ ID NO: 448659 - DNA, 56 bp, Artificial
  Synthetic oligonucleotide
tacaacgaccactagggtcgttggagattcaactttagctcttccttcgaatgtta

SEQ ID NO: 448660 - DNA, 50 bp, Artificial
  Synthetic oligonucleotide
tacaacgagtcatatgaatttaggctcgtcgtagggaacggagtgtttac

SEQ ID NO: 448661 - DNA, 60 bp, Artificial
  Synthetic oligonucleotide
tacaacgcaacgatggcagacctacagaaccagcctatcagcgtgcaacaaatcgggaat

SEQ ID NO: 448662 - DNA, 56 bp, Artificial
  Synthetic oligonucleotide
tacaacgcatggacgcaggataaaactttcgtctacgaccatgttatttacgcccc

SEQ ID NO: 448663 - DNA, 60 bp, Artificial
  Synthetic oligonucleotide
tacaacgcccagaatatttgggcggacagaaaacagaagtaatgatgcagacagtaccgc

SEQ ID NO: 448664 - DNA, 57 bp, Artificial
  Synthetic oligonucleotide
tacaacgcgctgctagaacgtgtttccaaatacaacagcttgaacgtgcagactaat

SEQ ID NO: 448665 - DNA, 59 bp, Artificial
  Synthetic oligonucleotide
tacaacggaaggacattgtggattgcctttagttagtgtcactgatggatttattgtag

SEQ ID NO: 448666 - DNA, 57 bp, Artificial
  Synthetic oligonucleotide
tacaacggagtgcgctaatgaagtcgcacgagtcacgggagagacatcaacgtgggg

SEQ ID NO: 448667 - DNA, 55 bp, Artificial
  Synthetic oligonucleotide
tacaacggcaagatgattactgacattgtgcgcaattaccgcgcatatttcaacg

SEQ ID NO: 448668 - DNA, 60 bp, Artificial
  Synthetic oligonucleotide
tacaacgggcttctagagtgtctaaatcctctgctgctagagcttccacacggggtatta

SEQ ID NO: 448669 - DNA, 53 bp, Artificial
  Synthetic oligonucleotide
tacaacggtcagttcaccgtgcttcaaccagaagacgaattctcggtgtggta

SEQ ID NO: 448670 - DNA, 58 bp, Artificial
  Synthetic oligonucleotide
tacaacggtgagaagaagaccttctacagcaggcccaacacacgcgggaactgttggc

SEQ ID NO: 448671 - DNA, 56 bp, Artificial
  Synthetic oligonucleotide
tacaacggtgagaggaagactttctactccaggcccaacaaccacgacaactgttg

SEQ ID NO: 448672 - DNA, 55 bp, Artificial
  Synthetic oligonucleotide
tacaacgtatgctgccacaacgctagacgcctaaactgatggggatatccgttgc

SEQ ID NO: 448673 - DNA, 60 bp, Artificial
  Synthetic oligonucleotide
tacaacgtgtgttcacagtggcttccattagaagcatgcttgtcaaatgaggaccaggct

SEQ ID NO: 448674 - DNA, 55 bp, Artificial
  Synthetic oligonucleotide
tacaactaaaagaaggaatggatggaccaaaagtaaaacagtggcctctctccag

SEQ ID NO: 448675 - DNA, 58 bp, Artificial
  Synthetic oligonucleotide
tacaactaaaatgtcctccaatactactaaccacaaatatacatccagcaaaggataa

SEQ ID NO: 448676 - DNA, 55 bp, Artificial
  Synthetic oligonucleotide
tacaactacgcagggctcaaatatgcggcggttaagacgcaggttaagggtaaaa

SEQ ID NO: 448677 - DNA, 56 bp, Artificial
  Synthetic oligonucleotide
tacaactatccaacaaaatctgggtactgtgggggtgttctgtataaaattggaca

SEQ ID NO: 448678 - DNA, 60 bp, Artificial
  Synthetic oligonucleotide
tacaactcccgctcggttgatgtgtcccgcatcttcaaggagccggaggttatcgcagca

SEQ ID NO: 448679 - DNA, 59 bp, Artificial
  Synthetic oligonucleotide
tacaactccgttagccaatcgaacagctacttcggtgacaagataaataattgattgac

SEQ ID NO: 448680 - DNA, 58 bp, Artificial
  Synthetic oligonucleotide
tacaactcctggcgattgtggttgtccctatatctacaagagagggaacgactacgtg

SEQ ID NO: 448681 - DNA, 59 bp, Artificial
  Synthetic oligonucleotide
tacaactgaaggagctagtgtgagagtgaaacggtgtgctgttagcccgtgccccgacg

SEQ ID NO: 448682 - DNA, 60 bp, Artificial
  Synthetic oligonucleotide
tacaactgatttatccgatgaaattaatgaaattggatcattgaaatcgcaggatgtcac

SEQ ID NO: 448683 - DNA, 60 bp, Artificial
  Synthetic oligonucleotide
tacaactgcgttcgctttctagttcgcaataagcacaaaatgagatgctcaatctcaggt

SEQ ID NO: 448684 - DNA, 52 bp, Artificial
  Synthetic oligonucleotide
tacaactggagagtattactttcccagacgctttctataatcgaatgaagac

SEQ ID NO: 448685 - DNA, 59 bp, Artificial
  Synthetic oligonucleotide
tacaactggcacgcgaaccttgaaaagtgaaaggcgcgcgctacgacgtctgctacgaa

SEQ ID NO: 448686 - DNA, 60 bp, Artificial
  Synthetic oligonucleotide
tacaactgtagttcaactatgtgtcatgcacatatattatattgtcctacacaccttaaa

SEQ ID NO: 448687 - DNA, 55 bp, Artificial
  Synthetic oligonucleotide
tacaacttatggttcattctctgcacttggagatggaacttccacatttggaggt

SEQ ID NO: 448688 - DNA, 55 bp, Artificial
  Synthetic oligonucleotide
tacaacttcttgaatggaacggacacgattgcaacactcgggccacagggaatac

SEQ ID NO: 448689 - DNA, 59 bp, Artificial
  Synthetic oligonucleotide
tacaagaaaacccatcgcacggaaccagtgtgtatcttaatacatggtgggcctggatg

SEQ ID NO: 448690 - DNA, 60 bp, Artificial
  Synthetic oligonucleotide
tacaagaaaccgatgaatatcaatgtccgtaatctgaacatgaggactatttggaaagat

SEQ ID NO: 448691 - DNA, 60 bp, Artificial
  Synthetic oligonucleotide
tacaagaaattcagtacataaatattgcttacacggtcagtcatagacgtacgattaaga

SEQ ID NO: 448692 - DNA, 52 bp, Artificial
  Synthetic oligonucleotide
tacaagaacggcctcaggtcgagtgagagtcagcagacttggtactactggc

SEQ ID NO: 448693 - DNA, 60 bp, Artificial
  Synthetic oligonucleotide
tacaagaagccgatgaatgttaatgttcgcaatctcaacttgaggaccatttggaaagat

SEQ ID NO: 448694 - DNA, 57 bp, Artificial
  Synthetic oligonucleotide
tacaagaaggaggctttcagcgaaatgggtcacaaggtttccacttatgcgggctgt

SEQ ID NO: 448695 - DNA, 57 bp, Artificial
  Synthetic oligonucleotide
tacaagaagtgcataacatctgggctacacatgcctgtgtacccacagaccccgacc

SEQ ID NO: 448696 - DNA, 56 bp, Artificial
  Synthetic oligonucleotide
tacaagacataaggctttcacctgttgcgttagttaagtgctttacgactaaaata

SEQ ID NO: 448697 - DNA, 60 bp, Artificial
  Synthetic oligonucleotide
tacaagaccctcaaactgatgatgggatgccaactgggggacctggctgtgatgaggttc

SEQ ID NO: 448698 - DNA, 59 bp, Artificial
  Synthetic oligonucleotide
tacaagacgctatgacaaatgtacgggtatctgattaggtatctgaacgtataagggcc

SEQ ID NO: 448699 - DNA, 60 bp, Artificial
  Synthetic oligonucleotide
tacaagagacggggaagagataacagcacatacaacatgctcagtcaacggagtaaacga

SEQ ID NO: 448700 - DNA, 53 bp, Artificial
  Synthetic oligonucleotide
tacaagagaggatcagagcgttgcgggagcaatacagcgaaacctggcatatg

SEQ ID NO: 448701 - DNA, 60 bp, Artificial
  Synthetic oligonucleotide
tacaagagattatgcaaaaggtgcgacaagcgcaatcagagtatgttgcagcaactaaag

SEQ ID NO: 448702 - DNA, 60 bp, Artificial
  Synthetic oligonucleotide
tacaagagcaagtgcagtggatgacaacccctcaggcacaaggaggagtaccagtagggg

SEQ ID NO: 448703 - DNA, 60 bp, Artificial
  Synthetic oligonucleotide
tacaagaggaatgcccttagatttgttgggcagtcggcttgcaagtttagagtgtgtaga

SEQ ID NO: 448704 - DNA, 50 bp, Artificial
  Synthetic oligonucleotide
tacaagataataaagctgatgcacccctagacattgtacggtctatctgc

SEQ ID NO: 448705 - DNA, 56 bp, Artificial
  Synthetic oligonucleotide
tacaagatagtagcccactcactcatgaacgctctgctccatgctagcacgaaaga

SEQ ID NO: 448706 - DNA, 60 bp, Artificial
  Synthetic oligonucleotide
tacaagatcctgagatacgatgagaccaaatccagggtgcgtgcttgcgagtgcgggggc

SEQ ID NO: 448707 - DNA, 58 bp, Artificial
  Synthetic oligonucleotide
tacaagatcttcaagatagaaaaggggagggtagtcaaatcagttgagttgaatgccc

SEQ ID NO: 448708 - DNA, 51 bp, Artificial
  Synthetic oligonucleotide
tacaagatgatttaacggtgctgcgttatgctaatgaaatcgagaattata

SEQ ID NO: 448709 - DNA, 60 bp, Artificial
  Synthetic oligonucleotide
tacaagatttaatgctacgaccgatcgtcccatctcgcaaacacctagtactcaagatga

SEQ ID NO: 448710 - DNA, 55 bp, Artificial
  Synthetic oligonucleotide
tacaagcatgactaatgctacaggaaataactcaacaacaatcatactcccatgc

SEQ ID NO: 448711 - DNA, 55 bp, Artificial
  Synthetic oligonucleotide
tacaagccgagactcgcctcctccaacatacagcttgcctggaattctatcgaag

SEQ ID NO: 448712 - DNA, 60 bp, Artificial
  Synthetic oligonucleotide
tacaagccttaagagtgtttaagcgatgcatgagtaatatggtggacgttcttaatgtgc

SEQ ID NO: 448713 - DNA, 57 bp, Artificial
  Synthetic oligonucleotide
tacaagcggcaccgatactgcctgcacgtctgggttgataccttctccaacgcagtc

SEQ ID NO: 448714 - DNA, 60 bp, Artificial
  Synthetic oligonucleotide
tacaagcgtgtagatgataaacgacgcccgagtagttcaaataaggtgtatgatgataca

SEQ ID NO: 448715 - DNA, 50 bp, Artificial
  Synthetic oligonucleotide
tacaagctccccgcacgcaatgtaaaggcgttcgtcgactctgcacagcg

SEQ ID NO: 448716 - DNA, 60 bp, Artificial
  Synthetic oligonucleotide
tacaagctcgcccttaaggctaacacctctgaaatcggacacattggattccagacgcca

SEQ ID NO: 448717 - DNA, 50 bp, Artificial
  Synthetic oligonucleotide
tacaagctgccacaatactgctacacaaccgtaggcatggaaagtccatg

SEQ ID NO: 448718 - DNA, 56 bp, Artificial
  Synthetic oligonucleotide
tacaagcttacagttgaccggagtctcggcgtgcagcgcctaaacacgggaaaccg

SEQ ID NO: 448719 - DNA, 54 bp, Artificial
  Synthetic oligonucleotide
tacaagcttcaaggctacacacccaaccgagccggactcagcctagtcttcgga

SEQ ID NO: 448720 - DNA, 55 bp, Artificial
  Synthetic oligonucleotide
tacaaggagtgccaaccttccaagtacctggatcacagcagtttatgacaacact

SEQ ID NO: 448721 - DNA, 60 bp, Artificial
  Synthetic oligonucleotide
tacaaggagttcaccaccttgtaccatgacgcattagttgatggcctatcacctaaggaa

SEQ ID NO: 448722 - DNA, 50 bp, Artificial
  Synthetic oligonucleotide
tacaaggcctttctgggtaaacaatccttgaacctttacccggttgcccg

SEQ ID NO: 448723 - DNA, 50 bp, Artificial
  Synthetic oligonucleotide
tacaaggcctttttacgtaaacagtatctaaccctttaccccgttgcacg

SEQ ID NO: 448724 - DNA, 59 bp, Artificial
  Synthetic oligonucleotide
tacaaggctacacagtgtcctatcccgagtctagacaaaccacagatataatttttcca

SEQ ID NO: 448725 - DNA, 60 bp, Artificial
  Synthetic oligonucleotide
tacaagggagttatctactccgagtcttggtgcaatccacagtgtgcgcctatcagacgc

SEQ ID NO: 448726 - DNA, 60 bp, Artificial
  Synthetic oligonucleotide
tacaagggcacgcggctttcattcaagcgctacaccggcctagattggtggctagttcac

SEQ ID NO: 448727 - DNA, 59 bp, Artificial
  Synthetic oligonucleotide
tacaagggcgccagagttgtcctctgggacgacttcggcatggataacgtggtgaagga

SEQ ID NO: 448728 - DNA, 59 bp, Artificial
  Synthetic oligonucleotide
tacaagggcgccagagttgtcctctgggacgacttcggtatggacaatgtggtgaaaga

SEQ ID NO: 448729 - DNA, 53 bp, Artificial
  Synthetic oligonucleotide
tacaaggtcctaccaaataatgccgtccctcagggaatgggaggtaaggacca

SEQ ID NO: 448730 - DNA, 50 bp, Artificial
  Synthetic oligonucleotide
tacaaggtgacaaaggtcgatgggaggacaatgcaaatgggaaacgtaga

SEQ ID NO: 448731 - DNA, 55 bp, Artificial
  Synthetic oligonucleotide
tacaaggtgctgtgcaaagctgtggattcgtacgagaagctattagtagctgaaa

SEQ ID NO: 448732 - DNA, 58 bp, Artificial
  Synthetic oligonucleotide
tacaaggtggtacctataacttcatgcttaatcaccctatgcttgttgcttttccaac

SEQ ID NO: 448733 - DNA, 60 bp, Artificial
  Synthetic oligonucleotide
tacaaggtgtcccagaattctctggtgagccgtgcaagtactagcataccaatgatgcac

SEQ ID NO: 448734 - DNA, 60 bp, Artificial
  Synthetic oligonucleotide
tacaaggtgtggttaacttcatttcaagagctggtgtgaggtcgagagtcgtccatctag

SEQ ID NO: 448735 - DNA, 55 bp, Artificial
  Synthetic oligonucleotide
tacaaggttacatagaagccgtacagctacaagaacttaggaattcgattggatg

SEQ ID NO: 448736 - DNA, 54 bp, Artificial
  Synthetic oligonucleotide
tacaagtaaagcaagtgtgtgcccatttattcctcaggtaaaaccctggtttac

SEQ ID NO: 448737 - DNA, 57 bp, Artificial
  Synthetic oligonucleotide
tacaagtacaacgggggagctcaccgctctctcggttgggatagagctctaaccgaa

SEQ ID NO: 448738 - DNA, 57 bp, Artificial
  Synthetic oligonucleotide
tacaagtactaggcctcaaaacaggtcctgacagtgttacacaaattgaatgttttc

SEQ ID NO: 448739 - DNA, 54 bp, Artificial
  Synthetic oligonucleotide
tacaagtatccggggtctggaagaagcctttgtgtgtcgggtatgagagggtgg

SEQ ID NO: 448740 - DNA, 60 bp, Artificial
  Synthetic oligonucleotide
tacaagtcatgaacgatttacgcctgactttctcaatcatagattcatgtgggggaagtg

SEQ ID NO: 448741 - DNA, 52 bp, Artificial
  Synthetic oligonucleotide
tacaagtggcggacccggaacaaatgggaccccgctgggtgttccactcctt

SEQ ID NO: 448742 - DNA, 60 bp, Artificial
  Synthetic oligonucleotide
tacaagttaggataggagcaatcagatgtagtgtaggacggcaatgagtctggttgcatg

SEQ ID NO: 448743 - DNA, 59 bp, Artificial
  Synthetic oligonucleotide
tacaagttatagatttgatgacccaggcaatgggtttgaatggaatgcccgaagtattg

SEQ ID NO: 448744 - DNA, 60 bp, Artificial
  Synthetic oligonucleotide
tacaagttccaaatcaatggggatgacctcatttatgcaccagatggctgcatgcaggag

SEQ ID NO: 448745 - DNA, 60 bp, Artificial
  Synthetic oligonucleotide
tacaagttccctatggatcaccgacatatgatataggtgggaacttcgcagcacatttgt

SEQ ID NO: 448746 - DNA, 50 bp, Artificial
  Synthetic oligonucleotide
tacaagttcgggtttttcaaccgagatttacgtaaaaaagagatttggtc

SEQ ID NO: 448747 - DNA, 56 bp, Artificial
  Synthetic oligonucleotide
tacaagtttaccacattggcaacttgttgaaaggggatagagtaaacgggcatcta

SEQ ID NO: 448748 - DNA, 60 bp, Artificial
  Synthetic oligonucleotide
tacaataaagtgaaaaagcatggctaggcccaagcgtgtaaaacgagcatcagcagaatc

SEQ ID NO: 448749 - DNA, 60 bp, Artificial
  Synthetic oligonucleotide
tacaataacctgtccaagatagttgaaccggctttggccactctgccctatgccgccaca

SEQ ID NO: 448750 - DNA, 54 bp, Artificial
  Synthetic oligonucleotide
tacaataataaactagaacgcgatttgcaaaataaaattggatcccttacttct

SEQ ID NO: 448751 - DNA, 60 bp, Artificial
  Synthetic oligonucleotide
tacaataatctcttcagcaccgattacgcttcagcatcgctgcttgctcttaggcgcgag

SEQ ID NO: 448752 - DNA, 55 bp, Artificial
  Synthetic oligonucleotide
tacaatacaacttgctaattggcgaaggcccttgtgaaccaggtgattgtggtgg

SEQ ID NO: 448753 - DNA, 60 bp, Artificial
  Synthetic oligonucleotide
tacaatacatgatagaatccctcatcggactctcttgatgaacgaattgggtgttccgtt

SEQ ID NO: 448754 - DNA, 60 bp, Artificial
  Synthetic oligonucleotide
tacaatacctcctcatccaattcacggattcgagtgatggctgctttccactgtggagcc

SEQ ID NO: 448755 - DNA, 57 bp, Artificial
  Synthetic oligonucleotide
tacaatacctgtacggtgtagggtcagcagttgtctcctatgcgatcaaatgggagt

SEQ ID NO: 448756 - DNA, 58 bp, Artificial
  Synthetic oligonucleotide
tacaatactattagatcacgtttcctcacgcacgaggtctttgatttaacgactgact

SEQ ID NO: 448757 - DNA, 56 bp, Artificial
  Synthetic oligonucleotide
tacaatactggaaaagaatgtaacagtaacacactccgttaaccttcttgaagaca

SEQ ID NO: 448758 - DNA, 56 bp, Artificial
  Synthetic oligonucleotide
tacaatacttgtacggggtggggtcaagcattgtgtcctgggccattaagtgggag

SEQ ID NO: 448759 - DNA, 60 bp, Artificial
  Synthetic oligonucleotide
tacaataggactatgcaacaggcccccattgtgctaactcctgctgctctcacaatgttc

SEQ ID NO: 448760 - DNA, 60 bp, Artificial
  Synthetic oligonucleotide
tacaataggatgggaactgtgaccacagaagtagcgtttggtctggtatgcgccacctgc

SEQ ID NO: 448761 - DNA, 57 bp, Artificial
  Synthetic oligonucleotide
tacaataggtggagagtatgcaagattaatcagttgtgggttggggagttacgggta

SEQ ID NO: 448762 - DNA, 60 bp, Artificial
  Synthetic oligonucleotide
tacaatatacaacttatgatatgtcggacatcttcaactcacctcaaaacaaggcttcta

SEQ ID NO: 448763 - DNA, 60 bp, Artificial
  Synthetic oligonucleotide
tacaatatatagtataaccctcatttactgatttgctacaccgtggcggccatccgctat

SEQ ID NO: 448764 - DNA, 55 bp, Artificial
  Synthetic oligonucleotide
tacaatatatgtccgtattgcgcatctagattaacctcagatggtcttgccagac

SEQ ID NO: 448765 - DNA, 58 bp, Artificial
  Synthetic oligonucleotide
tacaatatgtttctgtgtgatttgtacctgaatttaggagttaccattaaacaagcca

SEQ ID NO: 448766 - DNA, 55 bp, Artificial
  Synthetic oligonucleotide
tacaatattactggggatggtaattcatttacccccacctctgacatgacatcca

SEQ ID NO: 448767 - DNA, 60 bp, Artificial
  Synthetic oligonucleotide
tacaatcaccatacatatatccaccaatgccatgttacgttccactagacaaatacttta

SEQ ID NO: 448768 - DNA, 60 bp, Artificial
  Synthetic oligonucleotide
tacaatcagaggtcaattctcaaacatgtcgttgtccctgttggacttgtatttgagtcg

SEQ ID NO: 448769 - DNA, 52 bp, Artificial
  Synthetic oligonucleotide
tacaatcatcatgtactatggtggtgccctggattagtaatactgcatacag

SEQ ID NO: 448770 - DNA, 51 bp, Artificial
  Synthetic oligonucleotide
tacaatccacaaggacacctacaccccatgccagaaactttaacattcaaa

SEQ ID NO: 448771 - DNA, 54 bp, Artificial
  Synthetic oligonucleotide
tacaatccagatactgaacggctggtatgggcctgtcgtggcattgaggttggt

SEQ ID NO: 448772 - DNA, 60 bp, Artificial
  Synthetic oligonucleotide
tacaatccagtataacgttggtcattccttggataagtgggtctcacttccgcatgttca

SEQ ID NO: 448773 - DNA, 59 bp, Artificial
  Synthetic oligonucleotide
tacaatcccgccaactattgttgttcaacgaccctctcaatattttaataatgctgatg

SEQ ID NO: 448774 - DNA, 60 bp, Artificial
  Synthetic oligonucleotide
tacaatcctgctgacggcccatccaggcacagaccgcctgattggacggctcttacatac

SEQ ID NO: 448775 - DNA, 60 bp, Artificial
  Synthetic oligonucleotide
tacaatcggcaaggaattcatctcaattgcccagaaacagtcaaagtacctttctatgtc

SEQ ID NO: 448776 - DNA, 60 bp, Artificial
  Synthetic oligonucleotide
tacaatctaagagcaacaggcaatcttcaactagagtcagactttggtcacttgctattc

SEQ ID NO: 448777 - DNA, 58 bp, Artificial
  Synthetic oligonucleotide
tacaatctagattaaccgttggcgacttagcatataagaaataaacgtaaagctcaga

SEQ ID NO: 448778 - DNA, 53 bp, Artificial
  Synthetic oligonucleotide
tacaatgaaagaataaatgacgcagtagctatcataactgcagctaatagact

SEQ ID NO: 448779 - DNA, 60 bp, Artificial
  Synthetic oligonucleotide
tacaatgacacagtagctggtctattgatgtggcaacaatgtgctctcatgtggtcactg

SEQ ID NO: 448780 - DNA, 60 bp, Artificial
  Synthetic oligonucleotide
tacaatgagaagcaacaagtgttgtcgctggcttagtcacgtatcttgaccatcttatgt

SEQ ID NO: 448781 - DNA, 57 bp, Artificial
  Synthetic oligonucleotide
tacaatgagcaatttgctgtccagggtttgttgaggtatcagacttatgcaagattt

SEQ ID NO: 448782 - DNA, 55 bp, Artificial
  Synthetic oligonucleotide
tacaatgcagagctccttgtgcttctagagaaccagaaaacgctagacgaacatg

SEQ ID NO: 448783 - DNA, 53 bp, Artificial
  Synthetic oligonucleotide
tacaatgccgaagaatatcttacaccccagtggaacctcttggcgtgttgctc

SEQ ID NO: 448784 - DNA, 52 bp, Artificial
  Synthetic oligonucleotide
tacaatgctgttgaaaggaaattggtgaagtatgcgaaaggtaagccactag

SEQ ID NO: 448785 - DNA, 55 bp, Artificial
  Synthetic oligonucleotide
tacaatggacgcctattcaaggtgttgttaacacagttgctggtaagcaaggcga

SEQ ID NO: 448786 - DNA, 51 bp, Artificial
  Synthetic oligonucleotide
tacaatggactaactctacgtggagtaacgatgcgcccgacctcgttagcg

SEQ ID NO: 448787 - DNA, 55 bp, Artificial
  Synthetic oligonucleotide
tacaatgggctgtctggtgaccccttctttcaaagtgtcacaatgtgtatgagag

SEQ ID NO: 448788 - DNA, 60 bp, Artificial
  Synthetic oligonucleotide
tacaatgggcttatgacaaccagctcatagaagagtcagagatagcctatcggtatgctt

SEQ ID NO: 448789 - DNA, 51 bp, Artificial
  Synthetic oligonucleotide
tacaatggtcttacaagccgtcctttcgtactccggccccaagctcatcca

SEQ ID NO: 448790 - DNA, 60 bp, Artificial
  Synthetic oligonucleotide
tacaatggtgctatgcatcaacttataatcttatatcctcgaaatggtgctacgcaccac

SEQ ID NO: 448791 - DNA, 59 bp, Artificial
  Synthetic oligonucleotide
tacaatgtgactgtacccgtgcctggtgcacagatgcggtttgtagggaccggcttcgg

SEQ ID NO: 448792 - DNA, 60 bp, Artificial
  Synthetic oligonucleotide
tacaattacacccatcctggtgaaagtggcagagatgttagtgtggaggtgcgtgacaca

SEQ ID NO: 448793 - DNA, 60 bp, Artificial
  Synthetic oligonucleotide
tacaattaccaataagatggcacacggcgagctatactatagttccaagcctgacaaaga

SEQ ID NO: 448794 - DNA, 55 bp, Artificial
  Synthetic oligonucleotide
tacaattaggaactgtaagaaactagggcctagagaaaacgtcgcagttattcag

SEQ ID NO: 448795 - DNA, 60 bp, Artificial
  Synthetic oligonucleotide
tacaattagtgggtagtgagctctcaagtcatagcaagtaccaactttctgtgggagcgc

SEQ ID NO: 448796 - DNA, 56 bp, Artificial
  Synthetic oligonucleotide
tacaattatgagacattaatggcatgcattacaatgaacatgcaacatgttcaaac

SEQ ID NO: 448797 - DNA, 54 bp, Artificial
  Synthetic oligonucleotide
tacaattcaaaaacgtggcaaacgccacgattacttcacttcggccttaccttg

SEQ ID NO: 448798 - DNA, 52 bp, Artificial
  Synthetic oligonucleotide
tacaattccctggcccctaagggagctcctaatactagtcagtggatagtta

SEQ ID NO: 448799 - DNA, 60 bp, Artificial
  Synthetic oligonucleotide
tacaattgcaggaatcgttcgcagcaaaccacttgtactgcatcaggagaggagacttgc

SEQ ID NO: 448800 - DNA, 58 bp, Artificial
  Synthetic oligonucleotide
tacaattgcgtagcaacaaaagccaatcaaacagacttgaacaacttacaagctgatg

SEQ ID NO: 448801 - DNA, 56 bp, Artificial
  Synthetic oligonucleotide
tacaattgctttgccagtctttctgggcccccatgaactctttaaagtgctttaag

SEQ ID NO: 448802 - DNA, 58 bp, Artificial
  Synthetic oligonucleotide
tacaatttacaaggtcgggtcacttgataagagttataattattctggtacatggaga

SEQ ID NO: 448803 - DNA, 60 bp, Artificial
  Synthetic oligonucleotide
tacaatttacctggacctagcaatgtgcagcatacagagcatactagcatagaggattct

SEQ ID NO: 448804 - DNA, 60 bp, Artificial
  Synthetic oligonucleotide
tacaatttatactagaaccctcaatagaactttcaatctcgtgcacacacgtggcggcca

SEQ ID NO: 448805 - DNA, 55 bp, Artificial
  Synthetic oligonucleotide
tacaatttcaaccacgcgcaggaggagatctagaagttacagcacatagctttaa

SEQ ID NO: 448806 - DNA, 54 bp, Artificial
  Synthetic oligonucleotide
tacaattttgataacaaccgcagagacggactgtttaatttaaaacaacattcc

SEQ ID NO: 448807 - DNA, 60 bp, Artificial
  Synthetic oligonucleotide
tacacaaaatcgtccctcaggagagccatcaaggaaggggacctcagtgcatcaggagga

SEQ ID NO: 448808 - DNA, 60 bp, Artificial
  Synthetic oligonucleotide
tacacaaaccagtcattgactctgaccatgtagtttttaatgagagatggttaattcatg

SEQ ID NO: 448809 - DNA, 60 bp, Artificial
  Synthetic oligonucleotide
tacacaaatgttccttggaacaggaactggacaaatagcagccaggactataatgagatc

SEQ ID NO: 448810 - DNA, 60 bp, Artificial
  Synthetic oligonucleotide
tacacaaattcaactagtggagaatcatttctaacttcaacgctatgtttatactatcca

SEQ ID NO: 448811 - DNA, 58 bp, Artificial
  Synthetic oligonucleotide
tacacaagaaggggtactcacacaaaatccagttgaaaattacatagatagtgtctta

SEQ ID NO: 448812 - DNA, 60 bp, Artificial
  Synthetic oligonucleotide
tacacaagaatctgaatgcgtatgccacaacggtgtctgcccggtagtgttcacagatgg

SEQ ID NO: 448813 - DNA, 60 bp, Artificial
  Synthetic oligonucleotide
tacacaagacatagtttattgcatatcacattttccacccacgagtgcttgcattctaga

SEQ ID NO: 448814 - DNA, 60 bp, Artificial
  Synthetic oligonucleotide
tacacaagatagagacaggtctgtactcagggtggagaggtacatcattcctaaactcgg

SEQ ID NO: 448815 - DNA, 60 bp, Artificial
  Synthetic oligonucleotide
tacacaagttcagtggtacggttacaggtggacaatatgcgtctaaggaacaagctatga

SEQ ID NO: 448816 - DNA, 52 bp, Artificial
  Synthetic oligonucleotide
tacacaagtttaactaaaagcctagaacgaactttttattggacgcattaaa

SEQ ID NO: 448817 - DNA, 50 bp, Artificial
  Synthetic oligonucleotide
tacacaatacacgtacagtgcaatgcatccaaatttcaccaggggtgtct

SEQ ID NO: 448818 - DNA, 55 bp, Artificial
  Synthetic oligonucleotide
tacacaatagggagcggtcgatacaggtaattcggcagtatttctgtcagaatta

SEQ ID NO: 448819 - DNA, 55 bp, Artificial
  Synthetic oligonucleotide
tacacaatgacgttgaggcatgggtggatcgttaccgctaccatcctgagacccc

SEQ ID NO: 448820 - DNA, 60 bp, Artificial
  Synthetic oligonucleotide
tacacacaaccgggacagagtactcatgttgcaaggttatattggacagaaacaccggca

SEQ ID NO: 448821 - DNA, 60 bp, Artificial
  Synthetic oligonucleotide
tacacacaagaatatacagctggctgatatcattaaaacggtcgatgtccgtattcctcg

SEQ ID NO: 448822 - DNA, 56 bp, Artificial
  Synthetic oligonucleotide
tacacacaagccagtgtgtttatggtcgtaatgggtaactacgggatggaaccaac

SEQ ID NO: 448823 - DNA, 55 bp, Artificial
  Synthetic oligonucleotide
tacacacaagtggcaatggcactatgggagcagccaatagggtcttcccagtttt

SEQ ID NO: 448824 - DNA, 60 bp, Artificial
  Synthetic oligonucleotide
tacacacaccctcagtcaacatcaagccattggtttgattggcacaatccttctgacagc

SEQ ID NO: 448825 - DNA, 60 bp, Artificial
  Synthetic oligonucleotide
tacacacactcaggctgagaaacacactttgattgcgacgggtaagttcgataagaacaa

SEQ ID NO: 448826 - DNA, 60 bp, Artificial
  Synthetic oligonucleotide
tacacacagagcacaatggaatgctatgtgcaacaaacctggggcaccctctcatcctag

SEQ ID NO: 448827 - DNA, 60 bp, Artificial
  Synthetic oligonucleotide
tacacacagtacactgggacaatcaacctacacttcatgttcactgggccgaccgacgcg

SEQ ID NO: 448828 - DNA, 60 bp, Artificial
  Synthetic oligonucleotide
tacacacatcggaggctccacccactacttctttgacctcagtagaatcaatacaatgcc

SEQ ID NO: 448829 - DNA, 51 bp, Artificial
  Synthetic oligonucleotide
tacacacatgaatgatagtgaatggaataaagcgtgcacgcttgtagttaa

SEQ ID NO: 448830 - DNA, 52 bp, Artificial
  Synthetic oligonucleotide
tacacacattttgctctgcacagtcgacaagtctatttaacgaaacaaagaa

SEQ ID NO: 448831 - DNA, 60 bp, Artificial
  Synthetic oligonucleotide
tacacaccagggccagggactagattcccattgacttttggatggtgcttcaagctggta

SEQ ID NO: 448832 - DNA, 60 bp, Artificial
  Synthetic oligonucleotide
tacacaccagggccagggatcagatacccactgtgttttggatggtgcttcaagctagta

SEQ ID NO: 448833 - DNA, 60 bp, Artificial
  Synthetic oligonucleotide
tacacacccccaggtgcaagcattccagagtcccggcgtgacgcgatgctaggcacgcac

SEQ ID NO: 448834 - DNA, 56 bp, Artificial
  Synthetic oligonucleotide
tacacaccctatggaaggcgggcatcttatataaaagagaaactacacggtacgcc

SEQ ID NO: 448835 - DNA, 56 bp, Artificial
  Synthetic oligonucleotide
tacacaccgaggttcaccaaagcggaagatcgttaacaacgtgtctagagcacatc

SEQ ID NO: 448836 - DNA, 57 bp, Artificial
  Synthetic oligonucleotide
tacacaccgcagtcaaggggcaattcgggcacgggactggccgggctctgggcaagt

SEQ ID NO: 448837 - DNA, 58 bp, Artificial
  Synthetic oligonucleotide
tacacaccgcagtcaaggggcaattcgggctcgggaggccgggccatgggcaaggctc

SEQ ID NO: 448838 - DNA, 50 bp, Artificial
  Synthetic oligonucleotide
tacacaccgcgtcaaatgcggtctgaatccaccctagcccggagagcgag

SEQ ID NO: 448839 - DNA, 57 bp, Artificial
  Synthetic oligonucleotide
tacacaccgggaccaggggtcaaatacccactaacatttggatggtgcttcaagcta

SEQ ID NO: 448840 - DNA, 60 bp, Artificial
  Synthetic oligonucleotide
tacacacgataatcgattgggtgttgacactgtacacaaacgagttcgttatcgctgcgg

SEQ ID NO: 448841 - DNA, 60 bp, Artificial
  Synthetic oligonucleotide
tacacactaaagttgggtgagtatggtgaggtcacggttgattgtgagccacggtcagga

SEQ ID NO: 448842 - DNA, 51 bp, Artificial
  Synthetic oligonucleotide
tacacactacagggcacacgcccgtgctgggtactttgattattacaccac

SEQ ID NO: 448843 - DNA, 51 bp, Artificial
  Synthetic oligonucleotide
tacacactagacatgcttgtcacagaaatgttcagagagtacacccgtagg

SEQ ID NO: 448844 - DNA, 55 bp, Artificial
  Synthetic oligonucleotide
tacacactgatgcatgaggagcctggcagtagagcaatgaagatggccgagagag

SEQ ID NO: 448845 - DNA, 50 bp, Artificial
  Synthetic oligonucleotide
tacacactggacagtggtccacacagcatggtgtcactacatgccttaga

SEQ ID NO: 448846 - DNA, 56 bp, Artificial
  Synthetic oligonucleotide
tacacacttacgatcagttgcttttacccgtcataaaacgttattggtgattagga

SEQ ID NO: 448847 - DNA, 60 bp, Artificial
  Synthetic oligonucleotide
tacacacttgcccccatgggaaatggagcggggcgtagacgtgcattataatggctggag

SEQ ID NO: 448848 - DNA, 56 bp, Artificial
  Synthetic oligonucleotide
tacacagacgtttcacggaaatacactgggataatatgccgggtaccttagatccc

SEQ ID NO: 448849 - DNA, 58 bp, Artificial
  Synthetic oligonucleotide
tacacagagacaacagttttaacccctcaatgagaagggacctaggctcagactggcc

SEQ ID NO: 448850 - DNA, 58 bp, Artificial
  Synthetic oligonucleotide
tacacagagtccagagattaaggttcctattccccagaaagattggacaggcccaata

SEQ ID NO: 448851 - DNA, 58 bp, Artificial
  Synthetic oligonucleotide
tacacagcatttacagtgccgtccattaacaatgaaggaccaggacaaaggtacattt

SEQ ID NO: 448852 - DNA, 55 bp, Artificial
  Synthetic oligonucleotide
tacacagcggctccagagcctctgaacagcttgaattcgcatttccaactattgg

SEQ ID NO: 448853 - DNA, 60 bp, Artificial
  Synthetic oligonucleotide
tacacagcgtatattattctcggggtctcctctttgttcgatgcttcgtagtatcactgt

SEQ ID NO: 448854 - DNA, 60 bp, Artificial
  Synthetic oligonucleotide
tacacagcgtccgatgtggcagacacaacaaacgtacagggatgggtttgcatctaccaa

SEQ ID NO: 448855 - DNA, 60 bp, Artificial
  Synthetic oligonucleotide
tacacaggcttcaaagctcgaacacggtaagacacgattcatctacaattgtgatacaat

SEQ ID NO: 448856 - DNA, 54 bp, Artificial
  Synthetic oligonucleotide
tacacagggctcccaaataagaagcccaatgtccccccaattagaacggcaaaa

SEQ ID NO: 448857 - DNA, 57 bp, Artificial
  Synthetic oligonucleotide
tacacaggtattatggtgaattgccccctttaaacccacctcagctaagtcagctta

SEQ ID NO: 448858 - DNA, 56 bp, Artificial
  Synthetic oligonucleotide
tacacaggtggatccgtcgttgctaaatgtaacttcccaactaatctcgtttggcg

SEQ ID NO: 448859 - DNA, 55 bp, Artificial
  Synthetic oligonucleotide
tacacagtattaactcccgagatgggggtccaaacccttgccacaggagtgtttg

SEQ ID NO: 448860 - DNA, 60 bp, Artificial
  Synthetic oligonucleotide
tacacagtggtgatcgctctgtggggagtgcctggttccgcatcaataatattgccgatg

SEQ ID NO: 448861 - DNA, 55 bp, Artificial
  Synthetic oligonucleotide
tacacagttgacgccaagccccatacaggatattctgctccccggcagtgttgcg

SEQ ID NO: 448862 - DNA, 60 bp, Artificial
  Synthetic oligonucleotide
tacacagttgtcaacaccgtcagacagtcaccatcctggcttcttgccactacgattgta

SEQ ID NO: 448863 - DNA, 60 bp, Artificial
  Synthetic oligonucleotide
tacacataacgggatacatatccatgatgtatcttgatatgtcattggctatataataca

SEQ ID NO: 448864 - DNA, 58 bp, Artificial
  Synthetic oligonucleotide
tacacataccgatgtcacaggggtgacactcaaatacaaacccgaaggtcatttgaac

SEQ ID NO: 448865 - DNA, 58 bp, Artificial
  Synthetic oligonucleotide
tacacatcaagtgatgatcagatcactttatttgacagaagattaagtgaactggtta

SEQ ID NO: 448866 - DNA, 60 bp, Artificial
  Synthetic oligonucleotide
tacacatcagtgaaacagacacagttgacatcaagcaggatcaacctcgtccaactcacc

SEQ ID NO: 448867 - DNA, 58 bp, Artificial
  Synthetic oligonucleotide
tacacatcgatgccatgtggcgtcatttcatctcggggcgcctgcattgagaagcgtt

SEQ ID NO: 448868 - DNA, 51 bp, Artificial
  Synthetic oligonucleotide
tacacatcggactacacccagtacgatcagtcgcaagatgctgcctttttg

SEQ ID NO: 448869 - DNA, 52 bp, Artificial
  Synthetic oligonucleotide
tacacatcgtattggcaaacgtttttgcatcaagtccgtgtacattactggg

SEQ ID NO: 448870 - DNA, 60 bp, Artificial
  Synthetic oligonucleotide
tacacatgacggaccgtgatggtttgttcaatcttcatgcgaaccggtacatagggctaa

SEQ ID NO: 448871 - DNA, 55 bp, Artificial
  Synthetic oligonucleotide
tacacatggaccacgactcagccgcagattagcttcctatgtggtaatcggacct

SEQ ID NO: 448872 - DNA, 58 bp, Artificial
  Synthetic oligonucleotide
tacacatggttacgtttatcgtgaattgaatcagggttcattgttgccattagtcgac

SEQ ID NO: 448873 - DNA, 60 bp, Artificial
  Synthetic oligonucleotide
tacacatgtgcgatcatacatagaaacaatcattggcacacaccggtctcctgtgctaac

SEQ ID NO: 448874 - DNA, 60 bp, Artificial
  Synthetic oligonucleotide
tacacattgcaaacagatgtcaactctattcaacgaacagtcaccatcattgacacatta

SEQ ID NO: 448875 - DNA, 55 bp, Artificial
  Synthetic oligonucleotide
tacacattgggcaggttcactgcgcctatcctttatgtacactggcccagcactc

SEQ ID NO: 448876 - DNA, 52 bp, Artificial
  Synthetic oligonucleotide
tacacattgtttggtcaacaagagcaggtgcaagtatcaaatacatcaacta

SEQ ID NO: 448877 - DNA, 60 bp, Artificial
  Synthetic oligonucleotide
tacacattttcgacgtggctagagttccagacgatcaaatgtatagactaagagatagat

SEQ ID NO: 448878 - DNA, 51 bp, Artificial
  Synthetic oligonucleotide
tacaccaaaaccacctaggataactagcacacttgattacacagcgacccg

SEQ ID NO: 448879 - DNA, 55 bp, Artificial
  Synthetic oligonucleotide
tacaccaacccgcgatggcatgtctggtgcgccccttgtcaacccagatgggcgt

SEQ ID NO: 448880 - DNA, 58 bp, Artificial
  Synthetic oligonucleotide
tacaccaacttcagcgccactttcgagtactcctctttggccggcgttgtggagagac

SEQ ID NO: 448881 - DNA, 50 bp, Artificial
  Synthetic oligonucleotide
tacaccacaattaactgaggatgtattaacatttccatctagtgtagcac

SEQ ID NO: 448882 - DNA, 55 bp, Artificial
  Synthetic oligonucleotide
tacaccacaccatcgttcaaaagaatgttttcgaacaaagctgcaccctaacccc

SEQ ID NO: 448883 - DNA, 57 bp, Artificial
  Synthetic oligonucleotide
tacaccaccgggggagctgtctcccacgttgcgcaaggggtatctaacctcttctca

SEQ ID NO: 448884 - DNA, 58 bp, Artificial
  Synthetic oligonucleotide
tacaccaccggggggagtgctgctcggaccacgcaaggattcgccaggttcttcgagc

SEQ ID NO: 448885 - DNA, 57 bp, Artificial
  Synthetic oligonucleotide
tacaccaccggggggtctgctgctcagaccacgtctgcattcgccggcatgctcact

SEQ ID NO: 448886 - DNA, 50 bp, Artificial
  Synthetic oligonucleotide
tacaccacgaaactagggatagcgccctagcctcgatactaaggatagcg

SEQ ID NO: 448887 - DNA, 55 bp, Artificial
  Synthetic oligonucleotide
tacaccacggagaagagtaagggatggacccggtagatcctaacctagagccctg

SEQ ID NO: 448888 - DNA, 54 bp, Artificial
  Synthetic oligonucleotide
tacaccacgtgtatcccccttctccttacctcttacggtctcatctcgccttcg

SEQ ID NO: 448889 - DNA, 60 bp, Artificial
  Synthetic oligonucleotide
tacaccacgtgtggttgtgtaatgtccgtcttaacaccaatagctagaatgattagacca

SEQ ID NO: 448890 - DNA, 55 bp, Artificial
  Synthetic oligonucleotide
tacaccagaaactttttctatggggctgttatgcctgactttgtttgtggaagaa

SEQ ID NO: 448891 - DNA, 59 bp, Artificial
  Synthetic oligonucleotide
tacaccagacctggttcacgtctgcccaccgctagtactaatcccttcgtctaacatga

SEQ ID NO: 448892 - DNA, 51 bp, Artificial
  Synthetic oligonucleotide
tacaccagcatggtgagttctgaggtgagtcaaaacctgttgatgaaaatc

SEQ ID NO: 448893 - DNA, 50 bp, Artificial
  Synthetic oligonucleotide
tacaccagctaagttgcgtggcgtacttacgcagatggccgactcgccta

SEQ ID NO: 448894 - DNA, 58 bp, Artificial
  Synthetic oligonucleotide
tacaccagtgaggaactcgaatcatgagcgaccggaaccacccgtactaccaagacga

SEQ ID NO: 448895 - DNA, 55 bp, Artificial
  Synthetic oligonucleotide
tacaccatattcaaaatcaggatgtacgtgggaggggtcgagcacaggttggaag

SEQ ID NO: 448896 - DNA, 58 bp, Artificial
  Synthetic oligonucleotide
tacaccatggctctgaagcggtacggtcttctcccgacgcgtgcggataaggaggagg

SEQ ID NO: 448897 - DNA, 60 bp, Artificial
  Synthetic oligonucleotide
tacaccatgtgttgatgtccgcgactccaaacgtcatatggacgtggcgctgtctctcga

SEQ ID NO: 448898 - DNA, 57 bp, Artificial
  Synthetic oligonucleotide
tacaccatttgcacaaaactctcaaaggaaatgcaacacgtccaatgttttacactt

SEQ ID NO: 448899 - DNA, 56 bp, Artificial
  Synthetic oligonucleotide
tacacccaagaacattacactatatgtaccctccaaaagaaggagaggcacgttta

SEQ ID NO: 448900 - DNA, 55 bp, Artificial
  Synthetic oligonucleotide
tacacccacctgaggattgccccgtcctaagtggaaacaccgacatgttggttgt

SEQ ID NO: 448901 - DNA, 58 bp, Artificial
  Synthetic oligonucleotide
tacacccatcaaatgaactacttgtagaaaagcatatcagtagggcttttatcactct

SEQ ID NO: 448902 - DNA, 57 bp, Artificial
  Synthetic oligonucleotide
tacaccccagcgtgcgggctcccctctcccgcgtacttctagggaccaccacagatc

SEQ ID NO: 448903 - DNA, 60 bp, Artificial
  Synthetic oligonucleotide
tacaccccaggaggggaagtgaggaatgatgatgttgaccaaagcttgattatcgctgcc

SEQ ID NO: 448904 - DNA, 55 bp, Artificial
  Synthetic oligonucleotide
tacaccccagggccagggactagattcccactgacctttgggtggtgcttcaaac

SEQ ID NO: 448905 - DNA, 60 bp, Artificial
  Synthetic oligonucleotide
tacacccctccaggtgctgacatcccagagtcacgccgtgatgcaatgctcggcacgcac

SEQ ID NO: 448906 - DNA, 55 bp, Artificial
  Synthetic oligonucleotide
tacaccccttgaaccagcatggagtggatgacccggagagagaagtgttagtatg

SEQ ID NO: 448907 - DNA, 60 bp, Artificial
  Synthetic oligonucleotide
tacaccctatttttctaggatcgatgcattatgatatcacgtatgaagctctaaaaaata

SEQ ID NO: 448908 - DNA, 60 bp, Artificial
  Synthetic oligonucleotide
tacaccctcgcatcatacacacgtgactacacactcaccatcggatactataaggcggca

SEQ ID NO: 448909 - DNA, 60 bp, Artificial
  Synthetic oligonucleotide
tacacccttcgttacgtcttggcatagaatcatgttagcaacatcatgctgcatgtaagt

SEQ ID NO: 448910 - DNA, 60 bp, Artificial
  Synthetic oligonucleotide
tacaccgacacctgtcggtattatcgcgaaagattcacctcacgtcttagtggctctatc

SEQ ID NO: 448911 - DNA, 60 bp, Artificial
  Synthetic oligonucleotide
tacaccgaccgctgatatccaaggtaaacctgctgctcgcatggtcgctatctctcgcac

SEQ ID NO: 448912 - DNA, 58 bp, Artificial
  Synthetic oligonucleotide
tacaccgatggaggtgtggttgtccagttcgcgtcggatagtacagacgccgttccaa

SEQ ID NO: 448913 - DNA, 60 bp, Artificial
  Synthetic oligonucleotide
tacaccgcaagaaagaacgtggcccagcacatcagcgttagcgtccagtgcatgccgggc

SEQ ID NO: 448914 - DNA, 58 bp, Artificial
  Synthetic oligonucleotide
tacaccgcacccaacgagctcgctggacaatggcgaaaaacggcaactactcttacaa

SEQ ID NO: 448915 - DNA, 57 bp, Artificial
  Synthetic oligonucleotide
tacaccgcactcgagcggaagttaggagaaaaaccaacctgggacgagtactgctca

SEQ ID NO: 448916 - DNA, 57 bp, Artificial
  Synthetic oligonucleotide
tacaccgcagtgaacgagcaaccccgacaatggcgaaaaacggcaactactcttaca

SEQ ID NO: 448917 - DNA, 56 bp, Artificial
  Synthetic oligonucleotide
tacaccgcgactcgttatggtgtccaagacctgtccaaacacgtaccttggaaaca

SEQ ID NO: 448918 - DNA, 50 bp, Artificial
  Synthetic oligonucleotide
tacaccgcgagttgttcaactattaaaagacgcagcagacccccccgtcc

SEQ ID NO: 448919 - DNA, 58 bp, Artificial
  Synthetic oligonucleotide
tacaccgcgggtttgaggagggccatatggtacatagaggcaatcattttgtcgggat

SEQ ID NO: 448920 - DNA, 57 bp, Artificial
  Synthetic oligonucleotide
tacaccgtagtttatctcgaccctacctatgtcgtggctttaacacaacatggcacg

SEQ ID NO: 448921 - DNA, 56 bp, Artificial
  Synthetic oligonucleotide
tacaccgtggtcggtggaaacaccactactatggttcacgctaagccgcttcggga

SEQ ID NO: 448922 - DNA, 53 bp, Artificial
  Synthetic oligonucleotide
tacaccgtttcatacgggaattacacggagaaatattgcgagtggggggctat

SEQ ID NO: 448923 - DNA, 56 bp, Artificial
  Synthetic oligonucleotide
tacacctaaaccgctaacagctcgacgataagttagcaccccacgaatatggaacg

SEQ ID NO: 448924 - DNA, 57 bp, Artificial
  Synthetic oligonucleotide
tacacctaatgttatgcaacctaccccactcctcccgaccactaatgatggtcgagt

SEQ ID NO: 448925 - DNA, 57 bp, Artificial
  Synthetic oligonucleotide
tacacctacaattgtaagaccctctgttatcccagagacgataggcccagctgacat

SEQ ID NO: 448926 - DNA, 58 bp, Artificial
  Synthetic oligonucleotide
tacacctactccctcgattgtggtggctccaccgcctacctgacttacggatctggta

SEQ ID NO: 448927 - DNA, 54 bp, Artificial
  Synthetic oligonucleotide
tacacctatagttcaattacaaggtgactctaattgtctaaagtgttttcgata

SEQ ID NO: 448928 - DNA, 50 bp, Artificial
  Synthetic oligonucleotide
tacacctccccacggccgcagacaggaccgcagtgtgctgcctgtcctcc

SEQ ID NO: 448929 - DNA, 54 bp, Artificial
  Synthetic oligonucleotide
tacacctccggttcattataatttgacaacgaccccaaaggaaggggagactga

SEQ ID NO: 448930 - DNA, 60 bp, Artificial
  Synthetic oligonucleotide
tacacctcctttccatggctgctagggtgcgctgccaactggatcctgcgcgggacgtcc

SEQ ID NO: 448931 - DNA, 56 bp, Artificial
  Synthetic oligonucleotide
tacacctgaggtgcctattaaacgttctcggggcattttcaattggtttagcaggc

SEQ ID NO: 448932 - DNA, 51 bp, Artificial
  Synthetic oligonucleotide
tacaccttagaggaggtcgaaacgctattttaaactaccgtaacgataact

SEQ ID NO: 448933 - DNA, 60 bp, Artificial
  Synthetic oligonucleotide
tacaccttgggcgtttaagagcattaccatgccagcatacattaagcaccgacgcgcacg

SEQ ID NO: 448934 - DNA, 60 bp, Artificial
  Synthetic oligonucleotide
tacacctttggactcagatctagatgaccacacaaataattatgttggcctaacgatctg

SEQ ID NO: 448935 - DNA, 55 bp, Artificial
  Synthetic oligonucleotide
tacacctttggcgcgtgcttcccggcccgggattacgagcaaaagaaggttctgc

SEQ ID NO: 448936 - DNA, 59 bp, Artificial
  Synthetic oligonucleotide
tacacctttggtgagagcacaggtatgaattttgattacgtttgcgtgcttctcacaca

SEQ ID NO: 448937 - DNA, 60 bp, Artificial
  Synthetic oligonucleotide
tacacgaagacgatcataaatcctaagctacggtcataccgtatccctggagatgttgcc

SEQ ID NO: 448938 - DNA, 60 bp, Artificial
  Synthetic oligonucleotide
tacacgaagtgatagatgacgtccactccatgtggaaatcttggttcgacttcactcact

SEQ ID NO: 448939 - DNA, 60 bp, Artificial
  Synthetic oligonucleotide
tacacgaatatgttagaggcgccaccggagatagatcgtgtagttcagtacacttacgaa

SEQ ID NO: 448940 - DNA, 60 bp, Artificial
  Synthetic oligonucleotide
tacacgaccacttgcagagaatgtgcacgcacaattgtctgctagtccattccatctaaa

SEQ ID NO: 448941 - DNA, 57 bp, Artificial
  Synthetic oligonucleotide
tacacgactgaccgcatttaatttgttatcacaagaacagcgcgaatttttgattaa

SEQ ID NO: 448942 - DNA, 59 bp, Artificial
  Synthetic oligonucleotide
tacacgagcacgggagggaatgtaaaaacggagttcctgcatttgatcgatcacctcta

SEQ ID NO: 448943 - DNA, 58 bp, Artificial
  Synthetic oligonucleotide
tacacgagtaagtagaagttgcattattcggaacttcatatgtagacactttagtaag

SEQ ID NO: 448944 - DNA, 60 bp, Artificial
  Synthetic oligonucleotide
tacacgatggtctacgagatgataaattaaagaggtgtgtagtggatgccttacggaata

SEQ ID NO: 448945 - DNA, 55 bp, Artificial
  Synthetic oligonucleotide
tacacgattggtacgtccacaaccttctcaccaggtatgtgcttatgcccaccgg

SEQ ID NO: 448946 - DNA, 60 bp, Artificial
  Synthetic oligonucleotide
tacacgccacacgtaaaggaggcatatgtggctacagaaggtcagcccttgagatgacct

SEQ ID NO: 448947 - DNA, 60 bp, Artificial
  Synthetic oligonucleotide
tacacgccattctccgcttgacgtgcagtgatgcgttcccctgtgcgtgaatccatgtcc

SEQ ID NO: 448948 - DNA, 58 bp, Artificial
  Synthetic oligonucleotide
tacacgccgctccgcactggtggggggtctggtaattctgattcttttgtagttgctg

SEQ ID NO: 448949 - DNA, 57 bp, Artificial
  Synthetic oligonucleotide
tacacgcggagcggaaaacagggggtgcggtacacagagctaacctcatccctgaca

SEQ ID NO: 448950 - DNA, 51 bp, Artificial
  Synthetic oligonucleotide
tacacgctggccaatatctcagctcgcactctttacgttcgcgcaaaggga

SEQ ID NO: 448951 - DNA, 58 bp, Artificial
  Synthetic oligonucleotide
tacacggagaaatattgcgagtggggggcaatttcggtatcaatcgacgaagataata

SEQ ID NO: 448952 - DNA, 58 bp, Artificial
  Synthetic oligonucleotide
tacacggagaccactattattgccacggcagacgcccggggccttattcagtcgtcac

SEQ ID NO: 448953 - DNA, 59 bp, Artificial
  Synthetic oligonucleotide
tacacggcggaagtaggcattcttaccaacgctgtgagcaccaggcataccattgctga

SEQ ID NO: 448954 - DNA, 59 bp, Artificial
  Synthetic oligonucleotide
tacacgggcgagtatgatatgcccgaccccaatgacgggtttctgtgggacgatgttga

SEQ ID NO: 448955 - DNA, 56 bp, Artificial
  Synthetic oligonucleotide
tacacggggacgcgggccgttcctactgtttcaattgtggacaagctcttcgcagg

SEQ ID NO: 448956 - DNA, 52 bp, Artificial
  Synthetic oligonucleotide
tacacgggtgtgcactgcatacacaggacgctccccgactagctggtcgcct

SEQ ID NO: 448957 - DNA, 55 bp, Artificial
  Synthetic oligonucleotide
tacacggttacagcatgcagctaccaatcatgccaccaaagttattctccttccg

SEQ ID NO: 448958 - DNA, 55 bp, Artificial
  Synthetic oligonucleotide
tacacgtacaccggatctgacggcatgtccgccgatgcgacgacagctcccggcc

SEQ ID NO: 448959 - DNA, 52 bp, Artificial
  Synthetic oligonucleotide
tacacgtcccggagtcttcccgtatatgcgcaatggtggaagtgtctcccaa

SEQ ID NO: 448960 - DNA, 55 bp, Artificial
  Synthetic oligonucleotide
tacacgtcttgcaaagaggctacaacgacacccagaaatacttgccacaactagc

SEQ ID NO: 448961 - DNA, 60 bp, Artificial
  Synthetic oligonucleotide
tacacgtgcacggcgtcggaagcgagcatctgtaacacaattatattctacatgcaaagc

SEQ ID NO: 448962 - DNA, 53 bp, Artificial
  Synthetic oligonucleotide
tacacgtgcagtgcaacgcgtccaaatttcaccaagggtgtctgctggtggta

SEQ ID NO: 448963 - DNA, 60 bp, Artificial
  Synthetic oligonucleotide
tacacgtgcatatctggtgctatgatctgtgtacttggacgttgagtggaggaagagtcg

SEQ ID NO: 448964 - DNA, 55 bp, Artificial
  Synthetic oligonucleotide
tacacgtgggcatgggattcctaccgaaacatgctcaaccgagggatcgccaagg

SEQ ID NO: 448965 - DNA, 60 bp, Artificial
  Synthetic oligonucleotide
tacacgtgggcttacgggaccgatgagatatcgtggatggaagctgctctcatagcccag

SEQ ID NO: 448966 - DNA, 60 bp, Artificial
  Synthetic oligonucleotide
tacacgtgtcacgacggagctcaatgatatacgtgcaaacgtgacagccatctctggaag

SEQ ID NO: 448967 - DNA, 51 bp, Artificial
  Synthetic oligonucleotide
tacacgtttcaatttccaaacattagcagacgcaactaattacgctttagg

SEQ ID NO: 448968 - DNA, 52 bp, Artificial
  Synthetic oligonucleotide
tacacgtttgaaccgtacccaacctattctcaggagttatttagactcgata

SEQ ID NO: 448969 - DNA, 50 bp, Artificial
  Synthetic oligonucleotide
tacacgtttgttccccgctagtcgatgttaaagacgcccataggcacatg

SEQ ID NO: 448970 - DNA, 55 bp, Artificial
  Synthetic oligonucleotide
tacactaacttctttgggtatgtcacgactactttcaagaggaaacactttcgtc

SEQ ID NO: 448971 - DNA, 51 bp, Artificial
  Synthetic oligonucleotide
tacactacactctattaggcatgacagtttccccactgttccttgagtaca

SEQ ID NO: 448972 - DNA, 56 bp, Artificial
  Synthetic oligonucleotide
tacactacgaaactagggatagcgccctagccctgaatcttgggatagcgcccaag

SEQ ID NO: 448973 - DNA, 58 bp, Artificial
  Synthetic oligonucleotide
tacactacgcctgaaacacacacaataccgcatgcgacgcttttaggagtagtaacgg

SEQ ID NO: 448974 - DNA, 60 bp, Artificial
  Synthetic oligonucleotide
tacactagatttgattcagagatcacattggtgccttgtatagctgcaaaaggaaatgat

SEQ ID NO: 448975 - DNA, 60 bp, Artificial
  Synthetic oligonucleotide
tacactagggcctctttgcagaggtatgctgacaccttgtccaattacatacctcttgtg

SEQ ID NO: 448976 - DNA, 55 bp, Artificial
  Synthetic oligonucleotide
tacactattataatttgttccaccgttaccgttactgtcaccaactaccaatgat

SEQ ID NO: 448977 - DNA, 50 bp, Artificial
  Synthetic oligonucleotide
tacactattcggaattggttatgggtccgttatcatagcaaatcaacact

SEQ ID NO: 448978 - DNA, 58 bp, Artificial
  Synthetic oligonucleotide
tacactcaagtacccagggatatcccagtcctctggaggggacataggggttcacatg

SEQ ID NO: 448979 - DNA, 58 bp, Artificial
  Synthetic oligonucleotide
tacactcacacatcaggtttatttctccggttgttaagatagggttcattataacagc

SEQ ID NO: 448980 - DNA, 60 bp, Artificial
  Synthetic oligonucleotide
tacactcacgaagtgaaagacgcgcgacccgtaactctgcaccatattgacttacatgtg

SEQ ID NO: 448981 - DNA, 60 bp, Artificial
  Synthetic oligonucleotide
tacactcagctggagtaacactatccacacaatttactgactttgtatcacttaattcat

SEQ ID NO: 448982 - DNA, 55 bp, Artificial
  Synthetic oligonucleotide
tacactcaggcctgtgcctctctggataaaacaacatccagtggccatccccacc

SEQ ID NO: 448983 - DNA, 60 bp, Artificial
  Synthetic oligonucleotide
tacactccaggaggagaagtgagaaatgatgatgtagaccagagcttgattattgctgct

SEQ ID NO: 448984 - DNA, 60 bp, Artificial
  Synthetic oligonucleotide
tacactccaggcggggaagtaagaaacgatgatgttgaccaaagcttaatcatcgctgct

SEQ ID NO: 448985 - DNA, 60 bp, Artificial
  Synthetic oligonucleotide
tacactccataggagcaatttctaggttgtcaagcaataaggcgctcactcaagcaatgc

SEQ ID NO: 448986 - DNA, 57 bp, Artificial
  Synthetic oligonucleotide
tacactccgactacccaaccctatccgagagtgacaccgcccagcaatcgacgtcca

SEQ ID NO: 448987 - DNA, 60 bp, Artificial
  Synthetic oligonucleotide
tacactcgatgattgaagtctaggtgtccactaaggtaattatgtgggcctaaagcacga

SEQ ID NO: 448988 - DNA, 57 bp, Artificial
  Synthetic oligonucleotide
tacactctcccccaggggtctcatctccacctttacaaggactattgtatagtcctc

SEQ ID NO: 448989 - DNA, 59 bp, Artificial
  Synthetic oligonucleotide
tacactctcgggctaagatccaggatgggccgcacaagtaattgtgtggtcctaaagaa

SEQ ID NO: 448990 - DNA, 58 bp, Artificial
  Synthetic oligonucleotide
tacactctggtgttggtgtacagaaggtcctccacgtgtgtgatcttgaaataaaggg

SEQ ID NO: 448991 - DNA, 60 bp, Artificial
  Synthetic oligonucleotide
tacactcttgacgaagagagtagagcaaggatcaaaaccaggctattcaccataagacaa

SEQ ID NO: 448992 - DNA, 60 bp, Artificial
  Synthetic oligonucleotide
tacactcttttgacgacttatttggagcgaggatccatagtcacggcaatttgacaatca

SEQ ID NO: 448993 - DNA, 60 bp, Artificial
  Synthetic oligonucleotide
tacactgaaatggctactcaatgagctccacttcactgtcctccatgtcacaaggcacat

SEQ ID NO: 448994 - DNA, 55 bp, Artificial
  Synthetic oligonucleotide
tacactgaatcagctaaaagtttagaggtaatactacaggagatgagcacagttg

SEQ ID NO: 448995 - DNA, 59 bp, Artificial
  Synthetic oligonucleotide
tacactgagggcggcttactcagaaaggctaccagatacgtttcaatggtcccactcaa

SEQ ID NO: 448996 - DNA, 56 bp, Artificial
  Synthetic oligonucleotide
tacactgagttttagtaacaaacaaacagttagaatagaaagtacaagactcaaga

SEQ ID NO: 448997 - DNA, 60 bp, Artificial
  Synthetic oligonucleotide
tacactgatagatgccctattgggagacccccattgtgatgtattccaagatgaaacctg

SEQ ID NO: 448998 - DNA, 54 bp, Artificial
  Synthetic oligonucleotide
tacactgattatcgtgaaataaaggggatttggtacctcccagataaaaacgga

SEQ ID NO: 448999 - DNA, 60 bp, Artificial
  Synthetic oligonucleotide
tacactgcacgacatgtaaggcaaacctgtgcccagtatgcgcttggttggagtttggca

SEQ ID NO: 449000 - DNA, 60 bp, Artificial
  Synthetic oligonucleotide
tacactgcatattacaaagacctctgcaaatacaatcgtggcaagcacgtgctaaccttc

SEQ ID NO: 449001 - DNA, 60 bp, Artificial
  Synthetic oligonucleotide
tacactgccgtacacaaggaaatgactgccgttgtgacttcgacttggatggtgcccggc

SEQ ID NO: 449002 - DNA, 56 bp, Artificial
  Synthetic oligonucleotide
tacactgctgttccccttgtttgggtattcgcgataaaatgcgccacgcggaacgt

SEQ ID NO: 449003 - DNA, 55 bp, Artificial
  Synthetic oligonucleotide
tacactggactcccaaacaagaaacctaatgtcccaactattaggactgcaaagg

SEQ ID NO: 449004 - DNA, 60 bp, Artificial
  Synthetic oligonucleotide
tacactggaggatacttatagatatgtacagtcacaggccattacctgtcagaaacccac

SEQ ID NO: 449005 - DNA, 55 bp, Artificial
  Synthetic oligonucleotide
tacactggcaggaggcgaaccatatatgagggagccgtgaagtccttggaagggc

SEQ ID NO: 449006 - DNA, 60 bp, Artificial
  Synthetic oligonucleotide
tacactggtgtccagtgtgcaatgaggctccatatgtgtagacctacagcttcaggttct

SEQ ID NO: 449007 - DNA, 51 bp, Artificial
  Synthetic oligonucleotide
tacactgttcctcactttgaaactactagatctagctcttactatgtacaa

SEQ ID NO: 449008 - DNA, 58 bp, Artificial
  Synthetic oligonucleotide
tacacttaccactatccgcctacttggtcgttagcgctgttcctgggcactcctgttg

SEQ ID NO: 449009 - DNA, 58 bp, Artificial
  Synthetic oligonucleotide
tacacttattggtctaaaaggccgcgcagcggcacacacaacatttgacgtgacccaa

SEQ ID NO: 449010 - DNA, 60 bp, Artificial
  Synthetic oligonucleotide
tacacttcactgtgctccatgtcacaaggcacattggtgcattatgcaggaccacttcag

SEQ ID NO: 449011 - DNA, 56 bp, Artificial
  Synthetic oligonucleotide
tacacttcataatgagattaacctcagtgacgaccctgatgttgtgcttaacaagc

SEQ ID NO: 449012 - DNA, 60 bp, Artificial
  Synthetic oligonucleotide
tacacttccgggttcaggaggctcaatttggctcgcgttcgctcgcaccacgtttgctgc

SEQ ID NO: 449013 - DNA, 60 bp, Artificial
  Synthetic oligonucleotide
tacacttcctgggcatggtctacgtgataatataagtggcagcacttccaaatggctgag

SEQ ID NO: 449014 - DNA, 55 bp, Artificial
  Synthetic oligonucleotide
tacacttcgttatggcaatgtcttggatgtgaactccattgatcttgaagagcct

SEQ ID NO: 449015 - DNA, 60 bp, Artificial
  Synthetic oligonucleotide
tacacttctgcaacactatgaccgatgaaaaacaattctgggcgaaagtgaagtgcaccc

SEQ ID NO: 449016 - DNA, 51 bp, Artificial
  Synthetic oligonucleotide
tacacttgccatcgccggaatgcatacatacggaagagagtatcctccctt

SEQ ID NO: 449017 - DNA, 60 bp, Artificial
  Synthetic oligonucleotide
tacacttgggcagctcagttaaggttaggcacttggcagggtattacacttgggcagctc

SEQ ID NO: 449018 - DNA, 59 bp, Artificial
  Synthetic oligonucleotide
tacacttgggcccaattgttgaagctctctatacgggtgcatctccgaatcccttgaag

SEQ ID NO: 449019 - DNA, 57 bp, Artificial
  Synthetic oligonucleotide
tacacttggtgaagcaatttaccaagttgttgacactagtgtgactgttgtgacaga

SEQ ID NO: 449020 - DNA, 60 bp, Artificial
  Synthetic oligonucleotide
tacacttgtatgtgccccaatattggttgtcgataagcgtcctgacatggctccatgcaa

SEQ ID NO: 449021 - DNA, 54 bp, Artificial
  Synthetic oligonucleotide
tacacttgtcagtgttgggaaaacatgcactgccgtcaatgctatctcaacatg

SEQ ID NO: 449022 - DNA, 56 bp, Artificial
  Synthetic oligonucleotide
tacacttttggacttaaatctaaatgtccgcataagtagttatgtggtcccaaaga

SEQ ID NO: 449023 - DNA, 60 bp, Artificial
  Synthetic oligonucleotide
tacacttttgggcttagatctaaatgcccacatagatagttatgtgggcctaatgatcta

SEQ ID NO: 449024 - DNA, 60 bp, Artificial
  Synthetic oligonucleotide
tacagaaactgcaaacgccccgctagatagtgtccatcctgcaaatgccttttggccgga

SEQ ID NO: 449025 - DNA, 60 bp, Artificial
  Synthetic oligonucleotide
tacagaaagcccatgatgtacaggatgtatagaagcccagacataccgaggggctgtgaa

SEQ ID NO: 449026 - DNA, 60 bp, Artificial
  Synthetic oligonucleotide
tacagaaatcacatcatgtttggacaatcacgaatgtttattccacatattacactgagt

SEQ ID NO: 449027 - DNA, 55 bp, Artificial
  Synthetic oligonucleotide
tacagaacctatcagtagcactcctattccaggctttaggcgtattgcagctcct

SEQ ID NO: 449028 - DNA, 60 bp, Artificial
  Synthetic oligonucleotide
tacagaacgaaagatcgatgcacagaatgattacacaaaacgagaccgtacgaccaacac

SEQ ID NO: 449029 - DNA, 52 bp, Artificial
  Synthetic oligonucleotide
tacagaagatgtagacgacgaaatgtaccgagaatatacaatgctaataaga

SEQ ID NO: 449030 - DNA, 57 bp, Artificial
  Synthetic oligonucleotide
tacagaagattgcaacaaagttttagctgatctaaaacgaaagtatgtcactccaag

SEQ ID NO: 449031 - DNA, 57 bp, Artificial
  Synthetic oligonucleotide
tacagaagcccaaggtcagtaagaccctggaccacatcattgagggactctccccct

SEQ ID NO: 449032 - DNA, 55 bp, Artificial
  Synthetic oligonucleotide
tacagaaggccagtcggaatatccagtatggtggaggctatggtttccagagccc

SEQ ID NO: 449033 - DNA, 57 bp, Artificial
  Synthetic oligonucleotide
tacagaaggggtgggaagctcttaagtggctgggaagtcttgtgcagtatgggggtc

SEQ ID NO: 449034 - DNA, 58 bp, Artificial
  Synthetic oligonucleotide
tacagaagtccagtcgaggaagtgttaacacttttcgagccaacagctcaatccctaa

SEQ ID NO: 449035 - DNA, 60 bp, Artificial
  Synthetic oligonucleotide
tacagaagtgcaccccattcacgacgtttgcgttctctactctgtattcaactctccaag

SEQ ID NO: 449036 - DNA, 59 bp, Artificial
  Synthetic oligonucleotide
tacagaataaaattagttcacttgtgtcttcagtcgaatggtacctgaaatcaatggaa

SEQ ID NO: 449037 - DNA, 60 bp, Artificial
  Synthetic oligonucleotide
tacagaattaggactgggcaatggactggccagctagagtatcaagcaccgaaccttaca

SEQ ID NO: 449038 - DNA, 60 bp, Artificial
  Synthetic oligonucleotide
tacagacaagcgcgttgtagactctctccgcgccgtttgtgcagatctggaagggtcgag

SEQ ID NO: 449039 - DNA, 60 bp, Artificial
  Synthetic oligonucleotide
tacagacaccccactgtagactacatagtcacctacaacagaacaggcccattcgagata

SEQ ID NO: 449040 - DNA, 60 bp, Artificial
  Synthetic oligonucleotide
tacagacagatccagggtcactcgacaggagcattatgatcgttgaaactgaactcgttg

SEQ ID NO: 449041 - DNA, 59 bp, Artificial
  Synthetic oligonucleotide
tacagacatagagtcttgggacttaagtaagttgacacagatggataagtttaagctta

SEQ ID NO: 449042 - DNA, 60 bp, Artificial
  Synthetic oligonucleotide
tacagacatcaattcgcatatttgatggaatgacacctgcgtttcggcatatgacaactg

SEQ ID NO: 449043 - DNA, 60 bp, Artificial
  Synthetic oligonucleotide
tacagacatgtacatgaatggtatgttgataatctccttaatcgccatgtgcttttgcca

SEQ ID NO: 449044 - DNA, 55 bp, Artificial
  Synthetic oligonucleotide
tacagacccgcttgaacctgatgttcttaggccagattcgtctacagcctaccgt

SEQ ID NO: 449045 - DNA, 60 bp, Artificial
  Synthetic oligonucleotide
tacagacgcggaacgtgcagcaggtgtaatgccggtgaagcgcgcgaaatttgactcatg

SEQ ID NO: 449046 - DNA, 60 bp, Artificial
  Synthetic oligonucleotide
tacagacgtttgtcacagcaaactcggagagcttcgtggaggcgcggcctctggacactt

SEQ ID NO: 449047 - DNA, 60 bp, Artificial
  Synthetic oligonucleotide
tacagactaagggctatgacacttggacgaatggagaagcaaatctcctagttacaagga

SEQ ID NO: 449048 - DNA, 53 bp, Artificial
  Synthetic oligonucleotide
tacagactcagctatccatctatttaagattttggggttagactctagaccat

SEQ ID NO: 449049 - DNA, 56 bp, Artificial
  Synthetic oligonucleotide
tacagactgaactttagccatgcaatcttgcaggacaatggtctgcagagaccctt

SEQ ID NO: 449050 - DNA, 50 bp, Artificial
  Synthetic oligonucleotide
tacagactgaatgggctactgtgcccatgaggctgcttttaacctggata

SEQ ID NO: 449051 - DNA, 57 bp, Artificial
  Synthetic oligonucleotide
tacagagaaacctccccttcgaaagagcaaccattatggcggcgttcacagggaaca

SEQ ID NO: 449052 - DNA, 60 bp, Artificial
  Synthetic oligonucleotide
tacagagacagcagagaccctatttggaaaggaccggcacagctcctgtggaaaggtgag

SEQ ID NO: 449053 - DNA, 57 bp, Artificial
  Synthetic oligonucleotide
tacagagacatggtttttgttaccccagacggatttgcttaccgtcgtactcatgcc

SEQ ID NO: 449054 - DNA, 57 bp, Artificial
  Synthetic oligonucleotide
tacagagacggcggcgtgaagacccttcccaatgataaatttgccgttagaaatctg

SEQ ID NO: 449055 - DNA, 54 bp, Artificial
  Synthetic oligonucleotide
tacagagaggatatgctcgtaactaaccaattctgtgacagttatgacaaggtt

SEQ ID NO: 449056 - DNA, 56 bp, Artificial
  Synthetic oligonucleotide
tacagagagtgggacctgcaggtaacgccaaacgtgtttcccatcggtaacctgtg

SEQ ID NO: 449057 - DNA, 60 bp, Artificial
  Synthetic oligonucleotide
tacagaggcactgataagcacataactcgaacactattaaatcgtatcttgtagacatca

SEQ ID NO: 449058 - DNA, 58 bp, Artificial
  Synthetic oligonucleotide
tacagaggcgaagttgcgttggtgttttccggtgcttccaagtcctatctggagtcta

SEQ ID NO: 449059 - DNA, 60 bp, Artificial
  Synthetic oligonucleotide
tacagagtcaggaggtgtttcaggtccgcataggacctcccgtatccaaggagcgcagta

SEQ ID NO: 449060 - DNA, 60 bp, Artificial
  Synthetic oligonucleotide
tacagagtgcatatttattatggggatagcataataaaactcaatgatgacatcaatatg

SEQ ID NO: 449061 - DNA, 53 bp, Artificial
  Synthetic oligonucleotide
tacagagtgttcttaaaaagaaacgggcgtttgtggttatctatgcctatggc

SEQ ID NO: 449062 - DNA, 60 bp, Artificial
  Synthetic oligonucleotide
tacagagttaacaaattccaggtgaacaatgaactctggcaaggtgtcaaagcatgtgtt

SEQ ID NO: 449063 - DNA, 55 bp, Artificial
  Synthetic oligonucleotide
tacagataaataggcaagtcatagttgaaagaggtaacaggtccggttattctgg

SEQ ID NO: 449064 - DNA, 55 bp, Artificial
  Synthetic oligonucleotide
tacagataaccaccagacacatacagggaattgattgaaccgtaagcatcgttag

SEQ ID NO: 449065 - DNA, 57 bp, Artificial
  Synthetic oligonucleotide
tacagatacacttaccggtgccacagaggggacacacaaattcaaacaaggaggtcg

SEQ ID NO: 449066 - DNA, 58 bp, Artificial
  Synthetic oligonucleotide
tacagatataatcagtttatgggaccaaagcttacagccatgtgtaaagttaacccca

SEQ ID NO: 449067 - DNA, 58 bp, Artificial
  Synthetic oligonucleotide
tacagatatggcaatggtgtttggataggaaggactaaaagtaacagactcagaaagg

SEQ ID NO: 449068 - DNA, 60 bp, Artificial
  Synthetic oligonucleotide
tacagatcacactcgcttaccaggctgctttcagctgcgctggccctattgcacttcatt

SEQ ID NO: 449069 - DNA, 54 bp, Artificial
  Synthetic oligonucleotide
tacagatgataacggtaatactgaaacaccatatggagagtatgaagtcaaaga

SEQ ID NO: 449070 - DNA, 60 bp, Artificial
  Synthetic oligonucleotide
tacagatgcaaacgcgagagcatttttacagcataacagtcaggcaagacttgtcaaaga

SEQ ID NO: 449071 - DNA, 55 bp, Artificial
  Synthetic oligonucleotide
tacagatttagcgatacacttgtttaagatattaggattggaaaatagaccacca

SEQ ID NO: 449072 - DNA, 55 bp, Artificial
  Synthetic oligonucleotide
tacagatttgttaatctgcagctgtgttatgttccgctgtgcgccacaacggagg

SEQ ID NO: 449073 - DNA, 54 bp, Artificial
  Synthetic oligonucleotide
tacagcaaagaaatatcggaatggcctttgggtctcaaaatcgttgtgggagtg

SEQ ID NO: 449074 - DNA, 60 bp, Artificial
  Synthetic oligonucleotide
tacagcacagaccagcaaccacacagcacctcagaccccgtgggctgtgacaacgacagg

SEQ ID NO: 449075 - DNA, 60 bp, Artificial
  Synthetic oligonucleotide
tacagcacattctctctgctacatcttcgctttccatgccatcagtggacagtgacaaac

SEQ ID NO: 449076 - DNA, 60 bp, Artificial
  Synthetic oligonucleotide
tacagcactcaggcaagctgttgtgtgttggggggaattgatgaatctggccacctgggt

SEQ ID NO: 449077 - DNA, 60 bp, Artificial
  Synthetic oligonucleotide
tacagcagaagtgtcccattgcagggctactgaatacataatgaagggagtgtacataaa

SEQ ID NO: 449078 - DNA, 60 bp, Artificial
  Synthetic oligonucleotide
tacagcaggaccagaatcagtagataccatcaaagcaagaccccatgttgaagttcccat

SEQ ID NO: 449079 - DNA, 53 bp, Artificial
  Synthetic oligonucleotide
tacagcaggaggatttctaaacgataagttacacatatcggattcgttatata

SEQ ID NO: 449080 - DNA, 60 bp, Artificial
  Synthetic oligonucleotide
tacagcagtacgctgtgcgcgagttagaaggtcgccgtaaggctgcacagggtgacgata

SEQ ID NO: 449081 - DNA, 55 bp, Artificial
  Synthetic oligonucleotide
tacagcagtattggcattggagtgtgctggttggtgtacgatgcgcagcctaccg

SEQ ID NO: 449082 - DNA, 52 bp, Artificial
  Synthetic oligonucleotide
tacagcatcgttgaaagatcggtattacgtccgccatgtattgaagcgcgtt

SEQ ID NO: 449083 - DNA, 60 bp, Artificial
  Synthetic oligonucleotide
tacagcattgacataacgtttgtctgtagcaaacgaaacagctctaattacattgttaac

SEQ ID NO: 449084 - DNA, 59 bp, Artificial
  Synthetic oligonucleotide
tacagccaaacagatatctgcgacgttattcttgcaacagtgtatgcaaccgcatgtga

SEQ ID NO: 449085 - DNA, 56 bp, Artificial
  Synthetic oligonucleotide
tacagccatatcaattttattctggcaccgcagggtggctttgatcggcagggcaa

SEQ ID NO: 449086 - DNA, 60 bp, Artificial
  Synthetic oligonucleotide
tacagcccccggtagggcagcgtggatctcggagcgccgtagtgctctgagaagaaggga

SEQ ID NO: 449087 - DNA, 60 bp, Artificial
  Synthetic oligonucleotide
tacagccctacaacatacatagctataggtacagaatttcatgcagtaattctcaagagc

SEQ ID NO: 449088 - DNA, 60 bp, Artificial
  Synthetic oligonucleotide
tacagccgagcaggtacaggcgacaaaaaatgggttgatccaggaagtgctccataccaa

SEQ ID NO: 449089 - DNA, 56 bp, Artificial
  Synthetic oligonucleotide
tacagccgcatgacgtccgtttgggaggccgggggaaagtaactcagcacaccaag

SEQ ID NO: 449090 - DNA, 60 bp, Artificial
  Synthetic oligonucleotide
tacagccgcggctgtgcacgcacgctcgttggccagccccaatctatggcctcttggttg

SEQ ID NO: 449091 - DNA, 59 bp, Artificial
  Synthetic oligonucleotide
tacagccgtgtagcctctgagaacgtggagttcgtggggcagagtggtaaagtgttcca

SEQ ID NO: 449092 - DNA, 55 bp, Artificial
  Synthetic oligonucleotide
tacagcgagcacttcaaaggcaaaagcgaaggactggaggcgactagtcgacatc

SEQ ID NO: 449093 - DNA, 58 bp, Artificial
  Synthetic oligonucleotide
tacagcgatatccacttatatcacatttcctccccttgggaaaaccgagcccagtcga

SEQ ID NO: 449094 - DNA, 60 bp, Artificial
  Synthetic oligonucleotide
tacagcgatcgggtagcacaattaactattggcaactccaccatcaccacacaagaagca

SEQ ID NO: 449095 - DNA, 60 bp, Artificial
  Synthetic oligonucleotide
tacagcgatggaatgccaccgttactggtggccaatatgcctgtaaggaacaggcgttaa

SEQ ID NO: 449096 - DNA, 55 bp, Artificial
  Synthetic oligonucleotide
tacagcgcactacatcttattctgcaacattcgtccaagcttcatctcgtgttgc

SEQ ID NO: 449097 - DNA, 60 bp, Artificial
  Synthetic oligonucleotide
tacagcggaggctgcaagttaatggtctccgagcagtggttgacccgaatggacctatcg

SEQ ID NO: 449098 - DNA, 60 bp, Artificial
  Synthetic oligonucleotide
tacagctaaggattacataattggtgtcggaactggcctcttacagatcatactcgccta

SEQ ID NO: 449099 - DNA, 60 bp, Artificial
  Synthetic oligonucleotide
tacagctaccggtaaatccgcaagtagtgtgggatgtgccacgtagctccattgccaact

SEQ ID NO: 449100 - DNA, 60 bp, Artificial
  Synthetic oligonucleotide
tacagctaccgtgaagaacgatctccgcgatcgcttccaagtgatgcacaagttttacgc

SEQ ID NO: 449101 - DNA, 60 bp, Artificial
  Synthetic oligonucleotide
tacagctagctgtaaattaaagaattgcattaaaggtgaagctagactaaacacagcact

SEQ ID NO: 449102 - DNA, 51 bp, Artificial
  Synthetic oligonucleotide
tacagctcaaagaggctgtaacaattaactgtaccagacctaacaataaca

SEQ ID NO: 449103 - DNA, 60 bp, Artificial
  Synthetic oligonucleotide
tacagctcactcctagtggatctggagcaagtcttgctagctgcacgtcgatgcgctatg

SEQ ID NO: 449104 - DNA, 55 bp, Artificial
  Synthetic oligonucleotide
tacagctgacaaaatcggcaaaggtcctgcctctttctatactcttgagaaaggg

SEQ ID NO: 449105 - DNA, 60 bp, Artificial
  Synthetic oligonucleotide
tacagctgaccgactacggagccctcacattggactgctcacctagaacagggctggact

SEQ ID NO: 449106 - DNA, 60 bp, Artificial
  Synthetic oligonucleotide
tacagctgccagaaaaagagagctggactgtcaatgatatacagaagttagtgggaaaat

SEQ ID NO: 449107 - DNA, 60 bp, Artificial
  Synthetic oligonucleotide
tacagctgccgagtacgatcagactacttatggttcttccactaatcctatgtatgtctc

SEQ ID NO: 449108 - DNA, 56 bp, Artificial
  Synthetic oligonucleotide
tacagctgcttaattgcggcatttggtgttcccagtcggacctttaacactggggt

SEQ ID NO: 449109 - DNA, 50 bp, Artificial
  Synthetic oligonucleotide
tacagctggtggtgagggtcatgttgcattcatagatctaagacactttc

SEQ ID NO: 449110 - DNA, 59 bp, Artificial
  Synthetic oligonucleotide
tacagcttaatcagtcagtagtaattaattgtaccagacccaacaacaatacaaggaca

SEQ ID NO: 449111 - DNA, 55 bp, Artificial
  Synthetic oligonucleotide
tacagcttagcacggtatgcatttgatttctacgaaatgacttcacgcacacctg

SEQ ID NO: 449112 - DNA, 59 bp, Artificial
  Synthetic oligonucleotide
tacagcttcaacttaaaatgtccatggacagttggcatgactaagttttatgggggctg

SEQ ID NO: 449113 - DNA, 50 bp, Artificial
  Synthetic oligonucleotide
tacagctttagccatacgctacaatccctacacagctgtagccattcgct

SEQ ID NO: 449114 - DNA, 55 bp, Artificial
  Synthetic oligonucleotide
tacaggaaaacatcaccgcacacgaacaacaactcgtgactgccaggcagaagct

SEQ ID NO: 449115 - DNA, 55 bp, Artificial
  Synthetic oligonucleotide
tacaggaaaacgacaccgttaactcgataaccatatacgtcgatatcaaacgtgt

SEQ ID NO: 449116 - DNA, 52 bp, Artificial
  Synthetic oligonucleotide
tacaggaactgaagaatagtgctattacgttgcttaacgccatagccatagc

SEQ ID NO: 449117 - DNA, 50 bp, Artificial
  Synthetic oligonucleotide
tacaggaagaaagttttcaacatgcggaagagcctggcaggtccatcctg

SEQ ID NO: 449118 - DNA, 59 bp, Artificial
  Synthetic oligonucleotide
tacaggaatccccctatgggagcgagaaatggacaatgacagaaaccagccgagaaatg

SEQ ID NO: 449119 - DNA, 55 bp, Artificial
  Synthetic oligonucleotide
tacaggacaatctaattgacttgggatgcccaaatattccattgctaggtcgaac

SEQ ID NO: 449120 - DNA, 52 bp, Artificial
  Synthetic oligonucleotide
tacaggacatagtcaggtagggacactacaactgctagctctaagagcagta

SEQ ID NO: 449121 - DNA, 60 bp, Artificial
  Synthetic oligonucleotide
tacaggacggcaatttgtgggttatatcctgctcagattaaagctagacagatggtcagc

SEQ ID NO: 449122 - DNA, 60 bp, Artificial
  Synthetic oligonucleotide
tacaggagaccagcgtgtgggcctcatcccacgcaatggcgtcgaccattgggatgcgta

SEQ ID NO: 449123 - DNA, 59 bp, Artificial
  Synthetic oligonucleotide
tacaggagatcaagttaccagagaaagaagaatggacagttaacgatattcagaaatta

SEQ ID NO: 449124 - DNA, 60 bp, Artificial
  Synthetic oligonucleotide
tacaggagcgtccgagctcggcttatcaatcttagtagtcttccttatgacaatccagat

SEQ ID NO: 449125 - DNA, 55 bp, Artificial
  Synthetic oligonucleotide
tacaggaggggcccctgactcttccccaatggtatcccgcctgcggggaagaaga

SEQ ID NO: 449126 - DNA, 60 bp, Artificial
  Synthetic oligonucleotide
tacaggaggttagtcggtgatgagtgggcagcagtgatagaagagtactcgcttgcgtgt

SEQ ID NO: 449127 - DNA, 60 bp, Artificial
  Synthetic oligonucleotide
tacaggatatgagagaaacgaacaaaaggccgattgagtatttatatgattgtcctaata

SEQ ID NO: 449128 - DNA, 51 bp, Artificial
  Synthetic oligonucleotide
tacaggatcaggcggaattgataaggagataatggggttcacatacagcga

SEQ ID NO: 449129 - DNA, 60 bp, Artificial
  Synthetic oligonucleotide
tacaggccaagtgtcatgtatgagttactctccgaagagccatacttgttagtgttctcc

SEQ ID NO: 449130 - DNA, 60 bp, Artificial
  Synthetic oligonucleotide
tacaggccacattggcttgtataatgtgtagtcaaatgggcatgaggcccgagacagtgc

SEQ ID NO: 449131 - DNA, 60 bp, Artificial
  Synthetic oligonucleotide
tacaggccagaacacgcaggtaagcagccacccactagaatgtgggaaagtcccagcact

SEQ ID NO: 449132 - DNA, 60 bp, Artificial
  Synthetic oligonucleotide
tacaggcgacgatatggctgtggagcgcgtaaatccaagtgatatacgtgcaattaatat

SEQ ID NO: 449133 - DNA, 55 bp, Artificial
  Synthetic oligonucleotide
tacaggcgctaggcatgccggcgcaccactatcccactcgcccggttaccgagtt

SEQ ID NO: 449134 - DNA, 55 bp, Artificial
  Synthetic oligonucleotide
tacaggcggtcttgggagacctccaatgggtctctaggggcacacccactacccg

SEQ ID NO: 449135 - DNA, 60 bp, Artificial
  Synthetic oligonucleotide
tacaggctcgaattatgcaataagtgaccaatccattagcttcccaacttggctgagtcc

SEQ ID NO: 449136 - DNA, 50 bp, Artificial
  Synthetic oligonucleotide
tacaggcttgactgtgaagtgtcaaccgttgtgacctggggatctccagg

SEQ ID NO: 449137 - DNA, 56 bp, Artificial
  Synthetic oligonucleotide
tacagggactcttcttgcccgaatgtccctagggccaggcttgaacccctatacac

SEQ ID NO: 449138 - DNA, 55 bp, Artificial
  Synthetic oligonucleotide
tacagggagcttaccaggcactcaaccttaccaaccctgataaaactcaagagtg

SEQ ID NO: 449139 - DNA, 60 bp, Artificial
  Synthetic oligonucleotide
tacagggattggtcgaagccacagtgtcagattacaggatttgctcctttctccaaagac

SEQ ID NO: 449140 - DNA, 53 bp, Artificial
  Synthetic oligonucleotide
tacagggcagtcgtcagtagttcgacactaacttggcttagtctcgagatgct

SEQ ID NO: 449141 - DNA, 60 bp, Artificial
  Synthetic oligonucleotide
tacagggccagggataaggtatcagttcaattgtctgcctcagggatggaaaggatctcc

SEQ ID NO: 449142 - DNA, 55 bp, Artificial
  Synthetic oligonucleotide
tacagggcgccagcacgtctgtattgcgtgaggcaatggtgtgtctctctgttgg

SEQ ID NO: 449143 - DNA, 57 bp, Artificial
  Synthetic oligonucleotide
tacagggcggttgaagatttggcctctggaaggaagtggaggacggcggtagacata

SEQ ID NO: 449144 - DNA, 55 bp, Artificial
  Synthetic oligonucleotide
tacagggctgatattaacaagagatggtggtaataatggggacaacaagactgag

SEQ ID NO: 449145 - DNA, 60 bp, Artificial
  Synthetic oligonucleotide
tacagggctgatgttaacaagagatggtggtcataacaatgacacgcaccagatgacaga

SEQ ID NO: 449146 - DNA, 60 bp, Artificial
  Synthetic oligonucleotide
tacagggctgctattaacaagagatggtggcaatagcagtcatagtaatgggacagagac

SEQ ID NO: 449147 - DNA, 55 bp, Artificial
  Synthetic oligonucleotide
tacagggctgctattaacaagagatggtggtagtcagagcgggaccaacgccact

SEQ ID NO: 449148 - DNA, 55 bp, Artificial
  Synthetic oligonucleotide
tacagggctgctattaacaagagatggtggtgataccccgaacgggaccgaggtc

SEQ ID NO: 449149 - DNA, 60 bp, Artificial
  Synthetic oligonucleotide
tacaggggatgatgtcgagttagtagatgggagcgtcataagacaattagacgccggaga

SEQ ID NO: 449150 - DNA, 60 bp, Artificial
  Synthetic oligonucleotide
tacaggggcatcactgcacacaggctcgtcggtgcggaacccagacctcccgtcagtggg

SEQ ID NO: 449151 - DNA, 53 bp, Artificial
  Synthetic oligonucleotide
tacaggggggtacgtcacagccaatcaaaagctgccacgttgcgaaagtgacg

SEQ ID NO: 449152 - DNA, 51 bp, Artificial
  Synthetic oligonucleotide
tacaggggggtctcagtcaaattcacacagtcaatcccaacagagacaatc

SEQ ID NO: 449153 - DNA, 60 bp, Artificial
  Synthetic oligonucleotide
tacaggggtagagccaggtgatcatcttaaggaaagatcagcactaagctacgggaatac

SEQ ID NO: 449154 - DNA, 56 bp, Artificial
  Synthetic oligonucleotide
tacagggtatattcctttaggtgggcgtcctaatactgttgtggatgtaggtccca

SEQ ID NO: 449155 - DNA, 53 bp, Artificial
  Synthetic oligonucleotide
tacagggtatttagggtacgtttgcctgacccgaataagtttggtttatctga

SEQ ID NO: 449156 - DNA, 55 bp, Artificial
  Synthetic oligonucleotide
tacagggtctcatcggtcgttaatcagaaacttaaggaggaccaaatggctctcg

SEQ ID NO: 449157 - DNA, 59 bp, Artificial
  Synthetic oligonucleotide
tacagggttggacccagtgtcttctggtgtagcacgtactagcgtcgagccacgacacg

SEQ ID NO: 449158 - DNA, 56 bp, Artificial
  Synthetic oligonucleotide
tacagggttgggtacttatgtgctggaattcctagtgataccccaagaggggaaga

SEQ ID NO: 449159 - DNA, 60 bp, Artificial
  Synthetic oligonucleotide
tacagggtttggatgcatggactttggtacattgcaggctaataaaagtgatgtgcctat

SEQ ID NO: 449160 - DNA, 60 bp, Artificial
  Synthetic oligonucleotide
tacaggtacacgtatcggtgtcacagaggggacacacagattcagacaagaaggtcattc

SEQ ID NO: 449161 - DNA, 59 bp, Artificial
  Synthetic oligonucleotide
tacaggtaccatcacttcaatacctagccctagtggtagtgcaacaaaatgacagaccc

SEQ ID NO: 449162 - DNA, 60 bp, Artificial
  Synthetic oligonucleotide
tacaggtagagtggctgacgttcgcacagacactatcaaagactataacccgctaataaa

SEQ ID NO: 449163 - DNA, 55 bp, Artificial
  Synthetic oligonucleotide
tacaggtaggcggcgcgaatattttagacatcacggccgatccaacaactgtacc

SEQ ID NO: 449164 - DNA, 60 bp, Artificial
  Synthetic oligonucleotide
tacaggtatgtacttcattagccaacccatctacaactctatagtggatcccagtctcga

SEQ ID NO: 449165 - DNA, 58 bp, Artificial
  Synthetic oligonucleotide
tacaggtcgtacgacccgttggtcttcgcgaccagctgccaattgtccgagtggtgta

SEQ ID NO: 449166 - DNA, 60 bp, Artificial
  Synthetic oligonucleotide
tacaggtggaatccgaaccagacggcactagaattcgaccagtggctagagacgtcacag

SEQ ID NO: 449167 - DNA, 60 bp, Artificial
  Synthetic oligonucleotide
tacaggtggacaatatgcgtccaaggaacaagctgtcatcaagaggttctggaagttgaa

SEQ ID NO: 449168 - DNA, 52 bp, Artificial
  Synthetic oligonucleotide
tacaggtggcaattactctgccatacacggcacaagctgctacgtctcttca

SEQ ID NO: 449169 - DNA, 59 bp, Artificial
  Synthetic oligonucleotide
tacaggttatttgggctagatgagtgggcggccttcctttgggaggtgtcgcacactca

SEQ ID NO: 449170 - DNA, 60 bp, Artificial
  Synthetic oligonucleotide
tacaggttcaatggatactgcgtatgcaaactctacacaaagtgagccatttttgacatc

SEQ ID NO: 449171 - DNA, 60 bp, Artificial
  Synthetic oligonucleotide
tacaggttcacacagtgggtatgactttgatgataatacgctggatgtgatggttacatt

SEQ ID NO: 449172 - DNA, 59 bp, Artificial
  Synthetic oligonucleotide
tacagtaaaaacagaatatggcgaatttacaatgttgggtgtctatgacaggtgggctg

SEQ ID NO: 449173 - DNA, 56 bp, Artificial
  Synthetic oligonucleotide
tacagtaaatgaaaacaggaggctaaaattaattatgcctgctaggttttatccca

SEQ ID NO: 449174 - DNA, 55 bp, Artificial
  Synthetic oligonucleotide
tacagtaaccgcactgcctctcgtccagcatggcagtcctggtctcaccactaag

SEQ ID NO: 449175 - DNA, 59 bp, Artificial
  Synthetic oligonucleotide
tacagtaaccttcctccatctgaatcggcagaattgctgtgcctgctacgcctgtgggg

SEQ ID NO: 449176 - DNA, 56 bp, Artificial
  Synthetic oligonucleotide
tacagtaactgtgtagtagcttcacaacataaaggtttaaacgtagaatcttatac

SEQ ID NO: 449177 - DNA, 55 bp, Artificial
  Synthetic oligonucleotide
tacagtaagtatcaatgttcagcacaatgagcaatgcacgggatcctgccccagc

SEQ ID NO: 449178 - DNA, 56 bp, Artificial
  Synthetic oligonucleotide
tacagtacaccgtattagaagagattaaggatagattaattaggtcttctaaatac

SEQ ID NO: 449179 - DNA, 58 bp, Artificial
  Synthetic oligonucleotide
tacagtacgggcaaaatgacccgtctgtatgggcgtccatgcgtttctggggcgaatc

SEQ ID NO: 449180 - DNA, 59 bp, Artificial
  Synthetic oligonucleotide
tacagtactacagtactgcccaagttctctcctgagtgcctgggtccaaaggaatgact

SEQ ID NO: 449181 - DNA, 56 bp, Artificial
  Synthetic oligonucleotide
tacagtacttgtacggggtaggatcaagcttcgcgtcctgggccattaagtgggag

SEQ ID NO: 449182 - DNA, 58 bp, Artificial
  Synthetic oligonucleotide
tacagtagacgaaggaaacttaccaatacagtatcagaagtttatgcccactctacca

SEQ ID NO: 449183 - DNA, 60 bp, Artificial
  Synthetic oligonucleotide
tacagtagatttatccgatgagatacaagagattggatcaactaaatcacaaaatgtcac

SEQ ID NO: 449184 - DNA, 55 bp, Artificial
  Synthetic oligonucleotide
tacagtaggaactaattatacctctctacctgcaggactatcggatccacttcca

SEQ ID NO: 449185 - DNA, 60 bp, Artificial
  Synthetic oligonucleotide
tacagtcagaaacgcagatgttaacaggtataaactcacacgaagctatagactgcttta

SEQ ID NO: 449186 - DNA, 60 bp, Artificial
  Synthetic oligonucleotide
tacagtcagagacgcagatgttaacaggtataaaatctcatgaggctatagactgcttca

SEQ ID NO: 449187 - DNA, 55 bp, Artificial
  Synthetic oligonucleotide
tacagtcagaggcttgctggttgtatggaggaaaggatttcctttcgccgcatgc

SEQ ID NO: 449188 - DNA, 51 bp, Artificial
  Synthetic oligonucleotide
tacagtccaggatcttaagagagttggtttcccagagtgtgattacgtgac

SEQ ID NO: 449189 - DNA, 59 bp, Artificial
  Synthetic oligonucleotide
tacagtccattgtctttgagcttaacgtcctccactatatcaacgcctcagcaaccttt

SEQ ID NO: 449190 - DNA, 57 bp, Artificial
  Synthetic oligonucleotide
tacagtctactgcttcactagttgtaccatgggttagtgctagtcactttaggttca

SEQ ID NO: 449191 - DNA, 60 bp, Artificial
  Synthetic oligonucleotide
tacagtcttagatgtaggagatgcttatttctcatgccctttagatccagattttagaaa

SEQ ID NO: 449192 - DNA, 60 bp, Artificial
  Synthetic oligonucleotide
tacagtcttcgtaattatgtccgcaatttcttccctcgttatactccctgcttgtgatgc

SEQ ID NO: 449193 - DNA, 60 bp, Artificial
  Synthetic oligonucleotide
tacagtcttgtctacagtcgagcagtcaggctatgccaagcgtacagagatacagtctat

SEQ ID NO: 449194 - DNA, 60 bp, Artificial
  Synthetic oligonucleotide
tacagtgaaagatagaagcccttatcgtgcattgatgagtgtgccattaggatcttcacc

SEQ ID NO: 449195 - DNA, 55 bp, Artificial
  Synthetic oligonucleotide
tacagtgaaagctaaacctgctcgccagggccataaccccgcaacaggagaacct

SEQ ID NO: 449196 - DNA, 56 bp, Artificial
  Synthetic oligonucleotide
tacagtgcaattttttagcgtcggggatatctaccagaaacttcctaaaatccgca

SEQ ID NO: 449197 - DNA, 55 bp, Artificial
  Synthetic oligonucleotide
tacagtgcgacaagatcttgaacgtcaactaggtgatttaagggaggaattcaat

SEQ ID NO: 449198 - DNA, 56 bp, Artificial
  Synthetic oligonucleotide
tacagtggagggacaataaacagccctttaccatttcaaaacatcgatagtagggc

SEQ ID NO: 449199 - DNA, 57 bp, Artificial
  Synthetic oligonucleotide
tacagtggcttgctgccaaccttcgttcaatctcttggtctccccgttaaccgctta

SEQ ID NO: 449200 - DNA, 55 bp, Artificial
  Synthetic oligonucleotide
tacagtgggcggtgtggtaacactgaggcaggatccggaactagtgaaccgtttg

SEQ ID NO: 449201 - DNA, 57 bp, Artificial
  Synthetic oligonucleotide
tacagtgggtccttcatggactattgggcagagggggagtgctaccgagcgtgtttt

SEQ ID NO: 449202 - DNA, 55 bp, Artificial
  Synthetic oligonucleotide
tacagtgtaatgctagtaaattccaccaaggaaccctactagtagctgccctacc

SEQ ID NO: 449203 - DNA, 52 bp, Artificial
  Synthetic oligonucleotide
tacagtgtggacacggtggtttcagaacttattagggaatatagcaataggt

SEQ ID NO: 449204 - DNA, 60 bp, Artificial
  Synthetic oligonucleotide
tacagtgtggccagaattccactacccaatctaaatgaggatctaacctgtggaaatata

SEQ ID NO: 449205 - DNA, 60 bp, Artificial
  Synthetic oligonucleotide
tacagttaaagtgtgtccattaaatacgcagacacttggaattggatgcttaacaactga

SEQ ID NO: 449206 - DNA, 54 bp, Artificial
  Synthetic oligonucleotide
tacagttaacttcagtcacatcgttgtgtattctaatagggaatgcaaccgtta

SEQ ID NO: 449207 - DNA, 60 bp, Artificial
  Synthetic oligonucleotide
tacagttaatattcatagtaccgaagcacttgagacgtttacgcggacgatgatcagcag

SEQ ID NO: 449208 - DNA, 56 bp, Artificial
  Synthetic oligonucleotide
tacagttacacaaccgtggggtaacaccacagttccattgtcacttcctaatgacc

SEQ ID NO: 449209 - DNA, 58 bp, Artificial
  Synthetic oligonucleotide
tacagttagacaggatttagaacgtcagctaggcgaattgagagacgaatttaataat

SEQ ID NO: 449210 - DNA, 56 bp, Artificial
  Synthetic oligonucleotide
tacagttcaacaagctcgcacaatggcactatttgagcttccaatttacttcatga

SEQ ID NO: 449211 - DNA, 60 bp, Artificial
  Synthetic oligonucleotide
tacagttcacatttctcaccacaagactggcagcgcctcaccaacgaatataaaagatgg

SEQ ID NO: 449212 - DNA, 60 bp, Artificial
  Synthetic oligonucleotide
tacagttccgatccaagcacagaactgagccagtgtgtgtgttaattcatggtacaccag

SEQ ID NO: 449213 - DNA, 59 bp, Artificial
  Synthetic oligonucleotide
tacagttcgcaccactgatggccactcagcaaaagggcctatgccagagaactggacga

SEQ ID NO: 449214 - DNA, 57 bp, Artificial
  Synthetic oligonucleotide
tacagttggactgccagtccctttgggccccaatgagttccttccagtgcttcattt

SEQ ID NO: 449215 - DNA, 56 bp, Artificial
  Synthetic oligonucleotide
tacagttggactgccagtctctttgggccccaattagctctttccagtgtttcaac

SEQ ID NO: 449216 - DNA, 60 bp, Artificial
  Synthetic oligonucleotide
tacagtttacacagggtaagtggtacctgctaactagcacagttatgcatgatggcccca

SEQ ID NO: 449217 - DNA, 54 bp, Artificial
  Synthetic oligonucleotide
tacagtttgaacaccgtattgcaacgcgtcagtcactttgaacacccagcgcgt

SEQ ID NO: 449218 - DNA, 56 bp, Artificial
  Synthetic oligonucleotide
tacagtttgattgccagtccttctgggcccccatgaattccttaaagtgctttaag

SEQ ID NO: 449219 - DNA, 60 bp, Artificial
  Synthetic oligonucleotide
tacagtttgctttctgacaaaaggcttaggcatttcctatggcaggaagaagcggagaca

SEQ ID NO: 449220 - DNA, 58 bp, Artificial
  Synthetic oligonucleotide
tacagttttctgaaggatttcgcgggacctcggatcctcgaagaggatctgaattaca

SEQ ID NO: 449221 - DNA, 59 bp, Artificial
  Synthetic oligonucleotide
tacagttttctgccctgattaaggatcttccgattcagtcttccctaggactcggatgc

SEQ ID NO: 449222 - DNA, 58 bp, Artificial
  Synthetic oligonucleotide
tacataaaaagacaggggagtacccctctagccctgatggacatcttgatgttttcta

SEQ ID NO: 449223 - DNA, 60 bp, Artificial
  Synthetic oligonucleotide
tacataaacacagctttactcaacgcttcttgtgcagccatggatgactttcagttgatc

SEQ ID NO: 449224 - DNA, 58 bp, Artificial
  Synthetic oligonucleotide
tacataaagcacaacttcccagatgctgttccttacatagatgaatacttgaacattg

SEQ ID NO: 449225 - DNA, 60 bp, Artificial
  Synthetic oligonucleotide
tacataaatctcatgggctcatggataaaaccccaatgtgttggctacgagagagtctta

SEQ ID NO: 449226 - DNA, 57 bp, Artificial
  Synthetic oligonucleotide
tacataagaaccgttcggtataaccttattcatgctctcgccattcacccttagggc

SEQ ID NO: 449227 - DNA, 60 bp, Artificial
  Synthetic oligonucleotide
tacataagggcttgcacaaactggcccttttgaatatcattctcgaaacagggctcattg

SEQ ID NO: 449228 - DNA, 52 bp, Artificial
  Synthetic oligonucleotide
tacataatcaggtgtatgaggcattccgaaagcgttgaccattgcaagaagt

SEQ ID NO: 449229 - DNA, 59 bp, Artificial
  Synthetic oligonucleotide
tacataatttaggctctacgttattcgatatggatcgtcaacgtaatgtagagaactta

SEQ ID NO: 449230 - DNA, 54 bp, Artificial
  Synthetic oligonucleotide
tacatacaactggggggacaacgagacagacgtgctcatccttaactcgaccag

SEQ ID NO: 449231 - DNA, 60 bp, Artificial
  Synthetic oligonucleotide
tacatacagagcaaggtctaccttaccgaaaccaggaagctcaccgtacagtgcaatgta

SEQ ID NO: 449232 - DNA, 55 bp, Artificial
  Synthetic oligonucleotide
tacatacatacaaataacaattctatgggatgttaccaatgtagggcctgccagc

SEQ ID NO: 449233 - DNA, 58 bp, Artificial
  Synthetic oligonucleotide
tacataccagcggtgtggatccggaccctggctaacacctaggtgtctggtggattac

SEQ ID NO: 449234 - DNA, 56 bp, Artificial
  Synthetic oligonucleotide
tacatacccacctatatttttctctcggaagagaccgctgaagtggcttacgggta

SEQ ID NO: 449235 - DNA, 56 bp, Artificial
  Synthetic oligonucleotide
tacataccctatggaaggcgggcatcttatataaaagggaaacgacacgtagcgcc

SEQ ID NO: 449236 - DNA, 60 bp, Artificial
  Synthetic oligonucleotide
tacataccggtgccacagaggagacacccaaattcagacgaggagatcattcgagctaaa

SEQ ID NO: 449237 - DNA, 60 bp, Artificial
  Synthetic oligonucleotide
tacatacgccgcgcatgtcatattcccctacaacattaccagttccaagatatgcctcca

SEQ ID NO: 449238 - DNA, 60 bp, Artificial
  Synthetic oligonucleotide
tacatactatcacgctatcaccgagatgatggagatggacaggttcaatactaacgcaac

SEQ ID NO: 449239 - DNA, 57 bp, Artificial
  Synthetic oligonucleotide
tacatagactcacttgctactaagtgccccccagccccagaggaaacagtggaaaag

SEQ ID NO: 449240 - DNA, 55 bp, Artificial
  Synthetic oligonucleotide
tacataggcctgccttgacctctaggcgtggtgtggtacgttttagtagggtggg

SEQ ID NO: 449241 - DNA, 60 bp, Artificial
  Synthetic oligonucleotide
tacatatacagtagaagatgcgaatgctaatttagctctagtaaacttagtagatatgcg

SEQ ID NO: 449242 - DNA, 60 bp, Artificial
  Synthetic oligonucleotide
tacatatcagcccattatcaggaagtgcccagcatatagaggaatgttcctgttatcccc

SEQ ID NO: 449243 - DNA, 60 bp, Artificial
  Synthetic oligonucleotide
tacatatcccagtaggtcaggcaacattagtgatagtcacttattggggattaacaacag

SEQ ID NO: 449244 - DNA, 60 bp, Artificial
  Synthetic oligonucleotide
tacatatgcatcataggagggaattcagcacctgtttatgccccatcacctgatgacttt

SEQ ID NO: 449245 - DNA, 60 bp, Artificial
  Synthetic oligonucleotide
tacatatgctagatttgattctgaaattacaatagtaccatctatagctggcaagggcaa

SEQ ID NO: 449246 - DNA, 60 bp, Artificial
  Synthetic oligonucleotide
tacatatgggactagggcgaacattctatgcaacaggtgacataataggggatataagac

SEQ ID NO: 449247 - DNA, 50 bp, Artificial
  Synthetic oligonucleotide
tacatattaaaagtgaaaggtagcatatcagctttacaagactacatagc

SEQ ID NO: 449248 - DNA, 58 bp, Artificial
  Synthetic oligonucleotide
tacatattgagggaattgactgtccaacacctgctgacttaagccgttattgtgttcc

SEQ ID NO: 449249 - DNA, 60 bp, Artificial
  Synthetic oligonucleotide
tacatattgatactagcagtctgtgttgttagcacctcagcagttgagatggaaagccta

SEQ ID NO: 449250 - DNA, 60 bp, Artificial
  Synthetic oligonucleotide
tacatcaaccagaggcagtgttagaagcccctggcctgtttataaagcctgcaaatagcc

SEQ ID NO: 449251 - DNA, 55 bp, Artificial
  Synthetic oligonucleotide
tacatcaaccgtaccctacttcaaggtgttccgacgcttcgaagcgataccggcg

SEQ ID NO: 449252 - DNA, 60 bp, Artificial
  Synthetic oligonucleotide
tacatcaagcataattttccagatgcaattccatacatagatgagtatctcaacattgaa

SEQ ID NO: 449253 - DNA, 60 bp, Artificial
  Synthetic oligonucleotide
tacatcaatgaatatgttcgagttcacacgcgtgggatccgactaacctgtagcgtgcgg

SEQ ID NO: 449254 - DNA, 57 bp, Artificial
  Synthetic oligonucleotide
tacatcacactgtggtaccagactgcggtggtaaccccccccaactgcccgaatgag

SEQ ID NO: 449255 - DNA, 53 bp, Artificial
  Synthetic oligonucleotide
tacatcaccaagtcatagatgtcttgacaccgctcttcaagattattggagat

SEQ ID NO: 449256 - DNA, 59 bp, Artificial
  Synthetic oligonucleotide
tacatcacccacctaccgatactgaacagacaaatttatacataaggaccgacacaaca

SEQ ID NO: 449257 - DNA, 60 bp, Artificial
  Synthetic oligonucleotide
tacatcataatgtgctgtggaagcatcaccaatcctatgatccagcgcctaaacggtatc

SEQ ID NO: 449258 - DNA, 56 bp, Artificial
  Synthetic oligonucleotide
tacatcatcccttaccagaagagaagctgatcatcgaaaccgatgcatcagacgac

SEQ ID NO: 449259 - DNA, 56 bp, Artificial
  Synthetic oligonucleotide
tacatcatggaggacctaccaggcggtccgactcaggtctatatcactagagccac

SEQ ID NO: 449260 - DNA, 60 bp, Artificial
  Synthetic oligonucleotide
tacatcattggtcgtggctatgaacgccgctacacatgctacctcgcacgccgaatcgct

SEQ ID NO: 449261 - DNA, 51 bp, Artificial
  Synthetic oligonucleotide
tacatccaccacggaatatggaatcctgagaccttagaagagggctacgaa

SEQ ID NO: 449262 - DNA, 60 bp, Artificial
  Synthetic oligonucleotide
tacatccacccgcgctcgtgaggcacatattcagatgaaggcagcagcgcttaagtcggc

SEQ ID NO: 449263 - DNA, 55 bp, Artificial
  Synthetic oligonucleotide
tacatccagataagtggacagtccagcaaataaaattgccagaacaggaagtgtg

SEQ ID NO: 449264 - DNA, 60 bp, Artificial
  Synthetic oligonucleotide
tacatccagtcgcgagcaatataaagctcgaccaggaattgcgtccgcacagaaagctac

SEQ ID NO: 449265 - DNA, 55 bp, Artificial
  Synthetic oligonucleotide
tacatcccaagcggacgcccgacagcagtgaacagcggcagtcctactgcaacgg

SEQ ID NO: 449266 - DNA, 57 bp, Artificial
  Synthetic oligonucleotide
tacatcccagtaggacaagtgacagactatggcttcttaaatctaggaggcaccccc

SEQ ID NO: 449267 - DNA, 59 bp, Artificial
  Synthetic oligonucleotide
tacatcccagtggggcaggtcacagattatggcttcttgaacctaggtggtacacccac

SEQ ID NO: 449268 - DNA, 58 bp, Artificial
  Synthetic oligonucleotide
tacatccccaaagatacgcactatatatcgattcaatcaccttacgttagtacggatt

SEQ ID NO: 449269 - DNA, 60 bp, Artificial
  Synthetic oligonucleotide
tacatccgctactaacgagcaatcaccatcccatggcgactgacaatagcgacgctaaga

SEQ ID NO: 449270 - DNA, 55 bp, Artificial
  Synthetic oligonucleotide
tacatccgttgcttgggctacctagtatccagcgtcctactagcgttgtggtcgg

SEQ ID NO: 449271 - DNA, 60 bp, Artificial
  Synthetic oligonucleotide
tacatcctcaccagaggatggtcagacaacggcgacccaatgttcaaccagacatgggcc

SEQ ID NO: 449272 - DNA, 58 bp, Artificial
  Synthetic oligonucleotide
tacatcctgcgaccccttgggctttactcgtctgcatggtaccggtctgcagcactat

SEQ ID NO: 449273 - DNA, 60 bp, Artificial
  Synthetic oligonucleotide
tacatccttaccagaggatggtccgataacggtgaccccatgttcaatcagacatgggcc

SEQ ID NO: 449274 - DNA, 60 bp, Artificial
  Synthetic oligonucleotide
tacatcgaatcagcaacgagaaatcaagtattatggctattaccaatgggttttcatcgt

SEQ ID NO: 449275 - DNA, 54 bp, Artificial
  Synthetic oligonucleotide
tacatcgatcccactgacggcacaagggatttgatccaccactcgccaaacctg

SEQ ID NO: 449276 - DNA, 52 bp, Artificial
  Synthetic oligonucleotide
tacatcgcaccatacatcgcgaatttattcgggagaacttcattgttgtacg

SEQ ID NO: 449277 - DNA, 56 bp, Artificial
  Synthetic oligonucleotide
tacatcgcggactgtaactttgagtcgcacactggtgagtacgcagtatcctgtat

SEQ ID NO: 449278 - DNA, 51 bp, Artificial
  Synthetic oligonucleotide
tacatcgcggtgtccgctagatgtgacctgttatctggcgcagaggtataa

SEQ ID NO: 449279 - DNA, 55 bp, Artificial
  Synthetic oligonucleotide
tacatcggcatgcagggccttggtgaggccgtgacaccggcagaggccgaaacgt

SEQ ID NO: 449280 - DNA, 50 bp, Artificial
  Synthetic oligonucleotide
tacatcgtgcggaaacacctacacgaactctgtggcgaacgcgaccccgg

SEQ ID NO: 449281 - DNA, 53 bp, Artificial
  Synthetic oligonucleotide
tacatcgtgctcatccaatgtctcggttgcacacgatgcaacaggcaaaaggg

SEQ ID NO: 449282 - DNA, 60 bp, Artificial
  Synthetic oligonucleotide
tacatcgttgcgatcaccatatactaatgcgaatttctttcaagattagagcgcttagat

SEQ ID NO: 449283 - DNA, 60 bp, Artificial
  Synthetic oligonucleotide
tacatcgttggcttataattatgaacctgagcaattgaataagactgaccctgagatgaa

SEQ ID NO: 449284 - DNA, 55 bp, Artificial
  Synthetic oligonucleotide
tacatctaattgggaaagtccatgacgcctgcagtgactcgttgtcggtcattcg

SEQ ID NO: 449285 - DNA, 51 bp, Artificial
  Synthetic oligonucleotide
tacatctacaactaagatggcggacagttggattcaagcattacgcaatag

SEQ ID NO: 449286 - DNA, 60 bp, Artificial
  Synthetic oligonucleotide
tacatctctatccgtgaactgtttagataagatcttcaccgtcggtgctcggaaagcaat

SEQ ID NO: 449287 - DNA, 55 bp, Artificial
  Synthetic oligonucleotide
tacatctgaggcttacgtacgtgcgtcgcgaattatcaatgaaccgggagctggt

SEQ ID NO: 449288 - DNA, 60 bp, Artificial
  Synthetic oligonucleotide
tacatctgggaattcaagcgaacagactggtacgatgtcttcatctatttctttgtacga

SEQ ID NO: 449289 - DNA, 60 bp, Artificial
  Synthetic oligonucleotide
tacatctggggagttcatcacccttcaacagacacagagcagaccaatctgtacaagaac

SEQ ID NO: 449290 - DNA, 59 bp, Artificial
  Synthetic oligonucleotide
tacatctgtagaagaattagacgagtctccggttaatgatagtaaaccgaagattgcta

SEQ ID NO: 449291 - DNA, 55 bp, Artificial
  Synthetic oligonucleotide
tacatcttatattttcatgatgttcttaggttcgtaagtcaaacgggaggacctg

SEQ ID NO: 449292 - DNA, 60 bp, Artificial
  Synthetic oligonucleotide
tacatcttgcaactacagtaccggaaagaagagtcatcaatcgagaagattacgtcaagg

SEQ ID NO: 449293 - DNA, 60 bp, Artificial
  Synthetic oligonucleotide
tacatgaacatgccgaatgctttgtgctcactgtggaggtatatgcgaggagggatgtct

SEQ ID NO: 449294 - DNA, 59 bp, Artificial
  Synthetic oligonucleotide
tacatgaaccttttcacgaagttaaatggcactaattacatggaactgcgtcgtgtgta

SEQ ID NO: 449295 - DNA, 60 bp, Artificial
  Synthetic oligonucleotide
tacatgacacttgatgtggcagaatgggattcctcagtctgtcgtgagcttttgcatgct

SEQ ID NO: 449296 - DNA, 60 bp, Artificial
  Synthetic oligonucleotide
tacatgacatcatatgtctcttatcctgcgaagaccagaactggaacgaataaccgcgtt

SEQ ID NO: 449297 - DNA, 55 bp, Artificial
  Synthetic oligonucleotide
tacatgacatcgccgtgtccggttggacctgtgcttactgcgcatccaccctaac

SEQ ID NO: 449298 - DNA, 60 bp, Artificial
  Synthetic oligonucleotide
tacatgagaatcagtatggcactgactttgtcatggcccataattcagctatctcgacgt

SEQ ID NO: 449299 - DNA, 60 bp, Artificial
  Synthetic oligonucleotide
tacatgaggagtggctggggttggacaggttcagatggcaagactacttggtgcagccag

SEQ ID NO: 449300 - DNA, 50 bp, Artificial
  Synthetic oligonucleotide
tacatgaggctggtgcaggctgaaatcagttatgttagagaacacttaat

SEQ ID NO: 449301 - DNA, 60 bp, Artificial
  Synthetic oligonucleotide
tacatgagtgaacctgttggcttaatcaacctgtctgatgtcatctaggaaactcctaat

SEQ ID NO: 449302 - DNA, 53 bp, Artificial
  Synthetic oligonucleotide
tacatgatacggatagttgaatacataaacaacgaggtatacaatacaacaaa

SEQ ID NO: 449303 - DNA, 58 bp, Artificial
  Synthetic oligonucleotide
tacatgatagaaccccttatcgaaccctattgatgaatgaattgggtgtcccgtttca

SEQ ID NO: 449304 - DNA, 60 bp, Artificial
  Synthetic oligonucleotide
tacatgatcttcctcgtctgctatatgatactctaccagaacctccacaacgactacagg

SEQ ID NO: 449305 - DNA, 60 bp, Artificial
  Synthetic oligonucleotide
tacatgatgttgtcttctcccatcttgctagtagcactgacattagattctcaacagtct

SEQ ID NO: 449306 - DNA, 54 bp, Artificial
  Synthetic oligonucleotide
tacatgattattcatattatactaacaatgaaataagaacggatcaacattgga

SEQ ID NO: 449307 - DNA, 55 bp, Artificial
  Synthetic oligonucleotide
tacatgattgcatacgccccgccaggcatggagccgcctaaaacacccgaggcgg

SEQ ID NO: 449308 - DNA, 60 bp, Artificial
  Synthetic oligonucleotide
tacatgattgttcctatacatgcatgcaacatgatgaaaagctgtttgattggtcttggt

SEQ ID NO: 449309 - DNA, 60 bp, Artificial
  Synthetic oligonucleotide
tacatgcaccctgccgtgttgacagccggcagaatcagtgagatgggtgtctgctttgga

SEQ ID NO: 449310 - DNA, 60 bp, Artificial
  Synthetic oligonucleotide
tacatgcactggtgttgagttagaacctaccaaagacatattgttagaacatagaggaac

SEQ ID NO: 449311 - DNA, 60 bp, Artificial
  Synthetic oligonucleotide
tacatgcagccttaagtataaaaagggctctaagcatgatacaagatgcccctataatag

SEQ ID NO: 449312 - DNA, 55 bp, Artificial
  Synthetic oligonucleotide
tacatgccagtcatgaaaagatacagcgctccttccgagagtgaaggagttctgt

SEQ ID NO: 449313 - DNA, 50 bp, Artificial
  Synthetic oligonucleotide
tacatgcccgttaccaaccctgacaacttctatagggggtacacattcat

SEQ ID NO: 449314 - DNA, 51 bp, Artificial
  Synthetic oligonucleotide
tacatgcctatcggtgtacacgcagacttcgttaactcaatcttaggtcgt

SEQ ID NO: 449315 - DNA, 60 bp, Artificial
  Synthetic oligonucleotide
tacatgcgcgattacacagcgcacaacattgcaattctccaacaagcacgtgcccagctg

SEQ ID NO: 449316 - DNA, 52 bp, Artificial
  Synthetic oligonucleotide
tacatgctgaaacgcaagtacgagggcaaggttgacccgaccgacatttggc

SEQ ID NO: 449317 - DNA, 52 bp, Artificial
  Synthetic oligonucleotide
tacatgctgggatttattcgaatgggatttcgagcagatacaacgggattct

SEQ ID NO: 449318 - DNA, 56 bp, Artificial
  Synthetic oligonucleotide
tacatgctgttgaatgaacaaccaccggccaattgggacgcaaaaggtttcactga

SEQ ID NO: 449319 - DNA, 60 bp, Artificial
  Synthetic oligonucleotide
tacatggaagcaaacgattactacccagctaggtaccagtcacacatgctaatcggtcgc

SEQ ID NO: 449320 - DNA, 60 bp, Artificial
  Synthetic oligonucleotide
tacatggaccaaggtgtctggccatgtggaccatgcaggactatactttacacacgaagg

SEQ ID NO: 449321 - DNA, 51 bp, Artificial
  Synthetic oligonucleotide
tacatggacccgctaaagagcaagcagtctcgcgtcctggttacggcacgc

SEQ ID NO: 449322 - DNA, 57 bp, Artificial
  Synthetic oligonucleotide
tacatggactgtttgtgaaacaactgaacatgaggttgccattcggtgtggtgaaac

SEQ ID NO: 449323 - DNA, 58 bp, Artificial
  Synthetic oligonucleotide
tacatggaggtggaccactgaatccagaaccgagaaaaatgctataataacgttaaca

SEQ ID NO: 449324 - DNA, 50 bp, Artificial
  Synthetic oligonucleotide
tacatggattggcaatacgatcatcaatatgtgcttgctggcgcagagta

SEQ ID NO: 449325 - DNA, 60 bp, Artificial
  Synthetic oligonucleotide
tacatggcacgccttgcgtacagcgattttgaatcgaacagcgttgcccggagttatgcc

SEQ ID NO: 449326 - DNA, 60 bp, Artificial
  Synthetic oligonucleotide
tacatggcagggaggagcacagccactatactagccaagatggcaactaggttggattcc

SEQ ID NO: 449327 - DNA, 59 bp, Artificial
  Synthetic oligonucleotide
tacatggctagcttacaccttcgtgaacgaggatgtagggactataagaccagtgttag

SEQ ID NO: 449328 - DNA, 55 bp, Artificial
  Synthetic oligonucleotide
tacatgggcatgaggccttcgcggggatgcaggtagagccattggagggcctcgt

SEQ ID NO: 449329 - DNA, 57 bp, Artificial
  Synthetic oligonucleotide
tacatggtcagtcgatatcagctgtgaaggttatcagccaacaagcagcaccacaga

SEQ ID NO: 449330 - DNA, 55 bp, Artificial
  Synthetic oligonucleotide
tacatggtcttgggttgaagcaggtggtgtagaacgtactcacagaatttgtgtg

SEQ ID NO: 449331 - DNA, 52 bp, Artificial
  Synthetic oligonucleotide
tacatggtgaacgtcagggtggccagtctcccggcccggatccgtatcagat

SEQ ID NO: 449332 - DNA, 55 bp, Artificial
  Synthetic oligonucleotide
tacatggtggtggtcgatcacttggacagagattcatgacttggatgcggcagga

SEQ ID NO: 449333 - DNA, 58 bp, Artificial
  Synthetic oligonucleotide
tacatggttgtggaggaatacacctggtattcctcccctagattgatatctagtaccg

SEQ ID NO: 449334 - DNA, 59 bp, Artificial
  Synthetic oligonucleotide
tacatgtacaagacccggcaacaatacaagacaaagtatacatatagcaccaggaagag

SEQ ID NO: 449335 - DNA, 60 bp, Artificial
  Synthetic oligonucleotide
tacatgtcaaattgcagcttttgattcaacgtttgctgagaatgcacaaaataatactca

SEQ ID NO: 449336 - DNA, 59 bp, Artificial
  Synthetic oligonucleotide
tacatgtcgcataagtggttaaacgcctgtggtatgttaatcccgaaactatcacgaga

SEQ ID NO: 449337 - DNA, 60 bp, Artificial
  Synthetic oligonucleotide
tacatgtcgcgtcttgagatgcgagcctgcacgcgtggtctacctcaatcgacgtactgt

SEQ ID NO: 449338 - DNA, 56 bp, Artificial
  Synthetic oligonucleotide
tacatgtctggtcaacaaagtgcaaaaatttaggggatcagaacaacgagtaaatt

SEQ ID NO: 449339 - DNA, 58 bp, Artificial
  Synthetic oligonucleotide
tacatgtgggaagtgcaacctccctagccgatagcccttgaccgggtgtgtaggatag

SEQ ID NO: 449340 - DNA, 60 bp, Artificial
  Synthetic oligonucleotide
tacatgttacctgaaggcctctgcggcctgtcgagctgcaaagctccaggactgcacaat

SEQ ID NO: 449341 - DNA, 60 bp, Artificial
  Synthetic oligonucleotide
tacatgttagccaacaacgacatccgtgtaccagaaatcttagcttggataatcatcgta

SEQ ID NO: 449342 - DNA, 60 bp, Artificial
  Synthetic oligonucleotide
tacatgttcgaaagtaaaagcatgaagattagaacacaaataccggcagaaacgctagca

SEQ ID NO: 449343 - DNA, 57 bp, Artificial
  Synthetic oligonucleotide
tacatgttgacagtctttcatcctgaaactagaaatgctgaactaccacgtattttg

SEQ ID NO: 449344 - DNA, 55 bp, Artificial
  Synthetic oligonucleotide
tacattaacagaacttcctttaataaatgttgcaattaatttatcacacgccttt

SEQ ID NO: 449345 - DNA, 55 bp, Artificial
  Synthetic oligonucleotide
tacattaagagcctctgacttactgccgctgttaagtgccttggcgtaagcgtcg

SEQ ID NO: 449346 - DNA, 60 bp, Artificial
  Synthetic oligonucleotide
tacattacatagtcagcagtatgctgacagaaaacacacacatagtgcagcctcgggcta

SEQ ID NO: 449347 - DNA, 55 bp, Artificial
  Synthetic oligonucleotide
tacattacatttcagctacagtactctatcaaatgggcttatactcctaggaccc

SEQ ID NO: 449348 - DNA, 60 bp, Artificial
  Synthetic oligonucleotide
tacattaccatcactcagtattggtgcttagcaccagacaagggatacacatcagactgg

SEQ ID NO: 449349 - DNA, 60 bp, Artificial
  Synthetic oligonucleotide
tacattactatacacttcgtattcatcggctacattaatatctatcactggagcctcttg

SEQ ID NO: 449350 - DNA, 55 bp, Artificial
  Synthetic oligonucleotide
tacattagatattactttgacagcttacgatattggatgtcgcgactacgaatgc

SEQ ID NO: 449351 - DNA, 59 bp, Artificial
  Synthetic oligonucleotide
tacattagcaggcaatgctcagtctaaagtctgtgcttatgatggtctggtgtcactga

SEQ ID NO: 449352 - DNA, 59 bp, Artificial
  Synthetic oligonucleotide
tacattaggccaccacaaacctgttacaaagggtggtgagcatcactgtgcaaactggt

SEQ ID NO: 449353 - DNA, 58 bp, Artificial
  Synthetic oligonucleotide
tacattatgttactgatacgtcttccaaacttctacccacgttgttatgaactagata

SEQ ID NO: 449354 - DNA, 55 bp, Artificial
  Synthetic oligonucleotide
tacattcagaacacacaccgaaagttcatatatatacgacgccctgggattccga

SEQ ID NO: 449355 - DNA, 60 bp, Artificial
  Synthetic oligonucleotide
tacattcagaatagcagctcgtttatctggagacatcagttttacaggtgtgagtgcagg

SEQ ID NO: 449356 - DNA, 60 bp, Artificial
  Synthetic oligonucleotide
tacattcagagagggcctctactgatgtaccatttcagttggtaggacagaattatgttt

SEQ ID NO: 449357 - DNA, 60 bp, Artificial
  Synthetic oligonucleotide
tacattcagagcacacgcctaagatacatatatatacgaccccatgggattcggatagcg

SEQ ID NO: 449358 - DNA, 60 bp, Artificial
  Synthetic oligonucleotide
tacattcatgatgaattgtgaagtggcacttacaggggagattgaccttgcgaggacgtt

SEQ ID NO: 449359 - DNA, 55 bp, Artificial
  Synthetic oligonucleotide
tacattccgaaaggcaaatagcagcaatggcacgtgatttggcgcgtcgcgcccg

SEQ ID NO: 449360 - DNA, 55 bp, Artificial
  Synthetic oligonucleotide
tacattccgctagtactccaccctacgggttaagcaaatgagaatatcgaaacgg

SEQ ID NO: 449361 - DNA, 52 bp, Artificial
  Synthetic oligonucleotide
tacattccgctcgtcggcgctcccttagggggcgttgccagggccctggcac

SEQ ID NO: 449362 - DNA, 55 bp, Artificial
  Synthetic oligonucleotide
tacattcctccaggaccattcaagagacctcggagggacacgaacgccgaaaacc

SEQ ID NO: 449363 - DNA, 56 bp, Artificial
  Synthetic oligonucleotide
tacattctacctcagagtttatgtttcttgattgcttttcaaggagcatactacta

SEQ ID NO: 449364 - DNA, 60 bp, Artificial
  Synthetic oligonucleotide
tacattctctatgagattggatcttacgatgactctactggaaacttcattcccttagat

SEQ ID NO: 449365 - DNA, 60 bp, Artificial
  Synthetic oligonucleotide
tacattctgggtactctgacgcagatggttagcgcacctccgcacattatcaacgctacc

SEQ ID NO: 449366 - DNA, 60 bp, Artificial
  Synthetic oligonucleotide
tacattgaacaaaacatgagcagcagctctaattacatcgttaatggagataacacctat

SEQ ID NO: 449367 - DNA, 52 bp, Artificial
  Synthetic oligonucleotide
tacattgaatgtcgcttcgcgcggggattctacttgcttgcggagctgcgta

SEQ ID NO: 449368 - DNA, 52 bp, Artificial
  Synthetic oligonucleotide
tacattgaccattttacatcacatacggagttgtcggtaccgtgtaacacca

SEQ ID NO: 449369 - DNA, 55 bp, Artificial
  Synthetic oligonucleotide
tacattgacggttacggaaaactcaggtgggaaaacagcgtacttagcggatgga

SEQ ID NO: 449370 - DNA, 50 bp, Artificial
  Synthetic oligonucleotide
tacattgaggaatgggtgttctccaaacccactatacctaatcagtctgt

SEQ ID NO: 449371 - DNA, 60 bp, Artificial
  Synthetic oligonucleotide
tacattgctgctccccatgtttgggtattcgtgacaagatgcgtcacaccgaaagattaa

SEQ ID NO: 449372 - DNA, 51 bp, Artificial
  Synthetic oligonucleotide
tacattgctgctctccttgcctaggtgttcgcgataaaatgcggcacaccg

SEQ ID NO: 449373 - DNA, 56 bp, Artificial
  Synthetic oligonucleotide
tacattggaccgcctttggcgttgctatgcagggctttgaaagggtctatgatgtg

SEQ ID NO: 449374 - DNA, 58 bp, Artificial
  Synthetic oligonucleotide
tacattgtaccgccgttggcttgattcattttagcaaccctacctcagtcgaattgga

SEQ ID NO: 449375 - DNA, 59 bp, Artificial
  Synthetic oligonucleotide
tacattgtccgttatttcacagtctccgtatattcccatcaacgcaaatcagtacgtct

SEQ ID NO: 449376 - DNA, 50 bp, Artificial
  Synthetic oligonucleotide
tacattgtgccggtacgcgacattacacccggtacgacaattccttcggg

SEQ ID NO: 449377 - DNA, 54 bp, Artificial
  Synthetic oligonucleotide
tacattgttcttaaatactcttaagaaatgccaaatctgaggacgtaaacgagt

SEQ ID NO: 449378 - DNA, 58 bp, Artificial
  Synthetic oligonucleotide
tacatttacaccacctattgattattggatacttattaactcaaatacaaatggagta

SEQ ID NO: 449379 - DNA, 58 bp, Artificial
  Synthetic oligonucleotide
tacatttactgcccatgggcagacccgtctgtactttaagagtgttggcaaccagtaa

SEQ ID NO: 449380 - DNA, 55 bp, Artificial
  Synthetic oligonucleotide
tacatttagagatgatctgccaatacctgtaagagaaagaccaacgttgtatcgg

SEQ ID NO: 449381 - DNA, 57 bp, Artificial
  Synthetic oligonucleotide
tacatttccagaggcgagcaatcttgggagcgttaaagttcggttgcaaggtattag

SEQ ID NO: 449382 - DNA, 60 bp, Artificial
  Synthetic oligonucleotide
tacatttcgtacacgtatttatacacttgcattagtatacacatcgtacaagtcgtgtac

SEQ ID NO: 449383 - DNA, 60 bp, Artificial
  Synthetic oligonucleotide
tacatttgaattatcacagatggtacaatgggcctacgataatgacatagtagacgatag

SEQ ID NO: 449384 - DNA, 60 bp, Artificial
  Synthetic oligonucleotide
tacatttgatgagttgtttggcgcgcgtatccattgtcacggtaatttatctgtcgtacc

SEQ ID NO: 449385 - DNA, 59 bp, Artificial
  Synthetic oligonucleotide
tacatttgctcacagcccggttgtggcgaggcagatgttactaaattgtacctcggagg

SEQ ID NO: 449386 - DNA, 57 bp, Artificial
  Synthetic oligonucleotide
tacatttggaataaaaacacatcagacacagtgagagagatctctaatcgcgtcctt

SEQ ID NO: 449387 - DNA, 55 bp, Artificial
  Synthetic oligonucleotide
tacatttggttctctgaacagcctgtaaaatgaattctgcacggagagtaaagcg

SEQ ID NO: 449388 - DNA, 60 bp, Artificial
  Synthetic oligonucleotide
tacatttgtagtgcagattgtgtgatcacagtggacaaagaaacagctcagatccgtttg

SEQ ID NO: 449389 - DNA, 55 bp, Artificial
  Synthetic oligonucleotide
tacatttgttcgaagttcctactctctgacgagttcggtaatacattttccgttc

SEQ ID NO: 449390 - DNA, 55 bp, Artificial
  Synthetic oligonucleotide
tacatttgttgtgcacagtgatccactaactagtacgcctatacctggtaatgcc

SEQ ID NO: 449391 - DNA, 53 bp, Artificial
  Synthetic oligonucleotide
taccaaaagtggaaggagtcttctccgttgttgtggtcgtggatcgtaaaccc

SEQ ID NO: 449392 - DNA, 57 bp, Artificial
  Synthetic oligonucleotide
taccaaaatgtgggaacatatgtttccgttggaacatcaacactaaataagaggtca

SEQ ID NO: 449393 - DNA, 55 bp, Artificial
  Synthetic oligonucleotide
taccaaacctaggcctcaagtccttcctgatagcggaggaccactcattgatcta

SEQ ID NO: 449394 - DNA, 60 bp, Artificial
  Synthetic oligonucleotide
taccaaagcttggacaatggccgacaatgtttgatgtggctacagctgtgtacatgttga

SEQ ID NO: 449395 - DNA, 54 bp, Artificial
  Synthetic oligonucleotide
taccaaagcttgtggttatcggccttctccgctctcccggggaacaccaaggac

SEQ ID NO: 449396 - DNA, 54 bp, Artificial
  Synthetic oligonucleotide
taccaaaggatatcccacccttccctcaaaagctaggattcagacaacccgaaa

SEQ ID NO: 449397 - DNA, 57 bp, Artificial
  Synthetic oligonucleotide
taccaaaggctaccttgaccaaatcattgggacccatagatcaccaaacttgaccta

SEQ ID NO: 449398 - DNA, 56 bp, Artificial
  Synthetic oligonucleotide
taccaaagggcgttgattggtctcttgggtgctttgactctatttaacacactaac

SEQ ID NO: 449399 - DNA, 60 bp, Artificial
  Synthetic oligonucleotide
taccaaagggtgtcgcatgagcggcgatataaacacaggccttgggaacaagattctcat

SEQ ID NO: 449400 - DNA, 52 bp, Artificial
  Synthetic oligonucleotide
taccaaagtggactactccaacctgctcaaggacaggttcaaactgatgcaa

SEQ ID NO: 449401 - DNA, 53 bp, Artificial
  Synthetic oligonucleotide
taccaaagttggaacttttaacccagtgaaaacttcactggagttgataaata

SEQ ID NO: 449402 - DNA, 59 bp, Artificial
  Synthetic oligonucleotide
taccaaatactatttcgtttgttatacgatattacgcacgatgatatgcttgatacgat

SEQ ID NO: 449403 - DNA, 60 bp, Artificial
  Synthetic oligonucleotide
taccaaatatggctcaagctgttgtcagatggcttacctcagttggaggtgtttctcagg

SEQ ID NO: 449404 - DNA, 50 bp, Artificial
  Synthetic oligonucleotide
taccaaatggctggttatactgtgatgcggatggaagtcgttttgacagc

SEQ ID NO: 449405 - DNA, 60 bp, Artificial
  Synthetic oligonucleotide
taccaaatgtcagaccccagtgggtgcaataaattccagtatgcctttccacaatgttca

SEQ ID NO: 449406 - DNA, 53 bp, Artificial
  Synthetic oligonucleotide
taccaaattaggtaaggcgggcgatcagactttaactcttactccacgtgggg

SEQ ID NO: 449407 - DNA, 56 bp, Artificial
  Synthetic oligonucleotide
taccaaatttacatgttttaccacgaccgagacaagagttaatagagaggcttgaa

SEQ ID NO: 449408 - DNA, 59 bp, Artificial
  Synthetic oligonucleotide
taccaacacgactgcgacaggccgcgtttctgtcatttgggataaggattcgcaagacc

SEQ ID NO: 449409 - DNA, 60 bp, Artificial
  Synthetic oligonucleotide
taccaacagagacccagcaatcgtacgcgctatcgcccggttcatttcagggtgatgctc

SEQ ID NO: 449410 - DNA, 50 bp, Artificial
  Synthetic oligonucleotide
taccaacattcgaaccaaaagagtcaatattgaagaaactagaagatatt

SEQ ID NO: 449411 - DNA, 53 bp, Artificial
  Synthetic oligonucleotide
taccaaccacagttggcaagtatgatatggtattcgtgaacgttaggaccccg

SEQ ID NO: 449412 - DNA, 58 bp, Artificial
  Synthetic oligonucleotide
taccaaccaggatcactagttccaatagtggcctggatgaccccgttcgttacgctgc

SEQ ID NO: 449413 - DNA, 59 bp, Artificial
  Synthetic oligonucleotide
taccaacctctttgtaaatattcactcagcccaatacaataataatgaattttcacaca

SEQ ID NO: 449414 - DNA, 55 bp, Artificial
  Synthetic oligonucleotide
taccaacgctgtgagcaccaggcataccattgctgattcgactggtaggagcttg

SEQ ID NO: 449415 - DNA, 60 bp, Artificial
  Synthetic oligonucleotide
taccaacgttgttgactggcggccatgtgttgaggcgactgctccatcaccttaagcttg

SEQ ID NO: 449416 - DNA, 55 bp, Artificial
  Synthetic oligonucleotide
taccaactaagagagatgattttgcttggcagtcgggaacaaatgcatcagtctt

SEQ ID NO: 449417 - DNA, 59 bp, Artificial
  Synthetic oligonucleotide
taccaactacatgtcgctaatttcaggtatgtggttactaactgtagtgccaaacgata

SEQ ID NO: 449418 - DNA, 59 bp, Artificial
  Synthetic oligonucleotide
taccaactcaaggagacgtggtggttgtagccaccgatgccctaatgactggatacacc

SEQ ID NO: 449419 - DNA, 56 bp, Artificial
  Synthetic oligonucleotide
taccaagacaacaatgaagacctctcaaatcgaaaaattgtttaggaaacatcctg

SEQ ID NO: 449420 - DNA, 58 bp, Artificial
  Synthetic oligonucleotide
taccaagaggcacttgcagctaccaagaccctttgggaggacaattctaccggtctca

SEQ ID NO: 449421 - DNA, 59 bp, Artificial
  Synthetic oligonucleotide
taccaagaggcgcaaagtcgaaatattcacgttggttatcgcaatctaaagtgctcaat

SEQ ID NO: 449422 - DNA, 60 bp, Artificial
  Synthetic oligonucleotide
taccaagattcagaagacctgtggcataaaacacatgcacaggtagatgcgaaaggcctg

SEQ ID NO: 449423 - DNA, 55 bp, Artificial
  Synthetic oligonucleotide
taccaagattggaataggaaacccctccccactatggatgactccaagttaaaga

SEQ ID NO: 449424 - DNA, 60 bp, Artificial
  Synthetic oligonucleotide
taccaagcatctaagcgctcacatttgaagcgtgtctctgggaaacgtcgaagtatagtc

SEQ ID NO: 449425 - DNA, 55 bp, Artificial
  Synthetic oligonucleotide
taccaagccggtgttggagtcatgtatgagagtgtgttccacacgttatggcata

SEQ ID NO: 449426 - DNA, 58 bp, Artificial
  Synthetic oligonucleotide
taccaaggaaatgcatagattaaaattttcaatttactagatgcaactattccaccaa

SEQ ID NO: 449427 - DNA, 55 bp, Artificial
  Synthetic oligonucleotide
taccaaggcaccgaggcgcagtggcttgcctcgctgaagggtgccaagggtgaca

SEQ ID NO: 449428 - DNA, 50 bp, Artificial
  Synthetic oligonucleotide
taccaaggcgaatttcttctaaggagtcaccatgtccgccgcatccgact

SEQ ID NO: 449429 - DNA, 60 bp, Artificial
  Synthetic oligonucleotide
taccaagggctggcacgatctcgactgccgctgcggtaactggcaggaccacctatggct

SEQ ID NO: 449430 - DNA, 57 bp, Artificial
  Synthetic oligonucleotide
taccaagtctattctcaacctccggactaacaccgagaccaacaatccgtgtgccag

SEQ ID NO: 449431 - DNA, 55 bp, Artificial
  Synthetic oligonucleotide
taccaagtgatggatttccgttatttgtaacaagatttaacgccacaacgaatcg

SEQ ID NO: 449432 - DNA, 53 bp, Artificial
  Synthetic oligonucleotide
taccaagtgttcgcaagagaattactagattatccaatgatgctcatgagtta

SEQ ID NO: 449433 - DNA, 54 bp, Artificial
  Synthetic oligonucleotide
taccaagttcaaaggaaaattgggagtcctacttaattacaagtagatatttga

SEQ ID NO: 449434 - DNA, 58 bp, Artificial
  Synthetic oligonucleotide
taccaataccaatgagtatagattaataaattgtaatacctcagccgtaacacaagcc

SEQ ID NO: 449435 - DNA, 58 bp, Artificial
  Synthetic oligonucleotide
taccaataccatctaacgcatgtaatcggggaaaaggtcacaatatatagtatggtac

SEQ ID NO: 449436 - DNA, 58 bp, Artificial
  Synthetic oligonucleotide
taccaatagatagtaatgctaccagatttaggttgataagttgtaacacctcaactat

SEQ ID NO: 449437 - DNA, 60 bp, Artificial
  Synthetic oligonucleotide
taccaatatgcaatgaaggttgtatttgtggagtcatattaccaccaataccacgaacca

SEQ ID NO: 449438 - DNA, 60 bp, Artificial
  Synthetic oligonucleotide
taccaatcacagcgagcacaggatcatctcatagtatacctattactgtgacaattgcac

SEQ ID NO: 449439 - DNA, 60 bp, Artificial
  Synthetic oligonucleotide
taccaatcagcttccacacactattgacctttactgttcactgaggcgttactacttgga

SEQ ID NO: 449440 - DNA, 56 bp, Artificial
  Synthetic oligonucleotide
taccaatcatatctgcgacggactcaatcaatggggatccaacttgaccagaggat

SEQ ID NO: 449441 - DNA, 53 bp, Artificial
  Synthetic oligonucleotide
taccaatccagcaacactagcctggcgtatcactcaaggttctacacaaattg

SEQ ID NO: 449442 - DNA, 60 bp, Artificial
  Synthetic oligonucleotide
taccaatcgccagtcaggaaggcagcctaccccactgtctccacctttgagaaacactca

SEQ ID NO: 449443 - DNA, 60 bp, Artificial
  Synthetic oligonucleotide
taccaatctcacctcatgttagctcaagggcactcagaacccggtgactgtgggggcatc

SEQ ID NO: 449444 - DNA, 58 bp, Artificial
  Synthetic oligonucleotide
taccaatgccgaattcaccctccaacttaatatatctcggaggcatacaaatgaccac

SEQ ID NO: 449445 - DNA, 53 bp, Artificial
  Synthetic oligonucleotide
taccaatgctaatttgaccaatgctacggtgaccaatgacaataacacgacca

SEQ ID NO: 449446 - DNA, 60 bp, Artificial
  Synthetic oligonucleotide
taccaatgctacgttgaatgctaatttgacctatgtcaataacataactaatggccataa

SEQ ID NO: 449447 - DNA, 60 bp, Artificial
  Synthetic oligonucleotide
taccaatggactccatgcttagacataataactggagcttagtaatcatacctatctgtg

SEQ ID NO: 449448 - DNA, 55 bp, Artificial
  Synthetic oligonucleotide
taccaatgtgacatgccaacgttctttaacacacgtcacacttatgaaggagaga

SEQ ID NO: 449449 - DNA, 51 bp, Artificial
  Synthetic oligonucleotide
taccaatgtgggatccattagtaaacgagtttcccgaaaccgttcacggtt

SEQ ID NO: 449450 - DNA, 59 bp, Artificial
  Synthetic oligonucleotide
taccaatgttgtgacttggcccccgaagccagacaggttataaggtcgctcacagagcg

SEQ ID NO: 449451 - DNA, 59 bp, Artificial
  Synthetic oligonucleotide
taccaattcatccttttagcccatgtccaacaacatgtatctgcgggatggtttataat

SEQ ID NO: 449452 - DNA, 57 bp, Artificial
  Synthetic oligonucleotide
taccaattctacttccaggatcgcttttcgcgtttgactactcggggtatgacgcta

SEQ ID NO: 449453 - DNA, 59 bp, Artificial
  Synthetic oligonucleotide
taccaattggaaacagaacccataccaggagcagaaacgttctatgtggatggggcagc

SEQ ID NO: 449454 - DNA, 60 bp, Artificial
  Synthetic oligonucleotide
taccaattggcaaagtactgtcaatccctcagtatgacaacctgaggaggatttggcttg

SEQ ID NO: 449455 - DNA, 60 bp, Artificial
  Synthetic oligonucleotide
taccaatttaattgcaggacaggctgtagctccagtaacactagcaggcaattcctctct

SEQ ID NO: 449456 - DNA, 55 bp, Artificial
  Synthetic oligonucleotide
taccaatttcgggtttgtgcgaagctacaatagatgttggattgcggcgtttgtg

SEQ ID NO: 449457 - DNA, 60 bp, Artificial
  Synthetic oligonucleotide
taccacaagcaagaaggatcatgcaccccagatgagactagtgtattcagtgagaaaacc

SEQ ID NO: 449458 - DNA, 58 bp, Artificial
  Synthetic oligonucleotide
taccacaaggaaccgctcacacggctggcactaccttacacggcaccacaccgcgtct

SEQ ID NO: 449459 - DNA, 54 bp, Artificial
  Synthetic oligonucleotide
taccacaattgcctgggattccctttgtgtcctgccaacgcgggtatagggggg

SEQ ID NO: 449460 - DNA, 54 bp, Artificial
  Synthetic oligonucleotide
taccacacacgccatatatgctgctaggcctgtaaacttgcaaccattgtgttg

SEQ ID NO: 449461 - DNA, 54 bp, Artificial
  Synthetic oligonucleotide
taccacagacgcagaagccttcgatgcacatatatgcggctccctgggactcgg

SEQ ID NO: 449462 - DNA, 57 bp, Artificial
  Synthetic oligonucleotide
taccacaggatcatattgtactaaaaatcaagcaatgtttccgaaaactccctgtta

SEQ ID NO: 449463 - DNA, 60 bp, Artificial
  Synthetic oligonucleotide
taccacagggtacactggtcggtctggacgcactgtccgacgagatcgacaccatcacgg

SEQ ID NO: 449464 - DNA, 58 bp, Artificial
  Synthetic oligonucleotide
taccacatcgtcacttacctaatactgatcaacctgttctacctaggtttggatatcg

SEQ ID NO: 449465 - DNA, 56 bp, Artificial
  Synthetic oligonucleotide
taccacatgaaggcgaacaatgtttctgagtattacgcctccgcggctgcaatact

SEQ ID NO: 449466 - DNA, 60 bp, Artificial
  Synthetic oligonucleotide
taccacatgtattgatgaatttggctgaaaccactcaagctgacctatgtatcccctatg

SEQ ID NO: 449467 - DNA, 56 bp, Artificial
  Synthetic oligonucleotide
taccaccactcacagcagagtgtgattttctttccctggttacgcgtaccggacct

SEQ ID NO: 449468 - DNA, 58 bp, Artificial
  Synthetic oligonucleotide
taccaccactccttaaactgcggagtcccgtagattggtgactcatcctgcaaacaaa

SEQ ID NO: 449469 - DNA, 55 bp, Artificial
  Synthetic oligonucleotide
taccaccctttctacgtactccaacaaaagggcaatgtgtgtccacaatgggtgt

SEQ ID NO: 449470 - DNA, 51 bp, Artificial
  Synthetic oligonucleotide
taccaccggccacgatttaagaacggtaagccgtactgcccgattcagggc

SEQ ID NO: 449471 - DNA, 58 bp, Artificial
  Synthetic oligonucleotide
taccaccgtctcgccgtgaaatctggtcttgtaatcgccatgcgtagccggggagttg

SEQ ID NO: 449472 - DNA, 51 bp, Artificial
  Synthetic oligonucleotide
taccacctcccgatggccatgactgtaatggtgtctcgttcgccgagtgcc

SEQ ID NO: 449473 - DNA, 55 bp, Artificial
  Synthetic oligonucleotide
taccacctttaatgacacgtggttttccatactttaagtttgtctgccactctct

SEQ ID NO: 449474 - DNA, 55 bp, Artificial
  Synthetic oligonucleotide
taccacgacaattccattttgtcatggggcgagcgtgttattcacactgcccgtc

SEQ ID NO: 449475 - DNA, 60 bp, Artificial
  Synthetic oligonucleotide
taccacgacgcgttagctgatggcctatcacctagggaagctagggcatatgccctgggt

SEQ ID NO: 449476 - DNA, 58 bp, Artificial
  Synthetic oligonucleotide
taccacgatgttcgtaggcgaccctttcaaccctccgagtgatccgactgactgtgac

SEQ ID NO: 449477 - DNA, 60 bp, Artificial
  Synthetic oligonucleotide
taccacgcaatcgctgttgagacgaaagccgagcgtaaatgttgccatgtgcgcacagaa

SEQ ID NO: 449478 - DNA, 60 bp, Artificial
  Synthetic oligonucleotide
taccacgcatcatttgaataaactttggcgcttagatccaaatggccgcacaaataattg

SEQ ID NO: 449479 - DNA, 55 bp, Artificial
  Synthetic oligonucleotide
taccacgcccatggtcatgttggcaatacacgtatttggcccctccaacacgggc

SEQ ID NO: 449480 - DNA, 59 bp, Artificial
  Synthetic oligonucleotide
taccacggatggcaggtagaagtcctatacatggagcgattccctgacggctcactgcg

SEQ ID NO: 449481 - DNA, 55 bp, Artificial
  Synthetic oligonucleotide
taccacgggcccctgtacccctcttcctgcgccgaactatacgtttgcgctgtgg

SEQ ID NO: 449482 - DNA, 60 bp, Artificial
  Synthetic oligonucleotide
taccacggtcccttggaataactctctggaggatccagactgggacaatatgacctggca

SEQ ID NO: 449483 - DNA, 58 bp, Artificial
  Synthetic oligonucleotide
taccacgtgttgggtcatgcacactggatatcgggctgagagatcgcattaagaagat

SEQ ID NO: 449484 - DNA, 54 bp, Artificial
  Synthetic oligonucleotide
taccacgtttatatcgttagctaaattttgattaatcttagttaagtgtttgac

SEQ ID NO: 449485 - DNA, 60 bp, Artificial
  Synthetic oligonucleotide
taccactaatcagaaagcagagctgacagctgtttatctagccctacaagatgcagaaca

SEQ ID NO: 449486 - DNA, 59 bp, Artificial
  Synthetic oligonucleotide
taccactagataatagtcttgctaagaatagtagtcataataagaccagctatgccaat

SEQ ID NO: 449487 - DNA, 55 bp, Artificial
  Synthetic oligonucleotide
taccactagcctgggtgctggtcccacgtcaatttctgcggtcggtgtgttagcc

SEQ ID NO: 449488 - DNA, 57 bp, Artificial
  Synthetic oligonucleotide
taccactaggtcggtaagcttcttggagttgatggctaaatgttcaaaacctgattg

SEQ ID NO: 449489 - DNA, 51 bp, Artificial
  Synthetic oligonucleotide
taccactatcttggtagaagtggatatacagtgcacgttcagtgtaatgct

SEQ ID NO: 449490 - DNA, 60 bp, Artificial
  Synthetic oligonucleotide
taccactcttgcatgttaacgttcatactgattccgacaattcaactaagatcgatacgc

SEQ ID NO: 449491 - DNA, 58 bp, Artificial
  Synthetic oligonucleotide
taccactgaattgtatcagaccaagggttcaagagacgttccaattaaagcaacacga

SEQ ID NO: 449492 - DNA, 52 bp, Artificial
  Synthetic oligonucleotide
taccactgagtgtgcgaatgaggtcgcgcgtgttacaggcgagacatcaaca

SEQ ID NO: 449493 - DNA, 50 bp, Artificial
  Synthetic oligonucleotide
taccactgatgtgcccgccggtaacgcttggatccgcgcgatattccaat

SEQ ID NO: 449494 - DNA, 59 bp, Artificial
  Synthetic oligonucleotide
taccactgatgtgctctggaactccagttggagcaataaaacttttgagaaaatttgga

SEQ ID NO: 449495 - DNA, 59 bp, Artificial
  Synthetic oligonucleotide
taccactggctacggaccgtaaagaccactaaggagtctcttatcatcatatctccgag

SEQ ID NO: 449496 - DNA, 60 bp, Artificial
  Synthetic oligonucleotide
taccactgtacgatgcaattaaatgcatgaagacctttttcggctggaaagagcccaaca

SEQ ID NO: 449497 - DNA, 58 bp, Artificial
  Synthetic oligonucleotide
taccacttacactgtgtctgcatctagtccatgggactttaaccttaccaagaacatt

SEQ ID NO: 449498 - DNA, 59 bp, Artificial
  Synthetic oligonucleotide
taccacttgagccagaacaaatagaagaggccaataaaggagagaacaactgcctgtta

SEQ ID NO: 449499 - DNA, 59 bp, Artificial
  Synthetic oligonucleotide
taccagaaatgctgcaatctgttcgagaaatttttccctagtagttcatacaggaggcc

SEQ ID NO: 449500 - DNA, 58 bp, Artificial
  Synthetic oligonucleotide
taccagaaccgaagggaactaagattctggacatgccgaattggaagcctggcaactg

SEQ ID NO: 449501 - DNA, 60 bp, Artificial
  Synthetic oligonucleotide
taccagaccaagcatggcgtcgctggtaagtacctgcagcggaggctgcaagttaatggt

SEQ ID NO: 449502 - DNA, 54 bp, Artificial
  Synthetic oligonucleotide
taccagagaaaaccagggagtggtttactaagtcaggtgtctatctttcgcctt

SEQ ID NO: 449503 - DNA, 60 bp, Artificial
  Synthetic oligonucleotide
taccagagacaattacgatacttgatagtatccagttttacggtgagaaccatgtgtcac

SEQ ID NO: 449504 - DNA, 56 bp, Artificial
  Synthetic oligonucleotide
taccagaggaagagcggtgacgtcaccacgttcattgggaacacagtgatcatcgc

SEQ ID NO: 449505 - DNA, 50 bp, Artificial
  Synthetic oligonucleotide
taccagagggtcttaagactatgcctgttctcaaattggccaaaaaccca

SEQ ID NO: 449506 - DNA, 60 bp, Artificial
  Synthetic oligonucleotide
taccagagttactgaagtcgcctttaggcaattcagacctaattctgatgctcattccgc

SEQ ID NO: 449507 - DNA, 58 bp, Artificial
  Synthetic oligonucleotide
taccagagttcgggggctgagaagacatcccgagcctttccgcatgccaaccgcttcg

SEQ ID NO: 449508 - DNA, 60 bp, Artificial
  Synthetic oligonucleotide
taccagatacccatatgttaattgagccaccaaaactgcgtagcagttgtgcagcactat

SEQ ID NO: 449509 - DNA, 60 bp, Artificial
  Synthetic oligonucleotide
taccagatccgcgtgacgatggtaaatcgtaagacgatgacagctagggcgacactgtac

SEQ ID NO: 449510 - DNA, 59 bp, Artificial
  Synthetic oligonucleotide
taccagcaagttccccaacatgtatatcccagtaggacaggtcacagattacggcttcc

SEQ ID NO: 449511 - DNA, 55 bp, Artificial
  Synthetic oligonucleotide
taccagcacacagaggtataggaggaaatgaacaggtagataaactagttagttc

SEQ ID NO: 449512 - DNA, 60 bp, Artificial
  Synthetic oligonucleotide
taccagcacgggaccatgcaaaacctgcacgactcctgctcaaggaacctctatgtatcc

SEQ ID NO: 449513 - DNA, 59 bp, Artificial
  Synthetic oligonucleotide
taccagccacacacgccacacccatggttacacactttccgtggaaatgccgagacgaa

SEQ ID NO: 449514 - DNA, 54 bp, Artificial
  Synthetic oligonucleotide
taccagccagaggatgtactggacctagatgactttaccaacgacgaccagtgg

SEQ ID NO: 449515 - DNA, 55 bp, Artificial
  Synthetic oligonucleotide
taccagcgatccctggcacccgcccggccccttgggactcaagttcaaaacagtc

SEQ ID NO: 449516 - DNA, 60 bp, Artificial
  Synthetic oligonucleotide
taccagcgctccgcagaaaacctacgctcagttaaagacagcttcgaaagctcgatcttc

SEQ ID NO: 449517 - DNA, 60 bp, Artificial
  Synthetic oligonucleotide
taccagcggattatactactcggcagagaatttatatgagatcaattgttaatcttttgg

SEQ ID NO: 449518 - DNA, 56 bp, Artificial
  Synthetic oligonucleotide
taccagcggggataaaaaccctagtaagttgataaggctggagacaggtgattgga

SEQ ID NO: 449519 - DNA, 58 bp, Artificial
  Synthetic oligonucleotide
taccagctccaactagagtactaagaaatagaatagttacacctgttgtgcctgcagt

SEQ ID NO: 449520 - DNA, 60 bp, Artificial
  Synthetic oligonucleotide
taccagctccaatatcagtcgtagacaacaacactacaaacacagtagaagaacacctac

SEQ ID NO: 449521 - DNA, 55 bp, Artificial
  Synthetic oligonucleotide
taccagctccctcccctggtcaccttgctctctcctccctcaaatataactggtc

SEQ ID NO: 449522 - DNA, 54 bp, Artificial
  Synthetic oligonucleotide
taccagctgtataaggtcaagcacttctgtctccccggtcgacgttgatatgct

SEQ ID NO: 449523 - DNA, 53 bp, Artificial
  Synthetic oligonucleotide
taccagcttggcaggagtccgtgactattgctatttggctgcagtaagtgatt

SEQ ID NO: 449524 - DNA, 50 bp, Artificial
  Synthetic oligonucleotide
taccaggaaggattgaagatataagagcgctagctgggagttatgatacc

SEQ ID NO: 449525 - DNA, 50 bp, Artificial
  Synthetic oligonucleotide
taccaggagaggtaaaagtaataccaacgggagtaaaactaatgttgcct

SEQ ID NO: 449526 - DNA, 56 bp, Artificial
  Synthetic oligonucleotide
taccaggatctgggtgtccgatagaacgcccacggaagtaatacaggctggggaac

SEQ ID NO: 449527 - DNA, 55 bp, Artificial
  Synthetic oligonucleotide
taccaggatgccccccacagcacagaggtaccgtgttacagctgtgccaggatac

SEQ ID NO: 449528 - DNA, 55 bp, Artificial
  Synthetic oligonucleotide
taccaggccggtgctgaaatctacgtcaacgctctcgacaaagccttcctggtga

SEQ ID NO: 449529 - DNA, 55 bp, Artificial
  Synthetic oligonucleotide
taccaggcgtcattgctgtaaaccctaggacttaggtcaatatgaccacataggt

SEQ ID NO: 449530 - DNA, 56 bp, Artificial
  Synthetic oligonucleotide
taccagggaagtggcgttgcaaacggagccttggtacgaatacgcagcccctcggc

SEQ ID NO: 449531 - DNA, 55 bp, Artificial
  Synthetic oligonucleotide
taccagggcattttcgaagggccccttttcggcaccgtgattgctctggactcca

SEQ ID NO: 449532 - DNA, 57 bp, Artificial
  Synthetic oligonucleotide
taccaggggaaaatcctcaatacagtatctgagatctgtaagaggtctaaactcccc

SEQ ID NO: 449533 - DNA, 58 bp, Artificial
  Synthetic oligonucleotide
taccagggggtggtgaggtagaaatcattgcagaagtgcaccctcctcctacaatagg

SEQ ID NO: 449534 - DNA, 59 bp, Artificial
  Synthetic oligonucleotide
taccaggtgcaggccagtaatgccctattggctaagaatctcaacactagatacactct

SEQ ID NO: 449535 - DNA, 53 bp, Artificial
  Synthetic oligonucleotide
taccagtagggagcgcctgttagcggatccaccttactgctttaaaaaagggg

SEQ ID NO: 449536 - DNA, 60 bp, Artificial
  Synthetic oligonucleotide
taccagtatagctatacacgagatggggaagtaatcacagctcacacaacatgttcagtt

SEQ ID NO: 449537 - DNA, 55 bp, Artificial
  Synthetic oligonucleotide
taccagtccaacattgagaggagccattactgtatagctgactcacattgcctag

SEQ ID NO: 449538 - DNA, 58 bp, Artificial
  Synthetic oligonucleotide
taccagtccaactgtgaatagcaccagttagacgggtcgtcaagatccggaattggag

SEQ ID NO: 449539 - DNA, 57 bp, Artificial
  Synthetic oligonucleotide
taccagtcgacagactacaccgtgcagttaggccccggacccacgcgagtgattgac

SEQ ID NO: 449540 - DNA, 57 bp, Artificial
  Synthetic oligonucleotide
taccagtgatgagttagccggtatgtattcaaatgagaggtgtttagccttggaata

SEQ ID NO: 449541 - DNA, 60 bp, Artificial
  Synthetic oligonucleotide
taccagtgctggttataatcatgatgtttctaatctacgttcctggattaggaccactaa

SEQ ID NO: 449542 - DNA, 50 bp, Artificial
  Synthetic oligonucleotide
taccagtgttgaacacccctggtagtaaccagtacctgacgtcagataac

SEQ ID NO: 449543 - DNA, 57 bp, Artificial
  Synthetic oligonucleotide
taccagttcccccagaggaggtagaaagggccaatgagggagagaacaactgcttgc

SEQ ID NO: 449544 - DNA, 59 bp, Artificial
  Synthetic oligonucleotide
taccataaattggtaacaatttatgagtagtttgcaatatgtgtatgttactgaattaa

SEQ ID NO: 449545 - DNA, 58 bp, Artificial
  Synthetic oligonucleotide
taccataaccacgcaagaatgtgccaacgtcgtggtggcttatggaaggtggcccgcc

SEQ ID NO: 449546 - DNA, 57 bp, Artificial
  Synthetic oligonucleotide
taccataagagattttgttggatgactaggctttaaatcctcaaaaatagacgtaga

SEQ ID NO: 449547 - DNA, 60 bp, Artificial
  Synthetic oligonucleotide
taccatacataggcaaaaccaaaggagacacgactgcagaagcgctcgttctggctgact

SEQ ID NO: 449548 - DNA, 60 bp, Artificial
  Synthetic oligonucleotide
taccatactgtcaaatcaagatagggagaaatttcgctttgagagcggctgcaactccgg

SEQ ID NO: 449549 - DNA, 60 bp, Artificial
  Synthetic oligonucleotide
taccatagagcgaattggattggccatccggtgagtgttgcgtcaggtatacaactgttt

SEQ ID NO: 449550 - DNA, 53 bp, Artificial
  Synthetic oligonucleotide
taccatagaggagcagacaaatatgggatccgcagtgcccattatattcatct

SEQ ID NO: 449551 - DNA, 55 bp, Artificial
  Synthetic oligonucleotide
taccatagaggatggagacatgagaaactgctctttcaatatttccacagatgtg

SEQ ID NO: 449552 - DNA, 53 bp, Artificial
  Synthetic oligonucleotide
taccatatagtcctccggcccctgaatgcggctaatcccaacctcggagcatt

SEQ ID NO: 449553 - DNA, 57 bp, Artificial
  Synthetic oligonucleotide
taccatatgtataagtcaagaaaaactaggggatgggtttatagacatcactacgaa

SEQ ID NO: 449554 - DNA, 55 bp, Artificial
  Synthetic oligonucleotide
taccatcaatgtacttgagccagtactgggagagcatatgcagtttgaagtccac

SEQ ID NO: 449555 - DNA, 58 bp, Artificial
  Synthetic oligonucleotide
taccatcatatggtatagacactgataagttaacacctcgtgatagagggtttttgat

SEQ ID NO: 449556 - DNA, 59 bp, Artificial
  Synthetic oligonucleotide
taccatccgactttgtgcctctgacctaccgcgagtgccccccaccgctatggagccac

SEQ ID NO: 449557 - DNA, 60 bp, Artificial
  Synthetic oligonucleotide
taccatcgccagtgccaggatacgctggtgcaagtttctcccagtatacacggtcgtgtt

SEQ ID NO: 449558 - DNA, 59 bp, Artificial
  Synthetic oligonucleotide
taccatcgggttctggggtagttgataccatcggcatgcactgacggatgcaacacggt

SEQ ID NO: 449559 - DNA, 58 bp, Artificial
  Synthetic oligonucleotide
taccatcgtcaccatggctgagtttgcctggtgttacgacaccgaccaattcgaaaaa

SEQ ID NO: 449560 - DNA, 58 bp, Artificial
  Synthetic oligonucleotide
taccatctattactactataatttgtaccattctaaaccaataatatacatgctcggt

SEQ ID NO: 449561 - DNA, 60 bp, Artificial
  Synthetic oligonucleotide
taccatctctccagaaaaggcaatgtattgcttctcgagcccactagaccactcgcagag

SEQ ID NO: 449562 - DNA, 60 bp, Artificial
  Synthetic oligonucleotide
taccatgcgtcatttgagtagatcttggggctcaagtctagatgcccacaaaggtaatta

SEQ ID NO: 449563 - DNA, 55 bp, Artificial
  Synthetic oligonucleotide
taccatgctgggcatctatgacaggtgggccgtcttaccacgccacgccaaacct

SEQ ID NO: 449564 - DNA, 52 bp, Artificial
  Synthetic oligonucleotide
taccatggataagccaaacgcactaccggtacgtggcctcagatgagtacac

SEQ ID NO: 449565 - DNA, 55 bp, Artificial
  Synthetic oligonucleotide
taccatggcgccggctcaaagaccctagccggcccaaaggggccaatcaaccaaa

SEQ ID NO: 449566 - DNA, 60 bp, Artificial
  Synthetic oligonucleotide
taccatgtccaactgactgcagaatatgctatgctaactagatactgcgattattatacc

SEQ ID NO: 449567 - DNA, 56 bp, Artificial
  Synthetic oligonucleotide
taccatgttcgtgcgctccaaaccccgtggtttctgggcaagtctgaaacagattt

SEQ ID NO: 449568 - DNA, 52 bp, Artificial
  Synthetic oligonucleotide
taccatgttctatcttagcgggaatcagatatcacttatcttaacagcgttt

SEQ ID NO: 449569 - DNA, 54 bp, Artificial
  Synthetic oligonucleotide
taccattaaagtttgtccattaaatacacaaacactaggaattgggtgccaaac

SEQ ID NO: 449570 - DNA, 59 bp, Artificial
  Synthetic oligonucleotide
taccattaacgtaatcgttatgactactcgtattcattcttgtgagaagtgtgctaacg

SEQ ID NO: 449571 - DNA, 60 bp, Artificial
  Synthetic oligonucleotide
taccattaagttcttcaacatatgtgcagcgtttagcggcgataggcgcattatatccca

SEQ ID NO: 449572 - DNA, 60 bp, Artificial
  Synthetic oligonucleotide
taccattactctgtctacattggcaacggtcaggtgatgggtgtcaacaatcctggcgcc

SEQ ID NO: 449573 - DNA, 60 bp, Artificial
  Synthetic oligonucleotide
taccattatatgctttactgtcaccaggtgtcatcctggcattttacaatagtggatctc

SEQ ID NO: 449574 - DNA, 55 bp, Artificial
  Synthetic oligonucleotide
taccattccccgaacgctggaagcgttaggcttgcaatcttttgaccgtgtaacc

SEQ ID NO: 449575 - DNA, 60 bp, Artificial
  Synthetic oligonucleotide
taccattcctcacgcgagacgtgccggagggagtgtacgagagaatatggcaagtggtgc

SEQ ID NO: 449576 - DNA, 56 bp, Artificial
  Synthetic oligonucleotide
taccattcctcgaggttacccgctttcacgtgcacaccgttcggtcacaacacgaa

SEQ ID NO: 449577 - DNA, 58 bp, Artificial
  Synthetic oligonucleotide
taccattctgggttctctttgtcccaggaaattgagtttctgccttgacaatctttca

SEQ ID NO: 449578 - DNA, 60 bp, Artificial
  Synthetic oligonucleotide
taccattgtatgatgctatcaaatgcatgaagaccttctttggatggaaagagcctaatg

SEQ ID NO: 449579 - DNA, 54 bp, Artificial
  Synthetic oligonucleotide
taccatttatgtcacccgcgagtgcttaccagtggttttacgacgggtacccca

SEQ ID NO: 449580 - DNA, 52 bp, Artificial
  Synthetic oligonucleotide
taccatttcggttggtaacgttagggtgactttcgtatgactctgcctgcgt

SEQ ID NO: 449581 - DNA, 50 bp, Artificial
  Synthetic oligonucleotide
taccatttgagtcaacggggaaaagtcctattattgggaccaacacgacc

SEQ ID NO: 449582 - DNA, 60 bp, Artificial
  Synthetic oligonucleotide
taccatttgtcatatcttgtggttatcactacaaggaattaggattagtcatgaatatgg

SEQ ID NO: 449583 - DNA, 59 bp, Artificial
  Synthetic oligonucleotide
taccattttggacgtaagagtattaacaagatctcaactctggaatgtgttcatattta

SEQ ID NO: 449584 - DNA, 51 bp, Artificial
  Synthetic oligonucleotide
tacccaaagttgccagacagtcttgggtaatctctttggcaaatctgccaa

SEQ ID NO: 449585 - DNA, 55 bp, Artificial
  Synthetic oligonucleotide
tacccaacctctgtgttacctgacaacccacgagcgggggctttctatcgccgag

SEQ ID NO: 449586 - DNA, 55 bp, Artificial
  Synthetic oligonucleotide
tacccaacggtccgctgcctagctacatcctgttttgcacacggctccagcttcg

SEQ ID NO: 449587 - DNA, 55 bp, Artificial
  Synthetic oligonucleotide
tacccaacgttacgcttgcaaaattatgcgcactcaattgtaaagctcgaatgtc

SEQ ID NO: 449588 - DNA, 60 bp, Artificial
  Synthetic oligonucleotide
tacccaactcatcgcccgagcaaggagaagcctaatgcgtacccaccagacattgcatta

SEQ ID NO: 449589 - DNA, 60 bp, Artificial
  Synthetic oligonucleotide
tacccaagagaagcaagagcgccacatcattacattccatttcaagtagggccaagaagg

SEQ ID NO: 449590 - DNA, 57 bp, Artificial
  Synthetic oligonucleotide
tacccaaggctgccaggggccagtatagtggttttgtgagaacgctatttcagcaga

SEQ ID NO: 449591 - DNA, 57 bp, Artificial
  Synthetic oligonucleotide
tacccaagggtttaggcgaggtagcagcgctagttccagatatggtagatttgcgtg

SEQ ID NO: 449592 - DNA, 55 bp, Artificial
  Synthetic oligonucleotide
tacccaatatcaacggttggaacgtagacggctggctgttagacctcatgagtgg

SEQ ID NO: 449593 - DNA, 59 bp, Artificial
  Synthetic oligonucleotide
tacccaatcgcttacgatcacccataagctaagtccatcggataatctgataatcgttg

SEQ ID NO: 449594 - DNA, 57 bp, Artificial
  Synthetic oligonucleotide
tacccaatgtaagcggtcgccaagtaaggcgtacaccacatcgcgttactgtcccga

SEQ ID NO: 449595 - DNA, 58 bp, Artificial
  Synthetic oligonucleotide
tacccacaggtctgggtcaagtacggacgcggactggtggacctcagaaagcagctac

SEQ ID NO: 449596 - DNA, 57 bp, Artificial
  Synthetic oligonucleotide
tacccacagttctataaagactgctgacaaagaagtttctaactagaacttccgctg

SEQ ID NO: 449597 - DNA, 53 bp, Artificial
  Synthetic oligonucleotide
tacccacccctggggcccacgcggcgccagtactctggtacgcttagtacctt

SEQ ID NO: 449598 - DNA, 60 bp, Artificial
  Synthetic oligonucleotide
tacccacgcctctaatcctgtgtatgctaccttaaagatacggatctatttctatgattc

SEQ ID NO: 449599 - DNA, 60 bp, Artificial
  Synthetic oligonucleotide
tacccacgctaagaacgtgcttaataaggatgtcttatcgaaagtgaatgctgagataga

SEQ ID NO: 449600 - DNA, 50 bp, Artificial
  Synthetic oligonucleotide
tacccacgtcgagatagaacgctcgcttctctggagcacgcgtgatggcg

SEQ ID NO: 449601 - DNA, 59 bp, Artificial
  Synthetic oligonucleotide
tacccactggagccacggacaaaatcggtggcccctctcatgcccccaatatgtctatg

SEQ ID NO: 449602 - DNA, 51 bp, Artificial
  Synthetic oligonucleotide
tacccagaaggtactataaccccaaaaaacccaacagcccagtcccaagta

SEQ ID NO: 449603 - DNA, 58 bp, Artificial
  Synthetic oligonucleotide
tacccagatggttcccgaaagttcttgtaatatggataaccaccagtccctcagcaca

SEQ ID NO: 449604 - DNA, 58 bp, Artificial
  Synthetic oligonucleotide
tacccaggagttccctcccattacggccactcgcgctctaaccatgagcgcggtctct

SEQ ID NO: 449605 - DNA, 50 bp, Artificial
  Synthetic oligonucleotide
tacccagggattaaagtaaggcaactttgtaaactccttaggggggctaa

SEQ ID NO: 449606 - DNA, 51 bp, Artificial
  Synthetic oligonucleotide
tacccagtcctatagtgttaatctcctttgcggcgttgggttaccacatat

SEQ ID NO: 449607 - DNA, 50 bp, Artificial
  Synthetic oligonucleotide
tacccagtggcccattttcggtaactcggcaaacgagaataaattaatcg

SEQ ID NO: 449608 - DNA, 60 bp, Artificial
  Synthetic oligonucleotide
tacccagtgtcactgcctgtacattaccctttggtgcaggcccgaacatcgagcatccaa

SEQ ID NO: 449609 - DNA, 60 bp, Artificial
  Synthetic oligonucleotide
tacccagtgtccagaagttaacagaagatagatggagcaggcacctgaggatcagggacc

SEQ ID NO: 449610 - DNA, 60 bp, Artificial
  Synthetic oligonucleotide
tacccagtgtcccagttccccgtcggatgtatgctgaaacatactccggtctatatgtgc

SEQ ID NO: 449611 - DNA, 50 bp, Artificial
  Synthetic oligonucleotide
tacccagttgctgacgtcgagagtcacgcatgaaaagagttgagtacaat

SEQ ID NO: 449612 - DNA, 53 bp, Artificial
  Synthetic oligonucleotide
tacccatacttggtggcttaccaagctacagtctgcgctagagcgctggctcc

SEQ ID NO: 449613 - DNA, 60 bp, Artificial
  Synthetic oligonucleotide
tacccatatcatggcgactgaggcgtctaattacgcccaatatcgagtcgtccgggctac

SEQ ID NO: 449614 - DNA, 58 bp, Artificial
  Synthetic oligonucleotide
tacccatcagttgctataatactaagaacctcagtgttcgagtgaacggagcccaacg

SEQ ID NO: 449615 - DNA, 54 bp, Artificial
  Synthetic oligonucleotide
tacccatcccggctagatcaacagtatggcccactttcgttccgttcttgacca

SEQ ID NO: 449616 - DNA, 60 bp, Artificial
  Synthetic oligonucleotide
tacccatcgagatgagggagcgatcagtcagtcctgagtttctaattgcgctcggcttga

SEQ ID NO: 449617 - DNA, 60 bp, Artificial
  Synthetic oligonucleotide
tacccatcgggaactgtaacacaaaatgtcaaacatacgcaggagcaattaatagcagca

SEQ ID NO: 449618 - DNA, 56 bp, Artificial
  Synthetic oligonucleotide
tacccatgagattgtttcacgtgtaccagccgttgttgtataccttggcatatgcg

SEQ ID NO: 449619 - DNA, 60 bp, Artificial
  Synthetic oligonucleotide
tacccatgcacggctagaaatttccacctctgcaaagagccgcaccagcataataacagt

SEQ ID NO: 449620 - DNA, 59 bp, Artificial
  Synthetic oligonucleotide
tacccatggccgagcggaggtgtctaggacaatgctactgtccccaccctagacaccaa

SEQ ID NO: 449621 - DNA, 60 bp, Artificial
  Synthetic oligonucleotide
tacccatgtctgttatatctacagacgcattaactgcgatagcgtatgcatatcgtgggg

SEQ ID NO: 449622 - DNA, 60 bp, Artificial
  Synthetic oligonucleotide
tacccatgtgaaactgcaaatgttgaagctcattgcattttacgaaggcatagtgcagtt

SEQ ID NO: 449623 - DNA, 52 bp, Artificial
  Synthetic oligonucleotide
tacccatgtggtgttttgtcttaaacacccatagtgctgatgtaatgtgtgg

SEQ ID NO: 449624 - DNA, 53 bp, Artificial
  Synthetic oligonucleotide
tacccattacaggatcaatggatactgcgtatgcaaactctacgcaaaatgaa

SEQ ID NO: 449625 - DNA, 55 bp, Artificial
  Synthetic oligonucleotide
taccccaagaaatacgattatgaagtgggttacaatgattcgggcctaagcccga

SEQ ID NO: 449626 - DNA, 60 bp, Artificial
  Synthetic oligonucleotide
taccccaattcccacgaccatcatggctaagaatgaagtcttctgcgtagatccgtcgaa

SEQ ID NO: 449627 - DNA, 57 bp, Artificial
  Synthetic oligonucleotide
taccccaattggagtctctccaaacttgctctatcaattggggtctggggtctcatt

SEQ ID NO: 449628 - DNA, 60 bp, Artificial
  Synthetic oligonucleotide
taccccactcgttcagggcagtgtgggggggtcatatgcaaggctggcaagattatcgct

SEQ ID NO: 449629 - DNA, 53 bp, Artificial
  Synthetic oligonucleotide
taccccagacccgaggggacccgacaggcccagaggaatcgaagaaggaggtg

SEQ ID NO: 449630 - DNA, 55 bp, Artificial
  Synthetic oligonucleotide
taccccagctgcccttcaaaattctgtgtaaaattcagccttggctttaaataaa

SEQ ID NO: 449631 - DNA, 56 bp, Artificial
  Synthetic oligonucleotide
taccccagtgtgcatcttgcacagccatccataattgtcccagactttgtcctcat

SEQ ID NO: 449632 - DNA, 59 bp, Artificial
  Synthetic oligonucleotide
taccccatagtagacctggcagatgaggctagaaactccccactggcgacagtgttcta

SEQ ID NO: 449633 - DNA, 51 bp, Artificial
  Synthetic oligonucleotide
taccccattactatacagactgggtagtgtacagaatgagatcaccttaac

SEQ ID NO: 449634 - DNA, 52 bp, Artificial
  Synthetic oligonucleotide
tacccccaggttattactatggggacctgtacacggaagccgatctgcatcg

SEQ ID NO: 449635 - DNA, 50 bp, Artificial
  Synthetic oligonucleotide
taccccccccccacttgcaaccgttttcggttgcccttacatacacttac

SEQ ID NO: 449636 - DNA, 55 bp, Artificial
  Synthetic oligonucleotide
tacccccgcttttatgtaacacaggcgcgtcggagtgcgctgaaaaagtatacct

SEQ ID NO: 449637 - DNA, 56 bp, Artificial
  Synthetic oligonucleotide
tacccccggtatccagaagttaggtgtgtttgcagagacaattggaggggatctaa

SEQ ID NO: 449638 - DNA, 60 bp, Artificial
  Synthetic oligonucleotide
taccccctaatttccctattgacaatctgagcgcggcacagatcacaatgtgcccgcacg

SEQ ID NO: 449639 - DNA, 54 bp, Artificial
  Synthetic oligonucleotide
taccccctagcaatccgtccgaccgtcggatatcttctttccgaccgtgaacac

SEQ ID NO: 449640 - DNA, 54 bp, Artificial
  Synthetic oligonucleotide
taccccctccttggtccaaaaacagagaaattgccctcctcagacgaagaagga

SEQ ID NO: 449641 - DNA, 49 bp, Artificial
  Synthetic oligonucleotide
taccccctgcgtggtttaaagtccttacggaccttaggtcacgaagggg

SEQ ID NO: 449642 - DNA, 56 bp, Artificial
  Synthetic oligonucleotide
tacccccttacactaatatgtaccctgatatatcggggtacagatgtccgtactaa

SEQ ID NO: 449643 - DNA, 51 bp, Artificial
  Synthetic oligonucleotide
taccccctttaataagcagtttgggaacgggtgcgggtcttggacaggcct

SEQ ID NO: 449644 - DNA, 50 bp, Artificial
  Synthetic oligonucleotide
taccccgaagcaagctcactggtagctaccccagattcactggaactgtc

SEQ ID NO: 449645 - DNA, 54 bp, Artificial
  Synthetic oligonucleotide
taccccgactccgtgatttatgtgttcgtgggatggatacccttatttgggtcc

SEQ ID NO: 449646 - DNA, 51 bp, Artificial
  Synthetic oligonucleotide
taccccgagcgttgctcatcccagcgtactacgggggctctcacagccatg

SEQ ID NO: 449647 - DNA, 59 bp, Artificial
  Synthetic oligonucleotide
taccccgaggtctaccagtataagactatcaggagccatctccactacgtccctgagtc

SEQ ID NO: 449648 - DNA, 60 bp, Artificial
  Synthetic oligonucleotide
taccccgattgagctctctcaaacttgctcaatgaatcggtgtaatggtgtacaatttat

SEQ ID NO: 449649 - DNA, 54 bp, Artificial
  Synthetic oligonucleotide
taccccgccattggttaggtggtactataacttggtaccagaacccataccaga

SEQ ID NO: 449650 - DNA, 60 bp, Artificial
  Synthetic oligonucleotide
taccccgcgttggcagcagaaatttataacgtatatagcttcagagatcctacatggcac

SEQ ID NO: 449651 - DNA, 56 bp, Artificial
  Synthetic oligonucleotide
taccccgctccccctatggcttacagagacccaaatccaccaagacgtagatggcg

SEQ ID NO: 449652 - DNA, 59 bp, Artificial
  Synthetic oligonucleotide
taccccggcgtacatggcggagctgctcccaatggaattagccgctattgctcctacct

SEQ ID NO: 449653 - DNA, 54 bp, Artificial
  Synthetic oligonucleotide
taccccggggtaacacgcgacacccgagatctgagaaggggactggggcttcta

SEQ ID NO: 449654 - DNA, 55 bp, Artificial
  Synthetic oligonucleotide
taccccggttgagctctctcaaactttctcattcaattggggtaatgggttacaa

SEQ ID NO: 449655 - DNA, 57 bp, Artificial
  Synthetic oligonucleotide
taccccgtattggtaagtagcaggcaacgagaacttgtatctaggatcacccgcaaa

SEQ ID NO: 449656 - DNA, 50 bp, Artificial
  Synthetic oligonucleotide
taccccgtgagcagtgaggaccccactgtgggcatgagtgccacaaactg

SEQ ID NO: 449657 - DNA, 60 bp, Artificial
  Synthetic oligonucleotide
taccccgtgcaaagcataggcggcaactatactcatgtgccgctaagtccccgaactcta

SEQ ID NO: 449658 - DNA, 56 bp, Artificial
  Synthetic oligonucleotide
taccccgtgtcccgtagactttcatacgagcgtattgagagaccgctaagtactaa

SEQ ID NO: 449659 - DNA, 56 bp, Artificial
  Synthetic oligonucleotide
tacccctacaccctccccctggaccccactcacctcatagcaggaggcacctctaa

SEQ ID NO: 449660 - DNA, 55 bp, Artificial
  Synthetic oligonucleotide
tacccctaggctcactattaagataataaagcattatcggcatatattacacccc

SEQ ID NO: 449661 - DNA, 52 bp, Artificial
  Synthetic oligonucleotide
tacccctataataaaaacatgcttacctggttaagccaaccccttgcatggt

SEQ ID NO: 449662 - DNA, 55 bp, Artificial
  Synthetic oligonucleotide
tacccctctggaacccccaccaattctgatatcctcactcttgtttccgccggcg

SEQ ID NO: 449663 - DNA, 55 bp, Artificial
  Synthetic oligonucleotide
tacccctgactatatcttacgcacagccctctaccgaaatcatcatgcagccctg

SEQ ID NO: 449664 - DNA, 57 bp, Artificial
  Synthetic oligonucleotide
tacccctgcaccgtcaactacactatccataaggtgcggttgtacctatggggtatc

SEQ ID NO: 449665 - DNA, 60 bp, Artificial
  Synthetic oligonucleotide
tacccctgctggcattgggttgctattcacaagtgaacccactgactctaacagcggcag

SEQ ID NO: 449666 - DNA, 53 bp, Artificial
  Synthetic oligonucleotide
tacccctggcaccccatcacacggtgggtcatcattccgcacgtgctcacttg

SEQ ID NO: 449667 - DNA, 59 bp, Artificial
  Synthetic oligonucleotide
tacccctggttgaagatgtccggaggataaagaatgacgaggccagcagggagtgtgcc

SEQ ID NO: 449668 - DNA, 51 bp, Artificial
  Synthetic oligonucleotide
tacccctgtacccccttcatgcccgtgtcctgtcgtttcgctgttacgagg

SEQ ID NO: 449669 - DNA, 56 bp, Artificial
  Synthetic oligonucleotide
taccccttatcataagctgagcaggctagataagagcatgtttactccatgaacag

SEQ ID NO: 449670 - DNA, 60 bp, Artificial
  Synthetic oligonucleotide
taccccttcttagtgcaccctgttatgcccatgaaagacatacacgaatcaatcaggtgg

SEQ ID NO: 449671 - DNA, 54 bp, Artificial
  Synthetic oligonucleotide
tacccgaaattttctacccagccgaagcgaacgtgcagaaggcctacccccaca

SEQ ID NO: 449672 - DNA, 52 bp, Artificial
  Synthetic oligonucleotide
tacccgaaccataccaggttcgaaatgcagagtcggtatagaaagatttggt

SEQ ID NO: 449673 - DNA, 53 bp, Artificial
  Synthetic oligonucleotide
tacccgaacttattgtaactccgtcggggaacttggcgatcgggaacagtgcc

SEQ ID NO: 449674 - DNA, 54 bp, Artificial
  Synthetic oligonucleotide
tacccgaataggatccgcgtgtttctacagtgtttcattaagggtattttcgtc

SEQ ID NO: 449675 - DNA, 55 bp, Artificial
  Synthetic oligonucleotide
tacccgaggaactggactcacacatcgcgtggggaagcgattctgtgtgaaatcc

SEQ ID NO: 449676 - DNA, 57 bp, Artificial
  Synthetic oligonucleotide
tacccgaggcatggctttccaaggtaccagcaggactttaacccaacagtcctcagc

SEQ ID NO: 449677 - DNA, 60 bp, Artificial
  Synthetic oligonucleotide
tacccgatctgggaagctggcacactggacgagtggctatacaatggcggaccatatcaa

SEQ ID NO: 449678 - DNA, 60 bp, Artificial
  Synthetic oligonucleotide
tacccgatgctgcagatggtgaaacatatgcactagaagacctttggcgcgtgtcatgta

SEQ ID NO: 449679 - DNA, 52 bp, Artificial
  Synthetic oligonucleotide
tacccgcaccctcaaggttctcacccccccaactactgctacgacccccaag

SEQ ID NO: 449680 - DNA, 55 bp, Artificial
  Synthetic oligonucleotide
tacccgcagagatcctgcggaagtctcggaaatttgccccggccctgcccgtttg

SEQ ID NO: 449681 - DNA, 56 bp, Artificial
  Synthetic oligonucleotide
tacccgcatgcgcggtgtttacgggctcgtttacaagcctccttgctatggtaagg

SEQ ID NO: 449682 - DNA, 60 bp, Artificial
  Synthetic oligonucleotide
tacccgccgatttgtgatttctggtcgtcacgttggctgtgggctgcaaatggctcgcac

SEQ ID NO: 449683 - DNA, 56 bp, Artificial
  Synthetic oligonucleotide
tacccgcggcggaagtgtgtggcccagtctattgtttcaccccgagccctgttgta

SEQ ID NO: 449684 - DNA, 60 bp, Artificial
  Synthetic oligonucleotide
tacccgctcattgacaccttgcacctgcggctcctcggacctttacctggtcacgaggca

SEQ ID NO: 449685 - DNA, 58 bp, Artificial
  Synthetic oligonucleotide
tacccggaaaggcgaggagaactgaggcaaactgaagaccacacatttgtcccaatga

SEQ ID NO: 449686 - DNA, 55 bp, Artificial
  Synthetic oligonucleotide
tacccggaacgatacaacggattcggggccctattcgcgatggtggccaagacca

SEQ ID NO: 449687 - DNA, 59 bp, Artificial
  Synthetic oligonucleotide
tacccggcaaggtaccaatctcacctcatgttagctcaagggcactcagaacccggtga

SEQ ID NO: 449688 - DNA, 57 bp, Artificial
  Synthetic oligonucleotide
tacccggccaggtaccaatcccatatgctaattggacacggttttgcctcaccaggc

SEQ ID NO: 449689 - DNA, 59 bp, Artificial
  Synthetic oligonucleotide
tacccggctcaaggttgggtcagggcggatctctaggagcgtgatggatatgtcgaaac

SEQ ID NO: 449690 - DNA, 55 bp, Artificial
  Synthetic oligonucleotide
tacccggtggtagccacggagctactgccgctgcgctcccgggccttctacaaca

SEQ ID NO: 449691 - DNA, 53 bp, Artificial
  Synthetic oligonucleotide
tacccggtggtatcacgtcaacagcgataataggccccaagccagtaggccga

SEQ ID NO: 449692 - DNA, 55 bp, Artificial
  Synthetic oligonucleotide
tacccgtaatgctagatggacatctaatagcctttgactactctgggtatgacgc

SEQ ID NO: 449693 - DNA, 53 bp, Artificial
  Synthetic oligonucleotide
tacccgtactccattttgtatgcgaccgaaatcggtctcccgccttttcggtc

SEQ ID NO: 449694 - DNA, 52 bp, Artificial
  Synthetic oligonucleotide
tacccgtcggtccctctttccgtccaagccgcggacgttaaattgtggcacg

SEQ ID NO: 449695 - DNA, 54 bp, Artificial
  Synthetic oligonucleotide
tacccgtgatgaaggcggtgacgggaaggtggtggttatcgggcggcaggggta

SEQ ID NO: 449696 - DNA, 57 bp, Artificial
  Synthetic oligonucleotide
tacccgtgcctctaatcctgtgtacgctacccttaagattaggatctacttctacga

SEQ ID NO: 449697 - DNA, 56 bp, Artificial
  Synthetic oligonucleotide
tacccgtgtctcaacgggctacagagttctgcctccgtgattggaagtagtgcgtc

SEQ ID NO: 449698 - DNA, 58 bp, Artificial
  Synthetic oligonucleotide
tacccgtgtgtcaagaccatcttgaattttgggaggcagttttcaccggcctcacaca

SEQ ID NO: 449699 - DNA, 59 bp, Artificial
  Synthetic oligonucleotide
tacccgtgtgtgcaagaagcttatgctaaggacaaggagttacgtaaggagcaactaga

SEQ ID NO: 449700 - DNA, 55 bp, Artificial
  Synthetic oligonucleotide
tacccgttaacatctatctcaatgctcgccgtcactccggctggtatcgctcccc

SEQ ID NO: 449701 - DNA, 53 bp, Artificial
  Synthetic oligonucleotide
tacccgttattagggtcggggatttatcaggtccctgtgggcttaagcttcga

SEQ ID NO: 449702 - DNA, 56 bp, Artificial
  Synthetic oligonucleotide
tacccgttgcaattgttaacttaaaggcattgactcaggttattccgtatcgtgga

SEQ ID NO: 449703 - DNA, 55 bp, Artificial
  Synthetic oligonucleotide
taccctaaagccctttagacattggcgagtaaggaattgacacgtggcacttgaa

SEQ ID NO: 449704 - DNA, 51 bp, Artificial
  Synthetic oligonucleotide
taccctaacgtgcggctttgccgacctcatggggtacatccccgtcgtagg

SEQ ID NO: 449705 - DNA, 58 bp, Artificial
  Synthetic oligonucleotide
taccctaagacaaagaacaacgaatgggactttgttgtaaccactgacatatcagaga

SEQ ID NO: 449706 - DNA, 60 bp, Artificial
  Synthetic oligonucleotide
taccctacaactccgccgcttcacccactcagattctgagtgtgtatggcggcatgatgt

SEQ ID NO: 449707 - DNA, 54 bp, Artificial
  Synthetic oligonucleotide
taccctacaggaacagataagatggatgacaagcaacccacctattccagtggg

SEQ ID NO: 449708 - DNA, 56 bp, Artificial
  Synthetic oligonucleotide
taccctacccagactcccggggactacgctgagttctgcggttggtcattcacacc

SEQ ID NO: 449709 - DNA, 50 bp, Artificial
  Synthetic oligonucleotide
taccctacgtgcccaccatccttgcgcacgcagaaccggaaactatccta

SEQ ID NO: 449710 - DNA, 55 bp, Artificial
  Synthetic oligonucleotide
taccctagagtacacgtaaaacacccaccggtttggcaggacaccgcagagcaac

SEQ ID NO: 449711 - DNA, 52 bp, Artificial
  Synthetic oligonucleotide
taccctatttaccaactgtgtaataaaagggagagaagttcgtaaaggccaa

SEQ ID NO: 449712 - DNA, 55 bp, Artificial
  Synthetic oligonucleotide
taccctcaatgtctatccatgtgggtgcatttggatcaatcccgctcattagatc

SEQ ID NO: 449713 - DNA, 54 bp, Artificial
  Synthetic oligonucleotide
taccctcaattttatcttgacccttaacacggtcaagcatgggctcacaggtgt

SEQ ID NO: 449714 - DNA, 52 bp, Artificial
  Synthetic oligonucleotide
taccctccaagaatacaaatcgcagatccggaacacctcggcccacaaacaa

SEQ ID NO: 449715 - DNA, 58 bp, Artificial
  Synthetic oligonucleotide
taccctccgccatttgctttgaaaggaattgtcttgaagtctgagaggataaccaatc

SEQ ID NO: 449716 - DNA, 58 bp, Artificial
  Synthetic oligonucleotide
taccctccgtcgccggatggccttacgcttagctgccctgtgttggaccttgattgga

SEQ ID NO: 449717 - DNA, 55 bp, Artificial
  Synthetic oligonucleotide
taccctctgactttgttcagggcgttcagttaattctcccgtctaatgcgcttcc

SEQ ID NO: 449718 - DNA, 60 bp, Artificial
  Synthetic oligonucleotide
taccctctgcaggacaatcccctagccagtcctgatgaaagattgcagggcacacacagg

SEQ ID NO: 449719 - DNA, 57 bp, Artificial
  Synthetic oligonucleotide
taccctctgctaggcgccgggatctataaggtccctgtgagttcgagctttgacgcg

SEQ ID NO: 449720 - DNA, 59 bp, Artificial
  Synthetic oligonucleotide
taccctctgctctggagctatgccatgggagtaggggtggaacttgaaaactccatggg

SEQ ID NO: 449721 - DNA, 60 bp, Artificial
  Synthetic oligonucleotide
taccctcttccggatggtgccaactcattgacaccctgctcgtgccaggctgagtcctgt

SEQ ID NO: 449722 - DNA, 53 bp, Artificial
  Synthetic oligonucleotide
taccctgaagtgtttttcggtaaaccctggacggaccaattggtgtagtgata

SEQ ID NO: 449723 - DNA, 60 bp, Artificial
  Synthetic oligonucleotide
taccctgatgctggggaagtaatatgtgtgtgcagagataattggcatggctcgaatcga

SEQ ID NO: 449724 - DNA, 60 bp, Artificial
  Synthetic oligonucleotide
taccctgcaacctctaaatatggacctgctgctttgacccgcaatgaccctcggctcaac

SEQ ID NO: 449725 - DNA, 52 bp, Artificial
  Synthetic oligonucleotide
taccctgcaccacttaccagctaacgaccgccgaaacctctgaagagataga

SEQ ID NO: 449726 - DNA, 55 bp, Artificial
  Synthetic oligonucleotide
taccctgcgacggagtgctcctttaaagactagctaggattgagaccgaattctc

SEQ ID NO: 449727 - DNA, 56 bp, Artificial
  Synthetic oligonucleotide
taccctgtaaaccgctcccatatcaaaacttacaacctctattaatgctcctcaaa

SEQ ID NO: 449728 - DNA, 56 bp, Artificial
  Synthetic oligonucleotide
taccctgtcgtgctagaaccgcgggattggcgtaacctctaggactgcccactaac

SEQ ID NO: 449729 - DNA, 59 bp, Artificial
  Synthetic oligonucleotide
tacccttaagaaacgaccagtcggaggctgtgatgtcatccagattcggtagactagga

SEQ ID NO: 449730 - DNA, 55 bp, Artificial
  Synthetic oligonucleotide
tacccttagtaagcacgcccgagggtgctggcagagggccatctaggcaagcccg

SEQ ID NO: 449731 - DNA, 58 bp, Artificial
  Synthetic oligonucleotide
tacccttatcaggatagccttgaatctacttatgactttggttttttggcatatcaaa

SEQ ID NO: 449732 - DNA, 51 bp, Artificial
  Synthetic oligonucleotide
tacccttattccactatgagtgtggtaaagcacaccaaacctcgatctgac

SEQ ID NO: 449733 - DNA, 57 bp, Artificial
  Synthetic oligonucleotide
tacccttcaggaacaaatagcctggatgacatccaatccacctgtcccagtaggaga

SEQ ID NO: 449734 - DNA, 52 bp, Artificial
  Synthetic oligonucleotide
tacccttcaggaacagatagcatggatgacaggtaatccagctatcccagta

SEQ ID NO: 449735 - DNA, 60 bp, Artificial
  Synthetic oligonucleotide
tacccttcaggagcaaataggatggatgacaagcaatccacctatcccagtaggagaaat

SEQ ID NO: 449736 - DNA, 58 bp, Artificial
  Synthetic oligonucleotide
tacccttctatggctgtgttaactggactaatgagaacttcccatttaatgactgcgt

SEQ ID NO: 449737 - DNA, 60 bp, Artificial
  Synthetic oligonucleotide
tacccttgagcttgaattgtcccccatcgtcagcaatcataatacaattgaggctgttgc

SEQ ID NO: 449738 - DNA, 59 bp, Artificial
  Synthetic oligonucleotide
tacccttgataatgatgacgtataggggtgtcccgaggtaatttaacatagatctgaga

SEQ ID NO: 449739 - DNA, 54 bp, Artificial
  Synthetic oligonucleotide
tacccttgcggaacagatagcatggataacaaataacccacctattccagtggg

SEQ ID NO: 449740 - DNA, 57 bp, Artificial
  Synthetic oligonucleotide
tacccttggaagagtacctgaggccgcacacttgggtcttttttatgcgggcgcaca

SEQ ID NO: 449741 - DNA, 58 bp, Artificial
  Synthetic oligonucleotide
tacccttggattatgtcaacttggaggcggtttgccgccgcatagacttcctggtcta

SEQ ID NO: 449742 - DNA, 55 bp, Artificial
  Synthetic oligonucleotide
taccgaaacaggtaagagttagattgcgacagttgaactctctcatgagacaggt

SEQ ID NO: 449743 - DNA, 51 bp, Artificial
  Synthetic oligonucleotide
taccgaaaccacctgggctcatagggttctcgctcatgcctcggtaccaga

SEQ ID NO: 449744 - DNA, 56 bp, Artificial
  Synthetic oligonucleotide
taccgaaaggaaaatcagtatccaacacagcaatgtgttgggggtcacacccttcg

SEQ ID NO: 449745 - DNA, 56 bp, Artificial
  Synthetic oligonucleotide
taccgaagaaggtacaggtagatggtcttaagtcacggagggacgtgtatgaaatc

SEQ ID NO: 449746 - DNA, 54 bp, Artificial
  Synthetic oligonucleotide
taccgaagagaagaggacaccatagacggaccatgtccatacatgtccagcaca

SEQ ID NO: 449747 - DNA, 60 bp, Artificial
  Synthetic oligonucleotide
taccgaaggcatcagagtttatcagatgagcgatcctgtatgtaagttcaaacgcaccac

SEQ ID NO: 449748 - DNA, 58 bp, Artificial
  Synthetic oligonucleotide
taccgaagtccgataggggaagttcttaatcgcttcacatctgaggagcaatccaggg

SEQ ID NO: 449749 - DNA, 60 bp, Artificial
  Synthetic oligonucleotide
taccgaattagtgaaatatggactctttgtgtcaacacctacaactgtatgtcagagtag

SEQ ID NO: 449750 - DNA, 55 bp, Artificial
  Synthetic oligonucleotide
taccgacagccgaggtaacaaaccagggcgaccgtgtctattaagtcggtcaaga

SEQ ID NO: 449751 - DNA, 55 bp, Artificial
  Synthetic oligonucleotide
taccgaccgacttatctccaattccgagttcttacattagtttcatcgacggacg

SEQ ID NO: 449752 - DNA, 55 bp, Artificial
  Synthetic oligonucleotide
taccgaccgtgaacgtgctgcgcactcagtcgggaagtacggcgcccttgcccgt

SEQ ID NO: 449753 - DNA, 60 bp, Artificial
  Synthetic oligonucleotide
taccgacctgactaactggtatggtctcgctctcgcaggtgtccagtcctatggctctga

SEQ ID NO: 449754 - DNA, 55 bp, Artificial
  Synthetic oligonucleotide
taccgacctttttctaaaagaagcgtgtgagcatgactgggtacctataaaagac

SEQ ID NO: 449755 - DNA, 57 bp, Artificial
  Synthetic oligonucleotide
taccgacgttcacaagattcgaagtacaaacgcaatgtttgtaagactactggattg

SEQ ID NO: 449756 - DNA, 56 bp, Artificial
  Synthetic oligonucleotide
taccgacgtttacacctgcgagtaatacgttcagagtgccggtctctgcaccgcct

SEQ ID NO: 449757 - DNA, 51 bp, Artificial
  Synthetic oligonucleotide
taccgacttctagaacttggtttagaatttaaacgtctccggatcaaaaaa

SEQ ID NO: 449758 - DNA, 55 bp, Artificial
  Synthetic oligonucleotide
taccgactttccgcgaagcgtctctcgctattaagaagcggaatttgaatgtccc

SEQ ID NO: 449759 - DNA, 60 bp, Artificial
  Synthetic oligonucleotide
taccgagaatgcgttgatgctttatatggcttgtacccacgctagtaacccagtgtatgc

SEQ ID NO: 449760 - DNA, 52 bp, Artificial
  Synthetic oligonucleotide
taccgagatcacgcgaccttacgtcgccgaaacgcgttaaaaatcaaacgtc

SEQ ID NO: 449761 - DNA, 60 bp, Artificial
  Synthetic oligonucleotide
taccgagcattgttattccaaagagtatctgaaggtgagcgaatagagctaacgactgga

SEQ ID NO: 449762 - DNA, 55 bp, Artificial
  Synthetic oligonucleotide
taccgagctagttcaaagctcttcaaaagggaaaatatgcaacaatcctcacagg

SEQ ID NO: 449763 - DNA, 60 bp, Artificial
  Synthetic oligonucleotide
taccgaggaagtctttataactggcaccctcaccaggattgcacagcacgattgaaggga

SEQ ID NO: 449764 - DNA, 60 bp, Artificial
  Synthetic oligonucleotide
taccgaggagagcatgcaaacttttggattgtacgattgtgagaagtgcaagtggttgct

SEQ ID NO: 449765 - DNA, 58 bp, Artificial
  Synthetic oligonucleotide
taccgaggatcaactgtcgtcctggatgggcacacccggcccactgaacgcgggagtc

SEQ ID NO: 449766 - DNA, 52 bp, Artificial
  Synthetic oligonucleotide
taccgagggccaacagactttgaccgattacgtggggtttcgattacggtgt

SEQ ID NO: 449767 - DNA, 55 bp, Artificial
  Synthetic oligonucleotide
taccgagtcaacgtgtttatgtccttccaggaccggtgtctttcgtgcgactaaa

SEQ ID NO: 449768 - DNA, 58 bp, Artificial
  Synthetic oligonucleotide
taccgagtctcctgggtcaagagacgactctggtaacttatgcatgtgttttagtggg

SEQ ID NO: 449769 - DNA, 55 bp, Artificial
  Synthetic oligonucleotide
taccgagtgacccaccaaactatctaggacaggtagctagggaggtttggcgcaa

SEQ ID NO: 449770 - DNA, 58 bp, Artificial
  Synthetic oligonucleotide
taccgagtgcaggcctgcaccttgcacttccgcccgctggttccaaactcggtgggtg

SEQ ID NO: 449771 - DNA, 55 bp, Artificial
  Synthetic oligonucleotide
taccgagtgggaaagtactctatcacagctattactaactaaaggttggcccacc

SEQ ID NO: 449772 - DNA, 58 bp, Artificial
  Synthetic oligonucleotide
taccgagttacaactgtatacctcgtggacgatatcaagaagcaattaggtttgtaga

SEQ ID NO: 449773 - DNA, 58 bp, Artificial
  Synthetic oligonucleotide
taccgataagctaccgcactttgccagtacttgacagcttaggcataagcgactacgc

SEQ ID NO: 449774 - DNA, 60 bp, Artificial
  Synthetic oligonucleotide
taccgatacacatatcgatgccacagaggggacacacaaatccagacgaggaggtcattt

SEQ ID NO: 449775 - DNA, 55 bp, Artificial
  Synthetic oligonucleotide
taccgatatatcggtgtctcggagagagaaataaattccggataccgaaactacc

SEQ ID NO: 449776 - DNA, 58 bp, Artificial
  Synthetic oligonucleotide
taccgatccagtgtgagtatactaagcttccggagcccacgttgattacgcctcccga

SEQ ID NO: 449777 - DNA, 52 bp, Artificial
  Synthetic oligonucleotide
taccgatgagtctgcgagaaaggttccatgaggacttgggttggctaacccc

SEQ ID NO: 449778 - DNA, 55 bp, Artificial
  Synthetic oligonucleotide
taccgattaccgcaataatcacatttaccattagtaaagtcggaagccccgcagg

SEQ ID NO: 449779 - DNA, 60 bp, Artificial
  Synthetic oligonucleotide
taccgattgcacgagcaacctgatgatatcgatcattagtcggtgagtttggggaggtga

SEQ ID NO: 449780 - DNA, 55 bp, Artificial
  Synthetic oligonucleotide
taccgcaaaagttggacattgtcgttttcccgtcaaagtatggtggcggagctgg

SEQ ID NO: 449781 - DNA, 60 bp, Artificial
  Synthetic oligonucleotide
taccgcactcaggcaagctattctgtgttggcgtgagttgatgaatctggccacctgggt

SEQ ID NO: 449782 - DNA, 56 bp, Artificial
  Synthetic oligonucleotide
taccgcactgcggatcatggacgactcgctgctgtatggtcgggtaggtcagaact

SEQ ID NO: 449783 - DNA, 50 bp, Artificial
  Synthetic oligonucleotide
taccgcagagggctcacgtgagtacccaatacacacgccacaaatagagg

SEQ ID NO: 449784 - DNA, 53 bp, Artificial
  Synthetic oligonucleotide
taccgcagctggtacctgtcctatacctacggggaccccgagaagggggtaca

SEQ ID NO: 449785 - DNA, 55 bp, Artificial
  Synthetic oligonucleotide
taccgcagtgcagaagcccacgagcctccccacaaatcctcgaacgagccagctg

SEQ ID NO: 449786 - DNA, 60 bp, Artificial
  Synthetic oligonucleotide
taccgcatggaaaaaagtctgatagcagtgtgccatgccttatacctaattactatcgga

SEQ ID NO: 449787 - DNA, 55 bp, Artificial
  Synthetic oligonucleotide
taccgcattcccgcgtctggatcagagtccggatacgtttcgtaccgagtacctc

SEQ ID NO: 449788 - DNA, 54 bp, Artificial
  Synthetic oligonucleotide
taccgccccataggtctgtacgccggcgttgtagtagctccgggcctcggggca

SEQ ID NO: 449789 - DNA, 55 bp, Artificial
  Synthetic oligonucleotide
taccgcccgctcctcctacttcggaccaacaaccggcttattccgcaggagagcc

SEQ ID NO: 449790 - DNA, 53 bp, Artificial
  Synthetic oligonucleotide
taccgcccgtaaagtctccaggacacgtttagacttcgacgacggtgtaggtc

SEQ ID NO: 449791 - DNA, 57 bp, Artificial
  Synthetic oligonucleotide
taccgcccgtgatttcggcatgccaaggggttaatatgtcaaccgctctcgtaagac

SEQ ID NO: 449792 - DNA, 52 bp, Artificial
  Synthetic oligonucleotide
taccgccgagccttcgggttgagtcgtcgagtgcccatgtcagccctcctcc

SEQ ID NO: 449793 - DNA, 55 bp, Artificial
  Synthetic oligonucleotide
taccgccgatggcttgactcgttttagtaaccctacctcagtcgaattggattgg

SEQ ID NO: 449794 - DNA, 57 bp, Artificial
  Synthetic oligonucleotide
taccgccgctgtcgggaccttttcttcgggaccgctgtcttcatcgctgacgaagag

SEQ ID NO: 449795 - DNA, 59 bp, Artificial
  Synthetic oligonucleotide
taccgcctaactccagccgacacctgtcggtacccagagacgtcgactcagctgccaac

SEQ ID NO: 449796 - DNA, 60 bp, Artificial
  Synthetic oligonucleotide
taccgcctgagaaatgtgacacccttttgtgtgacatcggtgagtcctctccgaatccaa

SEQ ID NO: 449797 - DNA, 50 bp, Artificial
  Synthetic oligonucleotide
taccgcctttcccggcgttaacgggacgtaaccacaagacttacctccac

SEQ ID NO: 449798 - DNA, 60 bp, Artificial
  Synthetic oligonucleotide
taccgcgatatgcaattggaaagagacgaaatgtatggctacgtgaatatagctaggaat

SEQ ID NO: 449799 - DNA, 58 bp, Artificial
  Synthetic oligonucleotide
taccgcgattagcgccgcggactccttgggtaatgcgaagcccgtcgaccgatcagga

SEQ ID NO: 449800 - DNA, 55 bp, Artificial
  Synthetic oligonucleotide
taccgcgtctcgagcaacagcgggcgcctggtcgcgcacctccgcgagacggtgt

SEQ ID NO: 449801 - DNA, 60 bp, Artificial
  Synthetic oligonucleotide
taccgcgtgcagtgaccactgggagagtatacgacatgaacaccggtactctgcgcaatt

SEQ ID NO: 449802 - DNA, 53 bp, Artificial
  Synthetic oligonucleotide
taccgcgttcaaccttttctttccaccattaccttcaggggatgaggagtttc

SEQ ID NO: 449803 - DNA, 60 bp, Artificial
  Synthetic oligonucleotide
taccgctaccaagtcagtatgagagccctaaggctttgccgcctagggtgccgagctcgc

SEQ ID NO: 449804 - DNA, 55 bp, Artificial
  Synthetic oligonucleotide
taccgctccccctccctggcccattagtaggccccttgcctcggtgcgcggtgcc

SEQ ID NO: 449805 - DNA, 59 bp, Artificial
  Synthetic oligonucleotide
taccgctcgtcacaggaactggttatcacaaccgtcactcctacttccgacgatcattc

SEQ ID NO: 449806 - DNA, 59 bp, Artificial
  Synthetic oligonucleotide
taccgcttccgacaaatctgacagcgccgaagagcctaagaaattagacccgcgtgctc

SEQ ID NO: 449807 - DNA, 54 bp, Artificial
  Synthetic oligonucleotide
taccgcttcctcgccgggggtaccgcttgcgggtcttgccaattcaaacggtga

SEQ ID NO: 449808 - DNA, 55 bp, Artificial
  Synthetic oligonucleotide
taccgcttcgacgtctttgtccggtcaggatcagtgccggggacagtccggcttg

SEQ ID NO: 449809 - DNA, 58 bp, Artificial
  Synthetic oligonucleotide
taccgcttgacatgttctcaatgttttccggaattaaatcaacagtggaagcggtgaa

SEQ ID NO: 449810 - DNA, 52 bp, Artificial
  Synthetic oligonucleotide
taccgcttgatggcctttgtgaagatcgatggtcaatggcagatagcgaacc

SEQ ID NO: 449811 - DNA, 57 bp, Artificial
  Synthetic oligonucleotide
taccgctttcggtatgtcttgttatggtgtctgccaaaaagagcaagtaaaggcgaa

SEQ ID NO: 449812 - DNA, 58 bp, Artificial
  Synthetic oligonucleotide
taccggacccaccagtaccagatatttcactatgtagatttattggattacgtgtcga

SEQ ID NO: 449813 - DNA, 60 bp, Artificial
  Synthetic oligonucleotide
taccggagagaagccataatcgaggtggaccgcactgaagcacgcagggctagacgtgaa

SEQ ID NO: 449814 - DNA, 60 bp, Artificial
  Synthetic oligonucleotide
taccggagagtggctagtgccagacttcgttaaaggtggagtgacgataagtgtgataga

SEQ ID NO: 449815 - DNA, 55 bp, Artificial
  Synthetic oligonucleotide
taccggagccggacccattctcgcccgtctccctacggctcaaaccagtgccaag

SEQ ID NO: 449816 - DNA, 59 bp, Artificial
  Synthetic oligonucleotide
taccggagccttgaaagcacgctattttgacaggtctaaccttcgtcaagctgaaatca

SEQ ID NO: 449817 - DNA, 59 bp, Artificial
  Synthetic oligonucleotide
taccggaggtggttcggtaaacaaggctgctgcactgtattcaaactgttggagtctga

SEQ ID NO: 449818 - DNA, 55 bp, Artificial
  Synthetic oligonucleotide
taccggagtggttgatagacctctgtgtaaggaaacaggtgtgagaccgggtcct

SEQ ID NO: 449819 - DNA, 57 bp, Artificial
  Synthetic oligonucleotide
taccggatgtacagaagcccagatgttcctaggggctgtgaaggcccgtgtaaggtc

SEQ ID NO: 449820 - DNA, 54 bp, Artificial
  Synthetic oligonucleotide
taccggcaaacgtgctataaggctcactaacagatgccagttcgtaactggcct

SEQ ID NO: 449821 - DNA, 60 bp, Artificial
  Synthetic oligonucleotide
taccggcaaattcgatatacagtatatcgcgtgcagtagccgtgttctggcaccctacgg

SEQ ID NO: 449822 - DNA, 52 bp, Artificial
  Synthetic oligonucleotide
taccggcatcgacacctaaggtgtggcgccgtacggggattggttattcatc

SEQ ID NO: 449823 - DNA, 57 bp, Artificial
  Synthetic oligonucleotide
taccggccaaaatctcccgagttatcactgaacaagtatttggagctggagtgaacg

SEQ ID NO: 449824 - DNA, 58 bp, Artificial
  Synthetic oligonucleotide
taccggcctataggtttgtatgctggcgttgtggtggctccgggcctcggtgcacttc

SEQ ID NO: 449825 - DNA, 54 bp, Artificial
  Synthetic oligonucleotide
taccggcgttggacttcgatgaccgctgcttgacgggcgcagttaaactagacc

SEQ ID NO: 449826 - DNA, 54 bp, Artificial
  Synthetic oligonucleotide
taccggctgaggaaagccgaagaattcaaaagaacagcccgagacccgataagg

SEQ ID NO: 449827 - DNA, 58 bp, Artificial
  Synthetic oligonucleotide
taccgggaggaatgacacgttcacatacgctggatgccaggggctaactaagccgaaa

SEQ ID NO: 449828 - DNA, 54 bp, Artificial
  Synthetic oligonucleotide
taccgggatgaactccggggcttcacagttcaccccccaataccgccagccaac

SEQ ID NO: 449829 - DNA, 58 bp, Artificial
  Synthetic oligonucleotide
taccgggcctcgggcgaccttaagtcagccgcaccttcgtgacaatctgagatctcgg

SEQ ID NO: 449830 - DNA, 53 bp, Artificial
  Synthetic oligonucleotide
taccgggctccacttgtggagactagtatatactcatgcttacgttacgtacg

SEQ ID NO: 449831 - DNA, 51 bp, Artificial
  Synthetic oligonucleotide
taccggggacgcggccccacccctgccgtcactcacacgggcctggttggt

SEQ ID NO: 449832 - DNA, 56 bp, Artificial
  Synthetic oligonucleotide
taccgggtctaatgaagtctggtagttactgtacctcgagtactaacagccggata

SEQ ID NO: 449833 - DNA, 54 bp, Artificial
  Synthetic oligonucleotide
taccgggttggaagctaacgtacgtaggatacaatggaaatgacacacgagggc

SEQ ID NO: 449834 - DNA, 54 bp, Artificial
  Synthetic oligonucleotide
taccggtcgaagatatacgcggttagcaattaggtcgggatatttcccgacttc

SEQ ID NO: 449835 - DNA, 60 bp, Artificial
  Synthetic oligonucleotide
taccggtctggacatgactgttactggaagagtcaatgctaccacactaaacgcctctgg

SEQ ID NO: 449836 - DNA, 55 bp, Artificial
  Synthetic oligonucleotide
taccggtgcgggcatccaacacaccctgaccaccgagacaaaaactagtaaggct

SEQ ID NO: 449837 - DNA, 59 bp, Artificial
  Synthetic oligonucleotide
taccggtgcgggccccgcctgtggacacgcgattgcgccgtggccgaactctcatggga

SEQ ID NO: 449838 - DNA, 57 bp, Artificial
  Synthetic oligonucleotide
taccggtgggcagattgagtgaacctttgtttgaacctggtaagacagacatacgac

SEQ ID NO: 449839 - DNA, 53 bp, Artificial
  Synthetic oligonucleotide
taccggtgggggcaatgcgtttagtctaggaggagggttccttagatcccgaa

SEQ ID NO: 449840 - DNA, 57 bp, Artificial
  Synthetic oligonucleotide
taccggtgttggcagacatcccggaacgaaagagttgctcatcgaccggagacgttc

SEQ ID NO: 449841 - DNA, 55 bp, Artificial
  Synthetic oligonucleotide
taccggttacagatattcctaatgattatagcgttactgcgttttctgaagatgg

SEQ ID NO: 449842 - DNA, 55 bp, Artificial
  Synthetic oligonucleotide
taccggttccaaatcctacggaaccatcagtattgaccaactcaatacattcccc

SEQ ID NO: 449843 - DNA, 54 bp, Artificial
  Synthetic oligonucleotide
taccggtttttcggtgaaggtgttgactttcagcagccctacaattgtagtggt

SEQ ID NO: 449844 - DNA, 58 bp, Artificial
  Synthetic oligonucleotide
taccgtacagggcctcgagtacttggctgtcagtgggtgagtatgagcgacttggggt

SEQ ID NO: 449845 - DNA, 60 bp, Artificial
  Synthetic oligonucleotide
taccgtacatggtttcaggtgtatgctcgctgtaaaatacttgcagttggtagaatctac

SEQ ID NO: 449846 - DNA, 56 bp, Artificial
  Synthetic oligonucleotide
taccgtacggctctgtggagggtgtccgctgaggattacgtcgaggttatgcgtat

SEQ ID NO: 449847 - DNA, 60 bp, Artificial
  Synthetic oligonucleotide
taccgtagtgacaatcgtgaacacacatgctactcaggactagatgtcactgagtgtggc

SEQ ID NO: 449848 - DNA, 51 bp, Artificial
  Synthetic oligonucleotide
taccgtatatatgcccccgggctcttctggggttatcgccagataggtgtg

SEQ ID NO: 449849 - DNA, 57 bp, Artificial
  Synthetic oligonucleotide
taccgtatgaaggtcacttggactgtcgagttctctggacttaggcccgataccgac

SEQ ID NO: 449850 - DNA, 52 bp, Artificial
  Synthetic oligonucleotide
taccgtcaaagcaagcgatatctcaaaaccaactgtgatcacgatttcagcg

SEQ ID NO: 449851 - DNA, 60 bp, Artificial
  Synthetic oligonucleotide
taccgtccatgtctagatcagcattaccctctgagaaccaagcatgagagagatagttag

SEQ ID NO: 449852 - DNA, 55 bp, Artificial
  Synthetic oligonucleotide
taccgtccgcaactgctccatccgaggccttgtgcctctggtgctgtgcggacac

SEQ ID NO: 449853 - DNA, 59 bp, Artificial
  Synthetic oligonucleotide
taccgtcgaggtatcgcctgaattgatcccgattcgcttgatccatacgttggtttgct

SEQ ID NO: 449854 - DNA, 55 bp, Artificial
  Synthetic oligonucleotide
taccgtctatgctgcgcaagtgcaaggcactactttaagggcaactatgatgggc

SEQ ID NO: 449855 - DNA, 60 bp, Artificial
  Synthetic oligonucleotide
taccgtgaggtcacgggagctccacgagtcactacggctggtaaggtgctgacacacact

SEQ ID NO: 449856 - DNA, 56 bp, Artificial
  Synthetic oligonucleotide
taccgtgatatagaagtgcgttcggcaactggtttggggattaaaacctatgagcc

SEQ ID NO: 449857 - DNA, 57 bp, Artificial
  Synthetic oligonucleotide
taccgtgcgattatgcgctatgccaaggcacaacgtctggactgggtgctcatccct

SEQ ID NO: 449858 - DNA, 56 bp, Artificial
  Synthetic oligonucleotide
taccgtgctacgccgtgggagtttcactggtcggtgtctacctcttaaggtcacca

SEQ ID NO: 449859 - DNA, 55 bp, Artificial
  Synthetic oligonucleotide
taccgtgctttagtgagttggcctttatcatcaccacccacagtgtacaatacca

SEQ ID NO: 449860 - DNA, 55 bp, Artificial
  Synthetic oligonucleotide
taccgtggagtgaacttgatccggaggaagaatttttacgtaattatagagtgtc

SEQ ID NO: 449861 - DNA, 55 bp, Artificial
  Synthetic oligonucleotide
taccgtggccaaacccacaagacaccaaaatcaaatcagtccgaccgactcccac

SEQ ID NO: 449862 - DNA, 59 bp, Artificial
  Synthetic oligonucleotide
taccgtggcctcgacgtatctgtcattccaactacaggagacgtcgttgttgtagcgac

SEQ ID NO: 449863 - DNA, 55 bp, Artificial
  Synthetic oligonucleotide
taccgtggcgtgtctcctagcgaggtgggaaagcaacttcgatcagttggtgcaa

SEQ ID NO: 449864 - DNA, 53 bp, Artificial
  Synthetic oligonucleotide
taccgtgtcaggggggacgtcagcccataacacccgaggggttgtgtccctct

SEQ ID NO: 449865 - DNA, 55 bp, Artificial
  Synthetic oligonucleotide
taccgtgtgcaccaatctgcacccagctagacgagtcaacgctgaaccatgggta

SEQ ID NO: 449866 - DNA, 56 bp, Artificial
  Synthetic oligonucleotide
taccgtgtttatgtcagaaactccgggggcgactgtgtatcatgccgcatgggcat

SEQ ID NO: 449867 - DNA, 50 bp, Artificial
  Synthetic oligonucleotide
taccgttattcacgtaaacacatacgaggcgcggtctcaatatgcatgta

SEQ ID NO: 449868 - DNA, 55 bp, Artificial
  Synthetic oligonucleotide
taccgttcagatttgattactgaagggttaagcgaaaacgagagtgtgagtcaag

SEQ ID NO: 449869 - DNA, 49 bp, Artificial
  Synthetic oligonucleotide
taccgttccgttttgtctttaccccgttccgttattgagtaccaatccg

SEQ ID NO: 449870 - DNA, 60 bp, Artificial
  Synthetic oligonucleotide
taccgttcctacggaatggtcattggcttctggacagactctaagagcccgcagctgcca

SEQ ID NO: 449871 - DNA, 55 bp, Artificial
  Synthetic oligonucleotide
taccgttcctgtctaaaatccctttaatcggcctcctgtttagctcccgctctga

SEQ ID NO: 449872 - DNA, 57 bp, Artificial
  Synthetic oligonucleotide
taccgttctgcttacagtaaacacagtcggtagtctggcgctccgttgacaacggat

SEQ ID NO: 449873 - DNA, 57 bp, Artificial
  Synthetic oligonucleotide
taccgttggattgcttatttggccgctaagaggacaggagtcaagatcccaaaagtg

SEQ ID NO: 449874 - DNA, 52 bp, Artificial
  Synthetic oligonucleotide
taccgttgggaagcgtccaatcacttttgtcctgtcgcgcttagatatgcgt

SEQ ID NO: 449875 - DNA, 58 bp, Artificial
  Synthetic oligonucleotide
taccgttgtgcctgtgctaaagcggcgttctccctcgttgttctacgcctagcatctt

SEQ ID NO: 449876 - DNA, 60 bp, Artificial
  Synthetic oligonucleotide
taccgttgtgttcgatgccgttacaagcataatagcagatgtggaaaaggtcgatcagtc

SEQ ID NO: 449877 - DNA, 57 bp, Artificial
  Synthetic oligonucleotide
taccgttgttggctatttaatgtactgctttcacgcatttatctttttgactgacgt

SEQ ID NO: 449878 - DNA, 60 bp, Artificial
  Synthetic oligonucleotide
tacctaaaatcgaattgccacatgagagaggtatttacaagcgacaagaactcaactatg

SEQ ID NO: 449879 - DNA, 58 bp, Artificial
  Synthetic oligonucleotide
tacctaaacgatactgacaatgtaggcgtgttcgacaagatgacgtcctgggtacaaa

SEQ ID NO: 449880 - DNA, 60 bp, Artificial
  Synthetic oligonucleotide
tacctaaagccgccagaggtcaatacagcgggtttgtgagaacactatttcagcaaatgc

SEQ ID NO: 449881 - DNA, 55 bp, Artificial
  Synthetic oligonucleotide
tacctaaagtcctttcatatgtcagtgccgagcgtgttgacattaagggccctga

SEQ ID NO: 449882 - DNA, 54 bp, Artificial
  Synthetic oligonucleotide
tacctaatggggctaggagtgggcggaaacgcacaggtgcgcctagcgtcggct

SEQ ID NO: 449883 - DNA, 60 bp, Artificial
  Synthetic oligonucleotide
tacctacaacggaggctgcaagctaatggtctccgagcggtgactgataaagatgggcct

SEQ ID NO: 449884 - DNA, 60 bp, Artificial
  Synthetic oligonucleotide
tacctacacaatccagatttgaccactactgtctgtctgtctttgatggctggaatcgac

SEQ ID NO: 449885 - DNA, 54 bp, Artificial
  Synthetic oligonucleotide
tacctacacctggggtgagaaagaaacggacgtcttcgtcctcaacaacactag

SEQ ID NO: 449886 - DNA, 54 bp, Artificial
  Synthetic oligonucleotide
tacctacactagagcgtttgataaatcacgacgaaccgcgggcgttacttaaaa

SEQ ID NO: 449887 - DNA, 60 bp, Artificial
  Synthetic oligonucleotide
tacctacaggatcaacagttcctagggctctggggttgctctggaaaacgcatctgcacc

SEQ ID NO: 449888 - DNA, 60 bp, Artificial
  Synthetic oligonucleotide
tacctacatcaacttcttttggtgaattggagtgtgatatgaaaagtgtggttgcgtatg

SEQ ID NO: 449889 - DNA, 51 bp, Artificial
  Synthetic oligonucleotide
tacctacctcctagtgcaccagtagctcgtgtgttgcgcactgatgaatac

SEQ ID NO: 449890 - DNA, 50 bp, Artificial
  Synthetic oligonucleotide
tacctacttcggtggtagttgtcaagcccgagaaaaccccgaccctcggg

SEQ ID NO: 449891 - DNA, 54 bp, Artificial
  Synthetic oligonucleotide
tacctagaataccacgtagcgccaatcgaagcctctgccattagtagggcaagg

SEQ ID NO: 449892 - DNA, 60 bp, Artificial
  Synthetic oligonucleotide
tacctagactatgtgcatgcagagaagagccggttggcatcagaagaacagatcctacgg

SEQ ID NO: 449893 - DNA, 55 bp, Artificial
  Synthetic oligonucleotide
tacctagccctagtggtagtgcaacaaaatggcagaccccagagaaagggtgccg

SEQ ID NO: 449894 - DNA, 59 bp, Artificial
  Synthetic oligonucleotide
tacctagtaacagtaggatctacatcgacgcatagtaacgacttttagcctccaccaga

SEQ ID NO: 449895 - DNA, 60 bp, Artificial
  Synthetic oligonucleotide
tacctagttctagcccactatgatcggaagtatgccttcacagtgaaggcgacaaaggtc

SEQ ID NO: 449896 - DNA, 58 bp, Artificial
  Synthetic oligonucleotide
tacctataaatgacaagctgcttgattcgttagaccggtattctctaatttttgcgtg

SEQ ID NO: 449897 - DNA, 55 bp, Artificial
  Synthetic oligonucleotide
tacctataactggggtcaaaatgaaacggacgtcttcgtcctcaacaataccaga

SEQ ID NO: 449898 - DNA, 55 bp, Artificial
  Synthetic oligonucleotide
tacctataccactagcttgggtgccggccctacctcgatttccgccgttggtgtg

SEQ ID NO: 449899 - DNA, 59 bp, Artificial
  Synthetic oligonucleotide
tacctatcagtggatcatcagaaactgggaaactgttaaaattcagtggtcccagaatc

SEQ ID NO: 449900 - DNA, 59 bp, Artificial
  Synthetic oligonucleotide
tacctatcccggcgccgaactataagttcgcgctgtggcgagtgtctgccgaggaatac

SEQ ID NO: 449901 - DNA, 52 bp, Artificial
  Synthetic oligonucleotide
tacctatgagagcggccctatcactaacgaagaacttagggtgattacgtct

SEQ ID NO: 449902 - DNA, 60 bp, Artificial
  Synthetic oligonucleotide
tacctatgaggactttctgggctttcgggatccagcatacacctatatcatacgtctgcc

SEQ ID NO: 449903 - DNA, 60 bp, Artificial
  Synthetic oligonucleotide
tacctatgcagcgtggcagagatatctagggatgggccaagattagaatcaatgaactct

SEQ ID NO: 449904 - DNA, 57 bp, Artificial
  Synthetic oligonucleotide
tacctatggcagaactttccgtgaggcgtataaggagttcttcttacttgcctctaa

SEQ ID NO: 449905 - DNA, 58 bp, Artificial
  Synthetic oligonucleotide
tacctatgggagtgggcctcagtccgtttctcttggctcagtttactagtgccatttg

SEQ ID NO: 449906 - DNA, 52 bp, Artificial
  Synthetic oligonucleotide
tacctatggttgatcacccaaggataccgagtctccgtgacattaaagttac

SEQ ID NO: 449907 - DNA, 55 bp, Artificial
  Synthetic oligonucleotide
tacctattagaaattggacatttgactttggtctactaggtactacgctgttaaa

SEQ ID NO: 449908 - DNA, 60 bp, Artificial
  Synthetic oligonucleotide
tacctattgcaagcctaccctgtatatgattgtgccaatccatgcatgcaatatgatgaa

SEQ ID NO: 449909 - DNA, 54 bp, Artificial
  Synthetic oligonucleotide
tacctattttcttgcaagaagcactcaacattgcattggtggcagtcagcctca

SEQ ID NO: 449910 - DNA, 57 bp, Artificial
  Synthetic oligonucleotide
tacctcaacttggagagtggcccacacttacacgtttagcatcggtttgttacacca

SEQ ID NO: 449911 - DNA, 60 bp, Artificial
  Synthetic oligonucleotide
tacctcacctcaagtcagaacataactgaggagttttaccaatcgacatgtagtgcagtt

SEQ ID NO: 449912 - DNA, 56 bp, Artificial
  Synthetic oligonucleotide
tacctcacgtagtgcttcccttcgtcaacggaaggtgacatttgaccgcgtccaac

SEQ ID NO: 449913 - DNA, 60 bp, Artificial
  Synthetic oligonucleotide
tacctcagatcattcaacgactccatggccttagcgcattttcactccatagttactctc

SEQ ID NO: 449914 - DNA, 55 bp, Artificial
  Synthetic oligonucleotide
tacctcaggagccacgtttacgacaagacattggtgtgtatttatatccgaacga

SEQ ID NO: 449915 - DNA, 51 bp, Artificial
  Synthetic oligonucleotide
tacctcaggatgtcaatcaaatgctgaatgccataggaggacatcagggag

SEQ ID NO: 449916 - DNA, 52 bp, Artificial
  Synthetic oligonucleotide
tacctcagtcgaattggattgggttatactgttgtaggggtaaatttttctt

SEQ ID NO: 449917 - DNA, 55 bp, Artificial
  Synthetic oligonucleotide
tacctcattcagcatcccggatgtcggcctgaacggtatcttccgtacgcagggg

SEQ ID NO: 449918 - DNA, 58 bp, Artificial
  Synthetic oligonucleotide
tacctcattttacgagcagtgacgtaaggtggttgttgcgttgttatacacgcgtcaa

SEQ ID NO: 449919 - DNA, 56 bp, Artificial
  Synthetic oligonucleotide
tacctccacaagtctgtccgcgttaactgtttttgttccacgaagatgtattgtac

SEQ ID NO: 449920 - DNA, 59 bp, Artificial
  Synthetic oligonucleotide
tacctccacataagtctaataaccctgcagctaaggttgttttgccactatcaattgga

SEQ ID NO: 449921 - DNA, 55 bp, Artificial
  Synthetic oligonucleotide
tacctccaggtccgcacggacgaaaaggaacgggtcgcggatggagatgcctagc

SEQ ID NO: 449922 - DNA, 54 bp, Artificial
  Synthetic oligonucleotide
tacctccctctaacaggcgtattaattgttgggccacgtttaaggacgtggatc

SEQ ID NO: 449923 - DNA, 60 bp, Artificial
  Synthetic oligonucleotide
tacctccctctagagcgttgaagttgaacggagttatgatcccatcatggccgtatggga

SEQ ID NO: 449924 - DNA, 55 bp, Artificial
  Synthetic oligonucleotide
tacctccgtacagactgcacttcaatcatccgagcgtccttcaacctctgcgatt

SEQ ID NO: 449925 - DNA, 60 bp, Artificial
  Synthetic oligonucleotide
tacctcctgtggttcccagcactaccccatatgccatttatatacagggatctgattact

SEQ ID NO: 449926 - DNA, 59 bp, Artificial
  Synthetic oligonucleotide
tacctcgacacttatagtgggcactattactagcttcgaatcacgagacggacgatcca

SEQ ID NO: 449927 - DNA, 50 bp, Artificial
  Synthetic oligonucleotide
tacctcgacccccgcccctactaaacgtaaaaagcgcaaaaagtaacatg

SEQ ID NO: 449928 - DNA, 60 bp, Artificial
  Synthetic oligonucleotide
tacctcgataaagcgtattgcatgtagccctcggtgcgtattcgctgccacatggatact

SEQ ID NO: 449929 - DNA, 55 bp, Artificial
  Synthetic oligonucleotide
tacctcgatccctggtcgtcaccggcttctgtgcagtcaccattccgcacgttgc

SEQ ID NO: 449930 - DNA, 60 bp, Artificial
  Synthetic oligonucleotide
tacctcggcctttcagagcccagtcaagatgcttcggttctctcagaactggatgcgtta

SEQ ID NO: 449931 - DNA, 55 bp, Artificial
  Synthetic oligonucleotide
tacctcgggggtctagagcgccagaagaaccaaaactggtatgaagggtggttca

SEQ ID NO: 449932 - DNA, 60 bp, Artificial
  Synthetic oligonucleotide
tacctcgtgtaaatgagactcgggcgtttgccacagtgtgctatgcctagagacctgtag

SEQ ID NO: 449933 - DNA, 59 bp, Artificial
  Synthetic oligonucleotide
tacctctaggagacgagcaattcctgagcgttacgaccttaagacagtttgttgataca

SEQ ID NO: 449934 - DNA, 58 bp, Artificial
  Synthetic oligonucleotide
tacctctcgtcacgagtagtgcaaggcttgatgcattgcaggagtgcatggcagtgcc

SEQ ID NO: 449935 - DNA, 57 bp, Artificial
  Synthetic oligonucleotide
tacctctgtagtggcacgcggcctcactagtgaagcccaagtgtactctctaccccc

SEQ ID NO: 449936 - DNA, 58 bp, Artificial
  Synthetic oligonucleotide
tacctcttacatactacctcagattttttgtttcttgattgcttttcaaggagcatac

SEQ ID NO: 449937 - DNA, 55 bp, Artificial
  Synthetic oligonucleotide
tacctcttagtctatggagacacataggggaaagtatcggaagaaatcctgactg

SEQ ID NO: 449938 - DNA, 52 bp, Artificial
  Synthetic oligonucleotide
tacctctttcggggggaatctcggtaaagctatctttcaggccaaaaagagg

SEQ ID NO: 449939 - DNA, 55 bp, Artificial
  Synthetic oligonucleotide
tacctgaaaaacccgtgatatgctcggaacgtgttagtctgctggatcagcacac

SEQ ID NO: 449940 - DNA, 59 bp, Artificial
  Synthetic oligonucleotide
tacctgactggttcgcagccaaggagcccatatttctagaagccagcatcaaacgtgac

SEQ ID NO: 449941 - DNA, 58 bp, Artificial
  Synthetic oligonucleotide
tacctgagagccccgcgatcggtgtatcggtttagagcacgtgggtggtcctctaata

SEQ ID NO: 449942 - DNA, 60 bp, Artificial
  Synthetic oligonucleotide
tacctgaggacaatgagccaagtgggtatgcacagacagattgtgtcttggaagcaatgg

SEQ ID NO: 449943 - DNA, 60 bp, Artificial
  Synthetic oligonucleotide
tacctgagtttggacgcatgtacaccgcaatgctccttagtgacaataagaatacattag

SEQ ID NO: 449944 - DNA, 60 bp, Artificial
  Synthetic oligonucleotide
tacctgataagacttttgagatgctttgggatacagtttgcaaatacaagagtgatgctg

SEQ ID NO: 449945 - DNA, 54 bp, Artificial
  Synthetic oligonucleotide
tacctgatggacctccctgctctcagcggtcgaagtttttgctgatggacgccc

SEQ ID NO: 449946 - DNA, 60 bp, Artificial
  Synthetic oligonucleotide
tacctgattctgacatgatagatataccaaaaatcagcatagtagacgcactcagttaca

SEQ ID NO: 449947 - DNA, 56 bp, Artificial
  Synthetic oligonucleotide
tacctgattggtcagaaaaatgggaggagccaaaaatgcaaaccccactaaataca

SEQ ID NO: 449948 - DNA, 60 bp, Artificial
  Synthetic oligonucleotide
tacctgcaatatggcggcaacgtcgtgcgcgaacatgtccctcccggcccatcccacatc

SEQ ID NO: 449949 - DNA, 60 bp, Artificial
  Synthetic oligonucleotide
tacctgcacaatccagacttgacaactactgtctgtctttctttgatggccgggatcgac

SEQ ID NO: 449950 - DNA, 50 bp, Artificial
  Synthetic oligonucleotide
tacctgctccccaaccggtgagcggggagctaatcactccaggccaatag

SEQ ID NO: 449951 - DNA, 60 bp, Artificial
  Synthetic oligonucleotide
tacctgctggtgttcaagctcttcctacatttgaagagctgttcggagcatattccgctt

SEQ ID NO: 449952 - DNA, 60 bp, Artificial
  Synthetic oligonucleotide
tacctggacatcaagctgaacgcaaagatcttccttggagtcttaggcatcatgagactt

SEQ ID NO: 449953 - DNA, 57 bp, Artificial
  Synthetic oligonucleotide
tacctggactggtgcttcaaaatataaccttaatgggcgtgaatctataatcaaccc

SEQ ID NO: 449954 - DNA, 50 bp, Artificial
  Synthetic oligonucleotide
tacctggcagacaggctgcgcgtcaagtgcacgctacccaccagcgtgga

SEQ ID NO: 449955 - DNA, 55 bp, Artificial
  Synthetic oligonucleotide
tacctgggatcaatgtagggagttactttttacgtataaacgatgcctggacact

SEQ ID NO: 449956 - DNA, 59 bp, Artificial
  Synthetic oligonucleotide
tacctgggatgccagtcgtggacgtgtccctacacgggcccagtgtccagcccgcattg

SEQ ID NO: 449957 - DNA, 56 bp, Artificial
  Synthetic oligonucleotide
tacctgggtgatgatcgctgcccgtggttcgggtaggtactcccctccaggtgttc

SEQ ID NO: 449958 - DNA, 53 bp, Artificial
  Synthetic oligonucleotide
tacctggtagaaaggtatgtatatggtggtcgtaggtttgagtttagtccccc

SEQ ID NO: 449959 - DNA, 51 bp, Artificial
  Synthetic oligonucleotide
tacctgtcccccggcttggtgcaattcgcacaagccaccgaatcctacttt

SEQ ID NO: 449960 - DNA, 52 bp, Artificial
  Synthetic oligonucleotide
tacctgtcccgctgaacgggtcgagtacaattcccccggccctactacccgc

SEQ ID NO: 449961 - DNA, 59 bp, Artificial
  Synthetic oligonucleotide
tacctgtccgtgttgggccgacgatgtagaggctgcgttttcttgttcctggagcattc

SEQ ID NO: 449962 - DNA, 58 bp, Artificial
  Synthetic oligonucleotide
tacctgtctttaaccctgaatggcaaactccctcttttcctgatatacatttgcagga

SEQ ID NO: 449963 - DNA, 57 bp, Artificial
  Synthetic oligonucleotide
tacctgtgacacattgcagatgtgggaggcaatatctgttaaaacagaagtagttgg

SEQ ID NO: 449964 - DNA, 59 bp, Artificial
  Synthetic oligonucleotide
tacctgtgcgacgttacgccctccggtctgggtgatcgcatcgctttcccgattgttga

SEQ ID NO: 449965 - DNA, 53 bp, Artificial
  Synthetic oligonucleotide
tacctgtttagccataacgtctaataatgatgtggttgttggaggtcccgctc

SEQ ID NO: 449966 - DNA, 53 bp, Artificial
  Synthetic oligonucleotide
taccttaacgacataggttaaggagatgcctgcagttagtggttatccacggc

SEQ ID NO: 449967 - DNA, 60 bp, Artificial
  Synthetic oligonucleotide
taccttacaacagattgtctgagctatcaggtccatcagctgtagcaagactgttgaaat

SEQ ID NO: 449968 - DNA, 58 bp, Artificial
  Synthetic oligonucleotide
taccttacccggtcagctgtggcctgacccgtacagacgcgttattgcaaggtactga

SEQ ID NO: 449969 - DNA, 60 bp, Artificial
  Synthetic oligonucleotide
taccttagggcgcgtaagcgcgtactgaggcagtctcagatttgcgcactcccaacctgc

SEQ ID NO: 449970 - DNA, 55 bp, Artificial
  Synthetic oligonucleotide
taccttaggttcaccctgcatagttggcactggtaacagttttactggcgcgcct

SEQ ID NO: 449971 - DNA, 51 bp, Artificial
  Synthetic oligonucleotide
taccttatgctgggttggtattagttatcactgtaactgacaataaagggg

SEQ ID NO: 449972 - DNA, 60 bp, Artificial
  Synthetic oligonucleotide
taccttattgcgagatgctccgcctctgcgaccgttatccacataaagtgccagtcaagg

SEQ ID NO: 449973 - DNA, 60 bp, Artificial
  Synthetic oligonucleotide
taccttcaatggtgcattcatagccccagatagagccacctttctccgctctaatgcccc

SEQ ID NO: 449974 - DNA, 58 bp, Artificial
  Synthetic oligonucleotide
taccttcaccattgagacaaccacgctcccccaggatgccgtctccagcacccaacgt

SEQ ID NO: 449975 - DNA, 56 bp, Artificial
  Synthetic oligonucleotide
taccttcagctggggcgcaaatgatacggacgttttcgtccttaacaacaccaggc

SEQ ID NO: 449976 - DNA, 58 bp, Artificial
  Synthetic oligonucleotide
taccttcatgcattttcccataatctgaacggtcttctgttccagataagaaggaaat

SEQ ID NO: 449977 - DNA, 57 bp, Artificial
  Synthetic oligonucleotide
taccttcctctcggcgagctgagacttcagaaacaaaccggccaaatcaagcaaggg

SEQ ID NO: 449978 - DNA, 55 bp, Artificial
  Synthetic oligonucleotide
taccttcctgttctgtggttcaatgatggccacggggaaaatcctagtggcctat

SEQ ID NO: 449979 - DNA, 55 bp, Artificial
  Synthetic oligonucleotide
taccttcggactttatacccctgacctacgaagagagtcacccagttctctgggc

SEQ ID NO: 449980 - DNA, 57 bp, Artificial
  Synthetic oligonucleotide
taccttctctctccaaaactcgccggagaagacgattcctgccgatcccgacctcaa

SEQ ID NO: 449981 - DNA, 60 bp, Artificial
  Synthetic oligonucleotide
taccttctgcaggccagccttttacatgtgccgtactatgtgcgagctcacatcttgttg

SEQ ID NO: 449982 - DNA, 54 bp, Artificial
  Synthetic oligonucleotide
taccttgacttttctgtcagggtttataaatttcgtgggcttctactttggatg

SEQ ID NO: 449983 - DNA, 50 bp, Artificial
  Synthetic oligonucleotide
taccttgcaagttgagacaggtagtgaggtcatggatacagggggggtca

SEQ ID NO: 449984 - DNA, 58 bp, Artificial
  Synthetic oligonucleotide
taccttgcattggttttccggacagtgcgtcagagcaacgttttgctcggactcaagg

SEQ ID NO: 449985 - DNA, 55 bp, Artificial
  Synthetic oligonucleotide
taccttgcccttctcaaagtacccaaacataaattcctctgcaattgtgcacccc

SEQ ID NO: 449986 - DNA, 57 bp, Artificial
  Synthetic oligonucleotide
taccttgccgtgaacgggaacctcataccgtgcacggagtccttcaggcttcggata

SEQ ID NO: 449987 - DNA, 59 bp, Artificial
  Synthetic oligonucleotide
taccttggaaaaagatatcacatggttgaaccacttggtcaagtgattaagctaactga

SEQ ID NO: 449988 - DNA, 60 bp, Artificial
  Synthetic oligonucleotide
taccttggcgaatatcaggatagagcatcataagatgccgaccggcgcattcacgacgcg

SEQ ID NO: 449989 - DNA, 56 bp, Artificial
  Synthetic oligonucleotide
taccttgggtaccccttggtgtcacctgcctaatacgttgtggtccatcacaattg

SEQ ID NO: 449990 - DNA, 55 bp, Artificial
  Synthetic oligonucleotide
taccttggtacacctcagaacgtaaactctatctacaacaacctacctgctcgtg

SEQ ID NO: 449991 - DNA, 55 bp, Artificial
  Synthetic oligonucleotide
taccttgttagggctcatggcgctctgaatgtttgggtggaaaccatctatgtcg

SEQ ID NO: 449992 - DNA, 59 bp, Artificial
  Synthetic oligonucleotide
taccttgttggagagcgggagtctggtgaccgttgcagagcagcaccctgtaacgttcg

SEQ ID NO: 449993 - DNA, 57 bp, Artificial
  Synthetic oligonucleotide
tacctttagacatgttttctatgttttcggggataaaaagcactattgatctgacca

SEQ ID NO: 449994 - DNA, 59 bp, Artificial
  Synthetic oligonucleotide
tacctttttgatccttttggcttctcggatgagcgcctcaagcaaatctaccagtttga

SEQ ID NO: 449995 - DNA, 56 bp, Artificial
  Synthetic oligonucleotide
tacgaaaattgatctatggtcgtacaatgcagagctattagtagcgctagagaacc

SEQ ID NO: 449996 - DNA, 52 bp, Artificial
  Synthetic oligonucleotide
tacgaaagcatagttcgggatctaaccactcgggatggtagcttcgttctga

SEQ ID NO: 449997 - DNA, 52 bp, Artificial
  Synthetic oligonucleotide
tacgaaagtcaatagcgaattatgttcaaacatacccggacagcgacgtaac

SEQ ID NO: 449998 - DNA, 58 bp, Artificial
  Synthetic oligonucleotide
tacgaaagtgaggcggccagaggtccagcagaggtgagtgaggcgggcacagcggtca

SEQ ID NO: 449999 - DNA, 52 bp, Artificial
  Synthetic oligonucleotide
tacgaaagttattcgctactttgggccgaataagctaaattccctggaaggt

SEQ ID NO: 450000 - DNA, 60 bp, Artificial
  Synthetic oligonucleotide
tacgaaagttgatgtttacagagatgaggtcccagcacagattatcgaagtagaacgcag

SEQ ID NO: 450001 - DNA, 60 bp, Artificial
  Synthetic oligonucleotide
tacgaaatagaatagaacagctaatatcgcagtgtagattgtgagagccttctagaggtt

SEQ ID NO: 450002 - DNA, 54 bp, Artificial
  Synthetic oligonucleotide
tacgaaatccttgttcctggaagtttagtcggtgatgactggacattacggttt

SEQ ID NO: 450003 - DNA, 60 bp, Artificial
  Synthetic oligonucleotide
tacgaaatcttttagtaggaggcattgtactccgatgacgtggcttagcatattaacata

SEQ ID NO: 450004 - DNA, 54 bp, Artificial
  Synthetic oligonucleotide
tacgaaatgcggggacgtatacggcggaagtgaaaggttcggacgcgtacgtga

SEQ ID NO: 450005 - DNA, 57 bp, Artificial
  Synthetic oligonucleotide
tacgaacaatgctaaaaccataatagtacagctgagcaaatctgtagaaattacttg

SEQ ID NO: 450006 - DNA, 52 bp, Artificial
  Synthetic oligonucleotide
tacgaacatggccaatgacatcaatgtacccaatcacgcatgtacttgtgac

SEQ ID NO: 450007 - DNA, 58 bp, Artificial
  Synthetic oligonucleotide
tacgaaccaatactagacgcaatcaccactacgtaatccgcgtcatccctagagataa

SEQ ID NO: 450008 - DNA, 59 bp, Artificial
  Synthetic oligonucleotide
tacgaaccacccgtggtccatggctgcgcgcttccacatccacagtcccctcccgtgcc

SEQ ID NO: 450009 - DNA, 56 bp, Artificial
  Synthetic oligonucleotide
tacgaaccagaagaggagagctgaaatgcttgctggatacactccagcgatcctag

SEQ ID NO: 450010 - DNA, 56 bp, Artificial
  Synthetic oligonucleotide
tacgaacccggtaggtctctttggtgtaggatagggcacgatcgatgtggggagga

SEQ ID NO: 450011 - DNA, 60 bp, Artificial
  Synthetic oligonucleotide
tacgaacgcttctcctagctcgtcgttcaccgatgacgtccttcttactaggtgctctca

SEQ ID NO: 450012 - DNA, 58 bp, Artificial
  Synthetic oligonucleotide
tacgaactatcaaaacgtgcctaatcctgaaccgtttctaacatcaacactatgcttg

SEQ ID NO: 450013 - DNA, 59 bp, Artificial
  Synthetic oligonucleotide
tacgaactcactggttacgtaagtaatcagccgggatacgagacacgcatgcgtaatcc

SEQ ID NO: 450014 - DNA, 60 bp, Artificial
  Synthetic oligonucleotide
tacgaactctctccggacacagagtctatggatatgctccagatggggtacttccactgg

SEQ ID NO: 450015 - DNA, 51 bp, Artificial
  Synthetic oligonucleotide
tacgaactgctggagctacgccaagcgcgaggcgtgcggcctctttgacat

SEQ ID NO: 450016 - DNA, 50 bp, Artificial
  Synthetic oligonucleotide
tacgaacttgccaaactagagtatgtctataccaagctagaacgcgcggc

SEQ ID NO: 450017 - DNA, 55 bp, Artificial
  Synthetic oligonucleotide
tacgaagattcacagttaccgcattttcggcaggcggctttgtcctacactcagg

SEQ ID NO: 450018 - DNA, 60 bp, Artificial
  Synthetic oligonucleotide
tacgaagattgatgtttacagagatgaggttccagctcagatcatcgaggtggaacgcag

SEQ ID NO: 450019 - DNA, 60 bp, Artificial
  Synthetic oligonucleotide
tacgaagcgtttttgtgacaggattagcgggaggaaaaatgatacgagtgctcatgtatc

SEQ ID NO: 450020 - DNA, 60 bp, Artificial
  Synthetic oligonucleotide
tacgaaggccatgttatctttaactgagccatctaggtatatgataatgaattcacttgc

SEQ ID NO: 450021 - DNA, 55 bp, Artificial
  Synthetic oligonucleotide
tacgaagttgacgaccaatcagaatgtggttggcttccacacgaccattagggag

SEQ ID NO: 450022 - DNA, 60 bp, Artificial
  Synthetic oligonucleotide
tacgaatcagaaagcaaatatccagcgctgaacgtgactatgccaaacaatggcaatttt

SEQ ID NO: 450023 - DNA, 59 bp, Artificial
  Synthetic oligonucleotide
tacgaatccgatatctctgtattggttcgcacccgtgggtgtagtatctagtatgttta

SEQ ID NO: 450024 - DNA, 60 bp, Artificial
  Synthetic oligonucleotide
tacgaatctagtgggtctctttggtgcaggataggacacgatcgatgctcggaggacgat

SEQ ID NO: 450025 - DNA, 60 bp, Artificial
  Synthetic oligonucleotide
tacgaatgttttacaagcaatgacaactaatcttggtctaactgatggcgccccaatcca

SEQ ID NO: 450026 - DNA, 56 bp, Artificial
  Synthetic oligonucleotide
tacgaattttggagtagccagtgtcctccctggggctattttcccttcgcaagaga

SEQ ID NO: 450027 - DNA, 55 bp, Artificial
  Synthetic oligonucleotide
tacgacaatattctctggtggcatacaaagtagcgtggtttcgactaagcagatc

SEQ ID NO: 450028 - DNA, 55 bp, Artificial
  Synthetic oligonucleotide
tacgacacgcgcggcggtgtgtacccctgggagggtaggtaccactacgctacgc

SEQ ID NO: 450029 - DNA, 60 bp, Artificial
  Synthetic oligonucleotide
tacgacactattgtagtcgataatgtttcagagctgttccgagcatgcttatctaatcta

SEQ ID NO: 450030 - DNA, 55 bp, Artificial
  Synthetic oligonucleotide
tacgacatcctattcacccattctacgcactcggaccacccgatggctgctgcta

SEQ ID NO: 450031 - DNA, 55 bp, Artificial
  Synthetic oligonucleotide
tacgaccctgcggagcatcatagacgatcatttgagaggtatgtttcacaatgat

SEQ ID NO: 450032 - DNA, 52 bp, Artificial
  Synthetic oligonucleotide
tacgaccgccaatcgaagactctcaccagtgcacgaggaggacacccttata

SEQ ID NO: 450033 - DNA, 60 bp, Artificial
  Synthetic oligonucleotide
tacgaccgcctaactggaaagctgcgcgcacttggagtacagcttactccaattgatatg

SEQ ID NO: 450034 - DNA, 51 bp, Artificial
  Synthetic oligonucleotide
tacgaccgttggttcttgttttttctcaacgcgcaatcttttcgttgtggg

SEQ ID NO: 450035 - DNA, 60 bp, Artificial
  Synthetic oligonucleotide
tacgacctgctatgcatggacgcgcgctctctaagaaacaggaacagtcggcttatcacg

SEQ ID NO: 450036 - DNA, 60 bp, Artificial
  Synthetic oligonucleotide
tacgacgacaacacagactacaatctcgcggtcatttacagcaagtatctggtcctcgac

SEQ ID NO: 450037 - DNA, 55 bp, Artificial
  Synthetic oligonucleotide
tacgacgagatgcctgaatgtttccgccagtggattgtcaccaaggccagccgtc

SEQ ID NO: 450038 - DNA, 55 bp, Artificial
  Synthetic oligonucleotide
tacgacgctctgttcacctacacccgagccgtccgaacacttcggacctccgacc

SEQ ID NO: 450039 - DNA, 60 bp, Artificial
  Synthetic oligonucleotide
tacgacggagacgccaatattggctgttcccgatgtcaatttgcgacacgcgcggcggtg

SEQ ID NO: 450040 - DNA, 55 bp, Artificial
  Synthetic oligonucleotide
tacgacggtacgccagccgctgtgcgatgtcaagcaattccccgaaattggtccg

SEQ ID NO: 450041 - DNA, 52 bp, Artificial
  Synthetic oligonucleotide
tacgacggtgtcgtgtgcaccaacggaatatggcatgcgcataagtgccgca

SEQ ID NO: 450042 - DNA, 59 bp, Artificial
  Synthetic oligonucleotide
tacgacgtagacaccgttggagagctgtttaacgcaatcgtgacggcagcggtcgagtc

SEQ ID NO: 450043 - DNA, 56 bp, Artificial
  Synthetic oligonucleotide
tacgacgtggactcgaggagcttggctcccgcgagttccgccgtcgtctccgtttg

SEQ ID NO: 450044 - DNA, 60 bp, Artificial
  Synthetic oligonucleotide
tacgacgtgttatatgagagggttgtctgaacacattcgaattcagactagttctggtat

SEQ ID NO: 450045 - DNA, 60 bp, Artificial
  Synthetic oligonucleotide
tacgactaacgccctcgataacaattgatttaggtctcaatggccgcgcagcggcactct

SEQ ID NO: 450046 - DNA, 51 bp, Artificial
  Synthetic oligonucleotide
tacgactacgcgtgtccggccagcgcaaagtacgaagcatatttgcgcgac

SEQ ID NO: 450047 - DNA, 54 bp, Artificial
  Synthetic oligonucleotide
tacgactatcgccctccaagactaaccctatgggtctaattgggagcgcagcgg

SEQ ID NO: 450048 - DNA, 56 bp, Artificial
  Synthetic oligonucleotide
tacgactcactataggatacgatgggtctgaccccgggggagtcacccgtggacag

SEQ ID NO: 450049 - DNA, 60 bp, Artificial
  Synthetic oligonucleotide
tacgactcattttgaagcagtaaatgttccaccaccgcgctcaactgttatcactgtaag

SEQ ID NO: 450050 - DNA, 59 bp, Artificial
  Synthetic oligonucleotide
tacgactccatgtggaaagatgattggagctaagatagtagaaaataaggaaagattta

SEQ ID NO: 450051 - DNA, 56 bp, Artificial
  Synthetic oligonucleotide
tacgactgatgtcgtaactatgcgtcctccgacttacctctccgctatcttgacgt

SEQ ID NO: 450052 - DNA, 58 bp, Artificial
  Synthetic oligonucleotide
tacgactgcgtcggaaccttagattcacgagccgcgtgattaattgggtttgtcactg

SEQ ID NO: 450053 - DNA, 53 bp, Artificial
  Synthetic oligonucleotide
tacgacttccgttggggctccgtcggtattaccggcctccctgactacaggaa

SEQ ID NO: 450054 - DNA, 55 bp, Artificial
  Synthetic oligonucleotide
tacgacttggagctcataacatcatgctcctctaacgtatcggtcgcccacgacg

SEQ ID NO: 450055 - DNA, 55 bp, Artificial
  Synthetic oligonucleotide
tacgactttgaaagggagggatactccctggtcgggatcgatcctttccgtctgc

SEQ ID NO: 450056 - DNA, 55 bp, Artificial
  Synthetic oligonucleotide
tacgagacgtcggcggtgcagaatgcgacttgcggcgtagctcgccgtcgctatg

SEQ ID NO: 450057 - DNA, 60 bp, Artificial
  Synthetic oligonucleotide
tacgagagggctgaccggtatagaggtaacatgtaatccagtctgagcagagctacgacc

SEQ ID NO: 450058 - DNA, 55 bp, Artificial
  Synthetic oligonucleotide
tacgagatagcgcggttgcaagcgaatatgggacaatttcgcgcagctctgaggc

SEQ ID NO: 450059 - DNA, 57 bp, Artificial
  Synthetic oligonucleotide
tacgagatatcgggtctttgtgtgctagcgagtttacatttcgttgcagcatccgca

SEQ ID NO: 450060 - DNA, 60 bp, Artificial
  Synthetic oligonucleotide
tacgagatctaatgtcacagtcccgcactcgcgagatactaacaaaaaccactgtggacc

SEQ ID NO: 450061 - DNA, 55 bp, Artificial
  Synthetic oligonucleotide
tacgagattacggatgcgggatcggctcatacggccttccctcgccgcgggcagc

SEQ ID NO: 450062 - DNA, 60 bp, Artificial
  Synthetic oligonucleotide
tacgagattcacacacgtggcggccatccgatataatattaccggatggccgcgcgctcc

SEQ ID NO: 450063 - DNA, 59 bp, Artificial
  Synthetic oligonucleotide
tacgagattgcccatggggacgcaccagaacattctaagcagactgacgcacagtggct

SEQ ID NO: 450064 - DNA, 60 bp, Artificial
  Synthetic oligonucleotide
tacgagcaaatcatggagagcatcacagtagggtgcacagcaaagtgcgcgggcctgagc

SEQ ID NO: 450065 - DNA, 52 bp, Artificial
  Synthetic oligonucleotide
tacgagcaccaggagtacgtaggagcatccgcagtaacaatcccacaatcca

SEQ ID NO: 450066 - DNA, 60 bp, Artificial
  Synthetic oligonucleotide
tacgagcagcgtcacgacatctcacatgtcgggaaggtcatgtgcatatctgatgtcaca

SEQ ID NO: 450067 - DNA, 60 bp, Artificial
  Synthetic oligonucleotide
tacgagccagatgttgacttaggaagcggaacccgcaacattggaattgaaagtgagata

SEQ ID NO: 450068 - DNA, 50 bp, Artificial
  Synthetic oligonucleotide
tacgagccgataagcttcgactctctgctctgaagaagtcttgataatcg

SEQ ID NO: 450069 - DNA, 58 bp, Artificial
  Synthetic oligonucleotide
tacgagctcacgcccgccgagactacagttagactacgagcgtacatgaacaccccgg

SEQ ID NO: 450070 - DNA, 50 bp, Artificial
  Synthetic oligonucleotide
tacgaggaacccaagaaaccgcgtatgccgctacgagactcgggccgaca

SEQ ID NO: 450071 - DNA, 54 bp, Artificial
  Synthetic oligonucleotide
tacgaggaacgcgggtccggtatgtgtgtccatccacacctcgttgagcatcag

SEQ ID NO: 450072 - DNA, 57 bp, Artificial
  Synthetic oligonucleotide
tacgaggacaagtggtacccccagtcagaactctgtgacgtgcccctgctaaccgtc

SEQ ID NO: 450073 - DNA, 55 bp, Artificial
  Synthetic oligonucleotide
tacgaggacgagctggctgagtggaaccactaccgggacgaggggcgcttcattc

SEQ ID NO: 450074 - DNA, 55 bp, Artificial
  Synthetic oligonucleotide
tacgaggaggcactggaggctctgtacgaagccgtgcagaagcaaacgctaactc

SEQ ID NO: 450075 - DNA, 56 bp, Artificial
  Synthetic oligonucleotide
tacgaggagttcattcaaaagattagaagcgtcccaattgggcgctgtttgacttt

SEQ ID NO: 450076 - DNA, 57 bp, Artificial
  Synthetic oligonucleotide
tacgaggccatgaacgtcctgagggcgtttaccagcctagccagaccgtccgggctg

SEQ ID NO: 450077 - DNA, 60 bp, Artificial
  Synthetic oligonucleotide
tacgaggctcgcgtgtactttcgcaaggagtggcggaaatgatcttcgacatgggcaggt

SEQ ID NO: 450078 - DNA, 57 bp, Artificial
  Synthetic oligonucleotide
tacgagggaatgcccaacgtatcgtatatgatgatgaattacaaatgcacattctac

SEQ ID NO: 450079 - DNA, 60 bp, Artificial
  Synthetic oligonucleotide
tacgaggtaacatctcgtacatccacccgcgctcgtgaggcacatattcagatgaaggca

SEQ ID NO: 450080 - DNA, 57 bp, Artificial
  Synthetic oligonucleotide
tacgaggtacatacagtcgttatcgggttgacgcacgtacacaactcggtaaacaca

SEQ ID NO: 450081 - DNA, 57 bp, Artificial
  Synthetic oligonucleotide
tacgaggtgatgaaggataaaccgtactacttagtaacttgggctaactcatctata

SEQ ID NO: 450082 - DNA, 54 bp, Artificial
  Synthetic oligonucleotide
tacgagtacaccctttgagtagtttagcaggtaggaagggttacagtacggaca

SEQ ID NO: 450083 - DNA, 53 bp, Artificial
  Synthetic oligonucleotide
tacgagtctacgttcgaataataatcgtaagtacgaaaagtaagtatggttaa

SEQ ID NO: 450084 - DNA, 55 bp, Artificial
  Synthetic oligonucleotide
tacgagtggaactgggttgagctttttcatacgtgttagaggtgtaggtttaaga

SEQ ID NO: 450085 - DNA, 60 bp, Artificial
  Synthetic oligonucleotide
tacgagtggcacaccgtgaacacacaagccacgggtatcttgcgagagtagtgagcagtg

SEQ ID NO: 450086 - DNA, 57 bp, Artificial
  Synthetic oligonucleotide
tacgagtttcgtgactttcatgttgccgcctttaagggtgatgactcggtggtcctc

SEQ ID NO: 450087 - DNA, 53 bp, Artificial
  Synthetic oligonucleotide
tacgataacaaagggtggatccagtgtagttaggactgctgccgatttagcga

SEQ ID NO: 450088 - DNA, 59 bp, Artificial
  Synthetic oligonucleotide
tacgatagaacatttgttcctcgtattcctgattggattggacattatcctggtggtaa

SEQ ID NO: 450089 - DNA, 55 bp, Artificial
  Synthetic oligonucleotide
tacgataggggttacatatgctcggtagaacggggagatgacgatttattgtgta

SEQ ID NO: 450090 - DNA, 55 bp, Artificial
  Synthetic oligonucleotide
tacgatatgaattggtatctacacaacgatcgtcgatacattcgggtggaccaat

SEQ ID NO: 450091 - DNA, 53 bp, Artificial
  Synthetic oligonucleotide
tacgatatgactctttcagacatggcgaagtctattctttctcataaggcgaa

SEQ ID NO: 450092 - DNA, 53 bp, Artificial
  Synthetic oligonucleotide
tacgatatggagcctacacacttttcatgtatggttccctcgaaaacggttac

SEQ ID NO: 450093 - DNA, 54 bp, Artificial
  Synthetic oligonucleotide
tacgatatgggagtaagacataaccgtacgctatacctcgatcccaacgctaga

SEQ ID NO: 450094 - DNA, 55 bp, Artificial
  Synthetic oligonucleotide
tacgatatttgccactcatagacccgcggtccttagaggtacaagcgcgcacgat

SEQ ID NO: 450095 - DNA, 58 bp, Artificial
  Synthetic oligonucleotide
tacgatcaagagccactcaacggaggatggaaagccaacgttcagcgaaagctcaagg

SEQ ID NO: 450096 - DNA, 60 bp, Artificial
  Synthetic oligonucleotide
tacgatcaaggaaatctcttccacactgagaagtctgcaagactttcacatgagtctaga

SEQ ID NO: 450097 - DNA, 60 bp, Artificial
  Synthetic oligonucleotide
tacgatcaattctctgtactaattgatcgattatgtctatagagctttgtatgtgcctta

SEQ ID NO: 450098 - DNA, 53 bp, Artificial
  Synthetic oligonucleotide
tacgatcaccgcgtgggttatttttcgtactttgacaatccgtttgctaaacc

SEQ ID NO: 450099 - DNA, 54 bp, Artificial
  Synthetic oligonucleotide
tacgatcccgggtcctccgactacgcctggcggacctttgtgttcgtctccttc

SEQ ID NO: 450100 - DNA, 50 bp, Artificial
  Synthetic oligonucleotide
tacgatcgatcattagagctactaagtgtgtatgcgaattcgcaattaac

SEQ ID NO: 450101 - DNA, 50 bp, Artificial
  Synthetic oligonucleotide
tacgatctctaagccgattcggcaaaaaggtgggtaacgcactgacgtca

SEQ ID NO: 450102 - DNA, 60 bp, Artificial
  Synthetic oligonucleotide
tacgatctgatccgcgagtattacgcgagtttatcaatcaagagaatccaataatacgta

SEQ ID NO: 450103 - DNA, 57 bp, Artificial
  Synthetic oligonucleotide
tacgatgatagaaagtcggttaagaacgcacgcggcgtggattttatgacggatgct

SEQ ID NO: 450104 - DNA, 60 bp, Artificial
  Synthetic oligonucleotide
tacgatgctgctagaaaggtccttgcagatcgtaagagagtcgtctcggtagtacctgac

SEQ ID NO: 450105 - DNA, 55 bp, Artificial
  Synthetic oligonucleotide
tacgatgctggcacagatacgtttactgtcatgcatcatgcacctaagtatacaa

SEQ ID NO: 450106 - DNA, 54 bp, Artificial
  Synthetic oligonucleotide
tacgatgggccgccgcggtgtttcaagcgagtgccactttccgggtaaacggga

SEQ ID NO: 450107 - DNA, 57 bp, Artificial
  Synthetic oligonucleotide
tacgatgtcaagtacgtattcgagtagttggctccgacacccccaccttccataaga

SEQ ID NO: 450108 - DNA, 55 bp, Artificial
  Synthetic oligonucleotide
tacgattaataacgtaactgatctcgctattgccgcaatccagtggtctgaccgt

SEQ ID NO: 450109 - DNA, 59 bp, Artificial
  Synthetic oligonucleotide
tacgattacgttgataacgtcgtttatttgcatgattattcgtattatactaacaatga

SEQ ID NO: 450110 - DNA, 56 bp, Artificial
  Synthetic oligonucleotide
tacgattcatccctcatgtattacacaaatgttggtacccaacagattgtagcacg

SEQ ID NO: 450111 - DNA, 60 bp, Artificial
  Synthetic oligonucleotide
tacgattcgccaaggatggcagcaagtgctcagacgcttttccatcccagcaaccggaga

SEQ ID NO: 450112 - DNA, 60 bp, Artificial
  Synthetic oligonucleotide
tacgattggaaccaccgcggcagatgatatgtattactctgttacttccgaagtctttga

SEQ ID NO: 450113 - DNA, 60 bp, Artificial
  Synthetic oligonucleotide
tacgattgtcatgcatggaggattgggatattggtgagagaatgctcgagaacttgtaca

SEQ ID NO: 450114 - DNA, 57 bp, Artificial
  Synthetic oligonucleotide
tacgattgtcctatggaacaactaggcggaattagcaggtgttttgcgttggttatc

SEQ ID NO: 450115 - DNA, 51 bp, Artificial
  Synthetic oligonucleotide
tacgatttaagcacacccgcccgcaccgaacgactgtttattattgcgccg

SEQ ID NO: 450116 - DNA, 59 bp, Artificial
  Synthetic oligonucleotide
tacgatttagcaagatacatggggacacacctctacttcccccccctagcagacatctg

SEQ ID NO: 450117 - DNA, 60 bp, Artificial
  Synthetic oligonucleotide
tacgatttagcactactaaacagtcacagaaatcgtgtgtagctacagaaatacactggt

SEQ ID NO: 450118 - DNA, 55 bp, Artificial
  Synthetic oligonucleotide
tacgatttatggaagaatgggacattggacaagagatgctcaagaatttgtacac

SEQ ID NO: 450119 - DNA, 57 bp, Artificial
  Synthetic oligonucleotide
tacgatttccaagtgccgcacatggtggtccccagtgactagatatgcaatatctag

SEQ ID NO: 450120 - DNA, 56 bp, Artificial
  Synthetic oligonucleotide
tacgcaaagcgcaaacttggactcacacctccgttaacaacacttagaaatctagg

SEQ ID NO: 450121 - DNA, 60 bp, Artificial
  Synthetic oligonucleotide
tacgcaactcgtgtcagtgatgcaatagtggcagtgatttcaggatcaatcaagaaaggc

SEQ ID NO: 450122 - DNA, 57 bp, Artificial
  Synthetic oligonucleotide
tacgcaactgtaaaaaattaggaccaagagagaacgtagcagtcatacaggtaggcg

SEQ ID NO: 450123 - DNA, 60 bp, Artificial
  Synthetic oligonucleotide
tacgcaagtatataccagagagggaagatgattatcctgattgtaatttagcacttgtag

SEQ ID NO: 450124 - DNA, 54 bp, Artificial
  Synthetic oligonucleotide
tacgcacaaggccattgtgtttgtaaccaagtccgtattgttaggagggaaaag

SEQ ID NO: 450125 - DNA, 51 bp, Artificial
  Synthetic oligonucleotide
tacgcacacatatcatatacgtaggccttgtcttgcgtggcaagtaaacga

SEQ ID NO: 450126 - DNA, 60 bp, Artificial
  Synthetic oligonucleotide
tacgcaccacatccggatggtgagcctagctcactttgattattgagtaaagtaatgaaa

SEQ ID NO: 450127 - DNA, 57 bp, Artificial
  Synthetic oligonucleotide
tacgcacctgatacggtgggatacgatcttctccgagatttaatttcagtcatccga

SEQ ID NO: 450128 - DNA, 60 bp, Artificial
  Synthetic oligonucleotide
tacgcacgctcaactaactacactacaccagtcggacagttggtagttaatgcgccagcg

SEQ ID NO: 450129 - DNA, 55 bp, Artificial
  Synthetic oligonucleotide
tacgcacgctcaactaattataccacaccagttggacagttagtggttaaaaccc

SEQ ID NO: 450130 - DNA, 55 bp, Artificial
  Synthetic oligonucleotide
tacgcacgggataagttcgttagttttcaaggtgtatgtgggttcaatccgatgt

SEQ ID NO: 450131 - DNA, 57 bp, Artificial
  Synthetic oligonucleotide
tacgcagaacgctgttcactctctggcaggtggattgcgcgcattagaattggaata

SEQ ID NO: 450132 - DNA, 57 bp, Artificial
  Synthetic oligonucleotide
tacgcagaatgtccaaacgtcaagttacccgcctggtgtggtcttgtacaactccgc

SEQ ID NO: 450133 - DNA, 60 bp, Artificial
  Synthetic oligonucleotide
tacgcagacagaacaagcgaacgagtagtctgcgtattgggacgcaagtttcgatcatcc

SEQ ID NO: 450134 - DNA, 55 bp, Artificial
  Synthetic oligonucleotide
tacgcagagatgaaatggcttttgtcaaatacagacaatgctgctttcccacaga

SEQ ID NO: 450135 - DNA, 53 bp, Artificial
  Synthetic oligonucleotide
tacgcagagttttaagcaccgaatcgcttgccctactgcacaaatgtgcagag

SEQ ID NO: 450136 - DNA, 55 bp, Artificial
  Synthetic oligonucleotide
tacgcagatgcgtgaattaccaactctggactcagccgtgtacaatgtagaatgc

SEQ ID NO: 450137 - DNA, 57 bp, Artificial
  Synthetic oligonucleotide
tacgcagcagcccagccttagctacgccggagcttagctcgcccacgttctaatatt

SEQ ID NO: 450138 - DNA, 52 bp, Artificial
  Synthetic oligonucleotide
tacgcagcagccttagctacgccggagcttagctcgccaccgttataatatt

SEQ ID NO: 450139 - DNA, 50 bp, Artificial
  Synthetic oligonucleotide
tacgcagcctacatcgaccgagaaacttaagttaatcaagtggctcaaaa

SEQ ID NO: 450140 - DNA, 55 bp, Artificial
  Synthetic oligonucleotide
tacgcagctcgacctattccctctgataacacgtctgaactgttgcgaattcccc

SEQ ID NO: 450141 - DNA, 56 bp, Artificial
  Synthetic oligonucleotide
tacgcagtaggacagcccaagtgggtacgtttgactagaggaacgcgaataggcaa

SEQ ID NO: 450142 - DNA, 57 bp, Artificial
  Synthetic oligonucleotide
tacgcagtgtaatctaaatttaatttcgcatggtacaccgaaggaatccaataataa

SEQ ID NO: 450143 - DNA, 53 bp, Artificial
  Synthetic oligonucleotide
tacgcagttgttgatgacgcacttaattgacgcattttatcacatgacaatcg

SEQ ID NO: 450144 - DNA, 59 bp, Artificial
  Synthetic oligonucleotide
tacgcatacatgaggaatggttgggacgtcgaagtcaccgcagtggggaaccagttcaa

SEQ ID NO: 450145 - DNA, 60 bp, Artificial
  Synthetic oligonucleotide
tacgcatacgccagccgacagaatgtaatacacgcatacgacgtgatcacacagcccgac

SEQ ID NO: 450146 - DNA, 57 bp, Artificial
  Synthetic oligonucleotide
tacgcatctgtgcaagactcgggtgtccggtttcgcgaaggaattacccggcgtcta

SEQ ID NO: 450147 - DNA, 55 bp, Artificial
  Synthetic oligonucleotide
tacgcattcgctacatagagtaatcattcagatgatgtagtgagaggatgtgacc

SEQ ID NO: 450148 - DNA, 60 bp, Artificial
  Synthetic oligonucleotide
tacgccaaaaacattgaatgctgctggacagtcggaatgacgaagttctatggaggttgg

SEQ ID NO: 450149 - DNA, 60 bp, Artificial
  Synthetic oligonucleotide
tacgccaaccctgtcgctggtatagtgctgctggaggctcgagtcccggctaccgagata

SEQ ID NO: 450150 - DNA, 57 bp, Artificial
  Synthetic oligonucleotide
tacgccaactataaggcggtctccattactcatcaacacaataactctgggtttacc

SEQ ID NO: 450151 - DNA, 57 bp, Artificial
  Synthetic oligonucleotide
tacgccaggaagctaatgcagagtgggaaccccgcgttacggcattaaatcaagaac

SEQ ID NO: 450152 - DNA, 59 bp, Artificial
  Synthetic oligonucleotide
tacgccatatgtagatgtgaggccgctcttcatgtgtgggttcccccccaacttgcgcg

SEQ ID NO: 450153 - DNA, 58 bp, Artificial
  Synthetic oligonucleotide
tacgccatatgtaggtgtgagtctgctctccaagtatgggtcccccccctacttgccc

SEQ ID NO: 450154 - DNA, 60 bp, Artificial
  Synthetic oligonucleotide
tacgccatctgggatgagacggccggtctatggtctacggacgagtacgatgttcagaga

SEQ ID NO: 450155 - DNA, 50 bp, Artificial
  Synthetic oligonucleotide
tacgccatgagccccatcaagcccagctgctacgtggtgtgcacgcgtgt

SEQ ID NO: 450156 - DNA, 60 bp, Artificial
  Synthetic oligonucleotide
tacgccattctctgtctgatgcgcagtgatgagttcccctgtgcgtgaatccattgtctc

SEQ ID NO: 450157 - DNA, 55 bp, Artificial
  Synthetic oligonucleotide
tacgcccaaaggtttcatcaaggatccaaagaagcttcacgcgagtctggtgctt

SEQ ID NO: 450158 - DNA, 60 bp, Artificial
  Synthetic oligonucleotide
tacgcccagcgcatctcacccagcatatgtaaatttcgcatcctcgaacagacttaccga

SEQ ID NO: 450159 - DNA, 57 bp, Artificial
  Synthetic oligonucleotide
tacgcccatcggaggcatggtcgtgttcggtcaagtctcttttccagaaactccgac

SEQ ID NO: 450160 - DNA, 54 bp, Artificial
  Synthetic oligonucleotide
tacgcccctaggggtttgtggaggggaccctcaaccagagccaattacacgcta

SEQ ID NO: 450161 - DNA, 53 bp, Artificial
  Synthetic oligonucleotide
tacgcccgccgagacctcagttaggctacgggcttacctaaacacaccagggt

SEQ ID NO: 450162 - DNA, 57 bp, Artificial
  Synthetic oligonucleotide
tacgcccgccgagactacagttaggctacgagcgtacatgaacaccccagggcttcc

SEQ ID NO: 450163 - DNA, 59 bp, Artificial
  Synthetic oligonucleotide
tacgcccgtcgggaattctgggctgcttccgggggcgcgcctggcgctaagatgtcatg

SEQ ID NO: 450164 - DNA, 51 bp, Artificial
  Synthetic oligonucleotide
tacgccgaagagttgacataaacccaggccatgcagacctaagtgccaagg

SEQ ID NO: 450165 - DNA, 55 bp, Artificial
  Synthetic oligonucleotide
tacgccgagagcctagccgagtggttcatctcggacaccagggaggagtggacct

SEQ ID NO: 450166 - DNA, 60 bp, Artificial
  Synthetic oligonucleotide
tacgccgatatgactggagacataaggagttctcaaggaatcgaaatacaggcgatggtc

SEQ ID NO: 450167 - DNA, 55 bp, Artificial
  Synthetic oligonucleotide
tacgccgcaaaagtagcgtcgatcgcaagcaccgccgtggctcgctacggtagtg

SEQ ID NO: 450168 - DNA, 52 bp, Artificial
  Synthetic oligonucleotide
tacgccgcagaaaataaaagggttactaacattcagaagaacctcaagcaac

SEQ ID NO: 450169 - DNA, 59 bp, Artificial
  Synthetic oligonucleotide
tacgccgccggctgaatttcgacagtcccgggatcagccgtgccgctgcccccactgtc

SEQ ID NO: 450170 - DNA, 60 bp, Artificial
  Synthetic oligonucleotide
tacgccggcgtttgaacttcggcagcccatacaccagccgtgctgctgctcccattttcc

SEQ ID NO: 450171 - DNA, 58 bp, Artificial
  Synthetic oligonucleotide
tacgccgtaggactatccgaggctagtgtacaggagcttcgattcaattggccctgtt

SEQ ID NO: 450172 - DNA, 53 bp, Artificial
  Synthetic oligonucleotide
tacgcctaacccccccgttcataagccactctcgccaccaacgcctaagcccc

SEQ ID NO: 450173 - DNA, 55 bp, Artificial
  Synthetic oligonucleotide
tacgcctatatacggccctgaatcgcgccatgcctttcacttttacgctcggtta

SEQ ID NO: 450174 - DNA, 57 bp, Artificial
  Synthetic oligonucleotide
tacgcctccgggatcggttaccgtgccacacccaaatattgaggaggtggctctgtc

SEQ ID NO: 450175 - DNA, 57 bp, Artificial
  Synthetic oligonucleotide
tacgcctcgtacatccgagttcctgttaactctacggtgtacttggacccctgcatg

SEQ ID NO: 450176 - DNA, 58 bp, Artificial
  Synthetic oligonucleotide
tacgcctctatgtatccaagcgttgggtctggggtagtcatagacggcaaactagtgt

SEQ ID NO: 450177 - DNA, 60 bp, Artificial
  Synthetic oligonucleotide
tacgcctctcagccaaaactacgctcttactccacttgcatcggaccttgcggacctagc

SEQ ID NO: 450178 - DNA, 50 bp, Artificial
  Synthetic oligonucleotide
tacgcctgcccatggtgcaatttgtgtggggtcttgcgctgtataccgca

SEQ ID NO: 450179 - DNA, 51 bp, Artificial
  Synthetic oligonucleotide
tacgcctgtgttgcatttaaaaggtgatgcaaactgtttaaaatgccttag

SEQ ID NO: 450180 - DNA, 60 bp, Artificial
  Synthetic oligonucleotide
tacgcctgttgcagaactgtgcatggatgagaggcactctgaaattttacattgttgctc

SEQ ID NO: 450181 - DNA, 55 bp, Artificial
  Synthetic oligonucleotide
tacgccttcacaaacacaacgaccaggtctcaggctatcctgcgcgtgctattag

SEQ ID NO: 450182 - DNA, 55 bp, Artificial
  Synthetic oligonucleotide
tacgcgaagtcaattgcaggtgctccacaatcttggaagcccacgcaacacaagc

SEQ ID NO: 450183 - DNA, 53 bp, Artificial
  Synthetic oligonucleotide
tacgcgacacgagaagcagtgcttgatgaatcgattaaagagtgttcgcttgc

SEQ ID NO: 450184 - DNA, 60 bp, Artificial
  Synthetic oligonucleotide
tacgcgacggataccgcaattgcattcaggaaccgctctcctctaacggctcagcctcct

SEQ ID NO: 450185 - DNA, 54 bp, Artificial
  Synthetic oligonucleotide
tacgcgaggagaataaaacccttcgttaacggtgactggacaccaggtatgacc

SEQ ID NO: 450186 - DNA, 60 bp, Artificial
  Synthetic oligonucleotide
tacgcgatcttattggagttgttcgagctaagaactatgtcgaagcgtcctgcagatata

SEQ ID NO: 450187 - DNA, 55 bp, Artificial
  Synthetic oligonucleotide
tacgcgcacagattaactagtgattaagtgtttggtcacaccagaggtaactttt

SEQ ID NO: 450188 - DNA, 55 bp, Artificial
  Synthetic oligonucleotide
tacgcgcacgaacttaaggttattccattagaggtgggttcctacaatgaccgat

SEQ ID NO: 450189 - DNA, 60 bp, Artificial
  Synthetic oligonucleotide
tacgcgcagatgatttgacttatggagatagtggcttattgtttgatgaacgatcgtcaa

SEQ ID NO: 450190 - DNA, 57 bp, Artificial
  Synthetic oligonucleotide
tacgcgcagcagacccgaggcttgctaagcaccatcgtgacaagcctcaccggcagg

SEQ ID NO: 450191 - DNA, 60 bp, Artificial
  Synthetic oligonucleotide
tacgcgcaggtattagaccagttcgacctaaacatgtattttcgacttgcatatgcagta

SEQ ID NO: 450192 - DNA, 55 bp, Artificial
  Synthetic oligonucleotide
tacgcgcctattgcgtcgacgctaacggagccaccgtttgtttgcgtatggggca

SEQ ID NO: 450193 - DNA, 55 bp, Artificial
  Synthetic oligonucleotide
tacgcgcctattgtctggaatagcatgctcgttcgcaatcaaccaccctcagact

SEQ ID NO: 450194 - DNA, 59 bp, Artificial
  Synthetic oligonucleotide
tacgcgcgcgccaatctccacgacgctgactaacacccctgcacgtggggcctttaatc

SEQ ID NO: 450195 - DNA, 55 bp, Artificial
  Synthetic oligonucleotide
tacgcgctccgattgtatatatcccccaacaccaagacccatgttatcatttctt

SEQ ID NO: 450196 - DNA, 57 bp, Artificial
  Synthetic oligonucleotide
tacgcggacacaagagtccgagcgaattgaggcgtcgaaaactgagggagactttgt

SEQ ID NO: 450197 - DNA, 54 bp, Artificial
  Synthetic oligonucleotide
tacgcggagcttcccgcgcgtatctaaggaccgtcattgtccgacatgcttgag

SEQ ID NO: 450198 - DNA, 55 bp, Artificial
  Synthetic oligonucleotide
tacgcggatgggtcccacgtccacccagactatgcccatacatcagaaaggccaa

SEQ ID NO: 450199 - DNA, 60 bp, Artificial
  Synthetic oligonucleotide
tacgcggctttccatttccacgaaaatatgctcctagactgtgactctgtcacactggag

SEQ ID NO: 450200 - DNA, 55 bp, Artificial
  Synthetic oligonucleotide
tacgcggctttcgacaccttcgactccatcctcaatcccgcggcgctgcaaccca

SEQ ID NO: 450201 - DNA, 59 bp, Artificial
  Synthetic oligonucleotide
tacgcgggaaaggatcctttatattacacgacatcccaactagagatcatcgcgggatg

SEQ ID NO: 450202 - DNA, 59 bp, Artificial
  Synthetic oligonucleotide
tacgcggggcagcagtctgggcgcaggagtacacttgagtcaaacaccttttactccag

SEQ ID NO: 450203 - DNA, 55 bp, Artificial
  Synthetic oligonucleotide
tacgcgggtcacgacggagctcgatgatatacgtgcgaacgcgacagtcatctcc

SEQ ID NO: 450204 - DNA, 51 bp, Artificial
  Synthetic oligonucleotide
tacgcggtatgaatgagaccgccgtcgcagcccatgtctacagagtcgcag

SEQ ID NO: 450205 - DNA, 57 bp, Artificial
  Synthetic oligonucleotide
tacgcggttacaaacaatagcgagggcttcttgctatgcaaagttaccgacacagta

SEQ ID NO: 450206 - DNA, 60 bp, Artificial
  Synthetic oligonucleotide
tacgcgtaaggaaatatgtgaaacacaggagggattggagtatctgctgcacaacaatcg

SEQ ID NO: 450207 - DNA, 60 bp, Artificial
  Synthetic oligonucleotide
tacgcgtaaggaaatctgtgaaacacacgaaggatcagagtatgttctccacaacaatcg

SEQ ID NO: 450208 - DNA, 60 bp, Artificial
  Synthetic oligonucleotide
tacgcgtacgccaacgacttcacacaatttgaccaatcgcaggatggcgcaatgctgcaa

SEQ ID NO: 450209 - DNA, 60 bp, Artificial
  Synthetic oligonucleotide
tacgcgtcacgcctacataacgtgctgggtacagcaaatgccccactgagcatttacgag

SEQ ID NO: 450210 - DNA, 60 bp, Artificial
  Synthetic oligonucleotide
tacgcgtcacgcctgcacagtgtgttgggtacggcaaatgctccattgagcgtctacgag

SEQ ID NO: 450211 - DNA, 60 bp, Artificial
  Synthetic oligonucleotide
tacgcgtcacgtctgcacagtgtgctgggtacggcaaatgccccactgagcatttacgag

SEQ ID NO: 450212 - DNA, 60 bp, Artificial
  Synthetic oligonucleotide
tacgcgtccaccacatccttagaagacaaagagtgactcatgtcctgttatgtatgccca

SEQ ID NO: 450213 - DNA, 60 bp, Artificial
  Synthetic oligonucleotide
tacgcgtcgcgcttgcatagtgtgctgggtacagcaaatgccccactgagcatctatgag

SEQ ID NO: 450214 - DNA, 55 bp, Artificial
  Synthetic oligonucleotide
tacgcgtgaaattccagtctgaagaggtttactatcagaagtttggtgaagtgga

SEQ ID NO: 450215 - DNA, 55 bp, Artificial
  Synthetic oligonucleotide
tacgcgtgtttcccgttattcgagtagcgcgcgccacaagctacgtcgtgggccc

SEQ ID NO: 450216 - DNA, 60 bp, Artificial
  Synthetic oligonucleotide
tacgctaagcttcgctctctgcatcgacagatctacactcataaaggaaggttcactgac

SEQ ID NO: 450217 - DNA, 55 bp, Artificial
  Synthetic oligonucleotide
tacgctaattagatgcaacttcacatatgattatattgacgacattgtttacctt

SEQ ID NO: 450218 - DNA, 53 bp, Artificial
  Synthetic oligonucleotide
tacgctatcgaggcgagcttcgggtaccgtttaagtgagtacctatatgatgt

SEQ ID NO: 450219 - DNA, 58 bp, Artificial
  Synthetic oligonucleotide
tacgctcaaacggtcgaggcggctaatgacctagaggggttcggcatagccaccaatc

SEQ ID NO: 450220 - DNA, 60 bp, Artificial
  Synthetic oligonucleotide
tacgctcagagcaaatcgtaaataagtatcattattcgcggaggcatatctcaggggtcg

SEQ ID NO: 450221 - DNA, 52 bp, Artificial
  Synthetic oligonucleotide
tacgctcagcttaaggcagagggtaccttagacgcctacccacaagctaagc

SEQ ID NO: 450222 - DNA, 60 bp, Artificial
  Synthetic oligonucleotide
tacgctcagtctgagatacctggggctgcgttatcgaccgagattagggattacattaga

SEQ ID NO: 450223 - DNA, 59 bp, Artificial
  Synthetic oligonucleotide
tacgctcccgtaattatgtcgaagcgagctgccgatatcgtcatttctacccccgcgtc

SEQ ID NO: 450224 - DNA, 59 bp, Artificial
  Synthetic oligonucleotide
tacgctccggcgtgcaagcctctcctacgggacgaggtctcattccaggtcgggctcca

SEQ ID NO: 450225 - DNA, 58 bp, Artificial
  Synthetic oligonucleotide
tacgctccggcgtgcaagcctctcctacgggaggaggccacgttccttgtcgggctca

SEQ ID NO: 450226 - DNA, 60 bp, Artificial
  Synthetic oligonucleotide
tacgctcgttggcagctgatttaaattcagtaatgtgtacaggaggtgactatagttttg

SEQ ID NO: 450227 - DNA, 60 bp, Artificial
  Synthetic oligonucleotide
tacgctctgcacactttgaccttcgccagaccatccagcgccgctgcactcgcgtttgtg

SEQ ID NO: 450228 - DNA, 60 bp, Artificial
  Synthetic oligonucleotide
tacgctgaagtcggtagtgcaagagatacgtctgaatcattagcttatagtcctcaaaga

SEQ ID NO: 450229 - DNA, 57 bp, Artificial
  Synthetic oligonucleotide
tacgctgatgcgatcgcgtatcgatatacgtcattggaagatgaatcaaagggttgc

SEQ ID NO: 450230 - DNA, 60 bp, Artificial
  Synthetic oligonucleotide
tacgctgcaccttgggattcagacgacgtgttcatattacattgcgttgcaccacatcat

SEQ ID NO: 450231 - DNA, 52 bp, Artificial
  Synthetic oligonucleotide
tacgctgcaggcagaggcgttccgtctgtgttgtctcatgtcgggcatgtat

SEQ ID NO: 450232 - DNA, 60 bp, Artificial
  Synthetic oligonucleotide
tacgctgcatgcgtttactggcaaagctgtctccgacgtgcactgcgatgtgcacacaaa

SEQ ID NO: 450233 - DNA, 59 bp, Artificial
  Synthetic oligonucleotide
tacgctgctcaataggctctacgtcggtaaggctggttctacctccgcaatcgcgatga

SEQ ID NO: 450234 - DNA, 50 bp, Artificial
  Synthetic oligonucleotide
tacgctgctcgtgttcctgagctagtccttgaagttgtcttcggtggcca

SEQ ID NO: 450235 - DNA, 60 bp, Artificial
  Synthetic oligonucleotide
tacgctgggccactcgagcgtcagaaacctcttaaagtgaaagccgagctgccacaacag

SEQ ID NO: 450236 - DNA, 52 bp, Artificial
  Synthetic oligonucleotide
tacgctgtggaaggctggtattttatataagagagaaactactcgcagcgcc

SEQ ID NO: 450237 - DNA, 53 bp, Artificial
  Synthetic oligonucleotide
tacgcttagttttagcaacaaacagacggttagaatagaaagtaaaaaactca

SEQ ID NO: 450238 - DNA, 54 bp, Artificial
  Synthetic oligonucleotide
tacgcttataccaaggcaagatgggagtgtggaacggctctttgaaagcggagt

SEQ ID NO: 450239 - DNA, 60 bp, Artificial
  Synthetic oligonucleotide
tacgcttcctgtatgactgaggcgcaacgtaaccgcgtgccgatactgacgcaacaaggc

SEQ ID NO: 450240 - DNA, 60 bp, Artificial
  Synthetic oligonucleotide
tacgcttctatagcccagaataaagtgtggtaactgcaagtgtgtctgccctcatcattg

SEQ ID NO: 450241 - DNA, 57 bp, Artificial
  Synthetic oligonucleotide
tacgcttttaaagtcgcaatcgagtttcatggatcagaggcggaaacattaaacgaa

SEQ ID NO: 450242 - DNA, 54 bp, Artificial
  Synthetic oligonucleotide
tacgcttttagcgtttccgcagtcaacggtttcgcagattgccgttttgtggcc

SEQ ID NO: 450243 - DNA, 57 bp, Artificial
  Synthetic oligonucleotide
tacgcttttgcctatggacccaccttatctttagtcgttcaatgacatgcgctcctc

SEQ ID NO: 450244 - DNA, 60 bp, Artificial
  Synthetic oligonucleotide
tacgcttttggaggatctgatgtctcacttacacttcattaaaacacaatggtgaatctt

SEQ ID NO: 450245 - DNA, 56 bp, Artificial
  Synthetic oligonucleotide
tacggaacatttagtactactgaagactacgaagttacagtgacgtttgacgattc

SEQ ID NO: 450246 - DNA, 59 bp, Artificial
  Synthetic oligonucleotide
tacggaacccttacaggattctggagtcactacaccctcgtgtatggagatgatacgag

SEQ ID NO: 450247 - DNA, 57 bp, Artificial
  Synthetic oligonucleotide
tacggaacgttgaattcgagatataatcgaagtggaatgagacctccagaattattt

SEQ ID NO: 450248 - DNA, 50 bp, Artificial
  Synthetic oligonucleotide
tacggaaggtcttgttaacgacttacaagagtatctatcagagcactatt

SEQ ID NO: 450249 - DNA, 60 bp, Artificial
  Synthetic oligonucleotide
tacggaataagcagacaacaggcactaaatcttctaagatctgatccgagagtattacgt

SEQ ID NO: 450250 - DNA, 60 bp, Artificial
  Synthetic oligonucleotide
tacggaatacaagtacgcattagtggaatctgacacgatggatctcgaaaaacagaacgc

SEQ ID NO: 450251 - DNA, 59 bp, Artificial
  Synthetic oligonucleotide
tacggaataggatagagaatctaattatgcaatgtcgtttgtaagtaactgacgcaggt

SEQ ID NO: 450252 - DNA, 53 bp, Artificial
  Synthetic oligonucleotide
tacggaatcgggggcaagttccggggacgcgtactcgttatacgtcgagcgaa

SEQ ID NO: 450253 - DNA, 53 bp, Artificial
  Synthetic oligonucleotide
tacggaatgatggagtggattgcaggagatgcagagcatagatatcaagacat

SEQ ID NO: 450254 - DNA, 51 bp, Artificial
  Synthetic oligonucleotide
tacggacaaactcccatgggcgaaggtgctgatgcctgcttcaaacgcctc

SEQ ID NO: 450255 - DNA, 60 bp, Artificial
  Synthetic oligonucleotide
tacggacatggttatgttcgactgggccctgtttgctccaactatagatgcagactctcc

SEQ ID NO: 450256 - DNA, 60 bp, Artificial
  Synthetic oligonucleotide
tacggaccagtgctcatccttgtaccatcgcgtgaactttcagtgaacctcgcagccagc

SEQ ID NO: 450257 - DNA, 58 bp, Artificial
  Synthetic oligonucleotide
tacggaccgctatgtccagcgtaccaacctgtactattatggaggcagctcccgcctt

SEQ ID NO: 450258 - DNA, 55 bp, Artificial
  Synthetic oligonucleotide
tacggacgaacagaagtgcagattgcaatagtgcctgggagacgattcattggat

SEQ ID NO: 450259 - DNA, 55 bp, Artificial
  Synthetic oligonucleotide
tacggacgcgcacaccaaagagcgaaacggttcgtaccaaggaaagcaggtagga

SEQ ID NO: 450260 - DNA, 55 bp, Artificial
  Synthetic oligonucleotide
tacggacgcttgtagcaagcgcgttgcagcgttctgtagcaaatggggagtgctg

SEQ ID NO: 450261 - DNA, 58 bp, Artificial
  Synthetic oligonucleotide
tacggacgtccccagtaacaatttggaacctgcagcaacttttgacaagagacctgca

SEQ ID NO: 450262 - DNA, 54 bp, Artificial
  Synthetic oligonucleotide
tacggacttgggacccggcaactgggaataagaacggttcgcgtgattcaggag

SEQ ID NO: 450263 - DNA, 51 bp, Artificial
  Synthetic oligonucleotide
tacggagaaagaccccgttggattctgtctacgtaataaggtttgcactgt

SEQ ID NO: 450264 - DNA, 60 bp, Artificial
  Synthetic oligonucleotide
tacggagaacgctctgttattgtatatggcatgtactcatgcctctaatcctgtgtatgc

SEQ ID NO: 450265 - DNA, 59 bp, Artificial
  Synthetic oligonucleotide
tacggagacctgcctcaggtagagagatcggagtgggtgcagaccgcgagcggaggggg

SEQ ID NO: 450266 - DNA, 55 bp, Artificial
  Synthetic oligonucleotide
tacggagattggggacatcgatgatagcagggacggtaggagtagtccaaacgtc

SEQ ID NO: 450267 - DNA, 55 bp, Artificial
  Synthetic oligonucleotide
tacggagcgttacagacggtggtgtttcccgataaaattgtgaacgctctcttcg

SEQ ID NO: 450268 - DNA, 60 bp, Artificial
  Synthetic oligonucleotide
tacggagggcagaacatctgacatgaggactgaaatcataaggatgatggaaagtgccag

SEQ ID NO: 450269 - DNA, 55 bp, Artificial
  Synthetic oligonucleotide
tacggagggtattagtgaatgtcttcgactcaaaggcacatggaatgggagcttg

SEQ ID NO: 450270 - DNA, 57 bp, Artificial
  Synthetic oligonucleotide
tacggagtaccagctacattcggacgcttctaaccaactatccccgcatcaggtccc

SEQ ID NO: 450271 - DNA, 60 bp, Artificial
  Synthetic oligonucleotide
tacggagtgatgtctgtagttgtagtccgcgataaatctccaaagatttattctgcgacg

SEQ ID NO: 450272 - DNA, 57 bp, Artificial
  Synthetic oligonucleotide
tacggatacaatgcgtgatttgggagaccaaaattatgactttttgttccaggccac

SEQ ID NO: 450273 - DNA, 56 bp, Artificial
  Synthetic oligonucleotide
tacggataccatcatagctatgagcagggtagtggatatgctgcagacaaagaatc

SEQ ID NO: 450274 - DNA, 59 bp, Artificial
  Synthetic oligonucleotide
tacggatatacggtttcgattcttcatgcgttatagtaccagagtcccacgatattcca

SEQ ID NO: 450275 - DNA, 59 bp, Artificial
  Synthetic oligonucleotide
tacggatcagagcaattgcaagggtcaggtgctagggtgaggttccctttgagtcggct

SEQ ID NO: 450276 - DNA, 60 bp, Artificial
  Synthetic oligonucleotide
tacggatcaggcaacgctatccaagaatctgactcgagtagtaaaaacttcttgggatca

SEQ ID NO: 450277 - DNA, 59 bp, Artificial
  Synthetic oligonucleotide
tacggatgaagtaatagaagcttcattaccgtacttattgctttttgctactgatggtc

SEQ ID NO: 450278 - DNA, 55 bp, Artificial
  Synthetic oligonucleotide
tacggatgtatcttcatttatgcaataccctgtacgtggaatcaatggcgacgga

SEQ ID NO: 450279 - DNA, 59 bp, Artificial
  Synthetic oligonucleotide
tacggattctccgagtactgcagtaaagtaacaggagacacaaacatagaacacaactg

SEQ ID NO: 450280 - DNA, 58 bp, Artificial
  Synthetic oligonucleotide
tacggattggccggtggtggataccgcgaacccacagattcacggcataggaggagga

SEQ ID NO: 450281 - DNA, 60 bp, Artificial
  Synthetic oligonucleotide
tacggcaacgtggagtccaatgcaccggcagatgagcaatggctacccgtaaatccccca

SEQ ID NO: 450282 - DNA, 59 bp, Artificial
  Synthetic oligonucleotide
tacggcacctagtcctgcctcaatagagctctggccgtttgggaatttattgtggataa

SEQ ID NO: 450283 - DNA, 56 bp, Artificial
  Synthetic oligonucleotide
tacggcacttaataaccgcttaagtttcaacaaattgtgaaaatcaagactaatca

SEQ ID NO: 450284 - DNA, 51 bp, Artificial
  Synthetic oligonucleotide
tacggcatacttcctctgttaagccacgttttctaagcttaacagggtagc

SEQ ID NO: 450285 - DNA, 56 bp, Artificial
  Synthetic oligonucleotide
tacggcatggtcgagatcgcaattgatttcgttccaaccgtggtggggaacctgtt

SEQ ID NO: 450286 - DNA, 60 bp, Artificial
  Synthetic oligonucleotide
tacggcatgtacacgtcaaaaatgcagtccgcggcagtcagtaatttcaggacgtataat

SEQ ID NO: 450287 - DNA, 59 bp, Artificial
  Synthetic oligonucleotide
tacggccacaagggtgtcttgcacacgatgtggcacgtgactagaggagcggcgctgtc

SEQ ID NO: 450288 - DNA, 50 bp, Artificial
  Synthetic oligonucleotide
tacggccaccaacaacaaaggcggtcgcgctttggatttaacgtttcaaa

SEQ ID NO: 450289 - DNA, 52 bp, Artificial
  Synthetic oligonucleotide
tacggccacgcggacggaactgtaaatgccgtcaagggttctgacggtgttt

SEQ ID NO: 450290 - DNA, 55 bp, Artificial
  Synthetic oligonucleotide
tacggccattgtttcaaacctcaattatgaaggtagaatgaagactacgaacccg

SEQ ID NO: 450291 - DNA, 55 bp, Artificial
  Synthetic oligonucleotide
tacggcgaatctgtgaaacaagctgtattgttaaatgtgttggggagtggcgagg

SEQ ID NO: 450292 - DNA, 60 bp, Artificial
  Synthetic oligonucleotide
tacggcgacgacaacataatgtcagtctcgcgggaatgtgattggttcaatcacacctcc

SEQ ID NO: 450293 - DNA, 52 bp, Artificial
  Synthetic oligonucleotide
tacggcgcctgtcccagatgttgattcgcgcggggctatcctgcgccgtcag

SEQ ID NO: 450294 - DNA, 57 bp, Artificial
  Synthetic oligonucleotide
tacggcgctaccaacgttgtacctttcagcttcgacgacaactgtccaccgctggcc

SEQ ID NO: 450295 - DNA, 55 bp, Artificial
  Synthetic oligonucleotide
tacggcggcgaccgagttgcgcaccaattacgatggtatgcagggtgcgtcggct

SEQ ID NO: 450296 - DNA, 54 bp, Artificial
  Synthetic oligonucleotide
tacggcggcgggacgacgtaccactacgtgaccgccgtcggttggtccgatgag

SEQ ID NO: 450297 - DNA, 58 bp, Artificial
  Synthetic oligonucleotide
tacggcgttagttgggatggatcctcatccggggtcttaaagcggactgatgctgcgg

SEQ ID NO: 450298 - DNA, 55 bp, Artificial
  Synthetic oligonucleotide
tacggctacggcggtgtctggtccaagaccgatgtgaaccgcacgaccgactgct

SEQ ID NO: 450299 - DNA, 51 bp, Artificial
  Synthetic oligonucleotide
tacggctactcctcctgtggccacgtatgttccgggagaggcgtgtccttc

SEQ ID NO: 450300 - DNA, 60 bp, Artificial
  Synthetic oligonucleotide
tacggctcattcatccgcaacccacgcgatggattcaacgcctcgtcctactacgccatc

SEQ ID NO: 450301 - DNA, 60 bp, Artificial
  Synthetic oligonucleotide
tacggctccttggcaactatctagatgccgctggtaacccagtgacggagaagtggctgc

SEQ ID NO: 450302 - DNA, 57 bp, Artificial
  Synthetic oligonucleotide
tacggctcgccggcagctacgaaactggttagcgcggaaactaccatccctattgaa

SEQ ID NO: 450303 - DNA, 54 bp, Artificial
  Synthetic oligonucleotide
tacggctgggctccggcgtagggacttgccacctccccggcaacgctgtaaggt

SEQ ID NO: 450304 - DNA, 59 bp, Artificial
  Synthetic oligonucleotide
tacggcttcctcaatctgggtggaacacccaccaagcgcatgctaatgtacaacttccc

SEQ ID NO: 450305 - DNA, 53 bp, Artificial
  Synthetic oligonucleotide
tacgggaacagggatttcgtatacaacttaaaatagtgcttcaagtacggcgt

SEQ ID NO: 450306 - DNA, 52 bp, Artificial
  Synthetic oligonucleotide
tacgggaacggatctggacccctcgacattccgttttgtgacaagcatttaa

SEQ ID NO: 450307 - DNA, 50 bp, Artificial
  Synthetic oligonucleotide
tacgggacacaatcattatctatatcagttgggagttccacatatcagaa

SEQ ID NO: 450308 - DNA, 56 bp, Artificial
  Synthetic oligonucleotide
tacgggacatgcacccagagcggagaacggaggcgagagaagcgctcagtagcttt

SEQ ID NO: 450309 - DNA, 52 bp, Artificial
  Synthetic oligonucleotide
tacgggaccaaacgaaacgcggtgagcaagtcagttttaagggacctttctg

SEQ ID NO: 450310 - DNA, 57 bp, Artificial
  Synthetic oligonucleotide
tacgggacgtgaccaatgtgcccgtaacctgtgtgacaaagaacttcacgcagtggg

SEQ ID NO: 450311 - DNA, 52 bp, Artificial
  Synthetic oligonucleotide
tacgggaggtcatgacagaacaaagcgagtcccgttcgtgctagggttccta

SEQ ID NO: 450312 - DNA, 55 bp, Artificial
  Synthetic oligonucleotide
tacgggagtgtgaatgatcttgacagtgacccgagttacaaagtttgtggctctg

SEQ ID NO: 450313 - DNA, 55 bp, Artificial
  Synthetic oligonucleotide
tacgggattcagggctagaagtaaacatagtaacagattcacaatatgcattggg

SEQ ID NO: 450314 - DNA, 60 bp, Artificial
  Synthetic oligonucleotide
tacgggattctataaagtcatggcagaacaatatactgaggacccaagagtcagaatgcc

SEQ ID NO: 450315 - DNA, 50 bp, Artificial
  Synthetic oligonucleotide
tacgggcacttgggttatgcggagggtggactcaagcaactacgcgttga

SEQ ID NO: 450316 - DNA, 58 bp, Artificial
  Synthetic oligonucleotide
tacgggcagagtgagtattggttgtactgggagacgcttctgtgccgtacctccttcg

SEQ ID NO: 450317 - DNA, 51 bp, Artificial
  Synthetic oligonucleotide
tacgggcatcgcttgtactgattcagttgggagacactgcggtgcttacgg

SEQ ID NO: 450318 - DNA, 53 bp, Artificial
  Synthetic oligonucleotide
tacgggcggctttacgaagaattatggatgacgaaggttgggttaggttcgga

SEQ ID NO: 450319 - DNA, 51 bp, Artificial
  Synthetic oligonucleotide
tacgggcttagttttctggacctggttcgggtttttcagagtgataaaact

SEQ ID NO: 450320 - DNA, 57 bp, Artificial
  Synthetic oligonucleotide
tacggggcagtatactcggtcaatccattagacctaccggccataattgaaaggcta

SEQ ID NO: 450321 - DNA, 55 bp, Artificial
  Synthetic oligonucleotide
tacggggcagtccgcccttggccaacttatcgagtacgcgggctacgtctggcgt

SEQ ID NO: 450322 - DNA, 59 bp, Artificial
  Synthetic oligonucleotide
tacggggccgccgattaagacgtgtgatgcctgttatgcggtcattccagtacagtgca

SEQ ID NO: 450323 - DNA, 57 bp, Artificial
  Synthetic oligonucleotide
tacgggggaggcccaataagaacgatgatgtttcttggacaagcaatagtatagtta

SEQ ID NO: 450324 - DNA, 55 bp, Artificial
  Synthetic oligonucleotide
tacgggggctgctgccattaacgtcaatgggatgactgcacaccgtgcgtttggg

SEQ ID NO: 450325 - DNA, 55 bp, Artificial
  Synthetic oligonucleotide
tacggggggcacacgaatgaagacgactcgaacttcgcccattggactgaggcac

SEQ ID NO: 450326 - DNA, 55 bp, Artificial
  Synthetic oligonucleotide
tacggggttggaagcatgtagttgatggctccaccaatgacactagattctcgac

SEQ ID NO: 450327 - DNA, 53 bp, Artificial
  Synthetic oligonucleotide
tacgggtacgatctacggaccagctacgggtttgaagggcgggcctattcttc

SEQ ID NO: 450328 - DNA, 53 bp, Artificial
  Synthetic oligonucleotide
tacgggtactctagtcttgaaggcgttgacatcgttaaaagcaactaataccg

SEQ ID NO: 450329 - DNA, 59 bp, Artificial
  Synthetic oligonucleotide
tacgggtatctgattgtgttatcttaacgatctagggccgtaggcccgtgagcaatgaa

SEQ ID NO: 450330 - DNA, 59 bp, Artificial
  Synthetic oligonucleotide
tacgggtccctgagagcaactacgaaggggagtcagtatggacttcgcaagcatcctgg

SEQ ID NO: 450331 - DNA, 56 bp, Artificial
  Synthetic oligonucleotide
tacgggtgcgactccagaaggcactttcaaccccaacacccttcgtatgaacgtgc

SEQ ID NO: 450332 - DNA, 60 bp, Artificial
  Synthetic oligonucleotide
tacgggtggacagtatgccagcaacgagcaggctatagtcaagcgcttctggaaggtcaa

SEQ ID NO: 450333 - DNA, 55 bp, Artificial
  Synthetic oligonucleotide
tacgggttgaagtggctcacgtgcttgctccgcgacactaccgcgaacgacgacg

SEQ ID NO: 450334 - DNA, 53 bp, Artificial
  Synthetic oligonucleotide
tacgggttgtggccccttctcctactcctgttggcgttgccccaacgggcata

SEQ ID NO: 450335 - DNA, 55 bp, Artificial
  Synthetic oligonucleotide
tacggtaaccgaatgcgttgttcagcatgtcccggcgcaccataacaggcttgcc

SEQ ID NO: 450336 - DNA, 54 bp, Artificial
  Synthetic oligonucleotide
tacggtaccgaagggttggaggccctcgatctgacgactagcgcagggtacccg

SEQ ID NO: 450337 - DNA, 55 bp, Artificial
  Synthetic oligonucleotide
tacggtagattcttattgacatctgtaggagattgcgcatacatagggccgtatg

SEQ ID NO: 450338 - DNA, 52 bp, Artificial
  Synthetic oligonucleotide
tacggtagtgctcgccatgcaggacagggccgcagtgatcctccacccaggc

SEQ ID NO: 450339 - DNA, 60 bp, Artificial
  Synthetic oligonucleotide
tacggtatcgagcagtctggtattggcagggctgatcatagcaataggtctttggatgtg

SEQ ID NO: 450340 - DNA, 60 bp, Artificial
  Synthetic oligonucleotide
tacggtatcgagcagtctggttttggtgggactgatcattgccatgggtctttggatgtg

SEQ ID NO: 450341 - DNA, 60 bp, Artificial
  Synthetic oligonucleotide
tacggtatgggtgggtcgcacaccattgtatgattatgatgactattccttaccaagatc

SEQ ID NO: 450342 - DNA, 55 bp, Artificial
  Synthetic oligonucleotide
tacggtcaactcgtctgtgtccactgtcgtcgcaacaagcaaagtgtcgacgaca

SEQ ID NO: 450343 - DNA, 51 bp, Artificial
  Synthetic oligonucleotide
tacggtccacacatcatattgcctcaagccggggatgtacttggttaccac

SEQ ID NO: 450344 - DNA, 52 bp, Artificial
  Synthetic oligonucleotide
tacggtccttaagccgatttggcaaaaaggtgggcaacgcgttaacttctaa

SEQ ID NO: 450345 - DNA, 59 bp, Artificial
  Synthetic oligonucleotide
tacggtccttctgggtctgcagaactaagagatggaatgtgcattctcacacaaaatgc

SEQ ID NO: 450346 - DNA, 57 bp, Artificial
  Synthetic oligonucleotide
tacggtctaattagtaaaacctaatacgacatatagactgctatcaagtaaattgaa

SEQ ID NO: 450347 - DNA, 60 bp, Artificial
  Synthetic oligonucleotide
tacggtgcatgctcgctgtaaaatacttgcaactagttgagcagacatactccccggata

SEQ ID NO: 450348 - DNA, 52 bp, Artificial
  Synthetic oligonucleotide
tacggtgcttgtgaaaagtatgcttatccgtggcaaactgcaaaatgtttct

SEQ ID NO: 450349 - DNA, 54 bp, Artificial
  Synthetic oligonucleotide
tacggtggaagcagtgaaatccatgacaactaacgttatgaaaaagtttaaaac

SEQ ID NO: 450350 - DNA, 57 bp, Artificial
  Synthetic oligonucleotide
tacggtggactttccaaaaccagaaatttacgtgtagtgttggcagtgatctggcat

SEQ ID NO: 450351 - DNA, 55 bp, Artificial
  Synthetic oligonucleotide
tacggtggcgggtcgctaccttatagcgtaatccgtgactacgggctgctcgcag

SEQ ID NO: 450352 - DNA, 59 bp, Artificial
  Synthetic oligonucleotide
tacggtggtacggtggaaagcagtcccagctctgcattgggaaccggctcacacccagc

SEQ ID NO: 450353 - DNA, 60 bp, Artificial
  Synthetic oligonucleotide
tacggtgtagatgtgagaggagataatgtaacgcaagatagtatcaacgcatcatcaagg

SEQ ID NO: 450354 - DNA, 59 bp, Artificial
  Synthetic oligonucleotide
tacggtgtcgcatagactaccacgccgctgagacttcctttcgtgacgaagggaagcac

SEQ ID NO: 450355 - DNA, 52 bp, Artificial
  Synthetic oligonucleotide
tacggttataccgagtccgcaaacattgttccattactataatgtgaatgtc

SEQ ID NO: 450356 - DNA, 59 bp, Artificial
  Synthetic oligonucleotide
tacggttatttataagcgaaacattgcgcccaccggcacatcgcgtggcacaacaccaa

SEQ ID NO: 450357 - DNA, 55 bp, Artificial
  Synthetic oligonucleotide
tacggttccctttcgacagctgcgccacataccgctgttccggcgtcaacgcgtc

SEQ ID NO: 450358 - DNA, 60 bp, Artificial
  Synthetic oligonucleotide
tacggttcgatatggaggtcacttttgtcatcaccagctatcaacatcagagcacaatct

SEQ ID NO: 450359 - DNA, 56 bp, Artificial
  Synthetic oligonucleotide
tacggttcgcaatttccgcgatcctttgcatgccgatgcgatagaattcggcatct

SEQ ID NO: 450360 - DNA, 55 bp, Artificial
  Synthetic oligonucleotide
tacggttgacggaaactccactgccatctccaatttgaagagtgatgtatcgtcg

SEQ ID NO: 450361 - DNA, 55 bp, Artificial
  Synthetic oligonucleotide
tacggttgatgtacttcccgatttcactccgatcctcatgtttatcatgttccac

SEQ ID NO: 450362 - DNA, 58 bp, Artificial
  Synthetic oligonucleotide
tacggttgcgcgaacttgaagtgaatagtatgccgagtaaaacagaaaggtatgttca

SEQ ID NO: 450363 - DNA, 53 bp, Artificial
  Synthetic oligonucleotide
tacggtttcgtcccgcaaatgcgggtctgtttctcccagtaagtctaaactgg

SEQ ID NO: 450364 - DNA, 56 bp, Artificial
  Synthetic oligonucleotide
tacggtttctgtgagtagggccggtaatttgctaagtctagtgacttatgacccta

SEQ ID NO: 450365 - DNA, 58 bp, Artificial
  Synthetic oligonucleotide
tacggtttgtgttggtgcattattgttcgcggaacaaggcttgaatagtgacttgtag

SEQ ID NO: 450366 - DNA, 56 bp, Artificial
  Synthetic oligonucleotide
tacggttttattctaaagtgcgtctccttggtcttactgttgaccattcaactgta

SEQ ID NO: 450367 - DNA, 51 bp, Artificial
  Synthetic oligonucleotide
tacgtaaagtcaaatagactagtcttggcaacaggactcagaaatgtccct

SEQ ID NO: 450368 - DNA, 60 bp, Artificial
  Synthetic oligonucleotide
tacgtaaatggttctgttgaaacgcatctaagtctacattctactgtccaatacatttga

SEQ ID NO: 450369 - DNA, 55 bp, Artificial
  Synthetic oligonucleotide
tacgtaacatcacttacttaaaatacttcgaacaatggtgcctcccgaagaaatc

SEQ ID NO: 450370 - DNA, 55 bp, Artificial
  Synthetic oligonucleotide
tacgtaatggtataccgcatcctacatttgctggtgcgtatagtctttatactcc

SEQ ID NO: 450371 - DNA, 60 bp, Artificial
  Synthetic oligonucleotide
tacgtacactctcaaggccagtcaaatcgtggacgtactgcgtccgcagactgccgaggc

SEQ ID NO: 450372 - DNA, 60 bp, Artificial
  Synthetic oligonucleotide
tacgtacatgctcagcgttacatacggtattgtggcattgattcacgagagttaatcaat

SEQ ID NO: 450373 - DNA, 51 bp, Artificial
  Synthetic oligonucleotide
tacgtacgctcgagtccgtggtgtggatgagtggggtcaggtcggaccttg

SEQ ID NO: 450374 - DNA, 59 bp, Artificial
  Synthetic oligonucleotide
tacgtacggtcactgtagtaggtgtgtctcccatgtgaccactgtccccgaacacctca

SEQ ID NO: 450375 - DNA, 60 bp, Artificial
  Synthetic oligonucleotide
tacgtacggtgctcctgatatcattgggtccgctaatatcttcactcctcccgaggtgct

SEQ ID NO: 450376 - DNA, 58 bp, Artificial
  Synthetic oligonucleotide
tacgtagaggccagtgagtattacccagctagatatcaatcacacctcatgcttgcag

SEQ ID NO: 450377 - DNA, 60 bp, Artificial
  Synthetic oligonucleotide
tacgtagcgtgagcgctggacgtgcgctatatatccctccatatgaattactcctgcatg

SEQ ID NO: 450378 - DNA, 60 bp, Artificial
  Synthetic oligonucleotide
tacgtagctattcatcatcgtgaattagacacctatatattggtaccgaagcaatggcct

SEQ ID NO: 450379 - DNA, 56 bp, Artificial
  Synthetic oligonucleotide
tacgtatactttaattagacccactagctcttatacaagagtttaccttggcagtc

SEQ ID NO: 450380 - DNA, 50 bp, Artificial
  Synthetic oligonucleotide
tacgtataggaccaggacaagccttctatacaactggtgccattataggg

SEQ ID NO: 450381 - DNA, 56 bp, Artificial
  Synthetic oligonucleotide
tacgtataggtattctctcctaattcaggggtttgaagactgggtctagcttaaca

SEQ ID NO: 450382 - DNA, 58 bp, Artificial
  Synthetic oligonucleotide
tacgtatcaacacgccccaaccggtattcaacgcgacaataagattctatataatctc

SEQ ID NO: 450383 - DNA, 54 bp, Artificial
  Synthetic oligonucleotide
tacgtatcataagggactcttaaaagtgaggagtacctcgtaagaagagccttt

SEQ ID NO: 450384 - DNA, 59 bp, Artificial
  Synthetic oligonucleotide
tacgtatcggtgccatagaggggacactcaaattcaaacgaggagatctttcgagctaa

SEQ ID NO: 450385 - DNA, 60 bp, Artificial
  Synthetic oligonucleotide
tacgtatgtgaagggactcatacagaagggatggttcaattcacgtggtggcaagtctga

SEQ ID NO: 450386 - DNA, 58 bp, Artificial
  Synthetic oligonucleotide
tacgtattacgtgagatatggatggatgagaatatcaagactaaagatcacacgaata

SEQ ID NO: 450387 - DNA, 54 bp, Artificial
  Synthetic oligonucleotide
tacgtatttgcttgggttcgtgtctttgcacgtttactctaaggctaaatcggt

SEQ ID NO: 450388 - DNA, 55 bp, Artificial
  Synthetic oligonucleotide
tacgtcaagaaaggcttgcgccggactgacctctggaacccgaaaactggaccta

SEQ ID NO: 450389 - DNA, 58 bp, Artificial
  Synthetic oligonucleotide
tacgtcaagacatgcggggcacccccctgcctgactcgaccctcgaagtcgaatacca

SEQ ID NO: 450390 - DNA, 55 bp, Artificial
  Synthetic oligonucleotide
tacgtcaaggatttcgctggtcaaaccgttggtgacctctacccacaattacaag

SEQ ID NO: 450391 - DNA, 58 bp, Artificial
  Synthetic oligonucleotide
tacgtcacggaacgcattatcagaacaagacaagagcaagagatcgacatcttaagtg

SEQ ID NO: 450392 - DNA, 59 bp, Artificial
  Synthetic oligonucleotide
tacgtcactaaccacgtgcgttccacagaccaaccctatactatgtcgtgcacttcctg

SEQ ID NO: 450393 - DNA, 60 bp, Artificial
  Synthetic oligonucleotide
tacgtcactaaccacgtgtcctccacagaccaaccatatgctatgtcgtccacttcctgg

SEQ ID NO: 450394 - DNA, 59 bp, Artificial
  Synthetic oligonucleotide
tacgtcactgcaaccgatgcttcatcgaaaccctggtctattttcgttagagtgtctgg

SEQ ID NO: 450395 - DNA, 58 bp, Artificial
  Synthetic oligonucleotide
tacgtcaggcatgggcggggcttacataatctctcgctaatggttggttcccggccac

SEQ ID NO: 450396 - DNA, 59 bp, Artificial
  Synthetic oligonucleotide
tacgtcaggcatgggcggggcttgcatagcctctcgctattggtgggttcccgcccacg

SEQ ID NO: 450397 - DNA, 57 bp, Artificial
  Synthetic oligonucleotide
tacgtcatcaaaaagataacgatcagcccaggactatacggtaaagttgagaacttg

SEQ ID NO: 450398 - DNA, 60 bp, Artificial
  Synthetic oligonucleotide
tacgtcatcaatgacgttataccaggcatcattattgtagacctttgggctaaggtctag

SEQ ID NO: 450399 - DNA, 60 bp, Artificial
  Synthetic oligonucleotide
tacgtcatcgagacacgtggtgccagcagctgtaaacccggaagtcgctgacacacgtgt

SEQ ID NO: 450400 - DNA, 60 bp, Artificial
  Synthetic oligonucleotide
tacgtcatgatgtcgatacgtatgccagactttctcgtgagcttcaacttgttcgcgacg

SEQ ID NO: 450401 - DNA, 55 bp, Artificial
  Synthetic oligonucleotide
tacgtcccgtcggcactgaatcccgcggacgatccttctcggggtcgcttgggac

SEQ ID NO: 450402 - DNA, 51 bp, Artificial
  Synthetic oligonucleotide
tacgtcccgtgcttcccgtagtagcccggttgctctacggcgtagtctccg

SEQ ID NO: 450403 - DNA, 55 bp, Artificial
  Synthetic oligonucleotide
tacgtccctccggtggtgcacgggtgcccattgccacctgccaaggcccctccaa

SEQ ID NO: 450404 - DNA, 55 bp, Artificial
  Synthetic oligonucleotide
tacgtccggtagcaatctgctaccagtcaagggctgtgtcgtggggcagcaccat

SEQ ID NO: 450405 - DNA, 60 bp, Artificial
  Synthetic oligonucleotide
tacgtcctgcgaagcctgagaagggtcctgagcgcactatggaagactcttggagggata

SEQ ID NO: 450406 - DNA, 53 bp, Artificial
  Synthetic oligonucleotide
tacgtcctgttcaatcgtccgaacgggatggtggctacgaatctaattctctc

SEQ ID NO: 450407 - DNA, 60 bp, Artificial
  Synthetic oligonucleotide
tacgtccttacaagttgagggattgtgagatcagattaagtgaggcagcaataccacatg

SEQ ID NO: 450408 - DNA, 55 bp, Artificial
  Synthetic oligonucleotide
tacgtcgcccaccacacggcgccttttccgaccactctcgagagtcgttgggagt

SEQ ID NO: 450409 - DNA, 60 bp, Artificial
  Synthetic oligonucleotide
tacgtcgccgtctgaacttcgacagcccatacaacagtcgtgctgctgtccccactgtcc

SEQ ID NO: 450410 - DNA, 55 bp, Artificial
  Synthetic oligonucleotide
tacgtcggactatgggacctctgacgcggtctcgctgcgtgatcgccccacccgt

SEQ ID NO: 450411 - DNA, 56 bp, Artificial
  Synthetic oligonucleotide
tacgtcgtcgagtaccggccgttcgctggcgacgtccgagagatccgggtgactgg

SEQ ID NO: 450412 - DNA, 52 bp, Artificial
  Synthetic oligonucleotide
tacgtcgttgcagacccacctcccgaacgcagggggattggacaggctcgat

SEQ ID NO: 450413 - DNA, 57 bp, Artificial
  Synthetic oligonucleotide
tacgtctacaagagcttaggcattgtgacgccgcaagtgctatctagccgcacgttt

SEQ ID NO: 450414 - DNA, 54 bp, Artificial
  Synthetic oligonucleotide
tacgtctatgaccaccttactccactgcaggactgggcccatgcaggcctacgg

SEQ ID NO: 450415 - DNA, 57 bp, Artificial
  Synthetic oligonucleotide
tacgtctcctgtgtcttataacgaacttgtcgtttggacacaaggtaagatacgtga

SEQ ID NO: 450416 - DNA, 58 bp, Artificial
  Synthetic oligonucleotide
tacgtctctgtcctttggaatgttatgatactcaaggtctatgtcaacaccggttacg

SEQ ID NO: 450417 - DNA, 60 bp, Artificial
  Synthetic oligonucleotide
tacgtctgcatagatgggtgcgtcctcctgaagcgagcgagtaggggtcaaccagaggtc

SEQ ID NO: 450418 - DNA, 60 bp, Artificial
  Synthetic oligonucleotide
tacgtctgccttttagagactggcggggactagagaatgtgcttcagcacgcctgcactc

SEQ ID NO: 450419 - DNA, 50 bp, Artificial
  Synthetic oligonucleotide
tacgtctggcatgtatgttgtcccttctaaagagactttaagcgtgatga

SEQ ID NO: 450420 - DNA, 60 bp, Artificial
  Synthetic oligonucleotide
tacgtctgttcagtgttgtcattggataatgtatcctttgaggaatacacgtgtatccta

SEQ ID NO: 450421 - DNA, 59 bp, Artificial
  Synthetic oligonucleotide
tacgtgacaagcgaccatgtcagttctccgctgtggagcctattgtgccatttccggag

SEQ ID NO: 450422 - DNA, 58 bp, Artificial
  Synthetic oligonucleotide
tacgtgacaggacaagtcacctacaccgtggaatgggaagtgcaacggtaccagacca

SEQ ID NO: 450423 - DNA, 60 bp, Artificial
  Synthetic oligonucleotide
tacgtgacaggctcagacgtctaccagtggaaaggagacgcgttgatgtgttcgctataa

SEQ ID NO: 450424 - DNA, 50 bp, Artificial
  Synthetic oligonucleotide
tacgtgacatagaacgtgatcttgatagccgtgctggagcgtttcaaatc

SEQ ID NO: 450425 - DNA, 60 bp, Artificial
  Synthetic oligonucleotide
tacgtgacatcatatatcgtccatatgccaatgtgttgcgtttgccgggacaaacatatt

SEQ ID NO: 450426 - DNA, 51 bp, Artificial
  Synthetic oligonucleotide
tacgtgacgctttactcgcagcgccgttctatcgcgttgaatcgggcgtta

SEQ ID NO: 450427 - DNA, 54 bp, Artificial
  Synthetic oligonucleotide
tacgtgacttggcagagaggtacgcggagcaacagattccgcctgcgtaaccta

SEQ ID NO: 450428 - DNA, 56 bp, Artificial
  Synthetic oligonucleotide
tacgtgaggaggtgtcgttcagagtaggactacacgactacccggtggggtcgcaa

SEQ ID NO: 450429 - DNA, 55 bp, Artificial
  Synthetic oligonucleotide
tacgtgataatataagtggcagcacttccaaatggctgagttttccacgcccgtc

SEQ ID NO: 450430 - DNA, 56 bp, Artificial
  Synthetic oligonucleotide
tacgtgatcgttaccaagtcttacgtaagttcgattcaactgtcaccggaggtcaa

SEQ ID NO: 450431 - DNA, 60 bp, Artificial
  Synthetic oligonucleotide
tacgtgatcgtttccaggttatgcataagttctatgccaaggtcacgggtggacaatatg

SEQ ID NO: 450432 - DNA, 53 bp, Artificial
  Synthetic oligonucleotide
tacgtgatggctgcacacatgaaggctgcgggtctaccgaaagagcaacaggc

SEQ ID NO: 450433 - DNA, 55 bp, Artificial
  Synthetic oligonucleotide
tacgtgcacgtcagagtttgacggttgcgaagcaagcgttcttcgaccagatagg

SEQ ID NO: 450434 - DNA, 60 bp, Artificial
  Synthetic oligonucleotide
tacgtgcagcatctcttcccgctactgcatgcgcgacacatcgtttaactgagaacacat

SEQ ID NO: 450435 - DNA, 58 bp, Artificial
  Synthetic oligonucleotide
tacgtgcccataacggtgacagtagcccctatgtgtgcggagtacaacggtcttaggc

SEQ ID NO: 450436 - DNA, 52 bp, Artificial
  Synthetic oligonucleotide
tacgtgccccttcgcttgttaccgcctcggtagtatttacgaggtgggtaag

SEQ ID NO: 450437 - DNA, 60 bp, Artificial
  Synthetic oligonucleotide
tacgtgcctgctaccttgtgcgaccagatgacaggtatactggcgacagacgtaagcgca

SEQ ID NO: 450438 - DNA, 53 bp, Artificial
  Synthetic oligonucleotide
tacgtgcgatgagagctgccaaatccgtgagtgatcgtgccacacgttccgta

SEQ ID NO: 450439 - DNA, 50 bp, Artificial
  Synthetic oligonucleotide
tacgtgcgtaggaaggacaataggacttaggattagctttttggaaggac

SEQ ID NO: 450440 - DNA, 60 bp, Artificial
  Synthetic oligonucleotide
tacgtgctatgtatctgaacggcttcgtcacgcaacctccagcgtggattcgtaacgcga

SEQ ID NO: 450441 - DNA, 55 bp, Artificial
  Synthetic oligonucleotide
tacgtgctgcacttcgcgtgcctgacgtacttcgccgcccacttctgcacccggg

SEQ ID NO: 450442 - DNA, 51 bp, Artificial
  Synthetic oligonucleotide
tacgtggaagataaggtcaacaaaaccctggttccgtgtcccgaacccgac

SEQ ID NO: 450443 - DNA, 58 bp, Artificial
  Synthetic oligonucleotide
tacgtggaagttcgcagggtgggtgacttccattatatcaccggggtgacacaggata

SEQ ID NO: 450444 - DNA, 60 bp, Artificial
  Synthetic oligonucleotide
tacgtggaatccatcaaccctatgggagacaggtcaattcgtcacacctgacgtcatccg

SEQ ID NO: 450445 - DNA, 58 bp, Artificial
  Synthetic oligonucleotide
tacgtggaatgttcgaacaataaatgtggcggaggtggccgaccatttctatcctaga

SEQ ID NO: 450446 - DNA, 57 bp, Artificial
  Synthetic oligonucleotide
tacgtggaccgacaaagacagattctttgagggagctaagctcaacgtagttctaac

SEQ ID NO: 450447 - DNA, 59 bp, Artificial
  Synthetic oligonucleotide
tacgtggaggtcacgcgagtgggggatttccactacgtgacgggcatgaccactgacaa

SEQ ID NO: 450448 - DNA, 57 bp, Artificial
  Synthetic oligonucleotide
tacgtggatcagaggtacatgttggagccggggtggttcatattcaggtggggagac

SEQ ID NO: 450449 - DNA, 55 bp, Artificial
  Synthetic oligonucleotide
tacgtggcgtacggtcgattcttcgaatattcatgcaagcactgttcggtgtcca

SEQ ID NO: 450450 - DNA, 60 bp, Artificial
  Synthetic oligonucleotide
tacgtgggcagctggtctaatagacatgcaaaaaccgttcgatgctaatggagcctttag

SEQ ID NO: 450451 - DNA, 60 bp, Artificial
  Synthetic oligonucleotide
tacgtgggcccgaaacatactgcggacacaagaatctgaatgcgtatgccacaacggtgt

SEQ ID NO: 450452 - DNA, 60 bp, Artificial
  Synthetic oligonucleotide
tacgtgggcgtttgcgtacaggtactccacttgtgcaggtttcatgtccttgatccagtc

SEQ ID NO: 450453 - DNA, 58 bp, Artificial
  Synthetic oligonucleotide
tacgtggtgggtgcttctacaaccaatgccgcaaacctcgtgccgtctgatgttgtca

SEQ ID NO: 450454 - DNA, 55 bp, Artificial
  Synthetic oligonucleotide
tacgtggtgtataaccatcaagatgcagcgaagtatgagaatcacaccgagaacg

SEQ ID NO: 450455 - DNA, 60 bp, Artificial
  Synthetic oligonucleotide
tacgtgtcatccgtcttccttaagatgaaccttgcactctcagccaacgacatggaccga

SEQ ID NO: 450456 - DNA, 60 bp, Artificial
  Synthetic oligonucleotide
tacgtgtggtttggtattagcatgactatcacattcgtattagcagggctagttagtgaa

SEQ ID NO: 450457 - DNA, 50 bp, Artificial
  Synthetic oligonucleotide
tacgtgtgtaagcatacatacgtagacagaggctgggggaacggatgtgg

SEQ ID NO: 450458 - DNA, 50 bp, Artificial
  Synthetic oligonucleotide
tacgtgttgaaacacgggaccgctgggagtctgggataactcgcggggat

SEQ ID NO: 450459 - DNA, 55 bp, Artificial
  Synthetic oligonucleotide
tacgtgttgatatttgctcgaagttctgcattcggtcaaattaatatcgtctcga

SEQ ID NO: 450460 - DNA, 57 bp, Artificial
  Synthetic oligonucleotide
tacgttaaagtaaggacactcgtattgttccactggtgcttttgcatctttgggcat

SEQ ID NO: 450461 - DNA, 60 bp, Artificial
  Synthetic oligonucleotide
tacgttaaccagataattcaagcgatgtccaagagatctagatcactaaattcgtcagca

SEQ ID NO: 450462 - DNA, 55 bp, Artificial
  Synthetic oligonucleotide
tacgttactcggacaaacgtcttttattatgcatccagtgaccggctactcacag

SEQ ID NO: 450463 - DNA, 60 bp, Artificial
  Synthetic oligonucleotide
tacgttagttgcgacaatgataactgctggtcctttgctcttgcccaaggggcattactg

SEQ ID NO: 450464 - DNA, 58 bp, Artificial
  Synthetic oligonucleotide
tacgttatacctaatcttacactatgcaatccctcagtcccatgaggaacctgaaggt

SEQ ID NO: 450465 - DNA, 60 bp, Artificial
  Synthetic oligonucleotide
tacgttattctcttccatgtcatagctccatatggtgatggtagagctttcgcgctcatg

SEQ ID NO: 450466 - DNA, 60 bp, Artificial
  Synthetic oligonucleotide
tacgttcactgagactactatcatagccacggccgacgctagaggtcttattcaatcttc

SEQ ID NO: 450467 - DNA, 59 bp, Artificial
  Synthetic oligonucleotide
tacgttcacttaccgaaacacgaaagacactatcacgaacacacaactgtgagagctcc

SEQ ID NO: 450468 - DNA, 54 bp, Artificial
  Synthetic oligonucleotide
tacgttcgaaaacggagtccaactagtgttcgggatgtatggactcgaacaacg

SEQ ID NO: 450469 - DNA, 51 bp, Artificial
  Synthetic oligonucleotide
tacgttcgtgatgtacgagcggatataggaggatttcagtattcttattcc

SEQ ID NO: 450470 - DNA, 58 bp, Artificial
  Synthetic oligonucleotide
tacgttcttaaaacggcgatgggtgagtcttggcggtagagcttcgatgctgtacaaa

SEQ ID NO: 450471 - DNA, 55 bp, Artificial
  Synthetic oligonucleotide
tacgttcttcccactatcactatgaagctatccggccggttcctcgagattatcg

SEQ ID NO: 450472 - DNA, 60 bp, Artificial
  Synthetic oligonucleotide
tacgttgaataggtctcaaccacagcatgataatctgatgggaacgatgtggctcaacgc

SEQ ID NO: 450473 - DNA, 55 bp, Artificial
  Synthetic oligonucleotide
tacgttgacatagtgtttaattgactcgctagtaggttgcaaatggaccggaagg

SEQ ID NO: 450474 - DNA, 55 bp, Artificial
  Synthetic oligonucleotide
tacgttgacctcttacaggtggtcaagatatctgtaccgtcttctccccgacggt

SEQ ID NO: 450475 - DNA, 60 bp, Artificial
  Synthetic oligonucleotide
tacgttgaggacactaagattgatttgtggtcatacaatgctgaattgctagtagcacta

SEQ ID NO: 450476 - DNA, 59 bp, Artificial
  Synthetic oligonucleotide
tacgttgagtagaaaagtattgttatgccacagtccagatcagttacctagtggggtga

SEQ ID NO: 450477 - DNA, 51 bp, Artificial
  Synthetic oligonucleotide
tacgttgcgaggcaacaccacggactttgccacagcgtcgtccaccttcca

SEQ ID NO: 450478 - DNA, 51 bp, Artificial
  Synthetic oligonucleotide
tacgttgcggagactgtttaaggagaccccttctgtgcactaagtgcgcct

SEQ ID NO: 450479 - DNA, 59 bp, Artificial
  Synthetic oligonucleotide
tacgttggaatctctaaagattgatactatcttgcctcccttgaccgtgtccgaagcaa

SEQ ID NO: 450480 - DNA, 55 bp, Artificial
  Synthetic oligonucleotide
tacgttggatgcggtgacctacgtaccttgatgcagtttaaaaaacgatcaccgg

SEQ ID NO: 450481 - DNA, 58 bp, Artificial
  Synthetic oligonucleotide
tacgttgggcaatagaccatgcttgtactgattccttaatttccgctaggaatattcg

SEQ ID NO: 450482 - DNA, 60 bp, Artificial
  Synthetic oligonucleotide
tacgttgtggccctataataccatccgtcaggcatcactttaacataagacacatcataa

SEQ ID NO: 450483 - DNA, 55 bp, Artificial
  Synthetic oligonucleotide
tacgtttaaaaggtcacatgctgtggtacgcaatgatgtgaaacgtcgatttggt

SEQ ID NO: 450484 - DNA, 60 bp, Artificial
  Synthetic oligonucleotide
tacgtttaaagacttagatcatgactcatgtaatggcgtttatgacaatattagcaagaa

SEQ ID NO: 450485 - DNA, 51 bp, Artificial
  Synthetic oligonucleotide
tacgtttaactaatgttaaccgatatccagaaggtaaccaatctgtttttc

SEQ ID NO: 450486 - DNA, 57 bp, Artificial
  Synthetic oligonucleotide
tacgtttatgaccacctcactccattgcgggactgggcccacgtaagcctacgagac

SEQ ID NO: 450487 - DNA, 57 bp, Artificial
  Synthetic oligonucleotide
tacgtttcaaaggaactgttaagatcgagcgtgttcctactgacgtggcgatggacg

SEQ ID NO: 450488 - DNA, 60 bp, Artificial
  Synthetic oligonucleotide
tacgtttcatattacatattgagaatcgaatttgcatatgtcgttgcgcccttcttaaaa

SEQ ID NO: 450489 - DNA, 60 bp, Artificial
  Synthetic oligonucleotide
tacgtttgcatgacacttggggcaatcagcttaacactgcaattagggaacataatttca

SEQ ID NO: 450490 - DNA, 55 bp, Artificial
  Synthetic oligonucleotide
tacgtttgtgcgcgcacgggaaccgatggacttttgtccacccacctacagctgg

SEQ ID NO: 450491 - DNA, 60 bp, Artificial
  Synthetic oligonucleotide
tacgttttgatgcaatgaaactgcttaagagaggcatatgtggtgatgagttttctatgt

SEQ ID NO: 450492 - DNA, 56 bp, Artificial
  Synthetic oligonucleotide
tacgtttttgtacgcgttgcgacatgcttcgtcgggaatgttatcgccgttgttgg

SEQ ID NO: 450493 - DNA, 55 bp, Artificial
  Synthetic oligonucleotide
tactaaaacaagagacctcgtcatacaacctagaggtctccgaatcaggaagtgg

SEQ ID NO: 450494 - DNA, 55 bp, Artificial
  Synthetic oligonucleotide
tactaaaacactgcaggattatgttcgacccttactcattgttacgacgagatcg

SEQ ID NO: 450495 - DNA, 60 bp, Artificial
  Synthetic oligonucleotide
tactaaacagactccgagatgccattggacactgaggggacaaacagcaacgaaagtgag

SEQ ID NO: 450496 - DNA, 56 bp, Artificial
  Synthetic oligonucleotide
tactaaacctcctgagtacggtgatacacctattccgggctatacttatatcaacc

SEQ ID NO: 450497 - DNA, 50 bp, Artificial
  Synthetic oligonucleotide
tactaaacctcctgtatcctctaagaaacgctctgctcctactacatcta

SEQ ID NO: 450498 - DNA, 54 bp, Artificial
  Synthetic oligonucleotide
tactaaagcggggcagtgtggaggagtggtgacatctgttgggaaggttatcgg

SEQ ID NO: 450499 - DNA, 60 bp, Artificial
  Synthetic oligonucleotide
tactaaaggcgttaatagcggaattgatggcatgaagtcacgctttagtggtcttagaga

SEQ ID NO: 450500 - DNA, 57 bp, Artificial
  Synthetic oligonucleotide
tactaaagttgaagcatctatggcccttgtagacgcaaagcctatcatagaactagc

SEQ ID NO: 450501 - DNA, 59 bp, Artificial
  Synthetic oligonucleotide
tactaaatcaatagagttgaatgcacctaattctcactacgaggaatgttcctgttacc

SEQ ID NO: 450502 - DNA, 60 bp, Artificial
  Synthetic oligonucleotide
tactaaatctcgtatgacacaattcatgacgtccgcgcaaaatatgttacaggtgctcgg

SEQ ID NO: 450503 - DNA, 60 bp, Artificial
  Synthetic oligonucleotide
tactaaattattacgccaactggtcaggaagcatgaagctaaccttcatgtactgtggtg

SEQ ID NO: 450504 - DNA, 60 bp, Artificial
  Synthetic oligonucleotide
tactaacaatgagataagaacagatcaacattggataactaaaaccaacataactgacta

SEQ ID NO: 450505 - DNA, 56 bp, Artificial
  Synthetic oligonucleotide
tactaacatactaactcatataatggctcgtgcaaaacgtgttaaacgtgcctcag

SEQ ID NO: 450506 - DNA, 50 bp, Artificial
  Synthetic oligonucleotide
tactaaccaacaaagactacacacactggtacccagacatatacaaccaa

SEQ ID NO: 450507 - DNA, 58 bp, Artificial
  Synthetic oligonucleotide
tactaactcccaaagcctcagaactatactcggagcgtagtgttgaattccgatctct

SEQ ID NO: 450508 - DNA, 55 bp, Artificial
  Synthetic oligonucleotide
tactaagaaacaggagacgaaacacgttaaaatctatacagcagtcgagaaacag

SEQ ID NO: 450509 - DNA, 55 bp, Artificial
  Synthetic oligonucleotide
tactaagaacggagtaccgaggaattattactcgttctatccagattgcttacac

SEQ ID NO: 450510 - DNA, 58 bp, Artificial
  Synthetic oligonucleotide
tactaagggtaacatcgaaatgttaaaaccaatgtatgctgctataactcacaaagta

SEQ ID NO: 450511 - DNA, 50 bp, Artificial
  Synthetic oligonucleotide
tactaagggttttattataagggtggtagattaggggtgtttattattaa

SEQ ID NO: 450512 - DNA, 57 bp, Artificial
  Synthetic oligonucleotide
tactaagtcaatattccaagcaattcggaaaattactctaacgcgtaagctatcaat

SEQ ID NO: 450513 - DNA, 58 bp, Artificial
  Synthetic oligonucleotide
tactaataacgctcagagtcccgtttctgaccctgtcaatgcaagtgctaacgtaaaa

SEQ ID NO: 450514 - DNA, 52 bp, Artificial
  Synthetic oligonucleotide
tactaataactaagtttgcacggtgcttgcttgttgagccacagtactggcg

SEQ ID NO: 450515 - DNA, 57 bp, Artificial
  Synthetic oligonucleotide
tactaatactaaaacagtggcagcccaccactaacctcagactgacggtgaaaggac

SEQ ID NO: 450516 - DNA, 60 bp, Artificial
  Synthetic oligonucleotide
tactaataggtctatctggccgcacagcgggatctctgacatttctttcagcccatgaag

SEQ ID NO: 450517 - DNA, 55 bp, Artificial
  Synthetic oligonucleotide
tactaataggtctctccggccgcgcagcggcatccttcacatttcgttccgccca

SEQ ID NO: 450518 - DNA, 56 bp, Artificial
  Synthetic oligonucleotide
tactaataggtctttccggccgcgcagcggaacctcttccaaaataatcatccgcc

SEQ ID NO: 450519 - DNA, 59 bp, Artificial
  Synthetic oligonucleotide
tactaatgccaatataaatagtactaagaccaataccactaacaccacggacagtctga

SEQ ID NO: 450520 - DNA, 60 bp, Artificial
  Synthetic oligonucleotide
tactaatgctactactagtagtgagagtactactgctggtaccactactagtagcgggga

SEQ ID NO: 450521 - DNA, 55 bp, Artificial
  Synthetic oligonucleotide
tactaatgtgccctggaattataatatcacgcccaattggactaaggacacctgg

SEQ ID NO: 450522 - DNA, 51 bp, Artificial
  Synthetic oligonucleotide
tactaatgtggggagattgaaattcggactttcttacaaggagcaagtagg

SEQ ID NO: 450523 - DNA, 55 bp, Artificial
  Synthetic oligonucleotide
tactaattcctttggacaaaaatacccccgcaaagcagatagaacaggcgcgtgg

SEQ ID NO: 450524 - DNA, 55 bp, Artificial
  Synthetic oligonucleotide
tactaattgcaacttgacgattcgaagataggaactgcttagtatgatgccgtgg

SEQ ID NO: 450525 - DNA, 60 bp, Artificial
  Synthetic oligonucleotide
tactaattgtgaccattttcattctactggcggtcatcattaagaagagtattagagctt

SEQ ID NO: 450526 - DNA, 60 bp, Artificial
  Synthetic oligonucleotide
tactacaaactgtgccagcaaatccgcctccggcatccaccaatcgccagtcaggaaggc

SEQ ID NO: 450527 - DNA, 56 bp, Artificial
  Synthetic oligonucleotide
tactacaaagtgccaaacccctcatggggccttgaacagtaatcttccttttcaga

SEQ ID NO: 450528 - DNA, 60 bp, Artificial
  Synthetic oligonucleotide
tactacaaataagattgcttagacgctgccaatgactattaacacgtaactactatcacc

SEQ ID NO: 450529 - DNA, 59 bp, Artificial
  Synthetic oligonucleotide
tactacaagcagtaccaccccaccgcgtgcgaggtcgaaccagccttcggacacagcga

SEQ ID NO: 450530 - DNA, 60 bp, Artificial
  Synthetic oligonucleotide
tactacaagcgctgccatttgattatcagactagcgagaaaggtgggctaacctatgcta

SEQ ID NO: 450531 - DNA, 55 bp, Artificial
  Synthetic oligonucleotide
tactacaattagacccaaatttaggacttaagagaatgataaccaaagcattggc

SEQ ID NO: 450532 - DNA, 60 bp, Artificial
  Synthetic oligonucleotide
tactacacacttacgttgtgagcacacggggcctgatgaactgtcgttcacccacctaca

SEQ ID NO: 450533 - DNA, 54 bp, Artificial
  Synthetic oligonucleotide
tactacacccactggtcaggaagtttgaagtttactttcatgttttgcggtacc

SEQ ID NO: 450534 - DNA, 57 bp, Artificial
  Synthetic oligonucleotide
tactacagaaagtgccatatccccctcgacttctcgtcgactacgggggctattgga

SEQ ID NO: 450535 - DNA, 59 bp, Artificial
  Synthetic oligonucleotide
tactacagatataattacgcgtttgatcttaaaagatggatttatctacattcaattgg

SEQ ID NO: 450536 - DNA, 60 bp, Artificial
  Synthetic oligonucleotide
tactacaggcccgaggacacactaatagccctctaggagatatgttgcgggcttgtcaga

SEQ ID NO: 450537 - DNA, 58 bp, Artificial
  Synthetic oligonucleotide
tactacagtggtgaggacccatccaacctgagggtagttacatcgcagtccccatacg

SEQ ID NO: 450538 - DNA, 51 bp, Artificial
  Synthetic oligonucleotide
tactacagttgtgcaggatacctttaaaggccgaggtcttaacacaaatta

SEQ ID NO: 450539 - DNA, 60 bp, Artificial
  Synthetic oligonucleotide
tactacattaactaaaacagaagaaggcttgatgaagaatggctggtgtcagtctaacac

SEQ ID NO: 450540 - DNA, 60 bp, Artificial
  Synthetic oligonucleotide
tactacattcgtcatgtgttcaagagtgttatttctgtgatgaaagacactacaatgatc

SEQ ID NO: 450541 - DNA, 53 bp, Artificial
  Synthetic oligonucleotide
tactacattcgtgatgtccaatctagggatgtgggattttatatacagcaccc

SEQ ID NO: 450542 - DNA, 60 bp, Artificial
  Synthetic oligonucleotide
tactaccacaaataaagcaggcgatgaaagaggatcacgaagcaataggaagcgagaata

SEQ ID NO: 450543 - DNA, 58 bp, Artificial
  Synthetic oligonucleotide
tactaccaggttggaaattgacgtatgtaggatataatggaaacgacacacgaggaca

SEQ ID NO: 450544 - DNA, 58 bp, Artificial
  Synthetic oligonucleotide
tactaccatagagaaagagatttgtcctaaagcagtagactacaggaattggtcaaaa

SEQ ID NO: 450545 - DNA, 50 bp, Artificial
  Synthetic oligonucleotide
tactacccaagtagatatcaacagggagttatgaaaggtgtgggaccagc

SEQ ID NO: 450546 - DNA, 52 bp, Artificial
  Synthetic oligonucleotide
tactacccagttctctcacagatcggcgaacaaactgtcctaaataaggaaa

SEQ ID NO: 450547 - DNA, 57 bp, Artificial
  Synthetic oligonucleotide
tactacccttgctcctttacagtattcagaacctggtgactcaattttgcgcgggag

SEQ ID NO: 450548 - DNA, 51 bp, Artificial
  Synthetic oligonucleotide
tactaccgtccccgtaagctttactttccccgcccagtgtatacaaggtcc

SEQ ID NO: 450549 - DNA, 57 bp, Artificial
  Synthetic oligonucleotide
tactacctcttctcctaggcctatacggtgacctcaccccggagtggagatcccagc

SEQ ID NO: 450550 - DNA, 54 bp, Artificial
  Synthetic oligonucleotide
tactaccttacccgtgatcccacaacccccctcgcgagggctgcgtgggaaaca

SEQ ID NO: 450551 - DNA, 57 bp, Artificial
  Synthetic oligonucleotide
tactacgaagcttgcgtcggcaacctactacgtgcacactccgtacctgcttactgc

SEQ ID NO: 450552 - DNA, 52 bp, Artificial
  Synthetic oligonucleotide
tactacgaccggagttcgctatacatggtgtaaatcctatgccggggccgct

SEQ ID NO: 450553 - DNA, 58 bp, Artificial
  Synthetic oligonucleotide
tactacgatggcgacacactaaaaccgatcggttcaggtgcgagcgttgtaggagaga

SEQ ID NO: 450554 - DNA, 53 bp, Artificial
  Synthetic oligonucleotide
tactacgtaacggagtagatcctaacttttacgatgaatacatgaggtctcct

SEQ ID NO: 450555 - DNA, 60 bp, Artificial
  Synthetic oligonucleotide
tactacgttgtctacaacggcaaaggacaaggtatctacgatgattgggctcaagcagct

SEQ ID NO: 450556 - DNA, 55 bp, Artificial
  Synthetic oligonucleotide
tactactaagtctgacgggatctctcgccattttatgagtgattatggagcactc

SEQ ID NO: 450557 - DNA, 54 bp, Artificial
  Synthetic oligonucleotide
tactactacagcagccacacgctttatgaaagacctgcatttcacgggcacgaa

SEQ ID NO: 450558 - DNA, 60 bp, Artificial
  Synthetic oligonucleotide
tactactactttcactgatgaccgcgcttaactgtcaattattagcaattttcataatga

SEQ ID NO: 450559 - DNA, 52 bp, Artificial
  Synthetic oligonucleotide
tactactagagagcttacttgcaactcatgtctgtgacttctttaaagagaa

SEQ ID NO: 450560 - DNA, 55 bp, Artificial
  Synthetic oligonucleotide
tactactcgcccaggagagtagagcggagagaggaagtaagaagacgcctccggg

SEQ ID NO: 450561 - DNA, 58 bp, Artificial
  Synthetic oligonucleotide
tactactctagtcgcacccaccgctacggtcccaagctcactagcctactcaacgacc

SEQ ID NO: 450562 - DNA, 57 bp, Artificial
  Synthetic oligonucleotide
tactactcttaattacaactatactaatccctttagcaataacatatcgcctaactc

SEQ ID NO: 450563 - DNA, 56 bp, Artificial
  Synthetic oligonucleotide
tactactgaaaatgtgttcatacaaccaccatttaaacttaaaacatctaagaatg

SEQ ID NO: 450564 - DNA, 59 bp, Artificial
  Synthetic oligonucleotide
tactactgaggtggaggtaccggctatagactctcggccggatgacgagggaggatcag

SEQ ID NO: 450565 - DNA, 60 bp, Artificial
  Synthetic oligonucleotide
tactactgctgagacgctcgatgcgacgaggcgagtagatgatgctacggtggctattag

SEQ ID NO: 450566 - DNA, 57 bp, Artificial
  Synthetic oligonucleotide
tactactggactacataatcaactatcaaccaaggaaaacgacctaacattggctaa

SEQ ID NO: 450567 - DNA, 60 bp, Artificial
  Synthetic oligonucleotide
tactactgtatccatatactcacatattcacaactgcacatattactgcaagctatatct

SEQ ID NO: 450568 - DNA, 54 bp, Artificial
  Synthetic oligonucleotide
tactactgtgcccgtttacgggaacacaatttcaaccccttttgactacatgtg

SEQ ID NO: 450569 - DNA, 54 bp, Artificial
  Synthetic oligonucleotide
tactacttgctgccaagttatgttctgtggcctaaacgacgtaaacgtgtgcac

SEQ ID NO: 450570 - DNA, 53 bp, Artificial
  Synthetic oligonucleotide
tactacttttcggcgtgcgttaaaccgcgtctcggagctcctccgcacctccc

SEQ ID NO: 450571 - DNA, 55 bp, Artificial
  Synthetic oligonucleotide
tactagaactctctaggaagctaagagctgaggtgtcctaatcgcggccatccat

SEQ ID NO: 450572 - DNA, 60 bp, Artificial
  Synthetic oligonucleotide
tactagaatcctcgatgctgtgcaaaagatcacatctacgtttcaaaacccgcaggattt

SEQ ID NO: 450573 - DNA, 56 bp, Artificial
  Synthetic oligonucleotide
tactagacaaaatcgcttccgactacaaatcgttctttacgatcgactggtctggt

SEQ ID NO: 450574 - DNA, 55 bp, Artificial
  Synthetic oligonucleotide
tactagaccctccaacaacacaagaaaaggtataactataggaccaggacaagta

SEQ ID NO: 450575 - DNA, 59 bp, Artificial
  Synthetic oligonucleotide
tactagagataatccatgccctaagcggcccagacccctgggaatccgatggtgggatg

SEQ ID NO: 450576 - DNA, 60 bp, Artificial
  Synthetic oligonucleotide
tactagagcactactgtcgttgcaacctctgcacaccacaccgttgcctagccacaaacc

SEQ ID NO: 450577 - DNA, 54 bp, Artificial
  Synthetic oligonucleotide
tactagaggtactgggcttacccatcgtttgggtaagagggtgtgtattaagtc

SEQ ID NO: 450578 - DNA, 60 bp, Artificial
  Synthetic oligonucleotide
tactagatgctgcgtcatggtggaatatactggatgtaactcagactggagtgctcttcg

SEQ ID NO: 450579 - DNA, 59 bp, Artificial
  Synthetic oligonucleotide
tactagattgagtgctataacgggagttgatgtttgcaaactcctacgtactattatgg

SEQ ID NO: 450580 - DNA, 55 bp, Artificial
  Synthetic oligonucleotide
tactagcaagagatgatctaccgtatacctcagaagcatttatccgagccacacg

SEQ ID NO: 450581 - DNA, 60 bp, Artificial
  Synthetic oligonucleotide
tactagcatctaaatctaacattgtactagaacccattgaaccatctgtattacctgaag

SEQ ID NO: 450582 - DNA, 57 bp, Artificial
  Synthetic oligonucleotide
tactagcccctctctcattcggctactcacgcctagggttggtgggcaacgtagtgg

SEQ ID NO: 450583 - DNA, 52 bp, Artificial
  Synthetic oligonucleotide
tactagcctgcgctctaacccttgtcgcttgcgactcgagattccacaatgt

SEQ ID NO: 450584 - DNA, 53 bp, Artificial
  Synthetic oligonucleotide
tactagctggtcccacgaatgctgagaagttctctcgtgagtacggttggaag

SEQ ID NO: 450585 - DNA, 56 bp, Artificial
  Synthetic oligonucleotide
tactaggaggaaatattgggctatcattaacccctggagactgtttaacatgggac

SEQ ID NO: 450586 - DNA, 57 bp, Artificial
  Synthetic oligonucleotide
tactaggcgttcttcttgctgggctacttttaaggatacggaacgagagtcatgtaa

SEQ ID NO: 450587 - DNA, 60 bp, Artificial
  Synthetic oligonucleotide
tactagggagcttcttgagcaatcgcgattggctgcatctgaaggattgagaaaggtgat

SEQ ID NO: 450588 - DNA, 58 bp, Artificial
  Synthetic oligonucleotide
tactaggggacattacaacttttcttttacatgtcagaacgccgcaactgatgacgac

SEQ ID NO: 450589 - DNA, 57 bp, Artificial
  Synthetic oligonucleotide
tactagtagaggatccagtgctgtactagaggtggcaccggaacctacccctccaac

SEQ ID NO: 450590 - DNA, 54 bp, Artificial
  Synthetic oligonucleotide
tactagtcccaagaactcgtcagggctgaggtacttaagtcgtctgtactctac

SEQ ID NO: 450591 - DNA, 55 bp, Artificial
  Synthetic oligonucleotide
tactagtcctaaacccgtccgttgctgccactttgggcttcggggcgtatatgtc

SEQ ID NO: 450592 - DNA, 60 bp, Artificial
  Synthetic oligonucleotide
tactagtgccatttgttcagtggttcgtagggcattcccccactgcttggctttcagcta

SEQ ID NO: 450593 - DNA, 60 bp, Artificial
  Synthetic oligonucleotide
tactagtgcttatcagtttgatactaaccgtgctatgcattatattaacacatccctgaa

SEQ ID NO: 450594 - DNA, 55 bp, Artificial
  Synthetic oligonucleotide
tactagtggtgtgtactactgcaagtctcgtggtaagcactaccccgtggttgtg

SEQ ID NO: 450595 - DNA, 57 bp, Artificial
  Synthetic oligonucleotide
tactagttacactaaatgactacataactaaatatcaattaaaacttgaatgcgctt

SEQ ID NO: 450596 - DNA, 60 bp, Artificial
  Synthetic oligonucleotide
tactagttatgcaattgcaaactgcagctcctttttgcaagcattgagggcttctaagaa

SEQ ID NO: 450597 - DNA, 55 bp, Artificial
  Synthetic oligonucleotide
tactagttccaccacaaagcgcaaaacagtgcgtgtatctacgtcagccaagcgc

SEQ ID NO: 450598 - DNA, 53 bp, Artificial
  Synthetic oligonucleotide
tactagttccgggtcaaaacctattagtagtacccctatacctggcatacgta

SEQ ID NO: 450599 - DNA, 60 bp, Artificial
  Synthetic oligonucleotide
tactataaaactaagtacactgacgaatggctgagtttatcacgccagacggagacggca

SEQ ID NO: 450600 - DNA, 60 bp, Artificial
  Synthetic oligonucleotide
tactataatcgccacgttagatgctcgtggccttatagcttcatctcgcgcgcatgccat

SEQ ID NO: 450601 - DNA, 60 bp, Artificial
  Synthetic oligonucleotide
tactatacaactaattgttacacaggcgctgaggcattggtcacgaccgctattcatata

SEQ ID NO: 450602 - DNA, 52 bp, Artificial
  Synthetic oligonucleotide
tactatacataccacagtagaagcaagttgccctatagtgacagactgggtt

SEQ ID NO: 450603 - DNA, 60 bp, Artificial
  Synthetic oligonucleotide
tactatacttatgggcctcaatgtccgcgcagcggcactgacgacattatcggcagccca

SEQ ID NO: 450604 - DNA, 60 bp, Artificial
  Synthetic oligonucleotide
tactatacttatgggtctcaatggccgcgcagcggcatccttcacattctcggcgaccca

SEQ ID NO: 450605 - DNA, 55 bp, Artificial
  Synthetic oligonucleotide
tactatacttatgggtctcagaggccgcgcagcggaactgacgacgttctcggca

SEQ ID NO: 450606 - DNA, 53 bp, Artificial
  Synthetic oligonucleotide
tactatagtagcttcaaccgtgaacaaatacggtgtgccaaggcataacgcaa

SEQ ID NO: 450607 - DNA, 59 bp, Artificial
  Synthetic oligonucleotide
tactatagtttaggaacaatacgtcagttaatcttctattacgcaggtggatatgagaa

SEQ ID NO: 450608 - DNA, 55 bp, Artificial
  Synthetic oligonucleotide
tactatcaacctgataaggatctatgggttaatattcagaagcaaggaggggagc

SEQ ID NO: 450609 - DNA, 51 bp, Artificial
  Synthetic oligonucleotide
tactatcactccacacaggtgatgacgtttacatgcgccttgacactttag

SEQ ID NO: 450610 - DNA, 54 bp, Artificial
  Synthetic oligonucleotide
tactatcactttagacctactaaccggctcaaggggtcctcagctataatatta

SEQ ID NO: 450611 - DNA, 60 bp, Artificial
  Synthetic oligonucleotide
tactatcatatacttcctctgatactgatttgagcccgtcaatggtcaaagaggctgaaa

SEQ ID NO: 450612 - DNA, 60 bp, Artificial
  Synthetic oligonucleotide
tactatccaattaaagttactagtcatgattggtatgaaatacaagagagtgagtactac

SEQ ID NO: 450613 - DNA, 55 bp, Artificial
  Synthetic oligonucleotide
tactatcccgtcacttcgtcacgccgccaggggcgctgttatcgtgcgcactgac

SEQ ID NO: 450614 - DNA, 55 bp, Artificial
  Synthetic oligonucleotide
tactatccgactgaagctgcgacacaaataaatgacaattcgtggaaagatacac

SEQ ID NO: 450615 - DNA, 60 bp, Artificial
  Synthetic oligonucleotide
tactatccgtgatgttcgctatcaagcagttgatgcagtaagtaatgtgtggttcacaca

SEQ ID NO: 450616 - DNA, 55 bp, Artificial
  Synthetic oligonucleotide
tactatcgaagggctagtctatggcaatccttcttgtgatctactattgggaggg

SEQ ID NO: 450617 - DNA, 56 bp, Artificial
  Synthetic oligonucleotide
tactatcggacctaattgaaataacgcgagtgtgcacgttttacaacaggatacgg

SEQ ID NO: 450618 - DNA, 55 bp, Artificial
  Synthetic oligonucleotide
tactatcgggccggtccaggctaccacgtgcgagctatacgagctggtcgaggct

SEQ ID NO: 450619 - DNA, 60 bp, Artificial
  Synthetic oligonucleotide
tactatctcagatatccacttcggagctattaaagttctgataaaagcgagattccgaga

SEQ ID NO: 450620 - DNA, 60 bp, Artificial
  Synthetic oligonucleotide
tactatctcctgaggaggtcagtgaaacacagggaactgagagactgacaataacttatt

SEQ ID NO: 450621 - DNA, 55 bp, Artificial
  Synthetic oligonucleotide
tactatgacccatcaaaagacttaatagctgaaatacagaaacaggagtgtggcc

SEQ ID NO: 450622 - DNA, 60 bp, Artificial
  Synthetic oligonucleotide
tactatgacgccaagaatgttctgtcatgggaagtgcctgacgttttgaattctctctcg

SEQ ID NO: 450623 - DNA, 60 bp, Artificial
  Synthetic oligonucleotide
tactatgactatatagtacattactcaatatgctaccctatgacagacacagaagaccaa

SEQ ID NO: 450624 - DNA, 55 bp, Artificial
  Synthetic oligonucleotide
tactatgagaagtggtagtccgattgatttggaggagtatgttcccttagctgtg

SEQ ID NO: 450625 - DNA, 58 bp, Artificial
  Synthetic oligonucleotide
tactatgagatgggtggccatagggtgtacaactccgtttcctcaaacgtaagatctg

SEQ ID NO: 450626 - DNA, 54 bp, Artificial
  Synthetic oligonucleotide
tactatgagttacgaacgtgcctaaacgtgacaaatcgtttgacacagtagcta

SEQ ID NO: 450627 - DNA, 59 bp, Artificial
  Synthetic oligonucleotide
tactatgatcttacaccttccgggatgcgtcccgtgtgtgcaaacagggaacacgtctc

SEQ ID NO: 450628 - DNA, 60 bp, Artificial
  Synthetic oligonucleotide
tactatgcgatgattccgaaccattactaccagtgcatgtcaaacggtagaagcgtctat

SEQ ID NO: 450629 - DNA, 53 bp, Artificial
  Synthetic oligonucleotide
tactatggctgccaagtatttgccaagttatttaacgcgtttgccaaatggtt

SEQ ID NO: 450630 - DNA, 57 bp, Artificial
  Synthetic oligonucleotide
tactatgggtactctcccccaggggatggagcttgtggccttcattgcatttcggct

SEQ ID NO: 450631 - DNA, 60 bp, Artificial
  Synthetic oligonucleotide
tactatgtatcagtatattggagtcctatatatagtgagaccctaatggcataattgtaa

SEQ ID NO: 450632 - DNA, 58 bp, Artificial
  Synthetic oligonucleotide
tactatgtcaatgtacgtacccattggttcgacagagtggtaagggagttgatgccgt

SEQ ID NO: 450633 - DNA, 59 bp, Artificial
  Synthetic oligonucleotide
tactatgttccaggtgaaggcagttccggccggtgatacatctaagcccgtgctgtatt

SEQ ID NO: 450634 - DNA, 60 bp, Artificial
  Synthetic oligonucleotide
tactatgttttatttgctgatgatgcaagtagatatagcagaactggacattgggaagtt

SEQ ID NO: 450635 - DNA, 55 bp, Artificial
  Synthetic oligonucleotide
tactattaacaagagatggagggaataagaatcatacaaatgagaccttcaggcc

SEQ ID NO: 450636 - DNA, 55 bp, Artificial
  Synthetic oligonucleotide
tactattactcaaaaccagatcacatatcagcaagagctgcaagctctggtggcg

SEQ ID NO: 450637 - DNA, 60 bp, Artificial
  Synthetic oligonucleotide
tactattcacagcaagctcatggtcttatattgtggaaacttctaattcagacaatggga

SEQ ID NO: 450638 - DNA, 54 bp, Artificial
  Synthetic oligonucleotide
tactattcattcggtcgagcccaacggtaacgaaaaggattgtaagctccacgt

SEQ ID NO: 450639 - DNA, 50 bp, Artificial
  Synthetic oligonucleotide
tactattcccacagtgaataatcagggacccgggattaggtatcaattca

SEQ ID NO: 450640 - DNA, 60 bp, Artificial
  Synthetic oligonucleotide
tactattgatacattcttggaccgttgtccgaacaagctcgttcaactggcccattgaca

SEQ ID NO: 450641 - DNA, 60 bp, Artificial
  Synthetic oligonucleotide
tactattgtagcaaaacttaggcctagttacatcgtagggaatgaagcaccatatctcaa

SEQ ID NO: 450642 - DNA, 55 bp, Artificial
  Synthetic oligonucleotide
tactattgtttctgtgacgcggcatcgtcgttctttagtctactacaccgctgtg

SEQ ID NO: 450643 - DNA, 54 bp, Artificial
  Synthetic oligonucleotide
tactatttataatgtatttatacgcgacttgccgttggttaattctattaaaac

SEQ ID NO: 450644 - DNA, 55 bp, Artificial
  Synthetic oligonucleotide
tactatttattagagaggggaaaatcgtacacattagccccttgtcaggaagtgc

SEQ ID NO: 450645 - DNA, 54 bp, Artificial
  Synthetic oligonucleotide
tactattttcttcactacttcttctctccccgaattaactcccctcttcgagaa

SEQ ID NO: 450646 - DNA, 57 bp, Artificial
  Synthetic oligonucleotide
tactcaacctcatcaatgtatgtctgccaagtaggactaatgtctccgtacaatcct

SEQ ID NO: 450647 - DNA, 58 bp, Artificial
  Synthetic oligonucleotide
tactcaacgcacctagccgtccaaccatatcagacgttgaaaggtcagctacccttgt

SEQ ID NO: 450648 - DNA, 60 bp, Artificial
  Synthetic oligonucleotide
tactcaactagcgctaattaatgtagttgataatgttaaacatagagtacaaatgtcgtc

SEQ ID NO: 450649 - DNA, 55 bp, Artificial
  Synthetic oligonucleotide
tactcaagcaatgactaaaggattcttgggtgtccaggatttggtttcctttgga

SEQ ID NO: 450650 - DNA, 51 bp, Artificial
  Synthetic oligonucleotide
tactcaagctgataatactctaactcgtaagtatactttagaccgagtcgt

SEQ ID NO: 450651 - DNA, 55 bp, Artificial
  Synthetic oligonucleotide
tactcaaggaatgtcctaggacaatgcattcatatgtacctgcaagtgatctgtt

SEQ ID NO: 450652 - DNA, 60 bp, Artificial
  Synthetic oligonucleotide
tactcaaggattacacacaccgcaacaccgatctgataggaacaaaactctccgtcatgt

SEQ ID NO: 450653 - DNA, 60 bp, Artificial
  Synthetic oligonucleotide
tactcaatactaaagagggagaagcctatctagattggcttcttaatcgaagcccataca

SEQ ID NO: 450654 - DNA, 50 bp, Artificial
  Synthetic oligonucleotide
tactcaatcaaggtgttaactcaatcaatagcttgattagtagttttggc

SEQ ID NO: 450655 - DNA, 59 bp, Artificial
  Synthetic oligonucleotide
tactcaatggaatggagctccgattccgtagttctgcctccgacatcttcggacaaaac

SEQ ID NO: 450656 - DNA, 51 bp, Artificial
  Synthetic oligonucleotide
tactcaatgtatgacctgcgtgactgcaggtccgcgatctgttcaacttac

SEQ ID NO: 450657 - DNA, 60 bp, Artificial
  Synthetic oligonucleotide
tactcacaaggtcgctggtgctcgggtgcgtctcttcggacctgccaagttatacattct

SEQ ID NO: 450658 - DNA, 51 bp, Artificial
  Synthetic oligonucleotide
tactcacacagcagctctgcaccctatcggagggttgatacgcccgccaag

SEQ ID NO: 450659 - DNA, 59 bp, Artificial
  Synthetic oligonucleotide
tactcaccaatttctatcttaacgcaagacatatatccacagaatctacttttaccgac

SEQ ID NO: 450660 - DNA, 53 bp, Artificial
  Synthetic oligonucleotide
tactcacccagtacaaagtttattctccaaaatggggaacttatatacccttc

SEQ ID NO: 450661 - DNA, 60 bp, Artificial
  Synthetic oligonucleotide
tactcaccggggacagcaaacagagcgtgtaccacgaagccaacactgaggcctacatct

SEQ ID NO: 450662 - DNA, 60 bp, Artificial
  Synthetic oligonucleotide
tactcaccttaatatcagatttgaaagtcaaacagagaaatcttctacatcaatcaggat

SEQ ID NO: 450663 - DNA, 51 bp, Artificial
  Synthetic oligonucleotide
tactcacgcaataatttgtccacactattgttgggtgtgacctagcataat

SEQ ID NO: 450664 - DNA, 51 bp, Artificial
  Synthetic oligonucleotide
tactcacgcaattatttgtccacactattgttgagtgtgactcgacacaat

SEQ ID NO: 450665 - DNA, 57 bp, Artificial
  Synthetic oligonucleotide
tactcacggcagaaaattcgaggaacattgattcccggccgttgaactttgtgcaaa

SEQ ID NO: 450666 - DNA, 60 bp, Artificial
  Synthetic oligonucleotide
tactcacgtaccagctctggtatagcagctgccgaacggtagcgagtctgcccttcatca

SEQ ID NO: 450667 - DNA, 59 bp, Artificial
  Synthetic oligonucleotide
tactcactcaacgttaccctctcacacagaacgctcagcgatataccaacccgttagtg

SEQ ID NO: 450668 - DNA, 56 bp, Artificial
  Synthetic oligonucleotide
tactcagaatgaatcccgataatcaaaaaagttcaattcgccacttcccaaattac

SEQ ID NO: 450669 - DNA, 60 bp, Artificial
  Synthetic oligonucleotide
tactcagatatttagttctagatgcagagatggaccctagtgatattatgggtgagacaa

SEQ ID NO: 450670 - DNA, 56 bp, Artificial
  Synthetic oligonucleotide
tactcagcaggcgagctcttctggaaaggatttgaccgcgaatttaagattcatcg

SEQ ID NO: 450671 - DNA, 55 bp, Artificial
  Synthetic oligonucleotide
tactcagcccggcgagtgacacctccgacgacgccgttaccactgtgctcgatgt

SEQ ID NO: 450672 - DNA, 60 bp, Artificial
  Synthetic oligonucleotide
tactcagcttcccctggctttctgtactcgctgccggatacgagaagtaccgcgtgtcat

SEQ ID NO: 450673 - DNA, 54 bp, Artificial
  Synthetic oligonucleotide
tactcaggggtcctcactgtcggggtagcgttgacgcgtcgggtctacccggta

SEQ ID NO: 450674 - DNA, 60 bp, Artificial
  Synthetic oligonucleotide
tactcaggtaagcattgcgacggattacactccgtactgcattgcagtattgggttgcag

SEQ ID NO: 450675 - DNA, 55 bp, Artificial
  Synthetic oligonucleotide
tactcaggtgccaacacggtgtcgtagggatcgtgtccactggggggaacggcct

SEQ ID NO: 450676 - DNA, 55 bp, Artificial
  Synthetic oligonucleotide
tactcagtggcagccccagacccgtagaaagtgcaccatcaccgggtacctcccg

SEQ ID NO: 450677 - DNA, 60 bp, Artificial
  Synthetic oligonucleotide
tactcagtgggatgatttcataatttatagagagctaatgagagttcatatcgactttcg

SEQ ID NO: 450678 - DNA, 55 bp, Artificial
  Synthetic oligonucleotide
tactcatacgtataggcaagtgcctttctcgcagagcatccctgagtgatggcta

SEQ ID NO: 450679 - DNA, 60 bp, Artificial
  Synthetic oligonucleotide
tactcatagcaataattgtgtggaccatagtatatctagaatataggaaactggtaagac

SEQ ID NO: 450680 - DNA, 54 bp, Artificial
  Synthetic oligonucleotide
tactcatagctgcagcagtgctagctgtgctcgtccggccagggatctgttcga

SEQ ID NO: 450681 - DNA, 60 bp, Artificial
  Synthetic oligonucleotide
tactcatatcccaagcggaggcagccttggagaacctcgtattacttaatgcagcgtctc

SEQ ID NO: 450682 - DNA, 60 bp, Artificial
  Synthetic oligonucleotide
tactcatatcccaagcggaggcagctctggagaaccttgtgttactcaatgcggcgtctc

SEQ ID NO: 450683 - DNA, 60 bp, Artificial
  Synthetic oligonucleotide
tactcatatcccaagcggaggcggctttggaaaacctcgtagtgctcaacgcagcatctc

SEQ ID NO: 450684 - DNA, 51 bp, Artificial
  Synthetic oligonucleotide
tactcatattacactaataatgaaatacggactgaccaacactgggtaacc

SEQ ID NO: 450685 - DNA, 60 bp, Artificial
  Synthetic oligonucleotide
tactcatcatctacccgagatatagtaacttcatatcaactgaggcatacctagtcctgt

SEQ ID NO: 450686 - DNA, 57 bp, Artificial
  Synthetic oligonucleotide
tactcatgcctccaatcctgtatatgcgacgttgaaaatacgtatatatttctatga

SEQ ID NO: 450687 - DNA, 60 bp, Artificial
  Synthetic oligonucleotide
tactcatgcctctaatccagtttacgccactcttaagattaggatctacttctacgattc

SEQ ID NO: 450688 - DNA, 60 bp, Artificial
  Synthetic oligonucleotide
tactcatggcgtctcacgttctccgacagaactatttggagatccaatctccaaacaata

SEQ ID NO: 450689 - DNA, 60 bp, Artificial
  Synthetic oligonucleotide
tactcatgtgcaataaacgcgccagctaatacgcaacaatttgagcatattgtacagctt

SEQ ID NO: 450690 - DNA, 60 bp, Artificial
  Synthetic oligonucleotide
tactcattgtatctataaactgcatccaactaacggatcagttgggctaatcgttgaagt

SEQ ID NO: 450691 - DNA, 60 bp, Artificial
  Synthetic oligonucleotide
tactcatttgacccacacgatgacttctctggtgactcagttcgccgtgggatttgtaag

SEQ ID NO: 450692 - DNA, 51 bp, Artificial
  Synthetic oligonucleotide
tactccaactaacgctacatacaatcctactacaggtgatatggtattgac

SEQ ID NO: 450693 - DNA, 58 bp, Artificial
  Synthetic oligonucleotide
tactccacgtacgggaaatttctcgcggatggaggttgctctgggggggcatatgata

SEQ ID NO: 450694 - DNA, 55 bp, Artificial
  Synthetic oligonucleotide
tactccactgcagcattgggcccactcgggcctacgagatcttgcggtggcagtc

SEQ ID NO: 450695 - DNA, 51 bp, Artificial
  Synthetic oligonucleotide
tactccacttgattggagtatactttggaattgaaatcgagatgaccgctc

SEQ ID NO: 450696 - DNA, 60 bp, Artificial
  Synthetic oligonucleotide
tactccagatgagttactccatttgagccttctcaaacttgctcattcaattggagtatt

SEQ ID NO: 450697 - DNA, 60 bp, Artificial
  Synthetic oligonucleotide
tactccagcattggagtcggtgtgtgctggttggtgtacgatgcgcagcctaccggcact

SEQ ID NO: 450698 - DNA, 55 bp, Artificial
  Synthetic oligonucleotide
tactccagctgtaagagctgtatggaatatgcatgagagaccccgtgttgaggcc

SEQ ID NO: 450699 - DNA, 55 bp, Artificial
  Synthetic oligonucleotide
tactcccaaatatgcccaaggacaaagaggcgtgtgcaaaagctccattggaggc

SEQ ID NO: 450700 - DNA, 56 bp, Artificial
  Synthetic oligonucleotide
tactcccactaatgccccggctcttcctcaagttgatgggatcaaccccaaccttc

SEQ ID NO: 450701 - DNA, 51 bp, Artificial
  Synthetic oligonucleotide
tactcccagagaagacaagatatccttgatttgtgggtttatcacacacag

SEQ ID NO: 450702 - DNA, 60 bp, Artificial
  Synthetic oligonucleotide
tactcccagagtgccaacagcttgtttgataggaactataccctgatgttgaaagatctg

SEQ ID NO: 450703 - DNA, 60 bp, Artificial
  Synthetic oligonucleotide
tactcccagcactcagacaaccgatcctaagcccgccaacgctgatctctccgacccgaa

SEQ ID NO: 450704 - DNA, 58 bp, Artificial
  Synthetic oligonucleotide
tactcccaggagattacctgggatgatgacacagagtttgtcggattggaaatacggg

SEQ ID NO: 450705 - DNA, 55 bp, Artificial
  Synthetic oligonucleotide
tactccccacacatgatgcaaatgcggtacgactcgcccgagtgtttccagacac

SEQ ID NO: 450706 - DNA, 60 bp, Artificial
  Synthetic oligonucleotide
tactccccagtacctcatctctccagacgctctcaagagactacacggagagacgttccc

SEQ ID NO: 450707 - DNA, 55 bp, Artificial
  Synthetic oligonucleotide
tactcccctggtggaggtatgggcccaaaatctaatagggcctctgcctgggtta

SEQ ID NO: 450708 - DNA, 60 bp, Artificial
  Synthetic oligonucleotide
tactcccctgtgcgtaaatccatgattagcacagtttattgacacgtagtatgagcaacc

SEQ ID NO: 450709 - DNA, 58 bp, Artificial
  Synthetic oligonucleotide
tactcccgaccagtcgtctcggccaatggcgagccgactgtcaaattatacacttccg

SEQ ID NO: 450710 - DNA, 60 bp, Artificial
  Synthetic oligonucleotide
tactcccgtgccagtcagatgggcagataacaccagtagttacatggcagggaggagcac

SEQ ID NO: 450711 - DNA, 56 bp, Artificial
  Synthetic oligonucleotide
tactccctagtcggaattgaccctttccgtctgctccaaaacagtcaagtcttcag

SEQ ID NO: 450712 - DNA, 55 bp, Artificial
  Synthetic oligonucleotide
tactccctcgtgagtggtatggcaaggtccccaagggggatacttcaaatttcca

SEQ ID NO: 450713 - DNA, 59 bp, Artificial
  Synthetic oligonucleotide
tactccctgacctagcttggatgaggcagatagagggggctgtcttaaagccaacccta

SEQ ID NO: 450714 - DNA, 60 bp, Artificial
  Synthetic oligonucleotide
tactcccttgcaagaggtaccatattctactatgtgaggtacgcagacaccacatatgga

SEQ ID NO: 450715 - DNA, 60 bp, Artificial
  Synthetic oligonucleotide
tactccgaacatgagcgaggcatcattcttcgagcgtctgagtctatgttagctagacgt

SEQ ID NO: 450716 - DNA, 60 bp, Artificial
  Synthetic oligonucleotide
tactccgatggattttggccaggtgtttaatatgtatgacaacgagccaagcactgcgac

SEQ ID NO: 450717 - DNA, 60 bp, Artificial
  Synthetic oligonucleotide
tactccggagcttctcgttgatcttcgtagaaccaacctgcactcatggttcttcgagca

SEQ ID NO: 450718 - DNA, 59 bp, Artificial
  Synthetic oligonucleotide
tactccggcagagtctccaaagaaagtgaccgctactcagggcactcagaccgacgaac

SEQ ID NO: 450719 - DNA, 55 bp, Artificial
  Synthetic oligonucleotide
tactccggctatgacgccagcttaagtcctgtctggtttgcttgtttgaaattgc

SEQ ID NO: 450720 - DNA, 58 bp, Artificial
  Synthetic oligonucleotide
tactccgggtatgatgccagtctaagccccgtgtggtttgcttgtttaaagctactgc

SEQ ID NO: 450721 - DNA, 60 bp, Artificial
  Synthetic oligonucleotide
tactccgtcactgacagatcgttactacattcgccatgtgtttaaacgtgtaatgtctgt

SEQ ID NO: 450722 - DNA, 60 bp, Artificial
  Synthetic oligonucleotide
tactccgtctggctcaacagctagtccatgcgcatgtcaacatgggtctacccctaggtg

SEQ ID NO: 450723 - DNA, 57 bp, Artificial
  Synthetic oligonucleotide
tactccgtgggccgatacactttcaaagacgtgcaatactgggagctttgaaatttg

SEQ ID NO: 450724 - DNA, 57 bp, Artificial
  Synthetic oligonucleotide
tactccgttcgggtcaactaaatgtgatatgactagtgtagttcaatttttagacgc

SEQ ID NO: 450725 - DNA, 54 bp, Artificial
  Synthetic oligonucleotide
tactcctacttacggtaggagtaggcatctttttacttcccgctcgatagacgg

SEQ ID NO: 450726 - DNA, 60 bp, Artificial
  Synthetic oligonucleotide
tactcctatttgtgagtatgatggaaatatggtctcaggttacaaaaaagtgatggcaac

SEQ ID NO: 450727 - DNA, 60 bp, Artificial
  Synthetic oligonucleotide
tactcctcaactgctgtcccagctgtagaagctctctatcggaggattacttccttggta

SEQ ID NO: 450728 - DNA, 55 bp, Artificial
  Synthetic oligonucleotide
tactcctccagctaaagggaatgctatgactgttgacaccggccgcaatacagca

SEQ ID NO: 450729 - DNA, 60 bp, Artificial
  Synthetic oligonucleotide
tactcctccgcggcagagagagaaaactttctctctcttctgaaggaggaggatgttcac

SEQ ID NO: 450730 - DNA, 60 bp, Artificial
  Synthetic oligonucleotide
tactcctgagcttgtcattgtgacacatacagatgagaacaagttcacgtgtcttaccca

SEQ ID NO: 450731 - DNA, 53 bp, Artificial
  Synthetic oligonucleotide
tactcctgattttcaaccttcgcgtgacccaacccctattgctggcatgtcag

SEQ ID NO: 450732 - DNA, 60 bp, Artificial
  Synthetic oligonucleotide
tactcctgctcccacaatccagccagatactccgactccaattacagaccactccgattc

SEQ ID NO: 450733 - DNA, 55 bp, Artificial
  Synthetic oligonucleotide
tactcctggaccgacttcctactcttcaacctgaggaaagtcgacaaagtaggaa

SEQ ID NO: 450734 - DNA, 55 bp, Artificial
  Synthetic oligonucleotide
tactcctgggaagcaactatggcatacgcgtcctcaatgattggtaaagtgtatg

SEQ ID NO: 450735 - DNA, 57 bp, Artificial
  Synthetic oligonucleotide
tactccttcaaatctacgggtatccggcatgcctaggagcaataatcgtccaggtct

SEQ ID NO: 450736 - DNA, 60 bp, Artificial
  Synthetic oligonucleotide
tactccttcacaactatgaattcggaaggaattatgatgtaacccggcaggctgtcacaa

SEQ ID NO: 450737 - DNA, 60 bp, Artificial
  Synthetic oligonucleotide
tactccttgatcccaatgacacggtgaccttcactttcaatggggcattcatagctcctg

SEQ ID NO: 450738 - DNA, 53 bp, Artificial
  Synthetic oligonucleotide
tactcgacgggatggggcgtctattggaccgtcggctgtcgcgtaggggcgag

SEQ ID NO: 450739 - DNA, 60 bp, Artificial
  Synthetic oligonucleotide
tactcgaggccagtggtgatactgtgccactcagaggagatggctttcgagataggtgca

SEQ ID NO: 450740 - DNA, 59 bp, Artificial
  Synthetic oligonucleotide
tactcgccatgtaatcgtgtatgtccttgtgcgtgccgtgaaacctctttccggtggga

SEQ ID NO: 450741 - DNA, 53 bp, Artificial
  Synthetic oligonucleotide
tactcgccgcagtgctctttttcctcacacagccatatctagctaccagacga

SEQ ID NO: 450742 - DNA, 56 bp, Artificial
  Synthetic oligonucleotide
tactcgcctcgtacaggaagtgggccgataggtaacaaggcatccgaatgggttaa

SEQ ID NO: 450743 - DNA, 60 bp, Artificial
  Synthetic oligonucleotide
tactcgcgctgttcaatcccactttccaggcttagggcgcatgaccaaatgtttgtctcc

SEQ ID NO: 450744 - DNA, 50 bp, Artificial
  Synthetic oligonucleotide
tactcgcgtggaacactggcacggggtgggtcaacagatccgccgagaca

SEQ ID NO: 450745 - DNA, 58 bp, Artificial
  Synthetic oligonucleotide
tactcgctcacatgcacgcttggtcccgaacggtgctgccgggccccaatcaatggtg

SEQ ID NO: 450746 - DNA, 55 bp, Artificial
  Synthetic oligonucleotide
tactcgcttagcctctatcggctgtacttatagcgatacattcctgcctacatag

SEQ ID NO: 450747 - DNA, 55 bp, Artificial
  Synthetic oligonucleotide
tactcgctttaactatctgcctactgccaatccgcctgtgggacccccccaaccg

SEQ ID NO: 450748 - DNA, 56 bp, Artificial
  Synthetic oligonucleotide
tactcggaaaagggaaaatggacaacaaatacagagactggagcaccccaactcaa

SEQ ID NO: 450749 - DNA, 52 bp, Artificial
  Synthetic oligonucleotide
tactcggaaacgggataggataattaaccgtaattttttgcgtctgggccga

SEQ ID NO: 450750 - DNA, 60 bp, Artificial
  Synthetic oligonucleotide
tactcggaatacaactggtcttaatgcattcatgaacagtcgacttaactaactcgttca

SEQ ID NO: 450751 - DNA, 60 bp, Artificial
  Synthetic oligonucleotide
tactcggatgatcttgtgctgtatgccgagtcccccaccatgccaaactaccactggtgg

SEQ ID NO: 450752 - DNA, 60 bp, Artificial
  Synthetic oligonucleotide
tactcggcatgtccaatcagttcctagacatggagaagaacgggtgcaagattgacattc

SEQ ID NO: 450753 - DNA, 55 bp, Artificial
  Synthetic oligonucleotide
tactcggcgatcaaagttggtcatacatagtagagaggcctgatgcccaaaatgg

SEQ ID NO: 450754 - DNA, 60 bp, Artificial
  Synthetic oligonucleotide
tactcggctatctatcgatgcatcgctggctgtctgtacagtggtcttgtccagatgttc

SEQ ID NO: 450755 - DNA, 50 bp, Artificial
  Synthetic oligonucleotide
tactcggtatatcaagagttgtattgtgatgaggaacttcctgcttcctt

SEQ ID NO: 450756 - DNA, 54 bp, Artificial
  Synthetic oligonucleotide
tactcgtacgtgtagttacgagtcaagtttcggacgcggagaatgaccgtttgg

SEQ ID NO: 450757 - DNA, 55 bp, Artificial
  Synthetic oligonucleotide
tactcgtcctgaacccgtccgttgctgccaccttaggttttggggcgtacatgtc

SEQ ID NO: 450758 - DNA, 55 bp, Artificial
  Synthetic oligonucleotide
tactcgtcctgaacccgtctgtcgccgctaccttagggttcggggcgtatatgtc

SEQ ID NO: 450759 - DNA, 57 bp, Artificial
  Synthetic oligonucleotide
tactcgtcttgaacccgtccgttgccgccactctaggctttggggcgtacatgtcta

SEQ ID NO: 450760 - DNA, 51 bp, Artificial
  Synthetic oligonucleotide
tactcgtggcactgcagcctagttgtcgaagaagtgacacgcgtctcgcga

SEQ ID NO: 450761 - DNA, 59 bp, Artificial
  Synthetic oligonucleotide
tactcgttcggtggtggagctgtgtcagaaatgtctcaagtatataagatggcgatcag

SEQ ID NO: 450762 - DNA, 58 bp, Artificial
  Synthetic oligonucleotide
tactcgttctgaacccatctgttgccgccaccttgagttttggggcgtatatgtctaa

SEQ ID NO: 450763 - DNA, 51 bp, Artificial
  Synthetic oligonucleotide
tactcgttgccaccagaccctgatcactttgatggctacaaacagcaagct

SEQ ID NO: 450764 - DNA, 57 bp, Artificial
  Synthetic oligonucleotide
tactcgttgcgtattcgccacccggtgcccaaccaccgcaggacaggaaacaagcga

SEQ ID NO: 450765 - DNA, 55 bp, Artificial
  Synthetic oligonucleotide
tactctaaatggtatcttgattcgcgacttcttacccgagaccaccccttgaccc

SEQ ID NO: 450766 - DNA, 59 bp, Artificial
  Synthetic oligonucleotide
tactctaagagccctcccttacatctcagcgctcattaacctcaccccttcttggaaga

SEQ ID NO: 450767 - DNA, 60 bp, Artificial
  Synthetic oligonucleotide
tactctactcgcctctacctgccttgtctagtcctgctccctgtcgctccctggctctac

SEQ ID NO: 450768 - DNA, 54 bp, Artificial
  Synthetic oligonucleotide
tactctacttttacttgggtgctctaattccccgtggcggttcctgaaacagaa

SEQ ID NO: 450769 - DNA, 56 bp, Artificial
  Synthetic oligonucleotide
tactctaggtaaaaaacttagtcttatctacgacaatgagtaaagatcacttagac

SEQ ID NO: 450770 - DNA, 60 bp, Artificial
  Synthetic oligonucleotide
tactctatagactatccaagaaggcacggattacgttctgtaagtccagtcacagagaac

SEQ ID NO: 450771 - DNA, 60 bp, Artificial
  Synthetic oligonucleotide
tactctattgttggacctgccaatgcaaaagtgcctcacagtgctagctcagacacatta

SEQ ID NO: 450772 - DNA, 59 bp, Artificial
  Synthetic oligonucleotide
tactctcatttttgccttctgacttctatccttcagtccgggatctactagataccgcc

SEQ ID NO: 450773 - DNA, 55 bp, Artificial
  Synthetic oligonucleotide
tactctcggaagatgagaatctcaatggagtgaacggagataatgagtaccgtgg

SEQ ID NO: 450774 - DNA, 59 bp, Artificial
  Synthetic oligonucleotide
tactctcggtgtggctccggtccctggatcacgcccaggtgcctggtccactattctta

SEQ ID NO: 450775 - DNA, 56 bp, Artificial
  Synthetic oligonucleotide
tactctcgtttttgcctaatgacttctttccttccgtaagagatcttctagatacc

SEQ ID NO: 450776 - DNA, 60 bp, Artificial
  Synthetic oligonucleotide
tactctctagttggaatagatcccttccgtctgctgcaaaacggtcaggtcttcagtcta

SEQ ID NO: 450777 - DNA, 60 bp, Artificial
  Synthetic oligonucleotide
tactctctcgcacgagtataatctttttggtctgtgccgtggtgacatcattttggggca

SEQ ID NO: 450778 - DNA, 60 bp, Artificial
  Synthetic oligonucleotide
tactctctgccacctgatcctaagtactttgatggttacgaccaacagagtgtggtcata

SEQ ID NO: 450779 - DNA, 59 bp, Artificial
  Synthetic oligonucleotide
tactctgaacaagccattatcaacctgttacgagtgaactggaacgtaattggatatat

SEQ ID NO: 450780 - DNA, 59 bp, Artificial
  Synthetic oligonucleotide
tactctgacgccactcacctccggtaccgtcaccattaagggggcttcagtgtcatcag

SEQ ID NO: 450781 - DNA, 60 bp, Artificial
  Synthetic oligonucleotide
tactctgagcatgaacgaggcattattcttcgagcgtccgaatctatgttagctagacgt

SEQ ID NO: 450782 - DNA, 60 bp, Artificial
  Synthetic oligonucleotide
tactctgagggtgtatatgaggattaaacacgtcagagcatggatcccaaggcctctgag

SEQ ID NO: 450783 - DNA, 51 bp, Artificial
  Synthetic oligonucleotide
tactctgataacagacggaccatctgacgcacaagctttctataagatact

SEQ ID NO: 450784 - DNA, 60 bp, Artificial
  Synthetic oligonucleotide
tactctgcgagtgctatgatgccggagcagcctggtacgagcttacgcctgctgagacta

SEQ ID NO: 450785 - DNA, 53 bp, Artificial
  Synthetic oligonucleotide
tactctggtatcttggtacctttggggggcctgttttatctcccttcccagtg

SEQ ID NO: 450786 - DNA, 56 bp, Artificial
  Synthetic oligonucleotide
tactctggtcccctaggggctgtgcatccttccttacttaagaactttttcgcatg

SEQ ID NO: 450787 - DNA, 60 bp, Artificial
  Synthetic oligonucleotide
tactctgtaggatatgcattaagcaatagtcaccatagtgttgattatatagaccaagag

SEQ ID NO: 450788 - DNA, 60 bp, Artificial
  Synthetic oligonucleotide
tactctgtgcaactacatctggaagcaacaaacgacggaagttgtgtagtggtaacacta

SEQ ID NO: 450789 - DNA, 50 bp, Artificial
  Synthetic oligonucleotide
tactcttaagatgttttatcatttgtttcgttgtgtgtgttgtaatcctt

SEQ ID NO: 450790 - DNA, 55 bp, Artificial
  Synthetic oligonucleotide
tactcttaattgggaattacgagaaattaagtccggacctacatgaaggtatgga

SEQ ID NO: 450791 - DNA, 57 bp, Artificial
  Synthetic oligonucleotide
tactcttaccaccttccgcctacttggtcgttagcgctgactttggcacacctgtcg

SEQ ID NO: 450792 - DNA, 58 bp, Artificial
  Synthetic oligonucleotide
tactcttataaattgcagcgctaattaccaaagcgaagtagattacatattaaacgaa

SEQ ID NO: 450793 - DNA, 60 bp, Artificial
  Synthetic oligonucleotide
tactcttcaaacctacttatgacatcgtggtccacgctgaaaggagagatcgcagtcaac

SEQ ID NO: 450794 - DNA, 54 bp, Artificial
  Synthetic oligonucleotide
tactcttctggtgggtacgcgcagctggcctcttacttcaaccctggcggtagc

SEQ ID NO: 450795 - DNA, 56 bp, Artificial
  Synthetic oligonucleotide
tactcttgaactaagaagtaaatactgggctataagaaccaggagcggaggaaaca

SEQ ID NO: 450796 - DNA, 54 bp, Artificial
  Synthetic oligonucleotide
tactcttggaccagtcaagaaataccaacgtttcttcgactcccaagaccgccc

SEQ ID NO: 450797 - DNA, 54 bp, Artificial
  Synthetic oligonucleotide
tactctttaacttcatctttctgattaattctcctaagagtcttagattaatta

SEQ ID NO: 450798 - DNA, 50 bp, Artificial
  Synthetic oligonucleotide
tactctttatatgatgatgttggtccaggattgcataggaagattgtcgg

SEQ ID NO: 450799 - DNA, 58 bp, Artificial
  Synthetic oligonucleotide
tactctttgtcggagttgatgggagtacccgcgtgtcagggggcactacagcttacaa

SEQ ID NO: 450800 - DNA, 59 bp, Artificial
  Synthetic oligonucleotide
tactgaaactaacgatggagtgttgatcgtgaacactagtaagtaccccaacatgtatg

SEQ ID NO: 450801 - DNA, 51 bp, Artificial
  Synthetic oligonucleotide
tactgaacaagacaaatggtacagaccttatagaatagttgagccagtaac

SEQ ID NO: 450802 - DNA, 55 bp, Artificial
  Synthetic oligonucleotide
tactgaacatggatcgaaacctaccttcaacagctaggtatattagaccaaactt

SEQ ID NO: 450803 - DNA, 52 bp, Artificial
  Synthetic oligonucleotide
tactgaaccagatggtcgaaggggctatttcacctggccacatacaatctca

SEQ ID NO: 450804 - DNA, 56 bp, Artificial
  Synthetic oligonucleotide
tactgaacgaatggctgtgcaaccccatggacataacgttgtattattatcagcag

SEQ ID NO: 450805 - DNA, 60 bp, Artificial
  Synthetic oligonucleotide
tactgaagcacagatttgaattaattgagggaagagaccgaacaatggcctggacagtgg

SEQ ID NO: 450806 - DNA, 57 bp, Artificial
  Synthetic oligonucleotide
tactgaagcccaaaacatatttagacttttggaagataccattcaactattaggcga

SEQ ID NO: 450807 - DNA, 51 bp, Artificial
  Synthetic oligonucleotide
tactgaagggccaatatctgaaggaaatgacacaatcacactcccatgcag

SEQ ID NO: 450808 - DNA, 55 bp, Artificial
  Synthetic oligonucleotide
tactgaagggtcaaatagcactgagagagataatgcaacactcatactcccatgc

SEQ ID NO: 450809 - DNA, 60 bp, Artificial
  Synthetic oligonucleotide
tactgaataatgagttgacacctatggccacctcatcacaggtcaaattggggttcacgc

SEQ ID NO: 450810 - DNA, 60 bp, Artificial
  Synthetic oligonucleotide
tactgaatgcagtgcttataatcaggtcattttatatggaggattggtgggttggtcaag

SEQ ID NO: 450811 - DNA, 58 bp, Artificial
  Synthetic oligonucleotide
tactgaattcatttttgagattaatagagaacgaccgaaccacagtgtgtgttcgtct

SEQ ID NO: 450812 - DNA, 60 bp, Artificial
  Synthetic oligonucleotide
tactgacacaaactgggttcagtggatgattaaagatagtatggatcaacagccgcttaa

SEQ ID NO: 450813 - DNA, 60 bp, Artificial
  Synthetic oligonucleotide
tactgacacccagacaatgaacactatgttgggatcagtgacccgtatgtttacacagtg

SEQ ID NO: 450814 - DNA, 58 bp, Artificial
  Synthetic oligonucleotide
tactgacagtggagttagatctgaagtccctattgttaaagaatctccaggtacttta

SEQ ID NO: 450815 - DNA, 59 bp, Artificial
  Synthetic oligonucleotide
tactgacatttcttcgtctgttagtacgatttcaacgcagacttcgactattagtagaa

SEQ ID NO: 450816 - DNA, 54 bp, Artificial
  Synthetic oligonucleotide
tactgaccatcgtctctcatacgagctcggtccgcagcgacaaaaattcacccg

SEQ ID NO: 450817 - DNA, 57 bp, Artificial
  Synthetic oligonucleotide
tactgacgcgattggttggtttcagtacgtctcaaagcatgctgcgcggggtgtgaa

SEQ ID NO: 450818 - DNA, 60 bp, Artificial
  Synthetic oligonucleotide
tactgacgctagagcagttaccagatgaggaattactaaaggatatggtagaactagcga

SEQ ID NO: 450819 - DNA, 60 bp, Artificial
  Synthetic oligonucleotide
tactgagaacgccttgctattgtatatggcatgtactcatgcctctaaccccgtgtatgc

SEQ ID NO: 450820 - DNA, 55 bp, Artificial
  Synthetic oligonucleotide
tactgagaatgctctattgttgtatatggcttgtacacattctagtaatcccgtg

SEQ ID NO: 450821 - DNA, 60 bp, Artificial
  Synthetic oligonucleotide
tactgagaatggtaagttcacaggcttgggaatttatgacaatgttatgattctaccaac

SEQ ID NO: 450822 - DNA, 60 bp, Artificial
  Synthetic oligonucleotide
tactgagactgtgtgatcgatatccattgactgtagagactaaagggggaactgaacctt

SEQ ID NO: 450823 - DNA, 60 bp, Artificial
  Synthetic oligonucleotide
tactgagcgtaacagcgctactgagaccatgctcggtgtggtggagaaatgtggctacga

SEQ ID NO: 450824 - DNA, 59 bp, Artificial
  Synthetic oligonucleotide
tactgaggcagtgaagtaccttagtgtcgacttcacgaccactttcccgcagttgatgg

SEQ ID NO: 450825 - DNA, 55 bp, Artificial
  Synthetic oligonucleotide
tactgaggcgacgtcgggtccgcgttagtgtcagatccgcgacagacactgtgtt

SEQ ID NO: 450826 - DNA, 59 bp, Artificial
  Synthetic oligonucleotide
tactgagggaggttcactagtggagctgaactggcttcaggttgacccaaattcaatgt

SEQ ID NO: 450827 - DNA, 60 bp, Artificial
  Synthetic oligonucleotide
tactgaggtgtccaactgggactgtattcgtattgagaggatatacgtatcctcccaagc

SEQ ID NO: 450828 - DNA, 53 bp, Artificial
  Synthetic oligonucleotide
tactgagtactgaatgattaaccgaataatgccagaaatgcttttgaatccac

SEQ ID NO: 450829 - DNA, 55 bp, Artificial
  Synthetic oligonucleotide
tactgatacttggccttcaaatagtactaggaatgatacgatcacgcttccatgc

SEQ ID NO: 450830 - DNA, 55 bp, Artificial
  Synthetic oligonucleotide
tactgatagaccacttgtattcgcatacactagcaacactgctaactctgcaaac

SEQ ID NO: 450831 - DNA, 55 bp, Artificial
  Synthetic oligonucleotide
tactgatccacagtgtagcagcatggcacatagggaaaggcgtccttatttgctt

SEQ ID NO: 450832 - DNA, 52 bp, Artificial
  Synthetic oligonucleotide
tactgatccgtaccctttggtcttctataggaatcataccttgcgaggggtc

SEQ ID NO: 450833 - DNA, 60 bp, Artificial
  Synthetic oligonucleotide
tactgatgccactgaacacaatggcacacgcaccaatttcactcaaaatagcaccctgaa

SEQ ID NO: 450834 - DNA, 60 bp, Artificial
  Synthetic oligonucleotide
tactgatgcgtctcgaaaataagaagctcggactatcaagcgataagtggctgttcacag

SEQ ID NO: 450835 - DNA, 60 bp, Artificial
  Synthetic oligonucleotide
tactgatgtagttgacggcgtaaatcacaaactagatgttactactgcgacctgtactat

SEQ ID NO: 450836 - DNA, 55 bp, Artificial
  Synthetic oligonucleotide
tactgatgtggaagggaattgggctttgacggggggtatggagttgacaagggac

SEQ ID NO: 450837 - DNA, 59 bp, Artificial
  Synthetic oligonucleotide
tactgatgttaaagagagaaatgctaatgataccactagtactactagtccccctaata

SEQ ID NO: 450838 - DNA, 58 bp, Artificial
  Synthetic oligonucleotide
tactgattcgtatatggcccagttacgaagctactgggccttatatgtgttttctaag

SEQ ID NO: 450839 - DNA, 59 bp, Artificial
  Synthetic oligonucleotide
tactgattgtcttaaagttctttgctgcaatcctacacaacagttctcaagaaaatcgg

SEQ ID NO: 450840 - DNA, 58 bp, Artificial
  Synthetic oligonucleotide
tactgatttactccagtcagttaggactcctgaggttatcaagtattgtgaagttaat

SEQ ID NO: 450841 - DNA, 60 bp, Artificial
  Synthetic oligonucleotide
tactgatttcgacacggctactgataacatggagagtttttcaccggaagacatacagac

SEQ ID NO: 450842 - DNA, 60 bp, Artificial
  Synthetic oligonucleotide
tactgcaaagtgtcactatgaacgagattaccaatatgagacaagttggggctgtaatcc

SEQ ID NO: 450843 - DNA, 60 bp, Artificial
  Synthetic oligonucleotide
tactgcaatacatcaagactgtttaatagcacatttgataacacatctctggttaatggc

SEQ ID NO: 450844 - DNA, 60 bp, Artificial
  Synthetic oligonucleotide
tactgcaccaggcatggtaaaccatcctgctgcatatttacaggtcaagcatggtgacac

SEQ ID NO: 450845 - DNA, 59 bp, Artificial
  Synthetic oligonucleotide
tactgcagcaccgtattcgtgaagtaataaattacagtgacgtttgtacaaatcactag

SEQ ID NO: 450846 - DNA, 60 bp, Artificial
  Synthetic oligonucleotide
tactgcagcagagagcagtcaagttggacttcgccccgccactgaaggcactagaaaccc

SEQ ID NO: 450847 - DNA, 59 bp, Artificial
  Synthetic oligonucleotide
tactgcagcgactcctgccgaaacaaggcctactatcagcccgttaagcccgagtatgt

SEQ ID NO: 450848 - DNA, 60 bp, Artificial
  Synthetic oligonucleotide
tactgcagcgtacctgactatctgccatcagcgctacctacgaacacaggccatttccaa

SEQ ID NO: 450849 - DNA, 57 bp, Artificial
  Synthetic oligonucleotide
tactgcatatcactcccagtccgagttggcatgaacatgaatgaggatggtccaata

SEQ ID NO: 450850 - DNA, 55 bp, Artificial
  Synthetic oligonucleotide
tactgcatgtgcaccagtagctctgtaactcttaaatccagatgcatcattgatc

SEQ ID NO: 450851 - DNA, 60 bp, Artificial
  Synthetic oligonucleotide
tactgcattcactatacctagtataaataatgagacaccagggactagatatcagtacaa

SEQ ID NO: 450852 - DNA, 53 bp, Artificial
  Synthetic oligonucleotide
tactgcatttgggccggtttacctagtcaaaccctatggtctaggactgaaaa

SEQ ID NO: 450853 - DNA, 57 bp, Artificial
  Synthetic oligonucleotide
tactgccaactggatccttcgcgggacgtcctttgtttacgtcccgtcagcgctgaa

SEQ ID NO: 450854 - DNA, 55 bp, Artificial
  Synthetic oligonucleotide
tactgccaagcactgggacaggcccactcgcacccactactcagacacccctacc

SEQ ID NO: 450855 - DNA, 60 bp, Artificial
  Synthetic oligonucleotide
tactgccattcaacagattagctgagcaaacgaaaccgtcagccgtcgctcgcctgttga

SEQ ID NO: 450856 - DNA, 50 bp, Artificial
  Synthetic oligonucleotide
tactgcccatgagaatagtttgagttccaatgaattttattcgggcatgc

SEQ ID NO: 450857 - DNA, 60 bp, Artificial
  Synthetic oligonucleotide
tactgccccagattcctcattcctccacgaagctatgcaggtcacgtctcaggtcatggt

SEQ ID NO: 450858 - DNA, 55 bp, Artificial
  Synthetic oligonucleotide
tactgcccgatatgaccccaaacactgagatgtcactacgaggaataagggtcag

SEQ ID NO: 450859 - DNA, 56 bp, Artificial
  Synthetic oligonucleotide
tactgcccgatatgactccaagtaccgagatgtcgctgagggggataagagtcagc

SEQ ID NO: 450860 - DNA, 58 bp, Artificial
  Synthetic oligonucleotide
tactgccctcggcctgttctcacacactacgaccacaaaggcaaggaccgttaccaga

SEQ ID NO: 450861 - DNA, 51 bp, Artificial
  Synthetic oligonucleotide
tactgcctgagtacgcttacttagcctgcgacttcttcaaatttgaagacg

SEQ ID NO: 450862 - DNA, 53 bp, Artificial
  Synthetic oligonucleotide
tactgcgaccaggttatgtcgaacggtgaatcccggttccctgaggctattcc

SEQ ID NO: 450863 - DNA, 55 bp, Artificial
  Synthetic oligonucleotide
tactgcgattagtgacccacagttcattaaccagggaacgtgggacgctacacta

SEQ ID NO: 450864 - DNA, 55 bp, Artificial
  Synthetic oligonucleotide
tactgcgcgaagcccatgtctcacctggatcaatagtgattgggcttgggagccc

SEQ ID NO: 450865 - DNA, 55 bp, Artificial
  Synthetic oligonucleotide
tactgcgcgacacaacgcacatttcgcagacggccatgccacaaggggtggatga

SEQ ID NO: 450866 - DNA, 57 bp, Artificial
  Synthetic oligonucleotide
tactgcggacctcttcactgccacagtcacaacagcctatccacaactctttcttca

SEQ ID NO: 450867 - DNA, 52 bp, Artificial
  Synthetic oligonucleotide
tactgcgggctccatgtcatttcaacggggcaaccggagcatccagcctgcg

SEQ ID NO: 450868 - DNA, 60 bp, Artificial
  Synthetic oligonucleotide
tactgcgtcactgcgagcattcacggaggccatgaccaggtactcagctcccccagggga

SEQ ID NO: 450869 - DNA, 60 bp, Artificial
  Synthetic oligonucleotide
tactgcgtgcattctggcttgatctattttgatcccattaatactcaactaccagtccaa

SEQ ID NO: 450870 - DNA, 60 bp, Artificial
  Synthetic oligonucleotide
tactgctaccggcatagaccacggttacggaccatgactggtcacacgcggattcaacac

SEQ ID NO: 450871 - DNA, 60 bp, Artificial
  Synthetic oligonucleotide
tactgctcaatcaactatgaaggcagaagaactcacaccaggtagatttcgtacaatagt

SEQ ID NO: 450872 - DNA, 60 bp, Artificial
  Synthetic oligonucleotide
tactgctcccattggatttgctgctccgactgattcgatgtgcgatagtggtagtattga

SEQ ID NO: 450873 - DNA, 56 bp, Artificial
  Synthetic oligonucleotide
tactgctcgggccagccgatggaatggtttccaaggggtggaggttgctggcgcct

SEQ ID NO: 450874 - DNA, 52 bp, Artificial
  Synthetic oligonucleotide
tactgctctaattggacgtgggaaaggtgaagaagttggcgacggctatggg

SEQ ID NO: 450875 - DNA, 60 bp, Artificial
  Synthetic oligonucleotide
tactgctgagatgggagctgacgaaggcacaacgcagcgctctactcaggttattctgct

SEQ ID NO: 450876 - DNA, 55 bp, Artificial
  Synthetic oligonucleotide
tactgctgatagcccaggctgaggccgccttagagaacctggtggtcctcaatgc

SEQ ID NO: 450877 - DNA, 58 bp, Artificial
  Synthetic oligonucleotide
tactgctggcactacccgccaaaaccttgcggtattgtgcccgcaaggaacgtgtgtg

SEQ ID NO: 450878 - DNA, 60 bp, Artificial
  Synthetic oligonucleotide
tactgctggcactatcctccaagaccttgcggtattgtgcccgcacagagtgtatgtggc

SEQ ID NO: 450879 - DNA, 60 bp, Artificial
  Synthetic oligonucleotide
tactgctggcattaccccccaaggccttgcggtttcgtgccagcacagaccgtatgtggc

SEQ ID NO: 450880 - DNA, 60 bp, Artificial
  Synthetic oligonucleotide
tactgctgtccccattgtccaaggcacaaacaagcgacgatcatggacgtacaggcccat

SEQ ID NO: 450881 - DNA, 60 bp, Artificial
  Synthetic oligonucleotide
tactgcttaatgtgctaggcagtggtgaagagttacctgatcccctaagtccaggagaac

SEQ ID NO: 450882 - DNA, 60 bp, Artificial
  Synthetic oligonucleotide
tactgcttctagccatgatgtttagtgatgcatttgcaaccaatttcaaagatattcgaa

SEQ ID NO: 450883 - DNA, 60 bp, Artificial
  Synthetic oligonucleotide
tactgcttggaggatgagtcgtcgatgtcaattgctcttgggccggtgtatctcatgctt

SEQ ID NO: 450884 - DNA, 57 bp, Artificial
  Synthetic oligonucleotide
tactgcttgtttacgaattaaatcgaagtggactgctggcgggaaatgagaaaattc

SEQ ID NO: 450885 - DNA, 60 bp, Artificial
  Synthetic oligonucleotide
tactgctttgcttaatgcatcctgtgcagcaatggatgattttcaactaattcccatgat

SEQ ID NO: 450886 - DNA, 60 bp, Artificial
  Synthetic oligonucleotide
tactggaaaacaagtctctgctcgagactcatcctctttaccagaatccggagccagccg

SEQ ID NO: 450887 - DNA, 57 bp, Artificial
  Synthetic oligonucleotide
tactggaaaccacaaagaaggacctggggattggtcatgcagctgctgaaaaccacc

SEQ ID NO: 450888 - DNA, 60 bp, Artificial
  Synthetic oligonucleotide
tactggaacgaatggaggaagatgggtagttctgacggaagagattgctcgcgcgatcga

SEQ ID NO: 450889 - DNA, 52 bp, Artificial
  Synthetic oligonucleotide
tactggaaggctatgttccgaactaaaccgggtaattatactcgagttaaac

SEQ ID NO: 450890 - DNA, 59 bp, Artificial
  Synthetic oligonucleotide
tactggaatttaatttgctcgaccagagaataatctggcaaaattggtacgcattcacg

SEQ ID NO: 450891 - DNA, 51 bp, Artificial
  Synthetic oligonucleotide
tactggacacaataggttctatgcacatttgatgcacgaggaaaaaaaacg

SEQ ID NO: 450892 - DNA, 56 bp, Artificial
  Synthetic oligonucleotide
tactggaccttaaagtcattaaacccagtaaaagccctcacatggcaccagccttc

SEQ ID NO: 450893 - DNA, 60 bp, Artificial
  Synthetic oligonucleotide
tactggagacaaatgtctcaactctgaccactgacttagcgtcgctgaacacgagggtca

SEQ ID NO: 450894 - DNA, 56 bp, Artificial
  Synthetic oligonucleotide
tactggagacgaaggtatccaaggtacaccaggaggagaacaacaaacaggaggta

SEQ ID NO: 450895 - DNA, 60 bp, Artificial
  Synthetic oligonucleotide
tactggagatgtgccacagcacacagattggcgggataaggatggtggacattcttaggc

SEQ ID NO: 450896 - DNA, 55 bp, Artificial
  Synthetic oligonucleotide
tactggaggccgcctgtacacaatgtcccggggctcgagcacctctggtacgagt

SEQ ID NO: 450897 - DNA, 54 bp, Artificial
  Synthetic oligonucleotide
tactggagtactctcgggtaacccatgggtacattctggaggatcagacattga

SEQ ID NO: 450898 - DNA, 60 bp, Artificial
  Synthetic oligonucleotide
tactggagtggttatcgcagacagccaattgtgaacattgatgatttcggagctgtggca

SEQ ID NO: 450899 - DNA, 60 bp, Artificial
  Synthetic oligonucleotide
tactggatgcactaccggatggttgggtgtattgtgatgcagatggctcccaattcgaca

SEQ ID NO: 450900 - DNA, 55 bp, Artificial
  Synthetic oligonucleotide
tactggatggggatatcgcttatatgaagaaagtgctgatggaggtttaactcct

SEQ ID NO: 450901 - DNA, 59 bp, Artificial
  Synthetic oligonucleotide
tactggattacacacaagtatattcgagcacgtttcagtacatcaccggggatagaacc

SEQ ID NO: 450902 - DNA, 60 bp, Artificial
  Synthetic oligonucleotide
tactggattcctaccaacttcgggcatgtatgctctgaccactaaggagacattaagtgt

SEQ ID NO: 450903 - DNA, 55 bp, Artificial
  Synthetic oligonucleotide
tactggattgcctcaaaattaggcctgtccgtcacgccccaagagtgtgaacggg

SEQ ID NO: 450904 - DNA, 55 bp, Artificial
  Synthetic oligonucleotide
tactggattgtaaggccttcgggcctacaatgagtcttacacctaggggtatacc

SEQ ID NO: 450905 - DNA, 55 bp, Artificial
  Synthetic oligonucleotide
tactggcaaagctgtctccgacgtgcactgcgatgtgcacacaaacgtgtacccc

SEQ ID NO: 450906 - DNA, 60 bp, Artificial
  Synthetic oligonucleotide
tactggcacctgcggaagaaagctggagacactcaggtacctgctgggtactttgactgg

SEQ ID NO: 450907 - DNA, 60 bp, Artificial
  Synthetic oligonucleotide
tactggcatactgtcatgactcaccagatcttgtgatgcaactccataaaccagtgattg

SEQ ID NO: 450908 - DNA, 60 bp, Artificial
  Synthetic oligonucleotide
tactggcccatgcccagcaaatatcaatcatcaagttgggtggctcacatttgcaagaga

SEQ ID NO: 450909 - DNA, 50 bp, Artificial
  Synthetic oligonucleotide
tactggcgacggggcgtttgactttggggcgtgtgtgggggatgctaatc

SEQ ID NO: 450910 - DNA, 58 bp, Artificial
  Synthetic oligonucleotide
tactggcgtacaggtaagtcaattacctaatttcgtcacagtcgccaaggccactaca

SEQ ID NO: 450911 - DNA, 55 bp, Artificial
  Synthetic oligonucleotide
tactggcgtacccgagtcccgcattagtgcgcaatcaacggatgattcaatctcc

SEQ ID NO: 450912 - DNA, 60 bp, Artificial
  Synthetic oligonucleotide
tactggctcaaataaatgcaatgaacccctcactgctagaggaatggcaattagggtttg

SEQ ID NO: 450913 - DNA, 55 bp, Artificial
  Synthetic oligonucleotide
tactggctctacaaggccggtgtgactccagagaccttcccaactatctcacagt

SEQ ID NO: 450914 - DNA, 59 bp, Artificial
  Synthetic oligonucleotide
tactgggaaggccctttgtgtttctgatgtcacaagaggtaatggtattacacacagag

SEQ ID NO: 450915 - DNA, 54 bp, Artificial
  Synthetic oligonucleotide
tactgggacagaccccctagaggcaatctaagagacaccccctactacccctgg

SEQ ID NO: 450916 - DNA, 59 bp, Artificial
  Synthetic oligonucleotide
tactgggaggtggccatgtctgaactctccacgacaccggcccttcgtcctctgcttcc

SEQ ID NO: 450917 - DNA, 57 bp, Artificial
  Synthetic oligonucleotide
tactgggatataacttccgtgaaggtattgaataccggtttgatattagtcgtgatg

SEQ ID NO: 450918 - DNA, 60 bp, Artificial
  Synthetic oligonucleotide
tactgggcacctaattctatgagcacctccagctattcagggcgtttctctcgccccact

SEQ ID NO: 450919 - DNA, 60 bp, Artificial
  Synthetic oligonucleotide
tactgggcgccaccatctacctcataggctttgatgggacaacggtaatcaccagggctg

SEQ ID NO: 450920 - DNA, 57 bp, Artificial
  Synthetic oligonucleotide
tactggggtagtgtgaaggaagaccgcataagctatggaggcccgtggaggtttgac

SEQ ID NO: 450921 - DNA, 55 bp, Artificial
  Synthetic oligonucleotide
tactggggttgaagaatctacactgtcttactgtgggtacataacagcctggcta

SEQ ID NO: 450922 - DNA, 59 bp, Artificial
  Synthetic oligonucleotide
tactgggtacggccgtgcttgggtaaaaaatgtttcgagtgatattgagaagcagatga

SEQ ID NO: 450923 - DNA, 60 bp, Artificial
  Synthetic oligonucleotide
tactgggtcattgaatctgccctctatgtcaatccatgtgggggcattggggtcaattcc

SEQ ID NO: 450924 - DNA, 52 bp, Artificial
  Synthetic oligonucleotide
tactgggtcccagaccatactacgtgggtttgctctcttacgttgtgtacta

SEQ ID NO: 450925 - DNA, 55 bp, Artificial
  Synthetic oligonucleotide
tactgggtgctcgaacaagccccttattctgaacttgcacaactcggtaaagctc

SEQ ID NO: 450926 - DNA, 56 bp, Artificial
  Synthetic oligonucleotide
tactggtaaagttatttgtatttcggatgttacccgtggcaatggtattactcatc

SEQ ID NO: 450927 - DNA, 57 bp, Artificial
  Synthetic oligonucleotide
tactggtaagaggcaattctccagtgttcaattacaacaaggccaccaaaaggctta

SEQ ID NO: 450928 - DNA, 60 bp, Artificial
  Synthetic oligonucleotide
tactggtaagatatattatcatggaatggatgtgcctgaccaggtagacctggaggaacc

SEQ ID NO: 450929 - DNA, 60 bp, Artificial
  Synthetic oligonucleotide
tactggtagtactactgctattacaccagcgtgtccacaggtgacctttgagccaattcc

SEQ ID NO: 450930 - DNA, 58 bp, Artificial
  Synthetic oligonucleotide
tactggtattgttcgttgtgttagtgatgttacacgtggatccggaattacccacaga

SEQ ID NO: 450931 - DNA, 60 bp, Artificial
  Synthetic oligonucleotide
tactggtcctgttatgcacatttacagctacatatgcagacacaatatgtataggctacc

SEQ ID NO: 450932 - DNA, 60 bp, Artificial
  Synthetic oligonucleotide
tactggtgatcgcttccttgaattgcaagttcagctctactgggaatagatccaaagtgc

SEQ ID NO: 450933 - DNA, 54 bp, Artificial
  Synthetic oligonucleotide
tactggtgcgttgtattcaatcaacagtaactcagaatgttggtatcaacgttc

SEQ ID NO: 450934 - DNA, 54 bp, Artificial
  Synthetic oligonucleotide
tactggtggctttgaggtgacttcttcagccacaactacccctgctgtgttgga

SEQ ID NO: 450935 - DNA, 59 bp, Artificial
  Synthetic oligonucleotide
tactggtgtgaatatgatcaccgtggattttttcctatggttccaaacaagctgtctcc

SEQ ID NO: 450936 - DNA, 55 bp, Artificial
  Synthetic oligonucleotide
tactggttacaacgggcccagggtcagaacaatggtatttgttggggcaatcaat

SEQ ID NO: 450937 - DNA, 58 bp, Artificial
  Synthetic oligonucleotide
tactggttaccatgaaacagagaacctatactcagagattgtcctgaaatcgaaattt

SEQ ID NO: 450938 - DNA, 55 bp, Artificial
  Synthetic oligonucleotide
tactggttactccttgccggttgcgagaatcatcacacatagtgtgaatcgagga

SEQ ID NO: 450939 - DNA, 60 bp, Artificial
  Synthetic oligonucleotide
tactggtttaccagataaagctggcaactctcactacgactacatactcgatacaactgt

SEQ ID NO: 450940 - DNA, 59 bp, Artificial
  Synthetic oligonucleotide
tactgtaaaacatacccagcgcaactcctggctaacagctatagcgcaggaaaaagggc

SEQ ID NO: 450941 - DNA, 60 bp, Artificial
  Synthetic oligonucleotide
tactgtaacagcagcacatgtgcttggtaaccataaagtagcgaccatctgctaccaggg

SEQ ID NO: 450942 - DNA, 55 bp, Artificial
  Synthetic oligonucleotide
tactgtacattggcagaaagctttaagacgctaatacaaccacagtgcgaatatg

SEQ ID NO: 450943 - DNA, 55 bp, Artificial
  Synthetic oligonucleotide
tactgtacctaagaacagtaagacagatcgttgtattgctatcgaacctggttgg

SEQ ID NO: 450944 - DNA, 59 bp, Artificial
  Synthetic oligonucleotide
tactgtacgatgactataagagatttatgaactactggacctcctcaaacgaggaccta

SEQ ID NO: 450945 - DNA, 50 bp, Artificial
  Synthetic oligonucleotide
tactgtactagatgcattgtcgtaactcgtcaattcataataggaatgct

SEQ ID NO: 450946 - DNA, 55 bp, Artificial
  Synthetic oligonucleotide
tactgtaggggatgcgctctatatcatgtatgtcaatggtgtagtcaatacaatc

SEQ ID NO: 450947 - DNA, 60 bp, Artificial
  Synthetic oligonucleotide
tactgtaggggtagtgtatgtgagcatactaaaccaggttattgtgtatcactcaactcc

SEQ ID NO: 450948 - DNA, 56 bp, Artificial
  Synthetic oligonucleotide
tactgtagtagatactactagaagtactaacatgactattagtactgctacagaac

SEQ ID NO: 450949 - DNA, 51 bp, Artificial
  Synthetic oligonucleotide
tactgtatacgattgcatatatctatgataggattgtgtgcgtgcgtggta

SEQ ID NO: 450950 - DNA, 60 bp, Artificial
  Synthetic oligonucleotide
tactgtatactatgactactaaaatacgattaactggttagatctgctgaactcttatta

SEQ ID NO: 450951 - DNA, 60 bp, Artificial
  Synthetic oligonucleotide
tactgtatactccaattctactcaagaaggagtatttctaacatccacattatgtttgta

SEQ ID NO: 450952 - DNA, 60 bp, Artificial
  Synthetic oligonucleotide
tactgtatagaatccgcgccagtacctacgaaggttacagatgtccctgacgtctgattg

SEQ ID NO: 450953 - DNA, 60 bp, Artificial
  Synthetic oligonucleotide
tactgtcaatgtcatcagcgtcaaatggtgagtccagacagcttaaatttggtagaaaaa

SEQ ID NO: 450954 - DNA, 59 bp, Artificial
  Synthetic oligonucleotide
tactgtcagtgttagagttcgaaaagaaatgatgaaacgtgaggccccatggcgtacga

SEQ ID NO: 450955 - DNA, 60 bp, Artificial
  Synthetic oligonucleotide
tactgtcatgcattttcgttaaattcagtgtgtctttgacaccatgtttaatagcattat

SEQ ID NO: 450956 - DNA, 60 bp, Artificial
  Synthetic oligonucleotide
tactgtccctaatccgccgagccaaaccgctctcggacttgccactatcactgccgcaat

SEQ ID NO: 450957 - DNA, 58 bp, Artificial
  Synthetic oligonucleotide
tactgtcgagttcgctcaagcgttcctagacaacgaggcggcgctattcccagacact

SEQ ID NO: 450958 - DNA, 52 bp, Artificial
  Synthetic oligonucleotide
tactgtcgcaggttagtaggttaggggaagcaaatttttacggacgaaataa

SEQ ID NO: 450959 - DNA, 60 bp, Artificial
  Synthetic oligonucleotide
tactgtcgtcgccttgatgctaacgctgtgtcaaatcttcgtcgcctatgggccattgct

SEQ ID NO: 450960 - DNA, 55 bp, Artificial
  Synthetic oligonucleotide
tactgtcgttaaccattgccgcgcactttgtggcatctccaatagttatgtggtc

SEQ ID NO: 450961 - DNA, 58 bp, Artificial
  Synthetic oligonucleotide
tactgtcgttgcaacctctgcacaccacaccgttgcctagccacaaaccccgcaatgc

SEQ ID NO: 450962 - DNA, 57 bp, Artificial
  Synthetic oligonucleotide
tactgtctattcagttgaccaactgaacctatagtatcactatgtttttagggtggg

SEQ ID NO: 450963 - DNA, 57 bp, Artificial
  Synthetic oligonucleotide
tactgtctcggtactggttggcgtcgactacgtggccgggaagccggtgctacacca

SEQ ID NO: 450964 - DNA, 51 bp, Artificial
  Synthetic oligonucleotide
tactgtctctcccacatcgtcaatcttaccgaagactggggaccctgtacc

SEQ ID NO: 450965 - DNA, 60 bp, Artificial
  Synthetic oligonucleotide
tactgtctggactactttccctcagacatgctgcggacaggaaataactttgaattcact

SEQ ID NO: 450966 - DNA, 54 bp, Artificial
  Synthetic oligonucleotide
tactgtgaataacagggtttattattataagggtggtgttgggtcttattacta

SEQ ID NO: 450967 - DNA, 53 bp, Artificial
  Synthetic oligonucleotide
tactgtgacagtagatggaatagggcacaacacaactgttgtggatacgactt

SEQ ID NO: 450968 - DNA, 60 bp, Artificial
  Synthetic oligonucleotide
tactgtgagctatactgacctcaccagagtatttcacagtgatagaaccacaaacaatca

SEQ ID NO: 450969 - DNA, 60 bp, Artificial
  Synthetic oligonucleotide
tactgtgattattatacacagtacactgataattcaggttacagtcaaactgtgtggagg

SEQ ID NO: 450970 - DNA, 59 bp, Artificial
  Synthetic oligonucleotide
tactgtgcaccaccaggctttgccattatgaaatgtaatgaaggaaactttagtggaaa

SEQ ID NO: 450971 - DNA, 55 bp, Artificial
  Synthetic oligonucleotide
tactgtgcatcaacacatgcatattcatgggcaccaccctcaaaagataagcaac

SEQ ID NO: 450972 - DNA, 54 bp, Artificial
  Synthetic oligonucleotide
tactgtgccatgcaagacagtggcttgcagtgtattaatggcacaaattcaaga

SEQ ID NO: 450973 - DNA, 60 bp, Artificial
  Synthetic oligonucleotide
tactgtgccgaccgacaacaacccctttatcgtcgatagtgactcagtcgtctcactgtc

SEQ ID NO: 450974 - DNA, 54 bp, Artificial
  Synthetic oligonucleotide
tactgtggggagaagctaacgttactaattatatttctcgcctccgtacttggt

SEQ ID NO: 450975 - DNA, 52 bp, Artificial
  Synthetic oligonucleotide
tactgtgtaagatagatgatgagcgctataaggaaatgatggagaggttgat

SEQ ID NO: 450976 - DNA, 52 bp, Artificial
  Synthetic oligonucleotide
tactgtgtctagtgatgggaaggacggaatgcatggcgctgttaaatcacag

SEQ ID NO: 450977 - DNA, 60 bp, Artificial
  Synthetic oligonucleotide
tactgtgtggcagctcactcccttgacttatccaccaggttgtccgacatcagcgaaaat

SEQ ID NO: 450978 - DNA, 55 bp, Artificial
  Synthetic oligonucleotide
tactgtgtgtcattctaattccagacgcaggactgcagagatcaacgcaggataa

SEQ ID NO: 450979 - DNA, 60 bp, Artificial
  Synthetic oligonucleotide
tactgttatgcctttcctctatctcttggagacggaatagaaatgatcctcggatgtaac

SEQ ID NO: 450980 - DNA, 60 bp, Artificial
  Synthetic oligonucleotide
tactgttatgcggtgttactgagcagctactcacatccgcttactgcgccgacgattatc

SEQ ID NO: 450981 - DNA, 60 bp, Artificial
  Synthetic oligonucleotide
tactgttcaaggagcacgactgtaacaacatgctacaagagaccacgctacagttactcg

SEQ ID NO: 450982 - DNA, 57 bp, Artificial
  Synthetic oligonucleotide
tactgttccaacacggagggactaaagttgttattattgtaagttcaatggcagcgc

SEQ ID NO: 450983 - DNA, 55 bp, Artificial
  Synthetic oligonucleotide
tactgttccgactgacgcgaacaacctccccgtccaaacggattcacgcttgtcg

SEQ ID NO: 450984 - DNA, 56 bp, Artificial
  Synthetic oligonucleotide
tactgttctggtggttactactccacagcaggactcggttctttggcaaccgggcc

SEQ ID NO: 450985 - DNA, 60 bp, Artificial
  Synthetic oligonucleotide
tactgttgacggtgaagatcattggtggtatgatgttacccgtagatcgaagatccttgt

SEQ ID NO: 450986 - DNA, 50 bp, Artificial
  Synthetic oligonucleotide
tactgttgctaaggtgtcgcacctttgcacatataagcgtggttttcttg

SEQ ID NO: 450987 - DNA, 60 bp, Artificial
  Synthetic oligonucleotide
tactgttgggaggaagagaatggtcctacatcgtcgagagaccatcggctgttaatggat

SEQ ID NO: 450988 - DNA, 59 bp, Artificial
  Synthetic oligonucleotide
tactgtttactgcatctgcaccttttctagactcctacttccttcctctgtaagtatca

SEQ ID NO: 450989 - DNA, 58 bp, Artificial
  Synthetic oligonucleotide
tactgtttcacccccagtccagtggtagtgggcacgaccgatagacgtggagtgccta

SEQ ID NO: 450990 - DNA, 58 bp, Artificial
  Synthetic oligonucleotide
tactgtttcttaaaaacagttgagaatcagtcgagccacgccccaaatcagtctctct

SEQ ID NO: 450991 - DNA, 57 bp, Artificial
  Synthetic oligonucleotide
tactgtttgggggttccactctgatagcgaaacccaaatgggaagactctatggaga

SEQ ID NO: 450992 - DNA, 58 bp, Artificial
  Synthetic oligonucleotide
tactgttttactcctagccctgttgtcgtgggcaccactgacaggcagggcgtaccca

SEQ ID NO: 450993 - DNA, 56 bp, Artificial
  Synthetic oligonucleotide
tactgttttcactggtgttactcagtgtcctttgtcccgtaagaaagcataagaag

SEQ ID NO: 450994 - DNA, 54 bp, Artificial
  Synthetic oligonucleotide
tacttaaaacatgccttatactaaattgcatgcagtttaaactcgagatggatg

SEQ ID NO: 450995 - DNA, 54 bp, Artificial
  Synthetic oligonucleotide
tacttaaaatctattcctattaatcaacccttagattataaaatatgtgaaagg

SEQ ID NO: 450996 - DNA, 55 bp, Artificial
  Synthetic oligonucleotide
tacttaaacgcatttatgataaattgatggtgcgagcaactgacggaatagatat

SEQ ID NO: 450997 - DNA, 53 bp, Artificial
  Synthetic oligonucleotide
tacttaaagagaatgacaaagtgtacaaactggaaaacaagctgaaatagtcg

SEQ ID NO: 450998 - DNA, 55 bp, Artificial
  Synthetic oligonucleotide
tacttaaagagacggccccatgggccgaagctattttgagggtcccaactgataa

SEQ ID NO: 450999 - DNA, 54 bp, Artificial
  Synthetic oligonucleotide
tacttaaatcgatctttggacgattaagtagagaaaacattatttacctcggta

SEQ ID NO: 451000 - DNA, 60 bp, Artificial
  Synthetic oligonucleotide
tacttaacagtccctatagcaacgaacgatggacattgcgtgacacgagccaggaaatgt

SEQ ID NO: 451001 - DNA, 52 bp, Artificial
  Synthetic oligonucleotide
tacttaaccgatccactatcgcttttacactcggttccccttacggccaaac

SEQ ID NO: 451002 - DNA, 57 bp, Artificial
  Synthetic oligonucleotide
tacttaagaaagattaaaggtgaaaccgtatttgatatgtctgagtgagctagaaac

SEQ ID NO: 451003 - DNA, 55 bp, Artificial
  Synthetic oligonucleotide
tacttaagaatggtacttgtgcgtaccgatacaagactgatgctcagatagtgcg

SEQ ID NO: 451004 - DNA, 57 bp, Artificial
  Synthetic oligonucleotide
tacttaagtctgtcagaggcggagagagtgcaaggagattttaagacacccaagggg

SEQ ID NO: 451005 - DNA, 60 bp, Artificial
  Synthetic oligonucleotide
tacttaagtggtgaccaaattaagaatgatgatggaccattgttatcgattttcatgtta

SEQ ID NO: 451006 - DNA, 54 bp, Artificial
  Synthetic oligonucleotide
tacttaagttcccgtttggataaaggttgcaacctttcgcagagggagtctgaa

SEQ ID NO: 451007 - DNA, 56 bp, Artificial
  Synthetic oligonucleotide
tacttaataacgaaaagagaggtcaaaacacgcaatgggatcaagcagccgttctt

SEQ ID NO: 451008 - DNA, 60 bp, Artificial
  Synthetic oligonucleotide
tacttaataagagcactgacactgaacacaatgacaaaagatgcggaaagaggcaaattg

SEQ ID NO: 451009 - DNA, 57 bp, Artificial
  Synthetic oligonucleotide
tacttaatctagtaaagaacattaggcagggatatcaacccctctcgttacagatcc

SEQ ID NO: 451010 - DNA, 59 bp, Artificial
  Synthetic oligonucleotide
tacttaatgcttgttttagcgtgaaaaggataccagggaaatcatcatcagtcattaaa

SEQ ID NO: 451011 - DNA, 55 bp, Artificial
  Synthetic oligonucleotide
tacttacagactcctgcttgttggaatgcacaaacagcctgggacactgtgacct

SEQ ID NO: 451012 - DNA, 55 bp, Artificial
  Synthetic oligonucleotide
tacttaccacgcaagtcacggtgacggatatgtgcaagccggacgtagagggccc

SEQ ID NO: 451013 - DNA, 52 bp, Artificial
  Synthetic oligonucleotide
tacttaccagaccataacttagctatagaatgtaatggagactactggcatt

SEQ ID NO: 451014 - DNA, 55 bp, Artificial
  Synthetic oligonucleotide
tacttaccaggcaagatttggaacaattatagctagaaacttcgatactattaga

SEQ ID NO: 451015 - DNA, 57 bp, Artificial
  Synthetic oligonucleotide
tacttacccggcgaagtctaggtcggagttcagcagccgggtagactcgtacatcaa

SEQ ID NO: 451016 - DNA, 52 bp, Artificial
  Synthetic oligonucleotide
tacttacctaatgctaacaacttatacgcactattcgatggtgttcgggtac

SEQ ID NO: 451017 - DNA, 58 bp, Artificial
  Synthetic oligonucleotide
tacttacctccatgtgaagatttgagaataactttgagcaagtccaaaccataccacc

SEQ ID NO: 451018 - DNA, 52 bp, Artificial
  Synthetic oligonucleotide
tacttacctttgaagtcaccattactagttgaggtctcgcgaccgattgaac

SEQ ID NO: 451019 - DNA, 59 bp, Artificial
  Synthetic oligonucleotide
tacttacggctcgtcaaccaaccccatgtatgtttcagatactgtcacatttgttaatg

SEQ ID NO: 451020 - DNA, 60 bp, Artificial
  Synthetic oligonucleotide
tacttacgtctccgtcggaacatcaacattgaaccagagatcagtcccagaaatagccac

SEQ ID NO: 451021 - DNA, 55 bp, Artificial
  Synthetic oligonucleotide
tacttactggtcttaatggccgcgcagcggcagtgacaacattttcagacgccca

SEQ ID NO: 451022 - DNA, 55 bp, Artificial
  Synthetic oligonucleotide
tacttagaatatcacggaggcctctacagctccatatggttatcagcaggccgct

SEQ ID NO: 451023 - DNA, 56 bp, Artificial
  Synthetic oligonucleotide
tacttagaggaccgttacacttccagcgccgagcaatattaggtgcgttaaaattc

SEQ ID NO: 451024 - DNA, 51 bp, Artificial
  Synthetic oligonucleotide
tacttagatctaaaaattttacggacaatactaaaaccataatagtacagc

SEQ ID NO: 451025 - DNA, 55 bp, Artificial
  Synthetic oligonucleotide
tacttaggaatggtgatagacgatgcagatagtttgcataatgcgcaactacagc

SEQ ID NO: 451026 - DNA, 55 bp, Artificial
  Synthetic oligonucleotide
tacttaggacgggcaggttacacgattcacgtgcaatgcaatgcttcaaagttcc

SEQ ID NO: 451027 - DNA, 54 bp, Artificial
  Synthetic oligonucleotide
tacttaggaggcgctggttggacctcttttaggttaacaatatagacacttaat

SEQ ID NO: 451028 - DNA, 57 bp, Artificial
  Synthetic oligonucleotide
tacttaggcaaatgtactggactaggggccccaaccatgaagacccatctgaaacaa

SEQ ID NO: 451029 - DNA, 52 bp, Artificial
  Synthetic oligonucleotide
tacttaggcttatccgtcttattaacgaatatccaatcaacttccccgtaat

SEQ ID NO: 451030 - DNA, 55 bp, Artificial
  Synthetic oligonucleotide
tacttaggttccaacatggtggggctttctaagttaagagagcttattaacacca

SEQ ID NO: 451031 - DNA, 56 bp, Artificial
  Synthetic oligonucleotide
tacttagttatggtcatcggaccaccaagtggttttatggatacgccaaacgtatc

SEQ ID NO: 451032 - DNA, 60 bp, Artificial
  Synthetic oligonucleotide
tacttataagcgacaagaagctctctggaagcaacttgtctccgcagaacacagaaaatt

SEQ ID NO: 451033 - DNA, 60 bp, Artificial
  Synthetic oligonucleotide
tacttatattgctgggaatctacatattaagctaactgtatataatatgtctctctataa

SEQ ID NO: 451034 - DNA, 60 bp, Artificial
  Synthetic oligonucleotide
tacttatcaggcagttctcagggctgaaccgcacagggtgaccatggatatctactataa

SEQ ID NO: 451035 - DNA, 60 bp, Artificial
  Synthetic oligonucleotide
tacttatcataccacctcgtacctactcatccatgatggggaccgtgcagtgattacata

SEQ ID NO: 451036 - DNA, 60 bp, Artificial
  Synthetic oligonucleotide
tacttatcctgcgacccacaaggatgcagaatgtttgctctaagtcagggcacaacactc

SEQ ID NO: 451037 - DNA, 55 bp, Artificial
  Synthetic oligonucleotide
tacttatcggtcttaaaggccgcgcagcggcactgacaacattatctgctgccca

SEQ ID NO: 451038 - DNA, 58 bp, Artificial
  Synthetic oligonucleotide
tacttatgattatctcaaaatcaatagattagtaaacagtacatttcgttctttactg

SEQ ID NO: 451039 - DNA, 53 bp, Artificial
  Synthetic oligonucleotide
tacttatgattgtcctatggaacagttgaatggagtcggtaggtgttttgcac

SEQ ID NO: 451040 - DNA, 60 bp, Artificial
  Synthetic oligonucleotide
tacttatgctagatttggaattgaaattcaagtccagattaatcccactccctttcagca

SEQ ID NO: 451041 - DNA, 52 bp, Artificial
  Synthetic oligonucleotide
tacttattctaatttagtggagttacagaattctgactgccctttctcgcca

SEQ ID NO: 451042 - DNA, 59 bp, Artificial
  Synthetic oligonucleotide
tacttcaaattcagctcctgcactggatgctgcagagacggggcacacaagtactgtac

SEQ ID NO: 451043 - DNA, 56 bp, Artificial
  Synthetic oligonucleotide
tacttcaagacgagacattatttacacactctttggaaggcgggtattttatataa

SEQ ID NO: 451044 - DNA, 52 bp, Artificial
  Synthetic oligonucleotide
tacttcaaggaccctcgggtcgtgtggggtggagcagaattattaggcctac

SEQ ID NO: 451045 - DNA, 58 bp, Artificial
  Synthetic oligonucleotide
tacttcaatgaatcgacaaagaagaaaatcgagaaagtaaggcctctcctaatagatg

SEQ ID NO: 451046 - DNA, 55 bp, Artificial
  Synthetic oligonucleotide
tacttcacagacgcaatggaggtttgttgatgtatctaaaactacacagaacgga

SEQ ID NO: 451047 - DNA, 60 bp, Artificial
  Synthetic oligonucleotide
tacttcacaggtgagtgcgtgaggtgtggttatactcctaagtctctcattgatcagaga

SEQ ID NO: 451048 - DNA, 59 bp, Artificial
  Synthetic oligonucleotide
tacttcagtcccggctttcgtcctcatccagacctcagtaccaattcaacaagtcacta

SEQ ID NO: 451049 - DNA, 56 bp, Artificial
  Synthetic oligonucleotide
tacttcattcgtgactacgacgtgtaaggggacaaagtcggacggtcatcgttgcg

SEQ ID NO: 451050 - DNA, 60 bp, Artificial
  Synthetic oligonucleotide
tacttccaaatctacaagcgaatgtggtgtacctagcattcacacgccaagcaaaactaa

SEQ ID NO: 451051 - DNA, 55 bp, Artificial
  Synthetic oligonucleotide
tacttccacaatttagggcctgcgcataaacatcgttgacggtgtgttgaccacc

SEQ ID NO: 451052 - DNA, 56 bp, Artificial
  Synthetic oligonucleotide
tacttccacaccttgcgggagattttgcccgcaaaatctggtctactggaaaggac

SEQ ID NO: 451053 - DNA, 58 bp, Artificial
  Synthetic oligonucleotide
tacttccccctgttggtgatccgagtaaattcacgactctcttcaacatggaagctaa

SEQ ID NO: 451054 - DNA, 55 bp, Artificial
  Synthetic oligonucleotide
tacttcccctttttctctagtagtatgtactacaaagcacgttatacacttatta

SEQ ID NO: 451055 - DNA, 60 bp, Artificial
  Synthetic oligonucleotide
tacttcctatgggggaattacacatgagcgtgattcttggaatcaaatgctgcggaacca

SEQ ID NO: 451056 - DNA, 55 bp, Artificial
  Synthetic oligonucleotide
tacttcctgtgtctggggtttatcccgcagtacctctcgacggcctaggcgccgc

SEQ ID NO: 451057 - DNA, 59 bp, Artificial
  Synthetic oligonucleotide
tacttccttcccaagcccctcgccaggccacaagtagtgagattcataagagctccatt

SEQ ID NO: 451058 - DNA, 57 bp, Artificial
  Synthetic oligonucleotide
tacttcgattcgagattagttctagctagtagtaattttctggctgctaaccccgag

SEQ ID NO: 451059 - DNA, 50 bp, Artificial
  Synthetic oligonucleotide
tacttcgcacagtacagtggcactctcaatctgcatttcatgtacactgg

SEQ ID NO: 451060 - DNA, 60 bp, Artificial
  Synthetic oligonucleotide
tacttcggctgcgtgcacttggagctccccgtgatgcgataataggtcagcttatgatgt

SEQ ID NO: 451061 - DNA, 57 bp, Artificial
  Synthetic oligonucleotide
tacttcggtatagactccatagactcggcgttgaaatcgtgtttggttcttatcgtc

SEQ ID NO: 451062 - DNA, 57 bp, Artificial
  Synthetic oligonucleotide
tacttctaaaagctctgtatatgttaacaacaagggggaggcagaccaccaaggaca

SEQ ID NO: 451063 - DNA, 58 bp, Artificial
  Synthetic oligonucleotide
tacttctaatagaagacatgcctatgtacattatgctaaacggatacatagactgggc

SEQ ID NO: 451064 - DNA, 56 bp, Artificial
  Synthetic oligonucleotide
tacttctactgttggttgtcggttctgatccgggtatggtgggctcgcctgtactg

SEQ ID NO: 451065 - DNA, 58 bp, Artificial
  Synthetic oligonucleotide
tacttctagcacaagatgctagtgtagggtacaggtgccccccactatttagtggggc

SEQ ID NO: 451066 - DNA, 58 bp, Artificial
  Synthetic oligonucleotide
tacttctccacgagaggcgtgcattcttggtagctatgtgtgggttagggcgacgcta

SEQ ID NO: 451067 - DNA, 60 bp, Artificial
  Synthetic oligonucleotide
tacttctctgactaatagcgacctcctgtgtccaatctattattcctacacccattcaaa

SEQ ID NO: 451068 - DNA, 58 bp, Artificial
  Synthetic oligonucleotide
tacttctgcgggaagtatataattcaccatgccaacggctgtattgtttaccctgacc

SEQ ID NO: 451069 - DNA, 55 bp, Artificial
  Synthetic oligonucleotide
tacttctggaaagatgaatcatggagcatcgagaaactgtcagccggataccgag

SEQ ID NO: 451070 - DNA, 60 bp, Artificial
  Synthetic oligonucleotide
tacttctggaactgagccgaatcagcttcgattccagtcctctgtatcagatagtgaaag

SEQ ID NO: 451071 - DNA, 60 bp, Artificial
  Synthetic oligonucleotide
tacttctttattgtgctggattctttctggcattgcttctgtgagccagggctagttgtt

SEQ ID NO: 451072 - DNA, 60 bp, Artificial
  Synthetic oligonucleotide
tacttcttttcaatgatcactactatagttttctccacaagtacaagagacacactggat

SEQ ID NO: 451073 - DNA, 60 bp, Artificial
  Synthetic oligonucleotide
tacttgaaacagggttatctccattagatgacgttgtgactattagattgaaagatttgc

SEQ ID NO: 451074 - DNA, 58 bp, Artificial
  Synthetic oligonucleotide
tacttgaaagatttgtctgagatttcttcagagcaataaaccttgatagattttttgg

SEQ ID NO: 451075 - DNA, 54 bp, Artificial
  Synthetic oligonucleotide
tacttgaaaggctcctcggggggtccgctgttatgccccgcgggacacgccgtg

SEQ ID NO: 451076 - DNA, 60 bp, Artificial
  Synthetic oligonucleotide
tacttgaaccagtattgggagaacatatgcaatttgaggtccacagtgtacagactaatc

SEQ ID NO: 451077 - DNA, 56 bp, Artificial
  Synthetic oligonucleotide
tacttgaagggctcttcgggtggcccactgctttgcccttcggggcacgctgtggg

SEQ ID NO: 451078 - DNA, 54 bp, Artificial
  Synthetic oligonucleotide
tacttgaatacaaaccaagccaagttgacatatcgaacactcgttcaacccagg

SEQ ID NO: 451079 - DNA, 58 bp, Artificial
  Synthetic oligonucleotide
tacttgacataacggccgatccaactacagcaccacaaaccgagagaatgatgcgtat

SEQ ID NO: 451080 - DNA, 60 bp, Artificial
  Synthetic oligonucleotide
tacttgagatccattatgcttcccgagaatgggccagcaagcattccggacgacataaca

SEQ ID NO: 451081 - DNA, 60 bp, Artificial
  Synthetic oligonucleotide
tacttgatgagcgctggtgacttggtggatattaacctcatgtgaatgaagatcttcatg

SEQ ID NO: 451082 - DNA, 60 bp, Artificial
  Synthetic oligonucleotide
tacttgcacgactactcatattacactaacaacgaaatacgaaccgatcagcattggatc

SEQ ID NO: 451083 - DNA, 60 bp, Artificial
  Synthetic oligonucleotide
tacttgcagctgctgattcatttgcacagagtttcaaaccatcacaaagtgatatggaat

SEQ ID NO: 451084 - DNA, 60 bp, Artificial
  Synthetic oligonucleotide
tacttgcagtttgtggttatgaaggctgaacagccgcaacccttccacactatcctcgtc

SEQ ID NO: 451085 - DNA, 60 bp, Artificial
  Synthetic oligonucleotide
tacttgcatgattattcatactacaacctgaatgaattacgtactgatcaatattggtta

SEQ ID NO: 451086 - DNA, 60 bp, Artificial
  Synthetic oligonucleotide
tacttgccaccacctacacctgtgacacagtacttagacacggatgactttgttacacga

SEQ ID NO: 451087 - DNA, 58 bp, Artificial
  Synthetic oligonucleotide
tacttgcggtaagacggtgctcggtacagttatctgccgttctatggataacccaggc

SEQ ID NO: 451088 - DNA, 57 bp, Artificial
  Synthetic oligonucleotide
tacttgcgtcgccaagtagttttattgcaacatgtgggacccattactgaacgagtt

SEQ ID NO: 451089 - DNA, 58 bp, Artificial
  Synthetic oligonucleotide
tacttgcgtctgacggtacatttttgctcggtccaaagacatatacgcctcaaaatct

SEQ ID NO: 451090 - DNA, 57 bp, Artificial
  Synthetic oligonucleotide
tacttgctaccaggatggaaattaacgtacgtaggatataatggaagtgatactagg

SEQ ID NO: 451091 - DNA, 60 bp, Artificial
  Synthetic oligonucleotide
tacttggaagttgagaaatgccttgtggagatccaatgctctcctcaggttgtggttgaa

SEQ ID NO: 451092 - DNA, 51 bp, Artificial
  Synthetic oligonucleotide
tacttggaccctagtcattatcctaaggtctttaagtgcccgtttactttt

SEQ ID NO: 451093 - DNA, 59 bp, Artificial
  Synthetic oligonucleotide
tacttggacttggaatggtactgaaggatcaaataacactgaaggaaatatcacactcc

SEQ ID NO: 451094 - DNA, 60 bp, Artificial
  Synthetic oligonucleotide
tacttggatccctgtgatgggatcgttgggaaaattctcgatgattgcaccgggtcagta

SEQ ID NO: 451095 - DNA, 56 bp, Artificial
  Synthetic oligonucleotide
tacttggcagccaatacaaacgcctgaaagacgcggttcggcggaaaagagacgac

SEQ ID NO: 451096 - DNA, 55 bp, Artificial
  Synthetic oligonucleotide
tacttggcattgaaagcattagtaacaccaacaaggggaaggccacctttaccta

SEQ ID NO: 451097 - DNA, 60 bp, Artificial
  Synthetic oligonucleotide
tacttggctacattctcgtaagagcatttctcacatgggacgtaagcgagagtcatgggt

SEQ ID NO: 451098 - DNA, 57 bp, Artificial
  Synthetic oligonucleotide
tacttgggcaggagtcgaaagcatagtaaggatactgcaacaactactgtttattca

SEQ ID NO: 451099 - DNA, 56 bp, Artificial
  Synthetic oligonucleotide
tacttggggatacgatgtcgaagaatctttgatttgtacatttgaattttccttcg

SEQ ID NO: 451100 - DNA, 55 bp, Artificial
  Synthetic oligonucleotide
tacttgggtgctaaaatgattaggaagtccctatgagcggtatttgcatacttca

SEQ ID NO: 451101 - DNA, 52 bp, Artificial
  Synthetic oligonucleotide
tacttggtagagatgtaccatggtgtcccatatacagctgcagtacagctaa

SEQ ID NO: 451102 - DNA, 55 bp, Artificial
  Synthetic oligonucleotide
tacttggtagatacatgcgaaaggactattacaatgaacaacgcatcacctgaga

SEQ ID NO: 451103 - DNA, 53 bp, Artificial
  Synthetic oligonucleotide
tacttggtccccaagtattttgtcttgcataatgtgggacccacttctaaatg

SEQ ID NO: 451104 - DNA, 52 bp, Artificial
  Synthetic oligonucleotide
tacttggtccgcgagtacacagtcgaaacgcttatactcgggtggctgtaca

SEQ ID NO: 451105 - DNA, 56 bp, Artificial
  Synthetic oligonucleotide
tacttggtcgctaagttagtgggtgcagttataaattaaagtgtcattggcccacg

SEQ ID NO: 451106 - DNA, 57 bp, Artificial
  Synthetic oligonucleotide
tacttggtgccggtatatataaggtgcctgttgggttgagctttgacgcctgggaac

SEQ ID NO: 451107 - DNA, 58 bp, Artificial
  Synthetic oligonucleotide
tacttgtacaatccttattgcattgacatccaacaatggggctacacaggttctctga

SEQ ID NO: 451108 - DNA, 51 bp, Artificial
  Synthetic oligonucleotide
tacttgtatcccggtacatttatacgccagttttataacccccaccccaaa

SEQ ID NO: 451109 - DNA, 55 bp, Artificial
  Synthetic oligonucleotide
tacttgtcagctgttgatgtctgtggcatgtttactaacaggttaggttcccagc

SEQ ID NO: 451110 - DNA, 55 bp, Artificial
  Synthetic oligonucleotide
tacttgtccctaagacatatagcattactgccggcttacacttccctgcgaaggg

SEQ ID NO: 451111 - DNA, 60 bp, Artificial
  Synthetic oligonucleotide
tacttgtccgccactacgtaccgctcagagtaaccgctagcatcacggacgacagtcaat

SEQ ID NO: 451112 - DNA, 53 bp, Artificial
  Synthetic oligonucleotide
tacttgtcctgaacccgtccgtggccgctaccttagggttcggaacgtatatg

SEQ ID NO: 451113 - DNA, 57 bp, Artificial
  Synthetic oligonucleotide
tacttgtcctgaacccgtctgtcgccgccaccctaggctttggggcgtatatgtcta

SEQ ID NO: 451114 - DNA, 60 bp, Artificial
  Synthetic oligonucleotide
tacttgtctgctagcttaacggctacgataggtaatctcgagcggattgtcagatcctcg

SEQ ID NO: 451115 - DNA, 55 bp, Artificial
  Synthetic oligonucleotide
tacttgtgtgacttggtggaacaaacgcaacactcacttcctgaacgctctcgag

SEQ ID NO: 451116 - DNA, 60 bp, Artificial
  Synthetic oligonucleotide
tacttgttgtctgtattctatgacgcagtgatcgatcttcatgcagctacgactgagtct

SEQ ID NO: 451117 - DNA, 54 bp, Artificial
  Synthetic oligonucleotide
tactttaaagaactaacctctcacggaccccaacaaactgattctgagaaaggc

SEQ ID NO: 451118 - DNA, 50 bp, Artificial
  Synthetic oligonucleotide
tactttaaagaatatgctgatatagcggccttttcagtggaaccacagct

SEQ ID NO: 451119 - DNA, 56 bp, Artificial
  Synthetic oligonucleotide
tactttaagatgtaggcgtaccgaactcttcgacaattctccgacgcagggacgta

SEQ ID NO: 451120 - DNA, 57 bp, Artificial
  Synthetic oligonucleotide
tactttactggagttgtaccagcgtaggctttacctattcaagttagaaatgatgct

SEQ ID NO: 451121 - DNA, 55 bp, Artificial
  Synthetic oligonucleotide
tactttagagatgccatcaagttatgtcaaccagatgccatccattatggcaagg

SEQ ID NO: 451122 - DNA, 59 bp, Artificial
  Synthetic oligonucleotide
tactttagccagatactatgatatccgtcctggactaatgggtcgttcgctaaatagga

SEQ ID NO: 451123 - DNA, 57 bp, Artificial
  Synthetic oligonucleotide
tactttagttccattctatagaactatggattatactgatgacagtgcccaacaatt

SEQ ID NO: 451124 - DNA, 60 bp, Artificial
  Synthetic oligonucleotide
tactttatcgagctacgtgctgcgaaattatggagcgaaacggattgactcaggatgtta

SEQ ID NO: 451125 - DNA, 55 bp, Artificial
  Synthetic oligonucleotide
tactttatgatgaggagtacgttccccaggaaccggattacttgtattgcccgta

SEQ ID NO: 451126 - DNA, 59 bp, Artificial
  Synthetic oligonucleotide
tactttcaaccaatgctagggcaataccaaaagagtaggctcaatcgagaagcttacgc

SEQ ID NO: 451127 - DNA, 60 bp, Artificial
  Synthetic oligonucleotide
tactttcaagtatgccactcaggagctgtcagcacgctcaccgtggaccaagttccttaa

SEQ ID NO: 451128 - DNA, 53 bp, Artificial
  Synthetic oligonucleotide
tactttcaatatgagcacagaaataagagataagcagcaaaaagtacgtgcat

SEQ ID NO: 451129 - DNA, 55 bp, Artificial
  Synthetic oligonucleotide
tactttcacaagggattagtgattaaagaagaaccgctaaaaggatcagccaaac

SEQ ID NO: 451130 - DNA, 53 bp, Artificial
  Synthetic oligonucleotide
tactttcaccgtaacgctccttactttgctcctccgtccaggaacttccggta

SEQ ID NO: 451131 - DNA, 60 bp, Artificial
  Synthetic oligonucleotide
tactttccatcaatttctgtggaaaacactagagactgtcgaggcataagattctctggt

SEQ ID NO: 451132 - DNA, 55 bp, Artificial
  Synthetic oligonucleotide
tactttccggttagcttccctagcggaaccacagtacccacaagtcaattgccag

SEQ ID NO: 451133 - DNA, 55 bp, Artificial
  Synthetic oligonucleotide
tactttcgtgagcgtgacgaaaccaataggggtatagaagggaggtcttgaagtg

SEQ ID NO: 451134 - DNA, 57 bp, Artificial
  Synthetic oligonucleotide
tactttctagggggaaagttacagcacaattctgtgcattctacctgtgaagagctc

SEQ ID NO: 451135 - DNA, 54 bp, Artificial
  Synthetic oligonucleotide
tactttctcgcatcggtttgggactaacactgctaaacttttacgggatttgga

SEQ ID NO: 451136 - DNA, 54 bp, Artificial
  Synthetic oligonucleotide
tactttctcgccaatttacaaggcctttctgtataaacaatacctgaaccttta

SEQ ID NO: 451137 - DNA, 59 bp, Artificial
  Synthetic oligonucleotide
tactttctcggtacagagaaatcttcctttcgagaaagcgaccatcatggcagctttta

SEQ ID NO: 451138 - DNA, 60 bp, Artificial
  Synthetic oligonucleotide
tactttctgaccagagtcgaggctggcttgcgtgtgtgggtccctagccttcaagtcagg

SEQ ID NO: 451139 - DNA, 58 bp, Artificial
  Synthetic oligonucleotide
tactttgaccttattcgtccgatgtgtagccttcgtcgtctgtatcgtcgtctgcggt

SEQ ID NO: 451140 - DNA, 60 bp, Artificial
  Synthetic oligonucleotide
tactttgagcaaactctgcaacaggcctataccatattaacataagcagcaaggtaattc

SEQ ID NO: 451141 - DNA, 55 bp, Artificial
  Synthetic oligonucleotide
tactttgattctcgcgatttgggcgattgcgattcagtgtgtgtccgcgacgtgg

SEQ ID NO: 451142 - DNA, 60 bp, Artificial
  Synthetic oligonucleotide
tactttgcacattactgtaggaagtatgctcccttgtacgccgctgaggcaaagagggta

SEQ ID NO: 451143 - DNA, 55 bp, Artificial
  Synthetic oligonucleotide
tactttgcgcagctcgagaagggccgggagaacttccacgtgcacgtgctcgcct

SEQ ID NO: 451144 - DNA, 58 bp, Artificial
  Synthetic oligonucleotide
tactttggttgtcccggtgtcatatcggtctatggagacgatataatcgtccccacta

SEQ ID NO: 451145 - DNA, 60 bp, Artificial
  Synthetic oligonucleotide
tactttgtcagttcctcattggcttatccaccataagtcgggcacattttcttgtgagat

SEQ ID NO: 451146 - DNA, 54 bp, Artificial
  Synthetic oligonucleotide
tacttttacgtgtggttacataaactaaggtgcggttgtgtccctaggcattta

SEQ ID NO: 451147 - DNA, 54 bp, Artificial
  Synthetic oligonucleotide
tacttttctcgggaattttgcagagctgcaaatcttgagtacagaaatgatgtt

SEQ ID NO: 451148 - DNA, 60 bp, Artificial
  Synthetic oligonucleotide
tacttttgagtatgccacagtcattgtgcctgtgtcggcagtgagtgttaagggcgaagc

SEQ ID NO: 451149 - DNA, 58 bp, Artificial
  Synthetic oligonucleotide
tacttttggactgagatctagatggccacacaaataattatgtggacccaaagaacga

SEQ ID NO: 451150 - DNA, 60 bp, Artificial
  Synthetic oligonucleotide
tacttttggactgagatctagatggccacacaaataattgtgtagacccagagaccttgc

SEQ ID NO: 451151 - DNA, 59 bp, Artificial
  Synthetic oligonucleotide
tacttttggtaagccggttatctggttgggccacgaggaagcatctctgaaatcgctca

SEQ ID NO: 451152 - DNA, 58 bp, Artificial
  Synthetic oligonucleotide
tactttttgatacatacggattttgactgttaagggtatgtcatattcattacaggta

SEQ ID NO: 451153 - DNA, 55 bp, Artificial
  Synthetic oligonucleotide
tagaaaacggtaacgttgcgacgcgtgatgtcgatgtatatttaggcgcttgttc

SEQ ID NO: 451154 - DNA, 57 bp, Artificial
  Synthetic oligonucleotide
tagaaaagagcgagcctcccgatccgagtttgccctgaacctatcgagtttggagtc

SEQ ID NO: 451155 - DNA, 60 bp, Artificial
  Synthetic oligonucleotide
tagaaaagcgaggggcaattacaagcagcaatactagagataataatcctgacttggcct

SEQ ID NO: 451156 - DNA, 59 bp, Artificial
  Synthetic oligonucleotide
tagaaaagcggacaccacatcgtaccacgcaatcgctgttgagacgaaagccgagcgta

SEQ ID NO: 451157 - DNA, 60 bp, Artificial
  Synthetic oligonucleotide
tagaaaagcgttcgcgcttatgggttatattttgtcgatgggcacatatactggcgtcag

SEQ ID NO: 451158 - DNA, 59 bp, Artificial
  Synthetic oligonucleotide
tagaaaaggaagaagggataattccagattggcagaactatactcatgggccaggaata

SEQ ID NO: 451159 - DNA, 58 bp, Artificial
  Synthetic oligonucleotide
tagaaaagtcgcttgcgtttgtctacacgcagctcgtcaacgggacggagacgtggca

SEQ ID NO: 451160 - DNA, 56 bp, Artificial
  Synthetic oligonucleotide
tagaaaatacgtattctccggatacgttggggtacgatcttatacgcgatcttata

SEQ ID NO: 451161 - DNA, 53 bp, Artificial
  Synthetic oligonucleotide
tagaaaatggggtcacaagtctcaacccaacgatcgggttcccacgaaaattc

SEQ ID NO: 451162 - DNA, 56 bp, Artificial
  Synthetic oligonucleotide
tagaaaattcagctagttatgcagccggtccgggtcaggataacagggtaaatgtg

SEQ ID NO: 451163 - DNA, 60 bp, Artificial
  Synthetic oligonucleotide
tagaaacaatacaagtagaggtgccagtcgctagcaccaaagaatatttagatatgatga

SEQ ID NO: 451164 - DNA, 51 bp, Artificial
  Synthetic oligonucleotide
tagaaacaatagtaatgttgaattccaacataaacgcacattaacttcgag

SEQ ID NO: 451165 - DNA, 55 bp, Artificial
  Synthetic oligonucleotide
tagaaacaccaaccttgcgtgatctattaccaagcttaaaggagagggaagccaa

SEQ ID NO: 451166 - DNA, 60 bp, Artificial
  Synthetic oligonucleotide
tagaaactactacctactacgatgcaacatctcagctgacggtcgtaatgcaacaaaagc

SEQ ID NO: 451167 - DNA, 55 bp, Artificial
  Synthetic oligonucleotide
tagaaactcggaagctttggaggcatttataggaaggcacatctgtataagatgt

SEQ ID NO: 451168 - DNA, 60 bp, Artificial
  Synthetic oligonucleotide
tagaaactctgaattacataactacattcctactgttgaagcaagcttcagtgaaatgac

SEQ ID NO: 451169 - DNA, 60 bp, Artificial
  Synthetic oligonucleotide
tagaaacttctatttactacgatgtaatatttcagctgatggccgtaatgcaacgaaggc

SEQ ID NO: 451170 - DNA, 55 bp, Artificial
  Synthetic oligonucleotide
tagaaagaactccgccaacagcagagagaaccccacctgcaacagagggagtagg

SEQ ID NO: 451171 - DNA, 60 bp, Artificial
  Synthetic oligonucleotide
tagaaagatccccaattaggacaagtcccgatccgtcacgctagaacaagctgcattcaa

SEQ ID NO: 451172 - DNA, 53 bp, Artificial
  Synthetic oligonucleotide
tagaaagcagggattggtggataaaatacgcaccactatgcaacaggcagcgt

SEQ ID NO: 451173 - DNA, 60 bp, Artificial
  Synthetic oligonucleotide
tagaaagcccaggatatatcgtacgctcagaacgcccgatgttcctagaggctgtgaagg

SEQ ID NO: 451174 - DNA, 56 bp, Artificial
  Synthetic oligonucleotide
tagaaagcgagtacaaacatggcagaagaatttaccggaagtagattatttcttaa

SEQ ID NO: 451175 - DNA, 60 bp, Artificial
  Synthetic oligonucleotide
tagaaaggaaaacaggggatgcaataccagcagatgaaaattatgatggggacgatacag

SEQ ID NO: 451176 - DNA, 51 bp, Artificial
  Synthetic oligonucleotide
tagaaaggagatgaaaattagatagtaggtgaggtctaaaagttgcaaaaa

SEQ ID NO: 451177 - DNA, 58 bp, Artificial
  Synthetic oligonucleotide
tagaaaggtctttgctataacatgggaaacaagtggtcaaaaagctggcctcaggtca

SEQ ID NO: 451178 - DNA, 52 bp, Artificial
  Synthetic oligonucleotide
tagaaagtactaaattctcggagtttgagggtaaaatgcaaaatcttatgag

SEQ ID NO: 451179 - DNA, 54 bp, Artificial
  Synthetic oligonucleotide
tagaaagtttgataatgcaatgtcgcttataagcaactgacagaggatgtgacc

SEQ ID NO: 451180 - DNA, 60 bp, Artificial
  Synthetic oligonucleotide
tagaaataacagcactcatcctaggagcccaagctctgccagtgtacctaatgactctca

SEQ ID NO: 451181 - DNA, 55 bp, Artificial
  Synthetic oligonucleotide
tagaaatactcaggatcatgttcgctcgttgtgcttattggcttggcacaatggc

SEQ ID NO: 451182 - DNA, 59 bp, Artificial
  Synthetic oligonucleotide
tagaaatagaaattggatgactgattctaaaacggttgctaaattagatgaagacgtga

SEQ ID NO: 451183 - DNA, 55 bp, Artificial
  Synthetic oligonucleotide
tagaaatagtatgtccactgctgtacaaacccacggcaccctaccagagtgggtg

SEQ ID NO: 451184 - DNA, 60 bp, Artificial
  Synthetic oligonucleotide
tagaaatggtagcacaagcatcaaattctgatatcgcactatcaagcagacaatatgcac

SEQ ID NO: 451185 - DNA, 55 bp, Artificial
  Synthetic oligonucleotide
tagaaatggtcggcaaccatcccgacatcattgccggaagcaacaacggtgacgg

SEQ ID NO: 451186 - DNA, 60 bp, Artificial
  Synthetic oligonucleotide
tagaaatgttcctaattgatcagatttgaatgaacaagtatccatcatcaaccttgctga

SEQ ID NO: 451187 - DNA, 60 bp, Artificial
  Synthetic oligonucleotide
tagaaattgatatgaatacattggagcacacaagtagatacgtgtgcactggaattctca

SEQ ID NO: 451188 - DNA, 54 bp, Artificial
  Synthetic oligonucleotide
tagaaatttgcggaaaaaaggctataggtacagtattagtgggacccacacctg

SEQ ID NO: 451189 - DNA, 59 bp, Artificial
  Synthetic oligonucleotide
tagaacaacgattaaataatcgcaaagcaaaaatgctttcacaaggtgcgactaagtca

SEQ ID NO: 451190 - DNA, 52 bp, Artificial
  Synthetic oligonucleotide
tagaacaacggcaatgatagtagaatctgggacagaggttgacccaatgact

SEQ ID NO: 451191 - DNA, 58 bp, Artificial
  Synthetic oligonucleotide
tagaacaactgttcaaattggtaaatatcctccatgtgccgcggttaagccttctgcg

SEQ ID NO: 451192 - DNA, 60 bp, Artificial
  Synthetic oligonucleotide
tagaacaagatctcgtttatgcctagaatcctgtgaattgtccaaatttaatgtagaatg

SEQ ID NO: 451193 - DNA, 60 bp, Artificial
  Synthetic oligonucleotide
tagaacaagtactatgtttgctccaaatgagactggaggctatgtagaagataggctgat

SEQ ID NO: 451194 - DNA, 60 bp, Artificial
  Synthetic oligonucleotide
tagaacacccacaaggacagtctatgcgacgccgtctagtcgccctatgacgctttgcgt

SEQ ID NO: 451195 - DNA, 60 bp, Artificial
  Synthetic oligonucleotide
tagaacactgcctatcacggactgttaagcagcttcgtgactctggtcttccggccagac

SEQ ID NO: 451196 - DNA, 60 bp, Artificial
  Synthetic oligonucleotide
tagaacactgctagttgatatcaacacagcagctcgcacttgcggtacgccctacggtgc

SEQ ID NO: 451197 - DNA, 55 bp, Artificial
  Synthetic oligonucleotide
tagaacagccttgaactgcaatgaaagcctcaacaccggctggttagcaggcctt

SEQ ID NO: 451198 - DNA, 60 bp, Artificial
  Synthetic oligonucleotide
tagaacaggttatgtccccttatctacacggcctcccactgcatctgcgcctacatctac

SEQ ID NO: 451199 - DNA, 58 bp, Artificial
  Synthetic oligonucleotide
tagaacagtaccacattatagaactggagggaagttcattgaattcacacgcagcaat

SEQ ID NO: 451200 - DNA, 55 bp, Artificial
  Synthetic oligonucleotide
tagaacatgttgcacggactgggtatgtgccctgtttggggtatcgccaatggtg

SEQ ID NO: 451201 - DNA, 59 bp, Artificial
  Synthetic oligonucleotide
tagaacattccgaatcggacgatttccactctatgagtgagacctttgggtcgatgttc

SEQ ID NO: 451202 - DNA, 58 bp, Artificial
  Synthetic oligonucleotide
tagaaccaatgaccaatttagagaccagctttgaaaccttgtactcatagtctgaatg

SEQ ID NO: 451203 - DNA, 55 bp, Artificial
  Synthetic oligonucleotide
tagaaccactttaccaaatatgctaccaccaatcttcccaccaaacgatcgagat

SEQ ID NO: 451204 - DNA, 55 bp, Artificial
  Synthetic oligonucleotide
tagaaccagagagactgcaaagtatcatggcagattcatttggagctgaggtaac

SEQ ID NO: 451205 - DNA, 59 bp, Artificial
  Synthetic oligonucleotide
tagaaccaggggaccacctaaaggagagatcaatgctgagttatgggaacattcttgac

SEQ ID NO: 451206 - DNA, 52 bp, Artificial
  Synthetic oligonucleotide
tagaacccaagagtgctggttatgcctagtatcgggacccccatactacgag

SEQ ID NO: 451207 - DNA, 60 bp, Artificial
  Synthetic oligonucleotide
tagaacccaaggatttcttcaggtatgacgaggaatctacatctactagcttctccgtga

SEQ ID NO: 451208 - DNA, 52 bp, Artificial
  Synthetic oligonucleotide
tagaacccctcatagaacccttttaatgaatgagttgggtgttccgttccat

SEQ ID NO: 451209 - DNA, 56 bp, Artificial
  Synthetic oligonucleotide
tagaaccgattactcttcccacctggactaaggctacctacgtatccgatatagac

SEQ ID NO: 451210 - DNA, 55 bp, Artificial
  Synthetic oligonucleotide
tagaacctaataggtaccagccgttttgcctggggcccctgcacctcattgggta

SEQ ID NO: 451211 - DNA, 55 bp, Artificial
  Synthetic oligonucleotide
tagaacctctgagatcacctggccaagttggtaggtattataacccatttaacat

SEQ ID NO: 451212 - DNA, 60 bp, Artificial
  Synthetic oligonucleotide
tagaacgacactcaaatgacgttgctgatgcaaacaaaatttataaacgtagactggatc

SEQ ID NO: 451213 - DNA, 60 bp, Artificial
  Synthetic oligonucleotide
tagaacgcaactctaagccgttgtcaagtaggctaggaagattcgtagagcggatcgata

SEQ ID NO: 451214 - DNA, 56 bp, Artificial
  Synthetic oligonucleotide
tagaacgcaattggctgacaaagtactttcaaaaaaggaggaagtcgtaacagaca

SEQ ID NO: 451215 - DNA, 60 bp, Artificial
  Synthetic oligonucleotide
tagaacgccaggcacagtaagcactacagagtcaacacatgctggaccgccaacagctga

SEQ ID NO: 451216 - DNA, 56 bp, Artificial
  Synthetic oligonucleotide
tagaacgcgagagggatgcgggaaggttaaagctttacgatctgcaagtaatacgg

SEQ ID NO: 451217 - DNA, 56 bp, Artificial
  Synthetic oligonucleotide
tagaacgtcttgttttagtgtttgtgcgttaacatctggtattactcatcaaacgg

SEQ ID NO: 451218 - DNA, 51 bp, Artificial
  Synthetic oligonucleotide
tagaacgtgtacatgtggatgtgaacatggatggagtatccccgaagatcg

SEQ ID NO: 451219 - DNA, 53 bp, Artificial
  Synthetic oligonucleotide
tagaacgtgtcagatttgggcgtggaccgccaccagattcgacgtttgggtcg

SEQ ID NO: 451220 - DNA, 52 bp, Artificial
  Synthetic oligonucleotide
tagaacgtgtctatgcaaatggacatgtatatggtgataaggcaatgcctca

SEQ ID NO: 451221 - DNA, 55 bp, Artificial
  Synthetic oligonucleotide
tagaactacaacccagagggtacccttatctatcttttacataagaaagcaccta

SEQ ID NO: 451222 - DNA, 55 bp, Artificial
  Synthetic oligonucleotide
tagaactacaaggtaaggtcaatcaatttaggcattttgacttcgcgggatatgc

SEQ ID NO: 451223 - DNA, 55 bp, Artificial
  Synthetic oligonucleotide
tagaactacagctaaacaaacatttcgagaatttttcggataacgaaatatggaa

SEQ ID NO: 451224 - DNA, 60 bp, Artificial
  Synthetic oligonucleotide
tagaactccagaagtcattaagtactgtgaggacaataaatggatagttccagctgagtg

SEQ ID NO: 451225 - DNA, 58 bp, Artificial
  Synthetic oligonucleotide
tagaactcggttcgaaatccgaccctgtgcgagttctcgaagcgctgaaacatttgac

SEQ ID NO: 451226 - DNA, 59 bp, Artificial
  Synthetic oligonucleotide
tagaactggcagaaaacagggagattttaagagaaccagtacatggagtgtattatgac

SEQ ID NO: 451227 - DNA, 57 bp, Artificial
  Synthetic oligonucleotide
tagaactgtggtaagtgaacagcgcagcaggcgggttaaaaccatcgttgtcagggg

SEQ ID NO: 451228 - DNA, 60 bp, Artificial
  Synthetic oligonucleotide
tagaacttgatgaaataggggaagatgtcgccccaattgagcatattgcgagtatgagaa

SEQ ID NO: 451229 - DNA, 60 bp, Artificial
  Synthetic oligonucleotide
tagaagaacacaggtgaggtactccctggatatgttggtcactgagatgttccgagagta

SEQ ID NO: 451230 - DNA, 60 bp, Artificial
  Synthetic oligonucleotide
tagaagaacagacaattggagttgatgtgcatgctttaggccattggtttgatggtcgtc

SEQ ID NO: 451231 - DNA, 56 bp, Artificial
  Synthetic oligonucleotide
tagaagaatcagacagggtttagaaagggccctgttataacatgggtggcaagtgg

SEQ ID NO: 451232 - DNA, 52 bp, Artificial
  Synthetic oligonucleotide
tagaagacaaccaatcaggtataggcacgcccaattacaaagacacgaaatt

SEQ ID NO: 451233 - DNA, 57 bp, Artificial
  Synthetic oligonucleotide
tagaagacacctatcgctttataaaatcactagctactatctgtcctaaagacgctc

SEQ ID NO: 451234 - DNA, 60 bp, Artificial
  Synthetic oligonucleotide
tagaagacatgcccctgtgggccatgacctttggatacagtgactacgtaagcacacaac

SEQ ID NO: 451235 - DNA, 53 bp, Artificial
  Synthetic oligonucleotide
tagaagaccgcttcagaaaactattcggctcaccctctaaagatgaatacaca

SEQ ID NO: 451236 - DNA, 60 bp, Artificial
  Synthetic oligonucleotide
tagaagaccttttaatattatggggaattcatcaccctaatgatgcagctgaacagataa

SEQ ID NO: 451237 - DNA, 54 bp, Artificial
  Synthetic oligonucleotide
tagaagactgctggaaggtaagcaagaatgagggcgtgtccaggattgctgata

SEQ ID NO: 451238 - DNA, 56 bp, Artificial
  Synthetic oligonucleotide
tagaagactggaatttagcttttatacctcaacctaacgctagtattgaagacaaa

SEQ ID NO: 451239 - DNA, 59 bp, Artificial
  Synthetic oligonucleotide
tagaagagagctatctttgatgtcccacaccttaactactccagagggattccctctta

SEQ ID NO: 451240 - DNA, 55 bp, Artificial
  Synthetic oligonucleotide
tagaagagagggatgaaacccctctcctactcggaaattatgttcacagttactt

SEQ ID NO: 451241 - DNA, 60 bp, Artificial
  Synthetic oligonucleotide
tagaagagatctccaaaatccagcaaatgagcaagagagagttcctttccacctgcagat

SEQ ID NO: 451242 - DNA, 60 bp, Artificial
  Synthetic oligonucleotide
tagaagaggccaataaaggagagaacaactgcttgttacaccctatgagccagcatggga

SEQ ID NO: 451243 - DNA, 59 bp, Artificial
  Synthetic oligonucleotide
tagaagaggcccctgtgttcaagaggacagggtcagcattgcataggttcaagtccgct

SEQ ID NO: 451244 - DNA, 60 bp, Artificial
  Synthetic oligonucleotide
tagaagatcacatcaaattagattctcagagtctgcgacatcatattcgggatatatttt

SEQ ID NO: 451245 - DNA, 60 bp, Artificial
  Synthetic oligonucleotide
tagaagatcacgtcgaaagtatggcccagcaagtctgctaatgcccaactatgctctgca

SEQ ID NO: 451246 - DNA, 55 bp, Artificial
  Synthetic oligonucleotide
tagaagatcatatagtgtgtaatgccgcgtgtgaagatcaacgcacggaggctct

SEQ ID NO: 451247 - DNA, 60 bp, Artificial
  Synthetic oligonucleotide
tagaagatgatcaagtgtaacattcatgttacctagcgaagggtcctccgggatgtgctc

SEQ ID NO: 451248 - DNA, 54 bp, Artificial
  Synthetic oligonucleotide
tagaagattgtcagtggaatgaaagtacggtgcaagctccaattgaaaattgca

SEQ ID NO: 451249 - DNA, 60 bp, Artificial
  Synthetic oligonucleotide
tagaagatttgtcgcatataaaggtaaaatgagaattatggacattacacaatcgctcaa

SEQ ID NO: 451250 - DNA, 55 bp, Artificial
  Synthetic oligonucleotide
tagaagcaccaaaagcccatgctgttatagttgaagatactggttctcttggact

SEQ ID NO: 451251 - DNA, 60 bp, Artificial
  Synthetic oligonucleotide
tagaagcagaacctccattcggagacagctacatcatcataggagtagagccgggacaat

SEQ ID NO: 451252 - DNA, 60 bp, Artificial
  Synthetic oligonucleotide
tagaagcggacttttgcactggggcgcttattgtacttcgtgaggcccatgtctctcctg

SEQ ID NO: 451253 - DNA, 59 bp, Artificial
  Synthetic oligonucleotide
tagaagcgtgccaattggaagagctcttttgctccccgagtactccacactgtaccgcc

SEQ ID NO: 451254 - DNA, 60 bp, Artificial
  Synthetic oligonucleotide
tagaagctcatctattagatctaacatatcatccatttcagtgtggacggatgtttccga

SEQ ID NO: 451255 - DNA, 60 bp, Artificial
  Synthetic oligonucleotide
tagaagctcgagccgcacgatcagttggcatccgcgtacaagcgatgacacctccccgtg

SEQ ID NO: 451256 - DNA, 60 bp, Artificial
  Synthetic oligonucleotide
tagaagcttgtgggtatagcgatagagtgctgcaattaacactgggaaactccactataa

SEQ ID NO: 451257 - DNA, 59 bp, Artificial
  Synthetic oligonucleotide
tagaaggaccccacggtgcttcaactgtgggcaattcggacatatagccaaagattgcc

SEQ ID NO: 451258 - DNA, 60 bp, Artificial
  Synthetic oligonucleotide
tagaaggaggatggacaggcatgatagatgggtggtacggataccatcatgagaattcgc

SEQ ID NO: 451259 - DNA, 59 bp, Artificial
  Synthetic oligonucleotide
tagaaggaggccatatgcggcgaagatagctcaggttgctcgtgctaaagtgggttatc

SEQ ID NO: 451260 - DNA, 57 bp, Artificial
  Synthetic oligonucleotide
tagaaggccatctctctagcatcatgatcgcgatcccgggatttggcaaggatccca

SEQ ID NO: 451261 - DNA, 60 bp, Artificial
  Synthetic oligonucleotide
tagaaggccgtttggttcaccgatggattttggacaggtgttcaacatgtatgataatga

SEQ ID NO: 451262 - DNA, 60 bp, Artificial
  Synthetic oligonucleotide
tagaaggcgcatataagattaaggctgtaattagtgcattaaccggcatagatttaactc

SEQ ID NO: 451263 - DNA, 57 bp, Artificial
  Synthetic oligonucleotide
tagaaggggcatggggttctggtgttggatttacacttacatgtacagttggtttga

SEQ ID NO: 451264 - DNA, 58 bp, Artificial
  Synthetic oligonucleotide
tagaagggtacttaacacattccaaagacgcctgtataacaggcggcttgttcagcaa

SEQ ID NO: 451265 - DNA, 55 bp, Artificial
  Synthetic oligonucleotide
tagaagggtcgacgtgtttatctactaggcgttcttcttgctgggctacttttaa

SEQ ID NO: 451266 - DNA, 53 bp, Artificial
  Synthetic oligonucleotide
tagaaggtatggactaccgctaatggaattccgtgccacgaattcactggtaa

SEQ ID NO: 451267 - DNA, 53 bp, Artificial
  Synthetic oligonucleotide
tagaaggtgtgaatctcgagtgcgagaccgaagcttaaactcgagagagcctt

SEQ ID NO: 451268 - DNA, 60 bp, Artificial
  Synthetic oligonucleotide
tagaaggttattgccagaaactatggaccttaatctcaatcagtgcgatccacctagcag

SEQ ID NO: 451269 - DNA, 58 bp, Artificial
  Synthetic oligonucleotide
tagaagtaaacatgtaatagacgccggtggaaatatatctgctagtgtcaaaggtaag

SEQ ID NO: 451270 - DNA, 58 bp, Artificial
  Synthetic oligonucleotide
tagaagtaagacgattagacattttcaatttaatactaatgaacatggaccaaataga

SEQ ID NO: 451271 - DNA, 58 bp, Artificial
  Synthetic oligonucleotide
tagaagtaggtctaccgcaaactaacatagtagaagacacagcaaccaagcgaggtag

SEQ ID NO: 451272 - DNA, 50 bp, Artificial
  Synthetic oligonucleotide
tagaagtctgtcattgactaacattaacatttgtccaacaactattcccg

SEQ ID NO: 451273 - DNA, 50 bp, Artificial
  Synthetic oligonucleotide
tagaagtcttcggaccttgggttaaaaaacgtctaggcccgccccccaca

SEQ ID NO: 451274 - DNA, 51 bp, Artificial
  Synthetic oligonucleotide
tagaagtgtgtggactcttgagatggatgccggagttcttactggaaggtt

SEQ ID NO: 451275 - DNA, 60 bp, Artificial
  Synthetic oligonucleotide
tagaagtgttgcttacaacaagattagtgtcagctatggcgaaagaattcagagattggg

SEQ ID NO: 451276 - DNA, 55 bp, Artificial
  Synthetic oligonucleotide
tagaatacttccaaatttatggatccttcatctagatcgtgttctctggaactgc

SEQ ID NO: 451277 - DNA, 60 bp, Artificial
  Synthetic oligonucleotide
tagaatagtcaagtctaggtatgttaggacttgtgactcattcctgatgacaaattcacc

SEQ ID NO: 451278 - DNA, 59 bp, Artificial
  Synthetic oligonucleotide
tagaatagtcttagaatataggtacctaaatgcaccttccatgaatcgaaattggtatg

SEQ ID NO: 451279 - DNA, 60 bp, Artificial
  Synthetic oligonucleotide
tagaatcatcagaaggctgcagacagatactgggacagctacaaccgtcccttcagacag

SEQ ID NO: 451280 - DNA, 55 bp, Artificial
  Synthetic oligonucleotide
tagaatccttgatggaagggactgtacactgatagatgccctcttgggagacccc

SEQ ID NO: 451281 - DNA, 60 bp, Artificial
  Synthetic oligonucleotide
tagaatcgttatgcatctattttccaaatacagttgtaggatcacagggacctggccaaa

SEQ ID NO: 451282 - DNA, 51 bp, Artificial
  Synthetic oligonucleotide
tagaatgacaaaaaggctttttcgtactgaaggacaaaaaggggttttcga

SEQ ID NO: 451283 - DNA, 59 bp, Artificial
  Synthetic oligonucleotide
tagaatgacggttagaaatcttgaaaaccaattcgtttgagagcacgcgccgcattaca

SEQ ID NO: 451284 - DNA, 60 bp, Artificial
  Synthetic oligonucleotide
tagaatgactatctgcatacaggggaataatgacaatgctacagcgacggtgtattacaa

SEQ ID NO: 451285 - DNA, 55 bp, Artificial
  Synthetic oligonucleotide
tagaattatacaaatcacaagaggtgactccaccattacctcgcaagatgtggcc

SEQ ID NO: 451286 - DNA, 53 bp, Artificial
  Synthetic oligonucleotide
tagaattcacaacgcagtatcctgtgactttagtgacggaggagagtctctcc

SEQ ID NO: 451287 - DNA, 51 bp, Artificial
  Synthetic oligonucleotide
tagaattgaaagaaggatgtaaagggccacatgtgccccagtggccattaa

SEQ ID NO: 451288 - DNA, 55 bp, Artificial
  Synthetic oligonucleotide
tagaattgaaatctaggtgcccgctaagataattatgtgggcctaacgcacgagc

SEQ ID NO: 451289 - DNA, 60 bp, Artificial
  Synthetic oligonucleotide
tagaattgaatggtgtattagatgctccgttgtcaatgattagtacagttggattggaat

SEQ ID NO: 451290 - DNA, 55 bp, Artificial
  Synthetic oligonucleotide
tagaattgacggaggctgagaccacagctttgacgacggtaaagtcttggactat

SEQ ID NO: 451291 - DNA, 60 bp, Artificial
  Synthetic oligonucleotide
tagaattgggcccagatgtagtcaggatgaaatttaggtatgaagtcaccaatggtgtac

SEQ ID NO: 451292 - DNA, 55 bp, Artificial
  Synthetic oligonucleotide
tagacaaaacaatggcacacatgagaatagtgtaacagctagcaatgggtcagtt

SEQ ID NO: 451293 - DNA, 60 bp, Artificial
  Synthetic oligonucleotide
tagacaaaatctcagcaggcaaaaccaggtgcattgaggcatgtgaagtggactattgta

SEQ ID NO: 451294 - DNA, 58 bp, Artificial
  Synthetic oligonucleotide
tagacaacacagttcgtgaaacgataggagcttcgacctcaagggatgccctcccgaa

SEQ ID NO: 451295 - DNA, 59 bp, Artificial
  Synthetic oligonucleotide
tagacaacgaccacggagtcttgataattgttggtcgagtgttgaagggaacagcagag

SEQ ID NO: 451296 - DNA, 60 bp, Artificial
  Synthetic oligonucleotide
tagacaactgtgacgcgatgccgtgttgagaagaaagcacatctggttcagtaaacccac

SEQ ID NO: 451297 - DNA, 55 bp, Artificial
  Synthetic oligonucleotide
tagacaagcttggcctgggtttaggaaaactgtttggctctgtttggatcgtatc

SEQ ID NO: 451298 - DNA, 60 bp, Artificial
  Synthetic oligonucleotide
tagacaatgagttcaatgagatagaacaacaaataggaaatgtcattaattggacacgag

SEQ ID NO: 451299 - DNA, 60 bp, Artificial
  Synthetic oligonucleotide
tagacaatgcctgggaatttactcacacagctccaaccgctaaaggatggagcgggactc

SEQ ID NO: 451300 - DNA, 51 bp, Artificial
  Synthetic oligonucleotide
tagacacaacaatgaatgggattggatgttcaccagctagtacagaaacat

SEQ ID NO: 451301 - DNA, 59 bp, Artificial
  Synthetic oligonucleotide
tagacacaacggtgttaggctggtaaagcttaaaactgcacatgaggaagggcatcgga

SEQ ID NO: 451302 - DNA, 55 bp, Artificial
  Synthetic oligonucleotide
tagacacaatggatatcttccgcattcctgttcagagcgggaaccaccagagcac

SEQ ID NO: 451303 - DNA, 58 bp, Artificial
  Synthetic oligonucleotide
tagacacagttatggtttatacacaatacgagctagatgacgccaccataaacatacg

SEQ ID NO: 451304 - DNA, 60 bp, Artificial
  Synthetic oligonucleotide
tagacaccagcagtggggtaacaagggcctgctcttatattagtggttcatctttctata

SEQ ID NO: 451305 - DNA, 60 bp, Artificial
  Synthetic oligonucleotide
tagacaccattttccgtcccgcaactctctctatgtaattggtgtctggagtcctatata

SEQ ID NO: 451306 - DNA, 60 bp, Artificial
  Synthetic oligonucleotide
tagacacgaacagagctgagtgtctaaccgcctgggcgggtgccggagctcctgagagcg

SEQ ID NO: 451307 - DNA, 56 bp, Artificial
  Synthetic oligonucleotide
tagacacgcgttgttgttattcggtacattgcgtaaaggaaaaaataactcattga

SEQ ID NO: 451308 - DNA, 60 bp, Artificial
  Synthetic oligonucleotide
tagacacgtctctagtcgagctaggcgctgacattcgtgcggttaaggtgtcggttcatt

SEQ ID NO: 451309 - DNA, 59 bp, Artificial
  Synthetic oligonucleotide
tagacactaaggctcaattaagattcgtaggggcttattgggctatcattacttctaca

SEQ ID NO: 451310 - DNA, 58 bp, Artificial
  Synthetic oligonucleotide
tagacagacggtttgcaggtgctaggggacaaattggttcacccaattatcttcctgc

SEQ ID NO: 451311 - DNA, 55 bp, Artificial
  Synthetic oligonucleotide
tagacagagaagtagaccaagtagagtcgtgatggatgatagttgttcaatgctc

SEQ ID NO: 451312 - DNA, 55 bp, Artificial
  Synthetic oligonucleotide
tagacagaggaatagaccgagtagagttgtgatggatgatagctgctcaatgctc

SEQ ID NO: 451313 - DNA, 59 bp, Artificial
  Synthetic oligonucleotide
tagacagagtgttgttggtgatcttaaacttcttactgatgggaagttgtatgagggta

SEQ ID NO: 451314 - DNA, 52 bp, Artificial
  Synthetic oligonucleotide
tagacagatttggattagcagagagcctgttggaatcaaaagaaggatgtca

SEQ ID NO: 451315 - DNA, 60 bp, Artificial
  Synthetic oligonucleotide
tagacagccatgcaatccagagctgtcattctgaagcacaagtctggttcaagccataag

SEQ ID NO: 451316 - DNA, 60 bp, Artificial
  Synthetic oligonucleotide
tagacagctgcggatcactggggaagatgacaaattgattgctgctgaattgcaggttac

SEQ ID NO: 451317 - DNA, 55 bp, Artificial
  Synthetic oligonucleotide
tagacaggttctataaaactttaagagccgagcaagcttcacaggaggtaaaaaa

SEQ ID NO: 451318 - DNA, 54 bp, Artificial
  Synthetic oligonucleotide
tagacagtcaaaatacaacaatatggggtagtctattagatactttcgttaatt

SEQ ID NO: 451319 - DNA, 59 bp, Artificial
  Synthetic oligonucleotide
tagacataagtctgtcaacctctttattcaggtctctcaacttattgaggtcttcttcc

SEQ ID NO: 451320 - DNA, 60 bp, Artificial
  Synthetic oligonucleotide
tagacatacaccgataggtaaatgagacaccgatatatcggtactcaattggtacctctg

SEQ ID NO: 451321 - DNA, 55 bp, Artificial
  Synthetic oligonucleotide
tagacatagtgactcctatcagaagattgctaacgaccctgctactagcattgtc

SEQ ID NO: 451322 - DNA, 60 bp, Artificial
  Synthetic oligonucleotide
tagacatcaacacagaacaaatgtgccttgaggatgcaatgtatggcactgacggtctcg

SEQ ID NO: 451323 - DNA, 53 bp, Artificial
  Synthetic oligonucleotide
tagacatcatgggggtaatctgttggtgcaatggaatgagacagtgtcaataa

SEQ ID NO: 451324 - DNA, 55 bp, Artificial
  Synthetic oligonucleotide
tagacatccccgaaagccctaccaaataagtagtcaggtaccttaactatctgcc

SEQ ID NO: 451325 - DNA, 60 bp, Artificial
  Synthetic oligonucleotide
tagacatcgtacagtctctgggaggtggggtgcgtgactgtataggagtggacattttga

SEQ ID NO: 451326 - DNA, 55 bp, Artificial
  Synthetic oligonucleotide
tagacatctctagactcactgagagccaacgcagcgccactagtgcatcgaatcc

SEQ ID NO: 451327 - DNA, 60 bp, Artificial
  Synthetic oligonucleotide
tagacatgaccactgaacaatggaacactgtggattacttcgaaacggacaaagctcact

SEQ ID NO: 451328 - DNA, 55 bp, Artificial
  Synthetic oligonucleotide
tagacatggtgaaaatatccctgtcagagttggtagggtcctggactgtctcttc

SEQ ID NO: 451329 - DNA, 53 bp, Artificial
  Synthetic oligonucleotide
tagacatgtcatctctgactcatatgaaaaaactgataagacatgacaacgag

SEQ ID NO: 451330 - DNA, 60 bp, Artificial
  Synthetic oligonucleotide
tagacatgtctttaccccacatgaacgattgacaagactttctgtcccaaatgtttgcga

SEQ ID NO: 451331 - DNA, 60 bp, Artificial
  Synthetic oligonucleotide
tagacatgttctcgatgttctctggcatcaaaagtaccatcgacgcagctaaatctatag

SEQ ID NO: 451332 - DNA, 53 bp, Artificial
  Synthetic oligonucleotide
tagacattagcacggagcctatgagactagaggatgcagtgtacggtacagag

SEQ ID NO: 451333 - DNA, 58 bp, Artificial
  Synthetic oligonucleotide
tagacattaggtctgataaaccgaaaatgtctaaaggcgagttgaattctgagtggga

SEQ ID NO: 451334 - DNA, 51 bp, Artificial
  Synthetic oligonucleotide
tagacattccatactggcacttgccatccctatatcttatactcgcgcccc

SEQ ID NO: 451335 - DNA, 52 bp, Artificial
  Synthetic oligonucleotide
tagacattcttgaatttgattcgcgtatgtttatcaagtctggcacgcccgt

SEQ ID NO: 451336 - DNA, 55 bp, Artificial
  Synthetic oligonucleotide
tagacatttgtggacggcaacaaccgttccatagagtaagggctggttggaaagg

SEQ ID NO: 451337 - DNA, 56 bp, Artificial
  Synthetic oligonucleotide
tagacattttcaatttgatactaatgaacatggaccaaatagaacgtgcatcagat

SEQ ID NO: 451338 - DNA, 52 bp, Artificial
  Synthetic oligonucleotide
tagaccaaggatcatggaatagaaataagttcatgggtcacaaacatgggag

SEQ ID NO: 451339 - DNA, 57 bp, Artificial
  Synthetic oligonucleotide
tagaccacaaactctagtgatcggaactatgccaactaatttaccaacctggaagtc

SEQ ID NO: 451340 - DNA, 57 bp, Artificial
  Synthetic oligonucleotide
tagaccacccttacccagtgtagctaaattaacagaggatagatggaacacgcccca

SEQ ID NO: 451341 - DNA, 56 bp, Artificial
  Synthetic oligonucleotide
tagaccactcagacccaaacaaaggcttcgttccctactcatttagctttggcaac

SEQ ID NO: 451342 - DNA, 60 bp, Artificial
  Synthetic oligonucleotide
tagaccactgcaatgggatactgaaaagcagtggagagtgagaaatgactttgaggacca

SEQ ID NO: 451343 - DNA, 55 bp, Artificial
  Synthetic oligonucleotide
tagaccagacgggcgacgctggaggtggagcggttcaggagcgtggacagctctt

SEQ ID NO: 451344 - DNA, 55 bp, Artificial
  Synthetic oligonucleotide
tagaccagatcagagcccgggagctctctggctagcaagggaacccactgcttac

SEQ ID NO: 451345 - DNA, 53 bp, Artificial
  Synthetic oligonucleotide
tagaccagcttaatcccgagggcccggcaggtcccggagggccccccgccatc

SEQ ID NO: 451346 - DNA, 60 bp, Artificial
  Synthetic oligonucleotide
tagaccagtactcgtggatggtagctaccgcatgatccgcaatttgcatcaaggtctctc

SEQ ID NO: 451347 - DNA, 58 bp, Artificial
  Synthetic oligonucleotide
tagaccatgtgcacaattgaaagggcgggacttagttattgttcagttacccgactca

SEQ ID NO: 451348 - DNA, 60 bp, Artificial
  Synthetic oligonucleotide
tagacccaacaattctttgtgatgaaagtgtcactgtcttcagaatccaaatgaacctaa

SEQ ID NO: 451349 - DNA, 60 bp, Artificial
  Synthetic oligonucleotide
tagacccaactgatgcgtatgaaaaacacgtcacacgcttcaaccccaatggacagcgga

SEQ ID NO: 451350 - DNA, 60 bp, Artificial
  Synthetic oligonucleotide
tagacccacaagaattggctaggactgctgtgagttatggtctgaccataacacctgcca

SEQ ID NO: 451351 - DNA, 54 bp, Artificial
  Synthetic oligonucleotide
tagacccacctttttcaattctaagaactagggtgtccagactatatggtttac

SEQ ID NO: 451352 - DNA, 54 bp, Artificial
  Synthetic oligonucleotide
tagacccagattttatgttgttggtaaagaacgtctaggagaagttttcacttc

SEQ ID NO: 451353 - DNA, 54 bp, Artificial
  Synthetic oligonucleotide
tagacccagtcactaaaaaggacactaagtttcagcccccacaaagcttggtat

SEQ ID NO: 451354 - DNA, 57 bp, Artificial
  Synthetic oligonucleotide
tagaccccatgaacgagcctacctacttgctactcttgttcggtgtgtttgaccaag

SEQ ID NO: 451355 - DNA, 51 bp, Artificial
  Synthetic oligonucleotide
tagaccccccaggagcaaccttagggataaacccttctatccttgggcccc

SEQ ID NO: 451356 - DNA, 54 bp, Artificial
  Synthetic oligonucleotide
tagacccgcctctactgcattacggaagtctctagccgcctccgcgctactagc

SEQ ID NO: 451357 - DNA, 53 bp, Artificial
  Synthetic oligonucleotide
tagaccctaaactagagccctggaaccatccgggaggtcagcctaaaactcct

SEQ ID NO: 451358 - DNA, 58 bp, Artificial
  Synthetic oligonucleotide
tagaccctattattgaagtccaagtgtccactcaagtaattatgtgggcctaacgcac

SEQ ID NO: 451359 - DNA, 57 bp, Artificial
  Synthetic oligonucleotide
tagaccctattgtattagccggtatatcccacagacccaaactacctatgcctactc

SEQ ID NO: 451360 - DNA, 55 bp, Artificial
  Synthetic oligonucleotide
tagaccctgactataggaagtacacagcattcactataccctcagtaaacaatca

SEQ ID NO: 451361 - DNA, 55 bp, Artificial
  Synthetic oligonucleotide
tagaccctgttggttctgtggcccctcctgttggcagggatccttctcctcctcc

SEQ ID NO: 451362 - DNA, 58 bp, Artificial
  Synthetic oligonucleotide
tagacccttactggggagacgtgaagaaggacctgatttcatatggagggccatggaa

SEQ ID NO: 451363 - DNA, 56 bp, Artificial
  Synthetic oligonucleotide
tagaccgatttttaagggtgagagatcaaagagggaacgcactatggtctcccgaa

SEQ ID NO: 451364 - DNA, 55 bp, Artificial
  Synthetic oligonucleotide
tagaccgcaggtggttaacggtctttagcactttagtgctttcgttgcgtattag

SEQ ID NO: 451365 - DNA, 58 bp, Artificial
  Synthetic oligonucleotide
tagaccggcagctccttatcaagtaccaactataggagtgtacggagtacctggctcg

SEQ ID NO: 451366 - DNA, 54 bp, Artificial
  Synthetic oligonucleotide
tagaccgtacaggccggggtttatcccccggccgatacagcatggtcattttgg

SEQ ID NO: 451367 - DNA, 55 bp, Artificial
  Synthetic oligonucleotide
tagaccgtattggttacgaagggctcaaggaactaataatggaatatgttgggga

SEQ ID NO: 451368 - DNA, 54 bp, Artificial
  Synthetic oligonucleotide
tagacctaacgataccttattaattcgtacgcttttagtagtatgtggaggtat

SEQ ID NO: 451369 - DNA, 60 bp, Artificial
  Synthetic oligonucleotide
tagacctactgaataagtcaaatcctataggcatcaaggacagtgatggaaaatcacgat

SEQ ID NO: 451370 - DNA, 56 bp, Artificial
  Synthetic oligonucleotide
tagacctagccaggtaccaaggaaccaccttaaaactctacagacacgccacagta

SEQ ID NO: 451371 - DNA, 59 bp, Artificial
  Synthetic oligonucleotide
tagacctatagaagctcctgttgaaacagttcgcccagatataaccgtagagagaccca

SEQ ID NO: 451372 - DNA, 54 bp, Artificial
  Synthetic oligonucleotide
tagacctcgtaccaaaggcgtcgatgaataccactctctcatggtttaaatctc

SEQ ID NO: 451373 - DNA, 59 bp, Artificial
  Synthetic oligonucleotide
tagacctgaccagaccaacggacagcagaaatggagagcctgacagaacgttacgattc

SEQ ID NO: 451374 - DNA, 57 bp, Artificial
  Synthetic oligonucleotide
tagacgaaactccttgatggttttgaaatacaggggattgtggattgtccagataag

SEQ ID NO: 451375 - DNA, 60 bp, Artificial
  Synthetic oligonucleotide
tagacgaatttcgagtagataatacgttccccattatgcaagcaaaatggatgtcacttg

SEQ ID NO: 451376 - DNA, 57 bp, Artificial
  Synthetic oligonucleotide
tagacgaccttacgtggacccaacattggttgtggcagcctagcaaaattgcgtggg

SEQ ID NO: 451377 - DNA, 54 bp, Artificial
  Synthetic oligonucleotide
tagacgagatggacagagtgctgttttggcgaatgtgggacatttcgccaacgg

SEQ ID NO: 451378 - DNA, 60 bp, Artificial
  Synthetic oligonucleotide
tagacgaggcatggtgaaatgaatcggtgtccctcaaagctctatggcaatcggtgtatc

SEQ ID NO: 451379 - DNA, 54 bp, Artificial
  Synthetic oligonucleotide
tagacgagtcaccgactatttggatagacacatatgcgatcagatatttgcgaa

SEQ ID NO: 451380 - DNA, 60 bp, Artificial
  Synthetic oligonucleotide
tagacgagtgccatgtcacggacagtgcgactatagctttcaattgtgcgcttaaggagt

SEQ ID NO: 451381 - DNA, 55 bp, Artificial
  Synthetic oligonucleotide
tagacgatctctatcagatttaccgcaaagaacggatagacgactgactgtggtg

SEQ ID NO: 451382 - DNA, 55 bp, Artificial
  Synthetic oligonucleotide
tagacgcacacccctgggagatgtgtgtaggtattatacacagtggtcaggtagc

SEQ ID NO: 451383 - DNA, 57 bp, Artificial
  Synthetic oligonucleotide
tagacgcagactgtaccgacgctacagacgcaaaaaacgtaggagacgaaagcccaa

SEQ ID NO: 451384 - DNA, 53 bp, Artificial
  Synthetic oligonucleotide
tagacgcgacgtacaaggcatgacgatattagaaacgatagattggttcaaca

SEQ ID NO: 451385 - DNA, 60 bp, Artificial
  Synthetic oligonucleotide
tagacgctaactctcgtggtcttgtgtggcaagaaggactctcggatagggtgcccgaga

SEQ ID NO: 451386 - DNA, 52 bp, Artificial
  Synthetic oligonucleotide
tagacggatctactagtcgccatagagacagagagggggtcagctgttgact

SEQ ID NO: 451387 - DNA, 60 bp, Artificial
  Synthetic oligonucleotide
tagacggatgatgcctgagtgcatcatgtggggaatgctggaggtagccgatgtaacaca

SEQ ID NO: 451388 - DNA, 53 bp, Artificial
  Synthetic oligonucleotide
tagacggcgagggctccttttcgtttgccaccctggtccacgtgacgtaccat

SEQ ID NO: 451389 - DNA, 60 bp, Artificial
  Synthetic oligonucleotide
tagacggctggtacggtttcagacaccagaactctgaaggtacaggacaagctgcagacc

SEQ ID NO: 451390 - DNA, 54 bp, Artificial
  Synthetic oligonucleotide
tagacgggaaggcataattcaaacacgttcaggaactcgagtagggtccagcca

SEQ ID NO: 451391 - DNA, 60 bp, Artificial
  Synthetic oligonucleotide
tagacgggatttcacttcatgtaagttgactgacccagatgcactggaaaggcgctttcc

SEQ ID NO: 451392 - DNA, 55 bp, Artificial
  Synthetic oligonucleotide
tagacggtaacatccttagacctagctacaaccagtctgctacacgcacgacacg

SEQ ID NO: 451393 - DNA, 55 bp, Artificial
  Synthetic oligonucleotide
tagacggtcgcgtaacccctgtccctgatccttttaagttgctgaagaaagctgg

SEQ ID NO: 451394 - DNA, 59 bp, Artificial
  Synthetic oligonucleotide
tagacgtaaaccaaatctgcccattatgagatatggtttcaagaacagtattgcggaaa

SEQ ID NO: 451395 - DNA, 60 bp, Artificial
  Synthetic oligonucleotide
tagacgtcagttcatgggacgtcacagtaaagtggctttgcgactgtatcgcaacttagg

SEQ ID NO: 451396 - DNA, 53 bp, Artificial
  Synthetic oligonucleotide
tagacgtcgtccttgctagattttgtacccccagagaccttgtatttcccgga

SEQ ID NO: 451397 - DNA, 60 bp, Artificial
  Synthetic oligonucleotide
tagacgtgcaatggatgtatcgggtgtacttgcaggccttgacctactgaaggagcacac

SEQ ID NO: 451398 - DNA, 60 bp, Artificial
  Synthetic oligonucleotide
tagacgttccaggggatggttcatgcgggatacacgctatggtgaaggacctgacagtgc

SEQ ID NO: 451399 - DNA, 60 bp, Artificial
  Synthetic oligonucleotide
tagacgttggggctgacgcgaatgacatttcatatcaagatcatgattacgtgttagatc

SEQ ID NO: 451400 - DNA, 56 bp, Artificial
  Synthetic oligonucleotide
tagacgttgtggatggcgttaatcataaaatcgactatacatcgaatacttgtact

SEQ ID NO: 451401 - DNA, 58 bp, Artificial
  Synthetic oligonucleotide
tagactactagagattaccagggaatttagtgttaatgcaggtgtaactacacctgta

SEQ ID NO: 451402 - DNA, 60 bp, Artificial
  Synthetic oligonucleotide
tagactactcggaaaatcgtgttgccttatcgtcagacgcaattagtattcggctgcgtc

SEQ ID NO: 451403 - DNA, 56 bp, Artificial
  Synthetic oligonucleotide
tagactagagccctggaagcatccaggaagtaaacctgggactccttgtaccgctt

SEQ ID NO: 451404 - DNA, 60 bp, Artificial
  Synthetic oligonucleotide
tagactcaagatggacaaattggaactcaaggggatgagctatgcaatgtgcttgaatac

SEQ ID NO: 451405 - DNA, 55 bp, Artificial
  Synthetic oligonucleotide
tagactcagttcgagatgtagccgaaagtcgacttaacgcaggtggacaggaggt

SEQ ID NO: 451406 - DNA, 49 bp, Artificial
  Synthetic oligonucleotide
tagactccgtcccccttctccacactccttccccccgcgggcccccccc

SEQ ID NO: 451407 - DNA, 59 bp, Artificial
  Synthetic oligonucleotide
tagactcgctgcctcacgtaactttcacattctgtaaaggaggatctagtacgaggagt

SEQ ID NO: 451408 - DNA, 58 bp, Artificial
  Synthetic oligonucleotide
tagactctggtaactagaagatccctcagactactcgagacagtgaaaaatctctagc

SEQ ID NO: 451409 - DNA, 60 bp, Artificial
  Synthetic oligonucleotide
tagactgcaacacgtgcgtcacccagacagtcgattttagccttgaccctactttcacca

SEQ ID NO: 451410 - DNA, 55 bp, Artificial
  Synthetic oligonucleotide
tagactgcacacatctagaagggaaagtcatcctagtggcagtacatgtagccag

SEQ ID NO: 451411 - DNA, 58 bp, Artificial
  Synthetic oligonucleotide
tagactgccctagtggttatgccgaaacgattaacacgtctttggaattgtcagacga

SEQ ID NO: 451412 - DNA, 52 bp, Artificial
  Synthetic oligonucleotide
tagactgctaacgcggttgaaggagaaaacgttcgttacccggccaattact

SEQ ID NO: 451413 - DNA, 50 bp, Artificial
  Synthetic oligonucleotide
tagactgcttcggcgtttacctgagaattggatttattgtgatgccgacg

SEQ ID NO: 451414 - DNA, 56 bp, Artificial
  Synthetic oligonucleotide
tagactgcttgcgcggttgaaggagaaaacgttcgttatccggctaactacttcga

SEQ ID NO: 451415 - DNA, 60 bp, Artificial
  Synthetic oligonucleotide
tagactggctaactaaagacacctcagtatatgagaaaacacagagtaaatgtcttatac

SEQ ID NO: 451416 - DNA, 58 bp, Artificial
  Synthetic oligonucleotide
tagactgggacgacgagccacaattagaacccgtagtggggcacaggttggcactcaa

SEQ ID NO: 451417 - DNA, 60 bp, Artificial
  Synthetic oligonucleotide
tagactgtagtccaggaatatggcaattagattgcacacatctagaaggaaaagtaatcc

SEQ ID NO: 451418 - DNA, 60 bp, Artificial
  Synthetic oligonucleotide
tagactgtatatcttgtgcaaaatcagctacaggcctgaaccaaattagcagtagcaaca

SEQ ID NO: 451419 - DNA, 60 bp, Artificial
  Synthetic oligonucleotide
tagactgtcaaatctacggggcctgttactccattgaaccactcgatctacctcagatca

SEQ ID NO: 451420 - DNA, 55 bp, Artificial
  Synthetic oligonucleotide
tagactgtggtgccctccactttatggtggatgggaggcactccggaagactcgg

SEQ ID NO: 451421 - DNA, 54 bp, Artificial
  Synthetic oligonucleotide
tagactgttcacacggttgaaggagaaagcgtccgttacccggctaactacttc

SEQ ID NO: 451422 - DNA, 54 bp, Artificial
  Synthetic oligonucleotide
tagacttaagggaaactattctgttgaagctgctagggaaaaactactattacc

SEQ ID NO: 451423 - DNA, 56 bp, Artificial
  Synthetic oligonucleotide
tagacttggccaattgtttcaagcgtttctacccctcgcaaaagacttattagctc

SEQ ID NO: 451424 - DNA, 58 bp, Artificial
  Synthetic oligonucleotide
tagacttggtcaactggttgacttgaccagactgttagcctacaattacgaaacacta

SEQ ID NO: 451425 - DNA, 54 bp, Artificial
  Synthetic oligonucleotide
tagacttggttaaaacgtcgttaactggtacttattcacagtatggaccactat

SEQ ID NO: 451426 - DNA, 55 bp, Artificial
  Synthetic oligonucleotide
tagactttggcttgaaagtggttgctgatcttgacaccgactctcgttgtgtgag

SEQ ID NO: 451427 - DNA, 52 bp, Artificial
  Synthetic oligonucleotide
tagactttgtaataggaggctgtaggcataaattggtctgcgcaccatcacc

SEQ ID NO: 451428 - DNA, 54 bp, Artificial
  Synthetic oligonucleotide
tagagaaactgattactggtgtaagttgcacagaaaacagctttcaaggttact

SEQ ID NO: 451429 - DNA, 59 bp, Artificial
  Synthetic oligonucleotide
tagagaaattaacaactacacagacacaatataccagttgcttgaagaatcgcaaatcc

SEQ ID NO: 451430 - DNA, 57 bp, Artificial
  Synthetic oligonucleotide
tagagaaattgattactggtgtgagctgcacagagaatagcttccaaggttattaca

SEQ ID NO: 451431 - DNA, 57 bp, Artificial
  Synthetic oligonucleotide
tagagaacacggaaaggcatacgaccgaggacgttaatcggaacatgcacaacttac

SEQ ID NO: 451432 - DNA, 60 bp, Artificial
  Synthetic oligonucleotide
tagagaaccagatcacgaatttagagcagtccgctgcctcacaagaggaccttgaagcta

SEQ ID NO: 451433 - DNA, 55 bp, Artificial
  Synthetic oligonucleotide
tagagaacctggtggtcctcaatgcggcgtctgtggccggagcgcatggccttct

SEQ ID NO: 451434 - DNA, 56 bp, Artificial
  Synthetic oligonucleotide
tagagaactgtacacgcaccctccagaacacggagcagaacacccttgtcgtgtat

SEQ ID NO: 451435 - DNA, 59 bp, Artificial
  Synthetic oligonucleotide
tagagaagctaggagtgtgctacaaacaacaatattttcatagagttagggataattgg

SEQ ID NO: 451436 - DNA, 57 bp, Artificial
  Synthetic oligonucleotide
tagagaataacgcgtatatctttacaagaataaacctgtttgatacagaaagaacac

SEQ ID NO: 451437 - DNA, 59 bp, Artificial
  Synthetic oligonucleotide
tagagaatataccatgttaattagagacgaagttgtaaaaatgctagaggaggcagtta

SEQ ID NO: 451438 - DNA, 53 bp, Artificial
  Synthetic oligonucleotide
tagagaatctcagcggaatggaatagctccgcaatcagatgcattaagaaaac

SEQ ID NO: 451439 - DNA, 60 bp, Artificial
  Synthetic oligonucleotide
tagagaatggggatgtgttcatacgaaggttaagtgcattgggattggtgatcgaagcac

SEQ ID NO: 451440 - DNA, 55 bp, Artificial
  Synthetic oligonucleotide
tagagaattgcgattgctgttgtaataagtgtgatgagtggttgcacgattgtaa

SEQ ID NO: 451441 - DNA, 55 bp, Artificial
  Synthetic oligonucleotide
tagagacaaacatgctccattcgctcctctccgtaataatcacaggatgacaatc

SEQ ID NO: 451442 - DNA, 60 bp, Artificial
  Synthetic oligonucleotide
tagagacaacactcaaacactggaggcagctttacaacttgctctcattacttgtaacaa

SEQ ID NO: 451443 - DNA, 60 bp, Artificial
  Synthetic oligonucleotide
tagagacacgtatgtattgtactcgcagtatcaaggtcacggctggacacatacgttcgc

SEQ ID NO: 451444 - DNA, 57 bp, Artificial
  Synthetic oligonucleotide
tagagacacttcgaaatttacgaatgaacggctactggtttcactccttgagtataa

SEQ ID NO: 451445 - DNA, 58 bp, Artificial
  Synthetic oligonucleotide
tagagacagatagggttaaccaggagattgatgaagctatagagcgtgccatggaaga

SEQ ID NO: 451446 - DNA, 56 bp, Artificial
  Synthetic oligonucleotide
tagagaccaacctcccacaggtcctcccccaatgcgtggtgttcacagaattatca

SEQ ID NO: 451447 - DNA, 60 bp, Artificial
  Synthetic oligonucleotide
tagagacccacataatatatgggctactcataactgtgtacccctagatccacatcccta

SEQ ID NO: 451448 - DNA, 57 bp, Artificial
  Synthetic oligonucleotide
tagagacccctggacactgccccagacaagccttgaggtgtttatgtctaatccctc

SEQ ID NO: 451449 - DNA, 55 bp, Artificial
  Synthetic oligonucleotide
tagagaccctgcagcgctcgctccccgactttgccagccagagcatgatgcatgc

SEQ ID NO: 451450 - DNA, 57 bp, Artificial
  Synthetic oligonucleotide
tagagaccgtcgaaagacgcgactgtgtacccaggatcctcttacagggttgtgtag

SEQ ID NO: 451451 - DNA, 54 bp, Artificial
  Synthetic oligonucleotide
tagagacgaccacggaaaagtagaaaccaacggacaacttgcgcccggtgtcca

SEQ ID NO: 451452 - DNA, 59 bp, Artificial
  Synthetic oligonucleotide
tagagacggatgccgctctgcctcgactagcggccatggtggaagatggcaagcttaag

SEQ ID NO: 451453 - DNA, 54 bp, Artificial
  Synthetic oligonucleotide
tagagacggccgtaacagcgattatcggtataagccgagtgcggtgataacgtt

SEQ ID NO: 451454 - DNA, 55 bp, Artificial
  Synthetic oligonucleotide
tagagactaccaagagatcgatgtattagagttctgtactaggatgctcgatccg

SEQ ID NO: 451455 - DNA, 51 bp, Artificial
  Synthetic oligonucleotide
tagagactccaataggtaaataagaccccaattgagtccccaatatattgg

SEQ ID NO: 451456 - DNA, 56 bp, Artificial
  Synthetic oligonucleotide
tagagactccttggctagatttttggaagaaactacctggacaattgtaaatgccc

SEQ ID NO: 451457 - DNA, 55 bp, Artificial
  Synthetic oligonucleotide
tagagactgggtactgactgtttatgctgtacaagatgagctgttagaaagttct

SEQ ID NO: 451458 - DNA, 60 bp, Artificial
  Synthetic oligonucleotide
tagagagacaaacagatgtactgaggccaactccacgattggtctactagcgggtactag

SEQ ID NO: 451459 - DNA, 60 bp, Artificial
  Synthetic oligonucleotide
tagagagacaaacagctgtactgagactgactccacgatcggtctactagcgggtgctag

SEQ ID NO: 451460 - DNA, 55 bp, Artificial
  Synthetic oligonucleotide
tagagagagaactggttcgcaaaaccagattcctaccagtagctggcggaacaag

SEQ ID NO: 451461 - DNA, 60 bp, Artificial
  Synthetic oligonucleotide
tagagagagccttaaatcagtatagagcagaagacaaccttagggacctcaatgaccaca

SEQ ID NO: 451462 - DNA, 54 bp, Artificial
  Synthetic oligonucleotide
tagagagcacagatttccacgccaaccaacctagtaggttcacccctgttgggt

SEQ ID NO: 451463 - DNA, 56 bp, Artificial
  Synthetic oligonucleotide
tagagagcacctgggatatgtgaggaaaatgtttttcgcttgtattctaaaacggg

SEQ ID NO: 451464 - DNA, 60 bp, Artificial
  Synthetic oligonucleotide
tagagagctgcagaaagagcttagaaaatcatgtcgtttaggggtagatcctggcatttt

SEQ ID NO: 451465 - DNA, 55 bp, Artificial
  Synthetic oligonucleotide
tagagaggaacatagtgcatttgaacagtactaccatagagaaggaaatttgtcc

SEQ ID NO: 451466 - DNA, 56 bp, Artificial
  Synthetic oligonucleotide
tagagaggaagatccgatcctacaggtttaaggatgacctgggaggacccgactct

SEQ ID NO: 451467 - DNA, 52 bp, Artificial
  Synthetic oligonucleotide
tagagaggacgccttatccactaaatggggaaaagattggccaacagcatca

SEQ ID NO: 451468 - DNA, 55 bp, Artificial
  Synthetic oligonucleotide
tagagaggaggaacctgcgttaatcgcctggctcaagtccatcaaaccagtgttc

SEQ ID NO: 451469 - DNA, 52 bp, Artificial
  Synthetic oligonucleotide
tagagagggacgaaatgtatggctatgtaaatatagctaggaacctagatgg

SEQ ID NO: 451470 - DNA, 59 bp, Artificial
  Synthetic oligonucleotide
tagagagtgcagaggctatagaattaggtgttttaggggaacattctggagatacatct

SEQ ID NO: 451471 - DNA, 60 bp, Artificial
  Synthetic oligonucleotide
tagagagtgtggtcatactcagttctacaatttacaagacatacctctctataaggaagg

SEQ ID NO: 451472 - DNA, 53 bp, Artificial
  Synthetic oligonucleotide
tagagagttcctcaatctttcgatttcgagcacgttcagtagcgcaatacatg

SEQ ID NO: 451473 - DNA, 51 bp, Artificial
  Synthetic oligonucleotide
tagagataagaaattcaatggaacaggacaatgtacaaatgtcagcacagt

SEQ ID NO: 451474 - DNA, 60 bp, Artificial
  Synthetic oligonucleotide
tagagatagcctagttggtctctcgttctgtgggatgacaattatcaaaaattcgaacaa

SEQ ID NO: 451475 - DNA, 59 bp, Artificial
  Synthetic oligonucleotide
tagagataggggaattcaacttgttaggaatgattcaactgattaaagcttgtgaaaca

SEQ ID NO: 451476 - DNA, 60 bp, Artificial
  Synthetic oligonucleotide
tagagatatagaatcaacacaatgggagcccaagttagtagacagacgtctggtgcacat

SEQ ID NO: 451477 - DNA, 60 bp, Artificial
  Synthetic oligonucleotide
tagagatatggtatatgtcagatcattagcagctaatttgaactcagtgaaatgtacagg

SEQ ID NO: 451478 - DNA, 60 bp, Artificial
  Synthetic oligonucleotide
tagagatcggtagattagtacgtagcattgcatcatgtactaataaagattgtgaagcat

SEQ ID NO: 451479 - DNA, 60 bp, Artificial
  Synthetic oligonucleotide
tagagatctaatggcacaggggcgcatgctagtggtggctttaagaggtttcaaccctga

SEQ ID NO: 451480 - DNA, 60 bp, Artificial
  Synthetic oligonucleotide
tagagatctgttcggcaatagtgaagtgcgccagtgagtgcactccaccgaaggaacacg

SEQ ID NO: 451481 - DNA, 52 bp, Artificial
  Synthetic oligonucleotide
tagagatgcgacctatctgtgcaataggtagcggcagcggaaacacacttac

SEQ ID NO: 451482 - DNA, 55 bp, Artificial
  Synthetic oligonucleotide
tagagatgcggccgcagtgttgagctccacgtcggctgacagtgtcgtggcgtac

SEQ ID NO: 451483 - DNA, 60 bp, Artificial
  Synthetic oligonucleotide
tagagatgctcgcgtgtgtgaaaaagttgctgatttgtgcgcatatagacagacgcgaag

SEQ ID NO: 451484 - DNA, 55 bp, Artificial
  Synthetic oligonucleotide
tagagatggagattcatactactattctgagcccacaagtgaggataatgcccac

SEQ ID NO: 451485 - DNA, 51 bp, Artificial
  Synthetic oligonucleotide
tagagattacaccaattggatttgcacccacagaagtcaggcgatacacgg

SEQ ID NO: 451486 - DNA, 60 bp, Artificial
  Synthetic oligonucleotide
tagagattatgataaagatcaagatataggtcatttttgcctaagtccgcgttgtaatat

SEQ ID NO: 451487 - DNA, 57 bp, Artificial
  Synthetic oligonucleotide
tagagattttcttatagtgcgtggtaatcagaaaaggtagagatattttcgtataag

SEQ ID NO: 451488 - DNA, 53 bp, Artificial
  Synthetic oligonucleotide
tagagcaaaaattgtcgacatgtacgaaagactaacatcaacgggtaagttta

SEQ ID NO: 451489 - DNA, 60 bp, Artificial
  Synthetic oligonucleotide
tagagcaaaacatcatcgcagcagtgcatctaccaatctatgcggataaggttaacatga

SEQ ID NO: 451490 - DNA, 60 bp, Artificial
  Synthetic oligonucleotide
tagagcaaaccagcgactgaaccccatgcatcaacttttgagacattttcaaaaggatgc

SEQ ID NO: 451491 - DNA, 54 bp, Artificial
  Synthetic oligonucleotide
tagagcaaagtttaacgatgatgggtctggaactataccatttggttgctggaa

SEQ ID NO: 451492 - DNA, 60 bp, Artificial
  Synthetic oligonucleotide
tagagcaaataatacaggagctactgtcaaaagaagccatatacttatcatgggtgccag

SEQ ID NO: 451493 - DNA, 52 bp, Artificial
  Synthetic oligonucleotide
tagagcaacctcaacaggatcattgaatcttccctcaatgtcaatccatgtg

SEQ ID NO: 451494 - DNA, 60 bp, Artificial
  Synthetic oligonucleotide
tagagcactgcctgtcacggactgctaagcagcttcgtgattctggcctcccggccagac

SEQ ID NO: 451495 - DNA, 60 bp, Artificial
  Synthetic oligonucleotide
tagagcagcaagcaactggaacaagctgtactcaaccaacatgtacgcatactccctaac

SEQ ID NO: 451496 - DNA, 60 bp, Artificial
  Synthetic oligonucleotide
tagagcagctaagttggatgaggatgtaaataaactaagaatgatgttatcatcaaaagg

SEQ ID NO: 451497 - DNA, 60 bp, Artificial
  Synthetic oligonucleotide
tagagcaggaagccaatacagctggaccagagtctgtggataccatcaaagcaagacccc

SEQ ID NO: 451498 - DNA, 55 bp, Artificial
  Synthetic oligonucleotide
tagagcaggcctaagtctgttagggcctgcacaacatcattgagtggggtctgtg

SEQ ID NO: 451499 - DNA, 60 bp, Artificial
  Synthetic oligonucleotide
tagagcatctaaatctcatgtcatccctgaaactaatacacaaggccaatgctcttcagg

SEQ ID NO: 451500 - DNA, 60 bp, Artificial
  Synthetic oligonucleotide
tagagcatgacaaaagagatgattgctgtcagtcagaattgtttaagttagtagagttac

SEQ ID NO: 451501 - DNA, 60 bp, Artificial
  Synthetic oligonucleotide
tagagcatgcacctactatatcaccagccagccgaggataaagtgcacaaagtgtaagat

SEQ ID NO: 451502 - DNA, 56 bp, Artificial
  Synthetic oligonucleotide
tagagcctagtgcattccactatgtgtttgagggagtgaaagagccagccgtactc

SEQ ID NO: 451503 - DNA, 60 bp, Artificial
  Synthetic oligonucleotide
tagagcctccttgtggaacgctgctgcgtatgcattttgatgtgtccggcgatgtcagtg

SEQ ID NO: 451504 - DNA, 55 bp, Artificial
  Synthetic oligonucleotide
tagagcctctcacagcatcatggcaggaggggactaccacgtggaccccaccagc

SEQ ID NO: 451505 - DNA, 51 bp, Artificial
  Synthetic oligonucleotide
tagagccttatgtcgtgaacaagttggtacagaaagcagagaggttcagac

SEQ ID NO: 451506 - DNA, 58 bp, Artificial
  Synthetic oligonucleotide
tagagccttgtccagccccttgaattgttggcttcggtacgaagtatcgtctgtggat

SEQ ID NO: 451507 - DNA, 54 bp, Artificial
  Synthetic oligonucleotide
tagagcgaatccccgcgcaagtgtaaaccatcgcgctagcttctggattgcaga

SEQ ID NO: 451508 - DNA, 52 bp, Artificial
  Synthetic oligonucleotide
tagagcgcgctaagagggcagctcaagcctgcctaagcatgggttacactta

SEQ ID NO: 451509 - DNA, 60 bp, Artificial
  Synthetic oligonucleotide
tagagcgctagagctatgcaatatcctttccacgattgggcgtaagatactgaacacgca

SEQ ID NO: 451510 - DNA, 60 bp, Artificial
  Synthetic oligonucleotide
tagagcggctagtctggaaagctctggctgacaggctgcccctcaggtagaataaaaagc

SEQ ID NO: 451511 - DNA, 57 bp, Artificial
  Synthetic oligonucleotide
tagagcggggcgtataaggctaagatttccgctgagcgcgcgacatctaaaaggggt

SEQ ID NO: 451512 - DNA, 56 bp, Artificial
  Synthetic oligonucleotide
tagagcgtgcgtgccaaaagaggctttccgtgtcgtcgtggtttcggaaacacacg

SEQ ID NO: 451513 - DNA, 60 bp, Artificial
  Synthetic oligonucleotide
tagagcgtttcttcacactggagtgtctctgccgagaaatcatactttcttgccacatcc

SEQ ID NO: 451514 - DNA, 60 bp, Artificial
  Synthetic oligonucleotide
tagagctaaggaagcccacatgcagatgaaggccgcagcagtgcgtggttcaaacacacg

SEQ ID NO: 451515 - DNA, 57 bp, Artificial
  Synthetic oligonucleotide
tagagctatgtaatgaacttccaaactacactaatggtcgaggagacattactgtag

SEQ ID NO: 451516 - DNA, 60 bp, Artificial
  Synthetic oligonucleotide
tagagctattagagccaaatcgcaagccttcattgaagcctgcaagttaatcatacctaa

SEQ ID NO: 451517 - DNA, 60 bp, Artificial
  Synthetic oligonucleotide
tagagctctctcaattttgtgtgctgtgttcaagaatctgcaaatcgaaataaactttac

SEQ ID NO: 451518 - DNA, 55 bp, Artificial
  Synthetic oligonucleotide
tagagctgtagtaacacaaggacctaacacagagtttgcattgtccctacttagg

SEQ ID NO: 451519 - DNA, 55 bp, Artificial
  Synthetic oligonucleotide
tagagctgtcttgattatgcaatctgtggccactgtggtagcagttgtgtccctt

SEQ ID NO: 451520 - DNA, 55 bp, Artificial
  Synthetic oligonucleotide
tagagctgtgaaacagaccaccctcggactctgtagcatgactgtgagtaggctg

SEQ ID NO: 451521 - DNA, 60 bp, Artificial
  Synthetic oligonucleotide
tagagcttgacatgtcagaattagcgaacctaatattaaatgaatggctgtgtaacccga

SEQ ID NO: 451522 - DNA, 60 bp, Artificial
  Synthetic oligonucleotide
tagagcttgacgaaataggagaggatgtcgctccaatcgagcatattgcgagtatgagaa

SEQ ID NO: 451523 - DNA, 60 bp, Artificial
  Synthetic oligonucleotide
tagagcttttagaggagcttaagagtgaagctgtcagacattttcctaggatatggctcc

SEQ ID NO: 451524 - DNA, 54 bp, Artificial
  Synthetic oligonucleotide
tagaggaaaggtcccttcaagcgtaagaattttcgaaggaattgagaaatacac

SEQ ID NO: 451525 - DNA, 57 bp, Artificial
  Synthetic oligonucleotide
tagaggaacagacggttgccaacttaaacattgcgtatagatacctatcgacgggga

SEQ ID NO: 451526 - DNA, 60 bp, Artificial
  Synthetic oligonucleotide
tagaggaagcatccacttcggttttaatggcacaagagggtcaagaaacagtaatgctca

SEQ ID NO: 451527 - DNA, 51 bp, Artificial
  Synthetic oligonucleotide
tagaggaagctaatgaaggagaaaacaactgcctgttacaccccatatgcc

SEQ ID NO: 451528 - DNA, 50 bp, Artificial
  Synthetic oligonucleotide
tagaggaatacaaatatcagacccgaaggtactcggaccacccacagtct

SEQ ID NO: 451529 - DNA, 54 bp, Artificial
  Synthetic oligonucleotide
tagaggaatcataacatgtacatcaaatatcacaggactgttattgacacgtga

SEQ ID NO: 451530 - DNA, 60 bp, Artificial
  Synthetic oligonucleotide
tagaggacatgtcagctttattcttgcaagccaatagaccctgtgtgaagctagcaccca

SEQ ID NO: 451531 - DNA, 60 bp, Artificial
  Synthetic oligonucleotide
tagaggacgcctcaacaccccccccatgagatctttcgcaccaatgcgggcatactgcac

SEQ ID NO: 451532 - DNA, 55 bp, Artificial
  Synthetic oligonucleotide
tagaggactggtcgggacagatgacctccgacgagtggtcccgccaggctgtgac

SEQ ID NO: 451533 - DNA, 57 bp, Artificial
  Synthetic oligonucleotide
tagaggagacccctcccaagacacaacgcagcagcggggcccaacaccagggaaagc

SEQ ID NO: 451534 - DNA, 56 bp, Artificial
  Synthetic oligonucleotide
tagaggagaccgcagttgacgataccgacccgactggtagtgacgttttggttcca

SEQ ID NO: 451535 - DNA, 55 bp, Artificial
  Synthetic oligonucleotide
tagaggagcggtaggatcaggaaagtcgacagggttgccctccactctgagtagg

SEQ ID NO: 451536 - DNA, 53 bp, Artificial
  Synthetic oligonucleotide
tagaggagctaataaagaaacgagaagagtgcttggacaccttagagaccatc

SEQ ID NO: 451537 - DNA, 60 bp, Artificial
  Synthetic oligonucleotide
tagaggagctgtcgggtcagggaaatccacaggtttaccatatcacctcagtatgcgcgg

SEQ ID NO: 451538 - DNA, 60 bp, Artificial
  Synthetic oligonucleotide
tagaggagcttaagagtgaagctgttagacattttcctaggatatggctccatagcttag

SEQ ID NO: 451539 - DNA, 60 bp, Artificial
  Synthetic oligonucleotide
tagaggaggagtttatgtactcttgtgacggagatgagcggcctctgttggtgaagggga

SEQ ID NO: 451540 - DNA, 58 bp, Artificial
  Synthetic oligonucleotide
tagaggagtataaagcactaggcttcaaagtcgaggtaggtcgagaactcgaattctg

SEQ ID NO: 451541 - DNA, 56 bp, Artificial
  Synthetic oligonucleotide
tagaggagtgcactactccatctttcacgactataactaataccgatccggctctc

SEQ ID NO: 451542 - DNA, 58 bp, Artificial
  Synthetic oligonucleotide
tagaggagtgtcgcgagaacaagtccgtacattaaaggaagtgaagaatgtcgcccag

SEQ ID NO: 451543 - DNA, 60 bp, Artificial
  Synthetic oligonucleotide
tagaggattcgggagacgaggcagtctctcagacttctatctctacaaggagctaccagc

SEQ ID NO: 451544 - DNA, 55 bp, Artificial
  Synthetic oligonucleotide
tagaggattgaattcagttgattacaatctgaactccccgttggtgtccgacgat

SEQ ID NO: 451545 - DNA, 60 bp, Artificial
  Synthetic oligonucleotide
tagaggcagcatctgaagaggtgcctctgatcggagcgggcatggcaacggctgttgcga

SEQ ID NO: 451546 - DNA, 60 bp, Artificial
  Synthetic oligonucleotide
tagaggccttcccaggtacatgtctgtgactctcaggaagagactggtgaagaacccata

SEQ ID NO: 451547 - DNA, 60 bp, Artificial
  Synthetic oligonucleotide
tagaggcgcaacagcatatgttgcaactcacagtctggggcattaaacagctccagacaa

SEQ ID NO: 451548 - DNA, 60 bp, Artificial
  Synthetic oligonucleotide
tagaggcgcttgtaggacgttcgtcaccaccccaataggatgcggctcttgctaatagac

SEQ ID NO: 451549 - DNA, 55 bp, Artificial
  Synthetic oligonucleotide
tagaggcggcaaagtggacacgaaactcggtagatagaatggtcgctcaccaacc

SEQ ID NO: 451550 - DNA, 60 bp, Artificial
  Synthetic oligonucleotide
tagaggcggcgtctgaagaagtgcctttaattggagcaggtatggcgacagctgtcgcga

SEQ ID NO: 451551 - DNA, 54 bp, Artificial
  Synthetic oligonucleotide
tagaggcgtttcttgtatcgagcgttcaaggaaaaactttcccaagcgtttcgc

SEQ ID NO: 451552 - DNA, 55 bp, Artificial
  Synthetic oligonucleotide
tagaggctcaatagaaaggcagctctggtggactcgaggccctaaccatgatgat

SEQ ID NO: 451553 - DNA, 55 bp, Artificial
  Synthetic oligonucleotide
tagaggcttgtgggttctccgataggctaaaacaaatcactatcggtagttccac

SEQ ID NO: 451554 - DNA, 56 bp, Artificial
  Synthetic oligonucleotide
tagagggcagtaagtaccatctccagagtggtcatgtcacctgtgatgtgggcctt

SEQ ID NO: 451555 - DNA, 57 bp, Artificial
  Synthetic oligonucleotide
tagagggccactacatcgtatttgcactacgggaaatgggaggtgggttagtctaca

SEQ ID NO: 451556 - DNA, 50 bp, Artificial
  Synthetic oligonucleotide
tagagggcgtaggtgggagggcctttaggggggtgaggggacgtgggttc

SEQ ID NO: 451557 - DNA, 58 bp, Artificial
  Synthetic oligonucleotide
tagaggggacattaactaattacccagaatcaaggaagtatgatctggaggaaattgc

SEQ ID NO: 451558 - DNA, 56 bp, Artificial
  Synthetic oligonucleotide
tagaggggagaccaatattggtttagccgtgtcacgaggttgtgccaaacttgcgt

SEQ ID NO: 451559 - DNA, 52 bp, Artificial
  Synthetic oligonucleotide
tagaggggataggggtttctgctggctgccgctctacacctcttccgatata

SEQ ID NO: 451560 - DNA, 60 bp, Artificial
  Synthetic oligonucleotide
tagaggggatttgatatctcccagatatatacgccattctctgcctgaggtgcagtgatg

SEQ ID NO: 451561 - DNA, 60 bp, Artificial
  Synthetic oligonucleotide
tagaggggatttggaacctcccagatatagacgccattctctgtctgaggtgcagttatg

SEQ ID NO: 451562 - DNA, 60 bp, Artificial
  Synthetic oligonucleotide
tagaggggatttggtacctcccagataaagacgccattcatcgcctgagctgcagtgatg

SEQ ID NO: 451563 - DNA, 53 bp, Artificial
  Synthetic oligonucleotide
tagaggggctctgctccgactctggttttgaatccccgttttctattttgggg

SEQ ID NO: 451564 - DNA, 58 bp, Artificial
  Synthetic oligonucleotide
tagagggtagcgtagtgtacgttgggttcaacattgacttcgtctatgagttctctaa

SEQ ID NO: 451565 - DNA, 55 bp, Artificial
  Synthetic oligonucleotide
tagaggtacatgtgtaaagagttattcttcagcgtgtgacgtcgaatgccccgcg

SEQ ID NO: 451566 - DNA, 55 bp, Artificial
  Synthetic oligonucleotide
tagaggtacattactatacctatactataagctgagggaatcgttgtttttaccc

SEQ ID NO: 451567 - DNA, 51 bp, Artificial
  Synthetic oligonucleotide
tagaggtagactggacatgtcaaagtgcttaccatgtaaggattgcaaacc

SEQ ID NO: 451568 - DNA, 59 bp, Artificial
  Synthetic oligonucleotide
tagaggtaggcctgaagaggcaaaatatgtctggtggacaagtaacagtctaattgccc

SEQ ID NO: 451569 - DNA, 60 bp, Artificial
  Synthetic oligonucleotide
tagaggtcaaaaaccctgacctcatcatcgaggacagacctctgaaacatgtcacccctg

SEQ ID NO: 451570 - DNA, 59 bp, Artificial
  Synthetic oligonucleotide
tagaggtgcccgatatactagaatcgatgaacggctaccttatcaaacgccacgagtct

SEQ ID NO: 451571 - DNA, 60 bp, Artificial
  Synthetic oligonucleotide
tagaggtgtgtgtctctccatgaggccagatcttcatggcagcgtagttctgactcagtg

SEQ ID NO: 451572 - DNA, 56 bp, Artificial
  Synthetic oligonucleotide
tagaggtgttacatgttaaaaactacaccacaacaagcgttatttgattcgattta

SEQ ID NO: 451573 - DNA, 60 bp, Artificial
  Synthetic oligonucleotide
tagaggttcttcaaagtgcacgatcacagatccttgaatttaactcagcaacacatgatt

SEQ ID NO: 451574 - DNA, 54 bp, Artificial
  Synthetic oligonucleotide
tagaggttggcaggggacaaccgttgggtgttgggctaagtgggcatcctttat

SEQ ID NO: 451575 - DNA, 55 bp, Artificial
  Synthetic oligonucleotide
tagagtacaattaatgaacttcaattggctcaaccctaccgcatgaaccgaactt

SEQ ID NO: 451576 - DNA, 55 bp, Artificial
  Synthetic oligonucleotide
tagagtacataaccgaattgggattgtatatacgacgcgaacacgacaactctct

SEQ ID NO: 451577 - DNA, 59 bp, Artificial
  Synthetic oligonucleotide
tagagtacccgtactcaatccacataatagacaagaacaaggttccgatctacgatcaa

SEQ ID NO: 451578 - DNA, 59 bp, Artificial
  Synthetic oligonucleotide
tagagtacctagaacatatatacatgatcacccaacctatccctgggtcccagaagtac

SEQ ID NO: 451579 - DNA, 60 bp, Artificial
  Synthetic oligonucleotide
tagagtacctctgcagtaaatataacgctgatcaaagaaaatactcggaaacacatgtca

SEQ ID NO: 451580 - DNA, 55 bp, Artificial
  Synthetic oligonucleotide
tagagtacgtcgccaatccagccgcgctgcaatattaccgaactcttgaaatgga

SEQ ID NO: 451581 - DNA, 55 bp, Artificial
  Synthetic oligonucleotide
tagagtagaacaagaactcttgtcatttggctttaagcttaatggaccgtatgtg

SEQ ID NO: 451582 - DNA, 60 bp, Artificial
  Synthetic oligonucleotide
tagagtagctgtcagtacgtctgacagtttgaatgtaaacacgtcagtagcaaatttgaa

SEQ ID NO: 451583 - DNA, 55 bp, Artificial
  Synthetic oligonucleotide
tagagtaggactacacgaatacccggtggggtcgcaattaccttgcgagcccgaa

SEQ ID NO: 451584 - DNA, 60 bp, Artificial
  Synthetic oligonucleotide
tagagtaggcaagatcagggatgagtggtttgacctaattggtgccgtattagatgggga

SEQ ID NO: 451585 - DNA, 60 bp, Artificial
  Synthetic oligonucleotide
tagagtataagcaagtactcagcatgtatagagtacttgatgacgtcacggtgaccttga

SEQ ID NO: 451586 - DNA, 54 bp, Artificial
  Synthetic oligonucleotide
tagagtatcgtccgaatccaaattccaccctctatgagttcgctcgtgagtcac

SEQ ID NO: 451587 - DNA, 60 bp, Artificial
  Synthetic oligonucleotide
tagagtcaccggaacattgcacccccaatcataccgctctcaggcaagctattttgtgct

SEQ ID NO: 451588 - DNA, 55 bp, Artificial
  Synthetic oligonucleotide
tagagtcagaccagtatttagtggctggggattactccaactgtactggggaagc

SEQ ID NO: 451589 - DNA, 60 bp, Artificial
  Synthetic oligonucleotide
tagagtccaaatttgacgggttgtgcacagagtcggactatgaagccttcgacgctagtc

SEQ ID NO: 451590 - DNA, 58 bp, Artificial
  Synthetic oligonucleotide
tagagtccccacaagccctctcggtcatgggagaggattcactgtcaatgttccgggc

SEQ ID NO: 451591 - DNA, 56 bp, Artificial
  Synthetic oligonucleotide
tagagtcgacacgtttgaggaaataccctttgatgtacagaaattcgcggatttag

SEQ ID NO: 451592 - DNA, 60 bp, Artificial
  Synthetic oligonucleotide
tagagtctcaggtgccctcaactatgacacatcaggaaacctagaattgagagctgcagg

SEQ ID NO: 451593 - DNA, 60 bp, Artificial
  Synthetic oligonucleotide
tagagtctcctgaacattgctcgcctcaccatacagcaatcaggcaagctattttgtgct

SEQ ID NO: 451594 - DNA, 53 bp, Artificial
  Synthetic oligonucleotide
tagagtctgtcaaagtccacttacaatgctgatagcattgctttggaatgtac

SEQ ID NO: 451595 - DNA, 59 bp, Artificial
  Synthetic oligonucleotide
tagagtgaacgattctttctctccaggtaatgattttactcatatgactaccactttcc

SEQ ID NO: 451596 - DNA, 60 bp, Artificial
  Synthetic oligonucleotide
tagagtggaggctgaggaggtacagaacgcaagtagaccctgagttggcagaccgactaa

SEQ ID NO: 451597 - DNA, 60 bp, Artificial
  Synthetic oligonucleotide
tagagtggttctgtgagggtgatgaagattgcattctttaatgcccaggcctttagcgct

SEQ ID NO: 451598 - DNA, 58 bp, Artificial
  Synthetic oligonucleotide
tagagttaaggaggagattaagttaatgatctttgtactaagaggctgtaggcataaa

SEQ ID NO: 451599 - DNA, 60 bp, Artificial
  Synthetic oligonucleotide
tagagttactagtgcagatggaatcaattccaacacaacacagaccaacttaggaatttc

SEQ ID NO: 451600 - DNA, 60 bp, Artificial
  Synthetic oligonucleotide
tagagttagtcttctccgccagagccttagcaccagtcacgatggacttagcgattacct

SEQ ID NO: 451601 - DNA, 50 bp, Artificial
  Synthetic oligonucleotide
tagagttatctggaatccactaaagattggagaaggtcacaacaatctca

SEQ ID NO: 451602 - DNA, 52 bp, Artificial
  Synthetic oligonucleotide
tagagttccaatcttaccgagagttcagagagtgggcataccaaaatgggta

SEQ ID NO: 451603 - DNA, 55 bp, Artificial
  Synthetic oligonucleotide
tagagttgaatgcacccaattctcattatgaggaatgttcctgttacccagacac

SEQ ID NO: 451604 - DNA, 60 bp, Artificial
  Synthetic oligonucleotide
tagagttgcatcggggtgccatgagattaacgtatatggcggtcgtttctggaatactaa

SEQ ID NO: 451605 - DNA, 60 bp, Artificial
  Synthetic oligonucleotide
tagagttgttaagtattcatcagttgctaatcatgcagatagagtgttggctacatccaa

SEQ ID NO: 451606 - DNA, 60 bp, Artificial
  Synthetic oligonucleotide
tagagtttaagttgcgattagtgccacggcgcagccactctatgcaccctccttcacgcc

SEQ ID NO: 451607 - DNA, 55 bp, Artificial
  Synthetic oligonucleotide
tagagtttctctctcctaaaactcgtcggaactccgattaaggcacttccggtca

SEQ ID NO: 451608 - DNA, 57 bp, Artificial
  Synthetic oligonucleotide
tagagtttggtcagaactgaatattggaacgggaacttcagcttatacttcacttaa

SEQ ID NO: 451609 - DNA, 50 bp, Artificial
  Synthetic oligonucleotide
tagataaaccaattccattaggcagaagggatgtaccaggaagacgaacc

SEQ ID NO: 451610 - DNA, 58 bp, Artificial
  Synthetic oligonucleotide
tagataaaggagaacccgtcaacgaggcagacgctgccgccttagaacacgacaaggc

SEQ ID NO: 451611 - DNA, 60 bp, Artificial
  Synthetic oligonucleotide
tagataaatcaacgcagattgccccaaatacgttaccagatattgtcacggaagcatcag

SEQ ID NO: 451612 - DNA, 55 bp, Artificial
  Synthetic oligonucleotide
tagataaatcgagcccagaagtggcaaagatcgctgtcgaatccgatagtgagat

SEQ ID NO: 451613 - DNA, 60 bp, Artificial
  Synthetic oligonucleotide
tagataaatgaggaattcttctggatcagtatccatcagttctgtaaatttatgactaaa

SEQ ID NO: 451614 - DNA, 60 bp, Artificial
  Synthetic oligonucleotide
tagataacagggtatcaccttacacagggaattctggagacactccaacaatgcaatgtg

SEQ ID NO: 451615 - DNA, 59 bp, Artificial
  Synthetic oligonucleotide
tagataacggcaggcgattccactgtgttggtggctattggaagggtaggtgtctacat

SEQ ID NO: 451616 - DNA, 60 bp, Artificial
  Synthetic oligonucleotide
tagataacgtagagcggagagacgtgacgaaaagatgtcctgtcgatgtcacaaaattct

SEQ ID NO: 451617 - DNA, 53 bp, Artificial
  Synthetic oligonucleotide
tagataagaaaccctaccttccagaaggtgtgaacaagttaccctcctttgcg

SEQ ID NO: 451618 - DNA, 53 bp, Artificial
  Synthetic oligonucleotide
tagataaggctatgcagaagtaatcccaaaggacaggtctcaagaaacctaac

SEQ ID NO: 451619 - DNA, 57 bp, Artificial
  Synthetic oligonucleotide
tagataagtctgtttataatccagaaaaggaaaggctagtatggcgactacgaggtg

SEQ ID NO: 451620 - DNA, 55 bp, Artificial
  Synthetic oligonucleotide
tagataagtggtgtgaagcgttgtattcccctgaaagctactcgaacacgtatag

SEQ ID NO: 451621 - DNA, 53 bp, Artificial
  Synthetic oligonucleotide
tagataataacatatatgatgtttgtttgcttgagtttgacagtttgtaagta

SEQ ID NO: 451622 - DNA, 60 bp, Artificial
  Synthetic oligonucleotide
tagataatcactcaatgagtgacatcgaaatcatggcgtctcaaggcaccaaacgatcat

SEQ ID NO: 451623 - DNA, 60 bp, Artificial
  Synthetic oligonucleotide
tagataatgctaatttcgtatcagcttatagtagattaggtttatcagcgatgttaaatg

SEQ ID NO: 451624 - DNA, 57 bp, Artificial
  Synthetic oligonucleotide
tagataatgggggtccacgtcatcaatcacgttgtaagaaacgtcgtcgttgtatac

SEQ ID NO: 451625 - DNA, 60 bp, Artificial
  Synthetic oligonucleotide
tagatacagaagtcgctgttttgtaggattagtgtggtgcctactactcacaatggagct

SEQ ID NO: 451626 - DNA, 60 bp, Artificial
  Synthetic oligonucleotide
tagatacaggttgtgcagcaaaggaggtgtagagcaatatagtgaagaggatctaaggaa

SEQ ID NO: 451627 - DNA, 57 bp, Artificial
  Synthetic oligonucleotide
tagatacatcatattcatcccctatacgtatatcaactacaggggcctcatgcatca

SEQ ID NO: 451628 - DNA, 54 bp, Artificial
  Synthetic oligonucleotide
tagatacatgggaaaaaattaggttaaggccagggggaaaaaagcgctatatga

SEQ ID NO: 451629 - DNA, 55 bp, Artificial
  Synthetic oligonucleotide
tagataccaacaaccagcggtaactttcctttgacgaaatagtggccagagtggt

SEQ ID NO: 451630 - DNA, 58 bp, Artificial
  Synthetic oligonucleotide
tagataccctctccgggtatcattcaaggacacaaccgatgtagaacctagtggtctc

SEQ ID NO: 451631 - DNA, 55 bp, Artificial
  Synthetic oligonucleotide
tagatacgatgatcctacatttatgatcggatatcaaatttggaggtcgcgaggt

SEQ ID NO: 451632 - DNA, 56 bp, Artificial
  Synthetic oligonucleotide
tagatacgccgggtcaaatagtaggacaagaaataccactagttaattttgatatg

SEQ ID NO: 451633 - DNA, 55 bp, Artificial
  Synthetic oligonucleotide
tagatacgtctagcataccgcctattattaggcacatagagatagaggatttggc

SEQ ID NO: 451634 - DNA, 60 bp, Artificial
  Synthetic oligonucleotide
tagatacgtgtgcactggaattctcacagacaccagcagacctggggacaaatctagtgg

SEQ ID NO: 451635 - DNA, 51 bp, Artificial
  Synthetic oligonucleotide
tagatagaagcgtcaataaaccgggactttaattagttccgttttaggttc

SEQ ID NO: 451636 - DNA, 56 bp, Artificial
  Synthetic oligonucleotide
tagatagaatgacatacggctacaagcggcgaaacttcgtccttatagcggcacgt

SEQ ID NO: 451637 - DNA, 50 bp, Artificial
  Synthetic oligonucleotide
tagatagtacgtagatgtaagtttgattagaggtttgattaacggagagt

SEQ ID NO: 451638 - DNA, 58 bp, Artificial
  Synthetic oligonucleotide
tagatagtattggttcatggtccaaaaaaatcctcaggacccaggaatcagaatgcgt

SEQ ID NO: 451639 - DNA, 60 bp, Artificial
  Synthetic oligonucleotide
tagatagtgagatgtacaatgagtatacaatgttaattagagatgaaatagtcaaaatgt

SEQ ID NO: 451640 - DNA, 60 bp, Artificial
  Synthetic oligonucleotide
tagatagtgcgggtcgacatcatcaatgacgttgtaccaggcctcatttgaatacacttt

SEQ ID NO: 451641 - DNA, 60 bp, Artificial
  Synthetic oligonucleotide
tagatagtgcggtgcgacgtcatcaatgacgttatactccactgcatttgaatagactcg

SEQ ID NO: 451642 - DNA, 60 bp, Artificial
  Synthetic oligonucleotide
tagatagtgcggtgcgacgtcatcaatgacgttatactccacttcgtttgaatacacctt

SEQ ID NO: 451643 - DNA, 60 bp, Artificial
  Synthetic oligonucleotide
tagatagtgcggtgcgacgtcatcaatgacgttatactccacttcgttttggtacactcg

SEQ ID NO: 451644 - DNA, 60 bp, Artificial
  Synthetic oligonucleotide
tagatagtgcggtggtacgtcatcgatgacgttatacataacatcgtttgagtaaactct

SEQ ID NO: 451645 - DNA, 60 bp, Artificial
  Synthetic oligonucleotide
tagatagttcagacttagctgactggctacttaatgagtgggcttgtaatccaatggaca

SEQ ID NO: 451646 - DNA, 57 bp, Artificial
  Synthetic oligonucleotide
tagatataccttattctgaacccattgaaccatgtaaattgtttcggtctgttgcgg

SEQ ID NO: 451647 - DNA, 54 bp, Artificial
  Synthetic oligonucleotide
tagatatattaggaatagtcctaaatttctgttacccgctttacaccatttaaa

SEQ ID NO: 451648 - DNA, 60 bp, Artificial
  Synthetic oligonucleotide
tagatatcgtgagatgatccagacggtaattgatgatgggtgggaccaaaagaatcttaa

SEQ ID NO: 451649 - DNA, 54 bp, Artificial
  Synthetic oligonucleotide
tagatatctgcatagtagaattgtgggctttaaatttccaaacccctttcccct

SEQ ID NO: 451650 - DNA, 60 bp, Artificial
  Synthetic oligonucleotide
tagatatgcggatgaagtggttaactcgcgtaatgagagaacaagtgctagggccacgac

SEQ ID NO: 451651 - DNA, 57 bp, Artificial
  Synthetic oligonucleotide
tagatatggtcaagggtcgtcttatcacgtaagacgaggttattcacgttatcaaac

SEQ ID NO: 451652 - DNA, 60 bp, Artificial
  Synthetic oligonucleotide
tagatatgtcagagttagctgacttgatacttaatgagtggctctgtaatccaatggaca

SEQ ID NO: 451653 - DNA, 60 bp, Artificial
  Synthetic oligonucleotide
tagatatgtgtcagagttgcataccatggttgctaatatgcatactcagcgctttgttat

SEQ ID NO: 451654 - DNA, 60 bp, Artificial
  Synthetic oligonucleotide
tagatattggggcgtgatatcatcaatgacgttatactccacatagtttgaatagacctt

SEQ ID NO: 451655 - DNA, 60 bp, Artificial
  Synthetic oligonucleotide
tagatcaaatttatggtatatgtcacatcaagggcttatatttgacgacttgtacatacc

SEQ ID NO: 451656 - DNA, 60 bp, Artificial
  Synthetic oligonucleotide
tagatcaactctcctccggcgtattgacttcttcttggctattctgtgctggactttgat

SEQ ID NO: 451657 - DNA, 59 bp, Artificial
  Synthetic oligonucleotide
tagatcaatggaggcttttgctggtatctttaaatcccctcatggagaagatcatgacc

SEQ ID NO: 451658 - DNA, 59 bp, Artificial
  Synthetic oligonucleotide
tagatcaatttatttgaaaatacgagtagatgggaggtattgtgcggcctctacgctta

SEQ ID NO: 451659 - DNA, 60 bp, Artificial
  Synthetic oligonucleotide
tagatcacgcaatttgggcagagtcatcgataccatcacgtgtggttttgccgacctcat

SEQ ID NO: 451660 - DNA, 55 bp, Artificial
  Synthetic oligonucleotide
tagatcacgccaaacccacatttcgacagataatggctcatttcagttatgtcgc

SEQ ID NO: 451661 - DNA, 55 bp, Artificial
  Synthetic oligonucleotide
tagatcactaggatcaactgtttcagcttggacggaagtatctgaagttgcaaca

SEQ ID NO: 451662 - DNA, 60 bp, Artificial
  Synthetic oligonucleotide
tagatcactggcaagtagattatacccattatgaaaatatcatactattagtatgggtag

SEQ ID NO: 451663 - DNA, 50 bp, Artificial
  Synthetic oligonucleotide
tagatcagagttatttaaacgagtacggggttctagtggagctcgactag

SEQ ID NO: 451664 - DNA, 60 bp, Artificial
  Synthetic oligonucleotide
tagatcagcatgagggtccacgcgcacgcaacgttcttatagacgcacttgaagcaattc

SEQ ID NO: 451665 - DNA, 57 bp, Artificial
  Synthetic oligonucleotide
tagatcaggacctattagagacgaattagaaacgattccccacaagatcccaacctc

SEQ ID NO: 451666 - DNA, 59 bp, Artificial
  Synthetic oligonucleotide
tagatcagttccagttggaaaggcattggcgattccaaactttgagaatttgaggagaa

SEQ ID NO: 451667 - DNA, 60 bp, Artificial
  Synthetic oligonucleotide
tagatcatggcttggtctattgaactatgcaaggagttacattcctcatatgggccgcct

SEQ ID NO: 451668 - DNA, 55 bp, Artificial
  Synthetic oligonucleotide
tagatcatgtcccaattctcggatggcaggtctgacgcgataccgccgctctccc

SEQ ID NO: 451669 - DNA, 55 bp, Artificial
  Synthetic oligonucleotide
tagatcattaaatcctattgctccgggcaattttcagattaatgtaccaccatgg

SEQ ID NO: 451670 - DNA, 55 bp, Artificial
  Synthetic oligonucleotide
tagatcccataactggagcaacgcgtgatgagagtcctttaacagatgtggaatt

SEQ ID NO: 451671 - DNA, 58 bp, Artificial
  Synthetic oligonucleotide
tagatccctctatagccaaattcccatatggctgagggggattattataggtaaatac

SEQ ID NO: 451672 - DNA, 59 bp, Artificial
  Synthetic oligonucleotide
tagatccgacacacccattgatcacatatacttcaaaccggttgacaagtggtgggacg

SEQ ID NO: 451673 - DNA, 60 bp, Artificial
  Synthetic oligonucleotide
tagatcctacatagagactgagacaggtatgatgcagggaattctccactatactagctc

SEQ ID NO: 451674 - DNA, 55 bp, Artificial
  Synthetic oligonucleotide
tagatcctatgggaatccccggtctcctcttgtgtccagcccctccccggtccga

SEQ ID NO: 451675 - DNA, 52 bp, Artificial
  Synthetic oligonucleotide
tagatcctgtgcatcctgcgtggataatgaactaagcccacgtttggatgca

SEQ ID NO: 451676 - DNA, 60 bp, Artificial
  Synthetic oligonucleotide
tagatcgggctgcctgtaaggagcctgatatgaatatgtacctccagaaaggggtcggtg

SEQ ID NO: 451677 - DNA, 60 bp, Artificial
  Synthetic oligonucleotide
tagatcgttatcggctaatttgaacgatgtaatctgtagtggtggtgattacagcttcgc

SEQ ID NO: 451678 - DNA, 60 bp, Artificial
  Synthetic oligonucleotide
tagatctagatgcccacacagatagttgtgtgggcctagtgacctagcccacattgtctt

SEQ ID NO: 451679 - DNA, 57 bp, Artificial
  Synthetic oligonucleotide
tagatctagattgggcttttccagtgaagttctgaaactaaaggatgaggttcggct

SEQ ID NO: 451680 - DNA, 60 bp, Artificial
  Synthetic oligonucleotide
tagatctcatgtcatcattcactattcaccattcgctcaatccccagcagcgaagagaag

SEQ ID NO: 451681 - DNA, 60 bp, Artificial
  Synthetic oligonucleotide
tagatctccatacaagtgcgggatatccgtacagtgctctaggtatcaagaagagagaca

SEQ ID NO: 451682 - DNA, 51 bp, Artificial
  Synthetic oligonucleotide
tagatctcgatgtagatcggaatgctccactggcgcccgtacagctcagcc

SEQ ID NO: 451683 - DNA, 58 bp, Artificial
  Synthetic oligonucleotide
tagatctcgttggaaagcacgttggacaagggcgaatcattaacgggtatcaaatgcg

SEQ ID NO: 451684 - DNA, 50 bp, Artificial
  Synthetic oligonucleotide
tagatctgaggaggacaaagactcctcagtccttctagagtagtcgaatt

SEQ ID NO: 451685 - DNA, 60 bp, Artificial
  Synthetic oligonucleotide
tagatctgcttttgtgctcataacttcctagtttttgatcaaagtgaccttgtatcaaga

SEQ ID NO: 451686 - DNA, 55 bp, Artificial
  Synthetic oligonucleotide
tagatctggatacagttccaaattgtggatatttcgctctaaccactccttgggg

SEQ ID NO: 451687 - DNA, 52 bp, Artificial
  Synthetic oligonucleotide
tagatctgtgagtccttgtacaacgtcattgagggtctcccctccttgctcg

SEQ ID NO: 451688 - DNA, 59 bp, Artificial
  Synthetic oligonucleotide
tagatcttcctttttcaggaatgtagtgtggttgatcaagaagaataatgcgtacccaa

SEQ ID NO: 451689 - DNA, 60 bp, Artificial
  Synthetic oligonucleotide
tagatcttgcagactcagaaatgaacaaactttacgagcgcgtcagaaaacaactgaggg

SEQ ID NO: 451690 - DNA, 55 bp, Artificial
  Synthetic oligonucleotide
tagatcttttatgaggtcttgcgtcatcggcacctccccttaccttaaagggtac

SEQ ID NO: 451691 - DNA, 55 bp, Artificial
  Synthetic oligonucleotide
tagatgaacacatctctcggggcttccacgcaaactttagtaccgtctccgataa

SEQ ID NO: 451692 - DNA, 58 bp, Artificial
  Synthetic oligonucleotide
tagatgaggaagggaagccagtttttactataactgatgcagactggaaatctttctt

SEQ ID NO: 451693 - DNA, 55 bp, Artificial
  Synthetic oligonucleotide
tagatgagtgtcatgtacatgatgcaagtgcaattgccttcgtaagcttgctcaa

SEQ ID NO: 451694 - DNA, 60 bp, Artificial
  Synthetic oligonucleotide
tagatgatatagatctattactcgtaagtggagatgacagtctcattttctcaaggaaag

SEQ ID NO: 451695 - DNA, 52 bp, Artificial
  Synthetic oligonucleotide
tagatgcaaaaggttatttcaagtggtcatccacaactgcaccacaatctgt

SEQ ID NO: 451696 - DNA, 51 bp, Artificial
  Synthetic oligonucleotide
tagatgcatcacagatgggccgtgctcagattcagcagtcacgcagcccta

SEQ ID NO: 451697 - DNA, 57 bp, Artificial
  Synthetic oligonucleotide
tagatgcccacttcctatcccagacaaagcagagtggggagaaccttccttacctgg

SEQ ID NO: 451698 - DNA, 59 bp, Artificial
  Synthetic oligonucleotide
tagatgcctttgcatccaaacccccagtggacattaaccctgacaccacatttcgtgag

SEQ ID NO: 451699 - DNA, 55 bp, Artificial
  Synthetic oligonucleotide
tagatgcgtgcgtcgatttgatctttgacgtagtctctaaagtagggcacgaagc

SEQ ID NO: 451700 - DNA, 60 bp, Artificial
  Synthetic oligonucleotide
tagatgcgttagcattaatcaggcaacggctctcaagatagagccctcaaccggagtttg

SEQ ID NO: 451701 - DNA, 60 bp, Artificial
  Synthetic oligonucleotide
tagatgctataacagaggtagaatgcttcctaaacccagaaatgggggatccagatgaaa

SEQ ID NO: 451702 - DNA, 60 bp, Artificial
  Synthetic oligonucleotide
tagatgctgaaatgcatgatcttaactgtagctacaacatatgcccttattgcgcatcta

SEQ ID NO: 451703 - DNA, 57 bp, Artificial
  Synthetic oligonucleotide
tagatggaaagtggatgagggaactcgtcctttatgacaaaggagaaataaggcgaa

SEQ ID NO: 451704 - DNA, 60 bp, Artificial
  Synthetic oligonucleotide
tagatggaccaagaatgccagctacactcaagaacatgtcacctcgctgtgtctattggc

SEQ ID NO: 451705 - DNA, 60 bp, Artificial
  Synthetic oligonucleotide
tagatggactaaagatccaagaaacactcagggccatgtaagatccctgtgcctattggc

SEQ ID NO: 451706 - DNA, 54 bp, Artificial
  Synthetic oligonucleotide
tagatggagcgagccccagaagaccaggggccacagagagaaccctacaatgaa

SEQ ID NO: 451707 - DNA, 55 bp, Artificial
  Synthetic oligonucleotide
tagatggagggaattcctggttgggaaggaccataagcaaagactcaaggtcggg

SEQ ID NO: 451708 - DNA, 60 bp, Artificial
  Synthetic oligonucleotide
tagatggatcctgaacgaattccctacaactctctaagcgacagcgacgcaacaggaaaa

SEQ ID NO: 451709 - DNA, 60 bp, Artificial
  Synthetic oligonucleotide
tagatggatgacccatcgtttctcacgggtaggtccacgtatgctaagcgtaggcgcgct

SEQ ID NO: 451710 - DNA, 60 bp, Artificial
  Synthetic oligonucleotide
tagatggatggtatggatatcatcatagcaatgggcaggggagtggatatgctgcagaca

SEQ ID NO: 451711 - DNA, 55 bp, Artificial
  Synthetic oligonucleotide
tagatggatggtatggttaccatcagcagaatggacaaggatcaggctatgcagc

SEQ ID NO: 451712 - DNA, 60 bp, Artificial
  Synthetic oligonucleotide
tagatggctatagacaactattttctgaccttgctaccaccatcgacgtagctgagcagc

SEQ ID NO: 451713 - DNA, 60 bp, Artificial
  Synthetic oligonucleotide
tagatgggcaatgcgtctcattacataaccatgatcttcccgctttagtgtctttccgac

SEQ ID NO: 451714 - DNA, 59 bp, Artificial
  Synthetic oligonucleotide
tagatggggacgacgcgacagcgtccgtggggttatgggtcgcgcagcccttgatcaac

SEQ ID NO: 451715 - DNA, 60 bp, Artificial
  Synthetic oligonucleotide
tagatggtaggacgatgaagcatggtgagctcgagattgtgacacgaggaacaaagagta

SEQ ID NO: 451716 - DNA, 60 bp, Artificial
  Synthetic oligonucleotide
tagatggtcctccgaccatcgatcgagtggtgcagtatacatatgaagtggcaaggttac

SEQ ID NO: 451717 - DNA, 58 bp, Artificial
  Synthetic oligonucleotide
tagatgtacttagacatccagcctaagccggctggtgtgatagcagcgcgagcccatt

SEQ ID NO: 451718 - DNA, 60 bp, Artificial
  Synthetic oligonucleotide
tagatgtatttattagttagtaatgaagtgccttctcattcacattaaacgtgagacgca

SEQ ID NO: 451719 - DNA, 55 bp, Artificial
  Synthetic oligonucleotide
tagatgtctagagaaactcctatcttccaacctcctaacccacatgaccatggac

SEQ ID NO: 451720 - DNA, 60 bp, Artificial
  Synthetic oligonucleotide
tagatgtctggagtatgattacatggtacatggacaaatgaatggtctaatgttgttttg

SEQ ID NO: 451721 - DNA, 54 bp, Artificial
  Synthetic oligonucleotide
tagatgtgaaatggtttctgaatcagtttttttgcaactaggacattcaagagc

SEQ ID NO: 451722 - DNA, 50 bp, Artificial
  Synthetic oligonucleotide
tagatgtgttcgctatgaaaagaaagcagtcagttttggagagcgaatac

SEQ ID NO: 451723 - DNA, 53 bp, Artificial
  Synthetic oligonucleotide
tagattaaacgaaacccgaatagtctcgataaaagacgaaactcagggtgaag

SEQ ID NO: 451724 - DNA, 50 bp, Artificial
  Synthetic oligonucleotide
tagattaacaaaattttctatgctgtcagacacacctgataaaatgctct

SEQ ID NO: 451725 - DNA, 60 bp, Artificial
  Synthetic oligonucleotide
tagattacagtgaatatgatacgcacctcactcgatataattttcggactggtatgttgc

SEQ ID NO: 451726 - DNA, 60 bp, Artificial
  Synthetic oligonucleotide
tagattactgggacgattcacaagcatttagaaatatggtatatgttagatcgctgtcag

SEQ ID NO: 451727 - DNA, 60 bp, Artificial
  Synthetic oligonucleotide
tagattacttgtttccaggggttagtacatttgctagatatgcacagtatttagatccca

SEQ ID NO: 451728 - DNA, 52 bp, Artificial
  Synthetic oligonucleotide
tagattaggtagacgaggcacaatacgtactcgaagtggattacaaataggc

SEQ ID NO: 451729 - DNA, 57 bp, Artificial
  Synthetic oligonucleotide
tagattaggtcaacgggcaactatgtttacccgcagcggtacacaaataggtgctag

SEQ ID NO: 451730 - DNA, 53 bp, Artificial
  Synthetic oligonucleotide
tagattatagcacttatcacggagacggtacagacctgccagaagtaagggtg

SEQ ID NO: 451731 - DNA, 60 bp, Artificial
  Synthetic oligonucleotide
tagattattggatcctaatgtcaccagattcacatggagtggtagcggaagcaacgaata

SEQ ID NO: 451732 - DNA, 60 bp, Artificial
  Synthetic oligonucleotide
tagattcacgagccgcgtgattaatcgggtttgtcactgggatccggtctatcagtaaga

SEQ ID NO: 451733 - DNA, 60 bp, Artificial
  Synthetic oligonucleotide
tagattccattggattgtgcatgcctaaagggtctttcaagtcgactatgattaaatttc

SEQ ID NO: 451734 - DNA, 58 bp, Artificial
  Synthetic oligonucleotide
tagattcctcggtgaggtagccttgagagagattaagtctcaagttgacacctcaaat

SEQ ID NO: 451735 - DNA, 53 bp, Artificial
  Synthetic oligonucleotide
tagattccttaaacggtagaattaaagctcgtgacaccgtaacaggcggaaac

SEQ ID NO: 451736 - DNA, 56 bp, Artificial
  Synthetic oligonucleotide
tagattcctttctaatgcaccctccgaggagagtgtttaagaggttatttatcgac

SEQ ID NO: 451737 - DNA, 60 bp, Artificial
  Synthetic oligonucleotide
tagattcgcgcccccttgcaagcctttgcttcgggatgaggtgtcattcagagtgggact

SEQ ID NO: 451738 - DNA, 56 bp, Artificial
  Synthetic oligonucleotide
tagattcggaggtgtactacgaactgtacggattaaattcttcgattcacgcccgc

SEQ ID NO: 451739 - DNA, 60 bp, Artificial
  Synthetic oligonucleotide
tagattcgtagacccactcacaggggcgacgctagatgataatccgttcacagacatgac

SEQ ID NO: 451740 - DNA, 50 bp, Artificial
  Synthetic oligonucleotide
tagattctcagagtctgcaacatcatattcgggatatatctttagagatc

SEQ ID NO: 451741 - DNA, 56 bp, Artificial
  Synthetic oligonucleotide
tagattctctccgcgccatttgtgctgatctagaagggtcgagctctccgctcccc

SEQ ID NO: 451742 - DNA, 55 bp, Artificial
  Synthetic oligonucleotide
tagattgccgtctcgtggatcatttgaacgttctacatcgacattatatccaacc

SEQ ID NO: 451743 - DNA, 56 bp, Artificial
  Synthetic oligonucleotide
tagattgcttcaaaattgtgcttggtttaaaggaactcttgaatggaaggtagtta

SEQ ID NO: 451744 - DNA, 57 bp, Artificial
  Synthetic oligonucleotide
tagattggggaccaggagaaattaacgattcgacgacagttgtaccagtaattgatg

SEQ ID NO: 451745 - DNA, 59 bp, Artificial
  Synthetic oligonucleotide
tagattggttcatgtttccacggcgtcgcaatgtcttttacctcacgtgcaccccagaa

SEQ ID NO: 451746 - DNA, 60 bp, Artificial
  Synthetic oligonucleotide
tagattgtcagatctacggggcctgttactccatagagccacttgacctacctcaaatca

SEQ ID NO: 451747 - DNA, 51 bp, Artificial
  Synthetic oligonucleotide
tagattgtgcagccttctcctacaagtcagaccagataattttcgagaccg

SEQ ID NO: 451748 - DNA, 57 bp, Artificial
  Synthetic oligonucleotide
tagattgtgtaatcctctgaatccatttgttagtcacaaggaaattgagtccgtaaa

SEQ ID NO: 451749 - DNA, 54 bp, Artificial
  Synthetic oligonucleotide
tagattgtgtcagtatgagaaacaagggagcgttgacttcaaggtgcagggagt

SEQ ID NO: 451750 - DNA, 60 bp, Artificial
  Synthetic oligonucleotide
tagatttaagcttgtatgcacaacttcgaacagtgacattagtgaaggatttaatcttgc

SEQ ID NO: 451751 - DNA, 53 bp, Artificial
  Synthetic oligonucleotide
tagatttacatttgacttagtttacgcaggcgtagccgtagtaatgatggtag

SEQ ID NO: 451752 - DNA, 51 bp, Artificial
  Synthetic oligonucleotide
tagatttccctctgtggtggacgaacctgtaactgtctccacacccgccac

SEQ ID NO: 451753 - DNA, 55 bp, Artificial
  Synthetic oligonucleotide
tagatttctataacagccagaaaccctcggacagagcttccgaaatcctagccgc

SEQ ID NO: 451754 - DNA, 54 bp, Artificial
  Synthetic oligonucleotide
tagatttgaacctgacacaactgtcaagtgttgacgaattggcaacggttgtct

SEQ ID NO: 451755 - DNA, 57 bp, Artificial
  Synthetic oligonucleotide
tagatttgctagaagggaaggccttgaatataaactgtccatctgataaactacctt

SEQ ID NO: 451756 - DNA, 57 bp, Artificial
  Synthetic oligonucleotide
tagatttgcttagacagaataaagcgttatcggaactatcggatgaagttcttaacg

SEQ ID NO: 451757 - DNA, 59 bp, Artificial
  Synthetic oligonucleotide
tagatttggaacaataattgctagaaactttgatactatcagattgtcgttccaactta

SEQ ID NO: 451758 - DNA, 60 bp, Artificial
  Synthetic oligonucleotide
tagatttggaacgatcgtagctagaaattttgatacgatcagattatcgttccagttgat

SEQ ID NO: 451759 - DNA, 60 bp, Artificial
  Synthetic oligonucleotide
tagatttggcactattgtcgcaagaaatttcgatacaattcgtctatcattccaattaat

SEQ ID NO: 451760 - DNA, 59 bp, Artificial
  Synthetic oligonucleotide
tagatttggtactattatcgcaagaaattttgatacaattcgattgtcattccagttaa

SEQ ID NO: 451761 - DNA, 60 bp, Artificial
  Synthetic oligonucleotide
tagattttgtaactacgaattatatgtcacttatatctggcatgtggctattgactgtta

SEQ ID NO: 451762 - DNA, 58 bp, Artificial
  Synthetic oligonucleotide
tagcaaaaaattgtcgagcacctagaaagcgaggttgctggaaatgtggacaggaagg

SEQ ID NO: 451763 - DNA, 60 bp, Artificial
  Synthetic oligonucleotide
tagcaaaaatggatccaatgggaagttggcatattttaagagagccagtgtcctcttctg

SEQ ID NO: 451764 - DNA, 60 bp, Artificial
  Synthetic oligonucleotide
tagcaaaacaaatagtagtaatgagaccgagatcttcagacctggaggaggagatatgag

SEQ ID NO: 451765 - DNA, 60 bp, Artificial
  Synthetic oligonucleotide
tagcaaaagaaatagtagcctgctgtgacaaatgtcagctaaaaggggaagccatgcatg

SEQ ID NO: 451766 - DNA, 60 bp, Artificial
  Synthetic oligonucleotide
tagcaaaagcaggagtttaaaatgctatcaatcgcgattctgtttctgctcatagcagag

SEQ ID NO: 451767 - DNA, 60 bp, Artificial
  Synthetic oligonucleotide
tagcaaacatcgatgaagtaaatagtcgactgccgcttggtggcggcaagatggctaaag

SEQ ID NO: 451768 - DNA, 55 bp, Artificial
  Synthetic oligonucleotide
tagcaaacccatcacaaagtaaatggcgttttgttgacgtagttaagaccactgc

SEQ ID NO: 451769 - DNA, 58 bp, Artificial
  Synthetic oligonucleotide
tagcaaacggagatgattggggtggagttataccagtgggaatgccttgttattctaa

SEQ ID NO: 451770 - DNA, 57 bp, Artificial
  Synthetic oligonucleotide
tagcaaacggagggactagccgtagtggcgagctccctgggtggtctaagtcctgag

SEQ ID NO: 451771 - DNA, 55 bp, Artificial
  Synthetic oligonucleotide
tagcaaagccctcttttcatcaactcaaccttatccagccccgcctgtatatggg

SEQ ID NO: 451772 - DNA, 57 bp, Artificial
  Synthetic oligonucleotide
tagcaaaggaaggatattgttatctcaacatttttctagcaatgttagttaatgtta

SEQ ID NO: 451773 - DNA, 60 bp, Artificial
  Synthetic oligonucleotide
tagcaaataggcccattaggcaatggttgcatcattgtaatacacttcaatttggcagac

SEQ ID NO: 451774 - DNA, 55 bp, Artificial
  Synthetic oligonucleotide
tagcaaatcccattaaagtgcatgctgagagactgattggaggctccgttcgcag

SEQ ID NO: 451775 - DNA, 55 bp, Artificial
  Synthetic oligonucleotide
tagcaaatcctgatactgaaggagtgatagtcgaagcggacgccacagaccaaaa

SEQ ID NO: 451776 - DNA, 60 bp, Artificial
  Synthetic oligonucleotide
tagcaaattgtcaggaagtgctcagcatgtcgaggagtgctcctgttatcctcgatatcc

SEQ ID NO: 451777 - DNA, 54 bp, Artificial
  Synthetic oligonucleotide
tagcaaatttcaccaaggggcgctactcgttgcggtattgcccgagtatgtcat

SEQ ID NO: 451778 - DNA, 57 bp, Artificial
  Synthetic oligonucleotide
tagcaacaacagtgagtcagaaatattcagacctggaggaggagatatgagggacaa

SEQ ID NO: 451779 - DNA, 57 bp, Artificial
  Synthetic oligonucleotide
tagcaacaaccgggtttcactcacattccggctgcaatccagggacttgaacggtaa

SEQ ID NO: 451780 - DNA, 58 bp, Artificial
  Synthetic oligonucleotide
tagcaacaactaatcttcccaaatttcgacctgtcaccgtagcgcattaccctgctgt

SEQ ID NO: 451781 - DNA, 55 bp, Artificial
  Synthetic oligonucleotide
tagcaacaagcacacgcacctgtgtcgcgagctccccttgcgcacgcgccagtgt

SEQ ID NO: 451782 - DNA, 60 bp, Artificial
  Synthetic oligonucleotide
tagcaacacaccctctagccacaacattaattggagagattgccaattattatacacatt

SEQ ID NO: 451783 - DNA, 60 bp, Artificial
  Synthetic oligonucleotide
tagcaacagacgctctaatgacgggctttaccggcgacttcgactcagtaatcgactgta

SEQ ID NO: 451784 - DNA, 60 bp, Artificial
  Synthetic oligonucleotide
tagcaacagtggtgagttcgttggatggcttaagccctgagtacagggtagtcgtcagtg

SEQ ID NO: 451785 - DNA, 60 bp, Artificial
  Synthetic oligonucleotide
tagcaaccagaccacttcgcaatgatgctaatgccattctagagaggattggcgtccacg

SEQ ID NO: 451786 - DNA, 52 bp, Artificial
  Synthetic oligonucleotide
tagcaaccgaaggaccactctacagaccaatagacatggcagagtacctgcg

SEQ ID NO: 451787 - DNA, 58 bp, Artificial
  Synthetic oligonucleotide
tagcaaccggagaagtatttgtaggacccgacatctgcggcaattgtataacccatac

SEQ ID NO: 451788 - DNA, 60 bp, Artificial
  Synthetic oligonucleotide
tagcaacgacgtatggtagaatcgctgagtctcaagctcgacagattaaggctccattgg

SEQ ID NO: 451789 - DNA, 51 bp, Artificial
  Synthetic oligonucleotide
tagcaactaaagtaaaaacagatgatccagacacctatgtacttaaggaag

SEQ ID NO: 451790 - DNA, 51 bp, Artificial
  Synthetic oligonucleotide
tagcaactgtaaaaagttgaaaactagagtgaatgtccgcgttattcaagc

SEQ ID NO: 451791 - DNA, 52 bp, Artificial
  Synthetic oligonucleotide
tagcaagaaaagtgcctctggccctattgtggtccatagtataggctgtttt

SEQ ID NO: 451792 - DNA, 60 bp, Artificial
  Synthetic oligonucleotide
tagcaagacctcaagccgaagttggccgagacatagaatattcagaacttagtcaggcat

SEQ ID NO: 451793 - DNA, 54 bp, Artificial
  Synthetic oligonucleotide
tagcaagagccgcatcctattggggtggtgacgaacgtcctacaagcgcctcta

SEQ ID NO: 451794 - DNA, 60 bp, Artificial
  Synthetic oligonucleotide
tagcaagatgtcacactatcggattcatgagaatcaatatggcccagagtttgtcatggg

SEQ ID NO: 451795 - DNA, 56 bp, Artificial
  Synthetic oligonucleotide
tagcaagcatagtaggattaatagtaacatttatcatagcagtagttgtgtggacc

SEQ ID NO: 451796 - DNA, 55 bp, Artificial
  Synthetic oligonucleotide
tagcaagccatggctctttatccgtctcaagatgtcttggccctcactcagtggg

SEQ ID NO: 451797 - DNA, 60 bp, Artificial
  Synthetic oligonucleotide
tagcaaggagtatctgtgagaagctcgagcaatctggactcccagttggaggcaatgaaa

SEQ ID NO: 451798 - DNA, 60 bp, Artificial
  Synthetic oligonucleotide
tagcaagtccagttgttacgaggcatagttgtgaaggagtaccgttgctccgcattggag

SEQ ID NO: 451799 - DNA, 59 bp, Artificial
  Synthetic oligonucleotide
tagcaagtgcgcagggacaaatggtgtatcaggccctttcccccaggactttaaatgca

SEQ ID NO: 451800 - DNA, 60 bp, Artificial
  Synthetic oligonucleotide
tagcaataaatcaattgtgtataggttaaacagcatggtgttcttttatcatgaatacct

SEQ ID NO: 451801 - DNA, 55 bp, Artificial
  Synthetic oligonucleotide
tagcaatcaacaggtacaatggactaactctacgtggggtaacgatgcgcccgac

SEQ ID NO: 451802 - DNA, 60 bp, Artificial
  Synthetic oligonucleotide
tagcaatctaggctttttcacgaactacgcaaatgcgctggttgatcaactctgcgtatc

SEQ ID NO: 451803 - DNA, 60 bp, Artificial
  Synthetic oligonucleotide
tagcaatgagagggccgcgatagatttaatccgcacccatgttataagaggcaaaatacg

SEQ ID NO: 451804 - DNA, 60 bp, Artificial
  Synthetic oligonucleotide
tagcaatgagcatgaatcacgcacaacagtacaagcaattagttgttatgctcccgaaga

SEQ ID NO: 451805 - DNA, 54 bp, Artificial
  Synthetic oligonucleotide
tagcaatgcccaggcggttcgatgcgtcaccaatcaacgagatccggtgtgcga

SEQ ID NO: 451806 - DNA, 60 bp, Artificial
  Synthetic oligonucleotide
tagcaatggaaccatcaaagacagaacaccctatagatcactgatcaggttcccaatagg

SEQ ID NO: 451807 - DNA, 60 bp, Artificial
  Synthetic oligonucleotide
tagcaatggttttctcacaagaggattgcatgataaaggcagtccgaggtgatttgaatt

SEQ ID NO: 451808 - DNA, 52 bp, Artificial
  Synthetic oligonucleotide
tagcaatgtaattcttaattacattggataatcaatacattttgcactccaa

SEQ ID NO: 451809 - DNA, 54 bp, Artificial
  Synthetic oligonucleotide
tagcaatgtttggggttaatatcgggactaagttgtgtcgaggatattcccctt

SEQ ID NO: 451810 - DNA, 50 bp, Artificial
  Synthetic oligonucleotide
tagcaattacacacagataatatatagtctaattgaagaatcgcagaacc

SEQ ID NO: 451811 - DNA, 55 bp, Artificial
  Synthetic oligonucleotide
tagcaattattgctcctagcagaagataaaagctggtagctatataatacaggcc

SEQ ID NO: 451812 - DNA, 58 bp, Artificial
  Synthetic oligonucleotide
tagcaattcaccactggctaaacttcctccaagccgcgtaccgactacagccagggcc

SEQ ID NO: 451813 - DNA, 59 bp, Artificial
  Synthetic oligonucleotide
tagcaattgcagggatcctaataatgagagagggaatccaggggtgaaaggctgggctt

SEQ ID NO: 451814 - DNA, 55 bp, Artificial
  Synthetic oligonucleotide
tagcacaacatggcaatggtgtggtgatgggaattgtagacaaggcaggcaccgc

SEQ ID NO: 451815 - DNA, 55 bp, Artificial
  Synthetic oligonucleotide
tagcacacaccccttttaccgcgccgaaccgctgactgcggatgcctgcgaacga

SEQ ID NO: 451816 - DNA, 60 bp, Artificial
  Synthetic oligonucleotide
tagcacactgctatgagtcccgtgacttccgtgttgccgctttcaagggtgacgattctg

SEQ ID NO: 451817 - DNA, 55 bp, Artificial
  Synthetic oligonucleotide
tagcacagataactacgacgttggtagtttggactgaactgatgcatgcgaggca

SEQ ID NO: 451818 - DNA, 60 bp, Artificial
  Synthetic oligonucleotide
tagcacatcttcaattgacggagcctggggttcaggtgttggattcaatttagcttgcca

SEQ ID NO: 451819 - DNA, 58 bp, Artificial
  Synthetic oligonucleotide
tagcaccacccacaataacctcgttgccagctatgaataggagatttttcttagatct

SEQ ID NO: 451820 - DNA, 60 bp, Artificial
  Synthetic oligonucleotide
tagcaccatccactgaaacggagtccagcttatgctggcccgtttcacccatccaccacc

SEQ ID NO: 451821 - DNA, 59 bp, Artificial
  Synthetic oligonucleotide
tagcaccatggtacgctttcgcactgaacaaggattctggttctggaattataacgtcg

SEQ ID NO: 451822 - DNA, 57 bp, Artificial
  Synthetic oligonucleotide
tagcacccaccagggcaaggagaagagtagtggggaaagagaaaagagcagtagttg

SEQ ID NO: 451823 - DNA, 58 bp, Artificial
  Synthetic oligonucleotide
tagcacccggagtcgtagcccatgtcccgtcttcacggaggaaccgcgtagtgccagc

SEQ ID NO: 451824 - DNA, 54 bp, Artificial
  Synthetic oligonucleotide
tagcacctggtcagactggtgttattgcagactacaattataaactacctgacg

SEQ ID NO: 451825 - DNA, 60 bp, Artificial
  Synthetic oligonucleotide
tagcacgatatgcacgccgataggtgctgcgtcgcatctgcagtttgggcagtgacttcc

SEQ ID NO: 451826 - DNA, 55 bp, Artificial
  Synthetic oligonucleotide
tagcacggccttgaactgcaatgatagccttaacaccggctttgtagcagggctt

SEQ ID NO: 451827 - DNA, 60 bp, Artificial
  Synthetic oligonucleotide
tagcacggtcggtgatgtgtcgtcttctctctcagatcttgagcagactgttgcgactgc

SEQ ID NO: 451828 - DNA, 56 bp, Artificial
  Synthetic oligonucleotide
tagcactaaaggtagtagtggaaaatacaggctcctaaattgtaatacctcaacca

SEQ ID NO: 451829 - DNA, 55 bp, Artificial
  Synthetic oligonucleotide
tagcactcaaaaccgcggccgccgttgcacactgtgaccctctggtcccgggccc

SEQ ID NO: 451830 - DNA, 56 bp, Artificial
  Synthetic oligonucleotide
tagcactcaagtgaaatactcaggtacatcccttgtccgagtggcaaggtatacca

SEQ ID NO: 451831 - DNA, 58 bp, Artificial
  Synthetic oligonucleotide
tagcactccgttgacctttttatcccgaataatgtgacattatcccaaatgcgcgcgc

SEQ ID NO: 451832 - DNA, 60 bp, Artificial
  Synthetic oligonucleotide
tagcactcgatgaatgaacatatagtgcctcatacttataatacccgagtgtctttgctc

SEQ ID NO: 451833 - DNA, 54 bp, Artificial
  Synthetic oligonucleotide
tagcactgcgacggtaaagaatgatcttcgtgatcgttatcaagttatgcatcg

SEQ ID NO: 451834 - DNA, 55 bp, Artificial
  Synthetic oligonucleotide
tagcacttcactgcggtgcaggtacggacagcatcgttctctgccaacccgaggg

SEQ ID NO: 451835 - DNA, 54 bp, Artificial
  Synthetic oligonucleotide
tagcacttgaccccaaaccgaatcaaattagaacgataacaaaaccaaacacag

SEQ ID NO: 451836 - DNA, 52 bp, Artificial
  Synthetic oligonucleotide
tagcacttggccttcggattgtctatcttaagcgtgaactacgcgacgctga

SEQ ID NO: 451837 - DNA, 60 bp, Artificial
  Synthetic oligonucleotide
tagcagaaacatctgtagactatgattctgctgatttgttattagacaacggtgtggagg

SEQ ID NO: 451838 - DNA, 60 bp, Artificial
  Synthetic oligonucleotide
tagcagaactcgaagcagagatcaacaatctcagatcaacattagccatactcagtggag

SEQ ID NO: 451839 - DNA, 54 bp, Artificial
  Synthetic oligonucleotide
tagcagaagtttgcgattgcgtgaatttaccacacaaactgacaacttaagttt

SEQ ID NO: 451840 - DNA, 56 bp, Artificial
  Synthetic oligonucleotide
tagcagaccgaaaattgtatctaaattactaaaagaacatacaattttctagttga

SEQ ID NO: 451841 - DNA, 58 bp, Artificial
  Synthetic oligonucleotide
tagcagacgctgctgacagctagtatctctggtggagcggacctggtagtcaagtcat

SEQ ID NO: 451842 - DNA, 59 bp, Artificial
  Synthetic oligonucleotide
tagcagactagtggttagaggagacccctcccaagacacaacgcagcagcggggcccaa

SEQ ID NO: 451843 - DNA, 57 bp, Artificial
  Synthetic oligonucleotide
tagcagactccctagcgaatgcctcctgtcagattatacctcccctcttggttcaac

SEQ ID NO: 451844 - DNA, 50 bp, Artificial
  Synthetic oligonucleotide
tagcagactggcattaacacacagagcccgagagctgcatccggagttct

SEQ ID NO: 451845 - DNA, 60 bp, Artificial
  Synthetic oligonucleotide
tagcagacttggacccatcgtccagcccaatggtctaccaatggttgcctaaccctcaga

SEQ ID NO: 451846 - DNA, 60 bp, Artificial
  Synthetic oligonucleotide
tagcagagaaccaagtagatcctgggtgagttgctctcccctgccggtccaatatacaga

SEQ ID NO: 451847 - DNA, 60 bp, Artificial
  Synthetic oligonucleotide
tagcagagagttcctctcagaattacacagggaatcctgtaatatgcctgggacatcatg

SEQ ID NO: 451848 - DNA, 60 bp, Artificial
  Synthetic oligonucleotide
tagcagagagtttatcaacaacattcaagagaaggaccctacaactctcaacattgcatc

SEQ ID NO: 451849 - DNA, 55 bp, Artificial
  Synthetic oligonucleotide
tagcagaggctagaaggagagagatgggtgcgagagcgtcagtattgactccggg

SEQ ID NO: 451850 - DNA, 60 bp, Artificial
  Synthetic oligonucleotide
tagcagatattgatactctgcaacatgtgtcggcagcaattaaagcccgaaactacttag

SEQ ID NO: 451851 - DNA, 54 bp, Artificial
  Synthetic oligonucleotide
tagcagatccaaattgtcctccatataacactgaaaggattaagatagatgaca

SEQ ID NO: 451852 - DNA, 60 bp, Artificial
  Synthetic oligonucleotide
tagcagatgtgctaatccaaccatgggttagagcgtgaaagtcagcacttagtgctaaca

SEQ ID NO: 451853 - DNA, 60 bp, Artificial
  Synthetic oligonucleotide
tagcagcaacccacaatgccgtgcgatatggagcagtaaacgcatagaatttagccccgt

SEQ ID NO: 451854 - DNA, 55 bp, Artificial
  Synthetic oligonucleotide
tagcagcagctctgaacacaactaacattgccggacaaatgagtatccacgtagc

SEQ ID NO: 451855 - DNA, 60 bp, Artificial
  Synthetic oligonucleotide
tagcagcagttgaagtacaatctccagatgaattatttacgttaataagatgtaatttta

SEQ ID NO: 451856 - DNA, 55 bp, Artificial
  Synthetic oligonucleotide
tagcagccgatcaggattcgaggtgatcaaagtctcaaatggttgggtcaattcg

SEQ ID NO: 451857 - DNA, 54 bp, Artificial
  Synthetic oligonucleotide
tagcagccggctctacggagcgctgaaagtgctaggtcctgaaggtacagttgg

SEQ ID NO: 451858 - DNA, 60 bp, Artificial
  Synthetic oligonucleotide
tagcagctagccgtgaggcagctgaagctgatatttccggtttcgattggtctgtgcaag

SEQ ID NO: 451859 - DNA, 57 bp, Artificial
  Synthetic oligonucleotide
tagcagctcccggacccccttccaaaatgaccaagagagggtggcttggagcgcgga

SEQ ID NO: 451860 - DNA, 59 bp, Artificial
  Synthetic oligonucleotide
tagcagctgtcaattatgcgttggggacgtgtataaacgacgcggtacctaagtggcca

SEQ ID NO: 451861 - DNA, 55 bp, Artificial
  Synthetic oligonucleotide
tagcaggaactactagtacccctcaagagcaaatagcatggatgacaggcacgcc

SEQ ID NO: 451862 - DNA, 60 bp, Artificial
  Synthetic oligonucleotide
tagcaggaactactagtaccctgcaggaacaaataacatggatgacaagtaatccaccta

SEQ ID NO: 451863 - DNA, 60 bp, Artificial
  Synthetic oligonucleotide
tagcaggactgctctcaatgtcatcagcgtcaaatggtgagtcacgacaattgaaatttg

SEQ ID NO: 451864 - DNA, 60 bp, Artificial
  Synthetic oligonucleotide
tagcaggagggcctgtgcatatatccttaatctcattccagacacaccagcatcatactt

SEQ ID NO: 451865 - DNA, 60 bp, Artificial
  Synthetic oligonucleotide
tagcaggatggatccttggcaacccagagtgtgacttgttgctcacagcgaactcgtggt

SEQ ID NO: 451866 - DNA, 60 bp, Artificial
  Synthetic oligonucleotide
tagcaggcggaacaagcagtgtgtacattgaagtattgcacttgactcaaggaacctgct

SEQ ID NO: 451867 - DNA, 55 bp, Artificial
  Synthetic oligonucleotide
tagcaggtacggcacaggaaagaatcgacggtaggatgcctgttaagcgcgcgag

SEQ ID NO: 451868 - DNA, 60 bp, Artificial
  Synthetic oligonucleotide
tagcaggtacgtacgtttatgaccatcttactccactgcgagattgggctcacacgggct

SEQ ID NO: 451869 - DNA, 56 bp, Artificial
  Synthetic oligonucleotide
tagcaggtatgtcgtccaaccttgtgacattggcctttgccagtgattcggagatt

SEQ ID NO: 451870 - DNA, 52 bp, Artificial
  Synthetic oligonucleotide
tagcaggtcttatcttaaggaggtttgcgagcacgggaaggcagttttgaag

SEQ ID NO: 451871 - DNA, 55 bp, Artificial
  Synthetic oligonucleotide
tagcaggttcagcccagaaggacgtaccgagggtagcagaagctaatccaaactg

SEQ ID NO: 451872 - DNA, 55 bp, Artificial
  Synthetic oligonucleotide
tagcagtagtgcgagtgacctgtggttagagttccgttatgggcttatgccgttg

SEQ ID NO: 451873 - DNA, 52 bp, Artificial
  Synthetic oligonucleotide
tagcagtcactgtaactgcaatgcctccacgtaatacaaacgggggtagatg

SEQ ID NO: 451874 - DNA, 58 bp, Artificial
  Synthetic oligonucleotide
tagcagtccctctctcttttactagctggactattctttttgggtcaaatccttgata

SEQ ID NO: 451875 - DNA, 59 bp, Artificial
  Synthetic oligonucleotide
tagcagtccttttttgtgtgcatcaaaggatagatataaaagacaccaaggaagcctta

SEQ ID NO: 451876 - DNA, 60 bp, Artificial
  Synthetic oligonucleotide
tagcagtctgtgttgttagcacctcagcggtagagatggaaagcctaccagctgggacct

SEQ ID NO: 451877 - DNA, 60 bp, Artificial
  Synthetic oligonucleotide
tagcagtgggttcagaaacctacaacagaagattcaccccagaaatcagcactaggccca

SEQ ID NO: 451878 - DNA, 60 bp, Artificial
  Synthetic oligonucleotide
tagcagttcatacaggagaccggttgggatttctagcatggtggaggccatggtgtctag

SEQ ID NO: 451879 - DNA, 60 bp, Artificial
  Synthetic oligonucleotide
tagcagtttgcatactaaatctcctctgctgtctcacttttaccaccgttgaaggcactg

SEQ ID NO: 451880 - DNA, 55 bp, Artificial
  Synthetic oligonucleotide
tagcatactcacgtccctgacctttacgagtagtcaggaagatcccatcacgaga

SEQ ID NO: 451881 - DNA, 60 bp, Artificial
  Synthetic oligonucleotide
tagcatatgaatatgcattattagcatcagaatgtgccaatgcagccgcatggttaaatc

SEQ ID NO: 451882 - DNA, 60 bp, Artificial
  Synthetic oligonucleotide
tagcatcatttgtgagcgcatactcaaggcgctcagattgtatatacccacccactccca

SEQ ID NO: 451883 - DNA, 60 bp, Artificial
  Synthetic oligonucleotide
tagcatctgcaacactacaggagtcgaaaaacccaaatacctcccggatctgtatgatta

SEQ ID NO: 451884 - DNA, 54 bp, Artificial
  Synthetic oligonucleotide
tagcatcttagatcgtcagcccagtggtgaatccaaatgtaagcacctagagca

SEQ ID NO: 451885 - DNA, 60 bp, Artificial
  Synthetic oligonucleotide
tagcatcttgagggtacctgagatctgtgcgagtgtgatatttggtggccattgggggat

SEQ ID NO: 451886 - DNA, 59 bp, Artificial
  Synthetic oligonucleotide
tagcatgaacaacaagtacgaaacagccgcgcacaagccactcctagtaacacttcccg

SEQ ID NO: 451887 - DNA, 52 bp, Artificial
  Synthetic oligonucleotide
tagcatgatacccgataagatgttggacggcattgattcgcgcatgcgacaa

SEQ ID NO: 451888 - DNA, 60 bp, Artificial
  Synthetic oligonucleotide
tagcatgattgaggacattgagtcaccatcatcaatatgggtgtttgccggggcaccaga

SEQ ID NO: 451889 - DNA, 60 bp, Artificial
  Synthetic oligonucleotide
tagcatgcggcgaacatgcaaacccatcagtgtacatgattccaaacacaacaatctacc

SEQ ID NO: 451890 - DNA, 55 bp, Artificial
  Synthetic oligonucleotide
tagcatggagttgcccagctttggagtgtctgggatcaatgaatctgcagacatg

SEQ ID NO: 451891 - DNA, 55 bp, Artificial
  Synthetic oligonucleotide
tagcatggatggttcaaagatccttagcccaagagcatggaatagagactccaag

SEQ ID NO: 451892 - DNA, 60 bp, Artificial
  Synthetic oligonucleotide
tagcatggcgagttggacagacataacgccacagcgggccgtttttcgtgtggctcttag

SEQ ID NO: 451893 - DNA, 60 bp, Artificial
  Synthetic oligonucleotide
tagcatggtatattccttcctcgtactggagcgacaatggctggtgcacttgcgacactc

SEQ ID NO: 451894 - DNA, 56 bp, Artificial
  Synthetic oligonucleotide
tagcatgtataggcgcaaagcggggtttcggttgtacgcgattaggagtcccctta

SEQ ID NO: 451895 - DNA, 60 bp, Artificial
  Synthetic oligonucleotide
tagcattaaacaagtggcaaaatctgtggacttggtttgacatatcaagctggctgtggt

SEQ ID NO: 451896 - DNA, 55 bp, Artificial
  Synthetic oligonucleotide
tagcattatagatggttggcaagccgtgctaaccctatgggatagtagcgcaccg

SEQ ID NO: 451897 - DNA, 60 bp, Artificial
  Synthetic oligonucleotide
tagcattcatagccacccaagaagtactgaaacgcagatggactgggaagttgaccctga

SEQ ID NO: 451898 - DNA, 58 bp, Artificial
  Synthetic oligonucleotide
tagcattccgtcacatggctcgagagatacatccggagtactacaaggactgctgaca

SEQ ID NO: 451899 - DNA, 53 bp, Artificial
  Synthetic oligonucleotide
tagcattgcgttaggggttactttcgagagatttggaggggttggtccctccg

SEQ ID NO: 451900 - DNA, 52 bp, Artificial
  Synthetic oligonucleotide
tagcattggacagttggaacagtctgtggagctggtttgacataacaaggtg

SEQ ID NO: 451901 - DNA, 55 bp, Artificial
  Synthetic oligonucleotide
tagcattggggagcgcgtgactcattatgctaacgaggctgcaactaagtacctc

SEQ ID NO: 451902 - DNA, 60 bp, Artificial
  Synthetic oligonucleotide
tagcattggttggagcactgccattcattacagattcatcagtcatatcgctgatagcaa

SEQ ID NO: 451903 - DNA, 60 bp, Artificial
  Synthetic oligonucleotide
tagcatttcatcacatggcccgagagaagcatccggagttttacaagaactgctgacacc

SEQ ID NO: 451904 - DNA, 60 bp, Artificial
  Synthetic oligonucleotide
tagcatttgagtttcgcaatgcacgaattacttaggaagtggcttgacgacactaatgtg

SEQ ID NO: 451905 - DNA, 60 bp, Artificial
  Synthetic oligonucleotide
tagcatttgcatagggtatatagtgagctcggtcaatacactgcatcccgttagtcaact

SEQ ID NO: 451906 - DNA, 53 bp, Artificial
  Synthetic oligonucleotide
tagcattttgccagatggtatctacagtgccctaccacgttcctatggctgct

SEQ ID NO: 451907 - DNA, 57 bp, Artificial
  Synthetic oligonucleotide
tagccaaacccaatggtgagttagtcccccaattactgcagtacatgtatgtccccc

SEQ ID NO: 451908 - DNA, 54 bp, Artificial
  Synthetic oligonucleotide
tagccaaagcggtgttggggggggcctatgccttccagtacaccccaaaccagc

SEQ ID NO: 451909 - DNA, 60 bp, Artificial
  Synthetic oligonucleotide
tagccaacactatagaggtcttcagatcgaatggcctgacagctaatgaatcgggaaggc

SEQ ID NO: 451910 - DNA, 53 bp, Artificial
  Synthetic oligonucleotide
tagccaacgcgacgccggatccgaggggccattttggactgggggcgtggttt

SEQ ID NO: 451911 - DNA, 60 bp, Artificial
  Synthetic oligonucleotide
tagccaactgtctgcgccctccttgaaggcgacatgcactacccaccatgactccccgga

SEQ ID NO: 451912 - DNA, 59 bp, Artificial
  Synthetic oligonucleotide
tagccaagtgactactaacgcctcttcgcccacgaatctgaggagtatggtggcgggtc

SEQ ID NO: 451913 - DNA, 58 bp, Artificial
  Synthetic oligonucleotide
tagccaagtttttggcaaagagtggatcgtattggagacatttcctttacaaatgatg

SEQ ID NO: 451914 - DNA, 59 bp, Artificial
  Synthetic oligonucleotide
tagccaatcacagtcgcaaggtaagctgagaacagtctcgggggcttgtttgttctgtc

SEQ ID NO: 451915 - DNA, 60 bp, Artificial
  Synthetic oligonucleotide
tagccacacacgacgcttgcaccgcgacatatgtcggttttggacatatgcgggttaacc

SEQ ID NO: 451916 - DNA, 55 bp, Artificial
  Synthetic oligonucleotide
tagccacaggtctctcatttgtgaggtcaattgttgtgttctcccatgctctccc

SEQ ID NO: 451917 - DNA, 53 bp, Artificial
  Synthetic oligonucleotide
tagccacattggctttactgggatgtgatgtatcaccatgggcatggttgaag

SEQ ID NO: 451918 - DNA, 52 bp, Artificial
  Synthetic oligonucleotide
tagccaccccggttcgtccacaatcgtttggacgggcgtgtggactacttcg

SEQ ID NO: 451919 - DNA, 59 bp, Artificial
  Synthetic oligonucleotide
tagccaccttagagcacgccccagcatttatgtttcgcaaggagttagggacattggct

SEQ ID NO: 451920 - DNA, 58 bp, Artificial
  Synthetic oligonucleotide
tagccacgaacggttcgacatatcgggccgtggaatcagccagtacaagggacaacca

SEQ ID NO: 451921 - DNA, 57 bp, Artificial
  Synthetic oligonucleotide
tagccacgggtagggctatcgagggagcttacaaattgaagaaggtcataaacgctc

SEQ ID NO: 451922 - DNA, 56 bp, Artificial
  Synthetic oligonucleotide
tagccacgtggtcatggcggggtttatcctagtgacggggttaagtcatacctcga

SEQ ID NO: 451923 - DNA, 57 bp, Artificial
  Synthetic oligonucleotide
tagccacgtgtttaggcgacaaccaattgttaaacgccacgatggtagacgtcgaca

SEQ ID NO: 451924 - DNA, 57 bp, Artificial
  Synthetic oligonucleotide
tagccactaggcccaaagtaaatgggcaaagtggaagaatggatttcttctggacaa

SEQ ID NO: 451925 - DNA, 60 bp, Artificial
  Synthetic oligonucleotide
tagccagacacactacaggttcgtgcatactgacgagtacacgagcgcgggatacatcac

SEQ ID NO: 451926 - DNA, 51 bp, Artificial
  Synthetic oligonucleotide
tagccagacgaccggagtaaaatctctagttaacaaaatgtgttagaccgt

SEQ ID NO: 451927 - DNA, 60 bp, Artificial
  Synthetic oligonucleotide
tagccagattactgaaatcgcagctcaatatgtcagcatccccgtatttccagttacctg

SEQ ID NO: 451928 - DNA, 60 bp, Artificial
  Synthetic oligonucleotide
tagccagctgagcacgcaagtctcggacgtgcacattaacgagtcatctaccgactggaa

SEQ ID NO: 451929 - DNA, 60 bp, Artificial
  Synthetic oligonucleotide
tagccagctgtgacaaatgtcagctaaaaggggaagccatacatggacaggtagactgta

SEQ ID NO: 451930 - DNA, 60 bp, Artificial
  Synthetic oligonucleotide
tagccaggaggaaccaaggcgtgaatctataatccgcctatatgttgcctctactaatgc

SEQ ID NO: 451931 - DNA, 58 bp, Artificial
  Synthetic oligonucleotide
tagccagtaatgagacgagaggttggtttttgaactgccttgaggtcactaagagcaa

SEQ ID NO: 451932 - DNA, 60 bp, Artificial
  Synthetic oligonucleotide
tagccagtagtaattttttggctgctaaccccgagtcaggagttcatgattcagaggcat

SEQ ID NO: 451933 - DNA, 60 bp, Artificial
  Synthetic oligonucleotide
tagccagtatcatcaacgcgaaggagaagcgttcgtgatgcttaagatgctgctcgctac

SEQ ID NO: 451934 - DNA, 59 bp, Artificial
  Synthetic oligonucleotide
tagccagttgtctgcgccttctctgaaggcgacatgcactacccatcatgactccacgg

SEQ ID NO: 451935 - DNA, 55 bp, Artificial
  Synthetic oligonucleotide
tagccatacatagcgcctatagccagattaaataacccgcctactaaatcaacaa

SEQ ID NO: 451936 - DNA, 60 bp, Artificial
  Synthetic oligonucleotide
tagccataccaaatagcaatgtgtgtgggtggatgagtgttcgtgattataagcgacaag

SEQ ID NO: 451937 - DNA, 60 bp, Artificial
  Synthetic oligonucleotide
tagccatacccaaccgaggagtaaacgcctggctcacagctagtgagtacgcacggcttg

SEQ ID NO: 451938 - DNA, 60 bp, Artificial
  Synthetic oligonucleotide
tagccatagcggtacaagctatacaagaccacatcaacactattatgaacacccaattga

SEQ ID NO: 451939 - DNA, 60 bp, Artificial
  Synthetic oligonucleotide
tagccatagttgaccgtgttcacatagctcagttgctcgagttcgctaattggtataagt

SEQ ID NO: 451940 - DNA, 55 bp, Artificial
  Synthetic oligonucleotide
tagccatcacaagaccgtccagactagagtagcgcctagctggcaaaatactgtg

SEQ ID NO: 451941 - DNA, 60 bp, Artificial
  Synthetic oligonucleotide
tagccatccatttcttagctcatcctccagggccctcatctttgtacgagcttcatcctc

SEQ ID NO: 451942 - DNA, 60 bp, Artificial
  Synthetic oligonucleotide
tagccatgaaagttccctgctgggtttggaaccatatgttaattcatcgcatcttcaagg

SEQ ID NO: 451943 - DNA, 56 bp, Artificial
  Synthetic oligonucleotide
tagccatggatcctgaatccatcccatggacggctttcctggctaacaatgagctc

SEQ ID NO: 451944 - DNA, 58 bp, Artificial
  Synthetic oligonucleotide
tagccatggcgcatgatgactatgaggcctggcggcgttcgcaattagcatggatggg

SEQ ID NO: 451945 - DNA, 60 bp, Artificial
  Synthetic oligonucleotide
tagccatggtgttttcacaagaggattgcatgataaaagcagttagaggtgacctgaatt

SEQ ID NO: 451946 - DNA, 60 bp, Artificial
  Synthetic oligonucleotide
tagccattcgatagtagtgagttatagtcatcaatctgacaacgatcatgaaggacaatt

SEQ ID NO: 451947 - DNA, 53 bp, Artificial
  Synthetic oligonucleotide
tagcccaaatagttgcagaggatctattgtcgcctagcgtagttgacgtgggc

SEQ ID NO: 451948 - DNA, 60 bp, Artificial
  Synthetic oligonucleotide
tagcccaacagaaacacaagtttggacctgtctgcctgtgcaatcgtgcctacatacacg

SEQ ID NO: 451949 - DNA, 60 bp, Artificial
  Synthetic oligonucleotide
tagcccacatgtcaccgcacgtgaaagcagcactaagggcatcatccgtgttaatctggg

SEQ ID NO: 451950 - DNA, 55 bp, Artificial
  Synthetic oligonucleotide
tagcccagatggtgtcccgtcatcgtcgagcgccgttgggattagcctggcggtt

SEQ ID NO: 451951 - DNA, 60 bp, Artificial
  Synthetic oligonucleotide
tagcccaggtgttgtgtcatcattgtcttctggcaatgcagtttgtaaagtcatggcctc

SEQ ID NO: 451952 - DNA, 55 bp, Artificial
  Synthetic oligonucleotide
tagcccatgcttttcatactataagagatattaggtaccaagctgttgatgcagt

SEQ ID NO: 451953 - DNA, 55 bp, Artificial
  Synthetic oligonucleotide
tagcccatgtccaacaacatgtatctgcgggatggtttataattctagtgaagcc

SEQ ID NO: 451954 - DNA, 60 bp, Artificial
  Synthetic oligonucleotide
tagccccacgcccgaggagtcaccgcagacattcgaacgcaagccgtaatcgtttgtgca

SEQ ID NO: 451955 - DNA, 53 bp, Artificial
  Synthetic oligonucleotide
tagccccctccccgaagcgagagccgaaggaacaggagtcataccccttagcc

SEQ ID NO: 451956 - DNA, 60 bp, Artificial
  Synthetic oligonucleotide
tagccccctcgatttatgccttcagtggttatcgaggtttgctcatacgacgaggagaca

SEQ ID NO: 451957 - DNA, 58 bp, Artificial
  Synthetic oligonucleotide
tagcccccttacaactggggaactgcaacgtagcaggatggatccttggcaacccaga

SEQ ID NO: 451958 - DNA, 57 bp, Artificial
  Synthetic oligonucleotide
tagccccgtgccagagagcgtatctctgggtggcggtgttaaaaccgctacttctaa

SEQ ID NO: 451959 - DNA, 52 bp, Artificial
  Synthetic oligonucleotide
tagccccttcccggacatccggtgaggtaagtcggttcccattcccaatgga

SEQ ID NO: 451960 - DNA, 53 bp, Artificial
  Synthetic oligonucleotide
tagcccgaaagcaagtcgcggggctaatgacgtataaaaaagcggactttaaa

SEQ ID NO: 451961 - DNA, 60 bp, Artificial
  Synthetic oligonucleotide
tagcccgaagcagcgggtaatagatttaagcccacgacttgaagcgctgtgtgtgtcgcc

SEQ ID NO: 451962 - DNA, 57 bp, Artificial
  Synthetic oligonucleotide
tagcccgattttaagccaggatcgcattaaaaaggagacggaacgtctgtcacaata

SEQ ID NO: 451963 - DNA, 56 bp, Artificial
  Synthetic oligonucleotide
tagcccgccatcacacgaaaggttcgccatgtcaaacgtattcactctcgactccc

SEQ ID NO: 451964 - DNA, 53 bp, Artificial
  Synthetic oligonucleotide
tagcccgcttaccacccaacacaccctcctgtttaacatcctggggggatggg

SEQ ID NO: 451965 - DNA, 56 bp, Artificial
  Synthetic oligonucleotide
tagcccggcgtacgacggcaatcggggtggtgaggcaggtggtgtcaccggacgag

SEQ ID NO: 451966 - DNA, 56 bp, Artificial
  Synthetic oligonucleotide
tagcccgtcgggaccacatcctggcgttggtgttaatagtcgtctgatcggtttgg

SEQ ID NO: 451967 - DNA, 55 bp, Artificial
  Synthetic oligonucleotide
tagcccgtgggtacatcacaccagcaatggcatccattgttgtccctgtgacagg

SEQ ID NO: 451968 - DNA, 57 bp, Artificial
  Synthetic oligonucleotide
tagcccgttacgcttttgacttctatgaagttaattcaaagactcctgatagagccc

SEQ ID NO: 451969 - DNA, 59 bp, Artificial
  Synthetic oligonucleotide
tagccctacttcggaagattcggtgtggacagactcgtacctagtgataccagtggatc

SEQ ID NO: 451970 - DNA, 55 bp, Artificial
  Synthetic oligonucleotide
tagccctctctggattggagaatgtcccaagtatgttaaaagtgatagcctaaga

SEQ ID NO: 451971 - DNA, 60 bp, Artificial
  Synthetic oligonucleotide
tagccctgatcaagagctagcactaagtagaagccgacgagcgaaccttgtgccagcaga

SEQ ID NO: 451972 - DNA, 55 bp, Artificial
  Synthetic oligonucleotide
tagccctgcgctgggaccgtatctcagatccctggctgtctcggtgcacgcttac

SEQ ID NO: 451973 - DNA, 58 bp, Artificial
  Synthetic oligonucleotide
tagccctggatgcgtcccatgtgtaaaaactgggaacctgtctcggtgttgggtgcca

SEQ ID NO: 451974 - DNA, 59 bp, Artificial
  Synthetic oligonucleotide
tagccctggcagcatctgagttcaaagagactcccgaacttgaggacgctgtacgtgca

SEQ ID NO: 451975 - DNA, 56 bp, Artificial
  Synthetic oligonucleotide
tagcccttaggaggagatttcctctttctggtttggtctattcctgtataattagc

SEQ ID NO: 451976 - DNA, 60 bp, Artificial
  Synthetic oligonucleotide
tagcccttcagtcacagctaagatcggtttgtacccgcagaagcactgcgagtcgcatct

SEQ ID NO: 451977 - DNA, 57 bp, Artificial
  Synthetic oligonucleotide
tagcccttccggcctgcctcggtacccagcttcttgctcagacgtgcgacaccgggg

SEQ ID NO: 451978 - DNA, 53 bp, Artificial
  Synthetic oligonucleotide
tagccgaaatcatttgggagacggttaaacataagactgttaaatggtttacc

SEQ ID NO: 451979 - DNA, 58 bp, Artificial
  Synthetic oligonucleotide
tagccgactcagcccccctaacactcaattgtgaccgaatagaaaacaagggaatgca

SEQ ID NO: 451980 - DNA, 55 bp, Artificial
  Synthetic oligonucleotide
tagccgagcaaacgaaagttgcaagcatcggaagtcaagtctttcacatcagccg

SEQ ID NO: 451981 - DNA, 58 bp, Artificial
  Synthetic oligonucleotide
tagccgaggtaacggcataccgttcctacggaatggtcattggcttctggacagactc

SEQ ID NO: 451982 - DNA, 60 bp, Artificial
  Synthetic oligonucleotide
tagccgagtgatagtagggctttagactccatggtctgcacgtatatacacgcttgtaat

SEQ ID NO: 451983 - DNA, 60 bp, Artificial
  Synthetic oligonucleotide
tagccgcactagccgcactagccgcactagccgcactagccgcactagccgcactagccg

SEQ ID NO: 451984 - DNA, 54 bp, Artificial
  Synthetic oligonucleotide
tagccgcagccgtgtctatgtgcaatctagcacgctctctccgcagtctaacga

SEQ ID NO: 451985 - DNA, 60 bp, Artificial
  Synthetic oligonucleotide
tagccgccaacggctcctcgggactcatagcctcagctctcgttgataaagtagcatctg

SEQ ID NO: 451986 - DNA, 55 bp, Artificial
  Synthetic oligonucleotide
tagccgccaatttaaattccataacgtgcagtggtggtgactacactttcaagtt

SEQ ID NO: 451987 - DNA, 51 bp, Artificial
  Synthetic oligonucleotide
tagccgcccaccgcaagcttgtgcccgttgaccacgtaagtgtcaccctcg

SEQ ID NO: 451988 - DNA, 58 bp, Artificial
  Synthetic oligonucleotide
tagccgcctgggtactaagggcacaatgcgtacacgcagtggcctggtcatagggccg

SEQ ID NO: 451989 - DNA, 55 bp, Artificial
  Synthetic oligonucleotide
tagccggcagattttcactgatatctttagtaccaactaatgacgattatcagac

SEQ ID NO: 451990 - DNA, 50 bp, Artificial
  Synthetic oligonucleotide
tagccggcccaaagggcccaatcacccaaatgtataccaatgtggaccaa

SEQ ID NO: 451991 - DNA, 58 bp, Artificial
  Synthetic oligonucleotide
tagccgggctcgtttagaaataaccacctctgcaagaagcagaacgagcatagttacg

SEQ ID NO: 451992 - DNA, 56 bp, Artificial
  Synthetic oligonucleotide
tagccggtcaagcttacgtggccctcagcagagctacccattgcgacggtttaata

SEQ ID NO: 451993 - DNA, 60 bp, Artificial
  Synthetic oligonucleotide
tagccggtgggtctttcagacaactgcttctcagaatcagggccttttatcaggagaggc

SEQ ID NO: 451994 - DNA, 60 bp, Artificial
  Synthetic oligonucleotide
tagccgtctgctggcctcctctagcagatcttccgtcgatttggaattcgccccaagtga

SEQ ID NO: 451995 - DNA, 56 bp, Artificial
  Synthetic oligonucleotide
tagccgtgaagtatctgcaagcggtcgagaagacttattcccctgataccctaggg

SEQ ID NO: 451996 - DNA, 59 bp, Artificial
  Synthetic oligonucleotide
tagcctaaactaagtccatatgcccacctttgctgctccggatggatgttaatacccgc

SEQ ID NO: 451997 - DNA, 60 bp, Artificial
  Synthetic oligonucleotide
tagcctaagccaagttcatatgcccacctttgcttgtctccgggtggatgcctcatggtg

SEQ ID NO: 451998 - DNA, 50 bp, Artificial
  Synthetic oligonucleotide
tagcctacggggatgacgttatagtgacctaccccttccagctggatgca

SEQ ID NO: 451999 - DNA, 51 bp, Artificial
  Synthetic oligonucleotide
tagcctagaggaaaagggtatactgttcacatcagattatgtgcttgcctc

SEQ ID NO: 452000 - DNA, 57 bp, Artificial
  Synthetic oligonucleotide
tagcctcaaccgccttcactaagtcacttcttattaataaagaggcttcatttatgt

SEQ ID NO: 452001 - DNA, 60 bp, Artificial
  Synthetic oligonucleotide
tagcctctactgaagagttgatgacatggggcatggccattatggctttaaccacggcca

SEQ ID NO: 452002 - DNA, 58 bp, Artificial
  Synthetic oligonucleotide
tagcctctagaaccatcagaccaatcttttacatcttgtttcaccaccgaaaggaatg

SEQ ID NO: 452003 - DNA, 55 bp, Artificial
  Synthetic oligonucleotide
tagcctctagctcgttcggcggcgcctttccgcgtgcgagcctttcggcgagttt

SEQ ID NO: 452004 - DNA, 59 bp, Artificial
  Synthetic oligonucleotide
tagcctctttcttcgaagattgttttggaattgctgttagtggtttcgaatacatgaca

SEQ ID NO: 452005 - DNA, 55 bp, Artificial
  Synthetic oligonucleotide
tagcctggcgttaatcaattcacacgggcacgtgtttagatcgttgttacccatc

SEQ ID NO: 452006 - DNA, 58 bp, Artificial
  Synthetic oligonucleotide
tagcctgggaggatatagagttggcgggtgaccgtgacactactttctccgcctacag

SEQ ID NO: 452007 - DNA, 54 bp, Artificial
  Synthetic oligonucleotide
tagccttaatggatcttttgatgttttccacgtcagcctatctaattagtgtct

SEQ ID NO: 452008 - DNA, 58 bp, Artificial
  Synthetic oligonucleotide
tagccttattctgctgcgtgaggccgtctcatgctgagacagttggcgagactctcac

SEQ ID NO: 452009 - DNA, 51 bp, Artificial
  Synthetic oligonucleotide
tagccttgctaagggagacatctagtgatataagtgtgaactacacttatc

SEQ ID NO: 452010 - DNA, 50 bp, Artificial
  Synthetic oligonucleotide
tagcgaaacactatcacccgaatcgaggtttctgcatcgaatgggtctga

SEQ ID NO: 452011 - DNA, 55 bp, Artificial
  Synthetic oligonucleotide
tagcgaaactagagagttcctcgtaagcggccttagttgatctatatactctatg

SEQ ID NO: 452012 - DNA, 57 bp, Artificial
  Synthetic oligonucleotide
tagcgaaccgggacctccgtccgctcttataaactccgctcatccgatgacgtaatc

SEQ ID NO: 452013 - DNA, 55 bp, Artificial
  Synthetic oligonucleotide
tagcgaagtctaaagccagcggcaatggctccgctcgtatgaaatcttccatccg

SEQ ID NO: 452014 - DNA, 60 bp, Artificial
  Synthetic oligonucleotide
tagcgaataaatattcgtttataactaagataattcgagttgatggagatgataattatg

SEQ ID NO: 452015 - DNA, 57 bp, Artificial
  Synthetic oligonucleotide
tagcgacaaaaggtggagcttgggaagattattatcctcctaatttgaaagatctcc

SEQ ID NO: 452016 - DNA, 55 bp, Artificial
  Synthetic oligonucleotide
tagcgacaagttctttgagcttctaggctacaagccgcatcacgtacagttagcc

SEQ ID NO: 452017 - DNA, 52 bp, Artificial
  Synthetic oligonucleotide
tagcgacatgatggttgatacctggaacaattactctatagcagggatgaaa

SEQ ID NO: 452018 - DNA, 57 bp, Artificial
  Synthetic oligonucleotide
tagcgacccaaatgacgacgcgctttatgaagcggaatactaggtagtttccttgtc

SEQ ID NO: 452019 - DNA, 60 bp, Artificial
  Synthetic oligonucleotide
tagcgacgagaggtaatataccagtagcgtataatggtcgcattattacggtgcctgtag

SEQ ID NO: 452020 - DNA, 55 bp, Artificial
  Synthetic oligonucleotide
tagcgacgattttactggagcctaacgtacagtcagttgagcgtacatacacgct

SEQ ID NO: 452021 - DNA, 60 bp, Artificial
  Synthetic oligonucleotide
tagcgacgcattaccagatatagcggtgaagcgttaagggctaagcggtggcgtaacatg

SEQ ID NO: 452022 - DNA, 50 bp, Artificial
  Synthetic oligonucleotide
tagcgactagattatactctcattacgccataaagatgaggcttaccctg

SEQ ID NO: 452023 - DNA, 55 bp, Artificial
  Synthetic oligonucleotide
tagcgactgctggacctaccactgctagagatgagattagagatgcccttatagg

SEQ ID NO: 452024 - DNA, 58 bp, Artificial
  Synthetic oligonucleotide
tagcgactgggcgggtgccggaggatcccagatccggagtcaaggggcctatcgggca

SEQ ID NO: 452025 - DNA, 55 bp, Artificial
  Synthetic oligonucleotide
tagcgactggttaagcaaacaacaaccagatgtagtcggtcagctggcgaattac

SEQ ID NO: 452026 - DNA, 53 bp, Artificial
  Synthetic oligonucleotide
tagcgacttcgctcaccgcatcagagaaacgtaaagtgatcgatatgtttcct

SEQ ID NO: 452027 - DNA, 57 bp, Artificial
  Synthetic oligonucleotide
tagcgacttgccgcttctacacgttggagtccgtgaagtgggaagccaactcccctg

SEQ ID NO: 452028 - DNA, 52 bp, Artificial
  Synthetic oligonucleotide
tagcgagcgtgattacctcgagtgcaatgggtgggccccatacatacgcgag

SEQ ID NO: 452029 - DNA, 51 bp, Artificial
  Synthetic oligonucleotide
tagcgagtcccaagactcgcggacatacttgttgtccgcacgcgtagcggt

SEQ ID NO: 452030 - DNA, 60 bp, Artificial
  Synthetic oligonucleotide
tagcgataggagaggatgctgggagtcagcggcgaccaaagcgaggatcgaaagtaaaga

SEQ ID NO: 452031 - DNA, 60 bp, Artificial
  Synthetic oligonucleotide
tagcgatgaatgttcactctgatgaggtccgacagacatttatccagttcggtaatccta

SEQ ID NO: 452032 - DNA, 58 bp, Artificial
  Synthetic oligonucleotide
tagcgatggggggagatgctaggagtagggcggagaccgaagcgaggaggaaagcaaa

SEQ ID NO: 452033 - DNA, 60 bp, Artificial
  Synthetic oligonucleotide
tagcgattattccgttgacattgaccgaattcgtctgaagcaatccgatctgcttccaaa

SEQ ID NO: 452034 - DNA, 60 bp, Artificial
  Synthetic oligonucleotide
tagcgattggatcagtgaacacagtgttatctaccatagcactgctaattggaataggta

SEQ ID NO: 452035 - DNA, 60 bp, Artificial
  Synthetic oligonucleotide
tagcgatttggagttactgaaatcggcaatcatctacatgtatcgcgttgacagatcact

SEQ ID NO: 452036 - DNA, 59 bp, Artificial
  Synthetic oligonucleotide
tagcgcaactgcatcgctagttgcagccacttgatctgagataacaaaaagcaagagtg

SEQ ID NO: 452037 - DNA, 60 bp, Artificial
  Synthetic oligonucleotide
tagcgcacagtctaaatggtttgggtcattattgcgattgttaatatgtccctggttaca

SEQ ID NO: 452038 - DNA, 50 bp, Artificial
  Synthetic oligonucleotide
tagcgcagatggtccaacagtcattgcaactctggccctactgggatgta

SEQ ID NO: 452039 - DNA, 60 bp, Artificial
  Synthetic oligonucleotide
tagcgcatatacgtcaccaatgcacgcaaggcgcatgattagatcaaaaacggttcaccc

SEQ ID NO: 452040 - DNA, 55 bp, Artificial
  Synthetic oligonucleotide
tagcgcatgatttatgatgtgggtagtgggttaatggtccaaagttccatttatg

SEQ ID NO: 452041 - DNA, 60 bp, Artificial
  Synthetic oligonucleotide
tagcgcatggcctgcgatgactctttcatatccgcgaagtttcacgtgaggaccggctac

SEQ ID NO: 452042 - DNA, 56 bp, Artificial
  Synthetic oligonucleotide
tagcgcattgggtggattgggtcgttgatatcgtaatgatgactcaagttagccgc

SEQ ID NO: 452043 - DNA, 58 bp, Artificial
  Synthetic oligonucleotide
tagcgccgaaaggatacttgcagcctgggcggctaagaccaatcaggaaaacgtagtc

SEQ ID NO: 452044 - DNA, 60 bp, Artificial
  Synthetic oligonucleotide
tagcgcgaacttccctgtagtacgaaacgctcagggacagttgacgcataatccaatatc

SEQ ID NO: 452045 - DNA, 58 bp, Artificial
  Synthetic oligonucleotide
tagcgcgggatacatctcagggtggtatcaaaccagcatcgttgtcccccccaaaaca

SEQ ID NO: 452046 - DNA, 54 bp, Artificial
  Synthetic oligonucleotide
tagcgcgtaatatttgtctagggccgcggggactttgaccgtttacgtggagac

SEQ ID NO: 452047 - DNA, 59 bp, Artificial
  Synthetic oligonucleotide
tagcgcgtcatatcagggtcccccggtacaggttcagtcccatcatacactctaacctc

SEQ ID NO: 452048 - DNA, 60 bp, Artificial
  Synthetic oligonucleotide
tagcgcgtgatccaagattcaaacatcgggtgtatcagcaattgagtgctgtaactctac

SEQ ID NO: 452049 - DNA, 56 bp, Artificial
  Synthetic oligonucleotide
tagcgcgttatttgaagaacagaactgataacatcaagcaaggaagcctaacaaca

SEQ ID NO: 452050 - DNA, 60 bp, Artificial
  Synthetic oligonucleotide
tagcgctactgcagtggccacgcaaacacagcgaaagttcctatgtgacaggacgctgtg

SEQ ID NO: 452051 - DNA, 58 bp, Artificial
  Synthetic oligonucleotide
tagcgctagtggcattgcattcgccacgggtgtatctcttgaatacgcaactgagttc

SEQ ID NO: 452052 - DNA, 60 bp, Artificial
  Synthetic oligonucleotide
tagcgctagttggagctcttccatttgttacagactcgtcagtcataacgttgatagcga

SEQ ID NO: 452053 - DNA, 50 bp, Artificial
  Synthetic oligonucleotide
tagcgcttactaagccgtcccaagtgacctcgcgcgctgctatgttggca

SEQ ID NO: 452054 - DNA, 50 bp, Artificial
  Synthetic oligonucleotide
tagcgcttcgtgaaacctggcactgacatcggggtttgggagcacgcgtt

SEQ ID NO: 452055 - DNA, 53 bp, Artificial
  Synthetic oligonucleotide
tagcggaaaagcctatttatcgggcttaggtgtaaccgattccccagcatccg

SEQ ID NO: 452056 - DNA, 60 bp, Artificial
  Synthetic oligonucleotide
tagcggaaacagcgctaaggaagctctaccttgataaggaaccagctcaagaggacctca

SEQ ID NO: 452057 - DNA, 60 bp, Artificial
  Synthetic oligonucleotide
tagcggaaatgatgcggaggacgttgtgtgctgctcaatgtcttattcctggacaggcgc

SEQ ID NO: 452058 - DNA, 59 bp, Artificial
  Synthetic oligonucleotide
tagcggaagtaactgcgacgtggtttcaaaaggagacaatatcctcgtgtatgtggcaa

SEQ ID NO: 452059 - DNA, 60 bp, Artificial
  Synthetic oligonucleotide
tagcggaagttttgttcaacatccagaattgacggggctggactgcatgaggccttgctt

SEQ ID NO: 452060 - DNA, 55 bp, Artificial
  Synthetic oligonucleotide
tagcggaatgccacctttaatttgaaccggctttccgtactttgtgttgctttgc

SEQ ID NO: 452061 - DNA, 50 bp, Artificial
  Synthetic oligonucleotide
tagcggacgctggagagcattacgtaccgatgctaactggattacagtct

SEQ ID NO: 452062 - DNA, 55 bp, Artificial
  Synthetic oligonucleotide
tagcggagagctatgcgtcagcgcagatgggcggaaatgggccgcggaaacgatc

SEQ ID NO: 452063 - DNA, 59 bp, Artificial
  Synthetic oligonucleotide
tagcggagcaattttttaggtcccttggctatatataacacgtcatcgaggcgggcata

SEQ ID NO: 452064 - DNA, 59 bp, Artificial
  Synthetic oligonucleotide
tagcggagccgacacggaagatgtcgtgtgctgctcaatgtcttattcctggacaggcg

SEQ ID NO: 452065 - DNA, 55 bp, Artificial
  Synthetic oligonucleotide
tagcggagcttccaagctagaattttcacaggatccaagtaaattcactgatccc

SEQ ID NO: 452066 - DNA, 56 bp, Artificial
  Synthetic oligonucleotide
tagcggaggaccactcattgatctactcacggaggaccctccgccttaccgggacc

SEQ ID NO: 452067 - DNA, 59 bp, Artificial
  Synthetic oligonucleotide
tagcggagtcttgacgagccctagtggtgaattgagcttttctagagaagtggttggtc

SEQ ID NO: 452068 - DNA, 58 bp, Artificial
  Synthetic oligonucleotide
tagcggataagactgacaacgcttgcgtgatagctgaactggatcacgtcggtagcga

SEQ ID NO: 452069 - DNA, 60 bp, Artificial
  Synthetic oligonucleotide
tagcggatcggacgacgtcgtgtgctgctcaatgtcatactcctggacaggagctctaat

SEQ ID NO: 452070 - DNA, 55 bp, Artificial
  Synthetic oligonucleotide
tagcggatgggggtcgagaagttattgccgtcccgaaccctgctaaactcctcat

SEQ ID NO: 452071 - DNA, 58 bp, Artificial
  Synthetic oligonucleotide
tagcggcaatggacaccactgaagcacgggttactatctactgccgcgataaaacgtg

SEQ ID NO: 452072 - DNA, 59 bp, Artificial
  Synthetic oligonucleotide
tagcggcattttcttagtaagaacacccaccgaaacagtactgcaagaatatacacaga

SEQ ID NO: 452073 - DNA, 57 bp, Artificial
  Synthetic oligonucleotide
tagcggccacccttgggttcgggtcatacatgtctactgcccacggtatagacccta

SEQ ID NO: 452074 - DNA, 58 bp, Artificial
  Synthetic oligonucleotide
tagcggcctcctgtgtacaatctatctatctaaacacccttcaaaatggcgggaggga

SEQ ID NO: 452075 - DNA, 52 bp, Artificial
  Synthetic oligonucleotide
tagcggcctcctgtgtccaacctatttttcctaaaccccttcaaaatggcgg

SEQ ID NO: 452076 - DNA, 59 bp, Artificial
  Synthetic oligonucleotide
tagcggctaaaaacatgttctataggggccgccaaagtgccaaagtgtgagtggcacga

SEQ ID NO: 452077 - DNA, 55 bp, Artificial
  Synthetic oligonucleotide
tagcggctaaaatggtcagtctcacccgtaaggtgggccaagtctttacaaaggc

SEQ ID NO: 452078 - DNA, 54 bp, Artificial
  Synthetic oligonucleotide
tagcggctcccagcgtcgtgccgtcccggccggtttgcccggaaacgacacttg

SEQ ID NO: 452079 - DNA, 55 bp, Artificial
  Synthetic oligonucleotide
tagcggctcgcgaagggccacgtatgagaaagcgcgattgtccttggatgttctc

SEQ ID NO: 452080 - DNA, 60 bp, Artificial
  Synthetic oligonucleotide
tagcgggaccaagccctgtaaacatgtgacccccatgcgaggcttgcactgtgccttgtt

SEQ ID NO: 452081 - DNA, 60 bp, Artificial
  Synthetic oligonucleotide
tagcgggagaggagatcggagggtatctgaatttcttccttcgtgtacatgcatatgtgg

SEQ ID NO: 452082 - DNA, 60 bp, Artificial
  Synthetic oligonucleotide
tagcgggcaattcctctctctgccctgttagtggatgggctatatacagtaaagataata

SEQ ID NO: 452083 - DNA, 55 bp, Artificial
  Synthetic oligonucleotide
tagcgggcgtgtcgtgcaacgtcaccaccgaacatccgttctgcaacacgccgca

SEQ ID NO: 452084 - DNA, 54 bp, Artificial
  Synthetic oligonucleotide
tagcggggaaactgttgcggaacgggcacaaacgacggttgaggaaggtgatag

SEQ ID NO: 452085 - DNA, 55 bp, Artificial
  Synthetic oligonucleotide
tagcggggccaacgtatatacccgacccaggcctgaccggatctaagatgagagt

SEQ ID NO: 452086 - DNA, 57 bp, Artificial
  Synthetic oligonucleotide
tagcggtagtagcatcgcattttgtggtgttgattctgataccacaggttggtcgtg

SEQ ID NO: 452087 - DNA, 56 bp, Artificial
  Synthetic oligonucleotide
tagcggtgggagacaaccgcgttttggacatggggagcacttactttgacattcgg

SEQ ID NO: 452088 - DNA, 57 bp, Artificial
  Synthetic oligonucleotide
tagcggttaagagccgcatcactcgactagaaacgttaaaagctaagtcttatatcg

SEQ ID NO: 452089 - DNA, 60 bp, Artificial
  Synthetic oligonucleotide
tagcggtttagtctctgtgacaccccctgctggaacaagtgctctagtggaatgcgagtg

SEQ ID NO: 452090 - DNA, 54 bp, Artificial
  Synthetic oligonucleotide
tagcgtaatcgattgggaacagctagaatcttggtggcacgcgataggaaactg

SEQ ID NO: 452091 - DNA, 54 bp, Artificial
  Synthetic oligonucleotide
tagcgtaatctggccaggattcgttaataaagctatttccgctaaatgttcttc

SEQ ID NO: 452092 - DNA, 53 bp, Artificial
  Synthetic oligonucleotide
tagcgtacacactacagacagacatctattccatcccacgtattgtcaagatt

SEQ ID NO: 452093 - DNA, 60 bp, Artificial
  Synthetic oligonucleotide
tagcgtacacactgagtacagatcccgaagcaatccctcgaacaatagcacttttggaca

SEQ ID NO: 452094 - DNA, 54 bp, Artificial
  Synthetic oligonucleotide
tagcgtacgaggccggatcccacggaggcatcttctcccgatgactgccgctgg

SEQ ID NO: 452095 - DNA, 55 bp, Artificial
  Synthetic oligonucleotide
tagcgtaggtttaccaaagcgcaacaccttgaagtgtaacctcgtcacgtttgaa

SEQ ID NO: 452096 - DNA, 54 bp, Artificial
  Synthetic oligonucleotide
tagcgtagtgggatggcctgaggttagggaaagaataagacgtactcctgcagc

SEQ ID NO: 452097 - DNA, 60 bp, Artificial
  Synthetic oligonucleotide
tagcgtatgcggcgcataaaatcccacatgggacttgtaagacctagcgcaaataggccg

SEQ ID NO: 452098 - DNA, 55 bp, Artificial
  Synthetic oligonucleotide
tagcgtatgggcaggaagaacaattagtgtttcttcacggagtggctttgaggtc

SEQ ID NO: 452099 - DNA, 55 bp, Artificial
  Synthetic oligonucleotide
tagcgtccatgcctacaagaccgtactttcccgaggctacatcgacaacgcacag

SEQ ID NO: 452100 - DNA, 56 bp, Artificial
  Synthetic oligonucleotide
tagcgtgcagcccacattctctgtgcagaggaacctcccgttcgagagagcaacta

SEQ ID NO: 452101 - DNA, 60 bp, Artificial
  Synthetic oligonucleotide
tagcgtgcagtggctcctgaatgggacacttcctcttgattccagaagggagattggaca

SEQ ID NO: 452102 - DNA, 55 bp, Artificial
  Synthetic oligonucleotide
tagcgtggcccacaacttggaaagtaagccgggaactgtgtcaccgcttcgtggt

SEQ ID NO: 452103 - DNA, 60 bp, Artificial
  Synthetic oligonucleotide
tagcgtggccggatttgatcatgaactgttttctgcattcagcttcccactatggtgtgg

SEQ ID NO: 452104 - DNA, 60 bp, Artificial
  Synthetic oligonucleotide
tagcgtgggaatttgcccctgactggcaatcaggtttcatgccctctccgtgcacatatg

SEQ ID NO: 452105 - DNA, 60 bp, Artificial
  Synthetic oligonucleotide
tagcgtggtttcgactaagcagatcttgtatgaaacatacttatcctcattatgtggtgg

SEQ ID NO: 452106 - DNA, 55 bp, Artificial
  Synthetic oligonucleotide
tagcgtgtggtaggtgagcttgtcctggggatcggtcacgtaaacgaacccgtcg

SEQ ID NO: 452107 - DNA, 60 bp, Artificial
  Synthetic oligonucleotide
tagcgtgttaacgctagacgtgtcattcactcgccttgtaggcctgtggttgggcggcgc

SEQ ID NO: 452108 - DNA, 54 bp, Artificial
  Synthetic oligonucleotide
tagcgttcgcatcgcggggcaaccacgtctcccccacgcactatgtgcctgaga

SEQ ID NO: 452109 - DNA, 55 bp, Artificial
  Synthetic oligonucleotide
tagcgttcgcctctaggggcaaccacgtgtcacccacgcactatgtgcccgagac

SEQ ID NO: 452110 - DNA, 54 bp, Artificial
  Synthetic oligonucleotide
tagcgttctgccggatgcaccaaggacgggtagggatacctaacgtctaccacg

SEQ ID NO: 452111 - DNA, 60 bp, Artificial
  Synthetic oligonucleotide
tagcgttggcggagtagacatgcgggcgggacgtattatagcgtgggatggacaaactgc

SEQ ID NO: 452112 - DNA, 57 bp, Artificial
  Synthetic oligonucleotide
tagcgttgtttgtgatcatgactaatgttgatggtactccacgtaatgccaacgatc

SEQ ID NO: 452113 - DNA, 60 bp, Artificial
  Synthetic oligonucleotide
tagcgtttaagaacaatcctgaagaagtgtcagacatatggatgtacaaatcaataattg

SEQ ID NO: 452114 - DNA, 60 bp, Artificial
  Synthetic oligonucleotide
tagctaaaattagaagcgtgccaatcggaagagcattattgctccctgagtactccacat

SEQ ID NO: 452115 - DNA, 57 bp, Artificial
  Synthetic oligonucleotide
tagctaaagactgtcggcctgaatggtgcaacccaggaaggtagttaacattctatg

SEQ ID NO: 452116 - DNA, 52 bp, Artificial
  Synthetic oligonucleotide
tagctaacacccatgtagcccaaataactaacccagagctgttcaacaaaga

SEQ ID NO: 452117 - DNA, 57 bp, Artificial
  Synthetic oligonucleotide
tagctaagaaacttgtcaagagataattatcatatgtcggcgtagaactggaaatgg

SEQ ID NO: 452118 - DNA, 60 bp, Artificial
  Synthetic oligonucleotide
tagctaagaatcatcttggcgcatcacggaatattaacggtaaagttgtatttcacgatg

SEQ ID NO: 452119 - DNA, 55 bp, Artificial
  Synthetic oligonucleotide
tagctaagctggtgacgcggaaatataagcattcgggatggacctactcggcttt

SEQ ID NO: 452120 - DNA, 51 bp, Artificial
  Synthetic oligonucleotide
tagctaaggaattccctatatgctacatcaaataccacagaggaatcaacg

SEQ ID NO: 452121 - DNA, 56 bp, Artificial
  Synthetic oligonucleotide
tagctacaggatgacaaattgtaacacctcgatcattacacaggcctgtccaaagg

SEQ ID NO: 452122 - DNA, 60 bp, Artificial
  Synthetic oligonucleotide
tagctacaggtttctcggttgtgagatcaattgttgtgttctcccatgcccttcccacaa

SEQ ID NO: 452123 - DNA, 56 bp, Artificial
  Synthetic oligonucleotide
tagctaccatattaattgaaccgaatgtatcgtccgaaactagaacttatactatt

SEQ ID NO: 452124 - DNA, 57 bp, Artificial
  Synthetic oligonucleotide
tagctacccccttgatcatgtagtaatcgtaggggtagtggtagtttggagttgatc

SEQ ID NO: 452125 - DNA, 60 bp, Artificial
  Synthetic oligonucleotide
tagctacggctgacgccaggggtttaattcagtcatcccgggcacatgctatagttgcac

SEQ ID NO: 452126 - DNA, 57 bp, Artificial
  Synthetic oligonucleotide
tagctactaacggaaattttgctttggattatggattctctgtgatgggtaaaacaa

SEQ ID NO: 452127 - DNA, 55 bp, Artificial
  Synthetic oligonucleotide
tagctactctcaatccatgctatccaagacgaaggtttctaagtccttggttgcg

SEQ ID NO: 452128 - DNA, 57 bp, Artificial
  Synthetic oligonucleotide
tagctactctgcgttctgctaacgtacggttgaatgctgataatcatcggatgggtc

SEQ ID NO: 452129 - DNA, 60 bp, Artificial
  Synthetic oligonucleotide
tagctactggaagagcaatagagggagcttataagctgaagaaagtgattaatgctttaa

SEQ ID NO: 452130 - DNA, 55 bp, Artificial
  Synthetic oligonucleotide
tagctagagggcaagtacagacaaactttgactcacagtctttggctgcaaccgc

SEQ ID NO: 452131 - DNA, 52 bp, Artificial
  Synthetic oligonucleotide
tagctaggactacctacggtttcacaggcctctttagacccggggcgtctca

SEQ ID NO: 452132 - DNA, 55 bp, Artificial
  Synthetic oligonucleotide
tagctaggattgttatgtaccatcctaatgttggcttacgcggtctcaggaacaa

SEQ ID NO: 452133 - DNA, 50 bp, Artificial
  Synthetic oligonucleotide
tagctagggtctttctttaaatagccctcatatactgcatctctgaagca

SEQ ID NO: 452134 - DNA, 55 bp, Artificial
  Synthetic oligonucleotide
tagctagtctcttcgcgccgggcgccatgcagaacatccagctggtcaacaccaa

SEQ ID NO: 452135 - DNA, 60 bp, Artificial
  Synthetic oligonucleotide
tagctatgacactaacgagagaggtgggttagcgtatgcaacaattaagtacgctaccga

SEQ ID NO: 452136 - DNA, 55 bp, Artificial
  Synthetic oligonucleotide
tagctatgatcacatacatgaccagaaatcagcccgaatggttcagaaatgttct

SEQ ID NO: 452137 - DNA, 55 bp, Artificial
  Synthetic oligonucleotide
tagctatgctgccactagacatgttttcgatgttctcgggaattgagggtactgt

SEQ ID NO: 452138 - DNA, 60 bp, Artificial
  Synthetic oligonucleotide
tagctatggctacacgactcactcagtggcagatttacgacaaggcatcacgcctacgcg

SEQ ID NO: 452139 - DNA, 50 bp, Artificial
  Synthetic oligonucleotide
tagctattggattggccatccggtgtgcaacagagcaatcgtctacctat

SEQ ID NO: 452140 - DNA, 58 bp, Artificial
  Synthetic oligonucleotide
tagctcaaaacgctcgcccacgtttcgacgaccacagttacgctaaagcatgccaaga

SEQ ID NO: 452141 - DNA, 60 bp, Artificial
  Synthetic oligonucleotide
tagctcacatgacaaacaagcggattgctatcgataggcataggcgcaatggccggtttt

SEQ ID NO: 452142 - DNA, 56 bp, Artificial
  Synthetic oligonucleotide
tagctcaccctagcaaacggtgtcaaaagtttttacagaacttgagatactttgta

SEQ ID NO: 452143 - DNA, 51 bp, Artificial
  Synthetic oligonucleotide
tagctcagaaacatgcgcactagtttgaaggtgtcgtgccagtggtaagcc

SEQ ID NO: 452144 - DNA, 60 bp, Artificial
  Synthetic oligonucleotide
tagctcagcaatatttctctcggtgtcaagactttctcgttgtagaaatcaagaacgatt

SEQ ID NO: 452145 - DNA, 60 bp, Artificial
  Synthetic oligonucleotide
tagctcagtacaagagcaagtgcagtggatgacaacccctcaggcacaaggaggagtacc

SEQ ID NO: 452146 - DNA, 57 bp, Artificial
  Synthetic oligonucleotide
tagctcagtgtactcattacccccagacccagatcacttcgacggttacaaacaaca

SEQ ID NO: 452147 - DNA, 55 bp, Artificial
  Synthetic oligonucleotide
tagctccacgccgccagaatccccaggacgagaaagagcttccccagagtccacc

SEQ ID NO: 452148 - DNA, 60 bp, Artificial
  Synthetic oligonucleotide
tagctccagcagcagtaactgcagggatcctaataacgagagagggggcccaggagtgaa

SEQ ID NO: 452149 - DNA, 55 bp, Artificial
  Synthetic oligonucleotide
tagctccatgcccccccttgagggcgagcctggagaccccgacttaagttcggga

SEQ ID NO: 452150 - DNA, 60 bp, Artificial
  Synthetic oligonucleotide
tagctccatgttcagagggttgcgcgactacaacccaatatctaataacatttgtcatct

SEQ ID NO: 452151 - DNA, 60 bp, Artificial
  Synthetic oligonucleotide
tagctccctgaatgttcggatggaaatgtgttgccctggtttcggcatgtaagtcgaaga

SEQ ID NO: 452152 - DNA, 58 bp, Artificial
  Synthetic oligonucleotide
tagctcccttaagttaaacgtaggtgatgcttccaatgagtctgctgtgttggggtcc

SEQ ID NO: 452153 - DNA, 57 bp, Artificial
  Synthetic oligonucleotide
tagctccttgggatggaagtgatttagtttcagtttcaactcatctttccggagaaa

SEQ ID NO: 452154 - DNA, 60 bp, Artificial
  Synthetic oligonucleotide
tagctcgctatgcattcgatttctatgaggtcacctcacgaacaactgatcgtgcacgtg

SEQ ID NO: 452155 - DNA, 51 bp, Artificial
  Synthetic oligonucleotide
tagctcgtcagtttggtcacgtacagttgaacctagatcatataacattag

SEQ ID NO: 452156 - DNA, 59 bp, Artificial
  Synthetic oligonucleotide
tagctcgttacgcgtttgatttctacgaaatgacttctagaactccaatacgtgcaaga

SEQ ID NO: 452157 - DNA, 59 bp, Artificial
  Synthetic oligonucleotide
tagctcgtttaattgccccatcgacatagtaatgttggattccgctctctgggccccta

SEQ ID NO: 452158 - DNA, 57 bp, Artificial
  Synthetic oligonucleotide
tagctcgtttcacctttgatcgattacagaagttatcggaggcgaaatttgagcata

SEQ ID NO: 452159 - DNA, 55 bp, Artificial
  Synthetic oligonucleotide
tagctctatcgattgtcaaataagtattaaacgtagctgatgctggtcctccgcg

SEQ ID NO: 452160 - DNA, 55 bp, Artificial
  Synthetic oligonucleotide
tagctctatgcagatgttcaccttgcgtgtatagaaactatccatctcccacagg

SEQ ID NO: 452161 - DNA, 60 bp, Artificial
  Synthetic oligonucleotide
tagctctccagaaagctgaatcgcagttgtcctttccgttcacatcacgtgccggggttg

SEQ ID NO: 452162 - DNA, 50 bp, Artificial
  Synthetic oligonucleotide
tagctctgtggtgtctaagcactcgacccgttcaaccatcgtgccatgtc

SEQ ID NO: 452163 - DNA, 55 bp, Artificial
  Synthetic oligonucleotide
tagctcttctgtgcaagattacaatctaaacaattcggagaactcgaccttcctc

SEQ ID NO: 452164 - DNA, 55 bp, Artificial
  Synthetic oligonucleotide
tagctctttctccaagtggttggatcccttacgttgagaggatatgtgcagaggc

SEQ ID NO: 452165 - DNA, 60 bp, Artificial
  Synthetic oligonucleotide
tagctgaacctttcgtttcggcatttgatactgatcaatctctaatcatgcatccagaag

SEQ ID NO: 452166 - DNA, 60 bp, Artificial
  Synthetic oligonucleotide
tagctgagccttacgtacagagcgaagcgtcttggcacgtagtatgcaccgcggcataag

SEQ ID NO: 452167 - DNA, 60 bp, Artificial
  Synthetic oligonucleotide
tagctgagtactcaaagtatgacagttttgtggcccagtcatagggcagtgcactctgca

SEQ ID NO: 452168 - DNA, 58 bp, Artificial
  Synthetic oligonucleotide
tagctgatcagtacaggactaggagctccaaaaatggtattgtacggtttcttacaaa

SEQ ID NO: 452169 - DNA, 53 bp, Artificial
  Synthetic oligonucleotide
tagctgattgagtattataccagttcgctacaggggtatttggtatagtgcaa

SEQ ID NO: 452170 - DNA, 60 bp, Artificial
  Synthetic oligonucleotide
tagctgcaaatatcagctgccatcagaagattctggatgggtctcaggacatcattgggt

SEQ ID NO: 452171 - DNA, 55 bp, Artificial
  Synthetic oligonucleotide
tagctgcaaggccaaccggagcggatccgaggtgctccgtgccgcggagaacgct

SEQ ID NO: 452172 - DNA, 60 bp, Artificial
  Synthetic oligonucleotide
tagctgcagaacaagtgtacaaaatcgttaaagttcccagtatttcattcagacacatcg

SEQ ID NO: 452173 - DNA, 55 bp, Artificial
  Synthetic oligonucleotide
tagctgcaggtcaacctgtagacatttctgaaggtgtatcaagaggcacagctac

SEQ ID NO: 452174 - DNA, 60 bp, Artificial
  Synthetic oligonucleotide
tagctgcccattggcacgctttgggagccgctcaagaggcgaaaggacgtactttgaatg

SEQ ID NO: 452175 - DNA, 50 bp, Artificial
  Synthetic oligonucleotide
tagctgccctcggaaaagctccatacatagctgagacagcacttcgcaag

SEQ ID NO: 452176 - DNA, 60 bp, Artificial
  Synthetic oligonucleotide
tagctgcctgaatgttcggatggaaatgtgctgacctgcttggggatatgagatcgaaga

SEQ ID NO: 452177 - DNA, 60 bp, Artificial
  Synthetic oligonucleotide
tagctgcgtatcacgcagggtggttgttaccataaacaataatgtcgttggttgcattta

SEQ ID NO: 452178 - DNA, 57 bp, Artificial
  Synthetic oligonucleotide
tagctgctagtttttttgaaccgacagaatttcacctaaacatgagaaagctgttaa

SEQ ID NO: 452179 - DNA, 55 bp, Artificial
  Synthetic oligonucleotide
tagctgctctgtgtgtgaccttgattgggacctgagtataatggttcttcgaggg

SEQ ID NO: 452180 - DNA, 55 bp, Artificial
  Synthetic oligonucleotide
tagctggaatgcactgcttttataatgggtgtcagaaaagctgttgtagtgggtg

SEQ ID NO: 452181 - DNA, 57 bp, Artificial
  Synthetic oligonucleotide
tagctggaattgggtcctggattgcataggaagatagtgggtattccgcctttaatt

SEQ ID NO: 452182 - DNA, 60 bp, Artificial
  Synthetic oligonucleotide
tagctggactactctcgatgtcatcagcttctaacggtgagtcaaggcaattgaagtttg

SEQ ID NO: 452183 - DNA, 60 bp, Artificial
  Synthetic oligonucleotide
tagctggattgtgcggacgaaccccacttgcgcacctcgcgcgactggttagtactctta

SEQ ID NO: 452184 - DNA, 55 bp, Artificial
  Synthetic oligonucleotide
tagctggcatattaacaggactgccctgaattgcaatgactctctccagactggg

SEQ ID NO: 452185 - DNA, 60 bp, Artificial
  Synthetic oligonucleotide
tagctggcgtcgtcagccaatcagttcgatcaagacatcagtcagtgcgacttttacaaa

SEQ ID NO: 452186 - DNA, 57 bp, Artificial
  Synthetic oligonucleotide
tagctgggagtccaccaatcctttttgcggtgagagcaccctttatacccgcacttg

SEQ ID NO: 452187 - DNA, 50 bp, Artificial
  Synthetic oligonucleotide
tagctggggccacggggtacccctttcactgtgaactgtatggggacgct

SEQ ID NO: 452188 - DNA, 55 bp, Artificial
  Synthetic oligonucleotide
tagctggggccccacagacccccggcgtaggtcgcgcaatttgggtaaggtcatc

SEQ ID NO: 452189 - DNA, 60 bp, Artificial
  Synthetic oligonucleotide
tagctggtagattttcacaaatatcattgattccaactaatgatgattaccaaactccaa

SEQ ID NO: 452190 - DNA, 60 bp, Artificial
  Synthetic oligonucleotide
tagctggtcccatgagacgacgcatgggtctgagatgatagtaaactatccactcagttt

SEQ ID NO: 452191 - DNA, 60 bp, Artificial
  Synthetic oligonucleotide
tagctggtgtgacgaataaggatgaccaaatagtgatgccgtggatagactactgtgtta

SEQ ID NO: 452192 - DNA, 55 bp, Artificial
  Synthetic oligonucleotide
tagctggttggatcgttaatcggacggctggcacacggaatgtaggaggtcgctg

SEQ ID NO: 452193 - DNA, 60 bp, Artificial
  Synthetic oligonucleotide
tagctgtagaaattgcaaacaagactgtgatagatactgaacctttaaaatcatgtctgg

SEQ ID NO: 452194 - DNA, 57 bp, Artificial
  Synthetic oligonucleotide
tagctgtagtggctcttacgagtgcccgctatgaacggtgcgctgcagtcaaacgcc

SEQ ID NO: 452195 - DNA, 55 bp, Artificial
  Synthetic oligonucleotide
tagctgtcaaatacctgaaatacgttgaaagtacgtattcccctgatacactcgg

SEQ ID NO: 452196 - DNA, 60 bp, Artificial
  Synthetic oligonucleotide
tagctgtctaaccatacaacttagatttcacctctgtacgatgtcttaacatcttgcgga

SEQ ID NO: 452197 - DNA, 60 bp, Artificial
  Synthetic oligonucleotide
tagctgtctgctgacctcctctagcagatcttccgtcgacctgaaaagtaccccagtcga

SEQ ID NO: 452198 - DNA, 56 bp, Artificial
  Synthetic oligonucleotide
tagctgtctgttggcctcccctagcacttcttccgtcgacctggaattccccccat

SEQ ID NO: 452199 - DNA, 51 bp, Artificial
  Synthetic oligonucleotide
tagctgtctgttgtccaccccttgcagatcgaccgtcgatttgaaacttgc

SEQ ID NO: 452200 - DNA, 60 bp, Artificial
  Synthetic oligonucleotide
tagctgtgacagatggaccagcagacaataaggcagaccacagagtatactggataagag

SEQ ID NO: 452201 - DNA, 50 bp, Artificial
  Synthetic oligonucleotide
tagctgtgagagttggtgcgcctgtcgaatgtcgccagcagacggagact

SEQ ID NO: 452202 - DNA, 58 bp, Artificial
  Synthetic oligonucleotide
tagctgtgcagactgtaaaacgaaagtttgcacccagtccttatttcagccccgtgtg

SEQ ID NO: 452203 - DNA, 60 bp, Artificial
  Synthetic oligonucleotide
tagctgtgccctcagcatgcctctctctggaatgaagcgtaagaggtccgatgagacggg

SEQ ID NO: 452204 - DNA, 60 bp, Artificial
  Synthetic oligonucleotide
tagctgttaatgagaaagaatcattttatatgtcaataggagcatggacagggacaagag

SEQ ID NO: 452205 - DNA, 55 bp, Artificial
  Synthetic oligonucleotide
tagctgttaattgcgacgccgttgaaggaaattgcagtattatctcagttaggtc

SEQ ID NO: 452206 - DNA, 55 bp, Artificial
  Synthetic oligonucleotide
tagctgttacttgtctgtgactgaacagtctgagttttattttcctagagcacct

SEQ ID NO: 452207 - DNA, 60 bp, Artificial
  Synthetic oligonucleotide
tagctgttgctctctttcctagaattgtgtcaattgtaattgggcctccattagtagacg

SEQ ID NO: 452208 - DNA, 60 bp, Artificial
  Synthetic oligonucleotide
tagcttaaaagaccctaatacaccagtgtatgaagtgccttcagatcaatggattgcgcg

SEQ ID NO: 452209 - DNA, 60 bp, Artificial
  Synthetic oligonucleotide
tagcttaatagtctcagagttggatctgttttgtagtggacacactggcaatcattttgt

SEQ ID NO: 452210 - DNA, 53 bp, Artificial
  Synthetic oligonucleotide
tagcttacacaccacccggaggtgatcaaccagggagtagacaacaagccatg

SEQ ID NO: 452211 - DNA, 60 bp, Artificial
  Synthetic oligonucleotide
tagcttacttgcactaagaaatctagactttgactgtctcagtgtgcaagactataacgg

SEQ ID NO: 452212 - DNA, 58 bp, Artificial
  Synthetic oligonucleotide
tagcttagatgtgcgaacctccccctggttttataaccgttcagtgctacaccagcga

SEQ ID NO: 452213 - DNA, 60 bp, Artificial
  Synthetic oligonucleotide
tagcttatactttacagacggacgtcaactccatacagcgaacagtcactatcatagata

SEQ ID NO: 452214 - DNA, 51 bp, Artificial
  Synthetic oligonucleotide
tagcttatgcagaaagaatcaaagttgtgactttcaatgcgccagagtgtg

SEQ ID NO: 452215 - DNA, 55 bp, Artificial
  Synthetic oligonucleotide
tagcttatggagagtggcctgagtactgccctgacacagatgcaactgccgtgga

SEQ ID NO: 452216 - DNA, 60 bp, Artificial
  Synthetic oligonucleotide
tagcttcaaagcaacctctaataggcatataatcgtaacatgatcacgagtttcgtgtgt

SEQ ID NO: 452217 - DNA, 60 bp, Artificial
  Synthetic oligonucleotide
tagcttcactgccaatcggatttacatgcaccctggagtcttgacagcgggaagaatgtc

SEQ ID NO: 452218 - DNA, 55 bp, Artificial
  Synthetic oligonucleotide
tagcttcatcagagggaccaaagtatccccgcgggggaaactttcaactagagga

SEQ ID NO: 452219 - DNA, 55 bp, Artificial
  Synthetic oligonucleotide
tagcttcatctttggggatgtcgcactgaggatatgttaagaaaatgttcctggc

SEQ ID NO: 452220 - DNA, 60 bp, Artificial
  Synthetic oligonucleotide
tagcttcccctgcttgaatgaagatgaattgatgaaatgtaaaattgcagctgcaatctg

SEQ ID NO: 452221 - DNA, 51 bp, Artificial
  Synthetic oligonucleotide
tagcttccgccaccagggtcgtgaggtaggccgtaagcccttgttccacgt

SEQ ID NO: 452222 - DNA, 59 bp, Artificial
  Synthetic oligonucleotide
tagcttctgagaagacagttgtcttagcctctcgtcaaaggttagaccttgacattaaa

SEQ ID NO: 452223 - DNA, 58 bp, Artificial
  Synthetic oligonucleotide
tagcttcttaaccatataacttaaccttttcttctgtatgatgtcttaacatcttgcg

SEQ ID NO: 452224 - DNA, 56 bp, Artificial
  Synthetic oligonucleotide
tagcttgacagtggggtggcgacggtttggcttcacctgcatagcggaaaaacccg

SEQ ID NO: 452225 - DNA, 60 bp, Artificial
  Synthetic oligonucleotide
tagcttgatgctgacaccctatggagtcgaagcgacaacggaaagatgggaggagtggaa

SEQ ID NO: 452226 - DNA, 60 bp, Artificial
  Synthetic oligonucleotide
tagcttgccaagttagtctgacagagtgttcaacgtttatgactgcaattaaggcatgtg

SEQ ID NO: 452227 - DNA, 55 bp, Artificial
  Synthetic oligonucleotide
tagcttgcggatgttacacaagggaggcaggcaaccccaggatttccgtttcggt

SEQ ID NO: 452228 - DNA, 60 bp, Artificial
  Synthetic oligonucleotide
tagcttgggagctgctgtcaaggcaggggcctgcatgcttgatggtggcaatatgttgga

SEQ ID NO: 452229 - DNA, 60 bp, Artificial
  Synthetic oligonucleotide
tagcttgtcggtgtgctttcttgatagaggggggctgtgagggtgatgaagaccgcattc

SEQ ID NO: 452230 - DNA, 55 bp, Artificial
  Synthetic oligonucleotide
tagcttgtctagcgtgtcccaaccgccagccatagcatactcagagtgctttggg

SEQ ID NO: 452231 - DNA, 58 bp, Artificial
  Synthetic oligonucleotide
tagcttgtgaaaagtttcagagaggacgaacagatatgcgtgttgtccgaaggaaggg

SEQ ID NO: 452232 - DNA, 60 bp, Artificial
  Synthetic oligonucleotide
tagcttgtggagagcatgccaatccatctgtatatatgatgcctaatatcagtatctatc

SEQ ID NO: 452233 - DNA, 59 bp, Artificial
  Synthetic oligonucleotide
tagctttaagtcccggttctgacgcctcacccgaaattgatcagctcagcccaggcttg

SEQ ID NO: 452234 - DNA, 55 bp, Artificial
  Synthetic oligonucleotide
tagctttagggcagaaatattggaatggcatccgtaatccaccagtagttgctcg

SEQ ID NO: 452235 - DNA, 60 bp, Artificial
  Synthetic oligonucleotide
tagctttccgatctgacttggtgtgatccgtgtcatgcgtagtgtgacacctgcccctgg

SEQ ID NO: 452236 - DNA, 54 bp, Artificial
  Synthetic oligonucleotide
tagctttcgcaataatcagcatcatcaaaggtgaccaaatttgcattggttacc

SEQ ID NO: 452237 - DNA, 58 bp, Artificial
  Synthetic oligonucleotide
tagctttcggcattacgagtggtcagcgttactgaccgggcgttgcacgtacacaggg

SEQ ID NO: 452238 - DNA, 60 bp, Artificial
  Synthetic oligonucleotide
tagctttgctctgtgctgttagaaacaagctgatgcccactgctgtatctaatgctacac

SEQ ID NO: 452239 - DNA, 55 bp, Artificial
  Synthetic oligonucleotide
tagctttgtttgccctatggtatacaatccatagtacaagggataaccaaaggaa

SEQ ID NO: 452240 - DNA, 54 bp, Artificial
  Synthetic oligonucleotide
tagcttttaaacctgttaagaatccggaacccaagggatacgtgctgaatgttc

SEQ ID NO: 452241 - DNA, 58 bp, Artificial
  Synthetic oligonucleotide
tagcttttccgctaggtcaccaggaagcataccaagagacttacctagaggttcatta

SEQ ID NO: 452242 - DNA, 60 bp, Artificial
  Synthetic oligonucleotide
tagcttttctcaccttgagtcccgctcacttaatgcaacttgagacaactctgcgccaag

SEQ ID NO: 452243 - DNA, 56 bp, Artificial
  Synthetic oligonucleotide
taggaaaaataatgcgggaccaggaaggagatttgtgtggtgtagtctaccacaag

SEQ ID NO: 452244 - DNA, 54 bp, Artificial
  Synthetic oligonucleotide
taggaaaagggttgaactacttagagaacatttatatcggtggggattcactac

SEQ ID NO: 452245 - DNA, 55 bp, Artificial
  Synthetic oligonucleotide
taggaaaatcttcaagtttgacgctgtctatgttgacgagggtctgatggtccat

SEQ ID NO: 452246 - DNA, 53 bp, Artificial
  Synthetic oligonucleotide
taggaaaccgggtaattactagaggctaggttctcagtgataaagaactttgt

SEQ ID NO: 452247 - DNA, 55 bp, Artificial
  Synthetic oligonucleotide
taggaaagcacgtcagtgcttttccctcaaggcggtgttaaaccgtattggactg

SEQ ID NO: 452248 - DNA, 55 bp, Artificial
  Synthetic oligonucleotide
taggaaagccaagaatgtccaggaggtaccccttccttgcggaagggatctgacc

SEQ ID NO: 452249 - DNA, 60 bp, Artificial
  Synthetic oligonucleotide
taggaaagcggctggtgttgctggcaagaagtcaggtgctattaagaaatctctactgtg

SEQ ID NO: 452250 - DNA, 55 bp, Artificial
  Synthetic oligonucleotide
taggaaatcggataattgccagaggctaagctctcagtgataaagaactttgttc

SEQ ID NO: 452251 - DNA, 54 bp, Artificial
  Synthetic oligonucleotide
taggaaatgggaccgtaacaggaaattgtagtgttacaaattgggatgggtgta

SEQ ID NO: 452252 - DNA, 55 bp, Artificial
  Synthetic oligonucleotide
taggaacacccaggaccatgttcgctcgctgtgcttattggcttggcacaacggc

SEQ ID NO: 452253 - DNA, 58 bp, Artificial
  Synthetic oligonucleotide
taggaacagaagggctgatggaatggacatccgtgatcggttaaaaatgttgaagaac

SEQ ID NO: 452254 - DNA, 56 bp, Artificial
  Synthetic oligonucleotide
taggaacagcaatctcggggaaggtctcgctccacatgcgccggctcatttgcagg

SEQ ID NO: 452255 - DNA, 60 bp, Artificial
  Synthetic oligonucleotide
taggaacaggtcaaagtggctagagcatgagctcaaggatgcaaaggaagatatctctag

SEQ ID NO: 452256 - DNA, 60 bp, Artificial
  Synthetic oligonucleotide
taggaacatcgacactgaacaaaagatcagttccagaaatagccacaagacctaaggtga

SEQ ID NO: 452257 - DNA, 54 bp, Artificial
  Synthetic oligonucleotide
taggaaccaccccgacatcggctctcaacacttacccaagaggacaagttatgt

SEQ ID NO: 452258 - DNA, 56 bp, Artificial
  Synthetic oligonucleotide
taggaaccggcaaatcctccacaatagttctaacttagttcggactatttgcctgc

SEQ ID NO: 452259 - DNA, 58 bp, Artificial
  Synthetic oligonucleotide
taggaacctacaggcggaggtaacatgcaaggatggatttgtccaagagttccgtcca

SEQ ID NO: 452260 - DNA, 55 bp, Artificial
  Synthetic oligonucleotide
taggaacgaagccggactgagtggcctcgtccttctagccacagccaggagccgt

SEQ ID NO: 452261 - DNA, 53 bp, Artificial
  Synthetic oligonucleotide
taggaacgactgacaagtcgggcgcgcctacttacaactggggttgcaatgag

SEQ ID NO: 452262 - DNA, 60 bp, Artificial
  Synthetic oligonucleotide
taggaactcatgtggtatgggatgttggcttacagtccactgtatcaatggtggttccct

SEQ ID NO: 452263 - DNA, 55 bp, Artificial
  Synthetic oligonucleotide
taggaactggagcattcgggctgggattcaccccaccgcacggaggccttttggg

SEQ ID NO: 452264 - DNA, 60 bp, Artificial
  Synthetic oligonucleotide
taggaagactctatatagatcacctagtaagaaaaggcataagtatgtcatttcttctga

SEQ ID NO: 452265 - DNA, 55 bp, Artificial
  Synthetic oligonucleotide
taggaagatcccttgctgagaaactcaacagctcagtgtattcgctaccgccgga

SEQ ID NO: 452266 - DNA, 52 bp, Artificial
  Synthetic oligonucleotide
taggaaggactaaaagtaacagacttagaaaggggtttgagatggtttggga

SEQ ID NO: 452267 - DNA, 60 bp, Artificial
  Synthetic oligonucleotide
taggaaggagtcttttgggcttctcgtctgccacaaatcccaccagaactgcattgaaca

SEQ ID NO: 452268 - DNA, 52 bp, Artificial
  Synthetic oligonucleotide
taggaagggatactcacccttgtcgttgcagacccttaccccaaacccgagg

SEQ ID NO: 452269 - DNA, 52 bp, Artificial
  Synthetic oligonucleotide
taggaagtcaatcatggacttgcccctatactggccctgtctcgagcccaac

SEQ ID NO: 452270 - DNA, 54 bp, Artificial
  Synthetic oligonucleotide
taggaagtctcaaaaggcccaagaccatcacggatttacccgtggttgccccat

SEQ ID NO: 452271 - DNA, 60 bp, Artificial
  Synthetic oligonucleotide
taggaagtctgccaatgcaaaggttatgtagtcagaattccaaatcatggtgccagtagc

SEQ ID NO: 452272 - DNA, 60 bp, Artificial
  Synthetic oligonucleotide
taggaagtgaacaaacttttaacttagattatcgtcacgatatgcaagataagcttgcga

SEQ ID NO: 452273 - DNA, 55 bp, Artificial
  Synthetic oligonucleotide
taggaagtgcggcaaatactgttggagcttctttagctaaacatgtaaccctacc

SEQ ID NO: 452274 - DNA, 54 bp, Artificial
  Synthetic oligonucleotide
taggaatagaaggcattattgctactgtagtctgggggatagcttttataacgt

SEQ ID NO: 452275 - DNA, 55 bp, Artificial
  Synthetic oligonucleotide
taggaatagacgtggatggtcatataccccacgacgaggttatgcacgaaatggc

SEQ ID NO: 452276 - DNA, 55 bp, Artificial
  Synthetic oligonucleotide
taggaatagcgaacttaggattgaatataggactacatctgaaaccagactgcaa

SEQ ID NO: 452277 - DNA, 53 bp, Artificial
  Synthetic oligonucleotide
taggaataggaacccgaatagggtttcgagcggtataggacctgcggtccgac

SEQ ID NO: 452278 - DNA, 53 bp, Artificial
  Synthetic oligonucleotide
taggaatagtagccttagtagtagcagctctactagcaataattgtgtggacc

SEQ ID NO: 452279 - DNA, 55 bp, Artificial
  Synthetic oligonucleotide
taggaatattcgtgtttgcgttggtattgacccactagtgaccagatggacccgc

SEQ ID NO: 452280 - DNA, 60 bp, Artificial
  Synthetic oligonucleotide
taggaatcataggatgggtatctagcaataacacagctgcagatagtagtcaaggacgtt

SEQ ID NO: 452281 - DNA, 55 bp, Artificial
  Synthetic oligonucleotide
taggaatcgcactcctttcccaaagcaccttgccagagaccattctagaactgac

SEQ ID NO: 452282 - DNA, 60 bp, Artificial
  Synthetic oligonucleotide
taggaatgaacatgaatgaagatggccctatcatatttgacaaacattctaagtataggt

SEQ ID NO: 452283 - DNA, 60 bp, Artificial
  Synthetic oligonucleotide
taggaatgacgtacccatggctggaccattagtggctgggggcttgctgatagcgtgcta

SEQ ID NO: 452284 - DNA, 55 bp, Artificial
  Synthetic oligonucleotide
taggaatgctacaatatagtggaagagtatggacatttcatggtgaaacaccaag

SEQ ID NO: 452285 - DNA, 60 bp, Artificial
  Synthetic oligonucleotide
taggaatggcagaccaattcattggagatctcaccaagaccaacgcagcaggcggaaggt

SEQ ID NO: 452286 - DNA, 54 bp, Artificial
  Synthetic oligonucleotide
taggaatggcccaacaacaagtacagttcattaccctaaggtatataaaactta

SEQ ID NO: 452287 - DNA, 52 bp, Artificial
  Synthetic oligonucleotide
taggaatgtggcgccctctgaggtgtcatccgaggtgtccattgacattggg

SEQ ID NO: 452288 - DNA, 57 bp, Artificial
  Synthetic oligonucleotide
taggaattacgacgttcagtccagaatatacggagcactaagttaccgacttgactg

SEQ ID NO: 452289 - DNA, 55 bp, Artificial
  Synthetic oligonucleotide
taggaattcgacggacaagtagcaagcgagtcggtaccaattgatttagccttcg

SEQ ID NO: 452290 - DNA, 55 bp, Artificial
  Synthetic oligonucleotide
taggaattgttactgtaacatacacaacggagacacaacgacaaatgtttttaaa

SEQ ID NO: 452291 - DNA, 55 bp, Artificial
  Synthetic oligonucleotide
taggaatttaattcgttatcggtttgagaatgggtatgacaaagtaagaatagaa

SEQ ID NO: 452292 - DNA, 60 bp, Artificial
  Synthetic oligonucleotide
taggacaacatatctatgaaacttatggggatacctggacaggagtggaagccataataa

SEQ ID NO: 452293 - DNA, 59 bp, Artificial
  Synthetic oligonucleotide
taggacaccatatagatccctaatcaaattcccaattggaacagctcctgtacttggga

SEQ ID NO: 452294 - DNA, 53 bp, Artificial
  Synthetic oligonucleotide
taggacacgatcggtgtagcgagaatgatcatgacgagttagggttcttggtc

SEQ ID NO: 452295 - DNA, 60 bp, Artificial
  Synthetic oligonucleotide
taggacagcactcaactgtaacgacagcctccacaccggctttgtgacagcgctgttcta

SEQ ID NO: 452296 - DNA, 60 bp, Artificial
  Synthetic oligonucleotide
taggaccaacaagtgaagatgtgattactatatctatggtcgagccaatgagtatagctg

SEQ ID NO: 452297 - DNA, 60 bp, Artificial
  Synthetic oligonucleotide
taggaccaagagaaaacgtagctgttatacaagtgggcggtgcgaacatccttgatatca

SEQ ID NO: 452298 - DNA, 55 bp, Artificial
  Synthetic oligonucleotide
taggaccaagtgaactaatacctattgacagtgtcaatcctattgaccccagtgc

SEQ ID NO: 452299 - DNA, 60 bp, Artificial
  Synthetic oligonucleotide
taggaccacggctagattggatgaagatgtgaataaactaagaatgatgctgtcatctaa

SEQ ID NO: 452300 - DNA, 60 bp, Artificial
  Synthetic oligonucleotide
taggaccaggggctacattagaagagatgatgacagcatgtcagggagtgggaggacctg

SEQ ID NO: 452301 - DNA, 58 bp, Artificial
  Synthetic oligonucleotide
taggaccatagtggtaaaagcacctactaggaatgtaagacaccagatttagtgatac

SEQ ID NO: 452302 - DNA, 52 bp, Artificial
  Synthetic oligonucleotide
taggacccacaccggtcaacataattggaagaaacatgttgactcagcttgg

SEQ ID NO: 452303 - DNA, 53 bp, Artificial
  Synthetic oligonucleotide
taggaccccaaccgcttccccgattgcaagccggctaagggaacgacgagaaa

SEQ ID NO: 452304 - DNA, 57 bp, Artificial
  Synthetic oligonucleotide
taggaccccttatcggaccctattgatgaatgaattgggtgttccatttcatctggg

SEQ ID NO: 452305 - DNA, 60 bp, Artificial
  Synthetic oligonucleotide
taggacccgagtaggaacgaaacatgcaatactgctagttgcactatctttcgtgacatt

SEQ ID NO: 452306 - DNA, 51 bp, Artificial
  Synthetic oligonucleotide
taggacctgctgatgcaaaagtaccccacagtgccagtgcagacacgttga

SEQ ID NO: 452307 - DNA, 60 bp, Artificial
  Synthetic oligonucleotide
taggaccttaccggattcaggttgtttatgagagaacatactgcacaactggtatattga

SEQ ID NO: 452308 - DNA, 56 bp, Artificial
  Synthetic oligonucleotide
taggacgaaattttgcattaaaggcggttccaacaccagagccaaagggatatgta

SEQ ID NO: 452309 - DNA, 56 bp, Artificial
  Synthetic oligonucleotide
taggacgacaccgtttgatgtgtggcgatagcacatctgctgaagatatggcacgg

SEQ ID NO: 452310 - DNA, 51 bp, Artificial
  Synthetic oligonucleotide
taggacgattggatttgtgctgtaagcaacaataccagacaatttcagtct

SEQ ID NO: 452311 - DNA, 58 bp, Artificial
  Synthetic oligonucleotide
taggacgcaagtttctgtttcaagcaggcctgcgacgggcttccagagtatccaggac

SEQ ID NO: 452312 - DNA, 58 bp, Artificial
  Synthetic oligonucleotide
taggacgccaggacatgtcttcggaaatgatgaattaatgacgaaactattaaatgtt

SEQ ID NO: 452313 - DNA, 54 bp, Artificial
  Synthetic oligonucleotide
taggacgcttgctcccaaacgatttagttctttataggggtgtaacgcgttgtc

SEQ ID NO: 452314 - DNA, 60 bp, Artificial
  Synthetic oligonucleotide
taggacggactgtcgcatcataagagatgccgcgagaaccctgtcctgcggacagtgcgt

SEQ ID NO: 452315 - DNA, 57 bp, Artificial
  Synthetic oligonucleotide
taggacgtaaatttctagctcagcgctttacagctcgtcctcgaacgaccctaaaga

SEQ ID NO: 452316 - DNA, 51 bp, Artificial
  Synthetic oligonucleotide
taggacgtgttggacgacacaaatcaggaaccgcactcagaattggccata

SEQ ID NO: 452317 - DNA, 55 bp, Artificial
  Synthetic oligonucleotide
taggacgttcataaggaggtgtattacgtacctgaaacagaagggtagattactc

SEQ ID NO: 452318 - DNA, 55 bp, Artificial
  Synthetic oligonucleotide
taggacgttgttatccagtggttacgaactagaatatcagaagactttaaatagt

SEQ ID NO: 452319 - DNA, 58 bp, Artificial
  Synthetic oligonucleotide
taggactaagtcctcgagctctgtgtgtaaagggacttagattccaacaggaattgct

SEQ ID NO: 452320 - DNA, 60 bp, Artificial
  Synthetic oligonucleotide
taggactagctatagagctagtagtgtattgctataggaaaggtcactagaggctatgta

SEQ ID NO: 452321 - DNA, 56 bp, Artificial
  Synthetic oligonucleotide
taggactatgaagagctgcttgtgtcaatttatcacgggctaatacccataccgca

SEQ ID NO: 452322 - DNA, 54 bp, Artificial
  Synthetic oligonucleotide
taggactgggagcattcgggccagggttcactcccccacacggaggtcttttgg

SEQ ID NO: 452323 - DNA, 54 bp, Artificial
  Synthetic oligonucleotide
taggactgtcctggttgtaggagagaaactaaacataaccgggaaaaatgttga

SEQ ID NO: 452324 - DNA, 54 bp, Artificial
  Synthetic oligonucleotide
taggagaaatctataaaagatggataatcctggggttaaacaaaatagtaagaa

SEQ ID NO: 452325 - DNA, 55 bp, Artificial
  Synthetic oligonucleotide
taggagaagcggatggtgttaaaatttcgaatttgaggaatgataacacgtaccg

SEQ ID NO: 452326 - DNA, 60 bp, Artificial
  Synthetic oligonucleotide
taggagacatctataaaagatggataatcatgggactaaataaaatagtaaggatgtata

SEQ ID NO: 452327 - DNA, 60 bp, Artificial
  Synthetic oligonucleotide
taggagaccatttggcactccacaggattttggccaggtgtttaacatgtatgataatga

SEQ ID NO: 452328 - DNA, 55 bp, Artificial
  Synthetic oligonucleotide
taggagacttaggctgaaagaaatgacaacacaaactgaagggatgaactttgac

SEQ ID NO: 452329 - DNA, 52 bp, Artificial
  Synthetic oligonucleotide
taggagagcaggatataatgaaattgatagaacggttaacacagaaggtgcg

SEQ ID NO: 452330 - DNA, 59 bp, Artificial
  Synthetic oligonucleotide
taggagatgtcagtgggatcttggcccaaggaaagaaaatgattaggccacaacccatg

SEQ ID NO: 452331 - DNA, 60 bp, Artificial
  Synthetic oligonucleotide
taggagcactgttcctcgggtttctaggagcagcaggaagcactatgggcgcagcatcag

SEQ ID NO: 452332 - DNA, 56 bp, Artificial
  Synthetic oligonucleotide
taggagcagaaactttttatgtagatggggcatttaatagggagactaggctagga

SEQ ID NO: 452333 - DNA, 58 bp, Artificial
  Synthetic oligonucleotide
taggagcatccgcattcaaggtccactcgtttcctcctgaggggtctcttcgcttccc

SEQ ID NO: 452334 - DNA, 60 bp, Artificial
  Synthetic oligonucleotide
taggagccattgacttggtcaatcggtactcagatgcttctctccagtttatcggtactc

SEQ ID NO: 452335 - DNA, 60 bp, Artificial
  Synthetic oligonucleotide
taggagcccgttcagagccctcataagctgggagatgggtcaagcacccagcccatataa

SEQ ID NO: 452336 - DNA, 60 bp, Artificial
  Synthetic oligonucleotide
taggagcgacgatatcaaataacttacgccacggatttgttgacaatcaacaagacgcat

SEQ ID NO: 452337 - DNA, 56 bp, Artificial
  Synthetic oligonucleotide
taggagcgcgggggggaccactggagccgtgggatgctcctcccgattccgtccaa

SEQ ID NO: 452338 - DNA, 60 bp, Artificial
  Synthetic oligonucleotide
taggagcgctacccatactggcaatcactatggacgagggggtctggagaaagaacattg

SEQ ID NO: 452339 - DNA, 60 bp, Artificial
  Synthetic oligonucleotide
taggagctgatcaggttacagtgctaacgtcaggtgcgggtgacgatcgtaattcgaaag

SEQ ID NO: 452340 - DNA, 60 bp, Artificial
  Synthetic oligonucleotide
taggagctgtattccttgggttcttgagcgcagcaggaagcactatgggcgcggcgtcac

SEQ ID NO: 452341 - DNA, 55 bp, Artificial
  Synthetic oligonucleotide
taggaggacacgtggcgttccgtggctacttcgctctggacggggtggagtttgc

SEQ ID NO: 452342 - DNA, 55 bp, Artificial
  Synthetic oligonucleotide
taggaggcattaaccataagtggattgatttacatatgcaccatgtcgctcgttg

SEQ ID NO: 452343 - DNA, 50 bp, Artificial
  Synthetic oligonucleotide
taggaggcttggtaggtttaagaatagtttgtgctgtactttctatagtg

SEQ ID NO: 452344 - DNA, 58 bp, Artificial
  Synthetic oligonucleotide
taggagggaaatatgacgcgtctccaaccaatactgtgcgatcctttatgaggtattt

SEQ ID NO: 452345 - DNA, 55 bp, Artificial
  Synthetic oligonucleotide
taggagggactatggcgctcttggatagccttcgcaacgcggttcggaggggcct

SEQ ID NO: 452346 - DNA, 58 bp, Artificial
  Synthetic oligonucleotide
taggaggggcaaagtgcatgttccattccctttgactaacgtcacctgccgagtgccg

SEQ ID NO: 452347 - DNA, 55 bp, Artificial
  Synthetic oligonucleotide
taggaggggcagtaatatcctatgtgaattccaccagccacttttggttatcccc

SEQ ID NO: 452348 - DNA, 57 bp, Artificial
  Synthetic oligonucleotide
taggagggttcttatcgttgaagcacgcaacaaggccgttgaaagttggcaagccac

SEQ ID NO: 452349 - DNA, 54 bp, Artificial
  Synthetic oligonucleotide
taggagtaaccctatccctaatacacaagcaccaccaagtcaggggaatcccgg

SEQ ID NO: 452350 - DNA, 59 bp, Artificial
  Synthetic oligonucleotide
taggagtaagaccatagcgataggagaggatgctaggaggtaggggcgaccgaagcgag

SEQ ID NO: 452351 - DNA, 56 bp, Artificial
  Synthetic oligonucleotide
taggagtcagaacgggttcaaccgcagagtgccgagacagtcacagacaggccaac

SEQ ID NO: 452352 - DNA, 60 bp, Artificial
  Synthetic oligonucleotide
taggagtggatatactgtacatgtgcaatgtaatgctagtaaattccaccagggcacttt

SEQ ID NO: 452353 - DNA, 52 bp, Artificial
  Synthetic oligonucleotide
taggagtgggcacatactctgtagtaggcgttgcaacaggcaacttgagtgc

SEQ ID NO: 452354 - DNA, 60 bp, Artificial
  Synthetic oligonucleotide
taggagtggtttctccatctgttgcaggcagtgtcactaaacgtccgcatactacctttg

SEQ ID NO: 452355 - DNA, 56 bp, Artificial
  Synthetic oligonucleotide
taggagtgttaagttttttcaattgggaaagtgcttcttctttcgataatgagcat

SEQ ID NO: 452356 - DNA, 55 bp, Artificial
  Synthetic oligonucleotide
taggagttatgctgccggattcaaacgctgccctcccgagcaccgcgcgtgtcca

SEQ ID NO: 452357 - DNA, 53 bp, Artificial
  Synthetic oligonucleotide
taggagttcaccctgtgtattcgccctgcggggtggtacactggaaccacggt

SEQ ID NO: 452358 - DNA, 56 bp, Artificial
  Synthetic oligonucleotide
taggataaggtcgtctaccggtgcggcgcgtatgagtatcctcgaattttatttcc

SEQ ID NO: 452359 - DNA, 55 bp, Artificial
  Synthetic oligonucleotide
taggataataaacgggcgccaactagtccccaaccgtgacaggattctcgcggcc

SEQ ID NO: 452360 - DNA, 60 bp, Artificial
  Synthetic oligonucleotide
taggataatattcatattaccgtatgaatattttatagcgcagcatgctgtggtcgagaa

SEQ ID NO: 452361 - DNA, 60 bp, Artificial
  Synthetic oligonucleotide
taggatacgtgatgcgtggattggggacgcatacaatccaaggcatattcgttcgttaga

SEQ ID NO: 452362 - DNA, 60 bp, Artificial
  Synthetic oligonucleotide
taggatacgtgatgcgtggattggtgatgcgtacaatccgaggcatattcgctcgctgga

SEQ ID NO: 452363 - DNA, 60 bp, Artificial
  Synthetic oligonucleotide
taggatacttggctgcgtaaactagaccaagatcagtgagagattgcacaacatcattta

SEQ ID NO: 452364 - DNA, 55 bp, Artificial
  Synthetic oligonucleotide
taggatagagtcataacaacaagtaccctccaagccctacaggttggaagagggg

SEQ ID NO: 452365 - DNA, 55 bp, Artificial
  Synthetic oligonucleotide
taggataggttggattggtccgattctctgtaacggacggaggaaaacgtcagct

SEQ ID NO: 452366 - DNA, 57 bp, Artificial
  Synthetic oligonucleotide
taggatatcagaataacttcttgggaccgtggggaggaaatagatacaggtccatct

SEQ ID NO: 452367 - DNA, 60 bp, Artificial
  Synthetic oligonucleotide
taggatatttttgctcacaggatattatgaggcggaaccttacggctgcacgtcaaaata

SEQ ID NO: 452368 - DNA, 58 bp, Artificial
  Synthetic oligonucleotide
taggatcaattccccccataaggtcttttagtagcattgtctgactatagcttaagcc

SEQ ID NO: 452369 - DNA, 60 bp, Artificial
  Synthetic oligonucleotide
taggatcacaagaaggagcaatgcacactgcgttgaccggagcgacagaaatccaaacgt

SEQ ID NO: 452370 - DNA, 60 bp, Artificial
  Synthetic oligonucleotide
taggatcacaaggaccaggtaaatccgatggacatttgaatgatggtaattacgcacaga

SEQ ID NO: 452371 - DNA, 57 bp, Artificial
  Synthetic oligonucleotide
taggatccacagccatggtaacctaagcgttagcccgtcgttgaaggatcgttatta

SEQ ID NO: 452372 - DNA, 60 bp, Artificial
  Synthetic oligonucleotide
taggatccagaacctatcaaattgaagacgacggttcaaagtcagctatatctcgactaa

SEQ ID NO: 452373 - DNA, 54 bp, Artificial
  Synthetic oligonucleotide
taggatccgcttccttgacgggcatttcgtaatacagagattcgaactttataa

SEQ ID NO: 452374 - DNA, 60 bp, Artificial
  Synthetic oligonucleotide
taggatctgatttagaaataatgcaacatagggcaaagatagaggaattaagagaacacc

SEQ ID NO: 452375 - DNA, 60 bp, Artificial
  Synthetic oligonucleotide
taggatgagatctgcacatactaatgatgtaaaacagttaactgaggtagtacaaaaagt

SEQ ID NO: 452376 - DNA, 51 bp, Artificial
  Synthetic oligonucleotide
taggatgagctcgggaggggtgacaggatctagcggcaaggcatacacgta

SEQ ID NO: 452377 - DNA, 60 bp, Artificial
  Synthetic oligonucleotide
taggatgcaagcaaagcaacacatgaaagtgtgtagattggatggtgaatgggtaacatt

SEQ ID NO: 452378 - DNA, 57 bp, Artificial
  Synthetic oligonucleotide
taggatggactagacaggaagccacacggttcctccttagacaatcctccttttcta

SEQ ID NO: 452379 - DNA, 60 bp, Artificial
  Synthetic oligonucleotide
taggatggatgacacataatccacctatcccagtaggagaaatctataaaagatggataa

SEQ ID NO: 452380 - DNA, 55 bp, Artificial
  Synthetic oligonucleotide
taggatgggatagagaaatagtacctgtatatgtcaatgatactagcctgttagg

SEQ ID NO: 452381 - DNA, 60 bp, Artificial
  Synthetic oligonucleotide
taggatgtcaatactacaagaagtggtggccgatgatcctacactacattggccagacca

SEQ ID NO: 452382 - DNA, 55 bp, Artificial
  Synthetic oligonucleotide
taggatgtgtcagggatatagggtgttgtccccttctgcttatgttgaacaggat

SEQ ID NO: 452383 - DNA, 52 bp, Artificial
  Synthetic oligonucleotide
taggattccaacaacagagaggccctggaaatggtgtagttagaatctggga

SEQ ID NO: 452384 - DNA, 60 bp, Artificial
  Synthetic oligonucleotide
taggattctggttcagcccggtattgcctccgagttagtcatccctagtgagcgccttca

SEQ ID NO: 452385 - DNA, 56 bp, Artificial
  Synthetic oligonucleotide
taggattgactggcatctgtgcctacccggcgttctgaccgtcgcagcgtattccg

SEQ ID NO: 452386 - DNA, 60 bp, Artificial
  Synthetic oligonucleotide
taggattggaatggagacaaggaaaatatgtcacacaactagaccctgcaacagctgacc

SEQ ID NO: 452387 - DNA, 60 bp, Artificial
  Synthetic oligonucleotide
taggattggaccaaatgacatgactttcaggagattggatagcttgataagagtcaagct

SEQ ID NO: 452388 - DNA, 60 bp, Artificial
  Synthetic oligonucleotide
taggattgtggtacacacgagatgggcatccaatgttgactttgatcgagactcatctgt

SEQ ID NO: 452389 - DNA, 60 bp, Artificial
  Synthetic oligonucleotide
taggatttgcactacctatcatcttaaaggccttgtacatgttgtcaactcgagggaggc

SEQ ID NO: 452390 - DNA, 58 bp, Artificial
  Synthetic oligonucleotide
taggatttttgaaccaaggcagttgccgatatacagagcgaatggcgaaaaagaatta

SEQ ID NO: 452391 - DNA, 55 bp, Artificial
  Synthetic oligonucleotide
taggcaaacaccacggaggagggactttatgtcctccccgtgtgttgtttgctgg

SEQ ID NO: 452392 - DNA, 55 bp, Artificial
  Synthetic oligonucleotide
taggcaaatcataccagaacgtacaaatcggtgtactagatcggacaccagaggg

SEQ ID NO: 452393 - DNA, 56 bp, Artificial
  Synthetic oligonucleotide
taggcaacgagtgttacccattgcagggttacagaaggactcctacggcacttcgg

SEQ ID NO: 452394 - DNA, 60 bp, Artificial
  Synthetic oligonucleotide
taggcaacgcttcgaccccgagatatagagcggacatgatcgatatttacgcgcacgttg

SEQ ID NO: 452395 - DNA, 60 bp, Artificial
  Synthetic oligonucleotide
taggcaaggtatggatggacgagaatatcaagctcaagaaccacacgaacagttgcatgt

SEQ ID NO: 452396 - DNA, 60 bp, Artificial
  Synthetic oligonucleotide
taggcacacatctgtccaggcacatgcacattgttgcaattgctccagactagttcctga

SEQ ID NO: 452397 - DNA, 60 bp, Artificial
  Synthetic oligonucleotide
taggcacaggggttagtgcggctatggagataatgtcacaaaatccggtatcagtgggca

SEQ ID NO: 452398 - DNA, 57 bp, Artificial
  Synthetic oligonucleotide
taggcacaggtttgtgcccaacagagcgcagttgtcgccacgtcataacagcatcat

SEQ ID NO: 452399 - DNA, 60 bp, Artificial
  Synthetic oligonucleotide
taggcacctcaacattaaataagaggtcaatccctgaaatagcaacaaggccaacagtca

SEQ ID NO: 452400 - DNA, 50 bp, Artificial
  Synthetic oligonucleotide
taggcactaatatagaaaattccgtttcaggacatgtttataatgctttg

SEQ ID NO: 452401 - DNA, 55 bp, Artificial
  Synthetic oligonucleotide
taggcactgtatttaacacatttaaaacccaagaacacgtagtagaccccagatg

SEQ ID NO: 452402 - DNA, 60 bp, Artificial
  Synthetic oligonucleotide
taggcacttacagatcggtcctagcatgcgagttactgcgggttgcagaggttgggcctc

SEQ ID NO: 452403 - DNA, 55 bp, Artificial
  Synthetic oligonucleotide
taggcacttgctgtctgtattcaatgacacaatggtcgattttcatacagctgcg

SEQ ID NO: 452404 - DNA, 60 bp, Artificial
  Synthetic oligonucleotide
taggcagaagatcaatgacctggtgaaaagatatgaaagctggatgaacacaggattcag

SEQ ID NO: 452405 - DNA, 60 bp, Artificial
  Synthetic oligonucleotide
taggcagactaaggggtgagctctattcgccatcgtgtagcattccgcagtcagctaccg

SEQ ID NO: 452406 - DNA, 60 bp, Artificial
  Synthetic oligonucleotide
taggcagagtatctcgatcaacactctcattgagtttgaatgtcagtgacattggttctt

SEQ ID NO: 452407 - DNA, 54 bp, Artificial
  Synthetic oligonucleotide
taggcagccacatatgaagcgatgtctttgctggaccgcccatctgaaaccatc

SEQ ID NO: 452408 - DNA, 50 bp, Artificial
  Synthetic oligonucleotide
taggcagctgctagagaacgcctcgaacggagtctcttacctgtggagat

SEQ ID NO: 452409 - DNA, 59 bp, Artificial
  Synthetic oligonucleotide
taggcaggtctagatctatgatccctgcgaagctggggtgcatcatagcccttggatat

SEQ ID NO: 452410 - DNA, 56 bp, Artificial
  Synthetic oligonucleotide
taggcaggttccgtatttagatcggaatgatgcgtcatcaaaattcccgaggcact

SEQ ID NO: 452411 - DNA, 60 bp, Artificial
  Synthetic oligonucleotide
taggcagtgcaagtattgagggtggtagatattacgaacatgctccaatagagttaattt

SEQ ID NO: 452412 - DNA, 55 bp, Artificial
  Synthetic oligonucleotide
taggcagtggtcgataccattattgctgtatacagaccgagtgaaggtgattcca

SEQ ID NO: 452413 - DNA, 55 bp, Artificial
  Synthetic oligonucleotide
taggcataagaatagtaggggctatcatatcatttgtagcaaaggttaggcaggg

SEQ ID NO: 452414 - DNA, 59 bp, Artificial
  Synthetic oligonucleotide
taggcatattcagagccgcggtgtgtacccgtggagtggctaaagcggtggactttatc

SEQ ID NO: 452415 - DNA, 60 bp, Artificial
  Synthetic oligonucleotide
taggcatcaagacagtctggcccaccagggagtacaccgatttcagggagtacttcatgg

SEQ ID NO: 452416 - DNA, 60 bp, Artificial
  Synthetic oligonucleotide
taggcatcgcttgtgtatccgcaacaatcgtacttacggatgtagtcgtaggcagctgtt

SEQ ID NO: 452417 - DNA, 59 bp, Artificial
  Synthetic oligonucleotide
taggcatggcgaaaaattcgactgtgtcgaagttagtcgaaaagactactgactaggca

SEQ ID NO: 452418 - DNA, 57 bp, Artificial
  Synthetic oligonucleotide
taggcatgtcattaaatttaccaatcgccaagatagaaccaataaaagtaacgttga

SEQ ID NO: 452419 - DNA, 60 bp, Artificial
  Synthetic oligonucleotide
taggcatgtttatgggaatgttcaatcttagttctactctactagccttaatagcagcag

SEQ ID NO: 452420 - DNA, 55 bp, Artificial
  Synthetic oligonucleotide
taggcattcctggcggtgtaaacaaaatgaaatacgaaatgggagtgatgataag

SEQ ID NO: 452421 - DNA, 52 bp, Artificial
  Synthetic oligonucleotide
taggccaaggttatgttacaggatcagttgaaacaacaccagttcctttagg

SEQ ID NO: 452422 - DNA, 60 bp, Artificial
  Synthetic oligonucleotide
taggccaagtctttgttactcctgagcttgtcattgtgacacatacagatgagaacaagt

SEQ ID NO: 452423 - DNA, 48 bp, Artificial
  Synthetic oligonucleotide
taggccacgtgaccaggggtccccgccgggggggtataaaagggggcg

SEQ ID NO: 452424 - DNA, 55 bp, Artificial
  Synthetic oligonucleotide
taggccataggcgaattaagcctcaccatatagcaactggtacagttaatcccag

SEQ ID NO: 452425 - DNA, 55 bp, Artificial
  Synthetic oligonucleotide
taggccatcacccctgggccgctcccctggagctctctcgcgcggctcttaaggt

SEQ ID NO: 452426 - DNA, 60 bp, Artificial
  Synthetic oligonucleotide
taggccatcagcgcatgcgtggaacctttgtggctcctctaccgatccatactgcggaac

SEQ ID NO: 452427 - DNA, 60 bp, Artificial
  Synthetic oligonucleotide
taggccatccctccaaatccagacactccagcatgccgggaccaccatgataacggtccc

SEQ ID NO: 452428 - DNA, 55 bp, Artificial
  Synthetic oligonucleotide
taggccatcgtccggctcctgttgccgccgtcttgcctccctgccctgagctcga

SEQ ID NO: 452429 - DNA, 60 bp, Artificial
  Synthetic oligonucleotide
taggccatggccccaatcatgtactacatttagagcatgagcaaactgattaactcctgg

SEQ ID NO: 452430 - DNA, 54 bp, Artificial
  Synthetic oligonucleotide
taggcccaaactggttgttccagtctgcacccgtgtggcatacaaaaccgcccg

SEQ ID NO: 452431 - DNA, 58 bp, Artificial
  Synthetic oligonucleotide
taggcccatgtacagaaagcccaggatatatcgaacagtgagagggcccgatgttccg

SEQ ID NO: 452432 - DNA, 60 bp, Artificial
  Synthetic oligonucleotide
taggccccaagccagtaggccgattagtgactttcacgcacttgcacctcttgtcgacag

SEQ ID NO: 452433 - DNA, 60 bp, Artificial
  Synthetic oligonucleotide
taggcccgctttgtaaagctgacaagctatatatcacagcagcagacatttgtggctttc

SEQ ID NO: 452434 - DNA, 55 bp, Artificial
  Synthetic oligonucleotide
taggcccgtgcacaatatcgcgcaccatggactttggacctagtcgctgggacag

SEQ ID NO: 452435 - DNA, 60 bp, Artificial
  Synthetic oligonucleotide
taggccctcgcaaacgttctgctccatctgccactacgtcttctaaacctgccaagcgtg

SEQ ID NO: 452436 - DNA, 55 bp, Artificial
  Synthetic oligonucleotide
taggccctcgcgggcctccgtaggcgcgtactagtgacgtcacggcagccatttt

SEQ ID NO: 452437 - DNA, 56 bp, Artificial
  Synthetic oligonucleotide
taggccctgcatccacttttggtactcttaccgttgactatgacgggaccaaacaa

SEQ ID NO: 452438 - DNA, 60 bp, Artificial
  Synthetic oligonucleotide
taggccgagctgttgtgcgtcagcgtcaacgacgtcgcactcaagtgtagacaggtcact

SEQ ID NO: 452439 - DNA, 59 bp, Artificial
  Synthetic oligonucleotide
taggccgcaaagtgtcactgagcctcagcgggggaccgcggctggtcgctttctatccg

SEQ ID NO: 452440 - DNA, 60 bp, Artificial
  Synthetic oligonucleotide
taggccgggtaatcgcagcctatttgttatgccgacgagtccagattggaacatggatgt

SEQ ID NO: 452441 - DNA, 60 bp, Artificial
  Synthetic oligonucleotide
taggccgtccatggtagtcccagtgacaggaagccactcactcaagacgaccaaagcctg

SEQ ID NO: 452442 - DNA, 60 bp, Artificial
  Synthetic oligonucleotide
taggccgtttgtttgcattcggttcgagacacaagggtaaacatccagcttcatgtgctg

SEQ ID NO: 452443 - DNA, 51 bp, Artificial
  Synthetic oligonucleotide
taggcctaaaacccccaggaagcgggtctatggttggctgcgctgctgcta

SEQ ID NO: 452444 - DNA, 57 bp, Artificial
  Synthetic oligonucleotide
taggcctactttattggttcgctagcttagacagaaatcaagtccgagataatttaa

SEQ ID NO: 452445 - DNA, 60 bp, Artificial
  Synthetic oligonucleotide
taggcctcaagtccttcctgatagcggaggaccactcattgatctactcacggaggaccc

SEQ ID NO: 452446 - DNA, 56 bp, Artificial
  Synthetic oligonucleotide
taggcctccatgggcatagatagatcgggcagctttgactgttcggcgcgaacatg

SEQ ID NO: 452447 - DNA, 60 bp, Artificial
  Synthetic oligonucleotide
taggcctgatttgctagagaggataatagagcatgaaccattcgtgctagtgttagccat

SEQ ID NO: 452448 - DNA, 55 bp, Artificial
  Synthetic oligonucleotide
taggcctgtccgtcacaccccaagagtgcgaacgggcaacccttgaacctcaagg

SEQ ID NO: 452449 - DNA, 54 bp, Artificial
  Synthetic oligonucleotide
taggccttccggactacaaaaatcgccattttggtgacgtcacggccgccacct

SEQ ID NO: 452450 - DNA, 60 bp, Artificial
  Synthetic oligonucleotide
taggccttgacatctgagcttgatttagctccctgaatgttcggatggaaatgtgctgac

SEQ ID NO: 452451 - DNA, 60 bp, Artificial
  Synthetic oligonucleotide
taggccttgcaaatctaagggctctcctcctactgcaaacatgtgataattgactccctc

SEQ ID NO: 452452 - DNA, 55 bp, Artificial
  Synthetic oligonucleotide
taggcctttctgatctgagaaatcaaaccgggggctcttcagttgtaataaaccc

SEQ ID NO: 452453 - DNA, 56 bp, Artificial
  Synthetic oligonucleotide
taggcgaaggcagggaagggagctcggcaaactctctaccgatacaccgcgccttc

SEQ ID NO: 452454 - DNA, 58 bp, Artificial
  Synthetic oligonucleotide
taggcgaaggtgaagcaccccctgaccttaaaaggatggatgtcacgactcagcagtt

SEQ ID NO: 452455 - DNA, 60 bp, Artificial
  Synthetic oligonucleotide
taggcgactagctgagtactcaaagtatgacagttttgtggcccagtcgtaaggcagtga

SEQ ID NO: 452456 - DNA, 56 bp, Artificial
  Synthetic oligonucleotide
taggcgatattaagaagggtgccctgtatttagtaacctgtactcgtggaggtata

SEQ ID NO: 452457 - DNA, 50 bp, Artificial
  Synthetic oligonucleotide
taggcgattgcattaagactcactaacggaaagagacaacacttagagga

SEQ ID NO: 452458 - DNA, 55 bp, Artificial
  Synthetic oligonucleotide
taggcgccagcccataccaaaggcgcgcccgccaacgggccgtagctggggtcaa

SEQ ID NO: 452459 - DNA, 59 bp, Artificial
  Synthetic oligonucleotide
taggcgcctgacatcatccagatttacagaggtggatggccgtgttagggttagccgtt

SEQ ID NO: 452460 - DNA, 58 bp, Artificial
  Synthetic oligonucleotide
taggcgcgaaccagtctttgtgaaacctcgaaatgttttctcggatggcgattcagtc

SEQ ID NO: 452461 - DNA, 60 bp, Artificial
  Synthetic oligonucleotide
taggcgcgagatgattcttaggagtgctgaagggcgtgttggagaacagccaactagtgc

SEQ ID NO: 452462 - DNA, 60 bp, Artificial
  Synthetic oligonucleotide
taggcgcgcgggagagtgcagtcatgttagtttcgaacagcattaaagatgtggcgcgag

SEQ ID NO: 452463 - DNA, 60 bp, Artificial
  Synthetic oligonucleotide
taggcgcgttatgaaacgagtagaccctaccatgcacgagagtccccaagacgagatcaa

SEQ ID NO: 452464 - DNA, 60 bp, Artificial
  Synthetic oligonucleotide
taggcggcgtgaacatatcattggcacaggattaataattaggctaattggcaatagacc

SEQ ID NO: 452465 - DNA, 60 bp, Artificial
  Synthetic oligonucleotide
taggcggggtgttgacacgacaggtaggcgtctgtactatgcgccctgtctccacgcaac

SEQ ID NO: 452466 - DNA, 51 bp, Artificial
  Synthetic oligonucleotide
taggcggtttaggttataaatggtctgaagtttcattcaaagcagcaaatt

SEQ ID NO: 452467 - DNA, 55 bp, Artificial
  Synthetic oligonucleotide
taggcgtaaaaatacctaaggccaatttcctatgagcaaatacctgaaatcttta

SEQ ID NO: 452468 - DNA, 52 bp, Artificial
  Synthetic oligonucleotide
taggcgtagaccaagagttgcttacgttgattgaagccgcattcggagaaat

SEQ ID NO: 452469 - DNA, 55 bp, Artificial
  Synthetic oligonucleotide
taggcgtcacagccagttagtcacatccagctagtcacagccagctagtcacagc

SEQ ID NO: 452470 - DNA, 59 bp, Artificial
  Synthetic oligonucleotide
taggcgtccgggacaaaatgcgccatactgaacgtttattgagcatgcggaaagctgtt

SEQ ID NO: 452471 - DNA, 53 bp, Artificial
  Synthetic oligonucleotide
taggcgtccttttcgtggggaaaccgtatttgtatgccgccgggttctgagcc

SEQ ID NO: 452472 - DNA, 53 bp, Artificial
  Synthetic oligonucleotide
taggcgtgaaagtctatagccccagagctgggcgtatgggttatcctgcggct

SEQ ID NO: 452473 - DNA, 60 bp, Artificial
  Synthetic oligonucleotide
taggcgtggtcatgactcgtcaccctctgcctcctcttcgatagacccgaagatctcgta

SEQ ID NO: 452474 - DNA, 55 bp, Artificial
  Synthetic oligonucleotide
taggcgtgtatatgggagatctgttatacatgctgtacacccgcatgccaattac

SEQ ID NO: 452475 - DNA, 51 bp, Artificial
  Synthetic oligonucleotide
taggcgtgtctagaatggaggtcgatgagttgatgcctagtatcaacccag

SEQ ID NO: 452476 - DNA, 60 bp, Artificial
  Synthetic oligonucleotide
taggctaatgacctttgtactaggaggctgtaggcataaattggtctgcgcaccatcctc

SEQ ID NO: 452477 - DNA, 58 bp, Artificial
  Synthetic oligonucleotide
taggctacgggtgaaacctcttaagctaatacttctatgaagagatgctttggatagg

SEQ ID NO: 452478 - DNA, 54 bp, Artificial
  Synthetic oligonucleotide
taggctactgagcacaattgcaacttcctatgagtatgttaggacttatgggcc

SEQ ID NO: 452479 - DNA, 60 bp, Artificial
  Synthetic oligonucleotide
taggctagagccacacaaatgggagaaatattgtgtccttgaaataggggacatgctcct

SEQ ID NO: 452480 - DNA, 60 bp, Artificial
  Synthetic oligonucleotide
taggctcagtgctgcttgcaattggactcgaggagagcgttgtgacttgggagacaggga

SEQ ID NO: 452481 - DNA, 59 bp, Artificial
  Synthetic oligonucleotide
taggctccacttcaatggcacgtacaccgagtctgaactcaaccctggcctatttaata

SEQ ID NO: 452482 - DNA, 52 bp, Artificial
  Synthetic oligonucleotide
taggctccgcctacccgaccccaacaattttgcatttggtgacaaatctttg

SEQ ID NO: 452483 - DNA, 57 bp, Artificial
  Synthetic oligonucleotide
taggctcctaggggagtgacctaggatgagaggggaacctctataaatattccgagc

SEQ ID NO: 452484 - DNA, 60 bp, Artificial
  Synthetic oligonucleotide
taggctctgtaaccccgggtggggaagtcaagtgagagaggctgatctctaattgagcat

SEQ ID NO: 452485 - DNA, 56 bp, Artificial
  Synthetic oligonucleotide
taggctgactggttcctcttcgcgaaccaatgatttaccgccagggaccggtacta

SEQ ID NO: 452486 - DNA, 55 bp, Artificial
  Synthetic oligonucleotide
taggctgagtactttgataagtcagattgaaggatggcaagcaacacgagctagc

SEQ ID NO: 452487 - DNA, 60 bp, Artificial
  Synthetic oligonucleotide
taggctgcatgcgaaaaaagcggatactgcttcgtatcatgttgagtccattgaaatcga

SEQ ID NO: 452488 - DNA, 51 bp, Artificial
  Synthetic oligonucleotide
taggctgccggccgctaacctggtagatacttttgtcaatgtgggtgctcg

SEQ ID NO: 452489 - DNA, 60 bp, Artificial
  Synthetic oligonucleotide
taggctgcgcagctgaatcgataactgaaattactaagtgtaaacgatatgaaaccacta

SEQ ID NO: 452490 - DNA, 60 bp, Artificial
  Synthetic oligonucleotide
taggctgcgccggtacgttgatgagcacgcgatctcgtccgtcgctgaagtgctcggtaa

SEQ ID NO: 452491 - DNA, 51 bp, Artificial
  Synthetic oligonucleotide
taggctgcggtaacccccttggtagttcagggttagcggcgacaggaacta

SEQ ID NO: 452492 - DNA, 60 bp, Artificial
  Synthetic oligonucleotide
taggctgctcactacgtgcccgatatgggggctaatcgcggcttagggccgctgtcggct

SEQ ID NO: 452493 - DNA, 53 bp, Artificial
  Synthetic oligonucleotide
taggctgctttacggtcttgcaccgcccatgcagggaagccagtgttgtactt

SEQ ID NO: 452494 - DNA, 54 bp, Artificial
  Synthetic oligonucleotide
taggctgtaaggccctagaggaagagacttacggattgtagttgcagctcgtca

SEQ ID NO: 452495 - DNA, 55 bp, Artificial
  Synthetic oligonucleotide
taggctgtccaataactctggtttatccccaactcttagtgtgtacatctcgtta

SEQ ID NO: 452496 - DNA, 52 bp, Artificial
  Synthetic oligonucleotide
taggcttcgtagttaaccaaggagtggaccaagtgttcgaagtcccaaaact

SEQ ID NO: 452497 - DNA, 59 bp, Artificial
  Synthetic oligonucleotide
taggcttggttgttcaattgatgggtgatgcattaacttacaacgtttttgctcagtac

SEQ ID NO: 452498 - DNA, 51 bp, Artificial
  Synthetic oligonucleotide
taggctttatagcccaggtccattatccagggcttgtcaagaggggtcggt

SEQ ID NO: 452499 - DNA, 57 bp, Artificial
  Synthetic oligonucleotide
taggctttccgcaggtggggatattcgggtgaacagagaaccttatgtgtcgtgcgg

SEQ ID NO: 452500 - DNA, 50 bp, Artificial
  Synthetic oligonucleotide
taggctttcctgtcagacctcaggtgcccttaagaccaatgacttataaa

SEQ ID NO: 452501 - DNA, 60 bp, Artificial
  Synthetic oligonucleotide
taggctttgaatcagctgacttaatcagaaagatatcaaccacacaccacatattcaaag

SEQ ID NO: 452502 - DNA, 60 bp, Artificial
  Synthetic oligonucleotide
taggctttgtaccttcgcctgacaatcccatccatgacacttatagatatttaacatcgc

SEQ ID NO: 452503 - DNA, 57 bp, Artificial
  Synthetic oligonucleotide
tagggaaagaagcagtgtacctttcctgggtgcccgcacataagggcatcggaggaa

SEQ ID NO: 452504 - DNA, 53 bp, Artificial
  Synthetic oligonucleotide
tagggaaaggggctaacgatagcatatacgtaattactgagatcaataacaag

SEQ ID NO: 452505 - DNA, 55 bp, Artificial
  Synthetic oligonucleotide
tagggaacaaccagctcagctcattgattggtagcggcttgatcaccggtaaccc

SEQ ID NO: 452506 - DNA, 55 bp, Artificial
  Synthetic oligonucleotide
tagggaacacagtgcttcggcacgcttagttagttagaaccctctgcccactcct

SEQ ID NO: 452507 - DNA, 59 bp, Artificial
  Synthetic oligonucleotide
tagggaacattgctctccgcatcatacaactattagacaagctttagtatgctgggatg

SEQ ID NO: 452508 - DNA, 57 bp, Artificial
  Synthetic oligonucleotide
tagggaaccacaaccctcatgccccagttcaacagtcttgggaagtgcttaatgaaa

SEQ ID NO: 452509 - DNA, 56 bp, Artificial
  Synthetic oligonucleotide
tagggaacctaattacccacacggacaatgaggtggtggtgtacttcctactgctc

SEQ ID NO: 452510 - DNA, 50 bp, Artificial
  Synthetic oligonucleotide
tagggaactataaggagatatgtgtagcttggtcgagtagcagttgcttc

SEQ ID NO: 452511 - DNA, 54 bp, Artificial
  Synthetic oligonucleotide
tagggaagaaaaagcagagacttaacaaaaggagctacctaataagggctctaa

SEQ ID NO: 452512 - DNA, 60 bp, Artificial
  Synthetic oligonucleotide
tagggaatgatccaatgtggacagcttccttacctgataaattgtcactggacgaactct

SEQ ID NO: 452513 - DNA, 60 bp, Artificial
  Synthetic oligonucleotide
tagggacaaccctccgagcgcagccatagccagcctgttcacttcgtccctctcgctatg

SEQ ID NO: 452514 - DNA, 57 bp, Artificial
  Synthetic oligonucleotide
tagggacactctcgttctccaccagtggtataaagtccgcagggtcacggacccaca

SEQ ID NO: 452515 - DNA, 57 bp, Artificial
  Synthetic oligonucleotide
tagggagaacaaaaagcttggaatccaggagcgggtttgaaatggtctgggatgcaa

SEQ ID NO: 452516 - DNA, 56 bp, Artificial
  Synthetic oligonucleotide
tagggaggacaaaaagcttggagtccagaagtgggtttgagatggtttgggacgca

SEQ ID NO: 452517 - DNA, 56 bp, Artificial
  Synthetic oligonucleotide
tagggaggagtaaatggcgccgttatacggcgccgtaatctccggaggatcatacc

SEQ ID NO: 452518 - DNA, 58 bp, Artificial
  Synthetic oligonucleotide
tagggaggccgccaatggccgttatggacttcaccgaacccaacgtctgcattgcgga

SEQ ID NO: 452519 - DNA, 55 bp, Artificial
  Synthetic oligonucleotide
tagggaggtcctgtattagaggtcacgtgagtgttttgcgacattttgcgacacc

SEQ ID NO: 452520 - DNA, 51 bp, Artificial
  Synthetic oligonucleotide
tagggataagaagttcaatgggacaggtccatgtagcaatgtcagcacagt

SEQ ID NO: 452521 - DNA, 60 bp, Artificial
  Synthetic oligonucleotide
tagggataagtggtgcggatgacgatgcttatgctgtaatccattatgggggaatcccaa

SEQ ID NO: 452522 - DNA, 60 bp, Artificial
  Synthetic oligonucleotide
tagggatctcgagagagatacatgtaatggagtctatgctaatattagcaagaactccct

SEQ ID NO: 452523 - DNA, 60 bp, Artificial
  Synthetic oligonucleotide
tagggatgaatcctaccttagaagagatgctaactgcctgtcaaggagtaggtggaccag

SEQ ID NO: 452524 - DNA, 57 bp, Artificial
  Synthetic oligonucleotide
tagggatgtagtatttggtggtgcgggttctggtgataagaacgccattacgaagac

SEQ ID NO: 452525 - DNA, 59 bp, Artificial
  Synthetic oligonucleotide
tagggatttaatttgtgtcgttagggctcgtaattatgtcgaagcgaccagcagatata

SEQ ID NO: 452526 - DNA, 60 bp, Artificial
  Synthetic oligonucleotide
tagggatttggggttgctctggaaagctcatttgcaccactactgtgccttggaatgcta

SEQ ID NO: 452527 - DNA, 55 bp, Artificial
  Synthetic oligonucleotide
tagggcaatctgtaggagtgtgttgcgagtataaggaaggacacagacaggtagg

SEQ ID NO: 452528 - DNA, 60 bp, Artificial
  Synthetic oligonucleotide
tagggcaccatctcaacaagcaggtggaatgagtggagctaatattcctcagtatacacc

SEQ ID NO: 452529 - DNA, 55 bp, Artificial
  Synthetic oligonucleotide
tagggcacccacgaattggtactattacaaactccctggtcttaccaatcagcgg

SEQ ID NO: 452530 - DNA, 51 bp, Artificial
  Synthetic oligonucleotide
tagggcaccgcataaggccccgctatggccccgctatggccccgtactgcg

SEQ ID NO: 452531 - DNA, 51 bp, Artificial
  Synthetic oligonucleotide
tagggcagaagacaaccttagggacctcaatgaccacaagtctactattca

SEQ ID NO: 452532 - DNA, 54 bp, Artificial
  Synthetic oligonucleotide
tagggcaggtttggtaggagagatagatctccctcttaagggtaccaccaatcc

SEQ ID NO: 452533 - DNA, 60 bp, Artificial
  Synthetic oligonucleotide
tagggcatctgtcgggagaatggttggaggaatcggaagattctacatacagatgtgcac

SEQ ID NO: 452534 - DNA, 57 bp, Artificial
  Synthetic oligonucleotide
tagggccagtaggaggttccaatatcacaacaaaggggctggtactcagcattttag

SEQ ID NO: 452535 - DNA, 60 bp, Artificial
  Synthetic oligonucleotide
tagggccagtataagtaacctcatgaatgagttagttcgtggcacgggaatgtacaatca

SEQ ID NO: 452536 - DNA, 50 bp, Artificial
  Synthetic oligonucleotide
tagggccatacagagtgcaggtagtatatgagaggacctactgtatgaca

SEQ ID NO: 452537 - DNA, 60 bp, Artificial
  Synthetic oligonucleotide
tagggccatcacacccactcagaacccacctgacactgccacactaccgagtactagagt

SEQ ID NO: 452538 - DNA, 58 bp, Artificial
  Synthetic oligonucleotide
tagggcccgaattgatgcacgaattgacttcgaatctggacggattaagaaggaggac

SEQ ID NO: 452539 - DNA, 55 bp, Artificial
  Synthetic oligonucleotide
tagggccctttttgttagcggtatgttgtatatttattgctggtttgtatttgga

SEQ ID NO: 452540 - DNA, 55 bp, Artificial
  Synthetic oligonucleotide
tagggccgcgaagtctgtcggagtgtcagttaaagctattaccccgcccaaagga

SEQ ID NO: 452541 - DNA, 54 bp, Artificial
  Synthetic oligonucleotide
tagggcctttaattgcacctaaggattgtactgataaagaccataaaacctact

SEQ ID NO: 452542 - DNA, 54 bp, Artificial
  Synthetic oligonucleotide
tagggcgaccgtagctaaacgtcaagtccccttagcgttgctatcgttttctac

SEQ ID NO: 452543 - DNA, 58 bp, Artificial
  Synthetic oligonucleotide
tagggcgctactcgagtcgatacacgagaaagcgggtgttaagcacgtagactatacc

SEQ ID NO: 452544 - DNA, 59 bp, Artificial
  Synthetic oligonucleotide
tagggcgggttggacgattcaaagctggtacagctctccgcattggacatacagagcgc

SEQ ID NO: 452545 - DNA, 55 bp, Artificial
  Synthetic oligonucleotide
tagggcgtactcgtggactagcccggtcgtggtcgtggatcagtacccgacgaag

SEQ ID NO: 452546 - DNA, 50 bp, Artificial
  Synthetic oligonucleotide
tagggctatgaagtatgagcatccacagggtagatcaaccctccgacgtc

SEQ ID NO: 452547 - DNA, 60 bp, Artificial
  Synthetic oligonucleotide
tagggctgattcacgttcagtctctaactgctcaactatactcttatccataaggactga

SEQ ID NO: 452548 - DNA, 54 bp, Artificial
  Synthetic oligonucleotide
tagggctgtaaccacatgctcgtaccgcctttcccggcgttaacgggacataac

SEQ ID NO: 452549 - DNA, 60 bp, Artificial
  Synthetic oligonucleotide
tagggctgtcggaaagtgccccagatatgtgaagcaatcaagcttgccgctggccttagg

SEQ ID NO: 452550 - DNA, 59 bp, Artificial
  Synthetic oligonucleotide
tagggctgtggacttagggaaaaagttatcatctagaattacagcactggatccaactc

SEQ ID NO: 452551 - DNA, 58 bp, Artificial
  Synthetic oligonucleotide
tagggctttggggctgctctggaaaacttatctgcaccactaatgtgccatggaactc

SEQ ID NO: 452552 - DNA, 57 bp, Artificial
  Synthetic oligonucleotide
taggggaaccaaagcactaacagaaatagtaccactaacaaaagaagcagagctaga

SEQ ID NO: 452553 - DNA, 51 bp, Artificial
  Synthetic oligonucleotide
taggggaagacaaaaagttgtttccctaactgagacaacaaaccaaaaggc

SEQ ID NO: 452554 - DNA, 60 bp, Artificial
  Synthetic oligonucleotide
taggggaagatgttgctccgattgaacacattgcaagtatgaggaggaactattttacag

SEQ ID NO: 452555 - DNA, 56 bp, Artificial
  Synthetic oligonucleotide
taggggaagcctactctctcccagacctgtctcctacttgaaaggctcctcgggtg

SEQ ID NO: 452556 - DNA, 59 bp, Artificial
  Synthetic oligonucleotide
taggggaatacagtccaggagaaagaatagtagacattatagcaacagacctcctaaca

SEQ ID NO: 452557 - DNA, 60 bp, Artificial
  Synthetic oligonucleotide
taggggacatgctcctgcgaactgcaataggccaagtgtcaagacccatgttcctatatg

SEQ ID NO: 452558 - DNA, 57 bp, Artificial
  Synthetic oligonucleotide
taggggacattataatttttcattcacgtgtcagaatgcggcgactgatgacgactt

SEQ ID NO: 452559 - DNA, 56 bp, Artificial
  Synthetic oligonucleotide
taggggacgggaagaaacaaatcgccccgcaatataggatccagcgtcttgactcg

SEQ ID NO: 452560 - DNA, 60 bp, Artificial
  Synthetic oligonucleotide
taggggagtgccttctgtatcatggaaaggtactcttgcttgttggtggagtgttctatg

SEQ ID NO: 452561 - DNA, 60 bp, Artificial
  Synthetic oligonucleotide
taggggatatgatcctacgaactgcaataggccacgtatcaagacccatgttcctgtacg

SEQ ID NO: 452562 - DNA, 59 bp, Artificial
  Synthetic oligonucleotide
taggggatatgctcctgcggactgcaataggacaagtatcgagacccatgtttctatat

SEQ ID NO: 452563 - DNA, 55 bp, Artificial
  Synthetic oligonucleotide
taggggatcttctgctctgcacaaccagccacacggcacagtgcgccgacatagg

SEQ ID NO: 452564 - DNA, 55 bp, Artificial
  Synthetic oligonucleotide
taggggatggtcagatattatgcggtttgatgatgtcgttcagtactactggtgg

SEQ ID NO: 452565 - DNA, 50 bp, Artificial
  Synthetic oligonucleotide
taggggcagtatctcaagacttagctaaacatggagcagttactagcagc

SEQ ID NO: 452566 - DNA, 60 bp, Artificial
  Synthetic oligonucleotide
taggggcagtgccaattgatctggcaaaggggacatctggcagccccatcctcaactccc

SEQ ID NO: 452567 - DNA, 59 bp, Artificial
  Synthetic oligonucleotide
taggggccccaaccatgaagacccatctgaaacaatgataccacactcccagaggccca

SEQ ID NO: 452568 - DNA, 53 bp, Artificial
  Synthetic oligonucleotide
taggggcgattactaggttatcaagcaataaggcgctcactcaagcaatgcaa

SEQ ID NO: 452569 - DNA, 55 bp, Artificial
  Synthetic oligonucleotide
taggggctaattctctaattacattaagagcctccgacttacttcctgtgttaat

SEQ ID NO: 452570 - DNA, 56 bp, Artificial
  Synthetic oligonucleotide
taggggctttaattggtggacttttacctgtcacagttgccgaactcatggaacaa

SEQ ID NO: 452571 - DNA, 58 bp, Artificial
  Synthetic oligonucleotide
taggggctttcttctccattctgcaggacatgaggaatacgattatggcatctaagac

SEQ ID NO: 452572 - DNA, 51 bp, Artificial
  Synthetic oligonucleotide
tagggggaaatcgagggaatctcaaccgacctccacaacgtcccccgaaac

SEQ ID NO: 452573 - DNA, 55 bp, Artificial
  Synthetic oligonucleotide
tagggggaccacccgtgtgtcctggccaaaattcgcagtccccaacctccaatca

SEQ ID NO: 452574 - DNA, 45 bp, Artificial
  Synthetic oligonucleotide
tagggggctccgccccctaaaacccccaagggggttacgccccct

SEQ ID NO: 452575 - DNA, 53 bp, Artificial
  Synthetic oligonucleotide
tagggggctgtgtagtgccctaccttcaaaagtggagaggtcccaaagtaatc

SEQ ID NO: 452576 - DNA, 51 bp, Artificial
  Synthetic oligonucleotide
taggggggtggacaccggactaaagtggcgggtaatactgtcccgccactt

SEQ ID NO: 452577 - DNA, 59 bp, Artificial
  Synthetic oligonucleotide
taggggggttcctcaccatggtctcaatgatctctgcaagaagctctacattaccccta

SEQ ID NO: 452578 - DNA, 60 bp, Artificial
  Synthetic oligonucleotide
taggggtaatcgcgaagcgcctcccacgctgccgcgtcagcgctgacgtaaattacgtca

SEQ ID NO: 452579 - DNA, 54 bp, Artificial
  Synthetic oligonucleotide
taggggtaattccccacctcactcgggagagtgccagtgtacgaaccaccgccc

SEQ ID NO: 452580 - DNA, 55 bp, Artificial
  Synthetic oligonucleotide
taggggtatatgtgtgcaattataaaggtcgataggatatatatagcacgtcagc

SEQ ID NO: 452581 - DNA, 60 bp, Artificial
  Synthetic oligonucleotide
taggggtccatcgggttgcgattctgcggatctatttgccatcgatcagcttatctgtag

SEQ ID NO: 452582 - DNA, 58 bp, Artificial
  Synthetic oligonucleotide
taggggtcgagagatactactcgggccagccgatggaatggtctccaaggggtggaga

SEQ ID NO: 452583 - DNA, 60 bp, Artificial
  Synthetic oligonucleotide
taggggtctcagaggaaagccttgcagcagcatcctctattccctaccaggccctgcagt

SEQ ID NO: 452584 - DNA, 53 bp, Artificial
  Synthetic oligonucleotide
taggggtgaggaccatgatacagacaagacaggtcaaggtgtattgaggattg

SEQ ID NO: 452585 - DNA, 59 bp, Artificial
  Synthetic oligonucleotide
taggggtgatctgaatttcgtcaacagggcgaaccaacgattgaatccaatgcaccaac

SEQ ID NO: 452586 - DNA, 54 bp, Artificial
  Synthetic oligonucleotide
taggggttaattttggagtctccaataggtaaatgagtccccaattgaggcacc

SEQ ID NO: 452587 - DNA, 60 bp, Artificial
  Synthetic oligonucleotide
taggggttcacatggcacacgacgatcagtcagttagctccaaaatagtagctcactgcc

SEQ ID NO: 452588 - DNA, 51 bp, Artificial
  Synthetic oligonucleotide
taggggtttaattacagaagtcaacacccatagtatttatgcacataatag

SEQ ID NO: 452589 - DNA, 58 bp, Artificial
  Synthetic oligonucleotide
tagggtacacccagtacatgcagggcctattccaccaggccagatgagggaacctagg

SEQ ID NO: 452590 - DNA, 54 bp, Artificial
  Synthetic oligonucleotide
tagggtagcaagaaaggattcagaagaatcatcatccacgtctgtcccagagat

SEQ ID NO: 452591 - DNA, 58 bp, Artificial
  Synthetic oligonucleotide
tagggtataggttctttagtgattgggatcacaaagtttccactgtaggcctctatca

SEQ ID NO: 452592 - DNA, 59 bp, Artificial
  Synthetic oligonucleotide
tagggtatgagtggggcgcaacaaatcaccgattaggactatgcgaaatagaacacgta

SEQ ID NO: 452593 - DNA, 54 bp, Artificial
  Synthetic oligonucleotide
tagggtcaattccactagcctttgacatccctgacgccttgtttaccagggtgt

SEQ ID NO: 452594 - DNA, 60 bp, Artificial
  Synthetic oligonucleotide
tagggtcaattgcaagagtgacaaagaaacaagctttgaccgcttctttgtatgatctaa

SEQ ID NO: 452595 - DNA, 57 bp, Artificial
  Synthetic oligonucleotide
tagggtcacaggagtggtacaccacagtaccgcgatatgtggcaacccagggttacc

SEQ ID NO: 452596 - DNA, 60 bp, Artificial
  Synthetic oligonucleotide
tagggtcatggccacaaccatgtgcgccccaaggctcattcaggtcgtctgacgacttcg

SEQ ID NO: 452597 - DNA, 50 bp, Artificial
  Synthetic oligonucleotide
tagggtccaagtggttccccgtcatggactcactatctgtcaaccagatc

SEQ ID NO: 452598 - DNA, 60 bp, Artificial
  Synthetic oligonucleotide
tagggtcgaagaggaacttcagcgcgtgcgagatgacagagataagtcagagaaactaca

SEQ ID NO: 452599 - DNA, 53 bp, Artificial
  Synthetic oligonucleotide
tagggtcgcaccgcgaggtaacaaggttagtaggacgaagggagtggttctcc

SEQ ID NO: 452600 - DNA, 58 bp, Artificial
  Synthetic oligonucleotide
tagggtgatcctggatagagaacgcttggtcatcgaaagaccctacatcttgcttgga

SEQ ID NO: 452601 - DNA, 58 bp, Artificial
  Synthetic oligonucleotide
tagggtggagccctcaggcccagggcgtaacaaccatattgccagcagttcctcctcc

SEQ ID NO: 452602 - DNA, 53 bp, Artificial
  Synthetic oligonucleotide
tagggtggttactacgtgtggtatttgtaggtgtttagttaggctggtggtgt

SEQ ID NO: 452603 - DNA, 51 bp, Artificial
  Synthetic oligonucleotide
tagggtgtaacccactctactgtatatctgcggtccgaatccagccatgtc

SEQ ID NO: 452604 - DNA, 53 bp, Artificial
  Synthetic oligonucleotide
tagggtgtaaccgaaaagggttatgaccgaaaacggtgcatataaaagtgcag

SEQ ID NO: 452605 - DNA, 56 bp, Artificial
  Synthetic oligonucleotide
tagggttaaacatcctggttcgctaggtttgtcctcgccttaatctctattgataa

SEQ ID NO: 452606 - DNA, 58 bp, Artificial
  Synthetic oligonucleotide
tagggttaataaggagttctctggtctggtactccctgtacttgacagaccatggcag

SEQ ID NO: 452607 - DNA, 56 bp, Artificial
  Synthetic oligonucleotide
tagggttaccgctgcaagattcactagaccttggaaccaagttccttcggacgcca

SEQ ID NO: 452608 - DNA, 55 bp, Artificial
  Synthetic oligonucleotide
tagggttagagcacaatataagtgattttgttacgtatgcgaaagggtttggggc

SEQ ID NO: 452609 - DNA, 53 bp, Artificial
  Synthetic oligonucleotide
tagggttagatgactctctactcttttcttactccaagatcataggtgaatta

SEQ ID NO: 452610 - DNA, 55 bp, Artificial
  Synthetic oligonucleotide
tagggttattggtaccatcacgtacgttatcaagacgtatacgtaatgaagtacc

SEQ ID NO: 452611 - DNA, 55 bp, Artificial
  Synthetic oligonucleotide
tagggttggagcgtgcctcaggaaacttggggcccctcccttgcgggcctggaga

SEQ ID NO: 452612 - DNA, 59 bp, Artificial
  Synthetic oligonucleotide
tagggttgtgctccgaccagtgtcgtctccgatagcgtgccaggacgagcccctcgatt

SEQ ID NO: 452613 - DNA, 60 bp, Artificial
  Synthetic oligonucleotide
tagggtttaaattactatgcattgacatatagcaggtacaagcgtagataatacttacta

SEQ ID NO: 452614 - DNA, 56 bp, Artificial
  Synthetic oligonucleotide
tagggtttacattaacatgtctggtatcgctaacagaatgtcctacctttttgacc

SEQ ID NO: 452615 - DNA, 58 bp, Artificial
  Synthetic oligonucleotide
taggtaaaaacatacttgttcgtgcaaacaatgagctaggtgatgtatcactaaaggt

SEQ ID NO: 452616 - DNA, 53 bp, Artificial
  Synthetic oligonucleotide
taggtaaaaatgataggaagttcaacgttggggtcgccgcttggaaggacaat

SEQ ID NO: 452617 - DNA, 58 bp, Artificial
  Synthetic oligonucleotide
taggtaaaccttgcccaaaaccccacaggctgaaccacatgggcatctgctcctgtgg

SEQ ID NO: 452618 - DNA, 55 bp, Artificial
  Synthetic oligonucleotide
taggtaaactcgagcctatgaccaagaagacccacataacggtttatggagggtc

SEQ ID NO: 452619 - DNA, 55 bp, Artificial
  Synthetic oligonucleotide
taggtaaatgagacaccgatatatcggtaccccaattggtatcccttatttcact

SEQ ID NO: 452620 - DNA, 55 bp, Artificial
  Synthetic oligonucleotide
taggtaagctgggtttctcccactcggaggacaataagttcgtttgcgataggaa

SEQ ID NO: 452621 - DNA, 55 bp, Artificial
  Synthetic oligonucleotide
taggtaatagctgcatccacactcaagatctactctcttcctcctgtgcgctctc

SEQ ID NO: 452622 - DNA, 55 bp, Artificial
  Synthetic oligonucleotide
taggtaatagctgcatccacactcaaggtccactcgtctcctcctgagcgctctc

SEQ ID NO: 452623 - DNA, 58 bp, Artificial
  Synthetic oligonucleotide
taggtaatgagccgatctttaagactaagctaatccgtgaccaacaaatcggcagaat

SEQ ID NO: 452624 - DNA, 59 bp, Artificial
  Synthetic oligonucleotide
taggtaatgcggagcgacgtcatcaatgacgttatacttgacgtcattcgagaaaaccc

SEQ ID NO: 452625 - DNA, 58 bp, Artificial
  Synthetic oligonucleotide
taggtaatgggatgtggtttaatagttctaatcaattgcagctcgacctttcggggca

SEQ ID NO: 452626 - DNA, 57 bp, Artificial
  Synthetic oligonucleotide
taggtacacatattgtctgggatttcggattacaatctagtgttaccctgataatac

SEQ ID NO: 452627 - DNA, 55 bp, Artificial
  Synthetic oligonucleotide
taggtacagattacataaatcagtaccaacattgtttgtaagggccacctccaca

SEQ ID NO: 452628 - DNA, 50 bp, Artificial
  Synthetic oligonucleotide
taggtacaggacagcaatctgtggactctatcctgcacagatcaaggcca

SEQ ID NO: 452629 - DNA, 60 bp, Artificial
  Synthetic oligonucleotide
taggtacatgaggagaatgcgggaaattttccagcctaagaacattgccatcaactgcga

SEQ ID NO: 452630 - DNA, 54 bp, Artificial
  Synthetic oligonucleotide
taggtaccaaatggagtcctctgtcattggccgcatttaccggtgaactcacta

SEQ ID NO: 452631 - DNA, 53 bp, Artificial
  Synthetic oligonucleotide
taggtaccgaacgatgagagaggtacctagaccgtacaggccggggtttatcc

SEQ ID NO: 452632 - DNA, 52 bp, Artificial
  Synthetic oligonucleotide
taggtaccgaaggacctgcgttctaaaaaccctcaagaaaatcccagtcgga

SEQ ID NO: 452633 - DNA, 60 bp, Artificial
  Synthetic oligonucleotide
taggtaccggacagcaatctgtggtctctatcctgcacaaattaaggcaaggcaaatgat

SEQ ID NO: 452634 - DNA, 55 bp, Artificial
  Synthetic oligonucleotide
taggtacgcagccattgcgcgtgtcgccagctctggcttcacgactactgccgct

SEQ ID NO: 452635 - DNA, 51 bp, Artificial
  Synthetic oligonucleotide
taggtacgcctgaaccaaagtgaaacacgctatgtttggggtgtagataaa

SEQ ID NO: 452636 - DNA, 55 bp, Artificial
  Synthetic oligonucleotide
taggtacgctccggcgtgcaagcctctcctacgggaggaggtcacataccaggtc

SEQ ID NO: 452637 - DNA, 59 bp, Artificial
  Synthetic oligonucleotide
taggtacggcgactgacggccctgtaatgcaacctgttcgtgtaacacctgagactgct

SEQ ID NO: 452638 - DNA, 60 bp, Artificial
  Synthetic oligonucleotide
taggtacttctgacattgcaaatgatgagcacctcaaaagagtgcaacttacgcttaaga

SEQ ID NO: 452639 - DNA, 53 bp, Artificial
  Synthetic oligonucleotide
taggtacttttgtggtaaaagactcagcaatcccccacgttttttcgcacctg

SEQ ID NO: 452640 - DNA, 54 bp, Artificial
  Synthetic oligonucleotide
taggtagaaaccttctctgggctctaattacctaggaacttgatttggtcgtaa

SEQ ID NO: 452641 - DNA, 58 bp, Artificial
  Synthetic oligonucleotide
taggtagaagtataagtgtcttctcatacacataaaacctgagacgttgggagtacga

SEQ ID NO: 452642 - DNA, 53 bp, Artificial
  Synthetic oligonucleotide
taggtagacaacccccgccccgtcgtgtattctaggttcatcgcaaggaacac

SEQ ID NO: 452643 - DNA, 60 bp, Artificial
  Synthetic oligonucleotide
taggtagagaatgattaccagcgcgagaacgaatagctgtgcagaaacgggcaggtagga

SEQ ID NO: 452644 - DNA, 60 bp, Artificial
  Synthetic oligonucleotide
taggtagcgcactcacatcaaatgcggctaaaaagatttatagtacaataggcaaagcag

SEQ ID NO: 452645 - DNA, 55 bp, Artificial
  Synthetic oligonucleotide
taggtagtaccgcagatgtccccaggaggagagtccgtcaaaaggggcggtttgc

SEQ ID NO: 452646 - DNA, 59 bp, Artificial
  Synthetic oligonucleotide
taggtagtggggatccacgtcatcaatgacgttgtaccatgcctcgttgctgtaaacct

SEQ ID NO: 452647 - DNA, 60 bp, Artificial
  Synthetic oligonucleotide
taggtagtggggatctacgtcatcgatgacgttataccacgcatcattgctgtaaacttt

SEQ ID NO: 452648 - DNA, 58 bp, Artificial
  Synthetic oligonucleotide
taggtagtgggggtcgacgtcatcaatgacgttgtaccaggcataattactgtatacc

SEQ ID NO: 452649 - DNA, 60 bp, Artificial
  Synthetic oligonucleotide
taggtagtgggggtctacgtcatcaaccacgttgtaccatgcatcattgctgtacacctt

SEQ ID NO: 452650 - DNA, 54 bp, Artificial
  Synthetic oligonucleotide
taggtagttcctatcgcttctaagatctgttggtgttaggtatccgtgtgccat

SEQ ID NO: 452651 - DNA, 58 bp, Artificial
  Synthetic oligonucleotide
taggtataaggatccgagacctcttagggctaatagataatctcgggaagaatcatcc

SEQ ID NO: 452652 - DNA, 60 bp, Artificial
  Synthetic oligonucleotide
taggtataattgagcaagataaggttgagtcttcttatacgaaaggataagatgactaca

SEQ ID NO: 452653 - DNA, 52 bp, Artificial
  Synthetic oligonucleotide
taggtatacctatgataacagcggggctccccacccatcgcgggtgggttga

SEQ ID NO: 452654 - DNA, 60 bp, Artificial
  Synthetic oligonucleotide
taggtatctgcctctctacgcattgttatcaccgggtgttctcatcgctatgtacaatag

SEQ ID NO: 452655 - DNA, 59 bp, Artificial
  Synthetic oligonucleotide
taggtatgacaggaaatggacgagttatgctcacgtcgaccatcattcagaagattagt

SEQ ID NO: 452656 - DNA, 58 bp, Artificial
  Synthetic oligonucleotide
taggtatgcacacaaaattccaagaggtgtccctctctttaagtgcacttttgaccaa

SEQ ID NO: 452657 - DNA, 50 bp, Artificial
  Synthetic oligonucleotide
taggtatgggtctgagttcgttataagttctagtgacaaatcaagtcagg

SEQ ID NO: 452658 - DNA, 57 bp, Artificial
  Synthetic oligonucleotide
taggtcaaggctacatggggacagacctgaaggtatcaaatagagggccccacccaa

SEQ ID NO: 452659 - DNA, 51 bp, Artificial
  Synthetic oligonucleotide
taggtcacctagtcctggcatagtaggtatgtgggcagtgacttttcacaa

SEQ ID NO: 452660 - DNA, 59 bp, Artificial
  Synthetic oligonucleotide
taggtcagcacagcatgcttgaagctatggcccatagattaagaatggatgcacgacta

SEQ ID NO: 452661 - DNA, 60 bp, Artificial
  Synthetic oligonucleotide
taggtcaggagaaagcaatcgaagtctaccaggtgagagaaagttacacaagcatatgcc

SEQ ID NO: 452662 - DNA, 53 bp, Artificial
  Synthetic oligonucleotide
taggtcagggttacgtgacaggttcagtggaaattacacctattctcttaacg

SEQ ID NO: 452663 - DNA, 53 bp, Artificial
  Synthetic oligonucleotide
taggtcaggtgtacctctagatatagttgccagcacttgcaggtggccagatc

SEQ ID NO: 452664 - DNA, 59 bp, Artificial
  Synthetic oligonucleotide
taggtcatcgtacaaccggatcatctcttggctgttgtccgggtgtacatcctcgttag

SEQ ID NO: 452665 - DNA, 60 bp, Artificial
  Synthetic oligonucleotide
taggtcatgagaaagctgatattcatcacgctgagactcaatataattgaatgcgtttgg

SEQ ID NO: 452666 - DNA, 57 bp, Artificial
  Synthetic oligonucleotide
taggtcattccgggtaacctttccagatccaaataagtttgctttagcagacatgtc

SEQ ID NO: 452667 - DNA, 55 bp, Artificial
  Synthetic oligonucleotide
taggtcattgccaacaaccgcacccggttaatcagatataaaatgcacctggtgc

SEQ ID NO: 452668 - DNA, 60 bp, Artificial
  Synthetic oligonucleotide
taggtccaagagagaatgtagctgtaatacaagttggtggctctaatatattagacataa

SEQ ID NO: 452669 - DNA, 54 bp, Artificial
  Synthetic oligonucleotide
taggtccgccgctccttcgtaccagcccgttacccgtttgtagaactcgcctgc

SEQ ID NO: 452670 - DNA, 56 bp, Artificial
  Synthetic oligonucleotide
taggtcctaatatatcggtaatcggtgccatgtattcccagttcacaaccccaagg

SEQ ID NO: 452671 - DNA, 52 bp, Artificial
  Synthetic oligonucleotide
taggtcctaccaacctggagatcatcacatctagtctgggtcgtgaatcaat

SEQ ID NO: 452672 - DNA, 56 bp, Artificial
  Synthetic oligonucleotide
taggtcctggattgcagaggaagatagtgggaataccccctttaatttgaatgggc

SEQ ID NO: 452673 - DNA, 59 bp, Artificial
  Synthetic oligonucleotide
taggtcgacaccactggctacgcgcagatgatgccgtgtgtgtcagacccctcgttccc

SEQ ID NO: 452674 - DNA, 57 bp, Artificial
  Synthetic oligonucleotide
taggtcgcacgacaccccctgtcaaggacagtcaaccttgtgaagtcgggagaatac

SEQ ID NO: 452675 - DNA, 59 bp, Artificial
  Synthetic oligonucleotide
taggtcgccaatggttatcgggatggggtggccataagagttcaacagacatgtctggc

SEQ ID NO: 452676 - DNA, 55 bp, Artificial
  Synthetic oligonucleotide
taggtctactaccggggcaggagcgacacggtgacgcgaaacaaactataaatta

SEQ ID NO: 452677 - DNA, 55 bp, Artificial
  Synthetic oligonucleotide
taggtctctccggccgcgcagcgacacccattccaaaataatcatcagcccactc

SEQ ID NO: 452678 - DNA, 60 bp, Artificial
  Synthetic oligonucleotide
taggtctcttcaagttcttgatgaacttatctgaggagacattccagcatgagagactag

SEQ ID NO: 452679 - DNA, 56 bp, Artificial
  Synthetic oligonucleotide
taggtctggaggagataaacacgtggatccaaatttaccagaatcgttacaaaata

SEQ ID NO: 452680 - DNA, 56 bp, Artificial
  Synthetic oligonucleotide
taggtcttaccggccccgcaggggtcatacaagcggcccgcgcagcggttacattc

SEQ ID NO: 452681 - DNA, 60 bp, Artificial
  Synthetic oligonucleotide
taggtcttgagcgatcgcattaccagcctcgccctggagagtccggtccactatctcccg

SEQ ID NO: 452682 - DNA, 60 bp, Artificial
  Synthetic oligonucleotide
taggtgacgcgagtctatcacaggttgaccagacagactatttccagctacctccagtag

SEQ ID NO: 452683 - DNA, 54 bp, Artificial
  Synthetic oligonucleotide
taggtgagttaggtactattacaaccagaagtggtacaacaataggacaaaggg

SEQ ID NO: 452684 - DNA, 58 bp, Artificial
  Synthetic oligonucleotide
taggtgcatatgaatatattcatagaaccttgctttttgagtatcatgactttgaatt

SEQ ID NO: 452685 - DNA, 52 bp, Artificial
  Synthetic oligonucleotide
taggtgccaaaagacagccgccccaaagcaaaaagaagacccccttagtaag

SEQ ID NO: 452686 - DNA, 60 bp, Artificial
  Synthetic oligonucleotide
taggtgccaggttaatatgttcggcaaaatcattcagagctacatgtagcgccaaattat

SEQ ID NO: 452687 - DNA, 52 bp, Artificial
  Synthetic oligonucleotide
taggtgccccatctgcaaacacaaactacccttcagactagagctccagacc

SEQ ID NO: 452688 - DNA, 58 bp, Artificial
  Synthetic oligonucleotide
taggtgcctgtttactgatttctgattgggggggttgcttagtcaatatgtgaaactc

SEQ ID NO: 452689 - DNA, 55 bp, Artificial
  Synthetic oligonucleotide
taggtgcgatacaagacgcgctcctgaccatttatgaagagggcagcgaccggct

SEQ ID NO: 452690 - DNA, 60 bp, Artificial
  Synthetic oligonucleotide
taggtgcgttcatcattacgttacgccctttaggtatcattgcgttaccatcaggtgtga

SEQ ID NO: 452691 - DNA, 60 bp, Artificial
  Synthetic oligonucleotide
taggtgctcgtgataatggcaaagtttttcgcgcttatcacaagggcgcacaagtgcgct

SEQ ID NO: 452692 - DNA, 60 bp, Artificial
  Synthetic oligonucleotide
taggtggaaactggacatgcatagctggtgaccatagtaagttgaaagatgggcctatca

SEQ ID NO: 452693 - DNA, 50 bp, Artificial
  Synthetic oligonucleotide
taggtggaaggattggtttcgtaaaccaccctacttccgaaacggagtac

SEQ ID NO: 452694 - DNA, 60 bp, Artificial
  Synthetic oligonucleotide
taggtggaccggcacttacatctatgaccacctcacccctatgtcggactgggctgctag

SEQ ID NO: 452695 - DNA, 60 bp, Artificial
  Synthetic oligonucleotide
taggtggctttacgtcacatggatgagcggacatcgtaagaaatttcaccatagaaccgc

SEQ ID NO: 452696 - DNA, 58 bp, Artificial
  Synthetic oligonucleotide
taggtgggccctcaaccaatgaaattcacgctacatggcctatataatgcggggggac

SEQ ID NO: 452697 - DNA, 57 bp, Artificial
  Synthetic oligonucleotide
taggtgggccctcgaccaatgaaattcacggtacatgggctctttactgcgtgggga

SEQ ID NO: 452698 - DNA, 53 bp, Artificial
  Synthetic oligonucleotide
taggtggttagctatctatatcaccgcttattggatgcttgtactattagtgg

SEQ ID NO: 452699 - DNA, 60 bp, Artificial
  Synthetic oligonucleotide
taggtgtaggtgtactgcaacacatccaccgaagagtaggtgagctgtatcgttgcgtag

SEQ ID NO: 452700 - DNA, 59 bp, Artificial
  Synthetic oligonucleotide
taggtgtatgctttcaattaaatacctacagcttgtagaaaatacgtattctccagaca

SEQ ID NO: 452701 - DNA, 60 bp, Artificial
  Synthetic oligonucleotide
taggtgtccccgcatgatcactggtgccattggttcggaccagttgtccagactggactc

SEQ ID NO: 452702 - DNA, 50 bp, Artificial
  Synthetic oligonucleotide
taggtgtccttggctatagaaaagggctccctctggtagtaaaggcgata

SEQ ID NO: 452703 - DNA, 60 bp, Artificial
  Synthetic oligonucleotide
taggtgtctataatttcatgattaagcgtgatgttaagcctaaacttgacttatcacctc

SEQ ID NO: 452704 - DNA, 60 bp, Artificial
  Synthetic oligonucleotide
taggtgtgggaagtatctgcctctgaagaagccaactatttggcatcgtagacattagga

SEQ ID NO: 452705 - DNA, 60 bp, Artificial
  Synthetic oligonucleotide
taggtgtgggagtacatactgtcgccacaataggcggctgtggaggtgtaactgtcggct

SEQ ID NO: 452706 - DNA, 60 bp, Artificial
  Synthetic oligonucleotide
taggtgtgtaaaagctctagatatgggtgcatgcccacagcttgcacagttgggaatagt

SEQ ID NO: 452707 - DNA, 53 bp, Artificial
  Synthetic oligonucleotide
taggtgtttagaagaactggttagtattgaagtccccgattcaaccaataagt

SEQ ID NO: 452708 - DNA, 52 bp, Artificial
  Synthetic oligonucleotide
taggttaaaagacacggcaacccagatgaagttctccagtgcaacactagtc

SEQ ID NO: 452709 - DNA, 56 bp, Artificial
  Synthetic oligonucleotide
taggttaaaagcctccaagctgtgccttgggtggctttggggcatggacattgacc

SEQ ID NO: 452710 - DNA, 54 bp, Artificial
  Synthetic oligonucleotide
taggttaaccctgatgctgcggtcgtaacctgttgtagttttaccgttagccac

SEQ ID NO: 452711 - DNA, 56 bp, Artificial
  Synthetic oligonucleotide
taggttaataagttgtaacgcctcagttgttacacaagcctgtccaaagatatcct

SEQ ID NO: 452712 - DNA, 54 bp, Artificial
  Synthetic oligonucleotide
taggttaatagttagtaataagtacgagcctcttatggctcctttaattaattg

SEQ ID NO: 452713 - DNA, 51 bp, Artificial
  Synthetic oligonucleotide
taggttaatccgctagggaatttaacacgaacacgtacacagtctccgttt

SEQ ID NO: 452714 - DNA, 53 bp, Artificial
  Synthetic oligonucleotide
taggttaatgatctttgtactaggaggctgtacgcatacattgctcttttcac

SEQ ID NO: 452715 - DNA, 53 bp, Artificial
  Synthetic oligonucleotide
taggttacctgagtttcgcatgcagcaccataagttgtcgggagaaattgaga

SEQ ID NO: 452716 - DNA, 60 bp, Artificial
  Synthetic oligonucleotide
taggttacggcgtgatggtgtcatgactcaagctcagcagaaccaagtcgaagtgttagc

SEQ ID NO: 452717 - DNA, 53 bp, Artificial
  Synthetic oligonucleotide
taggttacgtcgtagcggaaagatctcgcaattttattgcgttggcaaataca

SEQ ID NO: 452718 - DNA, 57 bp, Artificial
  Synthetic oligonucleotide
taggttactattccgcttcctactctgacccctgtgctatacagtgcccttacctgg

SEQ ID NO: 452719 - DNA, 50 bp, Artificial
  Synthetic oligonucleotide
taggttactcaaccgacccgtaaaccccaccgtcaacaattttcgccgta

SEQ ID NO: 452720 - DNA, 60 bp, Artificial
  Synthetic oligonucleotide
taggttactttgatgaccttgctgcagcccagagtagatgtgttaaagcattagacatgg

SEQ ID NO: 452721 - DNA, 58 bp, Artificial
  Synthetic oligonucleotide
taggttatgacaccatggggagacaccagggggagctctcaacttctctccattattt

SEQ ID NO: 452722 - DNA, 55 bp, Artificial
  Synthetic oligonucleotide
taggttatttaaacagatagaagcagaatcagccccccaggatgtcaaacaatat

SEQ ID NO: 452723 - DNA, 56 bp, Artificial
  Synthetic oligonucleotide
taggttcaaccatcagttcaccaacctcctcagttctttaatcttctcagttagtt

SEQ ID NO: 452724 - DNA, 60 bp, Artificial
  Synthetic oligonucleotide
taggttcactagcagtgacaatatgggatctcatggggtgtacattgatttcaacggcct

SEQ ID NO: 452725 - DNA, 56 bp, Artificial
  Synthetic oligonucleotide
taggttcatagttaagcgtaaatggaaggtggactaccagtcctctggcgtccctg

SEQ ID NO: 452726 - DNA, 60 bp, Artificial
  Synthetic oligonucleotide
taggttctgagctagcttctgacactacagtgatactatcatgcaaacaaaatctcgatg

SEQ ID NO: 452727 - DNA, 50 bp, Artificial
  Synthetic oligonucleotide
taggttcttggcagtttacccaagaatttccccccacagtttaccttaac

SEQ ID NO: 452728 - DNA, 58 bp, Artificial
  Synthetic oligonucleotide
taggttctttcctgttgccgattcattgtgagtattctcgtgtggatccccccttcaa

SEQ ID NO: 452729 - DNA, 57 bp, Artificial
  Synthetic oligonucleotide
taggttgaacgacgaagcggccaagcacttcgagcctaagattcaagatttaacctc

SEQ ID NO: 452730 - DNA, 55 bp, Artificial
  Synthetic oligonucleotide
taggttgagttattgggagtcctttggggttgacccgcagacacaggtccttgtc

SEQ ID NO: 452731 - DNA, 59 bp, Artificial
  Synthetic oligonucleotide
taggttgcaagagtgaaacgggaagtcctatagacaagccgcgcgattctggattacaa

SEQ ID NO: 452732 - DNA, 55 bp, Artificial
  Synthetic oligonucleotide
taggttgcactcctgctattggggaacattgggataaggctgagccttgtgcaag

SEQ ID NO: 452733 - DNA, 55 bp, Artificial
  Synthetic oligonucleotide
taggttgcttaattatatgaggtttgattatttcaaagggttagatatgggtaaa

SEQ ID NO: 452734 - DNA, 53 bp, Artificial
  Synthetic oligonucleotide
taggttgggttgaaggactaataaacctatcggagggaagtaattgcgaggat

SEQ ID NO: 452735 - DNA, 53 bp, Artificial
  Synthetic oligonucleotide
taggttgtaaccagagacattaatttgtgattgttcctgtgtaatgtaaccca

SEQ ID NO: 452736 - DNA, 59 bp, Artificial
  Synthetic oligonucleotide
taggttgtttagcgttaaatgtggcaactggtgcttattcacaaatcatgtttttgtga

SEQ ID NO: 452737 - DNA, 55 bp, Artificial
  Synthetic oligonucleotide
taggtttagtgtggtgtatgttgcttgttttagagctaattgtatgggctgctag

SEQ ID NO: 452738 - DNA, 59 bp, Artificial
  Synthetic oligonucleotide
taggtttcatgactatagctaagaatggtgactctccaataactgtccccccaaatgga

SEQ ID NO: 452739 - DNA, 58 bp, Artificial
  Synthetic oligonucleotide
taggtttccgtgtcaatgcaaacacggcagctttaagtaacaaagtcctagcagaata

SEQ ID NO: 452740 - DNA, 58 bp, Artificial
  Synthetic oligonucleotide
taggtttctgcgtctagtgtggtcagctcctacgcttgacgggttggttgttgcccca

SEQ ID NO: 452741 - DNA, 58 bp, Artificial
  Synthetic oligonucleotide
taggtttgatgaagcaccgctagctactagacttcgtcgtaagactggtcggtacaaa

SEQ ID NO: 452742 - DNA, 60 bp, Artificial
  Synthetic oligonucleotide
taggtttgcgcccccttgcaagcccttgctacgagatgaggtgtcattcagagtaggact

SEQ ID NO: 452743 - DNA, 54 bp, Artificial
  Synthetic oligonucleotide
taggtttggaggtgtgttgagaaccgttcgagtcaagtttttcgattcgcgacc

SEQ ID NO: 452744 - DNA, 60 bp, Artificial
  Synthetic oligonucleotide
taggtttgtgactccaggagaacgaccctcaggcatgttcgactcttcggtcctgtgtga

SEQ ID NO: 452745 - DNA, 55 bp, Artificial
  Synthetic oligonucleotide
taggttttcaaagataaaggcctgcttgtctggagctacaaccctcgtgtcaggg

SEQ ID NO: 452746 - DNA, 60 bp, Artificial
  Synthetic oligonucleotide
taggttttgtgcctacacctgacaatcccattcatgacacctatagatatttaacatccc

SEQ ID NO: 452747 - DNA, 57 bp, Artificial
  Synthetic oligonucleotide
tagtaaaaagtacttgtcaatggccttaggaactatggatactcctagtaggtatgc

SEQ ID NO: 452748 - DNA, 59 bp, Artificial
  Synthetic oligonucleotide
tagtaaaaataggcactccatcacgagtcaattgtgggtgaccaaacattttcacagga

SEQ ID NO: 452749 - DNA, 54 bp, Artificial
  Synthetic oligonucleotide
tagtaaaaccgggagacatactgttaattaatagcaacgggaacctaattgctc

SEQ ID NO: 452750 - DNA, 58 bp, Artificial
  Synthetic oligonucleotide
tagtaaaccctgagccaggtagcaagacaaaacggatgactgcaaccaacattactgg

SEQ ID NO: 452751 - DNA, 52 bp, Artificial
  Synthetic oligonucleotide
tagtaaactgtggaccgtttgtcccccgagaccaaagttccccagcttggga

SEQ ID NO: 452752 - DNA, 58 bp, Artificial
  Synthetic oligonucleotide
tagtaaagctaggctgcaaacaatctaaccaggccacagcccccagtaattgagtaat

SEQ ID NO: 452753 - DNA, 60 bp, Artificial
  Synthetic oligonucleotide
tagtaaaggagccgtcttcaagtcaaatttaccaatcgagaactgtgatgccacatgcca

SEQ ID NO: 452754 - DNA, 53 bp, Artificial
  Synthetic oligonucleotide
tagtaaaggaggagagttgaaacggaggagcccaaggttccggagccttagta

SEQ ID NO: 452755 - DNA, 59 bp, Artificial
  Synthetic oligonucleotide
tagtaacaatatggtaccaaaccaactttgtggtgcctgatggagcgcctacaagtgct

SEQ ID NO: 452756 - DNA, 60 bp, Artificial
  Synthetic oligonucleotide
tagtaacagactcacagtatgcattaggaatcattcaggcacaaccagataggagtgaat

SEQ ID NO: 452757 - DNA, 55 bp, Artificial
  Synthetic oligonucleotide
tagtaaccagttgtgggctgatacaaagcaagctcaacagggtctgttggtgggc

SEQ ID NO: 452758 - DNA, 56 bp, Artificial
  Synthetic oligonucleotide
tagtaacgaaaacactaaagccgttgaatcaaggaacgatgttgataccatcaaaa

SEQ ID NO: 452759 - DNA, 56 bp, Artificial
  Synthetic oligonucleotide
tagtaactacctcgaaagtacttgactggtcgctccgccataccccatggtagacc

SEQ ID NO: 452760 - DNA, 57 bp, Artificial
  Synthetic oligonucleotide
tagtaactagatggaacttggatatagctggggtgcttctgcaatgtgtccctacga

SEQ ID NO: 452761 - DNA, 60 bp, Artificial
  Synthetic oligonucleotide
tagtaactgtagatggttatgtttgccgtaactatgctgctacatcgctatatgatctaa

SEQ ID NO: 452762 - DNA, 60 bp, Artificial
  Synthetic oligonucleotide
tagtaagaacctaatcggacttgttcaaattccatatctgagatctcacagcaaacatct

SEQ ID NO: 452763 - DNA, 53 bp, Artificial
  Synthetic oligonucleotide
tagtaagataagggaatgctacggtattcggtaagctcaaacgtgatttagtc

SEQ ID NO: 452764 - DNA, 55 bp, Artificial
  Synthetic oligonucleotide
tagtaagcccagcgtctgctgagggtacggtagtgctcgccatgcaggacagggc

SEQ ID NO: 452765 - DNA, 59 bp, Artificial
  Synthetic oligonucleotide
tagtaatacataaagttagtaagagatgcacatataaataccagctaaagtgggctaaa

SEQ ID NO: 452766 - DNA, 52 bp, Artificial
  Synthetic oligonucleotide
tagtaatatatcaactagaaacagcacagcgtatgatgaaataaagccgcta

SEQ ID NO: 452767 - DNA, 51 bp, Artificial
  Synthetic oligonucleotide
tagtaatctgtcgcctttctgtcgcgaggccgtctccgctatcgtcgcggg

SEQ ID NO: 452768 - DNA, 50 bp, Artificial
  Synthetic oligonucleotide
tagtaatgctgacagtgatgtcctcaaccctatctataaggccaagctaa

SEQ ID NO: 452769 - DNA, 58 bp, Artificial
  Synthetic oligonucleotide
tagtaatgctttcgaagtcatttggttggtcgctccgctgtaacccacagtagacctg

SEQ ID NO: 452770 - DNA, 54 bp, Artificial
  Synthetic oligonucleotide
tagtaatggagtatgcctttaaatttcagtggggaggccacggaaccgaaagat

SEQ ID NO: 452771 - DNA, 59 bp, Artificial
  Synthetic oligonucleotide
tagtaatgtaggttgcagttgcattgaacgggaatagtgaactccgcctgtttggagtc

SEQ ID NO: 452772 - DNA, 55 bp, Artificial
  Synthetic oligonucleotide
tagtaatgtggggaatgaactctgacgttgataaagtttctatactttttttcca

SEQ ID NO: 452773 - DNA, 56 bp, Artificial
  Synthetic oligonucleotide
tagtaattccacctcaaaccccacccacagctaggttactatgttttgtatcaggc

SEQ ID NO: 452774 - DNA, 55 bp, Artificial
  Synthetic oligonucleotide
tagtacaaagaggtggtagggctatacttcacatacctacaagaataagacaagg

SEQ ID NO: 452775 - DNA, 53 bp, Artificial
  Synthetic oligonucleotide
tagtacaaatgttaagtaggttaaggcagggttataggcctgttttctcctcc

SEQ ID NO: 452776 - DNA, 60 bp, Artificial
  Synthetic oligonucleotide
tagtacaactatcagctgcagcatgtgattttaactacccaagaataggctgctgtaatg

SEQ ID NO: 452777 - DNA, 56 bp, Artificial
  Synthetic oligonucleotide
tagtacaacttccatggaattgggtcttttaatgagaagaacgaagccgagaaata

SEQ ID NO: 452778 - DNA, 55 bp, Artificial
  Synthetic oligonucleotide
tagtacaattggaaaagcggcggagcgattcgctgagagtgagataggttcagcg

SEQ ID NO: 452779 - DNA, 54 bp, Artificial
  Synthetic oligonucleotide
tagtacacctaataccacttaccaatataacagcacatttcctaaaaacaggag

SEQ ID NO: 452780 - DNA, 50 bp, Artificial
  Synthetic oligonucleotide
tagtacactttaccgtctctgacaacgaacttagaaggataacgagccat

SEQ ID NO: 452781 - DNA, 52 bp, Artificial
  Synthetic oligonucleotide
tagtacagacgacaacacaactgtgctagtgccaaaggttaatcctagtcag

SEQ ID NO: 452782 - DNA, 55 bp, Artificial
  Synthetic oligonucleotide
tagtacagaggaaactacagtggggcacttcttttcaagagcggggttggtggga

SEQ ID NO: 452783 - DNA, 60 bp, Artificial
  Synthetic oligonucleotide
tagtacagctaaacgaagctatagctattaattgtacaagacccagcaacagtacaggac

SEQ ID NO: 452784 - DNA, 60 bp, Artificial
  Synthetic oligonucleotide
tagtacagctgaatgcagctgtagaaattaattgtacaagacacggcaacaatacaagaa

SEQ ID NO: 452785 - DNA, 60 bp, Artificial
  Synthetic oligonucleotide
tagtacagggcagtgtacactcgatattgacaggtgagtcttacggtgaatcagtcaaac

SEQ ID NO: 452786 - DNA, 56 bp, Artificial
  Synthetic oligonucleotide
tagtacagtttactgaacctgtacaaattagttgtaccagacccggcaacaataca

SEQ ID NO: 452787 - DNA, 60 bp, Artificial
  Synthetic oligonucleotide
tagtacatactgggaaggatctaatagtacaggaggtgactcaaccatcacaattccatg

SEQ ID NO: 452788 - DNA, 59 bp, Artificial
  Synthetic oligonucleotide
tagtacatcttaatgaatctatacaaattaactgtactagacctggtaataatacaaga

SEQ ID NO: 452789 - DNA, 60 bp, Artificial
  Synthetic oligonucleotide
tagtacatcttgataaatctgtaaacattacatgtacaagacctggcaataatacaagaa

SEQ ID NO: 452790 - DNA, 60 bp, Artificial
  Synthetic oligonucleotide
tagtacatgataatttcaaggattcacagggtaaacttaatgtagcagcagccttccaac

SEQ ID NO: 452791 - DNA, 55 bp, Artificial
  Synthetic oligonucleotide
tagtacatgccatcaaccagaaaagagattggggtgttgtggggagtatggagga

SEQ ID NO: 452792 - DNA, 56 bp, Artificial
  Synthetic oligonucleotide
tagtaccaatagagaagaataccagttataggttgatacattgtaacacctcaacc

SEQ ID NO: 452793 - DNA, 60 bp, Artificial
  Synthetic oligonucleotide
tagtaccaatcagcaatagcggtaatgccagtggaacatacaggctactaaattgtaata

SEQ ID NO: 452794 - DNA, 60 bp, Artificial
  Synthetic oligonucleotide
tagtaccaatcagcgatggtagtggcaatggaacatacaggctgataaattgtaatacct

SEQ ID NO: 452795 - DNA, 60 bp, Artificial
  Synthetic oligonucleotide
tagtaccactcagcaatactaatgggccactcaacaatactagtggggaatataggctaa

SEQ ID NO: 452796 - DNA, 60 bp, Artificial
  Synthetic oligonucleotide
tagtaccagccgaagtactgtacagatccagacgagacactgtgcatcacagagtctaca

SEQ ID NO: 452797 - DNA, 50 bp, Artificial
  Synthetic oligonucleotide
tagtaccagtagaaaatgatactgaaagctatacgctgataaattgtaac

SEQ ID NO: 452798 - DNA, 55 bp, Artificial
  Synthetic oligonucleotide
tagtaccatagggaaggcggcggaaaggttcgcggagagtgaaattggatctgcg

SEQ ID NO: 452799 - DNA, 60 bp, Artificial
  Synthetic oligonucleotide
tagtaccatcgaacgatgattaccagacaccaattatgaactcagtaacagttaggcagg

SEQ ID NO: 452800 - DNA, 55 bp, Artificial
  Synthetic oligonucleotide
tagtaccccaaaacagacttgagatggccatgtggaggagtgcagcgacagagct

SEQ ID NO: 452801 - DNA, 56 bp, Artificial
  Synthetic oligonucleotide
tagtaccctggcggagcaagtagcatggatgactgccaatcctcctgttccagtag

SEQ ID NO: 452802 - DNA, 60 bp, Artificial
  Synthetic oligonucleotide
tagtacccttcaggaacaaataggatggatgacaagcaatccacctatcccagtaggaga

SEQ ID NO: 452803 - DNA, 58 bp, Artificial
  Synthetic oligonucleotide
tagtaccgaagaaacttacgcgcctggagtgcacaatcaaattcgcttagtgagaggc

SEQ ID NO: 452804 - DNA, 55 bp, Artificial
  Synthetic oligonucleotide
tagtaccgcagcttattgttactctacctcttaacgagtattttgcgcgggtggg

SEQ ID NO: 452805 - DNA, 58 bp, Artificial
  Synthetic oligonucleotide
tagtacctaaagcagcccgaagtaaatatagtgggtttgtgagaacactgtttcagca

SEQ ID NO: 452806 - DNA, 60 bp, Artificial
  Synthetic oligonucleotide
tagtacctgagagtgtacaggaggtgagcccaattgagagtaagcgtgattcgggggcac

SEQ ID NO: 452807 - DNA, 59 bp, Artificial
  Synthetic oligonucleotide
tagtacctgtgaacagaagactgcctcacgctttagtcctccaccgtaatgaacaccca

SEQ ID NO: 452808 - DNA, 60 bp, Artificial
  Synthetic oligonucleotide
tagtacgatcggaaaagcagcggagcgatttgctgaaagtgagatcggatcagccgcaat

SEQ ID NO: 452809 - DNA, 57 bp, Artificial
  Synthetic oligonucleotide
tagtacgggatagccctcattttcaagtgttacctctgcacttagggttctgttgag

SEQ ID NO: 452810 - DNA, 59 bp, Artificial
  Synthetic oligonucleotide
tagtacggtaccgagcagtctagtcttggtagggctgatattggcaatgggtgtttgga

SEQ ID NO: 452811 - DNA, 57 bp, Artificial
  Synthetic oligonucleotide
tagtactagcaattcaagcggaggttttcaaaacgttgtatttgagataagcggtca

SEQ ID NO: 452812 - DNA, 59 bp, Artificial
  Synthetic oligonucleotide
tagtactcccattgaaagaataagtcaggaattcaggaacctacgtagagcactgtata

SEQ ID NO: 452813 - DNA, 51 bp, Artificial
  Synthetic oligonucleotide
tagtactcgttccgcccttacgctttaacccttaacctgataaaaccatta

SEQ ID NO: 452814 - DNA, 57 bp, Artificial
  Synthetic oligonucleotide
tagtactgatgggaaatttttcgcctacaaagtagacacattcaatgaaataccatt

SEQ ID NO: 452815 - DNA, 60 bp, Artificial
  Synthetic oligonucleotide
tagtactgccaccgtgaagaacgacctacgtgatcgttaccaggtcctgcatcgatggaa

SEQ ID NO: 452816 - DNA, 57 bp, Artificial
  Synthetic oligonucleotide
tagtacttctcgcctttgttctcatttctgaccattccccaaaagttggtgatcatt

SEQ ID NO: 452817 - DNA, 60 bp, Artificial
  Synthetic oligonucleotide
tagtagaaaccccacggggccacgtgaggataattccacagcaatcagaccgcatgatcg

SEQ ID NO: 452818 - DNA, 60 bp, Artificial
  Synthetic oligonucleotide
tagtagaacaacagactgtcaataacctaaacattgcatacaaatatctatcgacaggaa

SEQ ID NO: 452819 - DNA, 53 bp, Artificial
  Synthetic oligonucleotide
tagtagaacacaatggaaggaaaggttaagacaggtaaaggcaaagttagagg

SEQ ID NO: 452820 - DNA, 56 bp, Artificial
  Synthetic oligonucleotide
tagtagaacccattggcggccatttgtcgcggcgacataaattctaccgtccaatt

SEQ ID NO: 452821 - DNA, 55 bp, Artificial
  Synthetic oligonucleotide
tagtagaattgcagtattccactttatgtacaagtgtccattggatgacaagggg

SEQ ID NO: 452822 - DNA, 60 bp, Artificial
  Synthetic oligonucleotide
tagtagacacattgtatctactaaacttggtgagttggctactggagattacggtgcatc

SEQ ID NO: 452823 - DNA, 60 bp, Artificial
  Synthetic oligonucleotide
tagtagagaggccagatgccaaaaatgggatatgttatccaggagtactgaaagagacgg

SEQ ID NO: 452824 - DNA, 56 bp, Artificial
  Synthetic oligonucleotide
tagtagaggacgttaagcctgacgtgggccccatcgaaattaagccgcgcggctta

SEQ ID NO: 452825 - DNA, 60 bp, Artificial
  Synthetic oligonucleotide
tagtagaggcaaccaagttttgtgcacctatatacgagtgtgcatgggtcagctccaccg

SEQ ID NO: 452826 - DNA, 59 bp, Artificial
  Synthetic oligonucleotide
tagtagcacttacatccgtcttaggtcacgataagatacaaaaggtgagacattaaata

SEQ ID NO: 452827 - DNA, 50 bp, Artificial
  Synthetic oligonucleotide
tagtagcagtagaaaatggtaatgcaagctatatgttgagacattgtaac

SEQ ID NO: 452828 - DNA, 55 bp, Artificial
  Synthetic oligonucleotide
tagtagccagctgtgacaaatgccagctaaaaggggaagccatgcatgggcagat

SEQ ID NO: 452829 - DNA, 60 bp, Artificial
  Synthetic oligonucleotide
tagtagctagttgtgataaatgtcagctaaagggagaggcaatgcatggacaggtagact

SEQ ID NO: 452830 - DNA, 53 bp, Artificial
  Synthetic oligonucleotide
tagtagctatagttaagcgtaattttaatactccggacttagccgggacttta

SEQ ID NO: 452831 - DNA, 55 bp, Artificial
  Synthetic oligonucleotide
tagtagctatccccttggccggcgctttttgtctcaaacaggggtctcccccaga

SEQ ID NO: 452832 - DNA, 60 bp, Artificial
  Synthetic oligonucleotide
tagtaggactagcagacgggaggactagccatcgtggtgagatccctgagcagtctaaat

SEQ ID NO: 452833 - DNA, 59 bp, Artificial
  Synthetic oligonucleotide
tagtaggagagaaggctttcagcccagaggtaatacctatgttttcagcgttatcagaa

SEQ ID NO: 452834 - DNA, 60 bp, Artificial
  Synthetic oligonucleotide
tagtaggagggctgctgactggagaagattctctgatcagtatgtcaaacgatgtatctt

SEQ ID NO: 452835 - DNA, 60 bp, Artificial
  Synthetic oligonucleotide
tagtaggatgggcatcatcaaactatacagcaacaggcagtgtacaaaatgatagtggac

SEQ ID NO: 452836 - DNA, 55 bp, Artificial
  Synthetic oligonucleotide
tagtaggcatcccgtaattaacaaagagcgtgctactcaggagcgctcggaatta

SEQ ID NO: 452837 - DNA, 53 bp, Artificial
  Synthetic oligonucleotide
tagtagggaatgttgggctgggccggctttcaaattttttgggccggccgaca

SEQ ID NO: 452838 - DNA, 60 bp, Artificial
  Synthetic oligonucleotide
tagtaggggaattagtgtggagacaatccttgataggaaagagcatccccaatatcataa

SEQ ID NO: 452839 - DNA, 60 bp, Artificial
  Synthetic oligonucleotide
tagtaggtaatgcatccagcattatcacgagttaagcacttctgtttccccggtgatgga

SEQ ID NO: 452840 - DNA, 60 bp, Artificial
  Synthetic oligonucleotide
tagtagtagacaccgcaagagaaagcagtcaatcagcaccatgggtttatggaggtggct

SEQ ID NO: 452841 - DNA, 59 bp, Artificial
  Synthetic oligonucleotide
tagtagtagactccgcaaaagaaagcagtcaagtagcaacatgggggtatggaagtggc

SEQ ID NO: 452842 - DNA, 60 bp, Artificial
  Synthetic oligonucleotide
tagtagtagactccggaagtagacaatagagaaaacaccagcaatacatacctgcattca

SEQ ID NO: 452843 - DNA, 54 bp, Artificial
  Synthetic oligonucleotide
tagtagtagactccttgaaaagctactactgaaatcgctggtatgagccaactc

SEQ ID NO: 452844 - DNA, 59 bp, Artificial
  Synthetic oligonucleotide
tagtagtagactccttgaagagctactacgaaaaaaactgggatgagtgacttgacaga

SEQ ID NO: 452845 - DNA, 60 bp, Artificial
  Synthetic oligonucleotide
tagtagtagactccttgagaagctactactagagaagctgtaatgagcaacctcaaagaa

SEQ ID NO: 452846 - DNA, 60 bp, Artificial
  Synthetic oligonucleotide
tagtagtagactccttgagaagctactactgcatatgctggtatgagcaacctccaagaa

SEQ ID NO: 452847 - DNA, 60 bp, Artificial
  Synthetic oligonucleotide
tagtagtagactccttgagaagctactactgcgaaagctggaatgagcaccctccaagaa

SEQ ID NO: 452848 - DNA, 54 bp, Artificial
  Synthetic oligonucleotide
tagtagtagacttcgtaaaaagctactactacgaaaccgggaatgagccaactc

SEQ ID NO: 452849 - DNA, 56 bp, Artificial
  Synthetic oligonucleotide
tagtagtagacttcgtaaagagctactactacaagtgctgggatgagccaactcag

SEQ ID NO: 452850 - DNA, 54 bp, Artificial
  Synthetic oligonucleotide
tagtagtagacttcgtgaaaagctactactaaagactctggaatgagcaacctc

SEQ ID NO: 452851 - DNA, 56 bp, Artificial
  Synthetic oligonucleotide
tagtagtatcttgaaaagcatgtggttggttgctccgctgtaccccacagtaaacc

SEQ ID NO: 452852 - DNA, 56 bp, Artificial
  Synthetic oligonucleotide
tagtagtcagctatgtcaacgttaatacgggcctaaaaaccagacaactactgtgg

SEQ ID NO: 452853 - DNA, 55 bp, Artificial
  Synthetic oligonucleotide
tagtagtcagctatgtctcccctatcatatcaacaattccggaaactactgttgt

SEQ ID NO: 452854 - DNA, 59 bp, Artificial
  Synthetic oligonucleotide
tagtagtcaggatatgccggtcctgacacaccaaataatgtacgtgcccccaggcgggc

SEQ ID NO: 452855 - DNA, 57 bp, Artificial
  Synthetic oligonucleotide
tagtagtcatggggatagtactgagaggtcaaataccaatgaaagcaccattacact

SEQ ID NO: 452856 - DNA, 57 bp, Artificial
  Synthetic oligonucleotide
tagtagtccaggacgttataggagagttaagtcaggctatacccgatcttcaacaac

SEQ ID NO: 452857 - DNA, 56 bp, Artificial
  Synthetic oligonucleotide
tagtagtccgctatgttaatgttaatatgggcctaaaacttacacaactattgtgg

SEQ ID NO: 452858 - DNA, 59 bp, Artificial
  Synthetic oligonucleotide
tagtagtcctccggcccctgaatgcggctaatcccaactgcggagcacacgcccacaaa

SEQ ID NO: 452859 - DNA, 60 bp, Artificial
  Synthetic oligonucleotide
tagtagtgcaggttgcagttgcatttgattggaattgtgaattctgcttgtttcgtgtct

SEQ ID NO: 452860 - DNA, 52 bp, Artificial
  Synthetic oligonucleotide
tagtagtggtattggttcctccttgggtagttctccactcacggctgagtgg

SEQ ID NO: 452861 - DNA, 60 bp, Artificial
  Synthetic oligonucleotide
tagtagtgtaaataataaccatactagtgttaatgcctccagtgacatgaaaaattgctc

SEQ ID NO: 452862 - DNA, 58 bp, Artificial
  Synthetic oligonucleotide
tagtagtgtcaaagacatcattatggaaagagatgcaatataatagagatataacgat

SEQ ID NO: 452863 - DNA, 57 bp, Artificial
  Synthetic oligonucleotide
tagtagtgtttcgcgtgttggtcagtgtcgggttgttgtttttacatgtgatagagt

SEQ ID NO: 452864 - DNA, 58 bp, Artificial
  Synthetic oligonucleotide
tagtagttgtgcttttgcatagggggggggaaatgtagtgttatgcaatactcttatg

SEQ ID NO: 452865 - DNA, 55 bp, Artificial
  Synthetic oligonucleotide
tagtagttttaggtttatgtaggcataagggtttatcagggataattattgtata

SEQ ID NO: 452866 - DNA, 51 bp, Artificial
  Synthetic oligonucleotide
tagtatacacagcaaagcatgcaagagttctattgctaaatacagcttgac

SEQ ID NO: 452867 - DNA, 56 bp, Artificial
  Synthetic oligonucleotide
tagtatacagtttacaggatcctccggagttacacgggttcaattgaacctcgcca

SEQ ID NO: 452868 - DNA, 59 bp, Artificial
  Synthetic oligonucleotide
tagtatacataccaagtatacgataccggtgcaagcccgtacacagctaaagtgtctaa

SEQ ID NO: 452869 - DNA, 55 bp, Artificial
  Synthetic oligonucleotide
tagtatatgcaccatcaaccaggaatttgtcgatacgagactgatcactccgtgt

SEQ ID NO: 452870 - DNA, 60 bp, Artificial
  Synthetic oligonucleotide
tagtatcaactggtagtaatggtagtgggcagtatagactaataaattgcaatacatcag

SEQ ID NO: 452871 - DNA, 56 bp, Artificial
  Synthetic oligonucleotide
tagtatcaatggggaactctactaactctacttatagattaataaattgtaatacc

SEQ ID NO: 452872 - DNA, 52 bp, Artificial
  Synthetic oligonucleotide
tagtatcaattctagaatgggatcggtcgaaagaaccatgccatcgattgga

SEQ ID NO: 452873 - DNA, 60 bp, Artificial
  Synthetic oligonucleotide
tagtatcatatggtaatattttattgagtggaaatcaaacagcaagaatgctcaagtata

SEQ ID NO: 452874 - DNA, 61 bp, Artificial
  Synthetic oligonucleotide
tagtatcatcttggaatcttcgatgcgttgcgctcagcactcaaccccagagtgtagctta

SEQ ID NO: 452875 - DNA, 60 bp, Artificial
  Synthetic oligonucleotide
tagtatccaggggaatagctttgactgaaaaagcgaaattgaattcatatgcaccaatat

SEQ ID NO: 452876 - DNA, 53 bp, Artificial
  Synthetic oligonucleotide
tagtatcggcgtggcgtttgaatccgcaacttgttccttcgttcgcatatgcc

SEQ ID NO: 452877 - DNA, 54 bp, Artificial
  Synthetic oligonucleotide
tagtatgaacccgtccattttagaggattggaattttggccttacaccaccgcc

SEQ ID NO: 452878 - DNA, 54 bp, Artificial
  Synthetic oligonucleotide
tagtatgcaaaacatgtgaaatacaatattgtactacttgtgctaatcaacttg

SEQ ID NO: 452879 - DNA, 55 bp, Artificial
  Synthetic oligonucleotide
tagtatggaactgcctagctttggagtgtctgggattaatgaatctgccgacatg

SEQ ID NO: 452880 - DNA, 58 bp, Artificial
  Synthetic oligonucleotide
tagtatggatagactggtgctctaaagacgacaccacctttcgagatctaccacagag

SEQ ID NO: 452881 - DNA, 59 bp, Artificial
  Synthetic oligonucleotide
tagtatgggaaggagaaccactttggctacaactatatggccttcgagactacatatta

SEQ ID NO: 452882 - DNA, 55 bp, Artificial
  Synthetic oligonucleotide
tagtatgggcgtgcacagggttggaggtaggcaggggtcaacctttaggcgttgg

SEQ ID NO: 452883 - DNA, 60 bp, Artificial
  Synthetic oligonucleotide
tagtatgtcgtattctctcttgtgaatctgttgttgcggatctacagctttcatggagtg

SEQ ID NO: 452884 - DNA, 56 bp, Artificial
  Synthetic oligonucleotide
tagtattacccccgccccggggtcagagacatttgactaattgttgactatgctta

SEQ ID NO: 452885 - DNA, 58 bp, Artificial
  Synthetic oligonucleotide
tagtattacccccgtgccgggatcagagacatttgaccaatagttgactagtataata

SEQ ID NO: 452886 - DNA, 58 bp, Artificial
  Synthetic oligonucleotide
tagtattaccccgtgccgggatcagagacatttgactaaatgttgacttggaataata

SEQ ID NO: 452887 - DNA, 57 bp, Artificial
  Synthetic oligonucleotide
tagtattagcgctaataatagcaatagttgtgtggaccatagtattcatagaatatc

SEQ ID NO: 452888 - DNA, 60 bp, Artificial
  Synthetic oligonucleotide
tagtattaggctagagtacacattgacaccttctagttcatcttcatcctatcgtccgtt

SEQ ID NO: 452889 - DNA, 52 bp, Artificial
  Synthetic oligonucleotide
tagtattattgatggcaggggtgccaaatgatgtgatacagaggatggaaaa

SEQ ID NO: 452890 - DNA, 60 bp, Artificial
  Synthetic oligonucleotide
tagtattgaaggcggtagatattatgagcacgctccaatagagttgatttacgcatgcag

SEQ ID NO: 452891 - DNA, 60 bp, Artificial
  Synthetic oligonucleotide
tagtattgagtccagttatgtgtgctcaggacttgttggtgacacaccaagaaatgatga

SEQ ID NO: 452892 - DNA, 60 bp, Artificial
  Synthetic oligonucleotide
tagtattggcccagcgttggtcatgacaacggcccaacgctcagccaaccgttgagccag

SEQ ID NO: 452893 - DNA, 55 bp, Artificial
  Synthetic oligonucleotide
tagtattggtattgttatcagggttaatggtattaccagggtttactaatcaata

SEQ ID NO: 452894 - DNA, 55 bp, Artificial
  Synthetic oligonucleotide
tagtcaaacagatctggcccaagaaatctttgctataaaagtggatgttgcatcc

SEQ ID NO: 452895 - DNA, 60 bp, Artificial
  Synthetic oligonucleotide
tagtcaacgtctaggttaatatccattacatttgcctcatgcatcattattatgtcgatc

SEQ ID NO: 452896 - DNA, 60 bp, Artificial
  Synthetic oligonucleotide
tagtcaactacaaagctatgaacaaagccaccataggagacgcatacaatcttcccaaca

SEQ ID NO: 452897 - DNA, 59 bp, Artificial
  Synthetic oligonucleotide
tagtcaagtattaccgcgtgagaagctccttcaggcggtctgtgaacgtgaacgaaggc

SEQ ID NO: 452898 - DNA, 56 bp, Artificial
  Synthetic oligonucleotide
tagtcaatccggaggggattaaacaacagattttgcgagtcggtatccgaacttca

SEQ ID NO: 452899 - DNA, 60 bp, Artificial
  Synthetic oligonucleotide
tagtcacaagggagccctacttgtcctgcgacccacaaggctgcaggatgtttgctctga

SEQ ID NO: 452900 - DNA, 60 bp, Artificial
  Synthetic oligonucleotide
tagtcacaagggagccttatgttagctgtgataatgacaactgctggtcctttgctcttg

SEQ ID NO: 452901 - DNA, 60 bp, Artificial
  Synthetic oligonucleotide
tagtcacctacactcagaccatagccatcagtaatctctgtgtctacctgttggtctctc

SEQ ID NO: 452902 - DNA, 60 bp, Artificial
  Synthetic oligonucleotide
tagtcacgtgttgacatgcatacagcgcgagaggtactgtatgcatgtcaacacacaccg

SEQ ID NO: 452903 - DNA, 55 bp, Artificial
  Synthetic oligonucleotide
tagtcactgactgcatctaattaaactgtcaaccgaaatcggtgcataaatccta

SEQ ID NO: 452904 - DNA, 60 bp, Artificial
  Synthetic oligonucleotide
tagtcagacttgggatgctctagagcaggtaattatgcgtagtcagtatgttactgctcg

SEQ ID NO: 452905 - DNA, 51 bp, Artificial
  Synthetic oligonucleotide
tagtcagagcactaatagagggtcagcccctagaggttctactggacacag

SEQ ID NO: 452906 - DNA, 60 bp, Artificial
  Synthetic oligonucleotide
tagtcagagcgggaccaacgccactgagaccttcagacctggaggaggagatatgaggga

SEQ ID NO: 452907 - DNA, 58 bp, Artificial
  Synthetic oligonucleotide
tagtcagcaccactattgggtagttcacctctcttaacaactctggaatggttgaatt

SEQ ID NO: 452908 - DNA, 60 bp, Artificial
  Synthetic oligonucleotide
tagtcagcatcctactaagttcactcctcaaaaatgatgtgccgctagctgggccactaa

SEQ ID NO: 452909 - DNA, 51 bp, Artificial
  Synthetic oligonucleotide
tagtcagcccgcctacggcagtctcggtatacaccaagactccgtacgggc

SEQ ID NO: 452910 - DNA, 52 bp, Artificial
  Synthetic oligonucleotide
tagtcaggagggctttaaatcgattatttaagtatgggaggatagatggaac

SEQ ID NO: 452911 - DNA, 55 bp, Artificial
  Synthetic oligonucleotide
tagtcaggataaacacagagcctccgttcctagacactaacctgaccgcggcaca

SEQ ID NO: 452912 - DNA, 60 bp, Artificial
  Synthetic oligonucleotide
tagtcaggcacactacaggtttgtggagaaggacccatactcggctgcggggtatgtcac

SEQ ID NO: 452913 - DNA, 59 bp, Artificial
  Synthetic oligonucleotide
tagtcaggttgacccctacaccaatctccatcatcgcaggtgacagtccgcatgttttg

SEQ ID NO: 452914 - DNA, 60 bp, Artificial
  Synthetic oligonucleotide
tagtcagtatatatgtagccctgttctcacagataatccccgaccgaatgacccaactgt

SEQ ID NO: 452915 - DNA, 60 bp, Artificial
  Synthetic oligonucleotide
tagtcagtctcctgttaaacatccttctcaatatgaaggagtgttttatactgatggctc

SEQ ID NO: 452916 - DNA, 56 bp, Artificial
  Synthetic oligonucleotide
tagtcagtgcgtcgagtccaacgatgagtgtgtagaccaagatggttacagttgcg

SEQ ID NO: 452917 - DNA, 55 bp, Artificial
  Synthetic oligonucleotide
tagtcagtggtgatgactcgttgatcttctcgaaacacgatctcccaaatgtcac

SEQ ID NO: 452918 - DNA, 60 bp, Artificial
  Synthetic oligonucleotide
tagtcagttcagttgattcaactatcaatgcagttaatgagaaggtggaaaatgtaggca

SEQ ID NO: 452919 - DNA, 51 bp, Artificial
  Synthetic oligonucleotide
tagtcataccttggtgctggaaatattaaaactcgaatagtttaatttaac

SEQ ID NO: 452920 - DNA, 60 bp, Artificial
  Synthetic oligonucleotide
tagtcatacgtatgctttagaagcgcgtattggttatatgcaaatgaggggttgtggctc

SEQ ID NO: 452921 - DNA, 50 bp, Artificial
  Synthetic oligonucleotide
tagtcatatacacactagatgacgttacacttgtttcagagtcaccagac

SEQ ID NO: 452922 - DNA, 50 bp, Artificial
  Synthetic oligonucleotide
tagtcatattagatccagtcacaagttcagatatgagaggtgcactagtt

SEQ ID NO: 452923 - DNA, 60 bp, Artificial
  Synthetic oligonucleotide
tagtcatccgcgcctgcaatgcatatggactgccagtagcatgtccaaataagtatacga

SEQ ID NO: 452924 - DNA, 60 bp, Artificial
  Synthetic oligonucleotide
tagtcatcctatctatttggggatgcatgattacgaagtttcatacgagcagatcaaaat

SEQ ID NO: 452925 - DNA, 60 bp, Artificial
  Synthetic oligonucleotide
tagtcatgatgcagtcccagttgccacgacctgaatcaagggcaatgtaacttccgcccc

SEQ ID NO: 452926 - DNA, 60 bp, Artificial
  Synthetic oligonucleotide
tagtcatgtaacttataatcatcaggaggcagcgaagtatgaaaatcatactgagaatgc

SEQ ID NO: 452927 - DNA, 55 bp, Artificial
  Synthetic oligonucleotide
tagtcattctgtaataactgttccggttgttggcgcccgtcctatgaccggcagc

SEQ ID NO: 452928 - DNA, 60 bp, Artificial
  Synthetic oligonucleotide
tagtcattgaattggaccgtaataccttccgctcccactggccatagtccacatgggaga

SEQ ID NO: 452929 - DNA, 60 bp, Artificial
  Synthetic oligonucleotide
tagtcattggggacgacaacgttgatatgcaaattcgatccgagcaggcgattagtcggt

SEQ ID NO: 452930 - DNA, 55 bp, Artificial
  Synthetic oligonucleotide
tagtccaaggaagtacataccagccgccgcctctacgcacgcagataccgtgagc

SEQ ID NO: 452931 - DNA, 60 bp, Artificial
  Synthetic oligonucleotide
tagtccacattgtttaatattaactgatttagatccaactgcagaacagctccaagtaaa

SEQ ID NO: 452932 - DNA, 50 bp, Artificial
  Synthetic oligonucleotide
tagtccagagcaaacggctactggtaaagacacatcaaatccgttaaagg

SEQ ID NO: 452933 - DNA, 60 bp, Artificial
  Synthetic oligonucleotide
tagtccaggcatgcaagacgctggcttccaaaatcagaaggagctaaccaagatgcagct

SEQ ID NO: 452934 - DNA, 50 bp, Artificial
  Synthetic oligonucleotide
tagtccaggtctgtacgggaaaccgtcgggctacgctgccacgatgcatc

SEQ ID NO: 452935 - DNA, 58 bp, Artificial
  Synthetic oligonucleotide
tagtcccacattcgcgcgatttggttttcgcgtgaaagtagaggatcctgtctgggaa

SEQ ID NO: 452936 - DNA, 57 bp, Artificial
  Synthetic oligonucleotide
tagtcccactgggcaccggctggggcttctgggtctcatccaacctcctaattacaa

SEQ ID NO: 452937 - DNA, 59 bp, Artificial
  Synthetic oligonucleotide
tagtcccagtagttcttaggatatgacatatcagccattaagaaaacaattcccgaaga

SEQ ID NO: 452938 - DNA, 59 bp, Artificial
  Synthetic oligonucleotide
tagtcccattttagaagaatccacacacaatgcgtgaacaataaaagcctaagatcctc

SEQ ID NO: 452939 - DNA, 60 bp, Artificial
  Synthetic oligonucleotide
tagtcccctggtccctatctccacccgccaggcatgtgtgtcagtttgcagggccatcct

SEQ ID NO: 452940 - DNA, 59 bp, Artificial
  Synthetic oligonucleotide
tagtccctgcagtcaaaacagagaacagtaggagtcttttagctagaaatgtttctcaa

SEQ ID NO: 452941 - DNA, 58 bp, Artificial
  Synthetic oligonucleotide
tagtccgaaaaaccagatttctccctgtagccggtggaacaagcagtgtgtatatcga

SEQ ID NO: 452942 - DNA, 59 bp, Artificial
  Synthetic oligonucleotide
tagtccgcgggaaatgtcaacactttagccgatatttagctgaacataagggcgctgaa

SEQ ID NO: 452943 - DNA, 60 bp, Artificial
  Synthetic oligonucleotide
tagtccgttttgatggaacaatgcatcatgcaatacacactgttttgaaacagtttaaac

SEQ ID NO: 452944 - DNA, 59 bp, Artificial
  Synthetic oligonucleotide
tagtcctcaggactttggtcaggtatttaacatgttcgacaatgaacccagtactgcaa

SEQ ID NO: 452945 - DNA, 57 bp, Artificial
  Synthetic oligonucleotide
tagtcctccatgttagatcaaaattctcaagaacgtactagggagctttgtgtcccc

SEQ ID NO: 452946 - DNA, 59 bp, Artificial
  Synthetic oligonucleotide
tagtcctccggcccctgaatgcggataatcctaactgtggagcagatacccacgaacca

SEQ ID NO: 452947 - DNA, 55 bp, Artificial
  Synthetic oligonucleotide
tagtcctgactttacaggcggggctagtggttcatggggcgaagaaaacattccg

SEQ ID NO: 452948 - DNA, 57 bp, Artificial
  Synthetic oligonucleotide
tagtccttacaagttcgtttaattggcccatggacattgtaatgttcgactccgctc

SEQ ID NO: 452949 - DNA, 52 bp, Artificial
  Synthetic oligonucleotide
tagtccttctcaagtcagcttccaggtacatggggaagacaatgggaggagc

SEQ ID NO: 452950 - DNA, 60 bp, Artificial
  Synthetic oligonucleotide
tagtcgaacttccaggtcaggatttgagatactgaggataaagaatggttggacacagac

SEQ ID NO: 452951 - DNA, 55 bp, Artificial
  Synthetic oligonucleotide
tagtcgactgtattcaactcttaggcaaattcatcaaacacgttaacagtcaagg

SEQ ID NO: 452952 - DNA, 57 bp, Artificial
  Synthetic oligonucleotide
tagtcgagtacaaagtcggaacctcgatgactttacctgccacctgggcagagaaag

SEQ ID NO: 452953 - DNA, 50 bp, Artificial
  Synthetic oligonucleotide
tagtcgagtggcaaaatgtgtcggggctaacaacagttgcccacatgcgc

SEQ ID NO: 452954 - DNA, 60 bp, Artificial
  Synthetic oligonucleotide
tagtcgataaactgacgggtatcgatctatcgcatctcaaggttgcggagatccatccgc

SEQ ID NO: 452955 - DNA, 58 bp, Artificial
  Synthetic oligonucleotide
tagtcgcacactgtttacccaaactgttggcgaagagtccagaagtcagtgggttgaa

SEQ ID NO: 452956 - DNA, 57 bp, Artificial
  Synthetic oligonucleotide
tagtcgcacttacccgccacacagagaagtgcgttattcttgacgcccccggcttgt

SEQ ID NO: 452957 - DNA, 51 bp, Artificial
  Synthetic oligonucleotide
tagtcgcatccccgtgggtagtagtggttccacggtgtgtgttggtaatga

SEQ ID NO: 452958 - DNA, 59 bp, Artificial
  Synthetic oligonucleotide
tagtcgccgcctggtcactcggtgctcaactgagataaagaccctggtctgttaggacc

SEQ ID NO: 452959 - DNA, 60 bp, Artificial
  Synthetic oligonucleotide
tagtcgcgaatctgtttcaggtgccccagaatcctgtagtcgacgggattctcgcttcac

SEQ ID NO: 452960 - DNA, 59 bp, Artificial
  Synthetic oligonucleotide
tagtcgctaattatgattgggtgcctacttcaaccacaaaagtatacaagcaagtccca

SEQ ID NO: 452961 - DNA, 60 bp, Artificial
  Synthetic oligonucleotide
tagtcgctttgaccaacatgtgtcagagcaggcgcttaagtgggaacacgggatatacaa

SEQ ID NO: 452962 - DNA, 50 bp, Artificial
  Synthetic oligonucleotide
tagtcggatggaggttcccaggacggagaggcacgagtggtcgctcctga

SEQ ID NO: 452963 - DNA, 60 bp, Artificial
  Synthetic oligonucleotide
tagtcggctatggtgagtggccttcctactgctcggattctgacgctacagcagtggata

SEQ ID NO: 452964 - DNA, 60 bp, Artificial
  Synthetic oligonucleotide
tagtcggctcggtgtccaacgatgacgacccagcgaatggtggtttggcgatcttccgca

SEQ ID NO: 452965 - DNA, 53 bp, Artificial
  Synthetic oligonucleotide
tagtcggcttccggaaattgaaacgaaccattttcgccgacggagtgtatagg

SEQ ID NO: 452966 - DNA, 59 bp, Artificial
  Synthetic oligonucleotide
tagtcgggaatgcctagcaaagcttgtgcacgtttaacgtatttgagactggatcgatt

SEQ ID NO: 452967 - DNA, 58 bp, Artificial
  Synthetic oligonucleotide
tagtcggggttggcagggtatcggatgataccgagcctcgtggctcggttgaactgga

SEQ ID NO: 452968 - DNA, 55 bp, Artificial
  Synthetic oligonucleotide
tagtcggtaggtatggccgccgtacgaagttgtacgaagcagcccatgcagacgt

SEQ ID NO: 452969 - DNA, 60 bp, Artificial
  Synthetic oligonucleotide
tagtcggtccactgactttgaatcctaccaaacgtgatccacagggccaaggctctgcga

SEQ ID NO: 452970 - DNA, 60 bp, Artificial
  Synthetic oligonucleotide
tagtcggtctatctcttttagagaccagactcactctgggagggctgccctgaaggcatc

SEQ ID NO: 452971 - DNA, 60 bp, Artificial
  Synthetic oligonucleotide
tagtcgtactaggatcacaagaaggagcaatgcacactgcgttgactggagcgacagaaa

SEQ ID NO: 452972 - DNA, 60 bp, Artificial
  Synthetic oligonucleotide
tagtcgtctgatcggtttgggcctctcgacagaccaaaagtctacgcaatccgctgtgta

SEQ ID NO: 452973 - DNA, 59 bp, Artificial
  Synthetic oligonucleotide
tagtcgtggttgacacgcttgattcttacaagaatcaaagttgcctttgagagttactc

SEQ ID NO: 452974 - DNA, 58 bp, Artificial
  Synthetic oligonucleotide
tagtcgttatcgtgtactatcgctcggggctcgtattgtaccctatgatcccaattgt

SEQ ID NO: 452975 - DNA, 55 bp, Artificial
  Synthetic oligonucleotide
tagtctaaatgactcagtctaccttaggatgactttcgggcatctctatgaaact

SEQ ID NO: 452976 - DNA, 60 bp, Artificial
  Synthetic oligonucleotide
tagtctaaatgattcagtgtacctcagaatggtcttcggacatttgtatgagactttcca

SEQ ID NO: 452977 - DNA, 54 bp, Artificial
  Synthetic oligonucleotide
tagtctacgatttcggaggaggcacttttgatagttccttactcgtggttgggg

SEQ ID NO: 452978 - DNA, 60 bp, Artificial
  Synthetic oligonucleotide
tagtctacgcttgcgtaggggcaaatgcgcatgatgtagatgatccgcaggaggatgaaa

SEQ ID NO: 452979 - DNA, 51 bp, Artificial
  Synthetic oligonucleotide
tagtctagagccctggaagcatccaggaagtcagcccaggactgcttgtac

SEQ ID NO: 452980 - DNA, 55 bp, Artificial
  Synthetic oligonucleotide
tagtctagccacatttcagtcttgttgattcgcaactcttgacccaattcgtcca

SEQ ID NO: 452981 - DNA, 60 bp, Artificial
  Synthetic oligonucleotide
tagtctagtgaagtgccacatgtataacacaaagaaggcaaaaggatggttttacaggca

SEQ ID NO: 452982 - DNA, 50 bp, Artificial
  Synthetic oligonucleotide
tagtctccccttcaattttagtcgccatgtacaactctggaacctttgag

SEQ ID NO: 452983 - DNA, 53 bp, Artificial
  Synthetic oligonucleotide
tagtctcggaaatcgcctcacagactggggatgaacgaaccgttagagggact

SEQ ID NO: 452984 - DNA, 55 bp, Artificial
  Synthetic oligonucleotide
tagtctgatgatatcggcggacggagttgaagcaacgacagagcgatgggaagaa

SEQ ID NO: 452985 - DNA, 57 bp, Artificial
  Synthetic oligonucleotide
tagtctgccacgatactttccaaacgtgtaagcatcgtcaggatgcttataccggaa

SEQ ID NO: 452986 - DNA, 59 bp, Artificial
  Synthetic oligonucleotide
tagtctgcgtattgggacgcaagtttcgatcatccagagcgttgaaaccgccgtgcgtc

SEQ ID NO: 452987 - DNA, 51 bp, Artificial
  Synthetic oligonucleotide
tagtctggatgccctacccctactgtcgggtcttgtctggtaccaatcaga

SEQ ID NO: 452988 - DNA, 58 bp, Artificial
  Synthetic oligonucleotide
tagtctggtacgcgtatacaaacatgttgggtcaaaagtctgacacgtccatcctctt

SEQ ID NO: 452989 - DNA, 60 bp, Artificial
  Synthetic oligonucleotide
tagtctgtacgatagcattgataccatggcttgggaaaacctcaaacagtatgaagactt

SEQ ID NO: 452990 - DNA, 55 bp, Artificial
  Synthetic oligonucleotide
tagtctgtcattgcgatggggatgaggaaggtcactttcactgcactcattgcgg

SEQ ID NO: 452991 - DNA, 56 bp, Artificial
  Synthetic oligonucleotide
tagtctgttagaattgtcagggtcagtcatgcgaggtgcctctcctgagcccccca

SEQ ID NO: 452992 - DNA, 60 bp, Artificial
  Synthetic oligonucleotide
tagtcttagatgcatataaacatatagacttggacaaacttaagattatagcttatgggg

SEQ ID NO: 452993 - DNA, 57 bp, Artificial
  Synthetic oligonucleotide
tagtcttagcaacaggactaagaaacgtccctcagattgagtcaaggggattgtttg

SEQ ID NO: 452994 - DNA, 55 bp, Artificial
  Synthetic oligonucleotide
tagtcttatttcagcagatagcacaacatcaccagtgagtggatcaaagttttgg

SEQ ID NO: 452995 - DNA, 50 bp, Artificial
  Synthetic oligonucleotide
tagtcttcacaatgtccgcttattatgatgcacaccctgacacaaggaaa

SEQ ID NO: 452996 - DNA, 56 bp, Artificial
  Synthetic oligonucleotide
tagtcttgggtatctaatgtgtaaaccattcctcactggaacaacaacagggaaaa

SEQ ID NO: 452997 - DNA, 59 bp, Artificial
  Synthetic oligonucleotide
tagtctttgaagagagtccatctgctccaccctacgatggctaaagggaggccctcggc

SEQ ID NO: 452998 - DNA, 60 bp, Artificial
  Synthetic oligonucleotide
tagtctttgacagactcctcaacatctaagcatgtatactatgcggtatagacatggagc

SEQ ID NO: 452999 - DNA, 60 bp, Artificial
  Synthetic oligonucleotide
tagtgaaaagggactaaagtctgacttggcagagcaccccgcctacgtgcgtcagcagaa

SEQ ID NO: 453000 - DNA, 51 bp, Artificial
  Synthetic oligonucleotide
tagtgaaaataccggaatcagatatgatagatgtcccaagggtgagcattg

SEQ ID NO: 453001 - DNA, 50 bp, Artificial
  Synthetic oligonucleotide
tagtgaaaatcctaagttgcaggttctttcattagtgagtgaacatgaag

SEQ ID NO: 453002 - DNA, 60 bp, Artificial
  Synthetic oligonucleotide
tagtgaaactaataagctatctgatgttgagtcctcgtcagactctagttcgctcttgag

SEQ ID NO: 453003 - DNA, 58 bp, Artificial
  Synthetic oligonucleotide
tagtgaaagaggagagtggaaacggaggagcccatggttccggagcatttgcgaatat

SEQ ID NO: 453004 - DNA, 60 bp, Artificial
  Synthetic oligonucleotide
tagtgaaatacgcaccatattgccagccctcacatcacacatatgggcatatgtgtagag

SEQ ID NO: 453005 - DNA, 60 bp, Artificial
  Synthetic oligonucleotide
tagtgaacccttgaatggcaatctcaagcgcctctgtagggaagccaagaatgtccagga

SEQ ID NO: 453006 - DNA, 53 bp, Artificial
  Synthetic oligonucleotide
tagtgaacgacgctgtagttcaagcagactatactagcaattggatcagtgaa

SEQ ID NO: 453007 - DNA, 55 bp, Artificial
  Synthetic oligonucleotide
tagtgaactagggtgttacactatcaatagagtgaggtcattcaagctatgcgaa

SEQ ID NO: 453008 - DNA, 60 bp, Artificial
  Synthetic oligonucleotide
tagtgaagacaatcacagatgaccgggttgaagtgaccaatgctacagagttagttcaaa

SEQ ID NO: 453009 - DNA, 60 bp, Artificial
  Synthetic oligonucleotide
tagtgaagcaaaacccatctaaggaagcagtgacagaggtgtgcttaaaggatgacgtga

SEQ ID NO: 453010 - DNA, 50 bp, Artificial
  Synthetic oligonucleotide
tagtgaagctaaggagaagagagtcctttacagtattccctacaatgggg

SEQ ID NO: 453011 - DNA, 53 bp, Artificial
  Synthetic oligonucleotide
tagtgaagttactttctactgtaccacacttgctggtgctgtccaagaaaatc

SEQ ID NO: 453012 - DNA, 50 bp, Artificial
  Synthetic oligonucleotide
tagtgaataggtacagtagagatgtcttcgctctgtgctcttacctgctc

SEQ ID NO: 453013 - DNA, 58 bp, Artificial
  Synthetic oligonucleotide
tagtgaatatcctagggtcatgggtaaaaccccagtgtattggctatgagaatgttct

SEQ ID NO: 453014 - DNA, 60 bp, Artificial
  Synthetic oligonucleotide
tagtgaatcagatacctcttttgtcgagcatcttgaaacaattcaagatataccgacaaa

SEQ ID NO: 453015 - DNA, 60 bp, Artificial
  Synthetic oligonucleotide
tagtgaatcgcacagtgggtgtactgcagtattgcttggccgacatagtatatttggtga

SEQ ID NO: 453016 - DNA, 60 bp, Artificial
  Synthetic oligonucleotide
tagtgaatcgtctaatcgccgagtgaagcgtgactcatacgcaggagtggctaaacgtgg

SEQ ID NO: 453017 - DNA, 50 bp, Artificial
  Synthetic oligonucleotide
tagtgaatctatcttttactacactagtgaacttgacattagaggaataa

SEQ ID NO: 453018 - DNA, 60 bp, Artificial
  Synthetic oligonucleotide
tagtgacaagagcaccacgtatcctgctggaggacagtttgcgcacctttgggcgtataa

SEQ ID NO: 453019 - DNA, 54 bp, Artificial
  Synthetic oligonucleotide
tagtgacaagatgagtgagtatgaggagaactcacctgagttggaggaaagcct

SEQ ID NO: 453020 - DNA, 60 bp, Artificial
  Synthetic oligonucleotide
tagtgacaatccgagcgttatccgtgccgcaggaattgcgaacttgcgtaaacacgccta

SEQ ID NO: 453021 - DNA, 59 bp, Artificial
  Synthetic oligonucleotide
tagtgacaattcaaggggtatgaactatgaaactccaatgtttagtaaggtggcagctc

SEQ ID NO: 453022 - DNA, 55 bp, Artificial
  Synthetic oligonucleotide
tagtgacagcgagagcagtggaacttctgggacgcagcagtctcaggggattaca

SEQ ID NO: 453023 - DNA, 59 bp, Artificial
  Synthetic oligonucleotide
tagtgacatagcttggagggggccaatggagattgaatttttgaagaggacaccagctt

SEQ ID NO: 453024 - DNA, 55 bp, Artificial
  Synthetic oligonucleotide
tagtgacatttgggtgttaccaccaccttcagaggagtctcaggtcgatgcggca

SEQ ID NO: 453025 - DNA, 60 bp, Artificial
  Synthetic oligonucleotide
tagtgaccagttgtggtcactgtaataacaccgtgcgtctggttgtggagtgtacaggac

SEQ ID NO: 453026 - DNA, 59 bp, Artificial
  Synthetic oligonucleotide
tagtgacccggtctattacgctaaaggtgatcagggatgtttcaagtcgcataggatgg

SEQ ID NO: 453027 - DNA, 51 bp, Artificial
  Synthetic oligonucleotide
tagtgacccttaggattgacaaggcgattggccctgggaggatcatcgaca

SEQ ID NO: 453028 - DNA, 60 bp, Artificial
  Synthetic oligonucleotide
tagtgaccgttcacaccgtgtacgatatggcctgggctcttcggagacacctgaaatgga

SEQ ID NO: 453029 - DNA, 60 bp, Artificial
  Synthetic oligonucleotide
tagtgaccgtttgctaacagtgggtcatccatattatgatgtccgctcaggcgacggaca

SEQ ID NO: 453030 - DNA, 55 bp, Artificial
  Synthetic oligonucleotide
tagtgaccttaaatactactataaacatgacctgccagagaccaggacatcaaga

SEQ ID NO: 453031 - DNA, 59 bp, Artificial
  Synthetic oligonucleotide
tagtgacgccgcgacgacaatcgtgccgaatgtccccaaattggaacattcagacgtac

SEQ ID NO: 453032 - DNA, 54 bp, Artificial
  Synthetic oligonucleotide
tagtgactacggatccgaagacggcagaccccgtctacgggaaagtgttcaacc

SEQ ID NO: 453033 - DNA, 59 bp, Artificial
  Synthetic oligonucleotide
tagtgactccatcctgtagtattctttctgttaataagtagtcactaacctgaaggcaa

SEQ ID NO: 453034 - DNA, 60 bp, Artificial
  Synthetic oligonucleotide
tagtgactcccttgagacttaatagcagtactaaggtgttggatatgctcatagatagct

SEQ ID NO: 453035 - DNA, 51 bp, Artificial
  Synthetic oligonucleotide
tagtgactctctctcccgcacgcggccatgccttcgcctctgacgttaaaa

SEQ ID NO: 453036 - DNA, 53 bp, Artificial
  Synthetic oligonucleotide
tagtgactggatctgcagtaggatgtgacccagaagtcttttggtcaaccata

SEQ ID NO: 453037 - DNA, 58 bp, Artificial
  Synthetic oligonucleotide
tagtgagagcctgtggggggcgtatagctaaatttcatcggcacaaaataaacagggc

SEQ ID NO: 453038 - DNA, 53 bp, Artificial
  Synthetic oligonucleotide
tagtgagcaagctttagaatgggaacacggaatgtacctccggtgctttcgcg

SEQ ID NO: 453039 - DNA, 60 bp, Artificial
  Synthetic oligonucleotide
tagtgagcactgctgacggatgtttggttggaatacatagtttggcgaataatgtgcaga

SEQ ID NO: 453040 - DNA, 56 bp, Artificial
  Synthetic oligonucleotide
tagtgagcattgaccgatttttaagagtccgggaccaaagggggaatgtgctattg

SEQ ID NO: 453041 - DNA, 60 bp, Artificial
  Synthetic oligonucleotide
tagtgaggccgacaaggaggatgtcgtgtgctgctcaatgtcttatacctggacaggcgc

SEQ ID NO: 453042 - DNA, 60 bp, Artificial
  Synthetic oligonucleotide
tagtgaggccgacaaggaggatgtcgtgtgctgctccatgtcatactcctggaccggggc

SEQ ID NO: 453043 - DNA, 58 bp, Artificial
  Synthetic oligonucleotide
tagtgagtcaactcgttggttattgcccccactggacacgtcaagaattcttggcgtc

SEQ ID NO: 453044 - DNA, 56 bp, Artificial
  Synthetic oligonucleotide
tagtgagtttgtcacgggcgatatttctgctgggacagatgttgagacatcttctt

SEQ ID NO: 453045 - DNA, 59 bp, Artificial
  Synthetic oligonucleotide
tagtgataagacatgagtagcaccgctaatgcaatagctgatgcgtttctaggcgtact

SEQ ID NO: 453046 - DNA, 58 bp, Artificial
  Synthetic oligonucleotide
tagtgataagtggttgttcaggtctctttttgcgaagtcttctgtctagatatgtctg

SEQ ID NO: 453047 - DNA, 56 bp, Artificial
  Synthetic oligonucleotide
tagtgataagtggttgtttaggtctctattttatcgttcttctagttagttatgtc

SEQ ID NO: 453048 - DNA, 57 bp, Artificial
  Synthetic oligonucleotide
tagtgatagctaaagtatcacgcccatttacagtacggaactctaaaggacaaacca

SEQ ID NO: 453049 - DNA, 55 bp, Artificial
  Synthetic oligonucleotide
tagtgatcacattcatttacatgtctgacactaacgaggagaatagggacgaacc

SEQ ID NO: 453050 - DNA, 53 bp, Artificial
  Synthetic oligonucleotide
tagtgatgacaattggttaaattttgatggcacattattaggaaacttgacaa

SEQ ID NO: 453051 - DNA, 54 bp, Artificial
  Synthetic oligonucleotide
tagtgatggattgtgtacaaatccggaaggagaggaaatttaaatggcgacaag

SEQ ID NO: 453052 - DNA, 58 bp, Artificial
  Synthetic oligonucleotide
tagtgatgtaggccttctatacgaagtatcactaacatttaagacggtagatttacca

SEQ ID NO: 453053 - DNA, 57 bp, Artificial
  Synthetic oligonucleotide
tagtgatgtgactcgtggtacggggttaacacatagagttggtaagcgattttgcgt

SEQ ID NO: 453054 - DNA, 60 bp, Artificial
  Synthetic oligonucleotide
tagtgattccgaagatgagctcattgacgagccaaacttcgttcctggaatgcggatgaa

SEQ ID NO: 453055 - DNA, 59 bp, Artificial
  Synthetic oligonucleotide
tagtgcaccacttggtcttgggtgcagttgatccatgtaaagttacgtcctccgaggaa

SEQ ID NO: 453056 - DNA, 52 bp, Artificial
  Synthetic oligonucleotide
tagtgcacgactactcaggcaagagcatgcaactgttcgtgtactaaagaac

SEQ ID NO: 453057 - DNA, 52 bp, Artificial
  Synthetic oligonucleotide
tagtgcagatgtagtctattacgttggatcgggggacttacgtacactgcag

SEQ ID NO: 453058 - DNA, 56 bp, Artificial
  Synthetic oligonucleotide
tagtgcagcatagtttagatgatagtcaatttgacctatctcaaatgatacagtgg

SEQ ID NO: 453059 - DNA, 53 bp, Artificial
  Synthetic oligonucleotide
tagtgcagctaaaaccacgaccttaagtaaaacttcctttaggaagaggctcg

SEQ ID NO: 453060 - DNA, 59 bp, Artificial
  Synthetic oligonucleotide
tagtgcagcttgttaggcctgtacaaattaattgttccagacctacaaacaatacaaga

SEQ ID NO: 453061 - DNA, 59 bp, Artificial
  Synthetic oligonucleotide
tagtgcaggatacccttatgtaactatgggtattaagaagaaagatttgattgacaatc

SEQ ID NO: 453062 - DNA, 55 bp, Artificial
  Synthetic oligonucleotide
tagtgcagggtagtgtacactcgataataacgggtgaatcatatggtgaatcggt

SEQ ID NO: 453063 - DNA, 55 bp, Artificial
  Synthetic oligonucleotide
tagtgcagtgaccacagattgcaccttcatttatagcaagacagcccagctcctc

SEQ ID NO: 453064 - DNA, 60 bp, Artificial
  Synthetic oligonucleotide
tagtgcagttcaggacaaggtgatccccctgcttctctatgcatcgacgcccccccgtac

SEQ ID NO: 453065 - DNA, 60 bp, Artificial
  Synthetic oligonucleotide
tagtgcataatgcggggatgggagtagcagccggtaatttaacaatatacccgcatcagt

SEQ ID NO: 453066 - DNA, 60 bp, Artificial
  Synthetic oligonucleotide
tagtgcatcatcaaatctgtcataccataatatggtttttgaaaacagtatagtaactgt

SEQ ID NO: 453067 - DNA, 60 bp, Artificial
  Synthetic oligonucleotide
tagtgcatctgaatagcactaccatagagaaggaaatttgtcctaaagtggcagaataca

SEQ ID NO: 453068 - DNA, 54 bp, Artificial
  Synthetic oligonucleotide
tagtgcattagttttagggtaaagggcaaggtagagtgtttcgctctaagggcg

SEQ ID NO: 453069 - DNA, 60 bp, Artificial
  Synthetic oligonucleotide
tagtgccaccggtttgtactcaaatacgcttcgaaatgctattcttatatattatgtgtg

SEQ ID NO: 453070 - DNA, 55 bp, Artificial
  Synthetic oligonucleotide
tagtgcccctagtggaggctaccggtggtggggagccaattgaggtcaccccaga

SEQ ID NO: 453071 - DNA, 60 bp, Artificial
  Synthetic oligonucleotide
tagtgccctcgcgagagctatcggttaacctcgcagctagcatcgaaggagttacgcaga

SEQ ID NO: 453072 - DNA, 50 bp, Artificial
  Synthetic oligonucleotide
tagtgccggctttacgcacggcgcggctcagtaagtcacaggtacgactg

SEQ ID NO: 453073 - DNA, 60 bp, Artificial
  Synthetic oligonucleotide
tagtgccgtcatcagtctggaatgtcggcgaatacgtgtgtgttaggccggactggtggc

SEQ ID NO: 453074 - DNA, 59 bp, Artificial
  Synthetic oligonucleotide
tagtgccttacaccgcccggagccgaatacatggcaagtgtattcttggcccataagta

SEQ ID NO: 453075 - DNA, 52 bp, Artificial
  Synthetic oligonucleotide
tagtgcgactacgtttaaccccgttaattatccgggttttacatcgatgttc

SEQ ID NO: 453076 - DNA, 59 bp, Artificial
  Synthetic oligonucleotide
tagtgcgcgcatttccattttagacaaggctttaccgccctcataggttgcacttacca

SEQ ID NO: 453077 - DNA, 60 bp, Artificial
  Synthetic oligonucleotide
tagtgcgcttgaacaggattacacaacacatgacgcacttgatgcattactagcagctct

SEQ ID NO: 453078 - DNA, 53 bp, Artificial
  Synthetic oligonucleotide
tagtgcgcttgtcgtcctgccaaccaaccagctctccgtacaccacaaacgag

SEQ ID NO: 453079 - DNA, 54 bp, Artificial
  Synthetic oligonucleotide
tagtgcggaaggcggagtctcgcaaaagacccgccccttccggggaaggctata

SEQ ID NO: 453080 - DNA, 57 bp, Artificial
  Synthetic oligonucleotide
tagtgcggagctttataattggttcactttaaccaatttgaaaccagatgcgaacac

SEQ ID NO: 453081 - DNA, 60 bp, Artificial
  Synthetic oligonucleotide
tagtgcggatctacgtcatcaatgacgttgtaccaggcgtcattattgtatacctttgga

SEQ ID NO: 453082 - DNA, 59 bp, Artificial
  Synthetic oligonucleotide
tagtgcggcacagattaaggtctacgccaacattgccccaacctacgttcacgtggctg

SEQ ID NO: 453083 - DNA, 60 bp, Artificial
  Synthetic oligonucleotide
tagtgcggcagcagaacaatctgctgagggctattgaggcgcaacaacatctgctgcaac

SEQ ID NO: 453084 - DNA, 54 bp, Artificial
  Synthetic oligonucleotide
tagtgcgggctacaatcatgacgtctcaatactccgtgcatggatccgtactac

SEQ ID NO: 453085 - DNA, 53 bp, Artificial
  Synthetic oligonucleotide
tagtgcggggtacggttgagggaggcttcaccaaacccacacttattgggccg

SEQ ID NO: 453086 - DNA, 60 bp, Artificial
  Synthetic oligonucleotide
tagtgcgggtcgacgtcatcaatgacgttgtaccaagcttcattattgtacactctcggg

SEQ ID NO: 453087 - DNA, 60 bp, Artificial
  Synthetic oligonucleotide
tagtgcggtatgaagcaatcaggctggtgggcggctggaacaatccactgctagaaaccg

SEQ ID NO: 453088 - DNA, 59 bp, Artificial
  Synthetic oligonucleotide
tagtgcgtaactttccaaatggcactcgtaagttggccataggttcattaatagtgcca

SEQ ID NO: 453089 - DNA, 60 bp, Artificial
  Synthetic oligonucleotide
tagtgcgttctctgctgtcttaattttgatcggtcgagatcaaaacgaaactgtgcccaa

SEQ ID NO: 453090 - DNA, 60 bp, Artificial
  Synthetic oligonucleotide
tagtgctacctgctaatttgttgagcaacgaatcattaaatgaatctttgtcaccagatg

SEQ ID NO: 453091 - DNA, 60 bp, Artificial
  Synthetic oligonucleotide
tagtgctagtcaatataggttcaccacaccagacacatactcctcagctggttacatcac

SEQ ID NO: 453092 - DNA, 51 bp, Artificial
  Synthetic oligonucleotide
tagtgctatctaatccgccaaataaacgctccgtgctatccgcgctattct

SEQ ID NO: 453093 - DNA, 60 bp, Artificial
  Synthetic oligonucleotide
tagtgctatgggctatgcccatggtagggggtaggctctagcgttgctaggagaggctta

SEQ ID NO: 453094 - DNA, 60 bp, Artificial
  Synthetic oligonucleotide
tagtgctattagcttgcttaataccacagcaatagtggtagctgagggaacagatagaat

SEQ ID NO: 453095 - DNA, 57 bp, Artificial
  Synthetic oligonucleotide
tagtgctgagggtttggccgggctggatgaagttaggaaagtaatgcccggtatgac

SEQ ID NO: 453096 - DNA, 57 bp, Artificial
  Synthetic oligonucleotide
tagtgctgtgcaagttaacgttcggtttcctgaacgctttcttgtgtttatcaacga

SEQ ID NO: 453097 - DNA, 60 bp, Artificial
  Synthetic oligonucleotide
tagtgctgttagcttgttcaatgcagtagccatagcagtagctgagggaacagataggat

SEQ ID NO: 453098 - DNA, 59 bp, Artificial
  Synthetic oligonucleotide
tagtgctgttttaacaccgtggaaagatattctgacgacaggtgccattttcccagcaa

SEQ ID NO: 453099 - DNA, 52 bp, Artificial
  Synthetic oligonucleotide
tagtgcttttactaaacccagttctatcaaagaaatgcagtcacaatcatct

SEQ ID NO: 453100 - DNA, 54 bp, Artificial
  Synthetic oligonucleotide
tagtggaaaatgacgtcatttacttaaagacgaagtcttgcgacaaggggggcc

SEQ ID NO: 453101 - DNA, 51 bp, Artificial
  Synthetic oligonucleotide
tagtggaactggcgcacgactcgcctcgcctagcgattataaagcgggcca

SEQ ID NO: 453102 - DNA, 58 bp, Artificial
  Synthetic oligonucleotide
tagtggaatccgcaaaagcgatactgggggggtctgctgtacgagttgatcaaaagtg

SEQ ID NO: 453103 - DNA, 60 bp, Artificial
  Synthetic oligonucleotide
tagtggaccaagtcgcgaatcaagctctgaagaaaccacgcggcaagcgtggctcaaaga

SEQ ID NO: 453104 - DNA, 53 bp, Artificial
  Synthetic oligonucleotide
tagtggactggcttggggggccactaagaacagcaggcgtcatactcggctac

SEQ ID NO: 453105 - DNA, 60 bp, Artificial
  Synthetic oligonucleotide
tagtggagatcaatgttgcatctaattgggaaggtgtatgtcgtctgtaatgactcgttg

SEQ ID NO: 453106 - DNA, 60 bp, Artificial
  Synthetic oligonucleotide
tagtggagatctatgttacatcttatcggaaaagtccacgacgcttgcagagattcgttg

SEQ ID NO: 453107 - DNA, 60 bp, Artificial
  Synthetic oligonucleotide
tagtggagatctatgttgcatctgaccgggaaagtccatgaagcctgcaaggattcgtta

SEQ ID NO: 453108 - DNA, 53 bp, Artificial
  Synthetic oligonucleotide
tagtggagcgtgtcaacatgtgggatccattgttgaatgagttccccgagtct

SEQ ID NO: 453109 - DNA, 55 bp, Artificial
  Synthetic oligonucleotide
tagtggagttcgtagggcgctcattccaggtcaaggcttcagtgcaacacggccc

SEQ ID NO: 453110 - DNA, 53 bp, Artificial
  Synthetic oligonucleotide
tagtggatcagctgcacaaatagcgttagagttacatggaccgcaggcaagta

SEQ ID NO: 453111 - DNA, 60 bp, Artificial
  Synthetic oligonucleotide
tagtggatttatataaaactcaacagtcaggacaatatgtgagacagaattggcgtattt

SEQ ID NO: 453112 - DNA, 52 bp, Artificial
  Synthetic oligonucleotide
tagtggcacataccgcttgacagggtgccatcaataggttatgatagataca

SEQ ID NO: 453113 - DNA, 60 bp, Artificial
  Synthetic oligonucleotide
tagtggcagtggggaccacgcgtacatagagtgaatacggctggaagccgacagtgaaat

SEQ ID NO: 453114 - DNA, 60 bp, Artificial
  Synthetic oligonucleotide
tagtggccaaccctctacagttgttgacaactcgctcatggttgttttagccatgcacta

SEQ ID NO: 453115 - DNA, 60 bp, Artificial
  Synthetic oligonucleotide
tagtggcctctaccagcaaatcagacaagatctgcattggataccatgccaacaactcga

SEQ ID NO: 453116 - DNA, 60 bp, Artificial
  Synthetic oligonucleotide
tagtggcgatggaaaaccaacacactatcgatttgactgattcggagatgaacaagttat

SEQ ID NO: 453117 - DNA, 55 bp, Artificial
  Synthetic oligonucleotide
tagtggctcaacttaatggaagtggtcttagcgtacgcgacttagttacggttta

SEQ ID NO: 453118 - DNA, 52 bp, Artificial
  Synthetic oligonucleotide
tagtggctcaagctcctgtggatgaggtcagcttccactctgtagtacagca

SEQ ID NO: 453119 - DNA, 60 bp, Artificial
  Synthetic oligonucleotide
tagtggctcctcttcttgatgattctgccaccatgagtgacatattcaacagtccacagg

SEQ ID NO: 453120 - DNA, 58 bp, Artificial
  Synthetic oligonucleotide
tagtggctgctggctataagactagggatggtgccgaggcacaccatattgaagacat

SEQ ID NO: 453121 - DNA, 55 bp, Artificial
  Synthetic oligonucleotide
tagtggcttggtgggcgcgcttgttgctgaaccccagtcaggcccgagcactgaa

SEQ ID NO: 453122 - DNA, 55 bp, Artificial
  Synthetic oligonucleotide
tagtgggaacgaccgataagtcgggcgcgcctacctacaactggggtgaaaatga

SEQ ID NO: 453123 - DNA, 60 bp, Artificial
  Synthetic oligonucleotide
tagtgggagctgattgcgggtcttcggcactctacttcctgttaagaggtgcatcattcg

SEQ ID NO: 453124 - DNA, 56 bp, Artificial
  Synthetic oligonucleotide
tagtgggcaggattgtcctgtccgggaagccggcagttatacccaacagggaagtc

SEQ ID NO: 453125 - DNA, 55 bp, Artificial
  Synthetic oligonucleotide
tagtgggcgtggtgtgcgctgctgtcttgaggcgccatgtaggaccatcagaggg

SEQ ID NO: 453126 - DNA, 55 bp, Artificial
  Synthetic oligonucleotide
tagtgggctgtgcacctcctttaggtgaacattggggacagggcaagcaatgtac

SEQ ID NO: 453127 - DNA, 60 bp, Artificial
  Synthetic oligonucleotide
tagtggggatctacgtcatcaatgacgttataccaagcatcattgctgtatacttttgga

SEQ ID NO: 453128 - DNA, 60 bp, Artificial
  Synthetic oligonucleotide
tagtggggctgcacacagtgttccaattactgtaacaattgccccaatgttccttgagct

SEQ ID NO: 453129 - DNA, 58 bp, Artificial
  Synthetic oligonucleotide
tagtgggggtcgacgtcatcgatgacgttgtaccaagcattattactgtagacctttg

SEQ ID NO: 453130 - DNA, 60 bp, Artificial
  Synthetic oligonucleotide
tagtggggtcgacgcggagggtgtcgtgtgttgctcgatgtcttattcctggacaggcgc

SEQ ID NO: 453131 - DNA, 60 bp, Artificial
  Synthetic oligonucleotide
tagtggggtggcctgaggttagggaaagaatgagacgtgcccctgcagcagcaccaggag

SEQ ID NO: 453132 - DNA, 57 bp, Artificial
  Synthetic oligonucleotide
tagtgggtggaggcgattcaatagctgaccccttaagtccgggtgagaacgacatgg

SEQ ID NO: 453133 - DNA, 59 bp, Artificial
  Synthetic oligonucleotide
tagtgggtggtggttggatgttatgggattacttcacgagagttatacgtgagccagta

SEQ ID NO: 453134 - DNA, 60 bp, Artificial
  Synthetic oligonucleotide
tagtgggttatgtgatgtaaatcacttactgaatcaccgttgaagcagtcttgaaggaat

SEQ ID NO: 453135 - DNA, 60 bp, Artificial
  Synthetic oligonucleotide
tagtgggttttcaggcatccagtatgaaaagtggattactgctggacttgttatgccaga

SEQ ID NO: 453136 - DNA, 60 bp, Artificial
  Synthetic oligonucleotide
tagtggtacctgattatcaatgttatgtagacagagtagatacatggttgcaagggaaag

SEQ ID NO: 453137 - DNA, 60 bp, Artificial
  Synthetic oligonucleotide
tagtggtactgtggcttattcccttgcatgtagctgtttgtgtctccaaacattgcccat

SEQ ID NO: 453138 - DNA, 55 bp, Artificial
  Synthetic oligonucleotide
tagtggtagcgagagtagtggaaattctgggacacaggggatgggaagcccttaa

SEQ ID NO: 453139 - DNA, 53 bp, Artificial
  Synthetic oligonucleotide
tagtggtcaaacagcagactggtataccataggagtatatataatagggttta

SEQ ID NO: 453140 - DNA, 53 bp, Artificial
  Synthetic oligonucleotide
tagtggtcccattatttaatggaaggcccgaaaccacgtggatagggaactta

SEQ ID NO: 453141 - DNA, 60 bp, Artificial
  Synthetic oligonucleotide
tagtggtgcaccttattgtgatcatgatggtaggctagttggtatccacctaggcacaca

SEQ ID NO: 453142 - DNA, 52 bp, Artificial
  Synthetic oligonucleotide
tagtggtggaacaggttctaacatgggcgatgtctacgctggatcttgtcaa

SEQ ID NO: 453143 - DNA, 60 bp, Artificial
  Synthetic oligonucleotide
tagtggtggctggagaccgctgcttaacgctcaataaagcctgcctgagagtgttaacag

SEQ ID NO: 453144 - DNA, 60 bp, Artificial
  Synthetic oligonucleotide
tagtggtgtcaaaaacatcattgtggaaagagatgcaatataacagagacataacaatta

SEQ ID NO: 453145 - DNA, 58 bp, Artificial
  Synthetic oligonucleotide
tagtggttacgctttcgcataaggggggggaaatgtagtcatatgcaatactcttgtg

SEQ ID NO: 453146 - DNA, 58 bp, Artificial
  Synthetic oligonucleotide
tagtggtttcctggattggttaggtatcaatgttttgatctaagctttgagtattcta

SEQ ID NO: 453147 - DNA, 59 bp, Artificial
  Synthetic oligonucleotide
tagtgtaacatacgacggttcacagtatacaatacgtggctatagagatagaaacctaa

SEQ ID NO: 453148 - DNA, 56 bp, Artificial
  Synthetic oligonucleotide
tagtgtaacttaaccgtttctgtcccagatagatagatccccaaagttcaacagcc

SEQ ID NO: 453149 - DNA, 60 bp, Artificial
  Synthetic oligonucleotide
tagtgtaatacagaggcactgataagcacattacacgaacactattgaatcgtatcttgt

SEQ ID NO: 453150 - DNA, 60 bp, Artificial
  Synthetic oligonucleotide
tagtgtactatggacgctctgggagaaagaaaggatctgttctgactattcgcctcagaa

SEQ ID NO: 453151 - DNA, 57 bp, Artificial
  Synthetic oligonucleotide
tagtgtagaccaattagttacagccattatcaatgactacagaaataaggttaaaat

SEQ ID NO: 453152 - DNA, 60 bp, Artificial
  Synthetic oligonucleotide
tagtgtagctccattagttcatcagccatggtctgttcgtacagaagaatggctagcaaa

SEQ ID NO: 453153 - DNA, 60 bp, Artificial
  Synthetic oligonucleotide
tagtgtagctcctttagtgcatcaaccatggtcagtcagaacagaagagtggctagccaa

SEQ ID NO: 453154 - DNA, 60 bp, Artificial
  Synthetic oligonucleotide
tagtgtatagtggtagcacctacacacttgagtctgatggcaagggtaatgtgaaggttg

SEQ ID NO: 453155 - DNA, 59 bp, Artificial
  Synthetic oligonucleotide
tagtgtatctgaggcaaaccgccatcttttgtcatcagtacttctgaccttaggttaac

SEQ ID NO: 453156 - DNA, 56 bp, Artificial
  Synthetic oligonucleotide
tagtgtatgaggcggcggacataatcatgcacacccctgggtgcgtgccctgcgtt

SEQ ID NO: 453157 - DNA, 55 bp, Artificial
  Synthetic oligonucleotide
tagtgtatgaggctgaccatcacatcctacacctcccggggtgcttaccctgtgt

SEQ ID NO: 453158 - DNA, 51 bp, Artificial
  Synthetic oligonucleotide
tagtgtatgcgacggggtcacaggcgagaccaccttcatccaacaagattt

SEQ ID NO: 453159 - DNA, 60 bp, Artificial
  Synthetic oligonucleotide
tagtgtatgttgcagttgcaccctatgggtatagtgaactcagcctgtttcgagtcacct

SEQ ID NO: 453160 - DNA, 60 bp, Artificial
  Synthetic oligonucleotide
tagtgtcaacaaggcctgcaaagctggggtgcattagacatctaggaaatcctggagaca

SEQ ID NO: 453161 - DNA, 59 bp, Artificial
  Synthetic oligonucleotide
tagtgtcaccggctgggaaccagcctaagtgttatattatgtgcttcgtgtcggcatgt

SEQ ID NO: 453162 - DNA, 60 bp, Artificial
  Synthetic oligonucleotide
tagtgtcagtgtgggtgaaattcaataatgtgagactgtactgcccacgccctgggatac

SEQ ID NO: 453163 - DNA, 50 bp, Artificial
  Synthetic oligonucleotide
tagtgtcccgggagctggtaaaagttccgctattcgggagttgcttaagt

SEQ ID NO: 453164 - DNA, 55 bp, Artificial
  Synthetic oligonucleotide
tagtgtccgataatgatttgccagcgagtgacacgtggatgtgtctcgtcgagtt

SEQ ID NO: 453165 - DNA, 58 bp, Artificial
  Synthetic oligonucleotide
tagtgtccgtgttaagtgtagcaccgttgttggtggttcactacgctattacgatgta

SEQ ID NO: 453166 - DNA, 59 bp, Artificial
  Synthetic oligonucleotide
tagtgtcgaattgtttaaaaacgaccttgtgtctactaggtcagccgtgtgtgctgtga

SEQ ID NO: 453167 - DNA, 50 bp, Artificial
  Synthetic oligonucleotide
tagtgtcgtgtccgccacgggagtcgccctaccttttccattgatgcggc

SEQ ID NO: 453168 - DNA, 60 bp, Artificial
  Synthetic oligonucleotide
tagtgtgagcttctcacctaagtacctacatgtattgtgtgtggtatttatatattcgca

SEQ ID NO: 453169 - DNA, 60 bp, Artificial
  Synthetic oligonucleotide
tagtgtgggatgtgccacgcagttctatcgccaacttaatcatgaatatagcgacatgct

SEQ ID NO: 453170 - DNA, 60 bp, Artificial
  Synthetic oligonucleotide
tagtgtgggcactttgcgccaacacattggttcgctacacaatagaacagtggcgagttc

SEQ ID NO: 453171 - DNA, 51 bp, Artificial
  Synthetic oligonucleotide
tagtgtggtgccctttgataagatcgatgcaggtgcttccaataagtatgg

SEQ ID NO: 453172 - DNA, 60 bp, Artificial
  Synthetic oligonucleotide
tagtgtggtggcacacgaccacagagtcagcctgactttccgcagcactagaccattaga

SEQ ID NO: 453173 - DNA, 55 bp, Artificial
  Synthetic oligonucleotide
tagtgtgtaaacgtaggtgactcggaacgcgtgacgttacggatgcatgctccgg

SEQ ID NO: 453174 - DNA, 60 bp, Artificial
  Synthetic oligonucleotide
tagtgtgtgccacttgtgaacagattgctgattcacagcatcggtctcacagacaaatgg

SEQ ID NO: 453175 - DNA, 60 bp, Artificial
  Synthetic oligonucleotide
tagtgtgtgtagtcagggggggtcaaatgcctcagtggaagatatcgatgtagacacaca

SEQ ID NO: 453176 - DNA, 60 bp, Artificial
  Synthetic oligonucleotide
tagtgtgtttcttcacctaataaagatccctacacacagacacattgttggcaagggctg

SEQ ID NO: 453177 - DNA, 50 bp, Artificial
  Synthetic oligonucleotide
tagtgttcacagatgggtctgccactggacctgcagacacaagaatatac

SEQ ID NO: 453178 - DNA, 55 bp, Artificial
  Synthetic oligonucleotide
tagtgttgagtaatgcgcgtagtactaagtctaggcgtcgttcagtgtccaagaa

SEQ ID NO: 453179 - DNA, 54 bp, Artificial
  Synthetic oligonucleotide
tagtgttgctttgccagtccctttgggcccccatgaattctttaaagtgtttta

SEQ ID NO: 453180 - DNA, 55 bp, Artificial
  Synthetic oligonucleotide
tagtgttgttaccatatagcgattggattggccatccggtgaatagctttgtgac

SEQ ID NO: 453181 - DNA, 60 bp, Artificial
  Synthetic oligonucleotide
tagtgtttacagctacgatgctgctaggaagatacttgcagatcgtaagagagtcgtctc

SEQ ID NO: 453182 - DNA, 55 bp, Artificial
  Synthetic oligonucleotide
tagtgtttatccctccacttaaatcgaagggttttgtgtcagacgcgtgtaagga

SEQ ID NO: 453183 - DNA, 58 bp, Artificial
  Synthetic oligonucleotide
tagtgtttcttcacggagtggatttgaggttctattgatagaggacgggtggattaga

SEQ ID NO: 453184 - DNA, 57 bp, Artificial
  Synthetic oligonucleotide
tagtgttttgaatgcagtcggaccacgtaatggtgacagccgagttgaggccaagct

SEQ ID NO: 453185 - DNA, 53 bp, Artificial
  Synthetic oligonucleotide
tagttaaagatactattaaattgaagcaagaaagatggttggggaaaagagtg

SEQ ID NO: 453186 - DNA, 55 bp, Artificial
  Synthetic oligonucleotide
tagttaacattgtgttagaccagtaaggagaccttatggaagtaactccgattac

SEQ ID NO: 453187 - DNA, 57 bp, Artificial
  Synthetic oligonucleotide
tagttaagctcctcccgaatctgcccaaggataaggaggcatgtgcgaaagccccct

SEQ ID NO: 453188 - DNA, 60 bp, Artificial
  Synthetic oligonucleotide
tagttaagtctattggttatcacaaactggcagcaaatagagaagtcattgaatcaagca

SEQ ID NO: 453189 - DNA, 57 bp, Artificial
  Synthetic oligonucleotide
tagttaatcattacttccagacgcgacattatttacacattctttggaaggcgggga

SEQ ID NO: 453190 - DNA, 52 bp, Artificial
  Synthetic oligonucleotide
tagttacaacaagcgaacgtttttactccactcaatcagggtagtctacggt

SEQ ID NO: 453191 - DNA, 60 bp, Artificial
  Synthetic oligonucleotide
tagttacatgataacttggttgccaatcgagatgaacgcacgtgaattgggtagggtcaa

SEQ ID NO: 453192 - DNA, 60 bp, Artificial
  Synthetic oligonucleotide
tagttacatgtccatatcgctaccaaggcgcctgctaatgcgtaggcacagtagaaaacg

SEQ ID NO: 453193 - DNA, 54 bp, Artificial
  Synthetic oligonucleotide
tagttaccttaaagttttaaatctctgtaggtagtttgtccaattatgtcacac

SEQ ID NO: 453194 - DNA, 53 bp, Artificial
  Synthetic oligonucleotide
tagttacgtccgaatagtagtttgtttagtttctatataaacgtttcattcga

SEQ ID NO: 453195 - DNA, 55 bp, Artificial
  Synthetic oligonucleotide
tagttactccgggtctaattttggtatcgtcgtgtgagaaccctcccgactctga

SEQ ID NO: 453196 - DNA, 59 bp, Artificial
  Synthetic oligonucleotide
tagttactcctaggtgtgactatccagcaggacataataaggtaggatccctacaatac

SEQ ID NO: 453197 - DNA, 57 bp, Artificial
  Synthetic oligonucleotide
tagttactgacaataaggtcggcgacgattcagttgaggttttaagagtggtagata

SEQ ID NO: 453198 - DNA, 57 bp, Artificial
  Synthetic oligonucleotide
tagttagaaccctctgcccactcctccatggtgatataaagaccacccacacttttc

SEQ ID NO: 453199 - DNA, 60 bp, Artificial
  Synthetic oligonucleotide
tagttagaagattcattgccgacatgagacaaagagtgaacgcagagcgcaacacagtag

SEQ ID NO: 453200 - DNA, 60 bp, Artificial
  Synthetic oligonucleotide
tagttagacctaggtgtgactatcaagcaggacacaaggtaggatctctacaatatttag

SEQ ID NO: 453201 - DNA, 55 bp, Artificial
  Synthetic oligonucleotide
tagttagggatcgcgaggatctcaaaagggagctccagcgtgctagggttttgca

SEQ ID NO: 453202 - DNA, 56 bp, Artificial
  Synthetic oligonucleotide
tagttagtatatggtaccagacaaattacgtggttccaattggggcgcccaataca

SEQ ID NO: 453203 - DNA, 55 bp, Artificial
  Synthetic oligonucleotide
tagttataattcctatctgcccacttgaatcacagggtacggaaggtgtggttcc

SEQ ID NO: 453204 - DNA, 60 bp, Artificial
  Synthetic oligonucleotide
tagttatacctgctgatagttatacttggatacataatcttgcccaagatatgtttccat

SEQ ID NO: 453205 - DNA, 58 bp, Artificial
  Synthetic oligonucleotide
tagttatagactagtccgccctggctccgcttttcacccgcaacccgctggatcaata

SEQ ID NO: 453206 - DNA, 55 bp, Artificial
  Synthetic oligonucleotide
tagttatcatggcaatagtagctgccgcaggggcttctctgggagtcgcaaacgc

SEQ ID NO: 453207 - DNA, 50 bp, Artificial
  Synthetic oligonucleotide
tagttatgctgtaaaccctggccaggataatagggttaatgtagcaatgg

SEQ ID NO: 453208 - DNA, 57 bp, Artificial
  Synthetic oligonucleotide
tagttatggccagtgcatttatactattacaagtctcttttcactgttaccaggggt

SEQ ID NO: 453209 - DNA, 60 bp, Artificial
  Synthetic oligonucleotide
tagttatgggaatgtactggacttaaaccatctagacattgatgaaccaacaggacagac

SEQ ID NO: 453210 - DNA, 55 bp, Artificial
  Synthetic oligonucleotide
tagttatggtcgtaatgggcaactctgggatgggaccgactactttgggtgtccg

SEQ ID NO: 453211 - DNA, 60 bp, Artificial
  Synthetic oligonucleotide
tagttatgttctccattctcagttattgtatcgatgagtgtaccgagcattggtagttgt

SEQ ID NO: 453212 - DNA, 60 bp, Artificial
  Synthetic oligonucleotide
tagttattctggctaattctgagatgatgagttataggcgcacatcgcaagcaattataa

SEQ ID NO: 453213 - DNA, 57 bp, Artificial
  Synthetic oligonucleotide
tagttatttccatttaaatcctggttttcacactggtgttgcaattggaattgatcc

SEQ ID NO: 453214 - DNA, 55 bp, Artificial
  Synthetic oligonucleotide
tagttcaaactatgaccaccttcttagtgtttcagtagcaatgattacaaggttg

SEQ ID NO: 453215 - DNA, 60 bp, Artificial
  Synthetic oligonucleotide
tagttcaattacgccgtgtgttaaccacagctactattactctacttcctgatgcagaga

SEQ ID NO: 453216 - DNA, 58 bp, Artificial
  Synthetic oligonucleotide
tagttcactccaacacgtggtactcaattgacctagagaagggggaggcaaactgcac

SEQ ID NO: 453217 - DNA, 60 bp, Artificial
  Synthetic oligonucleotide
tagttcagaaagaagcagtatacataggatgggttccagctcataaaggcataggaggga

SEQ ID NO: 453218 - DNA, 60 bp, Artificial
  Synthetic oligonucleotide
tagttcagaaccacacaagcactcacatgaagcaaatacaagatgttaacaaggcgctca

SEQ ID NO: 453219 - DNA, 58 bp, Artificial
  Synthetic oligonucleotide
tagttcaggtcggaataatctcgatatagccacttcgcctccttctatcaatcgctat

SEQ ID NO: 453220 - DNA, 53 bp, Artificial
  Synthetic oligonucleotide
tagttcagtgcaggggaaacccgggccgtaagcacgtggaactatataactta

SEQ ID NO: 453221 - DNA, 60 bp, Artificial
  Synthetic oligonucleotide
tagttcattaaagaagcctgatgttcagtctgcagtggccaaactcagacagttatccga

SEQ ID NO: 453222 - DNA, 57 bp, Artificial
  Synthetic oligonucleotide
tagttcattattcctttatcattgagccttattcttaatttatgatttctcatccat

SEQ ID NO: 453223 - DNA, 60 bp, Artificial
  Synthetic oligonucleotide
tagttcattcgttactctgctctcagagagaacggacctcaggtcggagagatggcactt

SEQ ID NO: 453224 - DNA, 60 bp, Artificial
  Synthetic oligonucleotide
tagttcattgggatggcgggtctcaatccatcacagcgaagagaggtcgtcagcttgata

SEQ ID NO: 453225 - DNA, 60 bp, Artificial
  Synthetic oligonucleotide
tagttccacacaagcgtatgggtcgaggaactatctgaatactgcacatagattgcaagc

SEQ ID NO: 453226 - DNA, 56 bp, Artificial
  Synthetic oligonucleotide
tagttccattttagctaacttgatccggtagtcttcaaaattcagtgtctgtgggt

SEQ ID NO: 453227 - DNA, 52 bp, Artificial
  Synthetic oligonucleotide
tagttcccgtacccgcgggacaagaacctattgtagtagacgaaccggtctc

SEQ ID NO: 453228 - DNA, 54 bp, Artificial
  Synthetic oligonucleotide
tagttccctccttaggcccccccgggtaccactacgctacgcagcagccttagc

SEQ ID NO: 453229 - DNA, 60 bp, Artificial
  Synthetic oligonucleotide
tagttccgaagctaaaacagatagtcgacagatcacgacgagccaatgaactgactttct

SEQ ID NO: 453230 - DNA, 59 bp, Artificial
  Synthetic oligonucleotide
tagttcctaacatcccttgaagataagaaatccttttcacattggacaggctgtagcca

SEQ ID NO: 453231 - DNA, 60 bp, Artificial
  Synthetic oligonucleotide
tagttcctaccaaagagtccagatctttccagacacgatctggaatgtgacttacagtgg

SEQ ID NO: 453232 - DNA, 60 bp, Artificial
  Synthetic oligonucleotide
tagttccttgcctccttcgtggtctctttcgagatttcctacatatgagagctgaattgc

SEQ ID NO: 453233 - DNA, 56 bp, Artificial
  Synthetic oligonucleotide
tagttcgcgagtacggtcgcgactctcttaaggttcctgtgcgtgggacctacact

SEQ ID NO: 453234 - DNA, 51 bp, Artificial
  Synthetic oligonucleotide
tagttcgtcgcaccccggcgttaccgtccgggtcatgagcgcatattcacc

SEQ ID NO: 453235 - DNA, 55 bp, Artificial
  Synthetic oligonucleotide
tagttcgtttaattgggctatggacatggtaatgttggattccgctctctgggcc

SEQ ID NO: 453236 - DNA, 60 bp, Artificial
  Synthetic oligonucleotide
tagttctaacggaagagattgctcgcgcgattgaatctaaatacggtacgaagattgatg

SEQ ID NO: 453237 - DNA, 57 bp, Artificial
  Synthetic oligonucleotide
tagttctacacaacgacggagttattcacggcgtacagctgttaaacgtcattatac

SEQ ID NO: 453238 - DNA, 59 bp, Artificial
  Synthetic oligonucleotide
tagttctcagtatcatactgtagactgggcaaacgcttatacggcattgcctaaagggt

SEQ ID NO: 453239 - DNA, 54 bp, Artificial
  Synthetic oligonucleotide
tagttcttcaatcctaccattcaccccaaccctttgcaaactaaacaagactta

SEQ ID NO: 453240 - DNA, 55 bp, Artificial
  Synthetic oligonucleotide
tagttcttgaaggtgccttatcagtggagacagactatggtccaaaggttctggg

SEQ ID NO: 453241 - DNA, 57 bp, Artificial
  Synthetic oligonucleotide
tagttctttgataatttggactgtacggatttgacaagactgggtatttcttctcgc

SEQ ID NO: 453242 - DNA, 55 bp, Artificial
  Synthetic oligonucleotide
tagttgaaggacattttaacgcacaagacgctacaatcgcacgcacagatactac

SEQ ID NO: 453243 - DNA, 60 bp, Artificial
  Synthetic oligonucleotide
tagttgaccacaaactcggcacaatgcatgttctcgattcatatgggtcgatcagtgcag

SEQ ID NO: 453244 - DNA, 50 bp, Artificial
  Synthetic oligonucleotide
tagttgacccgaccgggattaacgcggaagctgccaagcgcgctttctca

SEQ ID NO: 453245 - DNA, 60 bp, Artificial
  Synthetic oligonucleotide
tagttgacctaactagactgctggcttataactatgagacattaatggcatgcatcacga

SEQ ID NO: 453246 - DNA, 60 bp, Artificial
  Synthetic oligonucleotide
tagttgatagtgtcacgcttcgagataatgctatgacatttggcgatcacgaaccctcac

SEQ ID NO: 453247 - DNA, 58 bp, Artificial
  Synthetic oligonucleotide
tagttgatgaggataccgcattcgaaactggaattgacggaacgttttatgcttacaa

SEQ ID NO: 453248 - DNA, 60 bp, Artificial
  Synthetic oligonucleotide
tagttgatgtacgtgagttcaacgaatcagatacaccatggatgacatatacgaacttcg

SEQ ID NO: 453249 - DNA, 60 bp, Artificial
  Synthetic oligonucleotide
tagttgatgtgacaaggcaaaagtacactcataatgcacgtgacgacattgatttttacc

SEQ ID NO: 453250 - DNA, 56 bp, Artificial
  Synthetic oligonucleotide
tagttgattggacagagagtgagagcggaaaagagggtaaagtggaacccaaagag

SEQ ID NO: 453251 - DNA, 60 bp, Artificial
  Synthetic oligonucleotide
tagttgcaattctagaatgggatcgctcaaaacaaccacagcatagactcgaagcgatct

SEQ ID NO: 453252 - DNA, 60 bp, Artificial
  Synthetic oligonucleotide
tagttgcactcactcgccacacggagaagtgcgtcattttggatgctcccggtttgttgc

SEQ ID NO: 453253 - DNA, 57 bp, Artificial
  Synthetic oligonucleotide
tagttgcaggtccaggcgacccgtcaccctacgtgacgcaaggaggagagattgctc

SEQ ID NO: 453254 - DNA, 60 bp, Artificial
  Synthetic oligonucleotide
tagttgcatggcaaaggagcaatgctgaatttgaacaaaatttagagaatgcccagtggt

SEQ ID NO: 453255 - DNA, 56 bp, Artificial
  Synthetic oligonucleotide
tagttgccacatctaacctagttgatgtgaacgcggaaatccgacgtggcgcagta

SEQ ID NO: 453256 - DNA, 50 bp, Artificial
  Synthetic oligonucleotide
tagttgccccggaagtatatgtggacccccccaaaagacgcattaagcgc

SEQ ID NO: 453257 - DNA, 55 bp, Artificial
  Synthetic oligonucleotide
tagttgcgaaattcgcatcaagtctaccattcgtcggtcagttccttagctatct

SEQ ID NO: 453258 - DNA, 51 bp, Artificial
  Synthetic oligonucleotide
tagttgcgctcaatataaaaagaaagggtggactaggggcaagccctatgg

SEQ ID NO: 453259 - DNA, 60 bp, Artificial
  Synthetic oligonucleotide
tagttgcgtactatattaaggatgcaactcagaaggctctcaaggttgacttgaccccgc

SEQ ID NO: 453260 - DNA, 59 bp, Artificial
  Synthetic oligonucleotide
tagttggactgtcaatgatatacagaagttagtgggaaagttaaactgggcaagtcaga

SEQ ID NO: 453261 - DNA, 56 bp, Artificial
  Synthetic oligonucleotide
tagttggagtaataaatctctgtctgacatttgggagaacatgacctggatgcagt

SEQ ID NO: 453262 - DNA, 55 bp, Artificial
  Synthetic oligonucleotide
tagttggagtaataaatcttataaggctatttgggacaacatgacctggatgcag

SEQ ID NO: 453263 - DNA, 57 bp, Artificial
  Synthetic oligonucleotide
tagttggatcaacgccaatgtagtgaccgccacttatttagggacgggtgtagcgac

SEQ ID NO: 453264 - DNA, 55 bp, Artificial
  Synthetic oligonucleotide
tagttggatggcctgctgtaagagaaagattaagacgagccagaccagcagcaga

SEQ ID NO: 453265 - DNA, 51 bp, Artificial
  Synthetic oligonucleotide
tagttggccttggccgcgcagctgaacactcattaaaataatcatcagccc

SEQ ID NO: 453266 - DNA, 58 bp, Artificial
  Synthetic oligonucleotide
tagttggcgctttgatgataaaaaggtattccacttaaagaatatcccctcagctatg

SEQ ID NO: 453267 - DNA, 50 bp, Artificial
  Synthetic oligonucleotide
tagttgggtaactccttaatgcatcatggaatggacttcctgagtatttg

SEQ ID NO: 453268 - DNA, 55 bp, Artificial
  Synthetic oligonucleotide
tagttgggtgattaacacacgaaatgtagtacaatttaggaggaagttggaattg

SEQ ID NO: 453269 - DNA, 57 bp, Artificial
  Synthetic oligonucleotide
tagttgggttctcgcactcccgcctgccaagtgaaactcggggaggagtgagtgcgg

SEQ ID NO: 453270 - DNA, 53 bp, Artificial
  Synthetic oligonucleotide
tagttggtccaaaagaacatgccttcccaactaagaaaacttcaggtgaggaa

SEQ ID NO: 453271 - DNA, 60 bp, Artificial
  Synthetic oligonucleotide
tagttggtgaaggctgtccaaagccccacagacttagggcagattccacctgtgcatgtg

SEQ ID NO: 453272 - DNA, 53 bp, Artificial
  Synthetic oligonucleotide
tagttggtgaccatccgttggttatagaacgtgtacgggccattggatgccat

SEQ ID NO: 453273 - DNA, 57 bp, Artificial
  Synthetic oligonucleotide
tagttggttgacaattggtatttccggcccagacaatggggcggtggctgtattgaa

SEQ ID NO: 453274 - DNA, 55 bp, Artificial
  Synthetic oligonucleotide
tagttgtagccctttggctctttgccccaagcgtggtttgaacctgcctttagtg

SEQ ID NO: 453275 - DNA, 58 bp, Artificial
  Synthetic oligonucleotide
tagttgtatatgcagaaaagggtgcaggtaagacctcatttttgtccacgtacgcgga

SEQ ID NO: 453276 - DNA, 55 bp, Artificial
  Synthetic oligonucleotide
tagttgtgaacaaggtgtgaagagtctattgagctatcaaagagtcctccggccc

SEQ ID NO: 453277 - DNA, 50 bp, Artificial
  Synthetic oligonucleotide
tagttgtgaatgccacttgccagttacgaatgaaaaatctcgataattgg

SEQ ID NO: 453278 - DNA, 50 bp, Artificial
  Synthetic oligonucleotide
tagttgtgactggcttgatgcattgcaggagagcatggcagtgccatgtc

SEQ ID NO: 453279 - DNA, 53 bp, Artificial
  Synthetic oligonucleotide
tagttgtgcccatcagtccattagattttgatcaaggggcgactccggttatt

SEQ ID NO: 453280 - DNA, 55 bp, Artificial
  Synthetic oligonucleotide
tagttgtgtcgtccgagacttctagcccaggtggtcttaccggtacgagttggtc

SEQ ID NO: 453281 - DNA, 55 bp, Artificial
  Synthetic oligonucleotide
tagttgtgtgtttcatcgtcttaggggagaggttctcggttatccagcgtttttc

SEQ ID NO: 453282 - DNA, 51 bp, Artificial
  Synthetic oligonucleotide
tagttgtgttagtcatggtaggcgctcctaagctttgccgttgtttgagtc

SEQ ID NO: 453283 - DNA, 59 bp, Artificial
  Synthetic oligonucleotide
tagtttaaaattcctatggcaacgtcctcattcaacatcaatgaactggtagcctccca

SEQ ID NO: 453284 - DNA, 60 bp, Artificial
  Synthetic oligonucleotide
tagtttacaattcactttgatctcagctacaacaagcatgacccgtggaaaactgctgtg

SEQ ID NO: 453285 - DNA, 60 bp, Artificial
  Synthetic oligonucleotide
tagtttacgatgatgaattgcagatgcatatacttagagggccgttacattttcagcgtc

SEQ ID NO: 453286 - DNA, 60 bp, Artificial
  Synthetic oligonucleotide
tagtttatcacccattcacagaatgtgggacacattgtgtctgcggtgctcgttatgaca

SEQ ID NO: 453287 - DNA, 60 bp, Artificial
  Synthetic oligonucleotide
tagtttatccagatagatgtaacctacccaaatacgatagccagcagatacgatctgaaa

SEQ ID NO: 453288 - DNA, 58 bp, Artificial
  Synthetic oligonucleotide
tagtttcaacgggggccatatagaagaatgctcatgctaccccaatgagggtaaagtg

SEQ ID NO: 453289 - DNA, 57 bp, Artificial
  Synthetic oligonucleotide
tagtttcaccggaaataggagagagaatgttaactttttcagcgcaattgcacgcgc

SEQ ID NO: 453290 - DNA, 60 bp, Artificial
  Synthetic oligonucleotide
tagtttccatcttagaatgggacaggagcaaggaaattatgcaccgcactgaggcaattt

SEQ ID NO: 453291 - DNA, 55 bp, Artificial
  Synthetic oligonucleotide
tagtttcctggagggctagacaatccagcgtcatcataaggtcccggtggtgggt

SEQ ID NO: 453292 - DNA, 56 bp, Artificial
  Synthetic oligonucleotide
tagtttcgaattaaatggtctagaagcatttataagcaaaattcccgcgttagcga

SEQ ID NO: 453293 - DNA, 55 bp, Artificial
  Synthetic oligonucleotide
tagtttctaccggtacaacaacggtaagaaatgagcatgggaaggatcgagccgg

SEQ ID NO: 453294 - DNA, 56 bp, Artificial
  Synthetic oligonucleotide
tagtttctactcgaaatatccgtgtttgtgttggtatcgatcccctggtaactcga

SEQ ID NO: 453295 - DNA, 55 bp, Artificial
  Synthetic oligonucleotide
tagtttctcctgttagattctgatttaggtagatcttcgttaacggtctgcggtc

SEQ ID NO: 453296 - DNA, 56 bp, Artificial
  Synthetic oligonucleotide
tagtttctctaattaagagggtcaggcagggatactcacccctttcgttgcagacc

SEQ ID NO: 453297 - DNA, 57 bp, Artificial
  Synthetic oligonucleotide
tagtttgaacatgtattctacaaaaaatagacgaggtccgtctgcctatcgaggaac

SEQ ID NO: 453298 - DNA, 60 bp, Artificial
  Synthetic oligonucleotide
tagtttgaaggatgggaattatgtttacccatgctgctgcacaaccatggatgatggaag

SEQ ID NO: 453299 - DNA, 60 bp, Artificial
  Synthetic oligonucleotide
tagtttgacttcaatcggcgctgtcatgactatgttagctacacagctaacaacgttaac

SEQ ID NO: 453300 - DNA, 59 bp, Artificial
  Synthetic oligonucleotide
tagtttgctgtgtgctcctttgcttggcgttggttcaactatcgtcttccgtgaactat

SEQ ID NO: 453301 - DNA, 60 bp, Artificial
  Synthetic oligonucleotide
tagtttggagacaacatgtagcgcacgcatgttgtgagaaatgcttaacgctgtgtgcga

SEQ ID NO: 453302 - DNA, 51 bp, Artificial
  Synthetic oligonucleotide
tagtttggatgccctacccttattgtcgggtcttatctggcactaatcaga

SEQ ID NO: 453303 - DNA, 54 bp, Artificial
  Synthetic oligonucleotide
tagtttgtcatgatgagctgtggacattactccagcagcagagcctgtagcttc

SEQ ID NO: 453304 - DNA, 60 bp, Artificial
  Synthetic oligonucleotide
tagttttagggtcttgtgatattatctctttattgagttgtatgtcacttgttatgccaa

SEQ ID NO: 453305 - DNA, 58 bp, Artificial
  Synthetic oligonucleotide
tagttttcctagtgtggacacatttacgatgtttatcttactatgcgcacccaacgta

SEQ ID NO: 453306 - DNA, 58 bp, Artificial
  Synthetic oligonucleotide
tagttttctccgcaaggccgcccataaattctgttgctttatgcgatggttggggcag

SEQ ID NO: 453307 - DNA, 57 bp, Artificial
  Synthetic oligonucleotide
tagttttgtaggccaccatatattctactataggcctctctaggtaaattagtaaca

SEQ ID NO: 453308 - DNA, 57 bp, Artificial
  Synthetic oligonucleotide
tagtttttgcaccgcaagcagggcaagttacagagctagaaactccgctagggagtt

SEQ ID NO: 453309 - DNA, 54 bp, Artificial
  Synthetic oligonucleotide
tagtttttggggcggtgtcctaaaagcaagagcgcttgacggtgttgaattaat

SEQ ID NO: 453310 - DNA, 55 bp, Artificial
  Synthetic oligonucleotide
tataaaaaaaaaccggtactaactcagtggcagcccacagtgagaagacgctgtt

SEQ ID NO: 453311 - DNA, 51 bp, Artificial
  Synthetic oligonucleotide
tataaaaaccacccacgaatctcaaggggtaagtgaggatcatgtcacatt

SEQ ID NO: 453312 - DNA, 55 bp, Artificial
  Synthetic oligonucleotide
tataaaaacccgtggaaaggcgggagtagcctttaatccccatgatagcaccgca

SEQ ID NO: 453313 - DNA, 60 bp, Artificial
  Synthetic oligonucleotide
tataaaaatcacatcacgtttggacaatcaagaatgttcatcccacacattacacttagt

SEQ ID NO: 453314 - DNA, 60 bp, Artificial
  Synthetic oligonucleotide
tataaaacatggctgtccaccaagcttggcatgggtttccatagctataagccattggat

SEQ ID NO: 453315 - DNA, 56 bp, Artificial
  Synthetic oligonucleotide
tataaaaccacaccacgaccacggaacgtctgttcgaaccatctttattgcgccag

SEQ ID NO: 453316 - DNA, 60 bp, Artificial
  Synthetic oligonucleotide
tataaaacgggaggctgtgtaggaagatgcgtccatgctgagaagtcaaaatcgtgtccc

SEQ ID NO: 453317 - DNA, 59 bp, Artificial
  Synthetic oligonucleotide
tataaaagatgctgcccgttgatttgtggaaaggctattcaatttagagatcgtagaac

SEQ ID NO: 453318 - DNA, 56 bp, Artificial
  Synthetic oligonucleotide
tataaaaggcaccactcgaagacgggtctcacattcaatcgctgacagtgaactaa

SEQ ID NO: 453319 - DNA, 59 bp, Artificial
  Synthetic oligonucleotide
tataaaagggagcatttctctcatttggtcattttaccaaatgccaactcttcaaggca

SEQ ID NO: 453320 - DNA, 57 bp, Artificial
  Synthetic oligonucleotide
tataaaaggggactattcggtcctccaattgcaagccaatagacgggcatactcagg

SEQ ID NO: 453321 - DNA, 60 bp, Artificial
  Synthetic oligonucleotide
tataaaatcgtcaaagttcccagtatttcgttcagacacatcgtaatgcagtcaagagat

SEQ ID NO: 453322 - DNA, 54 bp, Artificial
  Synthetic oligonucleotide
tataaacaacgagagcagtttataactacaatgaaattaccaccaaatgtagat

SEQ ID NO: 453323 - DNA, 59 bp, Artificial
  Synthetic oligonucleotide
tataaacacctcgttggggaattacctattgatgtgtgcaatggtacacgggtacatgc

SEQ ID NO: 453324 - DNA, 56 bp, Artificial
  Synthetic oligonucleotide
tataaacactatcggagggccacaacgacgtccgatccggtacaagaatcccgtca

SEQ ID NO: 453325 - DNA, 57 bp, Artificial
  Synthetic oligonucleotide
tataaacactggtatgaactggtatcaaaacgaccccttaaatcaatcagagaggac

SEQ ID NO: 453326 - DNA, 60 bp, Artificial
  Synthetic oligonucleotide
tataaacattttgaaatctccagtcggctggtgacgattcatgagtgtaacaataacacc

SEQ ID NO: 453327 - DNA, 57 bp, Artificial
  Synthetic oligonucleotide
tataaacgcggttggacgcgaaagaggacaccaggcggatgggtcatacacaataaa

SEQ ID NO: 453328 - DNA, 60 bp, Artificial
  Synthetic oligonucleotide
tataaacttgatatagtatcaataggtagtgataatactagctatatattgacaaagtgt

SEQ ID NO: 453329 - DNA, 57 bp, Artificial
  Synthetic oligonucleotide
tataaagaaaaaggacggcaccaaatggaggaaattagtggacttcagagagctcaa

SEQ ID NO: 453330 - DNA, 60 bp, Artificial
  Synthetic oligonucleotide
tataaagaagagacctgagcttgaattagccatctctgcttatgagagcggaagcaacct

SEQ ID NO: 453331 - DNA, 60 bp, Artificial
  Synthetic oligonucleotide
tataaagaatatgtgtatgaacataaggtcattatcgagtacaatgatatcgcagcagtt

SEQ ID NO: 453332 - DNA, 58 bp, Artificial
  Synthetic oligonucleotide
tataaagaatgggttagcatgttcttgttcaagtttatagtcgaacacacagcaaagt

SEQ ID NO: 453333 - DNA, 55 bp, Artificial
  Synthetic oligonucleotide
tataaagaccacccacttctttcgggtgagcccctaagccgtggttgtattgcac

SEQ ID NO: 453334 - DNA, 55 bp, Artificial
  Synthetic oligonucleotide
tataaagactgctgacaaagaagtttctaactagaacttccgctggggactttcc

SEQ ID NO: 453335 - DNA, 52 bp, Artificial
  Synthetic oligonucleotide
tataaagagcttgaggacaaacatcctcaccacattaagctccaagactgga

SEQ ID NO: 453336 - DNA, 51 bp, Artificial
  Synthetic oligonucleotide
tataaagagtccttgtgtagcttcagacctaactgttgaagtttgtaccgg

SEQ ID NO: 453337 - DNA, 60 bp, Artificial
  Synthetic oligonucleotide
tataaagattaatcgaccagtttatgtgcaatgtgagcattgtgaaacgttgtataacat

SEQ ID NO: 453338 - DNA, 60 bp, Artificial
  Synthetic oligonucleotide
tataaagcacaagcaattcttgttccccggagctggatatagactgctaacgtggtcaaa

SEQ ID NO: 453339 - DNA, 60 bp, Artificial
  Synthetic oligonucleotide
tataaagcagatcatgaacgtgagactgaactgactgacttaattaatagaattcgtgag

SEQ ID NO: 453340 - DNA, 55 bp, Artificial
  Synthetic oligonucleotide
tataaagcagcatgggtggcaagtggtcaaaaagtagtgtggttggatggcctgc

SEQ ID NO: 453341 - DNA, 59 bp, Artificial
  Synthetic oligonucleotide
tataaagcccaactgtctgtgacccttcacaacgatttctagatgattctacggaatta

SEQ ID NO: 453342 - DNA, 49 bp, Artificial
  Synthetic oligonucleotide
tataaagggaaaaacgtgtgacgtttggaactttaggtgtacgtaaaaa

SEQ ID NO: 453343 - DNA, 60 bp, Artificial
  Synthetic oligonucleotide
tataaaggtaaaatgagaattatggacattacacaatcgctcaaaatgggcactaagctg

SEQ ID NO: 453344 - DNA, 59 bp, Artificial
  Synthetic oligonucleotide
tataaagtatgccaggtcacccataggttcagggatgatcttaaaaagactgtcactcc

SEQ ID NO: 453345 - DNA, 55 bp, Artificial
  Synthetic oligonucleotide
tataaagtgagaggcagttggaaaggtgtttgtagacattgcagacagaaatgat

SEQ ID NO: 453346 - DNA, 56 bp, Artificial
  Synthetic oligonucleotide
tataaatacccacaatactcagaagagtcaaaattgaacaggaaggaaatagacgg

SEQ ID NO: 453347 - DNA, 52 bp, Artificial
  Synthetic oligonucleotide
tataaatagcatataacgccagctatgcaagtagaattgtactgctataggc

SEQ ID NO: 453348 - DNA, 58 bp, Artificial
  Synthetic oligonucleotide
tataaatatccgagcatattaaggggttctaccacaccatgtatactacgccgaggcg

SEQ ID NO: 453349 - DNA, 59 bp, Artificial
  Synthetic oligonucleotide
tataaatccatatgggatggaatggactgatctggctgcacgcctcaagagtaaaggta

SEQ ID NO: 453350 - DNA, 60 bp, Artificial
  Synthetic oligonucleotide
tataaatcctatacaagcaagaatcatggctttagtgcacagaaagacagcactgggggt

SEQ ID NO: 453351 - DNA, 52 bp, Artificial
  Synthetic oligonucleotide
tataaatgttggttagagatcaccgtcatacttgaagcagagatctcatcta

SEQ ID NO: 453352 - DNA, 57 bp, Artificial
  Synthetic oligonucleotide
tataaattccagtatgcctttccataatgttcacccccttaccattggagagtgccc

SEQ ID NO: 453353 - DNA, 53 bp, Artificial
  Synthetic oligonucleotide
tataaattttagcgacttgccaatccttaacccgacagtaagcagttaatttt

SEQ ID NO: 453354 - DNA, 60 bp, Artificial
  Synthetic oligonucleotide
tataacaaggcaaccaagaggcttacagtcctcggaaaggatgcaggcgcactgacagaa

SEQ ID NO: 453355 - DNA, 60 bp, Artificial
  Synthetic oligonucleotide
tataacaaggtgaaaagagcattgggctctaatgcagtagaagatggaaatggatgcttc

SEQ ID NO: 453356 - DNA, 56 bp, Artificial
  Synthetic oligonucleotide
tataacaataatgggtgggaaggtgttccacatttccatgtaggcttgcaattcca

SEQ ID NO: 453357 - DNA, 54 bp, Artificial
  Synthetic oligonucleotide
tataacaattggttcacgacttcggctgttagaaagtctctcgggtatcataaa

SEQ ID NO: 453358 - DNA, 60 bp, Artificial
  Synthetic oligonucleotide
tataacagctgaatgctacaattatacgagcttaccagcagattttcaagctgccataga

SEQ ID NO: 453359 - DNA, 59 bp, Artificial
  Synthetic oligonucleotide
tataacaggaccattaggatgtgcaaacaacacctgttataatatctcggtagtggtac

SEQ ID NO: 453360 - DNA, 55 bp, Artificial
  Synthetic oligonucleotide
tataacaggttcacccagcggcactcgctgaccggtggactatggttacaccctg

SEQ ID NO: 453361 - DNA, 60 bp, Artificial
  Synthetic oligonucleotide
tataacatcagatactccagttcacaattgcgacacaagatgccaaacccctcacggggc

SEQ ID NO: 453362 - DNA, 60 bp, Artificial
  Synthetic oligonucleotide
tataacatgtgtaacgttcgaggtcggattctagtgctgccacatgtgcgttatgtctac

SEQ ID NO: 453363 - DNA, 59 bp, Artificial
  Synthetic oligonucleotide
tataacatgttcccaagcaggtatagacgtggttggtcgtctaatcagcgacgaggtta

SEQ ID NO: 453364 - DNA, 50 bp, Artificial
  Synthetic oligonucleotide
tataaccacagtagtaacggataagaggaagcaagtacatgcactttttt

SEQ ID NO: 453365 - DNA, 55 bp, Artificial
  Synthetic oligonucleotide
tataaccatgtgatgtgacgaatggctgagtttaccccgctagacggtgcaggaa

SEQ ID NO: 453366 - DNA, 60 bp, Artificial
  Synthetic oligonucleotide
tataaccgcaccagcgtaaccgtagaactccagtaccagatgattgactctcagcgtaac

SEQ ID NO: 453367 - DNA, 58 bp, Artificial
  Synthetic oligonucleotide
tataaccttctgattgtgtttctcagtttgtttggggacgttagccccttgcatcatc

SEQ ID NO: 453368 - DNA, 53 bp, Artificial
  Synthetic oligonucleotide
tataacgaaagaattaatgatgcggtagctataataactgcagctaatagatt

SEQ ID NO: 453369 - DNA, 56 bp, Artificial
  Synthetic oligonucleotide
tataacgactgcataagtttattactgagttttggtatgggtgttgatttttagat

SEQ ID NO: 453370 - DNA, 55 bp, Artificial
  Synthetic oligonucleotide
tataacgccctcttcctctacgtccgcgctgtccgcacgctccgcgtaaccgatc

SEQ ID NO: 453371 - DNA, 54 bp, Artificial
  Synthetic oligonucleotide
tataacgccgttgaacggaaattagtcaaatatgcgaaaggtaaaccgcttgag

SEQ ID NO: 453372 - DNA, 51 bp, Artificial
  Synthetic oligonucleotide
tataacgcctttcttaacgattcccttaatgtggtcgtaaaccctgctaat

SEQ ID NO: 453373 - DNA, 60 bp, Artificial
  Synthetic oligonucleotide
tataacgctcatgaattaactattgttctccaatctatctcttcgaacctcaatggtgcc

SEQ ID NO: 453374 - DNA, 59 bp, Artificial
  Synthetic oligonucleotide
tataacgctccgcacccccagcatggcagaaatttacgacttcgacaagtcagcgtggg

SEQ ID NO: 453375 - DNA, 60 bp, Artificial
  Synthetic oligonucleotide
tataacggattaccatcaggccaataataagagtgctaatggtgctactgcacttcatgt

SEQ ID NO: 453376 - DNA, 52 bp, Artificial
  Synthetic oligonucleotide
tataacggattcatcagttatctcattgatagctaaactagatgctactgtc

SEQ ID NO: 453377 - DNA, 56 bp, Artificial
  Synthetic oligonucleotide
tataacggtatctcaagtttggtctgccaactcacgaacatctcagatgggcattg

SEQ ID NO: 453378 - DNA, 59 bp, Artificial
  Synthetic oligonucleotide
tataacggtctaagaataggcacttacagatcggtcctagcatgcgagttactgcgggt

SEQ ID NO: 453379 - DNA, 56 bp, Artificial
  Synthetic oligonucleotide
tataacgtaatccgtgactacgggctcctcgcagaaccctccccggatggggcaca

SEQ ID NO: 453380 - DNA, 58 bp, Artificial
  Synthetic oligonucleotide
tataacgttgtattactaccaacaaactgacgaagcgaataaatggatatcaatgggc

SEQ ID NO: 453381 - DNA, 55 bp, Artificial
  Synthetic oligonucleotide
tataactaagtgtactgacgaatggctgagtttaccccgctagacggtgcagaga

SEQ ID NO: 453382 - DNA, 57 bp, Artificial
  Synthetic oligonucleotide
tataactcagctatccccacgtcgatggtacatggaaggttagggttcgacggccaa

SEQ ID NO: 453383 - DNA, 53 bp, Artificial
  Synthetic oligonucleotide
tataactccacttcaggcggcagactgttgccaagtgaacgttgcgccccccc

SEQ ID NO: 453384 - DNA, 59 bp, Artificial
  Synthetic oligonucleotide
tataactccattaatcgaaattacatgaattgaatctaaataacgcaacacttgagtct

SEQ ID NO: 453385 - DNA, 59 bp, Artificial
  Synthetic oligonucleotide
tataactcgggtggagtctgagaccaaagtaattgtgctcgactcctttgaccccatca

SEQ ID NO: 453386 - DNA, 51 bp, Artificial
  Synthetic oligonucleotide
tataactgcaagaaatgtactacaggactcaccaaacccattactatctgg

SEQ ID NO: 453387 - DNA, 60 bp, Artificial
  Synthetic oligonucleotide
tataactgctcccctctcctggattgcacagcacgattgatggtatgccacctttaattt

SEQ ID NO: 453388 - DNA, 52 bp, Artificial
  Synthetic oligonucleotide
tataacttaaatgacgaaaattggaaatcctttttctcaaggacgtggtgcc

SEQ ID NO: 453389 - DNA, 60 bp, Artificial
  Synthetic oligonucleotide
tataacttactatcaattaattatggatgctatcaattattcgatttcaactctccagat

SEQ ID NO: 453390 - DNA, 60 bp, Artificial
  Synthetic oligonucleotide
tataacttgagcggtgaagcaacgttcgcagtttcagacgcacaaagccttggattgaca

SEQ ID NO: 453391 - DNA, 51 bp, Artificial
  Synthetic oligonucleotide
tataagaactcgtctgctctccgtgcacaaggtgcacagatagacactgct

SEQ ID NO: 453392 - DNA, 60 bp, Artificial
  Synthetic oligonucleotide
tataagaatgaagcggaagttgatgtatgttagtgcagatgcaacaaagtggtctcctgg

SEQ ID NO: 453393 - DNA, 50 bp, Artificial
  Synthetic oligonucleotide
tataagacaagcacattgtaacactagtgaacagaaatggaacaagactt

SEQ ID NO: 453394 - DNA, 56 bp, Artificial
  Synthetic oligonucleotide
tataagaggactttggtccaggattgcataaaaagatggtggggataccaccttta

SEQ ID NO: 453395 - DNA, 57 bp, Artificial
  Synthetic oligonucleotide
tataagagggaaactacacgtagcgcctcattttgcgggtcaccatattcttgggaa

SEQ ID NO: 453396 - DNA, 60 bp, Artificial
  Synthetic oligonucleotide
tataagcaagttccacagcaatttgatttcaggaattcgatgcatatgttgacatcaaat

SEQ ID NO: 453397 - DNA, 60 bp, Artificial
  Synthetic oligonucleotide
tataagcaagttccgcagcaatttgattttagaaactcaatgcacatgctgacgtcaaat

SEQ ID NO: 453398 - DNA, 60 bp, Artificial
  Synthetic oligonucleotide
tataagcacagatatagctgtgtggggagaacactcaaggctaagaattctctaacatcg

SEQ ID NO: 453399 - DNA, 57 bp, Artificial
  Synthetic oligonucleotide
tataagcagccgcttaccgcttgtaccgggtctcggttagagaaccaggtctgagcc

SEQ ID NO: 453400 - DNA, 60 bp, Artificial
  Synthetic oligonucleotide
tataagcatacaacttgcatagataccatccaccactaactaactcttaaacttgtcaac

SEQ ID NO: 453401 - DNA, 55 bp, Artificial
  Synthetic oligonucleotide
tataagccacccgagcgccacccaggacaaagcgatattgcgatcgacacggcgc

SEQ ID NO: 453402 - DNA, 55 bp, Artificial
  Synthetic oligonucleotide
tataagcctgtctccaaggcgtaagagcaagagacggctgttccctcaggaggac

SEQ ID NO: 453403 - DNA, 55 bp, Artificial
  Synthetic oligonucleotide
tataagccttgagattgtacttgggagtcagacgcttcagagcagctgcctgaga

SEQ ID NO: 453404 - DNA, 58 bp, Artificial
  Synthetic oligonucleotide
tataagcgaaacattgcgcccaccggcacatcgcgtggcacaacaccaaatttgacag

SEQ ID NO: 453405 - DNA, 57 bp, Artificial
  Synthetic oligonucleotide
tataagctaaatttccacctccgatgatcctaagagaaagccaacattagtccggga

SEQ ID NO: 453406 - DNA, 60 bp, Artificial
  Synthetic oligonucleotide
tataagctatggtaagattgaatgtaccagccacacacgccacacccatggttacacact

SEQ ID NO: 453407 - DNA, 58 bp, Artificial
  Synthetic oligonucleotide
tataagctcggacggtgcccgacacatttgagccgctttggttgagggagaatcttaa

SEQ ID NO: 453408 - DNA, 60 bp, Artificial
  Synthetic oligonucleotide
tataagctttgcaagtgatacgctagactcaagcatgaaaatgtatctcgttggaggtct

SEQ ID NO: 453409 - DNA, 57 bp, Artificial
  Synthetic oligonucleotide
tataaggaagtcccgcttagtgcacttagatggatccggtatttacaccgccgcgta

SEQ ID NO: 453410 - DNA, 55 bp, Artificial
  Synthetic oligonucleotide
tataaggagcaccagagtattgtaatagatcatcgatcaagcaagcgagagctaa

SEQ ID NO: 453411 - DNA, 55 bp, Artificial
  Synthetic oligonucleotide
tataaggcaattcaccacttgtccagagcgtttccgaacgtgacagggtttgtca

SEQ ID NO: 453412 - DNA, 60 bp, Artificial
  Synthetic oligonucleotide
tataaggcagctaactctcgccgctgacaaggggtacgaggttgtcgcgaatctattcca

SEQ ID NO: 453413 - DNA, 60 bp, Artificial
  Synthetic oligonucleotide
tataaggcatggttgtatgactcttacactcatcggtagttcaccacatgagtatttgag

SEQ ID NO: 453414 - DNA, 53 bp, Artificial
  Synthetic oligonucleotide
tataaggcctttctaagtaaacagtatctgaacctttaccccgttgcccggca

SEQ ID NO: 453415 - DNA, 54 bp, Artificial
  Synthetic oligonucleotide
tataaggcgtcgttactgtaaaccctagggtttagatccaagtgaccgcacaag

SEQ ID NO: 453416 - DNA, 52 bp, Artificial
  Synthetic oligonucleotide
tataaggctcgaccaggaattgcgtccgtacagaaagctaccgagagcgcag

SEQ ID NO: 453417 - DNA, 55 bp, Artificial
  Synthetic oligonucleotide
tataaggggcttaccctggaatccttgtgatttccaggtaggacacctaggagtg

SEQ ID NO: 453418 - DNA, 56 bp, Artificial
  Synthetic oligonucleotide
tataagggtttgtaacccctcgttgcaagcatagtcggaaataccagactgcttac

SEQ ID NO: 453419 - DNA, 57 bp, Artificial
  Synthetic oligonucleotide
tataaggtggatcaacctgatggtccgaatgccctgtctaggaaggggttcttgaag

SEQ ID NO: 453420 - DNA, 51 bp, Artificial
  Synthetic oligonucleotide
tataagtacagtacaatgtactcatggcatcaagccagtggtaactacaca

SEQ ID NO: 453421 - DNA, 55 bp, Artificial
  Synthetic oligonucleotide
tataagtacgagcctgttgggttcattgatcctacttgtaatgtacacgttgtag

SEQ ID NO: 453422 - DNA, 50 bp, Artificial
  Synthetic oligonucleotide
tataagtattttgactgctggaccagtagatgtataagaacagctatgtt

SEQ ID NO: 453423 - DNA, 57 bp, Artificial
  Synthetic oligonucleotide
tataagtcacacaacacaactttcaagactctgataggcagtccagaatcagggtat

SEQ ID NO: 453424 - DNA, 59 bp, Artificial
  Synthetic oligonucleotide
tataagtggaggttcgccagtcccttcagcaaggattggaccacgaaagcgcgaaggca

SEQ ID NO: 453425 - DNA, 60 bp, Artificial
  Synthetic oligonucleotide
tataagtggatcattggtgtcaagtgatgctcaattatttaacaggcccttctggctaca

SEQ ID NO: 453426 - DNA, 55 bp, Artificial
  Synthetic oligonucleotide
tataagtttcgacttacgaccgcacttgccttctgacgccttgttagcgaccgtg

SEQ ID NO: 453427 - DNA, 58 bp, Artificial
  Synthetic oligonucleotide
tataataaggggcatgatgccagtactgtgggccggcatgggtacggggggcagaaac

SEQ ID NO: 453428 - DNA, 56 bp, Artificial
  Synthetic oligonucleotide
tataatacaccggaaaggttcctggaaggaatgccaacaagaagaggcataaacaa

SEQ ID NO: 453429 - DNA, 55 bp, Artificial
  Synthetic oligonucleotide
tataatacctatggggacacctgggagggagtaactgcaattattaggatcctac

SEQ ID NO: 453430 - DNA, 54 bp, Artificial
  Synthetic oligonucleotide
tataatactacttgggaaggaaatagcactgaagacaatatcacactcccatgc

SEQ ID NO: 453431 - DNA, 59 bp, Artificial
  Synthetic oligonucleotide
tataatagaaggctaactgagcaagtgggtgtcactgaccctttatttttcacatcacc

SEQ ID NO: 453432 - DNA, 57 bp, Artificial
  Synthetic oligonucleotide
tataatagctggctgagcacccccctgtataaggaaggtagggtcccctgtatagtc

SEQ ID NO: 453433 - DNA, 52 bp, Artificial
  Synthetic oligonucleotide
tataatattaccggatggccgcccgaaatttcgtggtgggcccccccctgtc

SEQ ID NO: 453434 - DNA, 55 bp, Artificial
  Synthetic oligonucleotide
tataatattaccggatggccgcgcggagtacgctccccccacgcgcgcacgctcc

SEQ ID NO: 453435 - DNA, 58 bp, Artificial
  Synthetic oligonucleotide
tataatattaccggatggccgcgcttcggagtacgctctctctcctctcccctggtgc

SEQ ID NO: 453436 - DNA, 59 bp, Artificial
  Synthetic oligonucleotide
tataatcacagacacagcgtaggagcaaccctggaagcattgttccaaggaccaccggt

SEQ ID NO: 453437 - DNA, 60 bp, Artificial
  Synthetic oligonucleotide
tataatcacattaccatcttcacatgaccctctatgagcacaatagttaaaagctaacac

SEQ ID NO: 453438 - DNA, 55 bp, Artificial
  Synthetic oligonucleotide
tataatcccgaatatcgggtctagaccctgggtaaggggtcagtctggtagaata

SEQ ID NO: 453439 - DNA, 56 bp, Artificial
  Synthetic oligonucleotide
tataatcggtattcagttggtatcgtgtttatagcaagttgatatcaacatgctat

SEQ ID NO: 453440 - DNA, 60 bp, Artificial
  Synthetic oligonucleotide
tataatctgacgaattccatcaaacccggagataccagtctaccagacgcggaagttgca

SEQ ID NO: 453441 - DNA, 60 bp, Artificial
  Synthetic oligonucleotide
tataatctgtggaagctatccagactccatgtcagacttataccccttgcaggaaaagcg

SEQ ID NO: 453442 - DNA, 59 bp, Artificial
  Synthetic oligonucleotide
tataatcttactatgcattgtaagaggccaggaaataagacagttgtaccaataacact

SEQ ID NO: 453443 - DNA, 58 bp, Artificial
  Synthetic oligonucleotide
tataatgatgcagagaggcaattataggaatcaaagaaaggctgtcaagtgttttaat

SEQ ID NO: 453444 - DNA, 60 bp, Artificial
  Synthetic oligonucleotide
tataatggaggagaccgacagtcatatcgtacccatgctgactcagccttccaccgcgtt

SEQ ID NO: 453445 - DNA, 60 bp, Artificial
  Synthetic oligonucleotide
tataatggaggtgatcatacagcaacttatggcaccacagtggttaaccggatggggacg

SEQ ID NO: 453446 - DNA, 60 bp, Artificial
  Synthetic oligonucleotide
tataatggtcgaacatttaacgttatacctgagatgcctgggtcggtcattgctgactgc

SEQ ID NO: 453447 - DNA, 60 bp, Artificial
  Synthetic oligonucleotide
tataatggtggcatcagtgtttggaagggggctgtccaaatgtcaactacacagtatccg

SEQ ID NO: 453448 - DNA, 59 bp, Artificial
  Synthetic oligonucleotide
tataatggttatatgattaatttcaagatgtctggattaaggtttttgtttgcactgat

SEQ ID NO: 453449 - DNA, 53 bp, Artificial
  Synthetic oligonucleotide
tataatgtagcagctagttatctaagtaaatatgcctatgtagcttgcctcag

SEQ ID NO: 453450 - DNA, 53 bp, Artificial
  Synthetic oligonucleotide
tataattaaatgcgttcggaggatgcatcaactgagattccattatagaaata

SEQ ID NO: 453451 - DNA, 60 bp, Artificial
  Synthetic oligonucleotide
tataattacgatcacctcgattttcgatagtgcccagaattatggaatcaacttgccaat

SEQ ID NO: 453452 - DNA, 58 bp, Artificial
  Synthetic oligonucleotide
tataattagaaacagtgcagatccccatacagttgtggccactctggcattaatagga

SEQ ID NO: 453453 - DNA, 54 bp, Artificial
  Synthetic oligonucleotide
tataattcaggaagtggaccccaggttggacctaatcatttaggaagtggaccc

SEQ ID NO: 453454 - DNA, 56 bp, Artificial
  Synthetic oligonucleotide
tataattcatgagaaagatattcaacttacctcaccctttgtcccaaaaacagtag

SEQ ID NO: 453455 - DNA, 59 bp, Artificial
  Synthetic oligonucleotide
tataattctaattacattagtagcttgtgttcgttggataaagacgtgccaatcggata

SEQ ID NO: 453456 - DNA, 54 bp, Artificial
  Synthetic oligonucleotide
tataattgcattggcgttgctttcggcgacgttagtcaccggtgtgggcacttg

SEQ ID NO: 453457 - DNA, 60 bp, Artificial
  Synthetic oligonucleotide
tataattgtgggaagccaggacatcttgcgaggcagtgtagacagggaataatatgtcat

SEQ ID NO: 453458 - DNA, 59 bp, Artificial
  Synthetic oligonucleotide
tataattgttgggcatcgttcagcgatcttgaacgggattcatgtaatggcgtttacgg

SEQ ID NO: 453459 - DNA, 60 bp, Artificial
  Synthetic oligonucleotide
tataatttatccacgtccccgcttacatcatctgttgcctcgggcaccaatctggtcctc

SEQ ID NO: 453460 - DNA, 55 bp, Artificial
  Synthetic oligonucleotide
tataattttgacattgaaacgtgggatccattggatacaccattttcgaaacggc

SEQ ID NO: 453461 - DNA, 59 bp, Artificial
  Synthetic oligonucleotide
tatacaaaatcgtctcttaggagagccattaaggagggagacctcaatgcattaggagg

SEQ ID NO: 453462 - DNA, 60 bp, Artificial
  Synthetic oligonucleotide
tatacaaacagctttttggtccatggttgatggtgcctcggttgtctgagcctctaatca

SEQ ID NO: 453463 - DNA, 60 bp, Artificial
  Synthetic oligonucleotide
tatacaaataggaccaggaagggcattttatgcaacaggagatataataggagacattag

SEQ ID NO: 453464 - DNA, 60 bp, Artificial
  Synthetic oligonucleotide
tatacaaatgagtcaacaatagcatatgaatatgcaaagctagcagatgatgatagtaat

SEQ ID NO: 453465 - DNA, 58 bp, Artificial
  Synthetic oligonucleotide
tatacaacaaagtgacaccgcacaactaataccatgtaaggaagataataggcgacgt

SEQ ID NO: 453466 - DNA, 58 bp, Artificial
  Synthetic oligonucleotide
tatacaacacggtagcaactctctactgtgtacataaaaggatagatgtaagagacac

SEQ ID NO: 453467 - DNA, 57 bp, Artificial
  Synthetic oligonucleotide
tatacaagaaatacgtatacaatgtcccagaaaagaaaggtgaatcctcaaagtgcg

SEQ ID NO: 453468 - DNA, 60 bp, Artificial
  Synthetic oligonucleotide
tatacaagaaggacagttcctatgtagcagtgggttcagaaacctacaacagaagattca

SEQ ID NO: 453469 - DNA, 55 bp, Artificial
  Synthetic oligonucleotide
tatacaagagtcatgtgacaagcactattgggatgccatcagatataggtactgt

SEQ ID NO: 453470 - DNA, 56 bp, Artificial
  Synthetic oligonucleotide
tatacaagattggccaggttttaggtattcatgttgggggtaatggaagagatggt

SEQ ID NO: 453471 - DNA, 54 bp, Artificial
  Synthetic oligonucleotide
tatacaagtgactaatgtagcacacaatagtttatgcaaccgaaataggttggg

SEQ ID NO: 453472 - DNA, 60 bp, Artificial
  Synthetic oligonucleotide
tatacaatacaacgacacttatgtttgtacatgacagagctgcaccgtttatgagaagtt

SEQ ID NO: 453473 - DNA, 60 bp, Artificial
  Synthetic oligonucleotide
tatacaattaggaccaggacgagcattttatacaacgggagatataataggagacatcag

SEQ ID NO: 453474 - DNA, 60 bp, Artificial
  Synthetic oligonucleotide
tatacacaccgtgccctcagtgatgttagcttgccaaggcgcttcactcgaaggcagctg

SEQ ID NO: 453475 - DNA, 50 bp, Artificial
  Synthetic oligonucleotide
tatacacataatggactatcaagagtatcaacaattcttggctagaatca

SEQ ID NO: 453476 - DNA, 60 bp, Artificial
  Synthetic oligonucleotide
tatacacatctgtagagaatgcgcagcaggataaagggatcgctatcccacatgatatag

SEQ ID NO: 453477 - DNA, 55 bp, Artificial
  Synthetic oligonucleotide
tatacaccacgtgcttgctttgtcatttgcaactttacaattgtacaatgtcgag

SEQ ID NO: 453478 - DNA, 60 bp, Artificial
  Synthetic oligonucleotide
tatacacccagtcacaataggagagtgcccaaaatacgtcaggagtgccaaattgaggat

SEQ ID NO: 453479 - DNA, 60 bp, Artificial
  Synthetic oligonucleotide
tatacaccttgtcagtcccacattggcttatccaccataagttgggcacgttttcatgtg

SEQ ID NO: 453480 - DNA, 51 bp, Artificial
  Synthetic oligonucleotide
tatacacgagaacgcagcgatatactacccgcatgggtatggtttatactc

SEQ ID NO: 453481 - DNA, 60 bp, Artificial
  Synthetic oligonucleotide
tatacacgccactctcgcattgagttgcagtgagtaattccccggtgcgtgaatccatga

SEQ ID NO: 453482 - DNA, 60 bp, Artificial
  Synthetic oligonucleotide
tatacacgccattctccgcctgaggtacagtgatgaattcccctgtgcgtgaatccatgc

SEQ ID NO: 453483 - DNA, 54 bp, Artificial
  Synthetic oligonucleotide
tatacacgtggaggttctggggataatgtttcctatcagtacataggttgttta

SEQ ID NO: 453484 - DNA, 53 bp, Artificial
  Synthetic oligonucleotide
tatacagaagaccaaggtcatttcccgcttcaacatgcattacgatcagtgtt

SEQ ID NO: 453485 - DNA, 59 bp, Artificial
  Synthetic oligonucleotide
tatacagagtacaagccgagatgaataaacgaagggcgatgaatagctggaaaacttct

SEQ ID NO: 453486 - DNA, 60 bp, Artificial
  Synthetic oligonucleotide
tatacagagttcaagcagagttgaataaaacgaaggcgatgaatagctggaaaacatcct

SEQ ID NO: 453487 - DNA, 60 bp, Artificial
  Synthetic oligonucleotide
tatacagcaacccaggtctccaagcatttttcattcaacatggggcaacaaacgcactta

SEQ ID NO: 453488 - DNA, 60 bp, Artificial
  Synthetic oligonucleotide
tatacagcccccagccgcaatgtgctggctatggattattctggatttgatgcctctcat

SEQ ID NO: 453489 - DNA, 55 bp, Artificial
  Synthetic oligonucleotide
tatacaggtctatggccctgtcatagactggaacatcagtcatcaagcgatatat

SEQ ID NO: 453490 - DNA, 56 bp, Artificial
  Synthetic oligonucleotide
tatacaggtttgtgactccaggggaacggccctcgggcatgttcgattcttcggtc

SEQ ID NO: 453491 - DNA, 60 bp, Artificial
  Synthetic oligonucleotide
tatacagtatatcgcgtgcagtagccgtgttctggcaccctacggggtcttccagggcac

SEQ ID NO: 453492 - DNA, 60 bp, Artificial
  Synthetic oligonucleotide
tatacagtcaaactgatgcttattcaatccttaaatttttgaacgatggccacaactcat

SEQ ID NO: 453493 - DNA, 55 bp, Artificial
  Synthetic oligonucleotide
tatacatacaggcggaaactcacaaaccctgtggatacctctcaggcagtggact

SEQ ID NO: 453494 - DNA, 54 bp, Artificial
  Synthetic oligonucleotide
tatacatacgattcgagtttccggtgtagttagttttcatgactttaaaccaat

SEQ ID NO: 453495 - DNA, 60 bp, Artificial
  Synthetic oligonucleotide
tatacatacgtatatgctatgtgttctgtgcttactgtggaatggtatacgagaagaagg

SEQ ID NO: 453496 - DNA, 55 bp, Artificial
  Synthetic oligonucleotide
tatacatactacagttgaggcaagttgtcctataacaacagagtgtgtctccttc

SEQ ID NO: 453497 - DNA, 60 bp, Artificial
  Synthetic oligonucleotide
tatacatataggaccagggagaacaatttttgcaacagacataataggagatataagaca

SEQ ID NO: 453498 - DNA, 60 bp, Artificial
  Synthetic oligonucleotide
tatacatcaattgtatgtgcattcttgttggtggcttgtgctataaccccagtatttgga

SEQ ID NO: 453499 - DNA, 60 bp, Artificial
  Synthetic oligonucleotide
tatacatctaggaccagggcgaacatggtatgcaacaggacaaataataggagagataag

SEQ ID NO: 453500 - DNA, 59 bp, Artificial
  Synthetic oligonucleotide
tatacatcttacgtggaccattcacgtttgacctgtcgagccaaattaatattagccta

SEQ ID NO: 453501 - DNA, 58 bp, Artificial
  Synthetic oligonucleotide
tatacatgacaaatcatcaagcaacgatcactatgcctgcatctataacgttgttaca

SEQ ID NO: 453502 - DNA, 54 bp, Artificial
  Synthetic oligonucleotide
tatacatggaatatgcggaaataggggctagatttgacgatgagccgactgatg

SEQ ID NO: 453503 - DNA, 60 bp, Artificial
  Synthetic oligonucleotide
tatacattaaaggcgccgatgtaaatacatcacacgccgttcacagacttgttaacgagc

SEQ ID NO: 453504 - DNA, 60 bp, Artificial
  Synthetic oligonucleotide
tatacattattgtgcccctgctggttttgcgatcatgaaatgtaatgataagacattcaa

SEQ ID NO: 453505 - DNA, 59 bp, Artificial
  Synthetic oligonucleotide
tatacattgaggtattgcatttgactcaaggaacctgctgggaacaaatgtacaccccg

SEQ ID NO: 453506 - DNA, 58 bp, Artificial
  Synthetic oligonucleotide
tatacattgttgtaaagacactctattgtcttgagggtggagcctgttatagggcaag

SEQ ID NO: 453507 - DNA, 53 bp, Artificial
  Synthetic oligonucleotide
tatacatttaaaccctagcaaaacaaaaagatggggttattcccttcacttca

SEQ ID NO: 453508 - DNA, 57 bp, Artificial
  Synthetic oligonucleotide
tatacatttcaagaagactaatggggacctttacctggaccttgtctgattctgccg

SEQ ID NO: 453509 - DNA, 53 bp, Artificial
  Synthetic oligonucleotide
tataccaaacgagttagctaagcctaagaaattcaactataatgattatcccc

SEQ ID NO: 453510 - DNA, 60 bp, Artificial
  Synthetic oligonucleotide
tataccaacaactagagatgactatgcttggcaatctggaacaaatgcatctgtattttg

SEQ ID NO: 453511 - DNA, 54 bp, Artificial
  Synthetic oligonucleotide
tataccaacagtgtatcactactgattcggtgccagacggtgctatcgtagacg

SEQ ID NO: 453512 - DNA, 60 bp, Artificial
  Synthetic oligonucleotide
tataccaacatgtgattgcacacaagctacatattattgtaagcacaaaaacaggtactt

SEQ ID NO: 453513 - DNA, 59 bp, Artificial
  Synthetic oligonucleotide
tataccaagcgtcgttactgtacacctttgggctaagatccagatgcccgcacaaatag

SEQ ID NO: 453514 - DNA, 54 bp, Artificial
  Synthetic oligonucleotide
tataccaattttgtagctccgactttcctaatgtgcagacaaaggtggcttcat

SEQ ID NO: 453515 - DNA, 55 bp, Artificial
  Synthetic oligonucleotide
tataccacacacccgtatagattgtgtttattttgctacacctaatcagtacgga

SEQ ID NO: 453516 - DNA, 54 bp, Artificial
  Synthetic oligonucleotide
tataccaccccgtatcatttttcgcttcccgtacttaggattgacggagaagtc

SEQ ID NO: 453517 - DNA, 54 bp, Artificial
  Synthetic oligonucleotide
tataccacttggacgaccctctactacccttgaaccaggtcctcctgtacgtcc

SEQ ID NO: 453518 - DNA, 60 bp, Artificial
  Synthetic oligonucleotide
tataccagaagtacgtgaatatgctgccgagaaattggcggcgtaacacgatacctgatg

SEQ ID NO: 453519 - DNA, 52 bp, Artificial
  Synthetic oligonucleotide
tataccagagtgccgccttacgcctctaggacggctgccatttggctatgca

SEQ ID NO: 453520 - DNA, 55 bp, Artificial
  Synthetic oligonucleotide
tataccagcgtggatcacatgcgtttccacgtcctaagggagagctcaagtatgg

SEQ ID NO: 453521 - DNA, 59 bp, Artificial
  Synthetic oligonucleotide
tataccagtaaccataaccattgccccaatgtttctagaattgtctggcatacgatcaa

SEQ ID NO: 453522 - DNA, 55 bp, Artificial
  Synthetic oligonucleotide
tataccagtagggccagtattcccaccaggtatgaattggacagaactgattacc

SEQ ID NO: 453523 - DNA, 51 bp, Artificial
  Synthetic oligonucleotide
tataccatgtcacgaacgactgctccaactcaagcattgtgttcgaagcag

SEQ ID NO: 453524 - DNA, 60 bp, Artificial
  Synthetic oligonucleotide
tatacccacacatgcagatgcaggcacccaggtagagattgatggaattaagactaatgt

SEQ ID NO: 453525 - DNA, 58 bp, Artificial
  Synthetic oligonucleotide
tatacccatatccaaactagaaactcaaggagggacatcaattgtacccataaccata

SEQ ID NO: 453526 - DNA, 59 bp, Artificial
  Synthetic oligonucleotide
tatacccatatcgtattcccccattaggtcgatgtttactactggagcctcgttcatca

SEQ ID NO: 453527 - DNA, 57 bp, Artificial
  Synthetic oligonucleotide
tatacccatgggaccagggaaagcattttatgcaagaggagacataacaggagacat

SEQ ID NO: 453528 - DNA, 58 bp, Artificial
  Synthetic oligonucleotide
tatacccattggactggcagtcttaggtttagtttcctattctgtggttcagctaata

SEQ ID NO: 453529 - DNA, 57 bp, Artificial
  Synthetic oligonucleotide
tataccccatgtcatattctgccacccaagacaattgggagccttcctcaccaaggt

SEQ ID NO: 453530 - DNA, 55 bp, Artificial
  Synthetic oligonucleotide
tataccccccgttctactccattccctcgtgaccggagatcgtataatgccggta

SEQ ID NO: 453531 - DNA, 55 bp, Artificial
  Synthetic oligonucleotide
tataccccctcccccatatcgtaacatagaagcaatgcactcccggtcaatagct

SEQ ID NO: 453532 - DNA, 50 bp, Artificial
  Synthetic oligonucleotide
tatacccgccatggaagacgtcttttacggtcttccccttattcacattt

SEQ ID NO: 453533 - DNA, 53 bp, Artificial
  Synthetic oligonucleotide
tatacccggacgcgatatcgttcagcaaacaattgactagcatccgttacctc

SEQ ID NO: 453534 - DNA, 52 bp, Artificial
  Synthetic oligonucleotide
tatacccgggccgttcggactctccgagtgtccgaccccgccggattcgtcc

SEQ ID NO: 453535 - DNA, 55 bp, Artificial
  Synthetic oligonucleotide
tataccgaattgttgtcaatatttggcccgagtttacgtgaccccatttcagccg

SEQ ID NO: 453536 - DNA, 52 bp, Artificial
  Synthetic oligonucleotide
tataccgacacttataacccgggtgacaaagttgttcacggaaaagacgtgt

SEQ ID NO: 453537 - DNA, 60 bp, Artificial
  Synthetic oligonucleotide
tataccgcccaggcggtgctacagaatcgcctcgatcatgtgacccagaaacaacaacct

SEQ ID NO: 453538 - DNA, 58 bp, Artificial
  Synthetic oligonucleotide
tataccggatacacctgcatcatttttaatacatgatatggcatatcggtatattaac

SEQ ID NO: 453539 - DNA, 57 bp, Artificial
  Synthetic oligonucleotide
tataccggctcaaggccatcctgttactaagcgccaaaagagaaaggcgcgcgaaaa

SEQ ID NO: 453540 - DNA, 55 bp, Artificial
  Synthetic oligonucleotide
tataccgtccaacggtcaggctatgccctcaacgtatcgtattagaagagatatg

SEQ ID NO: 453541 - DNA, 52 bp, Artificial
  Synthetic oligonucleotide
tataccgtcttttcactgtccccgccccaggtacacgccagataaactaaca

SEQ ID NO: 453542 - DNA, 51 bp, Artificial
  Synthetic oligonucleotide
tataccgtgcacagatacgcccagataccaacatatgtagatggaaggttg

SEQ ID NO: 453543 - DNA, 56 bp, Artificial
  Synthetic oligonucleotide
tatacctaaggacacatatttcatggttgtaacaatgggaggggctagttttacca

SEQ ID NO: 453544 - DNA, 58 bp, Artificial
  Synthetic oligonucleotide
tatacctatgggaccaggcaaagcattttacacaacaggacaaataataggggatata

SEQ ID NO: 453545 - DNA, 51 bp, Artificial
  Synthetic oligonucleotide
tatacctcaacaataccgccgcatgaagacccttctgttcatacagagtca

SEQ ID NO: 453546 - DNA, 60 bp, Artificial
  Synthetic oligonucleotide
tatacctccttagatagatcgctagacacggtcccggagttggctccaacgctcacaaga

SEQ ID NO: 453547 - DNA, 60 bp, Artificial
  Synthetic oligonucleotide
tatacctggcgctcctgcttgcacagctactcctcatgaataaaaacagtccatgcacca

SEQ ID NO: 453548 - DNA, 59 bp, Artificial
  Synthetic oligonucleotide
tatacctggggggaaaatgagaccgatgtctttctgctaaatagcacgagacctccgca

SEQ ID NO: 453549 - DNA, 59 bp, Artificial
  Synthetic oligonucleotide
tatacctgttagtcctgctgctgttcctcactttcttgttggttctcctggattggaaa

SEQ ID NO: 453550 - DNA, 60 bp, Artificial
  Synthetic oligonucleotide
tataccttcctctagagcgttgaagtcgaacggaggtatgatcccatcatggccgtatgg

SEQ ID NO: 453551 - DNA, 57 bp, Artificial
  Synthetic oligonucleotide
tatacctttggagacagatccaggtgtccacataaataattatggggtcccaaagaa

SEQ ID NO: 453552 - DNA, 58 bp, Artificial
  Synthetic oligonucleotide
tatacgaactagagcatctcgagttctgcaacctccaacctttaaaccttgggagtca

SEQ ID NO: 453553 - DNA, 55 bp, Artificial
  Synthetic oligonucleotide
tatacgaaggaagagccacggttcctcttgaattggggacgtttgctggtcccac

SEQ ID NO: 453554 - DNA, 54 bp, Artificial
  Synthetic oligonucleotide
tatacgacacaaacctagtatcgtgtgttatgtatgtagaagagtcgtttaata

SEQ ID NO: 453555 - DNA, 50 bp, Artificial
  Synthetic oligonucleotide
tatacgacatatgtgcttggggaaaattctattgacttcgaggatgttgg

SEQ ID NO: 453556 - DNA, 60 bp, Artificial
  Synthetic oligonucleotide
tatacgactataaggagaacagatttgttgaaattggtgtgacaaggagagaagttcaca

SEQ ID NO: 453557 - DNA, 55 bp, Artificial
  Synthetic oligonucleotide
tatacgatgggacaagaccgagatgttgaattctatcttgatcgacaagatgtag

SEQ ID NO: 453558 - DNA, 57 bp, Artificial
  Synthetic oligonucleotide
tatacgcaaccaacagctaccgctccaagcttgccaccggatccaccaacctaccgt

SEQ ID NO: 453559 - DNA, 50 bp, Artificial
  Synthetic oligonucleotide
tatacgcgcgtataatgggctattatgtgctgattatcgtaacacagtcg

SEQ ID NO: 453560 - DNA, 59 bp, Artificial
  Synthetic oligonucleotide
tatacgcgtaaggaaatctgtgaaacgcaggagggatcggagtatcttctccacaacaa

SEQ ID NO: 453561 - DNA, 59 bp, Artificial
  Synthetic oligonucleotide
tatacggaaaacaacagcctggcatctaggacatttattacgagatattactgagtcct

SEQ ID NO: 453562 - DNA, 58 bp, Artificial
  Synthetic oligonucleotide
tatacggaaacatgccaaagcggaattacgatcaccgccttctctaccccgatgtcga

SEQ ID NO: 453563 - DNA, 57 bp, Artificial
  Synthetic oligonucleotide
tatacggagcatgtacggaggtgtacgattagagggtaatacaataaccttctacaa

SEQ ID NO: 453564 - DNA, 60 bp, Artificial
  Synthetic oligonucleotide
tatacgggcactagcgccatgggcttcgggtatgagtggttccggcagatggtaaccaga

SEQ ID NO: 453565 - DNA, 55 bp, Artificial
  Synthetic oligonucleotide
tatacggtagtcattgccaaacgtgcccggcaacaacttcacggtgtacgtgttg

SEQ ID NO: 453566 - DNA, 60 bp, Artificial
  Synthetic oligonucleotide
tatacggtattcagaattgtagctgtcgtcagtgacatcgaatctccaaccgtgaacatt

SEQ ID NO: 453567 - DNA, 59 bp, Artificial
  Synthetic oligonucleotide
tatacggtctgctggtgactgaacccagcccaatttccgatctacttgcccacgattcg

SEQ ID NO: 453568 - DNA, 55 bp, Artificial
  Synthetic oligonucleotide
tatacggtgctgactgcctctttgaatctttcaatataatggctaagggtctcga

SEQ ID NO: 453569 - DNA, 58 bp, Artificial
  Synthetic oligonucleotide
tatacgtaggccttgtcttgcgtggcaagtaaacgataaaggcgatctccgcgccact

SEQ ID NO: 453570 - DNA, 60 bp, Artificial
  Synthetic oligonucleotide
tatacgtatatcaactaatggggcctcatgcatcatcaatatatcaatagcctctaccat

SEQ ID NO: 453571 - DNA, 60 bp, Artificial
  Synthetic oligonucleotide
tatacgtatatcaattactggggcttcttgcatcatcagtatatcgatagtttcgaccat

SEQ ID NO: 453572 - DNA, 55 bp, Artificial
  Synthetic oligonucleotide
tatacgtctacgcctattggagatcatggggcagttcataacactgatgcagtcg

SEQ ID NO: 453573 - DNA, 58 bp, Artificial
  Synthetic oligonucleotide
tatacgtgcctagaggcgccagggatggcctaggcgaggggttgacagggtaggagtg

SEQ ID NO: 453574 - DNA, 56 bp, Artificial
  Synthetic oligonucleotide
tatacgtgcgccgacacaatttactaaaacggagctcgacgccgtaaatttgtatg

SEQ ID NO: 453575 - DNA, 55 bp, Artificial
  Synthetic oligonucleotide
tatacgtggcagacatcctccaacccgtcggtattttacacctatggagcgcccc

SEQ ID NO: 453576 - DNA, 60 bp, Artificial
  Synthetic oligonucleotide
tatacgtgggcctacgggactgatgagatatcgtggatggaagccgctcttatagcccaa

SEQ ID NO: 453577 - DNA, 55 bp, Artificial
  Synthetic oligonucleotide
tatacgtgtctgtaagacaggatgatggccaaatgagaccaattatggtcgttcc

SEQ ID NO: 453578 - DNA, 59 bp, Artificial
  Synthetic oligonucleotide
tatacgttcaggcatcaggaagggtgacagtttcgaccagaaggagccaacaaaccata

SEQ ID NO: 453579 - DNA, 58 bp, Artificial
  Synthetic oligonucleotide
tatactaacttccttctggacactaagggcagactctatcgttggcggtcgtccgtca

SEQ ID NO: 453580 - DNA, 60 bp, Artificial
  Synthetic oligonucleotide
tatactaccacgcaggagtcaagggttggactgagggcgacgctgtaagcacgacatggg

SEQ ID NO: 453581 - DNA, 60 bp, Artificial
  Synthetic oligonucleotide
tatactacctcaccttatatttatactatcgatcatagtctatattggtaatgctcatag

SEQ ID NO: 453582 - DNA, 56 bp, Artificial
  Synthetic oligonucleotide
tatactagaactctctatggagttttgggacacgtggcggccatcagtataatatt

SEQ ID NO: 453583 - DNA, 51 bp, Artificial
  Synthetic oligonucleotide
tatactagccgatttcttttccggtgacgtcgaaaagttcgaagtaccctt

SEQ ID NO: 453584 - DNA, 60 bp, Artificial
  Synthetic oligonucleotide
tatactataatgcacttatcaataaactctcatatagttcattctgctttctttactgta

SEQ ID NO: 453585 - DNA, 55 bp, Artificial
  Synthetic oligonucleotide
tatactatgatggacttctgctacgctttgaggcattttgacccaaaggactgcg

SEQ ID NO: 453586 - DNA, 55 bp, Artificial
  Synthetic oligonucleotide
tatactatgcgaccctccctcgatctaaaccacaaaacactacgccttgaacgcc

SEQ ID NO: 453587 - DNA, 57 bp, Artificial
  Synthetic oligonucleotide
tatactatgctgggggagattttaaactactacacacattgggctgggtccctgaag

SEQ ID NO: 453588 - DNA, 60 bp, Artificial
  Synthetic oligonucleotide
tatactattggctcatctttctacagaaacctcgtatggataataaaaactaattctgca

SEQ ID NO: 453589 - DNA, 60 bp, Artificial
  Synthetic oligonucleotide
tatactcagcagcctcaccgtaacccagctcctgaggcgactgcaccagtggataagctc

SEQ ID NO: 453590 - DNA, 60 bp, Artificial
  Synthetic oligonucleotide
tatactcccacactgatgttactatgtccaagaagaataagggcgtgtacgtcagtgagg

SEQ ID NO: 453591 - DNA, 59 bp, Artificial
  Synthetic oligonucleotide
tatactcgaatgctcgctttggggcgttgagtccgtcgattcttgggtgaatcgttcga

SEQ ID NO: 453592 - DNA, 58 bp, Artificial
  Synthetic oligonucleotide
tatactcgcgtagaagcttataatcaagttactacagttcattcggaaaaatggactc

SEQ ID NO: 453593 - DNA, 60 bp, Artificial
  Synthetic oligonucleotide
tatactcttactacttccactggccctatcttgctcagagtcactaatttccaattcaaa

SEQ ID NO: 453594 - DNA, 58 bp, Artificial
  Synthetic oligonucleotide
tatactgaagagggtcgctatgcccacggggggtccctcagcaccactacgtggtcgc

SEQ ID NO: 453595 - DNA, 56 bp, Artificial
  Synthetic oligonucleotide
tatactgagatgtaatgataccaactattcaggcttcatgcacaactgtagtaaag

SEQ ID NO: 453596 - DNA, 60 bp, Artificial
  Synthetic oligonucleotide
tatactgcccccactcgcgggccagctgctaattgccggcgttccgcactgcgcgggctc

SEQ ID NO: 453597 - DNA, 60 bp, Artificial
  Synthetic oligonucleotide
tatactgctctactactcaactgctgcttctagcttggctgtaacattaatgatagctat

SEQ ID NO: 453598 - DNA, 59 bp, Artificial
  Synthetic oligonucleotide
tatactgcttggatatgtccaacggcccaacatgctggaatggtcaagacggcgggcta

SEQ ID NO: 453599 - DNA, 55 bp, Artificial
  Synthetic oligonucleotide
tatactggagagcgcgtgacgagctgagtaaaccagggcagggaccgaaactcgc

SEQ ID NO: 453600 - DNA, 55 bp, Artificial
  Synthetic oligonucleotide
tatactgggaaggacccgttaatgggcccgtgccacggattagtggctttgtcta

SEQ ID NO: 453601 - DNA, 58 bp, Artificial
  Synthetic oligonucleotide
tatactgggctttaatcattaaagcccaataagaaatgttgggcctcaagcactattc

SEQ ID NO: 453602 - DNA, 60 bp, Artificial
  Synthetic oligonucleotide
tatactggtgtccctgtgacccgtataatggcccaatctacagatgacgccatctccttg

SEQ ID NO: 453603 - DNA, 60 bp, Artificial
  Synthetic oligonucleotide
tatactgtacatgtgcaatgtaatgctagtaaattccaccagggcactttgctagtagtt

SEQ ID NO: 453604 - DNA, 60 bp, Artificial
  Synthetic oligonucleotide
tatactgtctggacatgtcagacggcccgacatgttggaatggccaagatggagggctag

SEQ ID NO: 453605 - DNA, 59 bp, Artificial
  Synthetic oligonucleotide
tatactgttatactttctggcaagactactatatacatcctagatgtcctgcgggaggg

SEQ ID NO: 453606 - DNA, 60 bp, Artificial
  Synthetic oligonucleotide
tatacttacccttggcattgtggcgagagacggtcaccgcgctttcgacggagctgttgc

SEQ ID NO: 453607 - DNA, 55 bp, Artificial
  Synthetic oligonucleotide
tatacttagctctcactctgctttctgtggctgccccgatgctgtcgctcacttc

SEQ ID NO: 453608 - DNA, 60 bp, Artificial
  Synthetic oligonucleotide
tatacttatatttcctggatgtgtatcagattccacatcacgagtcgaaatggaaatgac

SEQ ID NO: 453609 - DNA, 60 bp, Artificial
  Synthetic oligonucleotide
tatacttattagcacctttctttactgctatctggtatgttgacaatgaacattgtttca

SEQ ID NO: 453610 - DNA, 57 bp, Artificial
  Synthetic oligonucleotide
tatacttccggagttttcaggtgggacttcaggaatgttgacaacggacatggtaca

SEQ ID NO: 453611 - DNA, 59 bp, Artificial
  Synthetic oligonucleotide
tatacttcgtttaactactctgattcctgttgaccaacacacaaactttatggatcaca

SEQ ID NO: 453612 - DNA, 54 bp, Artificial
  Synthetic oligonucleotide
tatacttgctcagtctagttgcggtagaagaaaacagatccaaggttacttgga

SEQ ID NO: 453613 - DNA, 60 bp, Artificial
  Synthetic oligonucleotide
tatactttatgcagaggcaggaagtactggataaaaaccatgttgctgatattgacaagt

SEQ ID NO: 453614 - DNA, 59 bp, Artificial
  Synthetic oligonucleotide
tatacttttctagccaggaaactgtcttgcaactttgggcatgttttacacacattatg

SEQ ID NO: 453615 - DNA, 57 bp, Artificial
  Synthetic oligonucleotide
tatagaaactggtggacaactagtaactgtggactaccattagtaaaatatacagga

SEQ ID NO: 453616 - DNA, 54 bp, Artificial
  Synthetic oligonucleotide
tatagaaatcatatcacgtttgggcaatcacgaatgtttatcccacacattacg

SEQ ID NO: 453617 - DNA, 59 bp, Artificial
  Synthetic oligonucleotide
tatagaaatgagtggattagcctgagtgatcaggttagtctcctacaaaaacaaaatag

SEQ ID NO: 453618 - DNA, 55 bp, Artificial
  Synthetic oligonucleotide
tatagaacgtcaagtggcaggagtcttgtgggttttttgtcgtcaacaaaaccac

SEQ ID NO: 453619 - DNA, 60 bp, Artificial
  Synthetic oligonucleotide
tatagaagcccaagtgaggttaaagcttgtatgacactgttcattgtctcacctccttga

SEQ ID NO: 453620 - DNA, 60 bp, Artificial
  Synthetic oligonucleotide
tatagaagtattacatttgactcaaggaacctgctgggagcagatgtacacaccaggagg

SEQ ID NO: 453621 - DNA, 55 bp, Artificial
  Synthetic oligonucleotide
tatagaagtcccgacgtgccaaggggatgtgaaggcccttgtaaagttcaatcgt

SEQ ID NO: 453622 - DNA, 60 bp, Artificial
  Synthetic oligonucleotide
tatagaatgaaacatctagtatgggcaagcagggagctggaaagattcgcacttaaccct

SEQ ID NO: 453623 - DNA, 60 bp, Artificial
  Synthetic oligonucleotide
tatagaatggtaaatggtgtcgcagaatttaatttagacgatgttagagattgggagcaa

SEQ ID NO: 453624 - DNA, 60 bp, Artificial
  Synthetic oligonucleotide
tatagaatgtagtatgactgatcatatgagagttgctatatcacattattcagctcaatt

SEQ ID NO: 453625 - DNA, 55 bp, Artificial
  Synthetic oligonucleotide
tatagaatgtataggagccctgatgttcctaggggttgtgaaggtccgtgtaagg

SEQ ID NO: 453626 - DNA, 56 bp, Artificial
  Synthetic oligonucleotide
tatagacaagaagaggtttaatatggctaaaggacgaaagcttccgtcggttatga

SEQ ID NO: 453627 - DNA, 60 bp, Artificial
  Synthetic oligonucleotide
tatagacaattgcttacgaattcatataccgtagatctttcagatgaaatacaggaaatt

SEQ ID NO: 453628 - DNA, 57 bp, Artificial
  Synthetic oligonucleotide
tatagacacccagaggtggacttcatagtaaaattcaacagaaaacctccattccta

SEQ ID NO: 453629 - DNA, 60 bp, Artificial
  Synthetic oligonucleotide
tatagacacctcgtcaagatgcgttcagacctcaagtactcccgacgtattattctccaa

SEQ ID NO: 453630 - DNA, 55 bp, Artificial
  Synthetic oligonucleotide
tatagacagggcgtcccaccccgctccccgaaggtctaataacagcagacaactt

SEQ ID NO: 453631 - DNA, 60 bp, Artificial
  Synthetic oligonucleotide
tatagacatcttggtgtattgtaacataatatgtggtagcctgtacggatcccacatagg

SEQ ID NO: 453632 - DNA, 56 bp, Artificial
  Synthetic oligonucleotide
tatagaccattattctcatcgtctgacagaggtgtttttaaacgtcgtacattggg

SEQ ID NO: 453633 - DNA, 57 bp, Artificial
  Synthetic oligonucleotide
tatagacccaggtaaggcccaaggatctacatactatgggcctggaccttgtaacca

SEQ ID NO: 453634 - DNA, 50 bp, Artificial
  Synthetic oligonucleotide
tatagacctggatacacttacaaacgggagtccagctatacggattccct

SEQ ID NO: 453635 - DNA, 59 bp, Artificial
  Synthetic oligonucleotide
tatagacgacccacagtggtgtatcaagaggctcatcaaaggggtgtataggcccaaac

SEQ ID NO: 453636 - DNA, 60 bp, Artificial
  Synthetic oligonucleotide
tatagacgccattcctgagttgagttgcagtgatgctctcccctgtgcgaaaatccatag

SEQ ID NO: 453637 - DNA, 57 bp, Artificial
  Synthetic oligonucleotide
tatagacgccattctctgcctgagctgcagtgatgggttcccctgtgcgaaaatcca

SEQ ID NO: 453638 - DNA, 56 bp, Artificial
  Synthetic oligonucleotide
tatagacttagaatctgctagtgatttttttattcatcccagtttattaaaacgta

SEQ ID NO: 453639 - DNA, 60 bp, Artificial
  Synthetic oligonucleotide
tatagagaactcctggagaagggtctagatcgtgaaacattccttgatcttatagaccgc

SEQ ID NO: 453640 - DNA, 57 bp, Artificial
  Synthetic oligonucleotide
tatagagaagaactattccccagacacagtcggttacgatcttgtccgagatctgat

SEQ ID NO: 453641 - DNA, 60 bp, Artificial
  Synthetic oligonucleotide
tatagaggatgtggctcctgggcatcatgccgcccaaaggtctagtcagcgatctatact

SEQ ID NO: 453642 - DNA, 55 bp, Artificial
  Synthetic oligonucleotide
tatagaggatgttctcataaggatttctatctccaacttgatctgacacaaacat

SEQ ID NO: 453643 - DNA, 51 bp, Artificial
  Synthetic oligonucleotide
tatagaggccctaaagtgccatttaaaggtgtttgtgaagtaggctcagtt

SEQ ID NO: 453644 - DNA, 60 bp, Artificial
  Synthetic oligonucleotide
tatagagtatgggacaactgacgatgaagtgtatatacaaagagcatttatgtcattgtc

SEQ ID NO: 453645 - DNA, 55 bp, Artificial
  Synthetic oligonucleotide
tatagataagcagcgcaacttggcttccctgcttgaacactcatgtaataaaatg

SEQ ID NO: 453646 - DNA, 54 bp, Artificial
  Synthetic oligonucleotide
tatagatagtcaagcaatggctttctactgtctgatggaagggaacgcgattga

SEQ ID NO: 453647 - DNA, 56 bp, Artificial
  Synthetic oligonucleotide
tatagatatggtgatgtccccttcgactcattcagagatagagtgattggtctcag

SEQ ID NO: 453648 - DNA, 58 bp, Artificial
  Synthetic oligonucleotide
tatagatatgtggttagctattatcttgattgaaccaaacgtacctcaagaattaaaa

SEQ ID NO: 453649 - DNA, 55 bp, Artificial
  Synthetic oligonucleotide
tatagatccctcccttttcgtgaaagactcgccagagctagacctccttggtgta

SEQ ID NO: 453650 - DNA, 60 bp, Artificial
  Synthetic oligonucleotide
tatagatgtgagaacacgctcagaatcacttatggtgcaagaaggagagtactcacgtgt

SEQ ID NO: 453651 - DNA, 55 bp, Artificial
  Synthetic oligonucleotide
tatagatttatacaatccagagctacgagatgtcctactcagtctcccagtactg

SEQ ID NO: 453652 - DNA, 60 bp, Artificial
  Synthetic oligonucleotide
tatagcaaagctcagtcgtccagtctattcagatactccacagggttatgtacgtgttag

SEQ ID NO: 453653 - DNA, 60 bp, Artificial
  Synthetic oligonucleotide
tatagcaacacaagcacagtttgaagcatggtacaatggtgtcaaacaagcatatgaggt

SEQ ID NO: 453654 - DNA, 59 bp, Artificial
  Synthetic oligonucleotide
tatagcaacgaacgatggacattgcgtgacacgagccaggaaatgtgggacgcagtgcc

SEQ ID NO: 453655 - DNA, 55 bp, Artificial
  Synthetic oligonucleotide
tatagcaagcccatggtcggtgcggggtatgtagttgggccgtctacctttttag

SEQ ID NO: 453656 - DNA, 60 bp, Artificial
  Synthetic oligonucleotide
tatagcacaatgaccaaaagtgagtttcatagcctctacaaggggagtagcggactaaca

SEQ ID NO: 453657 - DNA, 60 bp, Artificial
  Synthetic oligonucleotide
tatagcacacattatcacaatgttgtcgtccttggctggtaaagttacactagcgcgtac

SEQ ID NO: 453658 - DNA, 55 bp, Artificial
  Synthetic oligonucleotide
tatagcagaccaagtactgacttactatggtcaataaagccaaagcctaggtcgg

SEQ ID NO: 453659 - DNA, 60 bp, Artificial
  Synthetic oligonucleotide
tatagcatatggcatatgtcaatgccttttatctacacttatatactagcatatttactt

SEQ ID NO: 453660 - DNA, 60 bp, Artificial
  Synthetic oligonucleotide
tatagcatggtccagttcaagttgccatgacgggaaagcatggttgcacgtctgtgttac

SEQ ID NO: 453661 - DNA, 51 bp, Artificial
  Synthetic oligonucleotide
tatagccaatccgttaagagcggaaacaaaatcaaaccgttaagagcggta

SEQ ID NO: 453662 - DNA, 52 bp, Artificial
  Synthetic oligonucleotide
tatagccacggctgacgccaggggtcttatccagtcatcccgtgctcatgct

SEQ ID NO: 453663 - DNA, 55 bp, Artificial
  Synthetic oligonucleotide
tatagccgggttgaccctctccatagccgcattcaaaacagccaacaagtccacc

SEQ ID NO: 453664 - DNA, 55 bp, Artificial
  Synthetic oligonucleotide
tatagcctctgttgtttagtgaataacggattatattaatcgaagcgagagaggt

SEQ ID NO: 453665 - DNA, 55 bp, Artificial
  Synthetic oligonucleotide
tatagccttgttgtccgtaacaaatatatgtgacaatgaatcgagttgtttagtg

SEQ ID NO: 453666 - DNA, 52 bp, Artificial
  Synthetic oligonucleotide
tatagcgaacgggagaaacagcatgccgggtggcttcgaggttagcttgcgt

SEQ ID NO: 453667 - DNA, 55 bp, Artificial
  Synthetic oligonucleotide
tatagcgatccgcgtcggtacgttccggcgtaacggttcacaacatcgcagatgg

SEQ ID NO: 453668 - DNA, 55 bp, Artificial
  Synthetic oligonucleotide
tatagcgcaatatggattcatgctgcctgaagataagcggcaagaaggatacccg

SEQ ID NO: 453669 - DNA, 60 bp, Artificial
  Synthetic oligonucleotide
tatagcggaggtgacgaagagagcggttgagcataggcagcgtgaagtgaacgcgtgcat

SEQ ID NO: 453670 - DNA, 52 bp, Artificial
  Synthetic oligonucleotide
tatagcgggtccttaccctccgggttctgcaatgtcaattttaatgagcccg

SEQ ID NO: 453671 - DNA, 50 bp, Artificial
  Synthetic oligonucleotide
tatagctaagagaggctattgctacatgaacatcttcctggcgatgctca

SEQ ID NO: 453672 - DNA, 60 bp, Artificial
  Synthetic oligonucleotide
tatagctatctacctcaagcaaacactacactcaatgcacacagcactttagctgtataa

SEQ ID NO: 453673 - DNA, 60 bp, Artificial
  Synthetic oligonucleotide
tatagctcgtcatgaagggcacaaggaggcaattttcagttacctttctcgcctagatag

SEQ ID NO: 453674 - DNA, 55 bp, Artificial
  Synthetic oligonucleotide
tatagctctgccggacagttgcgcgcggggttgtacatcccggggattgtagggg

SEQ ID NO: 453675 - DNA, 60 bp, Artificial
  Synthetic oligonucleotide
tatagctgcaccttcgtccttgaggaatgaggcacgacgactagccaaagtctgggcagc

SEQ ID NO: 453676 - DNA, 60 bp, Artificial
  Synthetic oligonucleotide
tatagctggcaccctcaccaggattgcatagcacgattgctgggatccctcctttaattt

SEQ ID NO: 453677 - DNA, 51 bp, Artificial
  Synthetic oligonucleotide
tatagctgtgttagcgctacttactatgtgctttgacgctgaaagaagcga

SEQ ID NO: 453678 - DNA, 55 bp, Artificial
  Synthetic oligonucleotide
tatagcttctcactagtgacgattgtctcattcacgatctccgtctcgcatgccc

SEQ ID NO: 453679 - DNA, 55 bp, Artificial
  Synthetic oligonucleotide
tatagcttttccaaaggaattgagccctgtaggctctggtatgctattcagacct

SEQ ID NO: 453680 - DNA, 55 bp, Artificial
  Synthetic oligonucleotide
tataggaactctttagatactgacggtcatgatgtcaacttcatccgggagcaaa

SEQ ID NO: 453681 - DNA, 53 bp, Artificial
  Synthetic oligonucleotide
tataggaagtacacagcattcactataccctcagtaaacaatcaagcaccagg

SEQ ID NO: 453682 - DNA, 54 bp, Artificial
  Synthetic oligonucleotide
tataggacctatgcttatagcatttggttactacatagatggcattgtgacaat

SEQ ID NO: 453683 - DNA, 55 bp, Artificial
  Synthetic oligonucleotide
tataggactgcgtatccatccggttaaagatgctatcaacggtatcggtagcaac

SEQ ID NO: 453684 - DNA, 54 bp, Artificial
  Synthetic oligonucleotide
tataggagatggtatgcaattttctcagtgggttggatatcaaccgatgatgat

SEQ ID NO: 453685 - DNA, 57 bp, Artificial
  Synthetic oligonucleotide
tataggaggatctgggccccggattgcataggaatatggtggggatacctcctttaa

SEQ ID NO: 453686 - DNA, 60 bp, Artificial
  Synthetic oligonucleotide
tataggatggtgcgtaaaccagagagcatatccaaagacgcccattccctcatttcgatg

SEQ ID NO: 453687 - DNA, 60 bp, Artificial
  Synthetic oligonucleotide
tataggcaacattattcgagtacactcgattattgaagtctaggtgtccactgaggtaat

SEQ ID NO: 453688 - DNA, 55 bp, Artificial
  Synthetic oligonucleotide
tataggcagttacgcagctttgagtattaaccggaaaggccgcattgcaactgta

SEQ ID NO: 453689 - DNA, 59 bp, Artificial
  Synthetic oligonucleotide
tatagggaaggtcatgtgtattagtgatgtcactcgcggtacggggttaacacatagag

SEQ ID NO: 453690 - DNA, 60 bp, Artificial
  Synthetic oligonucleotide
tatagggagagccttcgagtcgatcatgaaaggagcaagacgcatggccatcttggggga

SEQ ID NO: 453691 - DNA, 55 bp, Artificial
  Synthetic oligonucleotide
tatagggattttcactcccgccttcagggcacgtcgacgtctgaacttcgacggc

SEQ ID NO: 453692 - DNA, 55 bp, Artificial
  Synthetic oligonucleotide
tataggggcccaactacctatacaattaatccaccaggagaccctagaaccctgc

SEQ ID NO: 453693 - DNA, 60 bp, Artificial
  Synthetic oligonucleotide
tatagggtctgctggtgacggacgaatgtccgatctccgatctgcttgcccatgattcgt

SEQ ID NO: 453694 - DNA, 54 bp, Artificial
  Synthetic oligonucleotide
tataggtactagagttactatcactttagacctactaaccggctctaggggtcc

SEQ ID NO: 453695 - DNA, 58 bp, Artificial
  Synthetic oligonucleotide
tataggtatgtcctctgccaagtacataaattctagcatcgagcaagatactttaatc

SEQ ID NO: 453696 - DNA, 59 bp, Artificial
  Synthetic oligonucleotide
tataggtatgtcgctaggtagctgaggcttaacctttatgtgcgtaatagggccaataa

SEQ ID NO: 453697 - DNA, 60 bp, Artificial
  Synthetic oligonucleotide
tataggtatgtctccactggtgagcgagcctcaggaatgtttgacagtgtagtactctgt

SEQ ID NO: 453698 - DNA, 58 bp, Artificial
  Synthetic oligonucleotide
tataggtggcgtgttcatcgtagttggtgaaatcgatggtaccgttccaatagttgtg

SEQ ID NO: 453699 - DNA, 59 bp, Artificial
  Synthetic oligonucleotide
tataggttgcaggccggctatgggggagcactgggataaagctaaggcatgtgcagaca

SEQ ID NO: 453700 - DNA, 53 bp, Artificial
  Synthetic oligonucleotide
tatagtaatctggggaaaggtacccaaatttaagatacccatagaaaaggata

SEQ ID NO: 453701 - DNA, 60 bp, Artificial
  Synthetic oligonucleotide
tatagtaatgactctattctgtgacttttatataattcctcgcacacaggaggaaacttg

SEQ ID NO: 453702 - DNA, 60 bp, Artificial
  Synthetic oligonucleotide
tatagtaatgccgaactaccctgatgtaatcaatacttgtttcgtctggtacacattatc

SEQ ID NO: 453703 - DNA, 54 bp, Artificial
  Synthetic oligonucleotide
tatagtacacttggcaacggagttggcccgcgctttaagccagacaaccttcaa

SEQ ID NO: 453704 - DNA, 52 bp, Artificial
  Synthetic oligonucleotide
tatagtacgaaaatccgcgtgatttggcggtattaaatttttaatacctatt

SEQ ID NO: 453705 - DNA, 60 bp, Artificial
  Synthetic oligonucleotide
tatagtacggtatcgagcagtctagtattggtagggctgatcatagcaatgggtctttgg

SEQ ID NO: 453706 - DNA, 60 bp, Artificial
  Synthetic oligonucleotide
tatagtagaaccctctatagaactctcaatctggttcacacacgtggcggccatccgcta

SEQ ID NO: 453707 - DNA, 58 bp, Artificial
  Synthetic oligonucleotide
tatagtagagaaggccaatccagccaatgacctctgttacccagggattttcaacgac

SEQ ID NO: 453708 - DNA, 60 bp, Artificial
  Synthetic oligonucleotide
tatagtaggtatcttggcagtactccacttgatagtgttgtacttgcctataccgcttgg

SEQ ID NO: 453709 - DNA, 60 bp, Artificial
  Synthetic oligonucleotide
tatagtatacgaacagtcaataactgactatgatcttctttgttctcacacaccagacgg

SEQ ID NO: 453710 - DNA, 50 bp, Artificial
  Synthetic oligonucleotide
tatagtatccaccgtcactaccaagaccagatcaaccatggctaaccgtc

SEQ ID NO: 453711 - DNA, 50 bp, Artificial
  Synthetic oligonucleotide
tatagtattgtctccattcgggtccgtgatctaataaatcgtcgttaatc

SEQ ID NO: 453712 - DNA, 60 bp, Artificial
  Synthetic oligonucleotide
tatagtcatgcaatatatgtatgttccaccaggtgctccactgcccacaaagagagatga

SEQ ID NO: 453713 - DNA, 52 bp, Artificial
  Synthetic oligonucleotide
tatagtcgcggatgtggaaccgggagcgcagcgtcttaagctgcgccaaact

SEQ ID NO: 453714 - DNA, 55 bp, Artificial
  Synthetic oligonucleotide
tatagtctacgttgactgtttcgtgggtgtttctgcacgtcaagccgcatcgaat

SEQ ID NO: 453715 - DNA, 56 bp, Artificial
  Synthetic oligonucleotide
tatagtcttgaccttcttgaaacaaggtagcctagcttgcttaaccggctcttaaa

SEQ ID NO: 453716 - DNA, 59 bp, Artificial
  Synthetic oligonucleotide
tatagtgacagagtgcgtcaaattacactagggaattcaaccatcacgacgcaagagtg

SEQ ID NO: 453717 - DNA, 60 bp, Artificial
  Synthetic oligonucleotide
tatagtgagcttcgtcctgacactcgttatgtgcttatggacggttctattatacaattc

SEQ ID NO: 453718 - DNA, 60 bp, Artificial
  Synthetic oligonucleotide
tatagtgaggtgagacatggcccaggacaacagcggttgttcgtttcagggacacatgta

SEQ ID NO: 453719 - DNA, 55 bp, Artificial
  Synthetic oligonucleotide
tatagtggaccaatggatacagctgcttatagagaggctgcttgttcacatttgg

SEQ ID NO: 453720 - DNA, 59 bp, Artificial
  Synthetic oligonucleotide
tatagtggcaaaagaaatagtggccagctgtgacaaatgtcagctaaaaggggaagcca

SEQ ID NO: 453721 - DNA, 57 bp, Artificial
  Synthetic oligonucleotide
tatagtgggagttttgttcaacacccagaattaacagggctggactgcataaggcct

SEQ ID NO: 453722 - DNA, 60 bp, Artificial
  Synthetic oligonucleotide
tatagtggtaatcttggccaccatgataaatgcgcagaactatggagtaaatttgccaat

SEQ ID NO: 453723 - DNA, 55 bp, Artificial
  Synthetic oligonucleotide
tatagtggtgcatactataatgcatagtgcttttccctccacttaaatcgcgccc

SEQ ID NO: 453724 - DNA, 60 bp, Artificial
  Synthetic oligonucleotide
tatagtgtcccacccattgctaaagaacacttgagcaatgcaggcatttatctgagccct

SEQ ID NO: 453725 - DNA, 57 bp, Artificial
  Synthetic oligonucleotide
tatagttactgaatcaagtaaggaggcgccgttaaatcgatggttagtgaaggagaa

SEQ ID NO: 453726 - DNA, 57 bp, Artificial
  Synthetic oligonucleotide
tatagttcagataaatacaggttatgttgcatccgctaatgtaatacgaccggtatc

SEQ ID NO: 453727 - DNA, 59 bp, Artificial
  Synthetic oligonucleotide
tatagttcataagaagagcggtttagttgatgagtattgtctaagcccaaattgtgacc

SEQ ID NO: 453728 - DNA, 55 bp, Artificial
  Synthetic oligonucleotide
tatagttctgactaatagtggtcggctgtactcggttaacaacagactcacgtct

SEQ ID NO: 453729 - DNA, 59 bp, Artificial
  Synthetic oligonucleotide
tatagttggctcctccattatctggttcacgttgctaaagtattccataagtcacgagg

SEQ ID NO: 453730 - DNA, 53 bp, Artificial
  Synthetic oligonucleotide
tatagtttaatagccaaccgaggttgcaaacttggtaatgtgcgtaaaaacgg

SEQ ID NO: 453731 - DNA, 59 bp, Artificial
  Synthetic oligonucleotide
tatagttttctacctgagctaacacctacactccatgctcacacttcgcaccttggtga

SEQ ID NO: 453732 - DNA, 60 bp, Artificial
  Synthetic oligonucleotide
tatagttttgcgcttccagttggtaattatccagttatgactgggggtgctgtgtcattg

SEQ ID NO: 453733 - DNA, 49 bp, Artificial
  Synthetic oligonucleotide
tatataaaacttatttcgaaaaagtcgaaaggttaaaacatggtacctt

SEQ ID NO: 453734 - DNA, 55 bp, Artificial
  Synthetic oligonucleotide
tatataaaccgaggtggcttagtattacccacctcggaacactacctctgaacgc

SEQ ID NO: 453735 - DNA, 60 bp, Artificial
  Synthetic oligonucleotide
tatataaatatggcagattatagtattgagtccagttatgtgtgctcaggacttgttggc

SEQ ID NO: 453736 - DNA, 60 bp, Artificial
  Synthetic oligonucleotide
tatataacaacgtcactgcgactcaatctgtccaagcctggaagcagggatttctgacta

SEQ ID NO: 453737 - DNA, 60 bp, Artificial
  Synthetic oligonucleotide
tatataacagggagcttagagtgccaaatttgtgagcagggaaacacgatgtatgggtgg

SEQ ID NO: 453738 - DNA, 60 bp, Artificial
  Synthetic oligonucleotide
tatataacctcgaatcataaaacattagctactgaggtacgtaattgcaagtggtgttca

SEQ ID NO: 453739 - DNA, 60 bp, Artificial
  Synthetic oligonucleotide
tatataactcctaaaggttgatgagattttggcgctcatattaaaaatgcggtgatttga

SEQ ID NO: 453740 - DNA, 60 bp, Artificial
  Synthetic oligonucleotide
tatataagtaagtacactgacgaatggctgagtttactccgtcagccggactggtgacag

SEQ ID NO: 453741 - DNA, 57 bp, Artificial
  Synthetic oligonucleotide
tatataagtggactcttggactctccgcgatgtcaacgaccgaccttaaggcctact

SEQ ID NO: 453742 - DNA, 60 bp, Artificial
  Synthetic oligonucleotide
tatataataggactcttggactctcagcaatgtcaacgaccgaccttgaggcatacttca

SEQ ID NO: 453743 - DNA, 60 bp, Artificial
  Synthetic oligonucleotide
tatataatgcagtagcagtcctctattgtgtgcatcaaaacatagacataaaggacacca

SEQ ID NO: 453744 - DNA, 54 bp, Artificial
  Synthetic oligonucleotide
tatataatgtctagcgaactttctacctttctagtccaagatccacgtatcagt

SEQ ID NO: 453745 - DNA, 60 bp, Artificial
  Synthetic oligonucleotide
tatatacaaccctttcacagacaaaggcacaggcaacataatctggatagactaccttac

SEQ ID NO: 453746 - DNA, 50 bp, Artificial
  Synthetic oligonucleotide
tatatacataccacgatggatagcatgcatggatttcaattcccactagc

SEQ ID NO: 453747 - DNA, 60 bp, Artificial
  Synthetic oligonucleotide
tatatacgccactctctgtttgagctgcagtgatgagttcccctgtgcgagaatccatga

SEQ ID NO: 453748 - DNA, 56 bp, Artificial
  Synthetic oligonucleotide
tatatacgcgacctaataggggttctacggtgtaagaattatgtcgaagcgaccag

SEQ ID NO: 453749 - DNA, 58 bp, Artificial
  Synthetic oligonucleotide
tatatactagagggtcttatagaacttattatcctattcgtacacgtgtaggccatcc

SEQ ID NO: 453750 - DNA, 60 bp, Artificial
  Synthetic oligonucleotide
tatatactagtaccctcaatctcgtgaattatcagattcacacacgtggcggccatccga

SEQ ID NO: 453751 - DNA, 60 bp, Artificial
  Synthetic oligonucleotide
tatatagaaattctcagtgttatgcttgctgcactaattgttgttgcttatcggcaaggt

SEQ ID NO: 453752 - DNA, 58 bp, Artificial
  Synthetic oligonucleotide
tatatagaggagcgcagcgaaccgaaaacttacacgtggctgcggtattgggccgggc

SEQ ID NO: 453753 - DNA, 55 bp, Artificial
  Synthetic oligonucleotide
tatatagccccctagcaacccacaaaacccctcaaaccccaacatgtctatacaa

SEQ ID NO: 453754 - DNA, 60 bp, Artificial
  Synthetic oligonucleotide
tatatagctcgagagggctactgctacatcaacatatttttcgccatgctaataaacgtt

SEQ ID NO: 453755 - DNA, 57 bp, Artificial
  Synthetic oligonucleotide
tatatagggtgtttaggaaataacattgtattcgatatccctcgtgataagaaggat

SEQ ID NO: 453756 - DNA, 58 bp, Artificial
  Synthetic oligonucleotide
tatataggttcaaccgctgcgtccagcggcattctcttatcgggggtttgtggtatta

SEQ ID NO: 453757 - DNA, 55 bp, Artificial
  Synthetic oligonucleotide
tatatatacttgggccctaagtatttaggcccataaaatgtgggatcctttagtc

SEQ ID NO: 453758 - DNA, 59 bp, Artificial
  Synthetic oligonucleotide
tatatataggatttgacttagaaatagggcagcatagagcaaaaatagaggagttaagg

SEQ ID NO: 453759 - DNA, 60 bp, Artificial
  Synthetic oligonucleotide
tatatatcagggtatgggcacatttatgggtgggaatcattattcagagggtgggtcagt

SEQ ID NO: 453760 - DNA, 55 bp, Artificial
  Synthetic oligonucleotide
tatatatctatggataaaactttaaaccagtacccagctttgactgccgaaattt

SEQ ID NO: 453761 - DNA, 60 bp, Artificial
  Synthetic oligonucleotide
tatatatgcacagagatatgctcccggaacctcggcttgacgacatcgagagatttagac

SEQ ID NO: 453762 - DNA, 60 bp, Artificial
  Synthetic oligonucleotide
tatatatggccacaataaagtgttcaggagttggaccataaaagattggaaattgtgcaa

SEQ ID NO: 453763 - DNA, 60 bp, Artificial
  Synthetic oligonucleotide
tatatatggctacaactcactaaacaatatggggaccatctatgcgcgtcatgttaatga

SEQ ID NO: 453764 - DNA, 57 bp, Artificial
  Synthetic oligonucleotide
tatatatggtggtacctaatggcattcttgtaatttgggaaagtggagcgtgtttta

SEQ ID NO: 453765 - DNA, 60 bp, Artificial
  Synthetic oligonucleotide
tatatattcccatatgatatggctatagcatatgatagagtaacggctgcttacgataat

SEQ ID NO: 453766 - DNA, 57 bp, Artificial
  Synthetic oligonucleotide
tatatattcgaatttgtttgttgcggatggtaggatatggaacctagtaagtaggta

SEQ ID NO: 453767 - DNA, 59 bp, Artificial
  Synthetic oligonucleotide
tatatattctaaccatctgctttcactatgggattacccagtctactagtggaaggcgt

SEQ ID NO: 453768 - DNA, 60 bp, Artificial
  Synthetic oligonucleotide
tatatcaaacatgataatgaatgcggctttaggctttccaactggagcatatgtctcgcc

SEQ ID NO: 453769 - DNA, 58 bp, Artificial
  Synthetic oligonucleotide
tatatcaaatgaagggttgtgaatttaatcctgcatggaaagtaccagaactttcgga

SEQ ID NO: 453770 - DNA, 60 bp, Artificial
  Synthetic oligonucleotide
tatatcaaatgaatcggggaatgggtctctatatatactgaggaccctaatggcattatt

SEQ ID NO: 453771 - DNA, 60 bp, Artificial
  Synthetic oligonucleotide
tatatcaagagctgtgctgctgaatgatggtgattgagggtcacgatccaaaactttgtt

SEQ ID NO: 453772 - DNA, 60 bp, Artificial
  Synthetic oligonucleotide
tatatcaagatatcgccaaatcgcatactatttctataatccggatgcggctgatgattg

SEQ ID NO: 453773 - DNA, 53 bp, Artificial
  Synthetic oligonucleotide
tatatcaagcaggcttgtccaaaggtaaattttgacccaattcccatacacta

SEQ ID NO: 453774 - DNA, 50 bp, Artificial
  Synthetic oligonucleotide
tatatcaaggggggtagacacctgattttctgccactctaaaaagaagtg

SEQ ID NO: 453775 - DNA, 60 bp, Artificial
  Synthetic oligonucleotide
tatatcacagcacgtgatatgtacatgccaagagacataacttctggtgacatagttact

SEQ ID NO: 453776 - DNA, 59 bp, Artificial
  Synthetic oligonucleotide
tatatcaccgataggagcgacaaaaatcatagacaagacaacattagaaactccccagt

SEQ ID NO: 453777 - DNA, 60 bp, Artificial
  Synthetic oligonucleotide
tatatcaggatccgccactgaaaaggaagatggcgttagtaccaacgatgaaagctttga

SEQ ID NO: 453778 - DNA, 60 bp, Artificial
  Synthetic oligonucleotide
tatatcaggctgtcggatactcggaaggtgtcacaggtagtatcgtgatactgcaggagg

SEQ ID NO: 453779 - DNA, 60 bp, Artificial
  Synthetic oligonucleotide
tatatcagttgtgacaatgatgattgctggtcttttgccctcgcccaaggggctctactg

SEQ ID NO: 453780 - DNA, 60 bp, Artificial
  Synthetic oligonucleotide
tatatcatacaaccgcgtgtcaggtggacaagcgaataataacgccgagtggacccagac

SEQ ID NO: 453781 - DNA, 60 bp, Artificial
  Synthetic oligonucleotide
tatatccacaatttcgaattggactaatgtttcgaatgatgtatcaaatgtgactaattc

SEQ ID NO: 453782 - DNA, 50 bp, Artificial
  Synthetic oligonucleotide
tatatccaccaggagacaacgttcccattaactctatcatccagcgttcg

SEQ ID NO: 453783 - DNA, 55 bp, Artificial
  Synthetic oligonucleotide
tatatccgccacgtgtttaaacgtgtcatgtctgtggagaaggacactgcgatgg

SEQ ID NO: 453784 - DNA, 59 bp, Artificial
  Synthetic oligonucleotide
tatatccggctgtgacgtgtttccgcatccgctacctcacatccgggcgccattttaaa

SEQ ID NO: 453785 - DNA, 55 bp, Artificial
  Synthetic oligonucleotide
tatatcctatgggaatccccggtcccctctcgcgtccagcccctccccgtgtctg

SEQ ID NO: 453786 - DNA, 55 bp, Artificial
  Synthetic oligonucleotide
tatatcctatgggaatccccgtccacccgtcacgtccagcccctccccgtgtcta

SEQ ID NO: 453787 - DNA, 59 bp, Artificial
  Synthetic oligonucleotide
tatatcctcagaatgggagattcacataatctagatgaatgtatagtccaagcacacaa

SEQ ID NO: 453788 - DNA, 57 bp, Artificial
  Synthetic oligonucleotide
tatatccttaaggctctaaacaaagatccgagagactacacggagagatatttaaag

SEQ ID NO: 453789 - DNA, 59 bp, Artificial
  Synthetic oligonucleotide
tatatccttggtttagtactgatgctactgttattgacactcttatcctatctcgctta

SEQ ID NO: 453790 - DNA, 53 bp, Artificial
  Synthetic oligonucleotide
tatatcgaaaactggaatctacagaataggcgacagcgtactggatttgtatt

SEQ ID NO: 453791 - DNA, 59 bp, Artificial
  Synthetic oligonucleotide
tatatcgaagtcttgcacttgacccagggaacatgctgggaacagatgtacgccccggg

SEQ ID NO: 453792 - DNA, 57 bp, Artificial
  Synthetic oligonucleotide
tatatcgagcgaatggggaaaaagagttgcgtaacagatggtattggaaattgaaac

SEQ ID NO: 453793 - DNA, 60 bp, Artificial
  Synthetic oligonucleotide
tatatcgggtatttatagacttctagcgcagctagaagtttcgttgtattcgatattgta

SEQ ID NO: 453794 - DNA, 55 bp, Artificial
  Synthetic oligonucleotide
tatatcggtactcaattggtacctctggagtcttaggaagttcttgtttaccatt

SEQ ID NO: 453795 - DNA, 53 bp, Artificial
  Synthetic oligonucleotide
tatatcggtgtcccatttggagagtaaaaattgcctttacgaaaatacccttg

SEQ ID NO: 453796 - DNA, 57 bp, Artificial
  Synthetic oligonucleotide
tatatcggtgtctcataaacaggaaatgactaaaatacccctgtccctgtgtccgga

SEQ ID NO: 453797 - DNA, 56 bp, Artificial
  Synthetic oligonucleotide
tatatcgtacaatatggaactcctccgttatcactcaacgtattttagcaagagga

SEQ ID NO: 453798 - DNA, 58 bp, Artificial
  Synthetic oligonucleotide
tatatctataacacttatggggatacctgggcaggagttgaagccctactaagaattc

SEQ ID NO: 453799 - DNA, 55 bp, Artificial
  Synthetic oligonucleotide
tatatctcaagtatcgtaagctgctgcctaaacagctgcagcgtaatactatacc

SEQ ID NO: 453800 - DNA, 56 bp, Artificial
  Synthetic oligonucleotide
tatatctcgcgggaaagttgcatcttttggggaaatcgtcaaattcacgaagttaa

SEQ ID NO: 453801 - DNA, 55 bp, Artificial
  Synthetic oligonucleotide
tatatctgaggatgtggaggggttagaagctacactggtaattcattcaaaccac

SEQ ID NO: 453802 - DNA, 60 bp, Artificial
  Synthetic oligonucleotide
tatatctggtagcggagatattcatctttgatagtgacagtactatcaaagttgattact

SEQ ID NO: 453803 - DNA, 55 bp, Artificial
  Synthetic oligonucleotide
tatatctgttcgaagttcttactctctgacgagttcggtaacactttttccgttc

SEQ ID NO: 453804 - DNA, 52 bp, Artificial
  Synthetic oligonucleotide
tatatctgtttagtaggaagtagttctgaacccctatatattccaacattgg

SEQ ID NO: 453805 - DNA, 60 bp, Artificial
  Synthetic oligonucleotide
tatatcttgatgcgttctgtcaggacagttatctcgcagagttattgtcttggcagctcg

SEQ ID NO: 453806 - DNA, 60 bp, Artificial
  Synthetic oligonucleotide
tatatgaacaccaacaagaaccactaaatgatatagtatgctgtggccctttagtaccaa

SEQ ID NO: 453807 - DNA, 60 bp, Artificial
  Synthetic oligonucleotide
tatatgaatggttgtgcaaccccatggatgttacgctgtattattatcaacaaacgagtg

SEQ ID NO: 453808 - DNA, 55 bp, Artificial
  Synthetic oligonucleotide
tatatgacaactcactgatcctaagtgatgtcactccttccgtaaactcaacccc

SEQ ID NO: 453809 - DNA, 60 bp, Artificial
  Synthetic oligonucleotide
tatatgaccctatcctcaaggcacgtgtcaatactggtcgtcacaattggtcacagctgt

SEQ ID NO: 453810 - DNA, 58 bp, Artificial
  Synthetic oligonucleotide
tatatgactataaggagaatcgattcattgaaattggtgtaacaagaagagaagtcca

SEQ ID NO: 453811 - DNA, 59 bp, Artificial
  Synthetic oligonucleotide
tatatgagacataccttgcttcgttatgtgggggtatttctgacggtattgtctggtat

SEQ ID NO: 453812 - DNA, 56 bp, Artificial
  Synthetic oligonucleotide
tatatgagcaaggacttatttgcaaataacgaattttaaagggtatccgaataata

SEQ ID NO: 453813 - DNA, 55 bp, Artificial
  Synthetic oligonucleotide
tatatgagtcctataatggcttttaagtaattttgtacacccttgaatggttaaa

SEQ ID NO: 453814 - DNA, 55 bp, Artificial
  Synthetic oligonucleotide
tatatgatgatggagcaccacagtgtgggattaaatgttggtttgtcaaatctgg

SEQ ID NO: 453815 - DNA, 54 bp, Artificial
  Synthetic oligonucleotide
tatatgatgcaagggagtatacgcgtagggcaatagatcaaattatacaactag

SEQ ID NO: 453816 - DNA, 60 bp, Artificial
  Synthetic oligonucleotide
tatatgatttaatcaacatgaggaactatactgaatttagatcccttaagtactgcgagt

SEQ ID NO: 453817 - DNA, 60 bp, Artificial
  Synthetic oligonucleotide
tatatgcacctctcgccagcacagggcatgctgacaaaaggtgcataagcgtctccggat

SEQ ID NO: 453818 - DNA, 60 bp, Artificial
  Synthetic oligonucleotide
tatatgcagggaaaatgacagactccattaaatcatggagaaaggacatactgagaactc

SEQ ID NO: 453819 - DNA, 60 bp, Artificial
  Synthetic oligonucleotide
tatatgcagtcctgttctcacagacaatcccagaccgaatgacccaaatgtaggtaagtg

SEQ ID NO: 453820 - DNA, 60 bp, Artificial
  Synthetic oligonucleotide
tatatgcatcaccacaactcgaggggttttcagctgaatcgaggaaattacttctcattg

SEQ ID NO: 453821 - DNA, 60 bp, Artificial
  Synthetic oligonucleotide
tatatgcatctccacaactcgagggattttcagctgaatcgagaaaactgctcctcattg

SEQ ID NO: 453822 - DNA, 53 bp, Artificial
  Synthetic oligonucleotide
tatatgcattagtacctctatgttctggagtaatcaaagatccgcttagacga

SEQ ID NO: 453823 - DNA, 60 bp, Artificial
  Synthetic oligonucleotide
tatatgcccatactgtgcatctagactgtctacagacgggctcatcaggcacgtaactca

SEQ ID NO: 453824 - DNA, 51 bp, Artificial
  Synthetic oligonucleotide
tatatgcctcaggaattggccacgtctgatagtgtgcttacgtttgaactg

SEQ ID NO: 453825 - DNA, 51 bp, Artificial
  Synthetic oligonucleotide
tatatgcctcaggagctcactacatcggatagtgtactaacatttgagctt

SEQ ID NO: 453826 - DNA, 50 bp, Artificial
  Synthetic oligonucleotide
tatatgcgcgctagctgtgtacgctaccctacccagggaaaaactgtcgg

SEQ ID NO: 453827 - DNA, 60 bp, Artificial
  Synthetic oligonucleotide
tatatgcttgaatggggaaaagagatggttgaccactttcatctgggtgatgatatggat

SEQ ID NO: 453828 - DNA, 54 bp, Artificial
  Synthetic oligonucleotide
tatatgcttgaatggggcaaagagatggtggatcatttccatctaggagatgat

SEQ ID NO: 453829 - DNA, 60 bp, Artificial
  Synthetic oligonucleotide
tatatggaatatgcggagatagggactagattcgacgatgagccgactgatgagaagtta

SEQ ID NO: 453830 - DNA, 55 bp, Artificial
  Synthetic oligonucleotide
tatatggacgcgggacgtaagcgctattatgtgcagttcgctgcggacgcgagga

SEQ ID NO: 453831 - DNA, 55 bp, Artificial
  Synthetic oligonucleotide
tatatggagaggtactcagcatcatcgttggatgcgttgtcggaggagaagaatt

SEQ ID NO: 453832 - DNA, 60 bp, Artificial
  Synthetic oligonucleotide
tatatggattcatcataaaggggagatctcacttaaggaatgatactgatgtggtgaatt

SEQ ID NO: 453833 - DNA, 55 bp, Artificial
  Synthetic oligonucleotide
tatatggctggtatccgccctagcggccggcacaggtatagcaggcggagttacc

SEQ ID NO: 453834 - DNA, 55 bp, Artificial
  Synthetic oligonucleotide
tatatgggagggtatatgtggccttagacaatatgggttccttggtcgatatcat

SEQ ID NO: 453835 - DNA, 55 bp, Artificial
  Synthetic oligonucleotide
tatatggttactaacagacagcttccaggaagtcaggatgcaggagttgatgaca

SEQ ID NO: 453836 - DNA, 55 bp, Artificial
  Synthetic oligonucleotide
tatatggttgcaggttgcccatcacaggcacggttcttagtgcataatcactgcc

SEQ ID NO: 453837 - DNA, 60 bp, Artificial
  Synthetic oligonucleotide
tatatgtaatgagtcctttagaaatctgggcaatagtaggactgatagtgtcactaatct

SEQ ID NO: 453838 - DNA, 57 bp, Artificial
  Synthetic oligonucleotide
tatatgtagccctgttcttacagacaacccccgaccgaatgatccaactgtaggtaa

SEQ ID NO: 453839 - DNA, 60 bp, Artificial
  Synthetic oligonucleotide
tatatgtagctttcatgcttcacaacagcatgattgtccgcatctaattacgataatggc

SEQ ID NO: 453840 - DNA, 60 bp, Artificial
  Synthetic oligonucleotide
tatatgtaggatgggtgccagctcacagaggactaggtggtaatcaggaagtagaccacc

SEQ ID NO: 453841 - DNA, 60 bp, Artificial
  Synthetic oligonucleotide
tatatgtatgtaagacatataagggcatgaaatgtcaactccactacaatatattgtact

SEQ ID NO: 453842 - DNA, 60 bp, Artificial
  Synthetic oligonucleotide
tatatgtctgcaagtgtatacagatcacgcctgaatacagaatccactactactaataac

SEQ ID NO: 453843 - DNA, 60 bp, Artificial
  Synthetic oligonucleotide
tatatgtggtctggtgagtgtcttccatttaagaacacaatgaacacctatgaaggttgt

SEQ ID NO: 453844 - DNA, 60 bp, Artificial
  Synthetic oligonucleotide
tatatgttctgggcaagatatggatggatgacaacatcaagactaggaatcatacgaata

SEQ ID NO: 453845 - DNA, 60 bp, Artificial
  Synthetic oligonucleotide
tatatgttgccttgatcattctgaaagactcaacattgatagtacaagcagcgggcactg

SEQ ID NO: 453846 - DNA, 57 bp, Artificial
  Synthetic oligonucleotide
tatatgttgtcgtagtagtgccattagtaccgtaggaactcggtaccagggtcgaga

SEQ ID NO: 453847 - DNA, 55 bp, Artificial
  Synthetic oligonucleotide
tatattaaaagtctatgacttcacactgttatttcgtcaatgcccactcacgggg

SEQ ID NO: 453848 - DNA, 52 bp, Artificial
  Synthetic oligonucleotide
tatattaactacccccatttgggtaagattgaacctaacccgaagcaggtcg

SEQ ID NO: 453849 - DNA, 60 bp, Artificial
  Synthetic oligonucleotide
tatattaagaccagatgctaggcggggtttagctattggaatgagggatgacattctgga

SEQ ID NO: 453850 - DNA, 52 bp, Artificial
  Synthetic oligonucleotide
tatattaatcacggcggccaaattcgtattgcagatgagtggaaccgctttg

SEQ ID NO: 453851 - DNA, 58 bp, Artificial
  Synthetic oligonucleotide
tatattacaccagattttatgaccacaattggagacttctatcaagggatccaattat

SEQ ID NO: 453852 - DNA, 56 bp, Artificial
  Synthetic oligonucleotide
tatattacagatacaatgtggtggccacgtaaatatggtggaccacaggcagcggg

SEQ ID NO: 453853 - DNA, 55 bp, Artificial
  Synthetic oligonucleotide
tatattacattgacaaagctgaaatcacggtcagaactgacagtagcgcaatcga

SEQ ID NO: 453854 - DNA, 56 bp, Artificial
  Synthetic oligonucleotide
tatattaccagggtatacccccacaaaacagatattcatcccaggagaaataacaa

SEQ ID NO: 453855 - DNA, 60 bp, Artificial
  Synthetic oligonucleotide
tatattagacggagcaatcatagaaaacggtaacgttgcgacgcgtgatgtcgatgtata

SEQ ID NO: 453856 - DNA, 58 bp, Artificial
  Synthetic oligonucleotide
tatattagctcgtaaatcttgtgattcactagttaattgtgagtaaaccaattttgaa

SEQ ID NO: 453857 - DNA, 50 bp, Artificial
  Synthetic oligonucleotide
tatattatgtgtggctaagcgatgtatcttcgcaacttgatatgtacagc

SEQ ID NO: 453858 - DNA, 50 bp, Artificial
  Synthetic oligonucleotide
tatattcaagtcaaatgtcaaattccgaaattaattatgcaaccgccact

SEQ ID NO: 453859 - DNA, 55 bp, Artificial
  Synthetic oligonucleotide
tatattccagtagagagagcttggatagtagtgaccacctattggggattgatgc

SEQ ID NO: 453860 - DNA, 60 bp, Artificial
  Synthetic oligonucleotide
tatattccgatcttcttgcattcgtttcagctgacactgttgaaccaattaatgctgtcg

SEQ ID NO: 453861 - DNA, 60 bp, Artificial
  Synthetic oligonucleotide
tatattcgccttactgttgctctgtctgaaaatgctgcttctcaagtgaagacctatgtg

SEQ ID NO: 453862 - DNA, 59 bp, Artificial
  Synthetic oligonucleotide
tatattcgggaaggacaatgctataagaataggggagaactctgatgttttagtcacaa

SEQ ID NO: 453863 - DNA, 58 bp, Artificial
  Synthetic oligonucleotide
tatattctatgaatggaaccctagtgggtaaccttctcatcttcccacaccagttcat

SEQ ID NO: 453864 - DNA, 60 bp, Artificial
  Synthetic oligonucleotide
tatattctatgacgcaatggtcgattttcatacaactacgactgagtctagctgttaatt

SEQ ID NO: 453865 - DNA, 59 bp, Artificial
  Synthetic oligonucleotide
tatattcttcgggacttgtagtctcggaggcctatgtgaatttagtcttggacacaata

SEQ ID NO: 453866 - DNA, 60 bp, Artificial
  Synthetic oligonucleotide
tatattgagaattggaatttacagaacaggcgacagcgcactgggtttgtatttcataaa

SEQ ID NO: 453867 - DNA, 55 bp, Artificial
  Synthetic oligonucleotide
tatattgagcaaatttaaaggcgcgtttggggtaggatttaaagaactgacgaga

SEQ ID NO: 453868 - DNA, 60 bp, Artificial
  Synthetic oligonucleotide
tatattgagggcctgagctttggaccctgcgttgattgcctcggcatatgtgtcgttggc

SEQ ID NO: 453869 - DNA, 60 bp, Artificial
  Synthetic oligonucleotide
tatattgatatatgggccgccagacacagggaagtcaatgtttactatgtcattaatgaa

SEQ ID NO: 453870 - DNA, 52 bp, Artificial
  Synthetic oligonucleotide
tatattgcatatcccctcctccaaactgttgaagtcgaatggtggtatgatc

SEQ ID NO: 453871 - DNA, 60 bp, Artificial
  Synthetic oligonucleotide
tatattgccggttgagacaggtagtaaggtcatggatgaggggagggtcaggcctctatg

SEQ ID NO: 453872 - DNA, 59 bp, Artificial
  Synthetic oligonucleotide
tatattgcgttaggagttcacggagtttgtcgtaatgatacagttactaccactggcag

SEQ ID NO: 453873 - DNA, 60 bp, Artificial
  Synthetic oligonucleotide
tatattggaccattgtgaaacctggagatgtcctaatgataaacagtaatggcaacttaa

SEQ ID NO: 453874 - DNA, 56 bp, Artificial
  Synthetic oligonucleotide
tatattgggccaccatcgacgctcggctttcacttgccacccccgaggataatcta

SEQ ID NO: 453875 - DNA, 60 bp, Artificial
  Synthetic oligonucleotide
tatattggtcaattgcacatcccagttcaaattgcaatctctcaggagtgccattcacat

SEQ ID NO: 453876 - DNA, 60 bp, Artificial
  Synthetic oligonucleotide
tatattgtagaaacatcgaactcagataatgggacatgttacccaggagatttcatcgac

SEQ ID NO: 453877 - DNA, 60 bp, Artificial
  Synthetic oligonucleotide
tatattgtcaagcagcaagagctatccatgtcccatacaagggaaagtacaaacttagag

SEQ ID NO: 453878 - DNA, 60 bp, Artificial
  Synthetic oligonucleotide
tatattgtgtcaaaggtgggatgccctcagggtgctccggcacttcaatctttaattcca

SEQ ID NO: 453879 - DNA, 56 bp, Artificial
  Synthetic oligonucleotide
tatatttaagctcacataccaaaacaaagtggtcaaagttcaacgaccgactccaa

SEQ ID NO: 453880 - DNA, 56 bp, Artificial
  Synthetic oligonucleotide
tatatttacccaacgcatgaagatttggggcgaccgtactactgagccccgtccag

SEQ ID NO: 453881 - DNA, 57 bp, Artificial
  Synthetic oligonucleotide
tatatttatttcaatgactttggtggtgttgggttacaattattgttaatacattca

SEQ ID NO: 453882 - DNA, 55 bp, Artificial
  Synthetic oligonucleotide
tatatttcatccttatcacagaatccaacctgctccaagtaaactcatctacgcc

SEQ ID NO: 453883 - DNA, 55 bp, Artificial
  Synthetic oligonucleotide
tatatttcgcggcacggcagcttgtccacgtcagtttgcaagttgagcccgacca

SEQ ID NO: 453884 - DNA, 60 bp, Artificial
  Synthetic oligonucleotide
tatatttgagcgtcatttgcatgtaattatgaattatacatgagtctattcgtcttaaat

SEQ ID NO: 453885 - DNA, 55 bp, Artificial
  Synthetic oligonucleotide
tatatttggatcttgggtgaaaccacagtgtgttgggtacgagaacgtcttggta

SEQ ID NO: 453886 - DNA, 55 bp, Artificial
  Synthetic oligonucleotide
tatatttggtatgcaagtaggctgtggagttgataataaaagctacgctatggct

SEQ ID NO: 453887 - DNA, 55 bp, Artificial
  Synthetic oligonucleotide
tatattttatccgagcacttatttccagctcgaggttaccgcagtgttacagcgg

SEQ ID NO: 453888 - DNA, 60 bp, Artificial
  Synthetic oligonucleotide
tatattttccatcgacttcagttgaaaacactaaagattgcctgggcataagattctctg

SEQ ID NO: 453889 - DNA, 55 bp, Artificial
  Synthetic oligonucleotide
tatattttgctaggcgaaagggtgttacgcgaattggatatcaacctgttcccac

SEQ ID NO: 453890 - DNA, 56 bp, Artificial
  Synthetic oligonucleotide
tatattttgtttggcggaggatcggaactttttcgaatgcagcgggaaacgcacaa

SEQ ID NO: 453891 - DNA, 60 bp, Artificial
  Synthetic oligonucleotide
tatcaaaactaccatgcacgattaccggctcgacgacaccattaacctcacaacgagctg

SEQ ID NO: 453892 - DNA, 60 bp, Artificial
  Synthetic oligonucleotide
tatcaaaatcatggcgtcccaaggcaccaaacggtcttatgaacagatggaaactgatgg

SEQ ID NO: 453893 - DNA, 55 bp, Artificial
  Synthetic oligonucleotide
tatcaaaatctggtggcggggatgttaggagagcttaacaagtcgcaacaggagg

SEQ ID NO: 453894 - DNA, 57 bp, Artificial
  Synthetic oligonucleotide
tatcaaaatgtgtgacgaagcacgacaccgagctgttcgctaatcctggaagtatcg

SEQ ID NO: 453895 - DNA, 60 bp, Artificial
  Synthetic oligonucleotide
tatcaaaattcaacctgaagactggccgactgactgtaaggctgaccacacaaacacatt

SEQ ID NO: 453896 - DNA, 55 bp, Artificial
  Synthetic oligonucleotide
tatcaaaattccaaccatctgacactttgctatttctaggtccactacagcaggg

SEQ ID NO: 453897 - DNA, 51 bp, Artificial
  Synthetic oligonucleotide
tatcaaacattacagggctgctattaacaagggatggtggtgggaacgaga

SEQ ID NO: 453898 - DNA, 58 bp, Artificial
  Synthetic oligonucleotide
tatcaaaccggaacaagcgaagaagcagactaagctatttagaatatttgaaccgaga

SEQ ID NO: 453899 - DNA, 60 bp, Artificial
  Synthetic oligonucleotide
tatcaaagaactagagcactagtgcgcacagggatggatcccaggatgtgctccctcatg

SEQ ID NO: 453900 - DNA, 60 bp, Artificial
  Synthetic oligonucleotide
tatcaaagcattggctgctgagcaggtgtacaagatagttaaagtaccaagcatatcttt

SEQ ID NO: 453901 - DNA, 60 bp, Artificial
  Synthetic oligonucleotide
tatcaaagtccgcaatacaaatctcaactcgatgcttcgataggttggcgtgtgaaaccc

SEQ ID NO: 453902 - DNA, 51 bp, Artificial
  Synthetic oligonucleotide
tatcaaataatctcaggactcgaagccgttgaaaccgagtgaaacattcaa

SEQ ID NO: 453903 - DNA, 60 bp, Artificial
  Synthetic oligonucleotide
tatcaaatacgcaaaacaccgcagagctactaatcccgtcgaggcattgaacaattatag

SEQ ID NO: 453904 - DNA, 54 bp, Artificial
  Synthetic oligonucleotide
tatcaaatagggtacatttgcagtggggttttcggtgataatccgcgttctaat

SEQ ID NO: 453905 - DNA, 59 bp, Artificial
  Synthetic oligonucleotide
tatcaaatgcggctcggcaggcatggaaaaaacttcctagttccagtaccaagacagag

SEQ ID NO: 453906 - DNA, 60 bp, Artificial
  Synthetic oligonucleotide
tatcaaattattggggttcggatgcatacggtgatctgagagttggaacatattttaatc

SEQ ID NO: 453907 - DNA, 58 bp, Artificial
  Synthetic oligonucleotide
tatcaaattctgaatgaagcggttccggatttcttcgctgggggtgaagacatcctaa

SEQ ID NO: 453908 - DNA, 60 bp, Artificial
  Synthetic oligonucleotide
tatcaaattctggcgatctactcaactgtcgccagttcactagtactgttagtctccctg

SEQ ID NO: 453909 - DNA, 60 bp, Artificial
  Synthetic oligonucleotide
tatcaacaatctcgtcgcctcaaatggtgacaaaggtctgatggcaaatgccctcgttga

SEQ ID NO: 453910 - DNA, 60 bp, Artificial
  Synthetic oligonucleotide
tatcaacaatggtggacatggggcatcttaggctgttggatgttattgacttgtagtgtg

SEQ ID NO: 453911 - DNA, 59 bp, Artificial
  Synthetic oligonucleotide
tatcaacacgagacaggtagcacagctacgcaggaaaattgagctgttcacatacacta

SEQ ID NO: 453912 - DNA, 51 bp, Artificial
  Synthetic oligonucleotide
tatcaacacttccggaaactactgttgttagagcaagacgcaggtccccta

SEQ ID NO: 453913 - DNA, 59 bp, Artificial
  Synthetic oligonucleotide
tatcaacatcagtgactccattatctaagcatgatctcacaacttatggttttggtcac

SEQ ID NO: 453914 - DNA, 59 bp, Artificial
  Synthetic oligonucleotide
tatcaacatgaacccgagagcatgtcaactatggtctgacatgtctcttcagacacaaa

SEQ ID NO: 453915 - DNA, 59 bp, Artificial
  Synthetic oligonucleotide
tatcaacatggaagatgatcttattactactaaagttgaagccgatatgttattaaaac

SEQ ID NO: 453916 - DNA, 52 bp, Artificial
  Synthetic oligonucleotide
tatcaaccaccgcaccagatctagttcctgtgtttgagaacacccacgttag

SEQ ID NO: 453917 - DNA, 55 bp, Artificial
  Synthetic oligonucleotide
tatcaacccacaccaacaactcctcagatcagagcccggcgggaactgtccaagg

SEQ ID NO: 453918 - DNA, 60 bp, Artificial
  Synthetic oligonucleotide
tatcaacgccgtgcagttagcgagagttgtcaatctgtctatccctgactcgtggatgac

SEQ ID NO: 453919 - DNA, 54 bp, Artificial
  Synthetic oligonucleotide
tatcaactccaaggcattttggttaagtttctcatcgaacttttgtacgatggg

SEQ ID NO: 453920 - DNA, 59 bp, Artificial
  Synthetic oligonucleotide
tatcaactgcaatatgtcctggacccgaacattaatagattcttttgacagcatggagt

SEQ ID NO: 453921 - DNA, 60 bp, Artificial
  Synthetic oligonucleotide
tatcaagaagcagaaccacactaatcaggtcatgttcttcttggtccgtgatagaaggcc

SEQ ID NO: 453922 - DNA, 60 bp, Artificial
  Synthetic oligonucleotide
tatcaagaagggcgcgttgtacctcgctgctgcctgccgacagggaattgttggagatgc

SEQ ID NO: 453923 - DNA, 55 bp, Artificial
  Synthetic oligonucleotide
tatcaagaagtggtccgcaactgtcactggtgggcaatatgcgtccaaggagcag

SEQ ID NO: 453924 - DNA, 60 bp, Artificial
  Synthetic oligonucleotide
tatcaagagaaaccaattgtatacatggttggttcagcaccttcatactggatatacgat

SEQ ID NO: 453925 - DNA, 60 bp, Artificial
  Synthetic oligonucleotide
tatcaagatctaaactctgtgaagatctatggagtaggggctacgaatccagaagttatt

SEQ ID NO: 453926 - DNA, 55 bp, Artificial
  Synthetic oligonucleotide
tatcaagccagatttgaagctgtggcgtggtcagcaacagcctgtcacgatggga

SEQ ID NO: 453927 - DNA, 60 bp, Artificial
  Synthetic oligonucleotide
tatcaagccgagatcggtcgcaacgcttatagcatggacgctagaggcttcatgttaggc

SEQ ID NO: 453928 - DNA, 60 bp, Artificial
  Synthetic oligonucleotide
tatcaaggccctgatgacgtgtatgtacctaattgttctattgttgagttgctggagcca

SEQ ID NO: 453929 - DNA, 60 bp, Artificial
  Synthetic oligonucleotide
tatcaagggatcttcagttcataagcaaggtgattcaatctgaaggagtaatgcacccta

SEQ ID NO: 453930 - DNA, 60 bp, Artificial
  Synthetic oligonucleotide
tatcaaggtgtgcgtaacttgacgagccgtgattataatcattcatggctgtgtgatgat

SEQ ID NO: 453931 - DNA, 60 bp, Artificial
  Synthetic oligonucleotide
tatcaagtcttgcgaagatttcaatcaacggtgactggtggacggtatgctgctaaggaa

SEQ ID NO: 453932 - DNA, 57 bp, Artificial
  Synthetic oligonucleotide
tatcaagtgaccggcctgtgcgactctgctcttgtctcgacagaagtcactttttac

SEQ ID NO: 453933 - DNA, 60 bp, Artificial
  Synthetic oligonucleotide
tatcaagtggagcggggaaaagagggtactcgtcatgtgcagggatacgtggagatgaag

SEQ ID NO: 453934 - DNA, 55 bp, Artificial
  Synthetic oligonucleotide
tatcaatacttcggtttcgtctgttgcgatgttcaataggtcgtataaacccgaa

SEQ ID NO: 453935 - DNA, 53 bp, Artificial
  Synthetic oligonucleotide
tatcaatagagggcttgatgtgtagtctgtttgctgtatgcctaccagagaca

SEQ ID NO: 453936 - DNA, 55 bp, Artificial
  Synthetic oligonucleotide
tatcaatcaagagccatattggtatgttacagtaagactgcagggactcatgtgg

SEQ ID NO: 453937 - DNA, 60 bp, Artificial
  Synthetic oligonucleotide
tatcaatggaagagacctgtgcaaaagaataggtctctgaaattgaagatgtatgacgac

SEQ ID NO: 453938 - DNA, 60 bp, Artificial
  Synthetic oligonucleotide
tatcaatggtacttgcacagtagtaatgactgatgggagtgcttcagggagagccgatac

SEQ ID NO: 453939 - DNA, 60 bp, Artificial
  Synthetic oligonucleotide
tatcaatggtatgtccatgcaatctggcgaacggatcgatatcaatgattatcattatac

SEQ ID NO: 453940 - DNA, 58 bp, Artificial
  Synthetic oligonucleotide
tatcaatgtccgcaatttgaacatgaggactatttggaaagacaccggtggtgggaag

SEQ ID NO: 453941 - DNA, 60 bp, Artificial
  Synthetic oligonucleotide
tatcaattagcaccaggcgcccaattacccacatttatagcactcctttgctgcgctaag

SEQ ID NO: 453942 - DNA, 52 bp, Artificial
  Synthetic oligonucleotide
tatcaattcacttattggtgattcatggaaacccctccatcaagtagattgt

SEQ ID NO: 453943 - DNA, 57 bp, Artificial
  Synthetic oligonucleotide
tatcaattccccttatatgtttcacggtaaaccatcaccctacaagaatgcacctcc

SEQ ID NO: 453944 - DNA, 60 bp, Artificial
  Synthetic oligonucleotide
tatcaattgaacattattagctctcaccttgagacaattgaacattaatagttctcactc

SEQ ID NO: 453945 - DNA, 60 bp, Artificial
  Synthetic oligonucleotide
tatcaatttacgcaattcacggcacatcaacacagtataataatttaggttcaacagtta

SEQ ID NO: 453946 - DNA, 57 bp, Artificial
  Synthetic oligonucleotide
tatcacaaacgaagtctcgtagctgatcttttttaccgttaacgacgtctgttcata

SEQ ID NO: 453947 - DNA, 60 bp, Artificial
  Synthetic oligonucleotide
tatcacaaatgtgatgaccaatgcatggaaacgattaggaacgggacctatgacaggcaa

SEQ ID NO: 453948 - DNA, 58 bp, Artificial
  Synthetic oligonucleotide
tatcacaagcaccgtttcaccagaacacaactcttaggatgcgcggattaaagtcgtt

SEQ ID NO: 453949 - DNA, 60 bp, Artificial
  Synthetic oligonucleotide
tatcacaagcgttgcatccactttgaacgatagcggtaagagcacgcctttggcgaaaca

SEQ ID NO: 453950 - DNA, 55 bp, Artificial
  Synthetic oligonucleotide
tatcacaaggccaagcatattaaagcatggtgtccaagggccccaagagcagtac

SEQ ID NO: 453951 - DNA, 57 bp, Artificial
  Synthetic oligonucleotide
tatcacaatacttttgggtccccaaggccgcgcagcggcaccactcacattctcaga

SEQ ID NO: 453952 - DNA, 59 bp, Artificial
  Synthetic oligonucleotide
tatcacacaccatgcttggggaagtactgaactattatactcattgggccgggtccttg

SEQ ID NO: 453953 - DNA, 51 bp, Artificial
  Synthetic oligonucleotide
tatcacagaacagtgtgggatccaatacttatgtccattgccccaagtctg

SEQ ID NO: 453954 - DNA, 60 bp, Artificial
  Synthetic oligonucleotide
tatcacagcgtgtctcatgcccgaccccgctggttcatctggtgcctactcctactttca

SEQ ID NO: 453955 - DNA, 55 bp, Artificial
  Synthetic oligonucleotide
tatcacagcgtgtcttatgcccgaccccgctatttgctcctgtgcctactcctac

SEQ ID NO: 453956 - DNA, 60 bp, Artificial
  Synthetic oligonucleotide
tatcacaggattactattggtacgtgatggaggcaaggataatacaggtacaaatgagac

SEQ ID NO: 453957 - DNA, 51 bp, Artificial
  Synthetic oligonucleotide
tatcacatcaaaggaggacatgcagtttgccaaatacaactacagggacta

SEQ ID NO: 453958 - DNA, 50 bp, Artificial
  Synthetic oligonucleotide
tatcacattcccttgcctcggtaagactgaacctaacagaaccaggtcgt

SEQ ID NO: 453959 - DNA, 60 bp, Artificial
  Synthetic oligonucleotide
tatcaccaacccactaatcaggcatgagaacagaatggtgttggccagcactacagctaa

SEQ ID NO: 453960 - DNA, 55 bp, Artificial
  Synthetic oligonucleotide
tatcaccaccagtgggcgatggttgcaacggcagttccctgtactgaccaccacc

SEQ ID NO: 453961 - DNA, 58 bp, Artificial
  Synthetic oligonucleotide
tatcaccccaacgaaatctggacggacttagctactcttgatcctattctcaggcgat

SEQ ID NO: 453962 - DNA, 56 bp, Artificial
  Synthetic oligonucleotide
tatcaccccggtacaggttctcggagcgcgccagaactattctgacgtttaaccaa

SEQ ID NO: 453963 - DNA, 60 bp, Artificial
  Synthetic oligonucleotide
tatcaccctctatgactaaacttattggtcgtaatggccgcgcagctgaactgacgacgt

SEQ ID NO: 453964 - DNA, 60 bp, Artificial
  Synthetic oligonucleotide
tatcacgaccacactggacgttggacagcttggcaagaagtggtatcctttcaagactag

SEQ ID NO: 453965 - DNA, 60 bp, Artificial
  Synthetic oligonucleotide
tatcacgcaccgcaaatagccgcacaatcgcggccggattgcattgtaagatcggcggtt

SEQ ID NO: 453966 - DNA, 60 bp, Artificial
  Synthetic oligonucleotide
tatcactatcttaggcaagcccctttctataaacactgacaatggttctgccttcctatc

SEQ ID NO: 453967 - DNA, 60 bp, Artificial
  Synthetic oligonucleotide
tatcactcccgaaccattagatatcagtcgatccagccccccacgtcatgcatgactatc

SEQ ID NO: 453968 - DNA, 60 bp, Artificial
  Synthetic oligonucleotide
tatcactgatgctttcagcctcttcatggtccagttctctaggacaatcaaccccagaaa

SEQ ID NO: 453969 - DNA, 60 bp, Artificial
  Synthetic oligonucleotide
tatcactgcaccagatcgacgtttatggcaagttatgtacaacggcagtccggtagctca

SEQ ID NO: 453970 - DNA, 59 bp, Artificial
  Synthetic oligonucleotide
tatcactgccaatacgattctgaacgtaattgaaaaattagggactaatcactcagtgg

SEQ ID NO: 453971 - DNA, 60 bp, Artificial
  Synthetic oligonucleotide
tatcactgcttgttttgccgtgtctcactttatacatccgttgcttgggctacctagtat

SEQ ID NO: 453972 - DNA, 60 bp, Artificial
  Synthetic oligonucleotide
tatcactggatattcccacagaggaacttacaatcaaggaagccttgtatggggtagatg

SEQ ID NO: 453973 - DNA, 60 bp, Artificial
  Synthetic oligonucleotide
tatcacttacgagacgttaaaatcaaacgcacaaaggatcgtttatgatgatgaacttca

SEQ ID NO: 453974 - DNA, 55 bp, Artificial
  Synthetic oligonucleotide
tatcacttgtttacctctggaggagagaacatacgggcttgactccaacctttgg

SEQ ID NO: 453975 - DNA, 60 bp, Artificial
  Synthetic oligonucleotide
tatcactttccacgacagattggtggctgagtataaatcctctgtggacatgcctgctct

SEQ ID NO: 453976 - DNA, 60 bp, Artificial
  Synthetic oligonucleotide
tatcagaacgagagaagatctctgggtgcaatcgattctttattcacatgacactttttg

SEQ ID NO: 453977 - DNA, 60 bp, Artificial
  Synthetic oligonucleotide
tatcagaacgtactgccaaatggacgaattaatctcaaaatgtctgtcaatggcctatca

SEQ ID NO: 453978 - DNA, 55 bp, Artificial
  Synthetic oligonucleotide
tatcagaaggtacgatgggcccgctaacaagcaaaaacgagcggccccgctagcc

SEQ ID NO: 453979 - DNA, 60 bp, Artificial
  Synthetic oligonucleotide
tatcagaaggtcatccgatgataatgtccccacacgtaggacattcttctgttgtgaaga

SEQ ID NO: 453980 - DNA, 50 bp, Artificial
  Synthetic oligonucleotide
tatcagaatgtggggacctatgtgtcagtaggaacatcaatactgaacaa

SEQ ID NO: 453981 - DNA, 56 bp, Artificial
  Synthetic oligonucleotide
tatcagaccctccgacaataaaagaacaagtataactatgggaccaggacaagtat

SEQ ID NO: 453982 - DNA, 51 bp, Artificial
  Synthetic oligonucleotide
tatcagacgaaaggatctcgcgatgtaccgatcaaggcgacgcgcgtaatc

SEQ ID NO: 453983 - DNA, 55 bp, Artificial
  Synthetic oligonucleotide
tatcagacgccaatagctaattctgtgacagtgaggcaggacttagaaaggcagc

SEQ ID NO: 453984 - DNA, 58 bp, Artificial
  Synthetic oligonucleotide
tatcagacgctttttgtaattaccaagcctgcgctggtacaactccctggcattaacc

SEQ ID NO: 453985 - DNA, 57 bp, Artificial
  Synthetic oligonucleotide
tatcagacttctcaaagaaggggggaatgcccaaatgtcgaacgaaaatttgaatgc

SEQ ID NO: 453986 - DNA, 60 bp, Artificial
  Synthetic oligonucleotide
tatcagagaacgagggcacttgtacgtactgggatggatcccaggatgtgttctctgatg

SEQ ID NO: 453987 - DNA, 60 bp, Artificial
  Synthetic oligonucleotide
tatcagagattccgttggaaactctggtgtatactgggggatgggatcaggaaatagata

SEQ ID NO: 453988 - DNA, 55 bp, Artificial
  Synthetic oligonucleotide
tatcagagcacagccgaagatccactgctgacaacatgactttggcacactccgg

SEQ ID NO: 453989 - DNA, 55 bp, Artificial
  Synthetic oligonucleotide
tatcagaggctccccagggacaggaaaatccctggcaactagcataattgctaga

SEQ ID NO: 453990 - DNA, 58 bp, Artificial
  Synthetic oligonucleotide
tatcagatatgccaacggaagtggccccgaacaccgcccctattgctggcactacccc

SEQ ID NO: 453991 - DNA, 55 bp, Artificial
  Synthetic oligonucleotide
tatcagatgaggcacaggaggatgagaggcattatttaatgcagccagctcaaac

SEQ ID NO: 453992 - DNA, 58 bp, Artificial
  Synthetic oligonucleotide
tatcagatgctaaactaggtatgatagatgatgtaacagccataagctggacatatat

SEQ ID NO: 453993 - DNA, 56 bp, Artificial
  Synthetic oligonucleotide
tatcagcaaggcagcacgggatgcggggaaaggtaacggccttagtgatgataagt

SEQ ID NO: 453994 - DNA, 59 bp, Artificial
  Synthetic oligonucleotide
tatcagcaatcgttcaccccgagtccgggagcacggccacaagtaaatggacagtctgg

SEQ ID NO: 453995 - DNA, 60 bp, Artificial
  Synthetic oligonucleotide
tatcagcacttatggaaatggggcatcatgctccttggaatgttgatgatctgtagtacc

SEQ ID NO: 453996 - DNA, 54 bp, Artificial
  Synthetic oligonucleotide
tatcagcacttgtggagatggggcaccatgggcatgatgctccttgggatattg

SEQ ID NO: 453997 - DNA, 60 bp, Artificial
  Synthetic oligonucleotide
tatcagcagactgtgatgctctttggaactatggctaggtacatgcgatggttcagacag

SEQ ID NO: 453998 - DNA, 60 bp, Artificial
  Synthetic oligonucleotide
tatcagcggccgtgtgaagcattcagacaaccgcattatgcaagcggcggcaatgaatgc

SEQ ID NO: 453999 - DNA, 50 bp, Artificial
  Synthetic oligonucleotide
tatcagcgtattacggggtggtggttaacgggctgagtgcatacactact

SEQ ID NO: 454000 - DNA, 60 bp, Artificial
  Synthetic oligonucleotide
tatcagctatcggtattgtttccatcaattcgatcggccgaattaccgagaatcttggtc

SEQ ID NO: 454001 - DNA, 59 bp, Artificial
  Synthetic oligonucleotide
tatcagctcgtaaaccatgatatccacccacaattaactactcgtgtactaacagtacc

SEQ ID NO: 454002 - DNA, 60 bp, Artificial
  Synthetic oligonucleotide
tatcagctggcgaggtgacagtgaagggtgcggtagtgagtgaagtagtccctgcagatt

SEQ ID NO: 454003 - DNA, 55 bp, Artificial
  Synthetic oligonucleotide
tatcaggaccttgaggagcagtggcacaaggttccaggccaagtggaccacaatg

SEQ ID NO: 454004 - DNA, 56 bp, Artificial
  Synthetic oligonucleotide
tatcaggagataactttgaatgtgacagaggctttcgatgcatgggataatacagt

SEQ ID NO: 454005 - DNA, 54 bp, Artificial
  Synthetic oligonucleotide
tatcaggcttgcaatatagggtttttagggtccgtttaccagatcctaataaat

SEQ ID NO: 454006 - DNA, 56 bp, Artificial
  Synthetic oligonucleotide
tatcagggatcgataggtttcgtactaccaacattacccataatgtaggtccgcct

SEQ ID NO: 454007 - DNA, 60 bp, Artificial
  Synthetic oligonucleotide
tatcaggggaaagtgttaatgtcaatcaataagactgacgctcaaagcgccataaacatt

SEQ ID NO: 454008 - DNA, 55 bp, Artificial
  Synthetic oligonucleotide
tatcaggtgtgttaacctaatcacatttgaagacggtctgagagaactatcagta

SEQ ID NO: 454009 - DNA, 54 bp, Artificial
  Synthetic oligonucleotide
tatcagtaagacgtacagtatccacttggagcattcccagtgctactgggtttg

SEQ ID NO: 454010 - DNA, 55 bp, Artificial
  Synthetic oligonucleotide
tatcagtacagacagtaagttgcgggtcagcgagactcttccgaccttggggtcg

SEQ ID NO: 454011 - DNA, 60 bp, Artificial
  Synthetic oligonucleotide
tatcagtatggttgcactgtctcctcttggggctctagttgcttgctacaaaggagtaag

SEQ ID NO: 454012 - DNA, 53 bp, Artificial
  Synthetic oligonucleotide
tatcagtcaagccatgcaggcagcatgttggtgggcaaatatcaaacacacca

SEQ ID NO: 454013 - DNA, 56 bp, Artificial
  Synthetic oligonucleotide
tatcagtcatatctgagacgcactcaatctatgggaatacaactggatcagagaat

SEQ ID NO: 454014 - DNA, 57 bp, Artificial
  Synthetic oligonucleotide
tatcagtgaaccctgctcttttaacaagtggacctatagtacgaccaggagacaatg

SEQ ID NO: 454015 - DNA, 60 bp, Artificial
  Synthetic oligonucleotide
tatcagtgacacccgcttagacgacgacctaggggttttgcatggcactcgacgcaagca

SEQ ID NO: 454016 - DNA, 51 bp, Artificial
  Synthetic oligonucleotide
tatcagtggcaaacgaaagatcaaagcggataaggttttagtcgacaagac

SEQ ID NO: 454017 - DNA, 60 bp, Artificial
  Synthetic oligonucleotide
tatcagtgggataacaggacaactagagaaggaaactcccactagcacctccagattcta

SEQ ID NO: 454018 - DNA, 60 bp, Artificial
  Synthetic oligonucleotide
tatcatacgttcttggctgtcaactacgatcaatagactaaatgtggaagagtatgcatc

SEQ ID NO: 454019 - DNA, 60 bp, Artificial
  Synthetic oligonucleotide
tatcatagggcaaaccgccaatccctcgcaagccaagatatcactgagatagactttgtt

SEQ ID NO: 454020 - DNA, 60 bp, Artificial
  Synthetic oligonucleotide
tatcatatcgtgataaacgggccctgcgatatggatgatggcggagcaaggtcgattgtt

SEQ ID NO: 454021 - DNA, 60 bp, Artificial
  Synthetic oligonucleotide
tatcatcaatggatataggaagaagaacgccggtgtctggccgagggtcaaagcacatac

SEQ ID NO: 454022 - DNA, 50 bp, Artificial
  Synthetic oligonucleotide
tatcatcaccccctggagactgacacccttttcatcaaagttcacaaaca

SEQ ID NO: 454023 - DNA, 54 bp, Artificial
  Synthetic oligonucleotide
tatcatcatgtacgctcccacaatatgggtacgcatggtactgatgacacattt

SEQ ID NO: 454024 - DNA, 60 bp, Artificial
  Synthetic oligonucleotide
tatcatcattcataccagacagcagtgaggcggaaagtgcttgtcgataagaaagtgctt

SEQ ID NO: 454025 - DNA, 57 bp, Artificial
  Synthetic oligonucleotide
tatcatccaatagatgtctagtaaacgttttattctatctgaattcctcccttttaa

SEQ ID NO: 454026 - DNA, 55 bp, Artificial
  Synthetic oligonucleotide
tatcatccatgcttgttccagaggctgtccatgacaggaagttggttatgatcct

SEQ ID NO: 454027 - DNA, 60 bp, Artificial
  Synthetic oligonucleotide
tatcatcctaggaggtctcacatggatggacttactacgagcccttatcatgttagggga

SEQ ID NO: 454028 - DNA, 60 bp, Artificial
  Synthetic oligonucleotide
tatcatcgcatatcgtgatatgcagttagagagagatgaaatgtatggttatgtaaatat

SEQ ID NO: 454029 - DNA, 60 bp, Artificial
  Synthetic oligonucleotide
tatcatcgcgtagtccactgtcagattatggcagtgttgcgtcgtcagatttcgggcgac

SEQ ID NO: 454030 - DNA, 55 bp, Artificial
  Synthetic oligonucleotide
tatcatcggaaagaggaccgttctgagcggcacatttgcgatcgtcaataagcac

SEQ ID NO: 454031 - DNA, 60 bp, Artificial
  Synthetic oligonucleotide
tatcatctcaatggccgcgactcgctggtgaatccaggaccagctatggccagtcacaag

SEQ ID NO: 454032 - DNA, 58 bp, Artificial
  Synthetic oligonucleotide
tatcatctgggtatatggacccactggtggggaaggagaatccacctttgccagggac

SEQ ID NO: 454033 - DNA, 57 bp, Artificial
  Synthetic oligonucleotide
tatcatctggtccggtcggcctggattttgcaagcgccgaaggagtctcttaagggt

SEQ ID NO: 454034 - DNA, 57 bp, Artificial
  Synthetic oligonucleotide
tatcatgagtccaagggacaaaggatttttatgccctgaattcccaggtagtttcag

SEQ ID NO: 454035 - DNA, 59 bp, Artificial
  Synthetic oligonucleotide
tatcatgctgagacctactaaatcgctatcgttgtatttacagttcgctatgagggcgt

SEQ ID NO: 454036 - DNA, 60 bp, Artificial
  Synthetic oligonucleotide
tatcatggcccaaactgtgatgagaatgtacatccgatcattcaaccgacgttcattgaa

SEQ ID NO: 454037 - DNA, 60 bp, Artificial
  Synthetic oligonucleotide
tatcatggcgcagccatgtcatcggagaataatttgggtctatggcccaaatggaggaga

SEQ ID NO: 454038 - DNA, 60 bp, Artificial
  Synthetic oligonucleotide
tatcatgtagtagtcgaaggggtaatggtacgcattaccggatcctggcagtctgtctcc

SEQ ID NO: 454039 - DNA, 55 bp, Artificial
  Synthetic oligonucleotide
tatcatgtcgtctcacctaagggtgcttgcaatctagaagtgaagccagtctggg

SEQ ID NO: 454040 - DNA, 54 bp, Artificial
  Synthetic oligonucleotide
tatcattacctgtgtgcggatttcttgaccggagctggcttgactgatttggaa

SEQ ID NO: 454041 - DNA, 56 bp, Artificial
  Synthetic oligonucleotide
tatcattcctacaccccttcaaaatggcggcgggtcacaaaatggcggagggacta

SEQ ID NO: 454042 - DNA, 55 bp, Artificial
  Synthetic oligonucleotide
tatcattgccacgtagtggagtgatatttgagaagtgagcataggagttgcttcg

SEQ ID NO: 454043 - DNA, 60 bp, Artificial
  Synthetic oligonucleotide
tatcattgctgactggatacaagatcatagattgcgttctggtgagggattgcgtattac

SEQ ID NO: 454044 - DNA, 55 bp, Artificial
  Synthetic oligonucleotide
tatcatttaggagcctggacgaatgtgtaaggagatcattggttcggaaaccacg

SEQ ID NO: 454045 - DNA, 60 bp, Artificial
  Synthetic oligonucleotide
tatcatttcggccatgactcgccacctcttgatgaggtagcacttcaagaataccgtacg

SEQ ID NO: 454046 - DNA, 55 bp, Artificial
  Synthetic oligonucleotide
tatcatttcgggacaacggcgaccgcgcgactccatgttgcctgcgcgtacgggt

SEQ ID NO: 454047 - DNA, 60 bp, Artificial
  Synthetic oligonucleotide
tatcatttggtactaggcggcaatgatcttgcaaaatacatagagttgcccacagacaca

SEQ ID NO: 454048 - DNA, 60 bp, Artificial
  Synthetic oligonucleotide
tatccaaaactcccgactgctccagttgccactgacactgagacttctaccagtactgag

SEQ ID NO: 454049 - DNA, 55 bp, Artificial
  Synthetic oligonucleotide
tatccaaaatattccgaagaatcaaagttaaacagggaaaaaatcgatggagtga

SEQ ID NO: 454050 - DNA, 60 bp, Artificial
  Synthetic oligonucleotide
tatccaacagaccccaaacaggtacgctgcttatgggatcagacacacaatctccaagtc

SEQ ID NO: 454051 - DNA, 56 bp, Artificial
  Synthetic oligonucleotide
tatccaaccgcatccaggtgcatccccacccttcataggtatatcctggacagttg

SEQ ID NO: 454052 - DNA, 60 bp, Artificial
  Synthetic oligonucleotide
tatccaagggcatcgaactcaggattgcagctaattaatgtcacacaacattcagtgaaa

SEQ ID NO: 454053 - DNA, 58 bp, Artificial
  Synthetic oligonucleotide
tatccaagtcaagttggaacgacctcaactagctggacactagttgacaagaaactag

SEQ ID NO: 454054 - DNA, 58 bp, Artificial
  Synthetic oligonucleotide
tatccaagtcgttgacctcaagttacagtgtcgccactccctcattcctaccgaaaga

SEQ ID NO: 454055 - DNA, 60 bp, Artificial
  Synthetic oligonucleotide
tatccacccagtcatgcctatgtcggagatccatgagtccattcgctggactaaggatgc

SEQ ID NO: 454056 - DNA, 60 bp, Artificial
  Synthetic oligonucleotide
tatccacccctgatagttgtgaagagctgcatacaatgtatgcggttcacgtcgggtacc

SEQ ID NO: 454057 - DNA, 60 bp, Artificial
  Synthetic oligonucleotide
tatccacgatgcagatggatgtacagcagctgaggatgatgcgagccagagtcccggaca

SEQ ID NO: 454058 - DNA, 59 bp, Artificial
  Synthetic oligonucleotide
tatccacggtcatgatagcgagcgctacacccttagcggtgagtgtgtgcagtgcaata

SEQ ID NO: 454059 - DNA, 60 bp, Artificial
  Synthetic oligonucleotide
tatccactaaggcctagtaccagaggaagaagccaatctggagtttgctgctgcagagtt

SEQ ID NO: 454060 - DNA, 57 bp, Artificial
  Synthetic oligonucleotide
tatccactaatttctattctggagataacggattaatcctccgttgtggaggaacac

SEQ ID NO: 454061 - DNA, 54 bp, Artificial
  Synthetic oligonucleotide
tatccactgattatcgtcggtccacggttttaatcacccacggcgttgtagcac

SEQ ID NO: 454062 - DNA, 55 bp, Artificial
  Synthetic oligonucleotide
tatccacttggagtgcccaatgattcccacatcctcactctagtttcgggcggag

SEQ ID NO: 454063 - DNA, 60 bp, Artificial
  Synthetic oligonucleotide
tatccagaacagctgatctagattacgaagtattgaaattagtgcatccactctcggtgc

SEQ ID NO: 454064 - DNA, 60 bp, Artificial
  Synthetic oligonucleotide
tatccagattacgccacaaataacagtcttgaatatatgcagagacaaacaatacaacta

SEQ ID NO: 454065 - DNA, 59 bp, Artificial
  Synthetic oligonucleotide
tatccagcatttggaatgcaacgaatgcattatagaaacggggacccgcagacaccgtt

SEQ ID NO: 454066 - DNA, 60 bp, Artificial
  Synthetic oligonucleotide
tatccagcgctgaacgtgactatgccaaacaatggcaaatttgacaaattgtacatttgg

SEQ ID NO: 454067 - DNA, 58 bp, Artificial
  Synthetic oligonucleotide
tatccaggaaactaactatgcataccgttccggtatgtattcttgaaatgttgggcat

SEQ ID NO: 454068 - DNA, 60 bp, Artificial
  Synthetic oligonucleotide
tatccaggaaatgcttctgagcatgaagctcactcagatgggtcaccacatagaccaccg

SEQ ID NO: 454069 - DNA, 51 bp, Artificial
  Synthetic oligonucleotide
tatccaggagtggaaaccttctactggctggtatgactggcagcaggtccc

SEQ ID NO: 454070 - DNA, 55 bp, Artificial
  Synthetic oligonucleotide
tatccaggcacccgccctgacgggacattgcagatgtgcgtgtctgcccttccac

SEQ ID NO: 454071 - DNA, 60 bp, Artificial
  Synthetic oligonucleotide
tatccagtctcttttgaaggtccaggattggtggaggttcaagcaagtgagtactatcca

SEQ ID NO: 454072 - DNA, 60 bp, Artificial
  Synthetic oligonucleotide
tatccagtgatgctcaattattcaataggccattttggttacagcgagcacaaggtcata

SEQ ID NO: 454073 - DNA, 60 bp, Artificial
  Synthetic oligonucleotide
tatccagtgatgctcaattgtttaacaggcccttctggctccaaagagcccaaggtcata

SEQ ID NO: 454074 - DNA, 58 bp, Artificial
  Synthetic oligonucleotide
tatccagtggttacgaactagaatatcagaagactttaaatagttggattgcgcaagt

SEQ ID NO: 454075 - DNA, 53 bp, Artificial
  Synthetic oligonucleotide
tatccagttgaaggttgaagaacagcaagttccacggggtccgtggggggccc

SEQ ID NO: 454076 - DNA, 55 bp, Artificial
  Synthetic oligonucleotide
tatccatccattgaaggtcagagatagcatcctcgagggtataacaggtaggttg

SEQ ID NO: 454077 - DNA, 55 bp, Artificial
  Synthetic oligonucleotide
tatccatgcctcgcgaattttgtctgcttcattacaggatgagtgccagcatagg

SEQ ID NO: 454078 - DNA, 60 bp, Artificial
  Synthetic oligonucleotide
tatccatgctgttgcgtgacattggatgacggcacaccactatattcagcattcatcatg

SEQ ID NO: 454079 - DNA, 55 bp, Artificial
  Synthetic oligonucleotide
tatccatggtggacgttcgtatatctcggcatcccacccattcttctgcccggtc

SEQ ID NO: 454080 - DNA, 60 bp, Artificial
  Synthetic oligonucleotide
tatccattccaaatcactctgtccaaccgaactgtttggtgattcaatctccaaacaata

SEQ ID NO: 454081 - DNA, 55 bp, Artificial
  Synthetic oligonucleotide
tatccattcctatataactcccgctgaaaatgaactccgagcaagtacctacact

SEQ ID NO: 454082 - DNA, 60 bp, Artificial
  Synthetic oligonucleotide
tatccattggacatggcctatttgcatgaaaagggcatgtctatggattcaccacttgtt

SEQ ID NO: 454083 - DNA, 55 bp, Artificial
  Synthetic oligonucleotide
tatccatttacaacttctgccaattgaaaagtaaccagtatgtctgtcctaacta

SEQ ID NO: 454084 - DNA, 57 bp, Artificial
  Synthetic oligonucleotide
tatccatttgcccttccgaaggcagccagtaaccctaacttcttgcctaatcgacac

SEQ ID NO: 454085 - DNA, 59 bp, Artificial
  Synthetic oligonucleotide
tatcccaaacatatacagtacaatttgctaattggtgagggtccttgtgaaccaggtga

SEQ ID NO: 454086 - DNA, 58 bp, Artificial
  Synthetic oligonucleotide
tatcccaacatcgatggtacatggaaggttagggttcgacggccaataccatgagaag

SEQ ID NO: 454087 - DNA, 60 bp, Artificial
  Synthetic oligonucleotide
tatcccaaccatagcatttgacgccgaatcactgcagttccatgttactgataaacgggg

SEQ ID NO: 454088 - DNA, 50 bp, Artificial
  Synthetic oligonucleotide
tatcccaaccttcaacgactacactgcagcctagtcgttcccccagaaag

SEQ ID NO: 454089 - DNA, 50 bp, Artificial
  Synthetic oligonucleotide
tatcccaaggtatataaaacttactttgaaaaggttgaaaggttaaaaca

SEQ ID NO: 454090 - DNA, 56 bp, Artificial
  Synthetic oligonucleotide
tatcccaatgtaggcagtagaggtggatgggcaatgtatggagtaacattcgacaa

SEQ ID NO: 454091 - DNA, 54 bp, Artificial
  Synthetic oligonucleotide
tatcccacatccagggggtttaaagaagaagcaatctgttacagtcttagatgt

SEQ ID NO: 454092 - DNA, 51 bp, Artificial
  Synthetic oligonucleotide
tatcccactaggggaagctagattggtaataaaaacatattggggtctgca

SEQ ID NO: 454093 - DNA, 57 bp, Artificial
  Synthetic oligonucleotide
tatcccagacaaagcagagtggggagaaccttccttacctggtagcgtaccaagcca

SEQ ID NO: 454094 - DNA, 50 bp, Artificial
  Synthetic oligonucleotide
tatcccagagcaccagttggcatatataggcacaggaaatgtaacagtag

SEQ ID NO: 454095 - DNA, 59 bp, Artificial
  Synthetic oligonucleotide
tatcccagcccggagggatcgagacaggccagaagaaatcgaagaaggaggtggagagc

SEQ ID NO: 454096 - DNA, 52 bp, Artificial
  Synthetic oligonucleotide
tatcccagctaaatggcttttgcttctccttatgccacacctcgccgttccg

SEQ ID NO: 454097 - DNA, 58 bp, Artificial
  Synthetic oligonucleotide
tatcccatgttagaccagctacttcactttctcgtagacctgttagtaacattaacat

SEQ ID NO: 454098 - DNA, 60 bp, Artificial
  Synthetic oligonucleotide
tatcccatgttgagttcaacctgaccagaatgtttgacaacctgcctcagtcttgctcag

SEQ ID NO: 454099 - DNA, 52 bp, Artificial
  Synthetic oligonucleotide
tatccccaactgttcagtgacgatctgagtgaagtcgccgtggggctcatgc

SEQ ID NO: 454100 - DNA, 58 bp, Artificial
  Synthetic oligonucleotide
tatccccctcgagaggatgcggacgggcaggcacttggtattctgccactcaaaggcg

SEQ ID NO: 454101 - DNA, 55 bp, Artificial
  Synthetic oligonucleotide
tatccccggcccaggcccaaacgcatttagttttgtccgggaccacacacagcaa

SEQ ID NO: 454102 - DNA, 53 bp, Artificial
  Synthetic oligonucleotide
tatcccctaaatttcatgggttatgtaattggaagttgggggtcattacccca

SEQ ID NO: 454103 - DNA, 60 bp, Artificial
  Synthetic oligonucleotide
tatcccctactaatgcagagtttctctctactttctttgagggttgtgctgtatctatac

SEQ ID NO: 454104 - DNA, 56 bp, Artificial
  Synthetic oligonucleotide
tatcccctctacccaatccagaggactttttggggcaattgccggattcattgaag

SEQ ID NO: 454105 - DNA, 55 bp, Artificial
  Synthetic oligonucleotide
tatcccgaccagactgaccacattcacgctaagccgctgggtttgatgaccagcc

SEQ ID NO: 454106 - DNA, 60 bp, Artificial
  Synthetic oligonucleotide
tatcccgcaggtaccctcaactaccacgtgcagtgaccactgggagagcatacgacatga

SEQ ID NO: 454107 - DNA, 60 bp, Artificial
  Synthetic oligonucleotide
tatcccgcgaatgcagttgtctgtaggtttgacacgcgagtgttaagcaaattaaatctc

SEQ ID NO: 454108 - DNA, 60 bp, Artificial
  Synthetic oligonucleotide
tatcccgctgctaatacccacactcgtccgggctggggtggtgcgaactctgatgttagc

SEQ ID NO: 454109 - DNA, 55 bp, Artificial
  Synthetic oligonucleotide
tatcccggaagacatcaaaccaagtctgaccatgttgatacagacactgttccct

SEQ ID NO: 454110 - DNA, 55 bp, Artificial
  Synthetic oligonucleotide
tatcccggcaatacagtaggagtacttcccaggatagtgttcatacatcactacc

SEQ ID NO: 454111 - DNA, 60 bp, Artificial
  Synthetic oligonucleotide
tatcccggccatataacgggtcaccgcatggcatgggacatgatgatgaactggtcccct

SEQ ID NO: 454112 - DNA, 55 bp, Artificial
  Synthetic oligonucleotide
tatcccggccattggccccgtacaggttacaacctgtgaattgtacgagctagtg

SEQ ID NO: 454113 - DNA, 58 bp, Artificial
  Synthetic oligonucleotide
tatcccgggccttatagatatagacaccagagcgggtacctatacattcaataacgga

SEQ ID NO: 454114 - DNA, 52 bp, Artificial
  Synthetic oligonucleotide
tatcccggggatcgggcgtcgccccaacatagcggaccccaggaccccttcc

SEQ ID NO: 454115 - DNA, 59 bp, Artificial
  Synthetic oligonucleotide
tatcccgggggaaggaaggctcaaccatatgagattgtggcgactacgaggcatagacg

SEQ ID NO: 454116 - DNA, 55 bp, Artificial
  Synthetic oligonucleotide
tatccctaaacttgaagaggaacgcatcgtttcaattcttgaatgggacaggagc

SEQ ID NO: 454117 - DNA, 60 bp, Artificial
  Synthetic oligonucleotide
tatccctaatcgccgaagtgccagccaaagtgatgcgtgcatccggatggaccattcagg

SEQ ID NO: 454118 - DNA, 60 bp, Artificial
  Synthetic oligonucleotide
tatccctatcgtgtggaaaattgctgaacgtggcatttggggctgatcttaagggcaaga

SEQ ID NO: 454119 - DNA, 50 bp, Artificial
  Synthetic oligonucleotide
tatccctcggccccctcatttgggcgcacattgcctgcccggcggcagtc

SEQ ID NO: 454120 - DNA, 60 bp, Artificial
  Synthetic oligonucleotide
tatccctgaggatcgtcatgtgcttgtggctattaggggttattagatctgaaaataatt

SEQ ID NO: 454121 - DNA, 51 bp, Artificial
  Synthetic oligonucleotide
tatccctgctcctctacttaaaaggatcaagaagctccgcttttcaatgct

SEQ ID NO: 454122 - DNA, 56 bp, Artificial
  Synthetic oligonucleotide
tatccctggcgctagtagcgtgttgaacagaacactcttaggtgagatccttaatt

SEQ ID NO: 454123 - DNA, 60 bp, Artificial
  Synthetic oligonucleotide
tatccctggctgcaagcgggaggcgcgtgaacaggtgttccacgtcttcttagatgcggg

SEQ ID NO: 454124 - DNA, 59 bp, Artificial
  Synthetic oligonucleotide
tatccgacgtgacacggggcaatggtattacgcatcgtgtgggtaagcgtttctgcgtc

SEQ ID NO: 454125 - DNA, 60 bp, Artificial
  Synthetic oligonucleotide
tatccgactatttgatgcaaaatccggagctaaagtcacgtgtgctacgtggtcgtagcg

SEQ ID NO: 454126 - DNA, 51 bp, Artificial
  Synthetic oligonucleotide
tatccgatcggtataagacaaattgcaggaattcgtaattatgcgaccaag

SEQ ID NO: 454127 - DNA, 60 bp, Artificial
  Synthetic oligonucleotide
tatccgcaggcttccatctagatcccagggtgctcgtttttgacgagtcagtaccctgtc

SEQ ID NO: 454128 - DNA, 57 bp, Artificial
  Synthetic oligonucleotide
tatccgcatggagtaagaccttctgtgctctgttcggcccatggttccgcgctattg

SEQ ID NO: 454129 - DNA, 58 bp, Artificial
  Synthetic oligonucleotide
tatccgcgagcccacttaccgtctgtggaacgacactagaacgagaatcgtttggcga

SEQ ID NO: 454130 - DNA, 60 bp, Artificial
  Synthetic oligonucleotide
tatccgctctatggagaatcaggctgcccggcaattggggtctagggcttggccttctac

SEQ ID NO: 454131 - DNA, 60 bp, Artificial
  Synthetic oligonucleotide
tatccggcagatagtgtgtgccgaccccatttacaccaggataggggcgtgcttagaggc

SEQ ID NO: 454132 - DNA, 55 bp, Artificial
  Synthetic oligonucleotide
tatccgggaccacatacatcaactaaagctgaccaatcacatcaatgctgacgag

SEQ ID NO: 454133 - DNA, 58 bp, Artificial
  Synthetic oligonucleotide
tatccggggcgcaagaaatgaccgccgttaatatcagcgactataccgcgcctgattt

SEQ ID NO: 454134 - DNA, 55 bp, Artificial
  Synthetic oligonucleotide
tatccgtaagacaagccctagagtcccacctaccgttgttcctccaccacagaac

SEQ ID NO: 454135 - DNA, 59 bp, Artificial
  Synthetic oligonucleotide
tatccgtactctttcacgtgccaacctctagaccatgagagagaaaactctagacccta

SEQ ID NO: 454136 - DNA, 60 bp, Artificial
  Synthetic oligonucleotide
tatccgtagccgaatgcgatgcatttcgagctcgctatggtggtgcatttgacgtgaatc

SEQ ID NO: 454137 - DNA, 59 bp, Artificial
  Synthetic oligonucleotide
tatccgtatacgcacgctcattcagtgccgcatttgggtcgcgcaaaacatgatcgcaa

SEQ ID NO: 454138 - DNA, 58 bp, Artificial
  Synthetic oligonucleotide
tatccgtatcgaggagtcaatttaccaatgttgtgacttggcccccgaagccagacag

SEQ ID NO: 454139 - DNA, 58 bp, Artificial
  Synthetic oligonucleotide
tatccgtctcggtacgcgcgcaaaacaagatgtactctggctgcacgtacacaagtac

SEQ ID NO: 454140 - DNA, 58 bp, Artificial
  Synthetic oligonucleotide
tatccgtgggtgggctatatacagcaaagataatggcgtaagaattggttccaaagga

SEQ ID NO: 454141 - DNA, 58 bp, Artificial
  Synthetic oligonucleotide
tatccgttatgggacaaacacctcagcctacccaagcgctacttgacacaggagccga

SEQ ID NO: 454142 - DNA, 59 bp, Artificial
  Synthetic oligonucleotide
tatccgttcggctcaccactaactgacactgtggttgttaactcccaagttctgcaatc

SEQ ID NO: 454143 - DNA, 60 bp, Artificial
  Synthetic oligonucleotide
tatccgttgccgccatctctgctatgtttgcggacgccgcatttggagtccaagctaaca

SEQ ID NO: 454144 - DNA, 56 bp, Artificial
  Synthetic oligonucleotide
tatcctaaactcagtaaatcatatacaaacaacaaggggaaagaagtgcttgtact

SEQ ID NO: 454145 - DNA, 54 bp, Artificial
  Synthetic oligonucleotide
tatcctacgggaatccgtgttcccctctcgtgtccagcccctccccgtgtctgg

SEQ ID NO: 454146 - DNA, 55 bp, Artificial
  Synthetic oligonucleotide
tatcctatagtgcaaaacccacaggggcaaatgatataccagtccctgtcaccta

SEQ ID NO: 454147 - DNA, 53 bp, Artificial
  Synthetic oligonucleotide
tatcctatgcgggtgtctgtgaacttggcactcctggccgcgaggaactctag

SEQ ID NO: 454148 - DNA, 55 bp, Artificial
  Synthetic oligonucleotide
tatcctatgggaatccccggtctcctctcaggtccagcccctccccagtccgaga

SEQ ID NO: 454149 - DNA, 54 bp, Artificial
  Synthetic oligonucleotide
tatcctatgggaatccctggtttcccctcacgtccagcccctccccagtcctgg

SEQ ID NO: 454150 - DNA, 55 bp, Artificial
  Synthetic oligonucleotide
tatcctatgggaatccgcgatcgcccctcacgtccagcccctccccgtgtctaac

SEQ ID NO: 454151 - DNA, 55 bp, Artificial
  Synthetic oligonucleotide
tatcctatgggaatccgcggtctcccctcacgtccagcccatccccgtgtctgtg

SEQ ID NO: 454152 - DNA, 54 bp, Artificial
  Synthetic oligonucleotide
tatcctatggtaacattctcctcagtggtactcaaacagctagaatgcttaaat

SEQ ID NO: 454153 - DNA, 59 bp, Artificial
  Synthetic oligonucleotide
tatcctatggtttatatccgttccgcatctattgaaagccatataccgtatagtttatc

SEQ ID NO: 454154 - DNA, 54 bp, Artificial
  Synthetic oligonucleotide
tatcctcaacggcgtcgtatgtactaccgtcctcgtaagcctttctttccccgc

SEQ ID NO: 454155 - DNA, 60 bp, Artificial
  Synthetic oligonucleotide
tatcctcactgacatgactattcagagaaattacgtctgccagggagacgacggcatact

SEQ ID NO: 454156 - DNA, 54 bp, Artificial
  Synthetic oligonucleotide
tatcctcccaagcataaacaaagcctatatgtttgaaccccagggtcctaaacc

SEQ ID NO: 454157 - DNA, 54 bp, Artificial
  Synthetic oligonucleotide
tatcctcccgttttcgtggtgtatcacggtggacttaagaacgtcggaagcaaa

SEQ ID NO: 454158 - DNA, 58 bp, Artificial
  Synthetic oligonucleotide
tatcctccgacgctcttaaatgggaacatagtgtttatcttgacgctttttgccacga

SEQ ID NO: 454159 - DNA, 58 bp, Artificial
  Synthetic oligonucleotide
tatcctccgttaacttcgtcttgtcggtatggctttgaggtttcatttgatcattctg

SEQ ID NO: 454160 - DNA, 60 bp, Artificial
  Synthetic oligonucleotide
tatcctcctgtacaagaatgatggaaacacagacctctacgtggtttggcttcaatggta

SEQ ID NO: 454161 - DNA, 55 bp, Artificial
  Synthetic oligonucleotide
tatcctcgatgtcgatcagttacttaggcaggctacgtcacaagtgggtgcgcgg

SEQ ID NO: 454162 - DNA, 55 bp, Artificial
  Synthetic oligonucleotide
tatcctctcgcgtaggtgttcggtccttgggatggggcaagagcctggaaggccc

SEQ ID NO: 454163 - DNA, 60 bp, Artificial
  Synthetic oligonucleotide
tatcctctgagggatgaagctccagatgatgaattacactgtagagtagatcgggatcaa

SEQ ID NO: 454164 - DNA, 60 bp, Artificial
  Synthetic oligonucleotide
tatcctcttgtatatgcttgaatggggaaaagagatggttgaccactttcatctgggtga

SEQ ID NO: 454165 - DNA, 55 bp, Artificial
  Synthetic oligonucleotide
tatcctgaattcacattgattgacgagtatttggagggggaggttcttgaaggtg

SEQ ID NO: 454166 - DNA, 55 bp, Artificial
  Synthetic oligonucleotide
tatcctgacgtcaggtgtatatgcagagacaactggaaaggctctaacaggcccg

SEQ ID NO: 454167 - DNA, 60 bp, Artificial
  Synthetic oligonucleotide
tatcctgattatttgcaaatgtctgcagatgtgtatggggacagtatgttcttctgttta

SEQ ID NO: 454168 - DNA, 60 bp, Artificial
  Synthetic oligonucleotide
tatcctgccaatggggcatgacagtgtttatgctgttgcggtacaaacgggccaaaaaca

SEQ ID NO: 454169 - DNA, 55 bp, Artificial
  Synthetic oligonucleotide
tatcctgcgtgaacaagcggcgagaacaactgcctttatggcaggtgaggtgaat

SEQ ID NO: 454170 - DNA, 57 bp, Artificial
  Synthetic oligonucleotide
tatcctggcaataagcgtgaggcgctacttcgtttaaaagggagccatttcgaacca

SEQ ID NO: 454171 - DNA, 59 bp, Artificial
  Synthetic oligonucleotide
tatcctggtcaacttgggtaaactcatccacctgtatatctactgtaagctcttcctgg

SEQ ID NO: 454172 - DNA, 51 bp, Artificial
  Synthetic oligonucleotide
tatcctggtgaatcctttgagaatctcgcagcacatttcctccccgctcac

SEQ ID NO: 454173 - DNA, 50 bp, Artificial
  Synthetic oligonucleotide
tatcctggtgccatcactggacaccgtatggcatgggacatgatgatgaa

SEQ ID NO: 454174 - DNA, 59 bp, Artificial
  Synthetic oligonucleotide
tatcctgtacgactcacagactcagctcctgggtatacaggtaaccctaccctcagttg

SEQ ID NO: 454175 - DNA, 55 bp, Artificial
  Synthetic oligonucleotide
tatcctgtgaatccaatcgaattggacacaactgacgaagttctcgaggtagcaa

SEQ ID NO: 454176 - DNA, 51 bp, Artificial
  Synthetic oligonucleotide
tatcctgtgaggaataaacgtgttggttacttccctaatcgacgatatacc

SEQ ID NO: 454177 - DNA, 60 bp, Artificial
  Synthetic oligonucleotide
tatccttacaggctttggcattatccttgcactgtcaattacaccttgttcaaagtcagg

SEQ ID NO: 454178 - DNA, 55 bp, Artificial
  Synthetic oligonucleotide
tatccttagatgctgcggtattccctaggatagaacagcgcttagtaacaagacc

SEQ ID NO: 454179 - DNA, 51 bp, Artificial
  Synthetic oligonucleotide
tatccttaggtgccaacatggagtgatagggttagtcacagcaggaggcaa

SEQ ID NO: 454180 - DNA, 54 bp, Artificial
  Synthetic oligonucleotide
tatccttctgtcccctcttgtacaaccaaccatgattacacattgtggttgcca

SEQ ID NO: 454181 - DNA, 52 bp, Artificial
  Synthetic oligonucleotide
tatccttgaaacatctatcactagtaaaccggttcttcgagttttaatgcaa

SEQ ID NO: 454182 - DNA, 55 bp, Artificial
  Synthetic oligonucleotide
tatccttgatctgtgggtctaccatacacaaggttacttccctgactggcagaac

SEQ ID NO: 454183 - DNA, 55 bp, Artificial
  Synthetic oligonucleotide
tatcctttgctgggattgttacaaagctaccaacagccaacaacaccaccacatc

SEQ ID NO: 454184 - DNA, 57 bp, Artificial
  Synthetic oligonucleotide
tatccttttacgttacatagtgtcggttcgcaaccgagcttaatggtgctaccataa

SEQ ID NO: 454185 - DNA, 55 bp, Artificial
  Synthetic oligonucleotide
tatcgaaatcggcgggaggaaatggagaagttaaaccgtttgtgcattattggcg

SEQ ID NO: 454186 - DNA, 60 bp, Artificial
  Synthetic oligonucleotide
tatcgaacaaacaccacaggtaatgactatatccctacttgtgactgtactgatgcaact

SEQ ID NO: 454187 - DNA, 59 bp, Artificial
  Synthetic oligonucleotide
tatcgaacgctaaggacgcctgacgtcccacgaggttgtgaaggcccatgtaaggtgca

SEQ ID NO: 454188 - DNA, 60 bp, Artificial
  Synthetic oligonucleotide
tatcgaatcttccgacacgcacccgtggtacacactgaaaggtcgtgtgttgaacgctca

SEQ ID NO: 454189 - DNA, 60 bp, Artificial
  Synthetic oligonucleotide
tatcgaattggaggaacattcgttgaattctcacgaagcaacgcagctactgtggctagt

SEQ ID NO: 454190 - DNA, 60 bp, Artificial
  Synthetic oligonucleotide
tatcgaatttctcggtatatgactaattagtttatcgcatatgcttaatggaaaatctta

SEQ ID NO: 454191 - DNA, 58 bp, Artificial
  Synthetic oligonucleotide
tatcgacgcaacaaagtacggaaataatatactcgtctatgttgcaagttacaacgac

SEQ ID NO: 454192 - DNA, 58 bp, Artificial
  Synthetic oligonucleotide
tatcgacgtttttcccaaccggactatctagcgaagatatttattgacaatgatggag

SEQ ID NO: 454193 - DNA, 54 bp, Artificial
  Synthetic oligonucleotide
tatcgacttactaaatctatcttgtttggtaaatttaggaaagccaaataccca

SEQ ID NO: 454194 - DNA, 51 bp, Artificial
  Synthetic oligonucleotide
tatcgacttccccgaaagggacgagggtatgccgactacaagtcgcgagcc

SEQ ID NO: 454195 - DNA, 55 bp, Artificial
  Synthetic oligonucleotide
tatcgagaaggagattccaaacccaaagggtaagggtcctatgggcttgattatg

SEQ ID NO: 454196 - DNA, 60 bp, Artificial
  Synthetic oligonucleotide
tatcgagaatacacaatgctaataagagatgaagttgttaaaatgctcgaggaaccggtg

SEQ ID NO: 454197 - DNA, 58 bp, Artificial
  Synthetic oligonucleotide
tatcgagcacatgccaggctgtattcacttttacaacacacttctcagcaccagcatg

SEQ ID NO: 454198 - DNA, 60 bp, Artificial
  Synthetic oligonucleotide
tatcgagcagacacgctagagataactagtgatgccgatttttatgatgatgtcatggag

SEQ ID NO: 454199 - DNA, 60 bp, Artificial
  Synthetic oligonucleotide
tatcgagctcgaattccccatggcaacgatttccatcatcaatgactccattgacagcgc

SEQ ID NO: 454200 - DNA, 50 bp, Artificial
  Synthetic oligonucleotide
tatcgaggaatggtttatgcattacagtatagaccgattaaatttagcac

SEQ ID NO: 454201 - DNA, 60 bp, Artificial
  Synthetic oligonucleotide
tatcgagtaaataggtacacgaagtcagcacatcaaaaaggtgagtacactgccattggg

SEQ ID NO: 454202 - DNA, 60 bp, Artificial
  Synthetic oligonucleotide
tatcgagtaattacatattagagctcctgtataagttccgtgacagtatcagatctagtg

SEQ ID NO: 454203 - DNA, 57 bp, Artificial
  Synthetic oligonucleotide
tatcgagttctccggactaaggcccgataccgacctgaccaactggtatggtctcgc

SEQ ID NO: 454204 - DNA, 60 bp, Artificial
  Synthetic oligonucleotide
tatcgatatagtgttgcacagtgaactcgcgtgcaaaaatcgaactacaatggatgtacc

SEQ ID NO: 454205 - DNA, 60 bp, Artificial
  Synthetic oligonucleotide
tatcgatatcacctattgctccgggtataaacctggaattgagttgaatgcaggaagatc

SEQ ID NO: 454206 - DNA, 60 bp, Artificial
  Synthetic oligonucleotide
tatcgatcgaaaaccgcacttgacctctgctggtggtctctatacattcgacgagctgtt

SEQ ID NO: 454207 - DNA, 60 bp, Artificial
  Synthetic oligonucleotide
tatcgatgcttgattatatcgtttacagcgcagaagaggtgcactacgttggatgcggtg

SEQ ID NO: 454208 - DNA, 60 bp, Artificial
  Synthetic oligonucleotide
tatcgattataaaaaaacatgtgattaataaggagtgataccataaaatgccattagata

SEQ ID NO: 454209 - DNA, 52 bp, Artificial
  Synthetic oligonucleotide
tatcgatttgtataacaatagtctagagatcgatcgacaaaacgttacggcg

SEQ ID NO: 454210 - DNA, 60 bp, Artificial
  Synthetic oligonucleotide
tatcgatttttctatgaccattgaggagtcattcataactgtctctgtctgttcaaacac

SEQ ID NO: 454211 - DNA, 55 bp, Artificial
  Synthetic oligonucleotide
tatcgcaactgcggtaagtgaccttgccacattcgcccaaacggtctataacgat

SEQ ID NO: 454212 - DNA, 60 bp, Artificial
  Synthetic oligonucleotide
tatcgcatatacaatcggcttcagggatatatcgaggcggtacaattggaggagttacgg

SEQ ID NO: 454213 - DNA, 57 bp, Artificial
  Synthetic oligonucleotide
tatcgcatgccgacgttcccacttctacgactctcacgtaggggtacgaccagggaa

SEQ ID NO: 454214 - DNA, 57 bp, Artificial
  Synthetic oligonucleotide
tatcgcatggtgaagggccaacgtaaagagcttcctgaaaggtggttcttctactac

SEQ ID NO: 454215 - DNA, 60 bp, Artificial
  Synthetic oligonucleotide
tatcgccaactaaatctgacatagtgacaatgactactaaaggagcccaccatacggcga

SEQ ID NO: 454216 - DNA, 58 bp, Artificial
  Synthetic oligonucleotide
tatcgccaatcgtatcgggtggtacttcaatattgaaaagacggagtactcgagaata

SEQ ID NO: 454217 - DNA, 53 bp, Artificial
  Synthetic oligonucleotide
tatcgccaatttacaacaaagtagttctaaccattcaagcccctcggctaaat

SEQ ID NO: 454218 - DNA, 55 bp, Artificial
  Synthetic oligonucleotide
tatcgccagattaactcgttccgtggcatgtggccttatggcttcacgcaaccga

SEQ ID NO: 454219 - DNA, 60 bp, Artificial
  Synthetic oligonucleotide
tatcgccctctatgactatacttatcggtctcaaaggccgcgcagcggcactcacaacat

SEQ ID NO: 454220 - DNA, 51 bp, Artificial
  Synthetic oligonucleotide
tatcgccgacgtcggtggtattgcacatacacctattcgtacttttgaatc

SEQ ID NO: 454221 - DNA, 60 bp, Artificial
  Synthetic oligonucleotide
tatcgccgatgttgaacgggaagagttcgcagcgcttgtataccgagtggacctgtggac

SEQ ID NO: 454222 - DNA, 55 bp, Artificial
  Synthetic oligonucleotide
tatcgccggatggctcttgggaaacccggaatgcgatttactgctcacagcgagc

SEQ ID NO: 454223 - DNA, 54 bp, Artificial
  Synthetic oligonucleotide
tatcgcctggcagccacagtttgaccctattactcgttatgacatccaagagtg

SEQ ID NO: 454224 - DNA, 51 bp, Artificial
  Synthetic oligonucleotide
tatcgcgaccaccaacttgtactcaggcttcaccccgaggaccatggtctg

SEQ ID NO: 454225 - DNA, 60 bp, Artificial
  Synthetic oligonucleotide
tatcgcgataattctcgtctgacatgttgatagcttttgtttaatacacgggaatctctg

SEQ ID NO: 454226 - DNA, 53 bp, Artificial
  Synthetic oligonucleotide
tatcgcgcagctaaagaggcttatctgaagaggatgaataccccgcttgagtg

SEQ ID NO: 454227 - DNA, 58 bp, Artificial
  Synthetic oligonucleotide
tatcgcgcgagatagtccgcatgttcttgtcgggctgaccaggcacactaaaacattc

SEQ ID NO: 454228 - DNA, 59 bp, Artificial
  Synthetic oligonucleotide
tatcgcgcgtacagagccatacagggcttggaagacgacagcgataaaacattcgcagc

SEQ ID NO: 454229 - DNA, 60 bp, Artificial
  Synthetic oligonucleotide
tatcgcgctctctaagtccgagtccgcatctacatgagacataccgattgtacttcttga

SEQ ID NO: 454230 - DNA, 60 bp, Artificial
  Synthetic oligonucleotide
tatcgcgtcactgctcgctatctttccgatcctcttatctcagctcttcttcttgggaat

SEQ ID NO: 454231 - DNA, 60 bp, Artificial
  Synthetic oligonucleotide
tatcgctaaggcagcgtctttggaacctgcatttaaagcctctgcacatgcgtcgttagc

SEQ ID NO: 454232 - DNA, 60 bp, Artificial
  Synthetic oligonucleotide
tatcgctaccgcaatgttccattaaagcgcaggcaatgggccgatgcgcagatgtctttg

SEQ ID NO: 454233 - DNA, 50 bp, Artificial
  Synthetic oligonucleotide
tatcgctagtaaagtgtctgagacgtcaatcatcagtgatggctcgggag

SEQ ID NO: 454234 - DNA, 55 bp, Artificial
  Synthetic oligonucleotide
tatcgctatcttgctattaagtgcttgcttgacctattgcactcagtatgtcacg

SEQ ID NO: 454235 - DNA, 59 bp, Artificial
  Synthetic oligonucleotide
tatcgctgccagaaacatagtaagaagagcgacagtatcagcagacccactagcatctc

SEQ ID NO: 454236 - DNA, 60 bp, Artificial
  Synthetic oligonucleotide
tatcgctgtggtttgctttcaacagatcatttgaacctacgcatagaaatgagatgctcg

SEQ ID NO: 454237 - DNA, 59 bp, Artificial
  Synthetic oligonucleotide
tatcgcttttgagacgatggtcaaacccatgcgtatcggtcaactatggtgccccgagt

SEQ ID NO: 454238 - DNA, 54 bp, Artificial
  Synthetic oligonucleotide
tatcggaaaccgagattctacaggggtcgaaggaccagtgatgttccgcggggt

SEQ ID NO: 454239 - DNA, 60 bp, Artificial
  Synthetic oligonucleotide
tatcggaaggtagctgatacactgaggaacaccacatatgaacaatgcaagtgggctatg

SEQ ID NO: 454240 - DNA, 60 bp, Artificial
  Synthetic oligonucleotide
tatcggacaatacacgcgcgagagcttggttgcagcacgtaacgctatgccgaggtttgc

SEQ ID NO: 454241 - DNA, 55 bp, Artificial
  Synthetic oligonucleotide
tatcggagaccccagcacaatcccatgcccctacggaccaggggaagcccctcaa

SEQ ID NO: 454242 - DNA, 60 bp, Artificial
  Synthetic oligonucleotide
tatcggagccaatatataggtctcccaatatattggtacgggagtcagcagcgacagttt

SEQ ID NO: 454243 - DNA, 60 bp, Artificial
  Synthetic oligonucleotide
tatcggagcttgccgaagaacgaagcggcttcaacttccgctatgagacctattggcgga

SEQ ID NO: 454244 - DNA, 58 bp, Artificial
  Synthetic oligonucleotide
tatcggatagctgtcggaatggcctcggaaagcttgttgggatagctgttgggacgcc

SEQ ID NO: 454245 - DNA, 60 bp, Artificial
  Synthetic oligonucleotide
tatcggatggttcacgctatgcggtcgatgttctccattcaaaattctgccaccacttat

SEQ ID NO: 454246 - DNA, 60 bp, Artificial
  Synthetic oligonucleotide
tatcggcaaatttgaatgatgtaatctgtagtggcggtgattatagtttcgcattaccgg

SEQ ID NO: 454247 - DNA, 60 bp, Artificial
  Synthetic oligonucleotide
tatcggcagactgatcaaagcacccgtttctagcagattcatctcagaggacaagtttct

SEQ ID NO: 454248 - DNA, 55 bp, Artificial
  Synthetic oligonucleotide
tatcggccgatacagtagagcctataaatgcagtagcattcgataatattcgcat

SEQ ID NO: 454249 - DNA, 57 bp, Artificial
  Synthetic oligonucleotide
tatcggcgaaggaggtctgtggcccggtatattgtttcacacccagtcctgtggtgg

SEQ ID NO: 454250 - DNA, 60 bp, Artificial
  Synthetic oligonucleotide
tatcggcgaagtgaacactgcactatttgaaaaagctgtcgaacatgtcatccaactcct

SEQ ID NO: 454251 - DNA, 56 bp, Artificial
  Synthetic oligonucleotide
tatcggcgacacattgacgtgcggcgatacggtagcaggtggtgcggggaaggtta

SEQ ID NO: 454252 - DNA, 57 bp, Artificial
  Synthetic oligonucleotide
tatcgggaggcaggttgtttactcgctggtgcaaagcacgtctggcccacgttacgg

SEQ ID NO: 454253 - DNA, 60 bp, Artificial
  Synthetic oligonucleotide
tatcgggaggccttagagtctccggaacatggctcacatcaccatacagcactcaggcaa

SEQ ID NO: 454254 - DNA, 58 bp, Artificial
  Synthetic oligonucleotide
tatcgggatgtgtaggtaaagcctatgacatctggtaaaacgagtttcctgttagtca

SEQ ID NO: 454255 - DNA, 60 bp, Artificial
  Synthetic oligonucleotide
tatcgggcaggagcagctgagcggagggcctatgccggaacactgggaggaagcctggtt

SEQ ID NO: 454256 - DNA, 51 bp, Artificial
  Synthetic oligonucleotide
tatcgggccagcctgctgttatccccaaccgagaggcgctctatcagcagt

SEQ ID NO: 454257 - DNA, 52 bp, Artificial
  Synthetic oligonucleotide
tatcggggacaatatataggtctcccaatatttgtactaagagcgtgcagag

SEQ ID NO: 454258 - DNA, 57 bp, Artificial
  Synthetic oligonucleotide
tatcgggggcttgtggtactatcctgagggcctagtgggtctgtttccaccattctc

SEQ ID NO: 454259 - DNA, 53 bp, Artificial
  Synthetic oligonucleotide
tatcggtgatcaattggtgaccaataaattacctttcctaaaatacccccgct

SEQ ID NO: 454260 - DNA, 55 bp, Artificial
  Synthetic oligonucleotide
tatcggtgatcaattggtgactcataattggtctttcctaaaatacccccgtttc

SEQ ID NO: 454261 - DNA, 55 bp, Artificial
  Synthetic oligonucleotide
tatcggtgatcaattggtgatcaataatagggattccctaaaatacccccgcttt

SEQ ID NO: 454262 - DNA, 59 bp, Artificial
  Synthetic oligonucleotide
tatcggtgatcaattggtgcctcataattggtgttgcctaaaatacccctatttctgtg

SEQ ID NO: 454263 - DNA, 58 bp, Artificial
  Synthetic oligonucleotide
tatcggtgcacgactaaacctgttagaaacacctctccttacggcactcacgtcactg

SEQ ID NO: 454264 - DNA, 59 bp, Artificial
  Synthetic oligonucleotide
tatcggtgtatggagtcttatatataccttatagaacttcatagcggcctttcgttata

SEQ ID NO: 454265 - DNA, 51 bp, Artificial
  Synthetic oligonucleotide
tatcggtgtgcaacgcgagtgttcctaactgcaaacataggagctctgtaa

SEQ ID NO: 454266 - DNA, 58 bp, Artificial
  Synthetic oligonucleotide
tatcgtaaatcatatttaccccagtttgaccatgcaatcgccgtatttccacttagaa

SEQ ID NO: 454267 - DNA, 55 bp, Artificial
  Synthetic oligonucleotide
tatcgtaaggcgcgtgcaccgtgagcgaaaacacgttgggctcattgagaagcgg

SEQ ID NO: 454268 - DNA, 59 bp, Artificial
  Synthetic oligonucleotide
tatcgtacattaggggtatttaggtacaagagtagatgctatgttgggctggtgtggtg

SEQ ID NO: 454269 - DNA, 59 bp, Artificial
  Synthetic oligonucleotide
tatcgtagccgtaagtcaataatctgctatgatctttcatgcaatagtacattctgtaa

SEQ ID NO: 454270 - DNA, 55 bp, Artificial
  Synthetic oligonucleotide
tatcgtcctaacaattgatgatacactgcacgtcgctttgaggcgtacacatgag

SEQ ID NO: 454271 - DNA, 55 bp, Artificial
  Synthetic oligonucleotide
tatcgtcgcgagagtgcgaacggccctacggcacgtgtcacccttcagatgctcc

SEQ ID NO: 454272 - DNA, 60 bp, Artificial
  Synthetic oligonucleotide
tatcgtcgtcttggatgacttttatgggtggctaccttattgcgagatgctccgtctctg

SEQ ID NO: 454273 - DNA, 52 bp, Artificial
  Synthetic oligonucleotide
tatcgtgacgttcctcacagaccttgatgaatttcttattcgtcgttgtatg

SEQ ID NO: 454274 - DNA, 60 bp, Artificial
  Synthetic oligonucleotide
tatcgtgatgagaatattcaggaatctgttgacgtggaaatgggagacaccacctctaat

SEQ ID NO: 454275 - DNA, 55 bp, Artificial
  Synthetic oligonucleotide
tatcgtgcattacttttggaagagagactgtacttgaatatttggtctctttcgg

SEQ ID NO: 454276 - DNA, 60 bp, Artificial
  Synthetic oligonucleotide
tatcgtgcggtgcgcgtgcttgttcagtggcatactccaaaattaccaattagatcattg

SEQ ID NO: 454277 - DNA, 55 bp, Artificial
  Synthetic oligonucleotide
tatcgtgctcaggctgcagactttattatgcgccgctacacgactgcagagaaga

SEQ ID NO: 454278 - DNA, 60 bp, Artificial
  Synthetic oligonucleotide
tatcgtgcttcacatacatcgccgcggacctccggatcacgctcaggttctccaatccaa

SEQ ID NO: 454279 - DNA, 60 bp, Artificial
  Synthetic oligonucleotide
tatcgtggccgtgcagtacgtacgaaagacgtcacaagcgattagcacgaatgatgccga

SEQ ID NO: 454280 - DNA, 59 bp, Artificial
  Synthetic oligonucleotide
tatcgtggggcgatgattgaacttcgtcattacggtagaggtgacgattacgttcaaga

SEQ ID NO: 454281 - DNA, 50 bp, Artificial
  Synthetic oligonucleotide
tatcgtgtaacgataccttgacgtgctgtacacttaaacgtagcgctctc

SEQ ID NO: 454282 - DNA, 60 bp, Artificial
  Synthetic oligonucleotide
tatcgttaggtctacccgatagatggcacttgcatgaaccgttgggttaccataggatga

SEQ ID NO: 454283 - DNA, 60 bp, Artificial
  Synthetic oligonucleotide
tatcgttcgtatcgcatattagcacgtcatgcttgggagaaacaattatcaaacctgcct

SEQ ID NO: 454284 - DNA, 57 bp, Artificial
  Synthetic oligonucleotide
tatcgttggaccaactgtcaacctgttcaagtatggatcagctgtcgtaaacataga

SEQ ID NO: 454285 - DNA, 55 bp, Artificial
  Synthetic oligonucleotide
tatcgtttacagcgcagaagaggtgcactacgttggatgcggtgacctacgtacc

SEQ ID NO: 454286 - DNA, 53 bp, Artificial
  Synthetic oligonucleotide
tatcgttttgtgcaatcagttgctgttacctgtcaaaaggatactacacctcc

SEQ ID NO: 454287 - DNA, 52 bp, Artificial
  Synthetic oligonucleotide
tatctaaaaaacattccgcttttgagttccaaataccatggggttgaaaact

SEQ ID NO: 454288 - DNA, 55 bp, Artificial
  Synthetic oligonucleotide
tatctaacctcgctccgtcactacattggtttacggtgatcgacctctcaaatgc

SEQ ID NO: 454289 - DNA, 60 bp, Artificial
  Synthetic oligonucleotide
tatctaactacatcgtatgcgttgattgctatgttggtgtgtcagctagacaggctgctg

SEQ ID NO: 454290 - DNA, 58 bp, Artificial
  Synthetic oligonucleotide
tatctaagtacaacattactaaatgtctaaagcgacttaaatagctcgtcccagaagc

SEQ ID NO: 454291 - DNA, 55 bp, Artificial
  Synthetic oligonucleotide
tatctaagtagattcagtgttctctcctgaatagcgttacatagtgtgacaggca

SEQ ID NO: 454292 - DNA, 60 bp, Artificial
  Synthetic oligonucleotide
tatctaattagctcagttctgacaagagtcttatccctgattagttagtaatggattaca

SEQ ID NO: 454293 - DNA, 57 bp, Artificial
  Synthetic oligonucleotide
tatctacaaagggcagcgtattacttgtcaaaccaacaagaccgctcgccgaaaatg

SEQ ID NO: 454294 - DNA, 60 bp, Artificial
  Synthetic oligonucleotide
tatctacacagatgatgagaaatgaatttagagtcagtacaacagaaaatgtagttaatt

SEQ ID NO: 454295 - DNA, 57 bp, Artificial
  Synthetic oligonucleotide
tatctacactccctcgccattggggccttcctcggcacttccgcccatcaaaccctc

SEQ ID NO: 454296 - DNA, 57 bp, Artificial
  Synthetic oligonucleotide
tatctacatgcggccttgctctcacgggaggaatcccaatctggcagagtttttatc

SEQ ID NO: 454297 - DNA, 60 bp, Artificial
  Synthetic oligonucleotide
tatctacgacatgttcgctgggatggttggtagcgatacctataagtacacccgctctac

SEQ ID NO: 454298 - DNA, 60 bp, Artificial
  Synthetic oligonucleotide
tatctacgtaggtttgagcattacctctatcgaggaattgatgaaatctggaatggcccc

SEQ ID NO: 454299 - DNA, 58 bp, Artificial
  Synthetic oligonucleotide
tatctactcaaacgaattagactttcagaattttatactcaagaagatcaaagagaga

SEQ ID NO: 454300 - DNA, 59 bp, Artificial
  Synthetic oligonucleotide
tatctagaatatggcgtagacgcccgagaacatatatatttgacccccctgactataat

SEQ ID NO: 454301 - DNA, 55 bp, Artificial
  Synthetic oligonucleotide
tatctagacaaagtgttgggagccatgagacaatgatccatgctgggaccggggc

SEQ ID NO: 454302 - DNA, 55 bp, Artificial
  Synthetic oligonucleotide
tatctagacccgttacctgaacaagaccgtgaaaatttagctcttgtacgtagta

SEQ ID NO: 454303 - DNA, 58 bp, Artificial
  Synthetic oligonucleotide
tatctagacgaaatggtggtataagatttaaggataagcgtggtgagacgttatcgaa

SEQ ID NO: 454304 - DNA, 60 bp, Artificial
  Synthetic oligonucleotide
tatctagaggaatagctctgactgaaaaagcaaagttgaattcgtatgcaccaatatcac

SEQ ID NO: 454305 - DNA, 50 bp, Artificial
  Synthetic oligonucleotide
tatctagatggtacagacggaataagattctgtgacccaccagctagtgg

SEQ ID NO: 454306 - DNA, 60 bp, Artificial
  Synthetic oligonucleotide
tatctagcagcatccggaagatgattaacaactcattcagctatcgcgaggaatgtaaaa

SEQ ID NO: 454307 - DNA, 57 bp, Artificial
  Synthetic oligonucleotide
tatctagccgaccttggtgataaagaacgagcacctatagatgctcaagtcgtcagt

SEQ ID NO: 454308 - DNA, 60 bp, Artificial
  Synthetic oligonucleotide
tatctaggaaattaactatgcataccgtcccagtatgtattcttgaactgttgggcatcg

SEQ ID NO: 454309 - DNA, 55 bp, Artificial
  Synthetic oligonucleotide
tatctaggcagtcctgtgctagggcttttgccctagaaacatcactaggtcttaa

SEQ ID NO: 454310 - DNA, 60 bp, Artificial
  Synthetic oligonucleotide
tatctagggccaggattgatgcacgaattgatttcgagtctgggaggattaagaaagaag

SEQ ID NO: 454311 - DNA, 55 bp, Artificial
  Synthetic oligonucleotide
tatctagtttggaggagaattgaaaacttcgcgatggcgcagggtaactcacagc

SEQ ID NO: 454312 - DNA, 60 bp, Artificial
  Synthetic oligonucleotide
tatctatcttgcgatccacaagggtgcaggatgtttgctctaagtcaaggcacaacactc

SEQ ID NO: 454313 - DNA, 59 bp, Artificial
  Synthetic oligonucleotide
tatctatgaagtatggagtaaaatttggagatgaatacgataataacatagctatcaag

SEQ ID NO: 454314 - DNA, 56 bp, Artificial
  Synthetic oligonucleotide
tatctatgatggcaaatcgttcgatgtgatcctgcccatttccgctctgtcctccg

SEQ ID NO: 454315 - DNA, 60 bp, Artificial
  Synthetic oligonucleotide
tatctatgcccacagcccagtctactatgaaagcagaggaacttacaccaggtcggtttc

SEQ ID NO: 454316 - DNA, 55 bp, Artificial
  Synthetic oligonucleotide
tatctatggaagactcacatagacccggcaaaggaacttctgacggttcctcccc

SEQ ID NO: 454317 - DNA, 58 bp, Artificial
  Synthetic oligonucleotide
tatctatggagaaccgttctcagtgtacggtcgatttttactcaccgcagtaggtgat

SEQ ID NO: 454318 - DNA, 60 bp, Artificial
  Synthetic oligonucleotide
tatctcagaacccttcagaagcctgacgttcagtcagccatagctaaattgggtcaactc

SEQ ID NO: 454319 - DNA, 50 bp, Artificial
  Synthetic oligonucleotide
tatctcagatggcctacataactggatccactacagggcacctcactcac

SEQ ID NO: 454320 - DNA, 60 bp, Artificial
  Synthetic oligonucleotide
tatctcagattgaggcaagcagttcgggagtaccgatatgatgagttaacgattatttgg

SEQ ID NO: 454321 - DNA, 55 bp, Artificial
  Synthetic oligonucleotide
tatctcagtccaagtacttgccacaagccatcctggaaaattgtgccacgaaggg

SEQ ID NO: 454322 - DNA, 60 bp, Artificial
  Synthetic oligonucleotide
tatctcatgatgcaagttccgttcggttctctaacgtacgacatcggtggtaactttgca

SEQ ID NO: 454323 - DNA, 60 bp, Artificial
  Synthetic oligonucleotide
tatctcatgctaacatgatatttggtgcagattcggtcggatttaaaggtgtaaatgtat

SEQ ID NO: 454324 - DNA, 54 bp, Artificial
  Synthetic oligonucleotide
tatctccactaacttcgatttggctgagggcaacacagcaaccatcgttgtggg

SEQ ID NO: 454325 - DNA, 60 bp, Artificial
  Synthetic oligonucleotide
tatctcccagataaaaacgccattctctgcctgagtggcagtgatgagttcccctgtgcg

SEQ ID NO: 454326 - DNA, 60 bp, Artificial
  Synthetic oligonucleotide
tatctcccagataaacacgccattctttgcttgagctgcagtgatgggttcccctgtgcg

SEQ ID NO: 454327 - DNA, 60 bp, Artificial
  Synthetic oligonucleotide
tatctcccagatatagacgccattctctacctgacgtgcagtgatgagttcccctgtgcg

SEQ ID NO: 454328 - DNA, 60 bp, Artificial
  Synthetic oligonucleotide
tatctcccatgttgggaaggtcatgtgcatttcggacgtgacacgtggtaacggtatcac

SEQ ID NO: 454329 - DNA, 55 bp, Artificial
  Synthetic oligonucleotide
tatctccgacgaggatcgattaaacagataaggttgagagtcgatccaggattca

SEQ ID NO: 454330 - DNA, 55 bp, Artificial
  Synthetic oligonucleotide
tatctccgtgaaggtaacagcaagtgggcagggaaggcgaagaagtgcacagcgt

SEQ ID NO: 454331 - DNA, 59 bp, Artificial
  Synthetic oligonucleotide
tatctcctggaggaaccatcatcctcgagtcctgctatggcgcacgtatgtgggccaca

SEQ ID NO: 454332 - DNA, 60 bp, Artificial
  Synthetic oligonucleotide
tatctcgacttggtcatgctactttgtcctaagggagtgtacttcattgtgggtggcgat

SEQ ID NO: 454333 - DNA, 58 bp, Artificial
  Synthetic oligonucleotide
tatctcgcaacttgaaattggatacggcgtgcgaatattcaaccccaagggaatcctc

SEQ ID NO: 454334 - DNA, 55 bp, Artificial
  Synthetic oligonucleotide
tatctcgcagaagtatttgattggtcccctgctgtttataatatctctcccggtg

SEQ ID NO: 454335 - DNA, 55 bp, Artificial
  Synthetic oligonucleotide
tatctcgcctatggtgtcacaccagatctccaggaagctgttgagctctggtatg

SEQ ID NO: 454336 - DNA, 50 bp, Artificial
  Synthetic oligonucleotide
tatctcggcggcacaacgtacggcaacctgctaaagatactgcgaaagaa

SEQ ID NO: 454337 - DNA, 54 bp, Artificial
  Synthetic oligonucleotide
tatctcggcgtgtcgtttcgccaggaatccactaatcgactagtcgactaatcg

SEQ ID NO: 454338 - DNA, 58 bp, Artificial
  Synthetic oligonucleotide
tatctcggcttatatcaaagtactcagtttacaaaccgtcgattgaagaactgtacaa

SEQ ID NO: 454339 - DNA, 60 bp, Artificial
  Synthetic oligonucleotide
tatctcggtcagatcatgggaaagctgatactcgtctcgatgggactctatgtaattgaa

SEQ ID NO: 454340 - DNA, 60 bp, Artificial
  Synthetic oligonucleotide
tatctcgtgtgtccccgctacgcattaatcccaccctgattgctaacgctatgtcaacga

SEQ ID NO: 454341 - DNA, 54 bp, Artificial
  Synthetic oligonucleotide
tatctctacaagacgcacagattaccatcaaaccagaaactattcgatgtaccc

SEQ ID NO: 454342 - DNA, 59 bp, Artificial
  Synthetic oligonucleotide
tatctctcgggaaacggtagtgtgaacactcgtcgcctatttcaatgtaaatagcctga

SEQ ID NO: 454343 - DNA, 56 bp, Artificial
  Synthetic oligonucleotide
tatctctctactggagacccgtttacacccccaactatttggtctccccagacaca

SEQ ID NO: 454344 - DNA, 55 bp, Artificial
  Synthetic oligonucleotide
tatctctctcagacgtgacataagaaccatcagtgttgatgattactctcaaaga

SEQ ID NO: 454345 - DNA, 57 bp, Artificial
  Synthetic oligonucleotide
tatctctgtgtactttagcctgctgtaggacctggtgtcaaagacgtagtcattgca

SEQ ID NO: 454346 - DNA, 60 bp, Artificial
  Synthetic oligonucleotide
tatctctgtgtctggaaggcgcgtgggagtgcgctgcaaaagtagactttctctctccta

SEQ ID NO: 454347 - DNA, 57 bp, Artificial
  Synthetic oligonucleotide
tatctgaaagtacccacaattttgaagtgttcagtggacctgaaggagtttccgaca

SEQ ID NO: 454348 - DNA, 60 bp, Artificial
  Synthetic oligonucleotide
tatctgaagaaaccatgtgtggtaatatgttgtttgactaataagtctattgttcatagg

SEQ ID NO: 454349 - DNA, 50 bp, Artificial
  Synthetic oligonucleotide
tatctgaaggtagatatcactatgctattgacacaaccgaacaaactagt

SEQ ID NO: 454350 - DNA, 60 bp, Artificial
  Synthetic oligonucleotide
tatctgaatggcagagagtggtcatacattgtggagagaaccaaggaaatggaagggatc

SEQ ID NO: 454351 - DNA, 60 bp, Artificial
  Synthetic oligonucleotide
tatctgaccggtttgtggaattcttagccatgcagggtttacttgctagtgcacttgaac

SEQ ID NO: 454352 - DNA, 52 bp, Artificial
  Synthetic oligonucleotide
tatctgacgttacccgtggtaacggtattactcaccgtgtcgggaagcggtt

SEQ ID NO: 454353 - DNA, 54 bp, Artificial
  Synthetic oligonucleotide
tatctgactttttggataggtctaatgtcaaagagctgttggccactatagttt

SEQ ID NO: 454354 - DNA, 60 bp, Artificial
  Synthetic oligonucleotide
tatctgagagttggttatgctgaagagatcagatatgtacaacagctcttcggaagggtc

SEQ ID NO: 454355 - DNA, 60 bp, Artificial
  Synthetic oligonucleotide
tatctgaggtttgacatggaggttaccatagtaaccaacaacacagggttgatgcaaata

SEQ ID NO: 454356 - DNA, 55 bp, Artificial
  Synthetic oligonucleotide
tatctgatagtatcgatgtcggcagaggcgttaggtctcgatcgtatcaggcagc

SEQ ID NO: 454357 - DNA, 60 bp, Artificial
  Synthetic oligonucleotide
tatctgcaaagcttagaggctacgtattctcctgatacggtcggaggtgaatttgtgaag

SEQ ID NO: 454358 - DNA, 60 bp, Artificial
  Synthetic oligonucleotide
tatctgcaccagagattgtgtgataacagttgacaaggaagatgctcaaatagttttcca

SEQ ID NO: 454359 - DNA, 60 bp, Artificial
  Synthetic oligonucleotide
tatctgcacgcacggtcgactcactgctcttgaacggatgcaccagaccagtcgacgtgt

SEQ ID NO: 454360 - DNA, 53 bp, Artificial
  Synthetic oligonucleotide
tatctgcatacggcccctcggtgtgtacggcctccggggtgaaaaaccccctc

SEQ ID NO: 454361 - DNA, 60 bp, Artificial
  Synthetic oligonucleotide
tatctgcctaaggcaaagactcacctaacgatcaccccatgtattccgcagtcaatcttc

SEQ ID NO: 454362 - DNA, 60 bp, Artificial
  Synthetic oligonucleotide
tatctgcgtcagctagaagttgaacacccattgaataacgcttgtttaattactgacagt

SEQ ID NO: 454363 - DNA, 60 bp, Artificial
  Synthetic oligonucleotide
tatctgctagctcatagtgagacaccggactctctgaatcacctatcaggagccaactgg

SEQ ID NO: 454364 - DNA, 60 bp, Artificial
  Synthetic oligonucleotide
tatctggactagttttaaagatgatggtggcagtgtagattcatcgggattatatagtaa

SEQ ID NO: 454365 - DNA, 55 bp, Artificial
  Synthetic oligonucleotide
tatctggcataccgatgaccctacctgatgaatcggacaatgtactgggccacgt

SEQ ID NO: 454366 - DNA, 58 bp, Artificial
  Synthetic oligonucleotide
tatctgggctagtgcctcttctttagtaagggagcactctgggtaagtgaggaagtaa

SEQ ID NO: 454367 - DNA, 60 bp, Artificial
  Synthetic oligonucleotide
tatctggtagacgggatgaccaattctctagaaagtgctaggcaagggaccgcaaagcta

SEQ ID NO: 454368 - DNA, 58 bp, Artificial
  Synthetic oligonucleotide
tatctggtctcggaacgagtttggaggccctctcagagtgtgtcaacaacaaagtcgg

SEQ ID NO: 454369 - DNA, 51 bp, Artificial
  Synthetic oligonucleotide
tatctggtgaacttatcagttcgattcagcggatccacttatcgcaagttt

SEQ ID NO: 454370 - DNA, 59 bp, Artificial
  Synthetic oligonucleotide
tatctggtttgagaacatttcacaatatctggcggttcagattcccataggttataacc

SEQ ID NO: 454371 - DNA, 60 bp, Artificial
  Synthetic oligonucleotide
tatctgtaatggtgaatctcttagtagaagtagattatagattaggagtaggagcactga

SEQ ID NO: 454372 - DNA, 54 bp, Artificial
  Synthetic oligonucleotide
tatctgtcaatacactgctgcagctaaggcatggtcttgtatcactacagatgc

SEQ ID NO: 454373 - DNA, 55 bp, Artificial
  Synthetic oligonucleotide
tatctgtcagcgggtagatcaggatgtcgtcgtatactgtaatggacagaagaaa

SEQ ID NO: 454374 - DNA, 57 bp, Artificial
  Synthetic oligonucleotide
tatctgtcggaacttaaaatcatcgacgaccctcagaagatttacgactacttacgc

SEQ ID NO: 454375 - DNA, 60 bp, Artificial
  Synthetic oligonucleotide
tatctgtggtgatgattcgaatatctacatgccgtctgaccaagagtcacgcgacatcaa

SEQ ID NO: 454376 - DNA, 53 bp, Artificial
  Synthetic oligonucleotide
tatctgtttattctagtgggtatggttatggagctatgtttgccagaaacgct

SEQ ID NO: 454377 - DNA, 55 bp, Artificial
  Synthetic oligonucleotide
tatcttacgttaacaaagttaagaattttgaagcaggtcaagtcgaaataattga

SEQ ID NO: 454378 - DNA, 60 bp, Artificial
  Synthetic oligonucleotide
tatcttagcatcaaacctattaactaacagcagtcggcgaaatgtagaacattatttcca

SEQ ID NO: 454379 - DNA, 60 bp, Artificial
  Synthetic oligonucleotide
tatcttagtccaaaagctgtcgcgcagcttagtccgcgtctcgagtcgatatcgttgtca

SEQ ID NO: 454380 - DNA, 56 bp, Artificial
  Synthetic oligonucleotide
tatcttagtttttctaggttgaactagtgttgagcatattaggttaagctagcggg

SEQ ID NO: 454381 - DNA, 60 bp, Artificial
  Synthetic oligonucleotide
tatcttatgggtatatggatttaaatggaacacgtatatcttgtattatccatacatatt

SEQ ID NO: 454382 - DNA, 60 bp, Artificial
  Synthetic oligonucleotide
tatcttcacaccatcgaggcacatgaatgggtcaagcactggaagtataatactagtgcc

SEQ ID NO: 454383 - DNA, 60 bp, Artificial
  Synthetic oligonucleotide
tatcttcatgggagttgtacaagagtgaaggcgagaccgggctgtgagggcatgccatct

SEQ ID NO: 454384 - DNA, 56 bp, Artificial
  Synthetic oligonucleotide
tatcttcatttacagtggtatccctaaaggcctcaaatacttcaagtaataaccaa

SEQ ID NO: 454385 - DNA, 60 bp, Artificial
  Synthetic oligonucleotide
tatcttcctggcacggtctgcactcattctgaggggatcagtggctcataagtcctgcct

SEQ ID NO: 454386 - DNA, 60 bp, Artificial
  Synthetic oligonucleotide
tatcttcgcatcgattacacaccgcaaggtatccgcggttcgattgctcgctcgtgcgct

SEQ ID NO: 454387 - DNA, 56 bp, Artificial
  Synthetic oligonucleotide
tatcttcgggtccggtacttaccgatctcttcagtgccctccggagtactgtcgtg

SEQ ID NO: 454388 - DNA, 58 bp, Artificial
  Synthetic oligonucleotide
tatcttctagactcccaactgtcgtcacttacaccactactaacgtgaattatgttcg

SEQ ID NO: 454389 - DNA, 59 bp, Artificial
  Synthetic oligonucleotide
tatcttctgtactccatataggcgtggggcggatatccttctcgattttgaacgccctc

SEQ ID NO: 454390 - DNA, 60 bp, Artificial
  Synthetic oligonucleotide
tatcttgacgaggttcttggtcccattcctgacaagtgctcgctggaccgaatcgacaac

SEQ ID NO: 454391 - DNA, 59 bp, Artificial
  Synthetic oligonucleotide
tatcttgagattcgagtatcggggcaacgaacgagtggcattttcgtagtcagggaaga

SEQ ID NO: 454392 - DNA, 55 bp, Artificial
  Synthetic oligonucleotide
tatcttgagtccttagccatttcaaaacatgcgtatgaggaaaagcgctatctca

SEQ ID NO: 454393 - DNA, 60 bp, Artificial
  Synthetic oligonucleotide
tatcttgcatgaggtcccattgagggatatcttactagttattatactggtgatcgcttc

SEQ ID NO: 454394 - DNA, 55 bp, Artificial
  Synthetic oligonucleotide
tatcttgctccagcaatcggtataggaggcgctacagacgttggcctcactggtg

SEQ ID NO: 454395 - DNA, 54 bp, Artificial
  Synthetic oligonucleotide
tatcttggtccgggcagtgataactttaaaaaacaaccagtagacgaagacgac

SEQ ID NO: 454396 - DNA, 60 bp, Artificial
  Synthetic oligonucleotide
tatcttgtgctggaccttgattggtacttgagaacagtggctcgtagagggtgatgaagg

SEQ ID NO: 454397 - DNA, 54 bp, Artificial
  Synthetic oligonucleotide
tatctttacatttaacggtgaaacaaaagttgaatactggacggctgaaacagt

SEQ ID NO: 454398 - DNA, 50 bp, Artificial
  Synthetic oligonucleotide
tatctttacgatcaacaagggtcgcgaaacgtttgcgactgccgcctctg

SEQ ID NO: 454399 - DNA, 55 bp, Artificial
  Synthetic oligonucleotide
tatctttactgaggactctcaatgagaagtaccgtgtcttcgaatacctcgctct

SEQ ID NO: 454400 - DNA, 58 bp, Artificial
  Synthetic oligonucleotide
tatctttaggaaggcaaacatcccactatgggttatctatcctctcgaaggccaacgc

SEQ ID NO: 454401 - DNA, 55 bp, Artificial
  Synthetic oligonucleotide
tatctttatgacttcattcactcaattgccgtatgctcgtgggcttaagccacat

SEQ ID NO: 454402 - DNA, 60 bp, Artificial
  Synthetic oligonucleotide
tatctttcaaccaaaatctggagtatcaaataggatatatatgcagtggagttttcggag

SEQ ID NO: 454403 - DNA, 60 bp, Artificial
  Synthetic oligonucleotide
tatctttgagaactcatgccttgaaacaatggaagccgttcaacagacaagggtggacaa

SEQ ID NO: 454404 - DNA, 60 bp, Artificial
  Synthetic oligonucleotide
tatctttgagacctcgtgtcttgaaacgatggaggttgttcagcaaacacgagtggacaa

SEQ ID NO: 454405 - DNA, 59 bp, Artificial
  Synthetic oligonucleotide
tatctttgagagatgggagtcatcaactctcaattatatggcttcacaaaatatatctg

SEQ ID NO: 454406 - DNA, 58 bp, Artificial
  Synthetic oligonucleotide
tatctttgccccgttgtatgcgaataggaaattcgcaatgatgttcccttcaaagccg

SEQ ID NO: 454407 - DNA, 56 bp, Artificial
  Synthetic oligonucleotide
tatctttgccccgttgtttgcgaataagaaattcgctaagatattcccttcaaatc

SEQ ID NO: 454408 - DNA, 58 bp, Artificial
  Synthetic oligonucleotide
tatctttggtgcgtcgggtgactcctccctcgcctgccgctttatgggcgcggcctct

SEQ ID NO: 454409 - DNA, 60 bp, Artificial
  Synthetic oligonucleotide
tatcttttaggcatattgttatgcaatcaagggatcgagtgctgcgggtggatacatatt

SEQ ID NO: 454410 - DNA, 57 bp, Artificial
  Synthetic oligonucleotide
tatgaaaaatttctatggactcttacgttaccgtggatccatcttttcactctccca

SEQ ID NO: 454411 - DNA, 57 bp, Artificial
  Synthetic oligonucleotide
tatgaaacctatggggatacttggacaggggtcgaaactctaataaggacactgcaa

SEQ ID NO: 454412 - DNA, 60 bp, Artificial
  Synthetic oligonucleotide
tatgaaagtagcgataagtagcagggatgatttatctcaaaggtaatcctcttttctgtc

SEQ ID NO: 454413 - DNA, 53 bp, Artificial
  Synthetic oligonucleotide
tatgaaagttaattaatctgaaacgaaaacacctccgcttaaaaggtgggcat

SEQ ID NO: 454414 - DNA, 50 bp, Artificial
  Synthetic oligonucleotide
tatgaaatatggatctatcactggattcaagccccatagctgtgcatgtg

SEQ ID NO: 454415 - DNA, 60 bp, Artificial
  Synthetic oligonucleotide
tatgaaatcccagtggactctcgctgaactacagactgtgctaggagagatccaatgggt

SEQ ID NO: 454416 - DNA, 59 bp, Artificial
  Synthetic oligonucleotide
tatgaaatcgcacgtctacaggcaaacatgggacaattccgagcggctctaagacgtat

SEQ ID NO: 454417 - DNA, 55 bp, Artificial
  Synthetic oligonucleotide
tatgaaatgggatgctgacagtaaactccaaagtctatatgagtttaagaaccga

SEQ ID NO: 454418 - DNA, 55 bp, Artificial
  Synthetic oligonucleotide
tatgaaattcccggtttcggtttatcccgttctggacgtcttcttgtatgcatgg

SEQ ID NO: 454419 - DNA, 60 bp, Artificial
  Synthetic oligonucleotide
tatgaacaatcagtgagtggaagggagttagaggaaatagagcacaagccaataggggaa

SEQ ID NO: 454420 - DNA, 51 bp, Artificial
  Synthetic oligonucleotide
tatgaacaatccactaccactaagttggctgatagtaaggacgcgttgaat

SEQ ID NO: 454421 - DNA, 60 bp, Artificial
  Synthetic oligonucleotide
tatgaacagagggatgatgttaagcatacgggtatggtccgatgtgtcagtgatgttacg

SEQ ID NO: 454422 - DNA, 60 bp, Artificial
  Synthetic oligonucleotide
tatgaacagccacaaggtagatcaactctccgtcgtctggttgtcttcctggcgattcgg

SEQ ID NO: 454423 - DNA, 60 bp, Artificial
  Synthetic oligonucleotide
tatgaacagccacggagttagaatacttcgcgggacgataatgtttgacggagctatgct

SEQ ID NO: 454424 - DNA, 57 bp, Artificial
  Synthetic oligonucleotide
tatgaacagtagtttgctggaggattggaactttgggttgaccttgccaccgtccac

SEQ ID NO: 454425 - DNA, 60 bp, Artificial
  Synthetic oligonucleotide
tatgaacagttctctacacgaaagcatattagaggatcacgagaactagcaattcgaaat

SEQ ID NO: 454426 - DNA, 60 bp, Artificial
  Synthetic oligonucleotide
tatgaacccaacatatacgcgtgctctacgaatccgaacgcctgaaccacgtgttgtcac

SEQ ID NO: 454427 - DNA, 59 bp, Artificial
  Synthetic oligonucleotide
tatgaaccggtgactgaggaagctcggcattcattccacttggcgtttggggtcagccc

SEQ ID NO: 454428 - DNA, 59 bp, Artificial
  Synthetic oligonucleotide
tatgaacctgactcccgccttgaatggtccgtttgttgccaccccctgctcatccgatg

SEQ ID NO: 454429 - DNA, 51 bp, Artificial
  Synthetic oligonucleotide
tatgaacctttaccccgttacccggcaacggtcaggtctttgccaagtgtt

SEQ ID NO: 454430 - DNA, 58 bp, Artificial
  Synthetic oligonucleotide
tatgaacgaattactagagataatccatgccctaagcggcccagacccctgggaatcc

SEQ ID NO: 454431 - DNA, 52 bp, Artificial
  Synthetic oligonucleotide
tatgaagaatcgctgcacaatccgtaccctgactaccactggcttcgaaccg

SEQ ID NO: 454432 - DNA, 60 bp, Artificial
  Synthetic oligonucleotide
tatgaagacttctatcattcgctatagcgaatatttgaagaaaccttgtgtggtaatatg

SEQ ID NO: 454433 - DNA, 55 bp, Artificial
  Synthetic oligonucleotide
tatgaagagaagggcgtatccccgattgacgatggtgcgaccaccaaccgagtcc

SEQ ID NO: 454434 - DNA, 54 bp, Artificial
  Synthetic oligonucleotide
tatgaagatcctcataggggtggttataacatggataggaatgaactcccgcag

SEQ ID NO: 454435 - DNA, 50 bp, Artificial
  Synthetic oligonucleotide
tatgaagattcaatcacagtgcttgccacactttcgctccttggatgtga

SEQ ID NO: 454436 - DNA, 60 bp, Artificial
  Synthetic oligonucleotide
tatgaagcaatgagttgtgacttcaatggagggaaaataagtgttcagtacaacctcagt

SEQ ID NO: 454437 - DNA, 59 bp, Artificial
  Synthetic oligonucleotide
tatgaagcacaacgggttgccagaaacatcggcaacgtcggaaggagactcatcgggag

SEQ ID NO: 454438 - DNA, 60 bp, Artificial
  Synthetic oligonucleotide
tatgaagccggtgacttaccatccaaaggatacatgagcgttccgcaggttctatgcgcg

SEQ ID NO: 454439 - DNA, 50 bp, Artificial
  Synthetic oligonucleotide
tatgaagccttccaacctcctgaatgtccaatcatcttgaccagcgctta

SEQ ID NO: 454440 - DNA, 60 bp, Artificial
  Synthetic oligonucleotide
tatgaagcgccccatagtttggctggtgctctgcgcatagcagaacattatgattgtcta

SEQ ID NO: 454441 - DNA, 60 bp, Artificial
  Synthetic oligonucleotide
tatgaagcttcgagctctcatacatcttgattttccagatcgctacaatataggaagtct

SEQ ID NO: 454442 - DNA, 60 bp, Artificial
  Synthetic oligonucleotide
tatgaagggaggctgatacagaacagtataacaatagagagaatggttctctctgcattt

SEQ ID NO: 454443 - DNA, 54 bp, Artificial
  Synthetic oligonucleotide
tatgaataatctagttttgttcaaatcccctactccatctactgaagcacaacg

SEQ ID NO: 454444 - DNA, 55 bp, Artificial
  Synthetic oligonucleotide
tatgaatatagagaaagcagtcttggtgagttatggtcacctaggagggctatgg

SEQ ID NO: 454445 - DNA, 60 bp, Artificial
  Synthetic oligonucleotide
tatgaatcaaaaatgaatgtcagttatagattgtacattaagactccggcttgcttgtta

SEQ ID NO: 454446 - DNA, 60 bp, Artificial
  Synthetic oligonucleotide
tatgaatccttcagcaaagtgctttatggctcctggatctggacccatactagtgaatat

SEQ ID NO: 454447 - DNA, 56 bp, Artificial
  Synthetic oligonucleotide
tatgaatcgtttaattggagccttgcagcgacgtgctacacactctccatgctggt

SEQ ID NO: 454448 - DNA, 54 bp, Artificial
  Synthetic oligonucleotide
tatgaatgctaatggttcgtatgtatctctataggtttgtaggttgcttgctat

SEQ ID NO: 454449 - DNA, 60 bp, Artificial
  Synthetic oligonucleotide
tatgaatggaggtgccgtttcgttacattttgctggtgttacattatctacgcaattcac

SEQ ID NO: 454450 - DNA, 53 bp, Artificial
  Synthetic oligonucleotide
tatgaattgggggaactgggggaacatatatagtagaaattcctagggttaga

SEQ ID NO: 454451 - DNA, 60 bp, Artificial
  Synthetic oligonucleotide
tatgacaaaagaatgagaacgaccaacacacggaatacgaagatagagatagacaccacc

SEQ ID NO: 454452 - DNA, 55 bp, Artificial
  Synthetic oligonucleotide
tatgacaaaaggggaccagcaaagaatcgggggttgattggtctatcctaacgat

SEQ ID NO: 454453 - DNA, 60 bp, Artificial
  Synthetic oligonucleotide
tatgacaaatataatgctgtggaacgaaagctagtcaactatgctaaaggtaaaccatta

SEQ ID NO: 454454 - DNA, 57 bp, Artificial
  Synthetic oligonucleotide
tatgacaaatgtacgggtatctgattaggtatcctaacgatctagggccgaaggccc

SEQ ID NO: 454455 - DNA, 60 bp, Artificial
  Synthetic oligonucleotide
tatgacaacgagcccagtacagctactgtgaagaacgatctgcgtgatcgaatacatgta

SEQ ID NO: 454456 - DNA, 59 bp, Artificial
  Synthetic oligonucleotide
tatgacacaaactttggcaatggaaaaatgccctcaggaagtggccaagtcccagtata

SEQ ID NO: 454457 - DNA, 60 bp, Artificial
  Synthetic oligonucleotide
tatgacacgggttgtgcttggtatgagctcacacccgccgagactacagttaggctgcga

SEQ ID NO: 454458 - DNA, 52 bp, Artificial
  Synthetic oligonucleotide
tatgacacggttggaagttcttatacgaccgacagagcagactgtggcaaaa

SEQ ID NO: 454459 - DNA, 50 bp, Artificial
  Synthetic oligonucleotide
tatgacactattcagcactggggttttagttatcccgggcatctattcac

SEQ ID NO: 454460 - DNA, 60 bp, Artificial
  Synthetic oligonucleotide
tatgacagacccaacttcatctacacccactgtggaaagactccttcagaactcagtgct

SEQ ID NO: 454461 - DNA, 55 bp, Artificial
  Synthetic oligonucleotide
tatgacagagaaacagtgtggttacaatgttataaaagtttttctcagccgtacc

SEQ ID NO: 454462 - DNA, 54 bp, Artificial
  Synthetic oligonucleotide
tatgacagggacgtccaaaattagccggtccgttaatttctcacctcgttcgag

SEQ ID NO: 454463 - DNA, 55 bp, Artificial
  Synthetic oligonucleotide
tatgacagtgtactagtgcaggagtatagagccggcggaggtatcaattttcaca

SEQ ID NO: 454464 - DNA, 50 bp, Artificial
  Synthetic oligonucleotide
tatgacagtttgtctaaccagagagcatgtaatcctaggttaggttgtcc

SEQ ID NO: 454465 - DNA, 55 bp, Artificial
  Synthetic oligonucleotide
tatgacatctggggaaatgacggcaattacaccaagattgtggccgcagttgata

SEQ ID NO: 454466 - DNA, 60 bp, Artificial
  Synthetic oligonucleotide
tatgacatttatgcagatgatacacacctatcctctatattacaggagccttccgttccc

SEQ ID NO: 454467 - DNA, 60 bp, Artificial
  Synthetic oligonucleotide
tatgaccacaaggactctctgcatgacttgttcgatgagaaacagtgtcaggcacacaca

SEQ ID NO: 454468 - DNA, 60 bp, Artificial
  Synthetic oligonucleotide
tatgaccacctagcgcctatgcaacattgggccgcagctggccttaaagacctagcagtg

SEQ ID NO: 454469 - DNA, 55 bp, Artificial
  Synthetic oligonucleotide
tatgaccacgttcctttaaactgccagggggcgggctcgagccttcgggcgagtc

SEQ ID NO: 454470 - DNA, 55 bp, Artificial
  Synthetic oligonucleotide
tatgaccattcacaatacagagaggaggctcttctgaatagactgaacatcaact

SEQ ID NO: 454471 - DNA, 57 bp, Artificial
  Synthetic oligonucleotide
tatgaccctgtcgagaatccggacatcatacgtgtttaccataagttgggtgaaacc

SEQ ID NO: 454472 - DNA, 59 bp, Artificial
  Synthetic oligonucleotide
tatgaccggatggtcggacatgtcccttgacgcgtatggcgcggagtaggtttgaggag

SEQ ID NO: 454473 - DNA, 60 bp, Artificial
  Synthetic oligonucleotide
tatgacctagcatgtaatcagacccattgccttcccacagtccatttaattgcccctgtc

SEQ ID NO: 454474 - DNA, 60 bp, Artificial
  Synthetic oligonucleotide
tatgacctctcatgcaacagcacctactgtaagcccaccctctacatgatcgtaccaatt

SEQ ID NO: 454475 - DNA, 55 bp, Artificial
  Synthetic oligonucleotide
tatgacctgtcatgcaatcaaacagtgtgtcagcctactgtctatttaatgggac

SEQ ID NO: 454476 - DNA, 53 bp, Artificial
  Synthetic oligonucleotide
tatgacgaggtactcagcgccccccggagacgcccctcaaccagcttatgacc

SEQ ID NO: 454477 - DNA, 54 bp, Artificial
  Synthetic oligonucleotide
tatgacgcacgctccaaagttactcagggtgttttgaactcgatggttcagttc

SEQ ID NO: 454478 - DNA, 55 bp, Artificial
  Synthetic oligonucleotide
tatgacgcgctgttagctctcgatcctccctttgacattgataagctggctagcc

SEQ ID NO: 454479 - DNA, 60 bp, Artificial
  Synthetic oligonucleotide
tatgacgcgtactgggactttgttcgcgaatctctcgtggaggctcctatctgcagggaa

SEQ ID NO: 454480 - DNA, 58 bp, Artificial
  Synthetic oligonucleotide
tatgacgctaacaaaattgtgtacacagtcaaagtggagccgcatacgggggattacg

SEQ ID NO: 454481 - DNA, 50 bp, Artificial
  Synthetic oligonucleotide
tatgacgcttgcctacctggaaacagttttgtgctcaatgactacgactc

SEQ ID NO: 454482 - DNA, 58 bp, Artificial
  Synthetic oligonucleotide
tatgacggcaagaagtggagaatggtcaggcatatctcaagtatagcgaaggattgct

SEQ ID NO: 454483 - DNA, 57 bp, Artificial
  Synthetic oligonucleotide
tatgacggccgtaggggtgattacaggacgtttatcaagtacgtctaatgaatttgc

SEQ ID NO: 454484 - DNA, 58 bp, Artificial
  Synthetic oligonucleotide
tatgacgggtttctgtcatactatagcggcgcgaagttgcgtacttattcgaatgccg

SEQ ID NO: 454485 - DNA, 57 bp, Artificial
  Synthetic oligonucleotide
tatgacgtataagatcattggtgtacctgggacttgcccgcccgaactcattcgaca

SEQ ID NO: 454486 - DNA, 60 bp, Artificial
  Synthetic oligonucleotide
tatgacgtatcacattcatccatggctttatttccagtcataatgatggaacatgacaaa

SEQ ID NO: 454487 - DNA, 52 bp, Artificial
  Synthetic oligonucleotide
tatgacgtgtaaactgtaatgggaggagcgaatatacgttcaaggttagatc

SEQ ID NO: 454488 - DNA, 53 bp, Artificial
  Synthetic oligonucleotide
tatgacgttagagaatatttccttaatttgtatgatcaagttcttactgaaat

SEQ ID NO: 454489 - DNA, 54 bp, Artificial
  Synthetic oligonucleotide
tatgacgttccctagggcatttactatcatagatgaccatggcatggttgttag

SEQ ID NO: 454490 - DNA, 55 bp, Artificial
  Synthetic oligonucleotide
tatgactaagctgtgcatacatagtttatgcaaccgaaataggttgggcagcaca

SEQ ID NO: 454491 - DNA, 54 bp, Artificial
  Synthetic oligonucleotide
tatgactacacctgatcttcgttgccgagtggtcaacgccttaataggaggcag

SEQ ID NO: 454492 - DNA, 55 bp, Artificial
  Synthetic oligonucleotide
tatgactattagtgccatatgtttgtccgtttacattctgtgaaacggtctggct

SEQ ID NO: 454493 - DNA, 60 bp, Artificial
  Synthetic oligonucleotide
tatgactcagtgaatatgacgactttttgcgatttttatataatgccacggtcagaagag

SEQ ID NO: 454494 - DNA, 60 bp, Artificial
  Synthetic oligonucleotide
tatgactcatctggcaatctagaattgcgagccgcagggggtatgcgaattaacacaggg

SEQ ID NO: 454495 - DNA, 57 bp, Artificial
  Synthetic oligonucleotide
tatgacttaccccatcaggagctttacgctttccgaaatagtcataatcacgaactt

SEQ ID NO: 454496 - DNA, 52 bp, Artificial
  Synthetic oligonucleotide
tatgagaaacagctacatgataccacggtgtccaatttgaaacgtatttgga

SEQ ID NO: 454497 - DNA, 60 bp, Artificial
  Synthetic oligonucleotide
tatgagaacttttctcaggctcagctcctcctttcatgcttccctgtcctgtagctaacc

SEQ ID NO: 454498 - DNA, 55 bp, Artificial
  Synthetic oligonucleotide
tatgagaagccatatatgccgaggtacggtattcaacggaacctcaccgatatga

SEQ ID NO: 454499 - DNA, 60 bp, Artificial
  Synthetic oligonucleotide
tatgagaagctctattctgaaacgatctctaagcacgtctctgacggatcgtatgggaat

SEQ ID NO: 454500 - DNA, 60 bp, Artificial
  Synthetic oligonucleotide
tatgagaccgtattgctggcactacccaccaagacagtgtggtgtagtctccgcgagctc

SEQ ID NO: 454501 - DNA, 60 bp, Artificial
  Synthetic oligonucleotide
tatgagacctatggagatacttggacaggagttgaagctataataagaacactgcaacaa

SEQ ID NO: 454502 - DNA, 60 bp, Artificial
  Synthetic oligonucleotide
tatgagacggtacaggactgcaattgttcaatctatcccggtcatgtatcaggtcatcgc

SEQ ID NO: 454503 - DNA, 60 bp, Artificial
  Synthetic oligonucleotide
tatgagacgtatctatcctcggtgtgtggcggtttttctgaggcgattctgtggtacctc

SEQ ID NO: 454504 - DNA, 59 bp, Artificial
  Synthetic oligonucleotide
tatgagactcggttggattgatccacttcctcaagtggacacaattttcccattgggat

SEQ ID NO: 454505 - DNA, 60 bp, Artificial
  Synthetic oligonucleotide
tatgagactgatgaggatgaaacttgcagaggtctaaattatggagcaaaatgcatcagt

SEQ ID NO: 454506 - DNA, 60 bp, Artificial
  Synthetic oligonucleotide
tatgagagagaagtgcataatgtctgggctacacatgcctgtgtacctacggaccccaac

SEQ ID NO: 454507 - DNA, 55 bp, Artificial
  Synthetic oligonucleotide
tatgagagagtgagacgacaactgagagagaatgctgaagaggatggcactggtt

SEQ ID NO: 454508 - DNA, 52 bp, Artificial
  Synthetic oligonucleotide
tatgagaggacctactgtatgacaggagtcttgattgaaggaaaatgttttg

SEQ ID NO: 454509 - DNA, 60 bp, Artificial
  Synthetic oligonucleotide
tatgagagtcaccctatgcatgagagtggcggactaagctaggctttggggtaataactt

SEQ ID NO: 454510 - DNA, 60 bp, Artificial
  Synthetic oligonucleotide
tatgagatactgtcacatgcgctcttccctagccttttaacataccgtgttgtggcggat

SEQ ID NO: 454511 - DNA, 60 bp, Artificial
  Synthetic oligonucleotide
tatgagcacggaccgttatgttacacgcaccagcctattttattatggtggcagctccag

SEQ ID NO: 454512 - DNA, 60 bp, Artificial
  Synthetic oligonucleotide
tatgagcagccgcacggtagatcaactctcctccggcgtattgacttcttcttggctatt

SEQ ID NO: 454513 - DNA, 60 bp, Artificial
  Synthetic oligonucleotide
tatgagcaggctaaaagtatgaaacccatgtacacggcagcacttaaagatgaactagtc

SEQ ID NO: 454514 - DNA, 59 bp, Artificial
  Synthetic oligonucleotide
tatgagcccaatactttgggccacgatctaattagggatcttatatctgttgtaagggc

SEQ ID NO: 454515 - DNA, 60 bp, Artificial
  Synthetic oligonucleotide
tatgagcctgacgaaatagtgcatttgtgcaactacttcaacttcgtcgctcacctcgac

SEQ ID NO: 454516 - DNA, 52 bp, Artificial
  Synthetic oligonucleotide
tatgagcgacggcccgggtggggttaagcgttatttgcgtaaaatgcgctcc

SEQ ID NO: 454517 - DNA, 58 bp, Artificial
  Synthetic oligonucleotide
tatgagctcctgcgtgtgactgaccggtacccgcataaggtgcccgtgaaaggggcct

SEQ ID NO: 454518 - DNA, 53 bp, Artificial
  Synthetic oligonucleotide
tatgagctgtaccctactatgactgtagtagttgtgtcagtggcctcgttcat

SEQ ID NO: 454519 - DNA, 60 bp, Artificial
  Synthetic oligonucleotide
tatgaggaattcacaatggttggacgaagagcaacagccattctaagaaaagcaaccaga

SEQ ID NO: 454520 - DNA, 60 bp, Artificial
  Synthetic oligonucleotide
tatgaggagatgtcgcaggttggagatgttataacggaagatgaaccagaaaagttctac

SEQ ID NO: 454521 - DNA, 52 bp, Artificial
  Synthetic oligonucleotide
tatgaggaggggcggtactattaacgggaattggattggagcgttacaggcg

SEQ ID NO: 454522 - DNA, 55 bp, Artificial
  Synthetic oligonucleotide
tatgaggatatacccgacgtctatagttggactagggaagacctctaacagcccc

SEQ ID NO: 454523 - DNA, 60 bp, Artificial
  Synthetic oligonucleotide
tatgaggcaatcagaccagtccttaaggaagcactcgtcaattgtccgtacgcactcacc

SEQ ID NO: 454524 - DNA, 60 bp, Artificial
  Synthetic oligonucleotide
tatgaggcaatcagagggtgacttggaaggctgtttatagcttcagtcagagcagatcca

SEQ ID NO: 454525 - DNA, 59 bp, Artificial
  Synthetic oligonucleotide
tatgaggcactatcccttttgggttagattcaaagacactcctagtcttgaggcaagtg

SEQ ID NO: 454526 - DNA, 60 bp, Artificial
  Synthetic oligonucleotide
tatgaggcagctgagtcaaccaagactgacttagcactggcagacgatggaaccgtcaac

SEQ ID NO: 454527 - DNA, 55 bp, Artificial
  Synthetic oligonucleotide
tatgaggcccgtcatgatgtgtcgcatactggtaaggttatttgtgtatcggatg

SEQ ID NO: 454528 - DNA, 56 bp, Artificial
  Synthetic oligonucleotide
tatgaggcggcacgcattgcctataacgcttacggttgggcccacaaaaacctcta

SEQ ID NO: 454529 - DNA, 55 bp, Artificial
  Synthetic oligonucleotide
tatgaggcgggcggccgtgcgatcgtgtagacggcagtcgcgtctccccgaggaa

SEQ ID NO: 454530 - DNA, 60 bp, Artificial
  Synthetic oligonucleotide
tatgaggctaattcagaattagatatgtcagagttagctgacttgatacttaatgagtgg

SEQ ID NO: 454531 - DNA, 58 bp, Artificial
  Synthetic oligonucleotide
tatgaggctataaaacgacgctacacatatatacaagtcgacgagggaaccgaatacc

SEQ ID NO: 454532 - DNA, 55 bp, Artificial
  Synthetic oligonucleotide
tatgagggaaccacgagaaacttcctaaagttctagtcgttgcaacaaattctcg

SEQ ID NO: 454533 - DNA, 59 bp, Artificial
  Synthetic oligonucleotide
tatgagggtgacgaaccctatatcgtgttgaaacaccagttagtgtcctccacgatgtg

SEQ ID NO: 454534 - DNA, 57 bp, Artificial
  Synthetic oligonucleotide
tatgagtacgaggtaatgaaagacaaaccatattatttagtaacatgggcaaattcg

SEQ ID NO: 454535 - DNA, 60 bp, Artificial
  Synthetic oligonucleotide
tatgagtatggccccttacacttacacgtgtagattgactgagattgattggagcaccga

SEQ ID NO: 454536 - DNA, 60 bp, Artificial
  Synthetic oligonucleotide
tatgagtctacgcaatggggttccggtgagcgatagaagtagtcacttctccgctacatc

SEQ ID NO: 454537 - DNA, 60 bp, Artificial
  Synthetic oligonucleotide
tatgagtctattatgccattcctcaatctttttgtcatgtataagcttgcagaggttagc

SEQ ID NO: 454538 - DNA, 55 bp, Artificial
  Synthetic oligonucleotide
tatgagtcttgcgcgatatgcatttgatttctatgagctgcactcaacaacacct

SEQ ID NO: 454539 - DNA, 59 bp, Artificial
  Synthetic oligonucleotide
tatgagtgcggtaacggccccattgaattcatgctcgcgtttgctccggggcaagaccc

SEQ ID NO: 454540 - DNA, 60 bp, Artificial
  Synthetic oligonucleotide
tatgagtgtgcttggacctgcagtacaggtgtagtgcagaagagcttaagctggtttgat

SEQ ID NO: 454541 - DNA, 60 bp, Artificial
  Synthetic oligonucleotide
tatgagttatcaatacagaagaggaccatatctaaaaggaagcactaagagatgtactct

SEQ ID NO: 454542 - DNA, 56 bp, Artificial
  Synthetic oligonucleotide
tatgagttattgttttcgcattaacacgttcattcaagcgttcctttatttcgtta

SEQ ID NO: 454543 - DNA, 60 bp, Artificial
  Synthetic oligonucleotide
tatgagttggcgccctcccgttcacaatgcggcaggaattgagcgacagctccttgaggg

SEQ ID NO: 454544 - DNA, 56 bp, Artificial
  Synthetic oligonucleotide
tatgagttgtaccggactaggtccgaagttgtacaagtagtctcctctcatcgcca

SEQ ID NO: 454545 - DNA, 58 bp, Artificial
  Synthetic oligonucleotide
tatgagtttgggcttcacaacaacagtgctgcgaaccttgaaaggggcttagccgaaa

SEQ ID NO: 454546 - DNA, 55 bp, Artificial
  Synthetic oligonucleotide
tatgataacaatggcccttattcatgcctactcgtattctgcgtggtaggtgcga

SEQ ID NO: 454547 - DNA, 56 bp, Artificial
  Synthetic oligonucleotide
tatgataaccgagtatgaaaacacggctagttggtgcaacgcaaacggtgtggtca

SEQ ID NO: 454548 - DNA, 54 bp, Artificial
  Synthetic oligonucleotide
tatgataagcagtctgcggaaattcactaacgataaaacggtgtacgttagctc

SEQ ID NO: 454549 - DNA, 60 bp, Artificial
  Synthetic oligonucleotide
tatgataagtctaggataggaatatgtctgccaaacgtgccacactgtgaatcgagcact

SEQ ID NO: 454550 - DNA, 58 bp, Artificial
  Synthetic oligonucleotide
tatgatacacgagtgggtgcctgacctacgggttaggggtggtagggactccatcatc

SEQ ID NO: 454551 - DNA, 59 bp, Artificial
  Synthetic oligonucleotide
tatgatacaggcgtaggaaacgcagtatacgtagtaatgttaaaacaagagacacaatc

SEQ ID NO: 454552 - DNA, 59 bp, Artificial
  Synthetic oligonucleotide
tatgataccatagggaagttcaggcccgaattcaaatgcctggtccattatgaggaggg

SEQ ID NO: 454553 - DNA, 60 bp, Artificial
  Synthetic oligonucleotide
tatgatacccgctgctttgactccactgtaaccgaaaaggacatcagagccgagggagag

SEQ ID NO: 454554 - DNA, 60 bp, Artificial
  Synthetic oligonucleotide
tatgatacccgctgttttgactccacggtcactgagagtgatatccgtacggaggaggca

SEQ ID NO: 454555 - DNA, 60 bp, Artificial
  Synthetic oligonucleotide
tatgatacgaacgagaagggtggtttatcatacgcgacaattaagtatgctactgagacc

SEQ ID NO: 454556 - DNA, 52 bp, Artificial
  Synthetic oligonucleotide
tatgatacgcactatgcccgatgaatcacgaattaagcaatgggtaatcgat

SEQ ID NO: 454557 - DNA, 60 bp, Artificial
  Synthetic oligonucleotide
tatgatagagcaaggcctaccgttactgcctccattgagaaatgcttatgcacctcgtgg

SEQ ID NO: 454558 - DNA, 59 bp, Artificial
  Synthetic oligonucleotide
tatgataggtttcgatctggagatcgaattcgttttttatgaggatacatcggtagagg

SEQ ID NO: 454559 - DNA, 55 bp, Artificial
  Synthetic oligonucleotide
tatgatatgtcggacatcttcaactcacctcaaaacaaggcttctatcttgaatg

SEQ ID NO: 454560 - DNA, 51 bp, Artificial
  Synthetic oligonucleotide
tatgatcaggttctcactgaaatgccggattacttattattgaaagatatg

SEQ ID NO: 454561 - DNA, 60 bp, Artificial
  Synthetic oligonucleotide
tatgatccacatagcccaattattctcagtgatgtcagatacaacaaccccctctacatc

SEQ ID NO: 454562 - DNA, 56 bp, Artificial
  Synthetic oligonucleotide
tatgatcctaggattagctaacctggtgttgtactttcggtggatgggcccccaac

SEQ ID NO: 454563 - DNA, 60 bp, Artificial
  Synthetic oligonucleotide
tatgatcctcgaacattggacagacccgtctcctacaccatgaacaggaccaggtctcgc

SEQ ID NO: 454564 - DNA, 60 bp, Artificial
  Synthetic oligonucleotide
tatgatcgaaaagaagacgaaattcctgcacgcagctatgcttttcgcacctgaggcaat

SEQ ID NO: 454565 - DNA, 60 bp, Artificial
  Synthetic oligonucleotide
tatgatcgctcattagaactattgagtgtgtatgcgaattcgcagttgacggatgaaggt

SEQ ID NO: 454566 - DNA, 60 bp, Artificial
  Synthetic oligonucleotide
tatgatcgtggtatgatcatgccttattaggaaggcaacagaggggtctgacgtggattg

SEQ ID NO: 454567 - DNA, 60 bp, Artificial
  Synthetic oligonucleotide
tatgatctagacgatggtttaattatcttagcacattatctagactttgctaacccattt

SEQ ID NO: 454568 - DNA, 59 bp, Artificial
  Synthetic oligonucleotide
tatgatgacaatgggggaaaacccacaccagatatgctccaattcgcaaggagagcagt

SEQ ID NO: 454569 - DNA, 56 bp, Artificial
  Synthetic oligonucleotide
tatgatgacccttctgttggtactcaagcaatctttactgttggtttttttggtcc

SEQ ID NO: 454570 - DNA, 55 bp, Artificial
  Synthetic oligonucleotide
tatgatgagctgcccaggagtgctctttgcaccttctatgcggggaccggcaggt

SEQ ID NO: 454571 - DNA, 55 bp, Artificial
  Synthetic oligonucleotide
tatgatgatatatttggtgtggagaagaatcgaaaactttgcaatggcgcaaggt

SEQ ID NO: 454572 - DNA, 60 bp, Artificial
  Synthetic oligonucleotide
tatgatgatatgcttggtgctggtggattgggttctaccattagcaataatggtatgatt

SEQ ID NO: 454573 - DNA, 60 bp, Artificial
  Synthetic oligonucleotide
tatgatgatgagttgcagatgcacgtgctgcgtgggccgatacactttcagcgcagggca

SEQ ID NO: 454574 - DNA, 55 bp, Artificial
  Synthetic oligonucleotide
tatgatgcattcgacccctctgtgtctagcacccaggacaccgagcaagaacccc

SEQ ID NO: 454575 - DNA, 60 bp, Artificial
  Synthetic oligonucleotide
tatgatgccctccgttcgtgaggaggttgctcgagcgctcaacgacaaggcgtacaggca

SEQ ID NO: 454576 - DNA, 60 bp, Artificial
  Synthetic oligonucleotide
tatgatgccgttgcaactacacactcatggatccctaagaggaaccgttccattctcaat

SEQ ID NO: 454577 - DNA, 57 bp, Artificial
  Synthetic oligonucleotide
tatgatgctctagaccgtctgaattctgccgctaagcctcttactgccatttacggg

SEQ ID NO: 454578 - DNA, 60 bp, Artificial
  Synthetic oligonucleotide
tatgatgctgttgctactactcactcctggatccctaagaggaaccgctccatcctcaac

SEQ ID NO: 454579 - DNA, 60 bp, Artificial
  Synthetic oligonucleotide
tatgatggaacgatcaaggctcaaattattaaagcagctgcttatgagtgggagcaggac

SEQ ID NO: 454580 - DNA, 60 bp, Artificial
  Synthetic oligonucleotide
tatgatggcaggccttacaccgaagacaccggtgcaactgatgagtgccacgagtaccgt

SEQ ID NO: 454581 - DNA, 55 bp, Artificial
  Synthetic oligonucleotide
tatgatggcggttaaaaccttagagaggatgaaagttcgaactgagtctgaccat

SEQ ID NO: 454582 - DNA, 58 bp, Artificial
  Synthetic oligonucleotide
tatgatgggacacctcaaagtacgcgtggacgaaagcggaagcagttctctcgcccgt

SEQ ID NO: 454583 - DNA, 59 bp, Artificial
  Synthetic oligonucleotide
tatgatggtcagtactggcttgtgtggaggtactaccccacctacggacgtgcatatgg

SEQ ID NO: 454584 - DNA, 58 bp, Artificial
  Synthetic oligonucleotide
tatgatggtgggccctatagtactccttgaggcccaagattctccgaggccttaattc

SEQ ID NO: 454585 - DNA, 55 bp, Artificial
  Synthetic oligonucleotide
tatgatgtgatacagaagttgtcaattgagacgatgggtaccgcttacgggttcc

SEQ ID NO: 454586 - DNA, 60 bp, Artificial
  Synthetic oligonucleotide
tatgatgtgggagatcaacggtccagaatcagtgttggttaacacataccaatggatcat

SEQ ID NO: 454587 - DNA, 55 bp, Artificial
  Synthetic oligonucleotide
tatgattacacactgttcgatgaatttcatgtggacgattcaaatgcgatggcat

SEQ ID NO: 454588 - DNA, 59 bp, Artificial
  Synthetic oligonucleotide
tatgattactttatgaaaataaagttagctgtgttctgaaatttcgcacatggtggtcc

SEQ ID NO: 454589 - DNA, 60 bp, Artificial
  Synthetic oligonucleotide
tatgattatcatgaccagaatgcaggccagacgagaaacgtgatgcagataatgtttaac

SEQ ID NO: 454590 - DNA, 55 bp, Artificial
  Synthetic oligonucleotide
tatgattcccgtgagttagtaaagacgacttatcggtgtccacaagatgttgtgg

SEQ ID NO: 454591 - DNA, 59 bp, Artificial
  Synthetic oligonucleotide
tatgattccgggtgctacacatgttacgcttcgattcgcattagcgcctagtaaaaatt

SEQ ID NO: 454592 - DNA, 58 bp, Artificial
  Synthetic oligonucleotide
tatgattcgataagaaccaacatcgatagattaaacgaaacccgatcagtcccgataa

SEQ ID NO: 454593 - DNA, 60 bp, Artificial
  Synthetic oligonucleotide
tatgattcgggactaacctgatagatgttaggctggagccaatctttgattgtctcatta

SEQ ID NO: 454594 - DNA, 56 bp, Artificial
  Synthetic oligonucleotide
tatgattgaagttgaaccacccttcggcgattcttacatcgtcgtcggaagaggta

SEQ ID NO: 454595 - DNA, 51 bp, Artificial
  Synthetic oligonucleotide
tatgattggttggcagtattggttgggggcccaatccgtaaggtgtggctc

SEQ ID NO: 454596 - DNA, 54 bp, Artificial
  Synthetic oligonucleotide
tatgattgtaatgctttccgagcgacccacaaacgggtcgggttacaacgggtg

SEQ ID NO: 454597 - DNA, 60 bp, Artificial
  Synthetic oligonucleotide
tatgattgtgatgattacccattcttagcacgtgacccgagatttaagcatcgagtgtat

SEQ ID NO: 454598 - DNA, 52 bp, Artificial
  Synthetic oligonucleotide
tatgattgtgggacccgtgctctacagctgtccagcggcctccgtcccgtaa

SEQ ID NO: 454599 - DNA, 58 bp, Artificial
  Synthetic oligonucleotide
tatgcaaaaataatacgtggtgcaattccttaactatcaggttcactagccttggaaa

SEQ ID NO: 454600 - DNA, 58 bp, Artificial
  Synthetic oligonucleotide
tatgcaaactaaacggaatccctccacttgaactaggggattgtagcattgccggatg

SEQ ID NO: 454601 - DNA, 60 bp, Artificial
  Synthetic oligonucleotide
tatgcaaagcagcaatgggtctgagaatcagttcgtcttttagctttggaggcttcactt

SEQ ID NO: 454602 - DNA, 60 bp, Artificial
  Synthetic oligonucleotide
tatgcaaagggagatgatcatgggtggtatgaaagtttcacctacagtttgtggtttgat

SEQ ID NO: 454603 - DNA, 60 bp, Artificial
  Synthetic oligonucleotide
tatgcaacaatcctcacagaattctcgatggaagagactgcacactaatagatgccctac

SEQ ID NO: 454604 - DNA, 59 bp, Artificial
  Synthetic oligonucleotide
tatgcaaccaaagtgtcattacgtatgaaaacaatacatgggtgaaccaaacttatgta

SEQ ID NO: 454605 - DNA, 58 bp, Artificial
  Synthetic oligonucleotide
tatgcaaccagatatgtaatttcctgtagaggaaattttaggtgatgcccaccggacc

SEQ ID NO: 454606 - DNA, 56 bp, Artificial
  Synthetic oligonucleotide
tatgcaagaattaggatgtaaccagaaccaattcttttgtaaaattccctgtgaat

SEQ ID NO: 454607 - DNA, 55 bp, Artificial
  Synthetic oligonucleotide
tatgcaagctagatggtgaatgggtgacatttagagaggttcttgctgctgcaga

SEQ ID NO: 454608 - DNA, 59 bp, Artificial
  Synthetic oligonucleotide
tatgcaatatccgttcggctcaccactaactgacactgtggttgttaactcccaagttc

SEQ ID NO: 454609 - DNA, 51 bp, Artificial
  Synthetic oligonucleotide
tatgcaattactgcaaagaatgggaacgatatcactactgctgcgcaatac

SEQ ID NO: 454610 - DNA, 60 bp, Artificial
  Synthetic oligonucleotide
tatgcacaaagggggtctacccacactaatgatgttaagcagttaacagaagtggtgcaa

SEQ ID NO: 454611 - DNA, 60 bp, Artificial
  Synthetic oligonucleotide
tatgcacatataggcatgcacccccctatataagagatcacattgtagatcttaacaatg

SEQ ID NO: 454612 - DNA, 58 bp, Artificial
  Synthetic oligonucleotide
tatgcaccaagtacgaaaaacaatttgttgatgctaaagcgggtcaaactcttgcctg

SEQ ID NO: 454613 - DNA, 60 bp, Artificial
  Synthetic oligonucleotide
tatgcaccttcgccaaattgaggagtagacaatacaagaactatacgatctcctgagtta

SEQ ID NO: 454614 - DNA, 60 bp, Artificial
  Synthetic oligonucleotide
tatgcacgccttggtgcaaatgtagaggataggcgtgacgtgagaattcccttcatgtgt

SEQ ID NO: 454615 - DNA, 60 bp, Artificial
  Synthetic oligonucleotide
tatgcactgtcaaaaggcatagtattaccaggtacatgttggacgtacatggcatacaga

SEQ ID NO: 454616 - DNA, 53 bp, Artificial
  Synthetic oligonucleotide
tatgcacttagccatcgtaggagccctcacccttgttctaaccctctttgtcc

SEQ ID NO: 454617 - DNA, 60 bp, Artificial
  Synthetic oligonucleotide
tatgcacttttttataagcctgatgtagtatcaatagggggaagtaatactagctataga

SEQ ID NO: 454618 - DNA, 60 bp, Artificial
  Synthetic oligonucleotide
tatgcagagatgaagtggttactgtcgaattcagacaatgcggcattcccccagatgacc

SEQ ID NO: 454619 - DNA, 60 bp, Artificial
  Synthetic oligonucleotide
tatgcagccacacacggagtttatgtaagagtcaaaggaacaactgtgcgttgtgccgac

SEQ ID NO: 454620 - DNA, 55 bp, Artificial
  Synthetic oligonucleotide
tatgcagcccagggttacaaggtactcgtcttgaacccatccgttgccgctaccc

SEQ ID NO: 454621 - DNA, 60 bp, Artificial
  Synthetic oligonucleotide
tatgcagcctcaggagatccaacatcaccagataacattgaagccccaaatgcaccctgg

SEQ ID NO: 454622 - DNA, 55 bp, Artificial
  Synthetic oligonucleotide
tatgcagctcaccagtcattgtggaaactgtcatcctagtggcgttagcatcaac

SEQ ID NO: 454623 - DNA, 60 bp, Artificial
  Synthetic oligonucleotide
tatgcaggaagaagcgatacaggagatagcgggaatgaccgctgatgtattagaggcggc

SEQ ID NO: 454624 - DNA, 60 bp, Artificial
  Synthetic oligonucleotide
tatgcaggagcacaatccaactcacgatcagacagtcccttgcagtccgcatctttttgg

SEQ ID NO: 454625 - DNA, 55 bp, Artificial
  Synthetic oligonucleotide
tatgcaggcacgatggccttaatagtctttcgtgatacacgatggactcaggaag

SEQ ID NO: 454626 - DNA, 50 bp, Artificial
  Synthetic oligonucleotide
tatgcaggctcccatcttggtgtttctcttgtgacactcggataaataat

SEQ ID NO: 454627 - DNA, 60 bp, Artificial
  Synthetic oligonucleotide
tatgcaggctgccagggcatcacagctgacagagttcaggtacttctagacacagacaca

SEQ ID NO: 454628 - DNA, 60 bp, Artificial
  Synthetic oligonucleotide
tatgcagtaagaataacctggtatacagagaggttctggacagatgttaccccagactgt

SEQ ID NO: 454629 - DNA, 55 bp, Artificial
  Synthetic oligonucleotide
tatgcagtacaccgtctcggtgcagctgcgtctgctctgcgagagggtcagggct

SEQ ID NO: 454630 - DNA, 60 bp, Artificial
  Synthetic oligonucleotide
tatgcatcctaaccccttatttcaacagttggaacctgcagctataggtgacacttcaac

SEQ ID NO: 454631 - DNA, 60 bp, Artificial
  Synthetic oligonucleotide
tatgcatctccacaacttgagggattttcagctgagtcaagaaagctgctcctcattgtt

SEQ ID NO: 454632 - DNA, 55 bp, Artificial
  Synthetic oligonucleotide
tatgcatgcagtaccctaacaaggcgaactgatttgaggtttgttcacagcaagg

SEQ ID NO: 454633 - DNA, 60 bp, Artificial
  Synthetic oligonucleotide
tatgcatggatgaaatggcgagagagtcgcaaaggaacggagtagctccacaatctgaag

SEQ ID NO: 454634 - DNA, 60 bp, Artificial
  Synthetic oligonucleotide
tatgcatgtaatggacgatatggctaacggaagatacactccaggcataattccacctgt

SEQ ID NO: 454635 - DNA, 56 bp, Artificial
  Synthetic oligonucleotide
tatgcatgtcaggaccaaacaataacgcatcagctgtagtgtggtatgggggtaga

SEQ ID NO: 454636 - DNA, 60 bp, Artificial
  Synthetic oligonucleotide
tatgcatgtcgggaccgaacaacaatgcatcagcagtagtgtggtacggggggaggccag

SEQ ID NO: 454637 - DNA, 56 bp, Artificial
  Synthetic oligonucleotide
tatgcatgtgtaacctgggagcctatctatgctgatgagggtataccacatagaag

SEQ ID NO: 454638 - DNA, 60 bp, Artificial
  Synthetic oligonucleotide
tatgcattagttgggctttgtgtcatgtggcctggtggatttgaagtacacgtacaaccg

SEQ ID NO: 454639 - DNA, 60 bp, Artificial
  Synthetic oligonucleotide
tatgcattgctgggttgtggttggaatttaaactgtgaacttcttattgaatatgtatgg

SEQ ID NO: 454640 - DNA, 55 bp, Artificial
  Synthetic oligonucleotide
tatgcattgctggtttgtgtttggaatttaaacggtgaactttttattgaatacg

SEQ ID NO: 454641 - DNA, 60 bp, Artificial
  Synthetic oligonucleotide
tatgcattggataccatgccaataattccacagagaaggtcgacacaattctagagcgga

SEQ ID NO: 454642 - DNA, 58 bp, Artificial
  Synthetic oligonucleotide
tatgcatttgggaactgccccaaatacgttggagttaagagtctcaaactggcagtcg

SEQ ID NO: 454643 - DNA, 58 bp, Artificial
  Synthetic oligonucleotide
tatgccaacccttccgagaggtcttcgcttcggatcgaatggcgaggtcttaaatgac

SEQ ID NO: 454644 - DNA, 60 bp, Artificial
  Synthetic oligonucleotide
tatgccaagttatcccggttccatgaccttgttagtgctaatctaatctcgaccaccaga

SEQ ID NO: 454645 - DNA, 56 bp, Artificial
  Synthetic oligonucleotide
tatgccaatacaattagaggaccaattaaatcagcatcaaatataacagggctgtt

SEQ ID NO: 454646 - DNA, 55 bp, Artificial
  Synthetic oligonucleotide
tatgccacaactacaccccggttcacgatgagctgggcaacgctattcgcactcg

SEQ ID NO: 454647 - DNA, 56 bp, Artificial
  Synthetic oligonucleotide
tatgccacacactcagacgataccaactacccaggaccctttggggggggtatgac

SEQ ID NO: 454648 - DNA, 59 bp, Artificial
  Synthetic oligonucleotide
tatgccacctgtacttactttaatgtggtgggtcatatgtcccgagttagtgcgccacg

SEQ ID NO: 454649 - DNA, 56 bp, Artificial
  Synthetic oligonucleotide
tatgccaccttttgcggctactacgtcggctttaccggtgcagttcgatcgccccc

SEQ ID NO: 454650 - DNA, 55 bp, Artificial
  Synthetic oligonucleotide
tatgccagcagggaggctattaccctgcgagcttacatcaacaagctatgaggaa

SEQ ID NO: 454651 - DNA, 57 bp, Artificial
  Synthetic oligonucleotide
tatgccagccctaccaagaggtcttcgctttggttcgaatggcgaaatcttaaacga

SEQ ID NO: 454652 - DNA, 56 bp, Artificial
  Synthetic oligonucleotide
tatgccagctgcgtacggttatatgacggcactttagctctcatgacctgtcacca

SEQ ID NO: 454653 - DNA, 59 bp, Artificial
  Synthetic oligonucleotide
tatgccagtaaccggccttttatcaataaactgctagactacttacacagggcggctgc

SEQ ID NO: 454654 - DNA, 55 bp, Artificial
  Synthetic oligonucleotide
tatgccagtagagaccatccatacacgtgcggccaattatcaagtcgctaacacg

SEQ ID NO: 454655 - DNA, 60 bp, Artificial
  Synthetic oligonucleotide
tatgccataactattgtgtccggaatgcaggttgatgtggatgtgaaaagtgttactggc

SEQ ID NO: 454656 - DNA, 55 bp, Artificial
  Synthetic oligonucleotide
tatgccatcacctctaaccatcggatttgggtttctttgccccatgccaatcatc

SEQ ID NO: 454657 - DNA, 59 bp, Artificial
  Synthetic oligonucleotide
tatgccatggtacagcatgtggctaaaggcgtgcggatcttggaagcccgagtggcgcg

SEQ ID NO: 454658 - DNA, 60 bp, Artificial
  Synthetic oligonucleotide
tatgccattaaaagatggagcgaatctgtatgtttataagcgtgttaatggagcgtttgt

SEQ ID NO: 454659 - DNA, 59 bp, Artificial
  Synthetic oligonucleotide
tatgcccaaacgttcgctggaacgtccaagtatagactgatagactgtgtttcgaacag

SEQ ID NO: 454660 - DNA, 58 bp, Artificial
  Synthetic oligonucleotide
tatgcccaacagacgcggggcctacttggttgcatcgtcaccagtctcacaggccggg

SEQ ID NO: 454661 - DNA, 54 bp, Artificial
  Synthetic oligonucleotide
tatgcccagtgtcgccggtggttgtctgccggctttcatctcgacccacgcgta

SEQ ID NO: 454662 - DNA, 59 bp, Artificial
  Synthetic oligonucleotide
tatgcccatttcaatgagtaggcgtcttagaaacgcttactcagctgactcccccttag

SEQ ID NO: 454663 - DNA, 60 bp, Artificial
  Synthetic oligonucleotide
tatgccccaaggtaattcgcagcaaacgctagctggcgttactgtgagcgttggtggtgt

SEQ ID NO: 454664 - DNA, 51 bp, Artificial
  Synthetic oligonucleotide
tatgccccatgccaccaattgatcagcgtaacaatggtccagcaagagagc

SEQ ID NO: 454665 - DNA, 59 bp, Artificial
  Synthetic oligonucleotide
tatgcccccccatggcggatagatttctcagggttcgcgcgatacattccgatgccccg

SEQ ID NO: 454666 - DNA, 57 bp, Artificial
  Synthetic oligonucleotide
tatgcccctcccgttagagggaaaataacatgtaattcaagtatcacaggactacta

SEQ ID NO: 454667 - DNA, 60 bp, Artificial
  Synthetic oligonucleotide
tatgcccctgcaggagaagactttagagcaatggaagtattttcagggattataacatca

SEQ ID NO: 454668 - DNA, 60 bp, Artificial
  Synthetic oligonucleotide
tatgcccggtcccagacaggtatccctcgagctacagtggctgtaaaccaggagctcgag

SEQ ID NO: 454669 - DNA, 57 bp, Artificial
  Synthetic oligonucleotide
tatgccgagatatggacttcagcgaaacttaaccgactttagccttgcacgctatgc

SEQ ID NO: 454670 - DNA, 56 bp, Artificial
  Synthetic oligonucleotide
tatgccgcctttaatttgaactggcttcccgtacttggtattggattgccagtccc

SEQ ID NO: 454671 - DNA, 60 bp, Artificial
  Synthetic oligonucleotide
tatgccgctgattggaagactaactgtcgacttgtaagtttgtcatggaacaaagacgag

SEQ ID NO: 454672 - DNA, 60 bp, Artificial
  Synthetic oligonucleotide
tatgccggagacgacttagtgcgtgatcgagcttgcgaagaacgagccggatgggtatac

SEQ ID NO: 454673 - DNA, 52 bp, Artificial
  Synthetic oligonucleotide
tatgccgttggattccttgatgacaggtatcgaggaccgtgaggtacctgac

SEQ ID NO: 454674 - DNA, 50 bp, Artificial
  Synthetic oligonucleotide
tatgcctagtgaattatgcgatagaggctagttttgggtacaggttaagt

SEQ ID NO: 454675 - DNA, 55 bp, Artificial
  Synthetic oligonucleotide
tatgcctcaatggtcgaaaatggaaagcactttagtaagtcggtgcataggctcg

SEQ ID NO: 454676 - DNA, 60 bp, Artificial
  Synthetic oligonucleotide
tatgcctccaggtgacgacctgatactccattgaacggccacgccttagcgattacttct

SEQ ID NO: 454677 - DNA, 59 bp, Artificial
  Synthetic oligonucleotide
tatgcctcctagtgaagaccgagtgttctcacagcacaacggcgttgagtatgcgcctc

SEQ ID NO: 454678 - DNA, 53 bp, Artificial
  Synthetic oligonucleotide
tatgcctcgcatcttcacaacgtacttgggacggcgaactctccactgagcgt

SEQ ID NO: 454679 - DNA, 55 bp, Artificial
  Synthetic oligonucleotide
tatgcctctcactaatgaacatatacctggtcatcttaccctttatgtacaagcc

SEQ ID NO: 454680 - DNA, 60 bp, Artificial
  Synthetic oligonucleotide
tatgcctctccacaactcgagggattttcagctgaatcgaggaaattgcttctcattgtt

SEQ ID NO: 454681 - DNA, 55 bp, Artificial
  Synthetic oligonucleotide
tatgcctgcccgccctgtaggaggatgaccgtatgacgagtgcaaccgcgctgct

SEQ ID NO: 454682 - DNA, 54 bp, Artificial
  Synthetic oligonucleotide
tatgcctgcggcgcaactgctttgggagttccggcaggggcgcctcaaggcgtt

SEQ ID NO: 454683 - DNA, 58 bp, Artificial
  Synthetic oligonucleotide
tatgcctgctagattttatcccaatgttaccaaatacttgcccttagataaaggtatc

SEQ ID NO: 454684 - DNA, 60 bp, Artificial
  Synthetic oligonucleotide
tatgcctggaaagtatcctgtcgtgttttcgacaggtgctggagagcctactcgtgatca

SEQ ID NO: 454685 - DNA, 60 bp, Artificial
  Synthetic oligonucleotide
tatgcgaacggccagtgtgcgaccctagcgaagccttgggccgagccctcgctagctatg

SEQ ID NO: 454686 - DNA, 51 bp, Artificial
  Synthetic oligonucleotide
tatgcgaataacagccctatccaacaatatcagctgacaaataacaatggg

SEQ ID NO: 454687 - DNA, 58 bp, Artificial
  Synthetic oligonucleotide
tatgcgaatcgggatcgtcgtggattttttcagtgttttctgaatcttccttatgacc

SEQ ID NO: 454688 - DNA, 55 bp, Artificial
  Synthetic oligonucleotide
tatgcgagaaaatgctatcccttcaattgaagaacagggatactggaaaggaact

SEQ ID NO: 454689 - DNA, 59 bp, Artificial
  Synthetic oligonucleotide
tatgcgagaagatatttgggttagattgtggtccctacacccttgcggccctcagtata

SEQ ID NO: 454690 - DNA, 60 bp, Artificial
  Synthetic oligonucleotide
tatgcgagaatgaatgctaaagtaaaagcgttagtgtcaactgttggaatagagatagct

SEQ ID NO: 454691 - DNA, 60 bp, Artificial
  Synthetic oligonucleotide
tatgcgagtagatcggaatgctgatgttggagttgcccttcctagaatgagcacaacaac

SEQ ID NO: 454692 - DNA, 59 bp, Artificial
  Synthetic oligonucleotide
tatgcgatcagatgactggtataatggccacggatatatcacctgacgatgcacaaaaa

SEQ ID NO: 454693 - DNA, 60 bp, Artificial
  Synthetic oligonucleotide
tatgcgcagcaatgatcgaatcatggggttacgacaagttaacccatgaaattcgaaaat

SEQ ID NO: 454694 - DNA, 55 bp, Artificial
  Synthetic oligonucleotide
tatgcgcctggtctgcatgctgtacacaccactccgcacaaacagcccgggtgat

SEQ ID NO: 454695 - DNA, 55 bp, Artificial
  Synthetic oligonucleotide
tatgcggagggcctctagccgatgtgttggaaccggacgttctacttatgcgaga

SEQ ID NO: 454696 - DNA, 60 bp, Artificial
  Synthetic oligonucleotide
tatgcggattgcagcaaagactgggcgtacgttcataggcccagagttaagtgagaaatt

SEQ ID NO: 454697 - DNA, 57 bp, Artificial
  Synthetic oligonucleotide
tatgcggcgggtactctgaaggtgttttgtggtatcttccaataacgcatcccgtta

SEQ ID NO: 454698 - DNA, 57 bp, Artificial
  Synthetic oligonucleotide
tatgcggggtccgaagtttaggaccgtatttgattggtccgccagatctggcggcta

SEQ ID NO: 454699 - DNA, 52 bp, Artificial
  Synthetic oligonucleotide
tatgcgggtcgaacgtcaatatggctgtctccccgctgacactgtccccgaa

SEQ ID NO: 454700 - DNA, 60 bp, Artificial
  Synthetic oligonucleotide
tatgcggtacgcatgaaataagcgtattacaactttgcattcgaaatgttcagcggattg

SEQ ID NO: 454701 - DNA, 55 bp, Artificial
  Synthetic oligonucleotide
tatgcggtttgtgatggtgtgcatccgctgaaagatttcgttgagatgagggcaa

SEQ ID NO: 454702 - DNA, 56 bp, Artificial
  Synthetic oligonucleotide
tatgcgtaagctgcgcgtaaccaacgtagcagtaacgacaaaccccgctaacccaa

SEQ ID NO: 454703 - DNA, 60 bp, Artificial
  Synthetic oligonucleotide
tatgcgtcttaaataatggacatatatcatgatatatggacataattcatatacgtggtc

SEQ ID NO: 454704 - DNA, 60 bp, Artificial
  Synthetic oligonucleotide
tatgcgttagcacgctacaatatggtccttccaaagaccaaatgcatactaacgtcattg

SEQ ID NO: 454705 - DNA, 60 bp, Artificial
  Synthetic oligonucleotide
tatgcgttattagtacttcgtctcgaagttatgagtgagggccctatatgtggatatcta

SEQ ID NO: 454706 - DNA, 55 bp, Artificial
  Synthetic oligonucleotide
tatgctaaaggtggcggggcccgaccgctgcaacccagacccaaggttgcatcag

SEQ ID NO: 454707 - DNA, 51 bp, Artificial
  Synthetic oligonucleotide
tatgctaactgaccttagaacagctgacttagtataaccttgacttagttg

SEQ ID NO: 454708 - DNA, 52 bp, Artificial
  Synthetic oligonucleotide
tatgctaacttcagtaacaaataagactacgcaaaatgtgtcagtaacaact

SEQ ID NO: 454709 - DNA, 60 bp, Artificial
  Synthetic oligonucleotide
tatgctaagactggacagagtgtgatggttacatctggtacatctcggaagtctacgttt

SEQ ID NO: 454710 - DNA, 60 bp, Artificial
  Synthetic oligonucleotide
tatgctaatctggatgactgagcaaggcattattaccaaggaagtccaaagagtgcacca

SEQ ID NO: 454711 - DNA, 60 bp, Artificial
  Synthetic oligonucleotide
tatgctacatccagatctagtgattatgtttgagagtactccgagcgggtctcgaacgct

SEQ ID NO: 454712 - DNA, 60 bp, Artificial
  Synthetic oligonucleotide
tatgctacccccagtggctccatggtgtctagcgatggccaaatatttaataggccatac

SEQ ID NO: 454713 - DNA, 52 bp, Artificial
  Synthetic oligonucleotide
tatgctacccctaatggatatggtactagaacgatagatatgagttcagcca

SEQ ID NO: 454714 - DNA, 60 bp, Artificial
  Synthetic oligonucleotide
tatgctacctgtccagctgttggaggatggtcgtaccgcttattgttctgtcgctgacgg

SEQ ID NO: 454715 - DNA, 50 bp, Artificial
  Synthetic oligonucleotide
tatgctacggtggagcctggagtcttgaggagaagtggaagggtgagaca

SEQ ID NO: 454716 - DNA, 60 bp, Artificial
  Synthetic oligonucleotide
tatgctaggcttaacgggcttcggtcacaccaagctcatctccaagcgagaatttcagct

SEQ ID NO: 454717 - DNA, 60 bp, Artificial
  Synthetic oligonucleotide
tatgctagtaacgagcaagctatagtgaggcgtttttggaaggtcaacaatcatgtggtc

SEQ ID NO: 454718 - DNA, 57 bp, Artificial
  Synthetic oligonucleotide
tatgctagtttatttttatgcttcagctctgtttggaagtggcttggtcctaattct

SEQ ID NO: 454719 - DNA, 60 bp, Artificial
  Synthetic oligonucleotide
tatgctatcctcacccataccaacatccgttggtctccttccgtggtcgctcaaaatgcg

SEQ ID NO: 454720 - DNA, 54 bp, Artificial
  Synthetic oligonucleotide
tatgctatgacactgcttattatcactaatacgctattgatcatactatcgtac

SEQ ID NO: 454721 - DNA, 56 bp, Artificial
  Synthetic oligonucleotide
tatgctatttctaaaaatctcctaatggacacatctagacacaattatattcgatc

SEQ ID NO: 454722 - DNA, 56 bp, Artificial
  Synthetic oligonucleotide
tatgctcaaaaggatacatgagcgtcccccaagtgttatgtgctgttactcgaaca

SEQ ID NO: 454723 - DNA, 52 bp, Artificial
  Synthetic oligonucleotide
tatgctcaacagactcggggcatagtgggcaccatcgtcactagcctcaccg

SEQ ID NO: 454724 - DNA, 60 bp, Artificial
  Synthetic oligonucleotide
tatgctcaagcatcaggaagaatcacagtctctacccaaagatgcaaacaacttgtaatc

SEQ ID NO: 454725 - DNA, 55 bp, Artificial
  Synthetic oligonucleotide
tatgctcagactattgctactttgtttgaaacaaaaggattcccaaaaggttcga

SEQ ID NO: 454726 - DNA, 60 bp, Artificial
  Synthetic oligonucleotide
tatgctcagcagttccaacagaatggtttccaacaagcagaacaacatggtcaatccacg

SEQ ID NO: 454727 - DNA, 60 bp, Artificial
  Synthetic oligonucleotide
tatgctccaacagggcaaaaacaactgagatcgttatccgcaaagcgcctacgcaaagcc

SEQ ID NO: 454728 - DNA, 59 bp, Artificial
  Synthetic oligonucleotide
tatgctccagccagaccaactgtggaaacagtatcgggaccgcctagctttaggacgga

SEQ ID NO: 454729 - DNA, 58 bp, Artificial
  Synthetic oligonucleotide
tatgctccagttaactggggacacggtgaattgtccgattcaacattagttcaaccaa

SEQ ID NO: 454730 - DNA, 60 bp, Artificial
  Synthetic oligonucleotide
tatgctcgagggttatcgagtgccgaccgctcgcggttgtacagactgcttcgttctttg

SEQ ID NO: 454731 - DNA, 60 bp, Artificial
  Synthetic oligonucleotide
tatgctcgattacacggatttcaattctcagcatacaatccgaagcatgcgactgatatt

SEQ ID NO: 454732 - DNA, 60 bp, Artificial
  Synthetic oligonucleotide
tatgctctagtatcttaagctaagaaaggcagacaggcacttactgccttgggaaaacac

SEQ ID NO: 454733 - DNA, 51 bp, Artificial
  Synthetic oligonucleotide
tatgctctcgatacgagcacactctgataccttgccagtccatgtacggag

SEQ ID NO: 454734 - DNA, 60 bp, Artificial
  Synthetic oligonucleotide
tatgctcttctgtgactgcggtgactacgtgaagcacctgcagaacatcctgggaccaca

SEQ ID NO: 454735 - DNA, 55 bp, Artificial
  Synthetic oligonucleotide
tatgctgacagtctagatttcataacgaagatctccgaagtcgagtcttttgaag

SEQ ID NO: 454736 - DNA, 55 bp, Artificial
  Synthetic oligonucleotide
tatgctgacgtcgaatcttactttcactgtttattcggacttacttgcattcgtg

SEQ ID NO: 454737 - DNA, 55 bp, Artificial
  Synthetic oligonucleotide
tatgctgaggaaagaactggggactctgagttttaaacaaggtgagagacgggct

SEQ ID NO: 454738 - DNA, 60 bp, Artificial
  Synthetic oligonucleotide
tatgctgatcctgtcacacaatgacccaccggattcaccactgcgtcgctacgtgcgccg

SEQ ID NO: 454739 - DNA, 60 bp, Artificial
  Synthetic oligonucleotide
tatgctgatgatcctaactactttataggaattaagtttgatagcataccttatgactat

SEQ ID NO: 454740 - DNA, 50 bp, Artificial
  Synthetic oligonucleotide
tatgctgcttcgcttcccctacgaaaacaccgagcgggtgccctccatgg

SEQ ID NO: 454741 - DNA, 55 bp, Artificial
  Synthetic oligonucleotide
tatgctggactgtctaccacggggccggaacaaggaccctcgcatcacccaaggg

SEQ ID NO: 454742 - DNA, 55 bp, Artificial
  Synthetic oligonucleotide
tatgctggagctgattccatcgcagtacacgtcctctcagtacgtctcacaggat

SEQ ID NO: 454743 - DNA, 57 bp, Artificial
  Synthetic oligonucleotide
tatgctggcatcgtcaaaaggaaatgacctggacgggattggtgctcgctacaacgt

SEQ ID NO: 454744 - DNA, 56 bp, Artificial
  Synthetic oligonucleotide
tatgctggctaatgacctagaccccgacaacgtaacacgggaattctacatcggtt

SEQ ID NO: 454745 - DNA, 55 bp, Artificial
  Synthetic oligonucleotide
tatgctggctcaggcttcccacggtgatgttcctgttgacatacaaaatgtggca

SEQ ID NO: 454746 - DNA, 60 bp, Artificial
  Synthetic oligonucleotide
tatgctgggaatgaagtcggagtgttcccacgaatcctatttgcctacagatatctggag

SEQ ID NO: 454747 - DNA, 50 bp, Artificial
  Synthetic oligonucleotide
tatgctgggcatctatgacaagtgggccgttttgccacgccatgctaaac

SEQ ID NO: 454748 - DNA, 56 bp, Artificial
  Synthetic oligonucleotide
tatgctgggtgaagctaacaacatcttcgaagtggcatatggtccatgccctaaga

SEQ ID NO: 454749 - DNA, 59 bp, Artificial
  Synthetic oligonucleotide
tatgctgtaagctggggtcttattattgctggattattggttggactgatatttaaaaa

SEQ ID NO: 454750 - DNA, 52 bp, Artificial
  Synthetic oligonucleotide
tatgctgtttccgtgggcataacattcgccctacagcttggccctgaggtaa

SEQ ID NO: 454751 - DNA, 55 bp, Artificial
  Synthetic oligonucleotide
tatgcttacatggtgccaggctggcaagcggaagccatgcgatctgcccagcggc

SEQ ID NO: 454752 - DNA, 52 bp, Artificial
  Synthetic oligonucleotide
tatgcttaccaattacgagctgtctgttattaacagccgtgttagagctaag

SEQ ID NO: 454753 - DNA, 58 bp, Artificial
  Synthetic oligonucleotide
tatgcttaggagtagataggcttactgtcccggggttgatcaactaaccgctggcgcc

SEQ ID NO: 454754 - DNA, 50 bp, Artificial
  Synthetic oligonucleotide
tatgcttataccgctaggcaggtctaccccgcaggctcgcactgtgccta

SEQ ID NO: 454755 - DNA, 54 bp, Artificial
  Synthetic oligonucleotide
tatgcttcaagggatcagagaagctatggctccctatagagatttacgttatga

SEQ ID NO: 454756 - DNA, 60 bp, Artificial
  Synthetic oligonucleotide
tatgcttccgatggataaggtgataaaaggtgctttctgcggggacgatagtttgatata

SEQ ID NO: 454757 - DNA, 59 bp, Artificial
  Synthetic oligonucleotide
tatgcttctgtcgtcttcgaccaatcacgttatcgttaacggagttacgatgattgcgg

SEQ ID NO: 454758 - DNA, 60 bp, Artificial
  Synthetic oligonucleotide
tatgcttgcagcctgcaagcgcatgtgcttcagagcaactatggaggtgagcaataaggc

SEQ ID NO: 454759 - DNA, 55 bp, Artificial
  Synthetic oligonucleotide
tatgcttgctgcactaattgttgttgcttatcggcaaggttcgaatttgagaagc

SEQ ID NO: 454760 - DNA, 55 bp, Artificial
  Synthetic oligonucleotide
tatgcttgcttacgctactaactcaacatactacctcatccactacccttttccc

SEQ ID NO: 454761 - DNA, 60 bp, Artificial
  Synthetic oligonucleotide
tatgcttgtagctctggcatctcatgcaaagttagaattcatgtggatgaaccagatgaa

SEQ ID NO: 454762 - DNA, 52 bp, Artificial
  Synthetic oligonucleotide
tatgctttgtgtcgggatgcaaagacttttgcttacgtatggctagggatac

SEQ ID NO: 454763 - DNA, 60 bp, Artificial
  Synthetic oligonucleotide
tatggaaaatctggaactactatagcatccgtatattataacactatcactaaccagaat

SEQ ID NO: 454764 - DNA, 54 bp, Artificial
  Synthetic oligonucleotide
tatggaaacctgttctctaatgggaaccaagcctctgtataacgaagttgtcat

SEQ ID NO: 454765 - DNA, 54 bp, Artificial
  Synthetic oligonucleotide
tatggaaactactatgcggtctccggtcttcacggacaattcgtcccccccggc

SEQ ID NO: 454766 - DNA, 60 bp, Artificial
  Synthetic oligonucleotide
tatggaaactgctggtttcccctgatgtccagtccatccccgtgtctggtgaatggagac

SEQ ID NO: 454767 - DNA, 60 bp, Artificial
  Synthetic oligonucleotide
tatggaaagttcgcatgtggttgctgaaacgcgctatgtatcgttttggcaatcttggtg

SEQ ID NO: 454768 - DNA, 53 bp, Artificial
  Synthetic oligonucleotide
tatggaaatccccggtttcccctgatgtccagcccctccccggtccgagagaa

SEQ ID NO: 454769 - DNA, 59 bp, Artificial
  Synthetic oligonucleotide
tatggaaatgtctaggatcggaagtattacgacggaatgttgcttgatgtgtaggttgg

SEQ ID NO: 454770 - DNA, 60 bp, Artificial
  Synthetic oligonucleotide
tatggaaccagagcgttctcaactggcacctgaagaggtgccagattctttccgggtgga

SEQ ID NO: 454771 - DNA, 58 bp, Artificial
  Synthetic oligonucleotide
tatggaagcaaggcggcaaccagtcacgactactcgtcgttaggttcaatattggttc

SEQ ID NO: 454772 - DNA, 52 bp, Artificial
  Synthetic oligonucleotide
tatggaagcggaagccattgatcaggcgcctatctggtctgaccttctcaca

SEQ ID NO: 454773 - DNA, 57 bp, Artificial
  Synthetic oligonucleotide
tatggaaggtgttctcaaaaaatcaactatagtttgtgttggcgacccacttcaggc

SEQ ID NO: 454774 - DNA, 60 bp, Artificial
  Synthetic oligonucleotide
tatggaagtttgacagcagcttagcacgtcaccacaaggcccgagagctgcatccggagt

SEQ ID NO: 454775 - DNA, 53 bp, Artificial
  Synthetic oligonucleotide
tatggaatcgcaagccaggcagccacgactagcgccagtgcaccggtcaattc

SEQ ID NO: 454776 - DNA, 60 bp, Artificial
  Synthetic oligonucleotide
tatggaatgagtaaccccatccatgatgccctcaggttgcaggaacttgctgacacttgc

SEQ ID NO: 454777 - DNA, 58 bp, Artificial
  Synthetic oligonucleotide
tatggaattcactgggattccgccagttggaaaagtacggtctattgacaatgaagga

SEQ ID NO: 454778 - DNA, 55 bp, Artificial
  Synthetic oligonucleotide
tatggaattcctcaggggattctacttatctttcttaacgaacgtcaagtttcta

SEQ ID NO: 454779 - DNA, 53 bp, Artificial
  Synthetic oligonucleotide
tatggaattcttgtttggcgcgacacaaaaacgggagataagcaaataccccc

SEQ ID NO: 454780 - DNA, 57 bp, Artificial
  Synthetic oligonucleotide
tatggacaatttgaccaatctgatctacaagttatcagtgataaatcagatgtaatc

SEQ ID NO: 454781 - DNA, 57 bp, Artificial
  Synthetic oligonucleotide
tatggacacacaacttggagacaacgctattagcggaggttccaacgagggttccac

SEQ ID NO: 454782 - DNA, 60 bp, Artificial
  Synthetic oligonucleotide
tatggacacgattcttgaaatgcctaattggtgtcgaggaggactcgatattcaagaagg

SEQ ID NO: 454783 - DNA, 57 bp, Artificial
  Synthetic oligonucleotide
tatggacagaatgttaatttaggttatgctgttacttgtgttgaggaaaattgttct

SEQ ID NO: 454784 - DNA, 58 bp, Artificial
  Synthetic oligonucleotide
tatggacccattagaggagataataccagtcttaggtgaagagggagttcaattggaa

SEQ ID NO: 454785 - DNA, 56 bp, Artificial
  Synthetic oligonucleotide
tatggacgagggggtctggaggaagaacattgagaacagaggatacctgggaaaaa

SEQ ID NO: 454786 - DNA, 60 bp, Artificial
  Synthetic oligonucleotide
tatggactacttcgcagagtccataattgacaaggtgggatactgtaaaacataccctgc

SEQ ID NO: 454787 - DNA, 59 bp, Artificial
  Synthetic oligonucleotide
tatggactagaacccatagaaaatccctacgaggatcaacaagaaatctgtcttctaga

SEQ ID NO: 454788 - DNA, 55 bp, Artificial
  Synthetic oligonucleotide
tatggactatggggagcccacacagcactctacaaaagcttggcagcgcgattgg

SEQ ID NO: 454789 - DNA, 52 bp, Artificial
  Synthetic oligonucleotide
tatggactgccagtagcatgtccaaataagtatacgactgaatcgaacccac

SEQ ID NO: 454790 - DNA, 58 bp, Artificial
  Synthetic oligonucleotide
tatggactggttttgtccaaggcgttagagatggcattcggactaagtcgttgtccgc

SEQ ID NO: 454791 - DNA, 58 bp, Artificial
  Synthetic oligonucleotide
tatggacttgtagtagccagtggatacgactttgaaagagaggggtactctctggttg

SEQ ID NO: 454792 - DNA, 59 bp, Artificial
  Synthetic oligonucleotide
tatggagaatgtgaaaacgtgccatgtgtgtatcgctgccggtccgaatcatgtctcgc

SEQ ID NO: 454793 - DNA, 59 bp, Artificial
  Synthetic oligonucleotide
tatggagacgaaagagttggaattggtttcaacggcagagtcgaatatgtagacgtaca

SEQ ID NO: 454794 - DNA, 60 bp, Artificial
  Synthetic oligonucleotide
tatggagagaataaaagaactaagagatctgatgtcacagtctcgcactcgcgagatact

SEQ ID NO: 454795 - DNA, 60 bp, Artificial
  Synthetic oligonucleotide
tatggagcaaatggctgggtcaagtgaacaggcagcggaggccatggaggttgctagcca

SEQ ID NO: 454796 - DNA, 60 bp, Artificial
  Synthetic oligonucleotide
tatggagctacccagttttggggtttccgggataaatgaatctgcagacatgagcatcgg

SEQ ID NO: 454797 - DNA, 60 bp, Artificial
  Synthetic oligonucleotide
tatggagctgcccagttatggagtgtctagaatttatgaatcggccgacatgagcattgg

SEQ ID NO: 454798 - DNA, 59 bp, Artificial
  Synthetic oligonucleotide
tatggaggaccttggaagatgggcacgaaatggaacggggttgatgaagtgcaagtcat

SEQ ID NO: 454799 - DNA, 60 bp, Artificial
  Synthetic oligonucleotide
tatggaggagtgtggcatgccccagtggcttatccgtttgtaccacctagttagatcagc

SEQ ID NO: 454800 - DNA, 60 bp, Artificial
  Synthetic oligonucleotide
tatggaggccagtacgccgcacgaccttgcaggcatatcgactgtgatctctaagacaga

SEQ ID NO: 454801 - DNA, 51 bp, Artificial
  Synthetic oligonucleotide
tatggaggctaatgagtactacccagccaggtaccagacacacatgcttct

SEQ ID NO: 454802 - DNA, 60 bp, Artificial
  Synthetic oligonucleotide
tatggaggtgcgaaaccgcctcacaatcgattgcaatgagctcaccagacaccttcgcgc

SEQ ID NO: 454803 - DNA, 60 bp, Artificial
  Synthetic oligonucleotide
tatggagtgaatttgccaattacaggttcaatggatactgcatacgcaaattctacgcaa

SEQ ID NO: 454804 - DNA, 59 bp, Artificial
  Synthetic oligonucleotide
tatggagttaaagggtttggattcaggcaaggcaatgatgtgtggatgggaaggaccat

SEQ ID NO: 454805 - DNA, 60 bp, Artificial
  Synthetic oligonucleotide
tatggagttaatatacaggaattttatcgcacggttctgccagcttggatagtgaattgt

SEQ ID NO: 454806 - DNA, 57 bp, Artificial
  Synthetic oligonucleotide
tatggagttagtcctgggctggtacataaccttatcggcatgttgcagaccattgct

SEQ ID NO: 454807 - DNA, 60 bp, Artificial
  Synthetic oligonucleotide
tatggagttgagccagagaattacagtatgatcagatttgttgacccgctaactgggcac

SEQ ID NO: 454808 - DNA, 59 bp, Artificial
  Synthetic oligonucleotide
tatggagtttggccctcctatctcaatgaccaggatgccaacccagtagaccaaccaac

SEQ ID NO: 454809 - DNA, 55 bp, Artificial
  Synthetic oligonucleotide
tatggataataacgggtcacaggcaagcacaacccaaatgttacgagacgacatc

SEQ ID NO: 454810 - DNA, 60 bp, Artificial
  Synthetic oligonucleotide
tatggataataacgggtcacaggcaagcacgaccgaaatgctacgagacgctgtccaaag

SEQ ID NO: 454811 - DNA, 60 bp, Artificial
  Synthetic oligonucleotide
tatggataatccgtcatatcagcaatctccgcgtcattttgttcctactggtatgcatag

SEQ ID NO: 454812 - DNA, 60 bp, Artificial
  Synthetic oligonucleotide
tatggatatcaatgcttctagagccttagctaatgtgtatgatctgccagatgatttctt

SEQ ID NO: 454813 - DNA, 60 bp, Artificial
  Synthetic oligonucleotide
tatggatatcaccatcaaaatgagcagggatctggttacgcagcagatcagaaaagtaca

SEQ ID NO: 454814 - DNA, 60 bp, Artificial
  Synthetic oligonucleotide
tatggatcaaattcagtctccatctacagtgtttgtgtgttatctcaaagatgagctacg

SEQ ID NO: 454815 - DNA, 55 bp, Artificial
  Synthetic oligonucleotide
tatggatcattaagcgttggctatcatatcctgaaagcaaacactgtagggcagc

SEQ ID NO: 454816 - DNA, 56 bp, Artificial
  Synthetic oligonucleotide
tatggatgaagagggttgggtcaggttcggaggtgtattgagaaccgttcgagtta

SEQ ID NO: 454817 - DNA, 55 bp, Artificial
  Synthetic oligonucleotide
tatggatgaatggcaacaatataatgatgagtggtggaaatattgctagtgctgg

SEQ ID NO: 454818 - DNA, 55 bp, Artificial
  Synthetic oligonucleotide
tatggatgaccaattatctctcgagttacaacctttaggcattgcgacgtggcgc

SEQ ID NO: 454819 - DNA, 60 bp, Artificial
  Synthetic oligonucleotide
tatggatgatatggctaatggaagatatacaccaggtataataccaccagtaaatgttga

SEQ ID NO: 454820 - DNA, 51 bp, Artificial
  Synthetic oligonucleotide
tatggatgatcatccaacacctgcgcatgaagatctccgaacccgtgaccc

SEQ ID NO: 454821 - DNA, 58 bp, Artificial
  Synthetic oligonucleotide
tatggatggttgtccaacacttacgctcaaaaatttctgagcccgtaactcatgaggc

SEQ ID NO: 454822 - DNA, 60 bp, Artificial
  Synthetic oligonucleotide
tatggatgttatcagctattcgacttcaattcaccagatctagaaaagctgatcagaata

SEQ ID NO: 454823 - DNA, 56 bp, Artificial
  Synthetic oligonucleotide
tatggattagacctaccattctctacatacatcaaggatgaactgaggagtaaaga

SEQ ID NO: 454824 - DNA, 60 bp, Artificial
  Synthetic oligonucleotide
tatggatttgccacgaagtacggggcgtgatgctccaattcccatagtgcatcggcgaaa

SEQ ID NO: 454825 - DNA, 60 bp, Artificial
  Synthetic oligonucleotide
tatggatttgtagccaactttagcatggagttgcccagctttggagtgtctgggattaat

SEQ ID NO: 454826 - DNA, 58 bp, Artificial
  Synthetic oligonucleotide
tatggatttgtagccaattttagcatggaacttcccagttttggagtatctgggatta

SEQ ID NO: 454827 - DNA, 60 bp, Artificial
  Synthetic oligonucleotide
tatggatttgtccaaccataccagaccctacaggcaagctcttaatagcattaattgacc

SEQ ID NO: 454828 - DNA, 60 bp, Artificial
  Synthetic oligonucleotide
tatggcacatgacagcaatgttaagcgtaagtggtacacaccaactacagctgagtgtta

SEQ ID NO: 454829 - DNA, 55 bp, Artificial
  Synthetic oligonucleotide
tatggcactgcgtgagacctgccggttcggccatgagctagacggcgttcgcaag

SEQ ID NO: 454830 - DNA, 60 bp, Artificial
  Synthetic oligonucleotide
tatggcactggttcggaagtgtgctgcccaacttgataatagtaacactatagaccaccg

SEQ ID NO: 454831 - DNA, 57 bp, Artificial
  Synthetic oligonucleotide
tatggcacttctgttagcccaggtctcacctggatcgattgatattgggctgggaag

SEQ ID NO: 454832 - DNA, 53 bp, Artificial
  Synthetic oligonucleotide
tatggcagacagcacttcaatggaccatgatggagaacaacgaggaacaaaac

SEQ ID NO: 454833 - DNA, 60 bp, Artificial
  Synthetic oligonucleotide
tatggcagagcttggtgccttcttttcaatcttgcaggatatgaggaatacaataatggc

SEQ ID NO: 454834 - DNA, 58 bp, Artificial
  Synthetic oligonucleotide
tatggcaggcttggcccggggccaacatactgccgcggaggcgcagtaagggctaggg

SEQ ID NO: 454835 - DNA, 55 bp, Artificial
  Synthetic oligonucleotide
tatggcaggtgctcgcttgggttccaatgcgttacgtgctggtggacttaatgtt

SEQ ID NO: 454836 - DNA, 52 bp, Artificial
  Synthetic oligonucleotide
tatggcagtgggtggagtactgcaaagatgtcaccgtgctttacacggtttt

SEQ ID NO: 454837 - DNA, 55 bp, Artificial
  Synthetic oligonucleotide
tatggcagttcacgtcaatgccactacgaagaccgaccacacaccctcgtggcat

SEQ ID NO: 454838 - DNA, 59 bp, Artificial
  Synthetic oligonucleotide
tatggcataaagtaaagggtgaagtggattataatggtctgttctttacagaccataca

SEQ ID NO: 454839 - DNA, 60 bp, Artificial
  Synthetic oligonucleotide
tatggcatgcaatccagcatgtgcgtagtcgtaatgagtaattgtgggacggaaccgact

SEQ ID NO: 454840 - DNA, 59 bp, Artificial
  Synthetic oligonucleotide
tatggcatgctcaaaccctaagatagagggagtcttcacgttggttgttgttgtggacc

SEQ ID NO: 454841 - DNA, 60 bp, Artificial
  Synthetic oligonucleotide
tatggcatgtactcatgcctcaaaccctgtgtatgctacgttaaagatacggatctactt

SEQ ID NO: 454842 - DNA, 60 bp, Artificial
  Synthetic oligonucleotide
tatggcattccaacctcaatgatgccacttatcagagaacaagagcccttgtgcgtactg

SEQ ID NO: 454843 - DNA, 60 bp, Artificial
  Synthetic oligonucleotide
tatggcattgggatgacttatcattgctataacgaaatgttacgaatgctagttgccgca

SEQ ID NO: 454844 - DNA, 59 bp, Artificial
  Synthetic oligonucleotide
tatggccaaagttcgagcgtcgttagagaggatccgggacccatcagtgcaaactgcta

SEQ ID NO: 454845 - DNA, 52 bp, Artificial
  Synthetic oligonucleotide
tatggccacccttaaacttaccgggtaatgcttcaaagggtctcacggaact

SEQ ID NO: 454846 - DNA, 54 bp, Artificial
  Synthetic oligonucleotide
tatggccaccgaggcgtctaattacgcccagtaccgggtggttcgggctacaat

SEQ ID NO: 454847 - DNA, 60 bp, Artificial
  Synthetic oligonucleotide
tatggccagctcctcggctagccaactgtccgctccatctctcagggcaacttgcactac

SEQ ID NO: 454848 - DNA, 60 bp, Artificial
  Synthetic oligonucleotide
tatggccagctgtcgctccattgacacgttcgctcaggggtggggtcccatcacctactc

SEQ ID NO: 454849 - DNA, 60 bp, Artificial
  Synthetic oligonucleotide
tatggcccagcaagtctgctaatgcccaactatgctctgcacccatccatcattcccact

SEQ ID NO: 454850 - DNA, 60 bp, Artificial
  Synthetic oligonucleotide
tatggcccagcattgagcatcaatgagctgagcaatcttgcaaagggagagaaggctaat

SEQ ID NO: 454851 - DNA, 54 bp, Artificial
  Synthetic oligonucleotide
tatggccccacttgatagccgggacgacacgttactccgcgaacttttaactgg

SEQ ID NO: 454852 - DNA, 59 bp, Artificial
  Synthetic oligonucleotide
tatggcccctataccgacgaggagtccgcaagattgaggatctgccaccggagagggac

SEQ ID NO: 454853 - DNA, 60 bp, Artificial
  Synthetic oligonucleotide
tatggccgtatggccgaatccgtctgcagctattgtgtagtggccccatgtgggccgcat

SEQ ID NO: 454854 - DNA, 60 bp, Artificial
  Synthetic oligonucleotide
tatggcctcaagagagatacgtccaaatagcttacgattcaccgtccgtagtcgatggag

SEQ ID NO: 454855 - DNA, 60 bp, Artificial
  Synthetic oligonucleotide
tatggcctgggcttgggtagcccagttgatatcaaagaaccagtgcacatgtcaactgta

SEQ ID NO: 454856 - DNA, 55 bp, Artificial
  Synthetic oligonucleotide
tatggccttgtatggatttgatgtctcgttggcatatcgcggtcgcgtgcgcaca

SEQ ID NO: 454857 - DNA, 60 bp, Artificial
  Synthetic oligonucleotide
tatggccttgtggaatggcatctgtagtgtatctagaagactgtgacctcatggttgata

SEQ ID NO: 454858 - DNA, 54 bp, Artificial
  Synthetic oligonucleotide
tatggcgagaattcttggctatcccccgacgcatcagacagggggcggagatac

SEQ ID NO: 454859 - DNA, 55 bp, Artificial
  Synthetic oligonucleotide
tatggcgcagagagcataacacttacaaggggacagaatactgttaaagtctcag

SEQ ID NO: 454860 - DNA, 57 bp, Artificial
  Synthetic oligonucleotide
tatggcgctgacgaagacggcctttacgagtctattggccctctgaaggttgaccct

SEQ ID NO: 454861 - DNA, 55 bp, Artificial
  Synthetic oligonucleotide
tatggcggcgtcactggctacagtgaaaagtggacagttctcggtgtgactagct

SEQ ID NO: 454862 - DNA, 60 bp, Artificial
  Synthetic oligonucleotide
tatggcgggtatggataatttagactatccggccctccgtatgcaacagcacaggtatgg

SEQ ID NO: 454863 - DNA, 53 bp, Artificial
  Synthetic oligonucleotide
tatggcgtggctcacctacgggatgtcccgaaaggtaaccaagcggtctgtta

SEQ ID NO: 454864 - DNA, 55 bp, Artificial
  Synthetic oligonucleotide
tatggctaaattgagagaaagactaaaacagcggcaacaactgtttgactcccaa

SEQ ID NO: 454865 - DNA, 60 bp, Artificial
  Synthetic oligonucleotide
tatggctactgaggcttctaattatgcccagtatcgtgttgtccgcgccaccattcggta

SEQ ID NO: 454866 - DNA, 56 bp, Artificial
  Synthetic oligonucleotide
tatggctatgttccagggatccacatcaggaagacaagagaagaaccctgctctca

SEQ ID NO: 454867 - DNA, 60 bp, Artificial
  Synthetic oligonucleotide
tatggctattgcatgtgtgtcccacatgcaaataaaggatatgcgggcctatcgaatgac

SEQ ID NO: 454868 - DNA, 59 bp, Artificial
  Synthetic oligonucleotide
tatggctctacaacagccaatcttttaagagggcaaaatacagttcatattgtaggaaa

SEQ ID NO: 454869 - DNA, 55 bp, Artificial
  Synthetic oligonucleotide
tatggctgggcgccaaattcaggtcgcccaaatacacaggagagccatgtttcaa

SEQ ID NO: 454870 - DNA, 59 bp, Artificial
  Synthetic oligonucleotide
tatggctgttacagacattgggggcacccctatatagattatcggaagggtctgttgaa

SEQ ID NO: 454871 - DNA, 50 bp, Artificial
  Synthetic oligonucleotide
tatggcttatacatcaatcaggaacatatcctgtaataaagaggactttt

SEQ ID NO: 454872 - DNA, 55 bp, Artificial
  Synthetic oligonucleotide
tatggcttatcgataagttcgctatggctcacggattttcatcacaccatatgcg

SEQ ID NO: 454873 - DNA, 58 bp, Artificial
  Synthetic oligonucleotide
tatggcttgatcacttcaaacgtaaaaatgacgtcaatcctaatggagggggtatcca

SEQ ID NO: 454874 - DNA, 56 bp, Artificial
  Synthetic oligonucleotide
tatggcttgcatgtcagctgacctcgaggtagtgacgagcacgtgggtcctagtgg

SEQ ID NO: 454875 - DNA, 55 bp, Artificial
  Synthetic oligonucleotide
tatggctttgatcctactgaatattcctttatccgatttgttgacccaatcactg

SEQ ID NO: 454876 - DNA, 54 bp, Artificial
  Synthetic oligonucleotide
tatgggaaaccaggggtacggagttaaggggtttggattcaggcaaggcaatga

SEQ ID NO: 454877 - DNA, 55 bp, Artificial
  Synthetic oligonucleotide
tatgggaaagaatgcagaggaagctcttaaggttgatctcacaccacatatacca

SEQ ID NO: 454878 - DNA, 60 bp, Artificial
  Synthetic oligonucleotide
tatgggaacctgctgcctgtactctatgacgcagtggtcgattttcatacagctccgagt

SEQ ID NO: 454879 - DNA, 54 bp, Artificial
  Synthetic oligonucleotide
tatgggaacgtactactgttcgaccgcgtgccagcaatgcagacagtgcaccct

SEQ ID NO: 454880 - DNA, 59 bp, Artificial
  Synthetic oligonucleotide
tatgggaatcaactatgcactaatttacttatacgggtaatactggcattattatcagg

SEQ ID NO: 454881 - DNA, 54 bp, Artificial
  Synthetic oligonucleotide
tatgggaatccctggtttcccctcacgtccagcccctccccgtgtctgtggaag

SEQ ID NO: 454882 - DNA, 51 bp, Artificial
  Synthetic oligonucleotide
tatgggaatgaggggctcggttgggcaggatggctcctgtcccctcgaggt

SEQ ID NO: 454883 - DNA, 57 bp, Artificial
  Synthetic oligonucleotide
tatgggacagacaggtggggtcgatcacgaatgttactgacctttagggacaacaac

SEQ ID NO: 454884 - DNA, 55 bp, Artificial
  Synthetic oligonucleotide
tatgggacgtgtcatcagatcggtcgcagatggacaatgatgagtgggagtcgac

SEQ ID NO: 454885 - DNA, 55 bp, Artificial
  Synthetic oligonucleotide
tatgggagtggtacaccaattggatttcacagcccagcggagtcgctggcggtgg

SEQ ID NO: 454886 - DNA, 55 bp, Artificial
  Synthetic oligonucleotide
tatgggatatgtccatgatgcttgtaatgactcattatccgtcattcttttgtcg

SEQ ID NO: 454887 - DNA, 58 bp, Artificial
  Synthetic oligonucleotide
tatgggatcccgactctcaagactcggttccccagtcgcgacaggagatatcagccta

SEQ ID NO: 454888 - DNA, 58 bp, Artificial
  Synthetic oligonucleotide
tatgggatcgatggttataaccgttagttatgaacagctcgtttcgaacgcgatgaag

SEQ ID NO: 454889 - DNA, 54 bp, Artificial
  Synthetic oligonucleotide
tatgggatctagatggtcacgttgagtggcagacctggggtaacatgcgaccct

SEQ ID NO: 454890 - DNA, 59 bp, Artificial
  Synthetic oligonucleotide
tatgggcaaacgataggtttgagttagtgaggggaacgtatacttacgcaagatgcaga

SEQ ID NO: 454891 - DNA, 59 bp, Artificial
  Synthetic oligonucleotide
tatgggcaagcagggaactagaacgattcgcagttaatcccggcctattagaaacagca

SEQ ID NO: 454892 - DNA, 59 bp, Artificial
  Synthetic oligonucleotide
tatgggcaagcagggagctggaaagatttgcacttaaccctggtcttttggaaacagca

SEQ ID NO: 454893 - DNA, 60 bp, Artificial
  Synthetic oligonucleotide
tatgggcaatttcgacagctgttccgcacaatatatatactgactacgtgggtaattctc

SEQ ID NO: 454894 - DNA, 60 bp, Artificial
  Synthetic oligonucleotide
tatgggcatgttcatccgaccctattcttggtgtaggaagatgaagttctactcaaatca

SEQ ID NO: 454895 - DNA, 60 bp, Artificial
  Synthetic oligonucleotide
tatgggccaacaggcccatgtatcggaagcccaagatgtacagaatgtatcgaagcccag

SEQ ID NO: 454896 - DNA, 60 bp, Artificial
  Synthetic oligonucleotide
tatgggccagcattaagcatcaatgaattgagtagtcttgcaaaaggagagaaggccaat

SEQ ID NO: 454897 - DNA, 56 bp, Artificial
  Synthetic oligonucleotide
tatgggccattaggtgaagggacgagtgtaagagttggaaatacacccacagttat

SEQ ID NO: 454898 - DNA, 55 bp, Artificial
  Synthetic oligonucleotide
tatgggccctattagtcaatggatggttgttcaaaacgtgccacaattggagcgc

SEQ ID NO: 454899 - DNA, 58 bp, Artificial
  Synthetic oligonucleotide
tatgggcctcgtgttagaatgacccattgtaccatgcttatttacgtggaccaattaa

SEQ ID NO: 454900 - DNA, 52 bp, Artificial
  Synthetic oligonucleotide
tatgggctacacgtaatcagtccgatcttgagtgggaccttgacttgagtca

SEQ ID NO: 454901 - DNA, 60 bp, Artificial
  Synthetic oligonucleotide
tatgggcttccagtcaccacacatggagtatccacaaatatactcgggaagtgcacagtt

SEQ ID NO: 454902 - DNA, 54 bp, Artificial
  Synthetic oligonucleotide
tatgggcttcccttaatggaaaagcccttgtggaatcccactccccctcgatcc

SEQ ID NO: 454903 - DNA, 59 bp, Artificial
  Synthetic oligonucleotide
tatgggcttgaatgacggattaaacgtgttaggaaataatcttgctattcgtctgccag

SEQ ID NO: 454904 - DNA, 59 bp, Artificial
  Synthetic oligonucleotide
tatgggcttgctgtagccagtggatacgactttgagagggagggatactccctagtcgg

SEQ ID NO: 454905 - DNA, 55 bp, Artificial
  Synthetic oligonucleotide
tatggggaatctctagtagaaaatggatatatgatgtgggagctgcgcgaaaatg

SEQ ID NO: 454906 - DNA, 58 bp, Artificial
  Synthetic oligonucleotide
tatggggacacctagtggctccttagtttctacagatggacagctatttaacagacct

SEQ ID NO: 454907 - DNA, 60 bp, Artificial
  Synthetic oligonucleotide
tatggggactcaaagccccagaagttcacctcatctgccaacggagtgaccacacattac

SEQ ID NO: 454908 - DNA, 58 bp, Artificial
  Synthetic oligonucleotide
tatggggagcccataacccaggaaatagtaataatgcaaccttcaaactcatattgct

SEQ ID NO: 454909 - DNA, 52 bp, Artificial
  Synthetic oligonucleotide
tatggggagtaaagaatttacagactcgcctgaccagtttggagaattatat

SEQ ID NO: 454910 - DNA, 56 bp, Artificial
  Synthetic oligonucleotide
tatggggattgtgctcgatcggtggcaggaagacatttggtacgcggccctgggtt

SEQ ID NO: 454911 - DNA, 60 bp, Artificial
  Synthetic oligonucleotide
tatggggcaattgcgccctatccccagagtggagggaaccgagttacacgcgcattgcaa

SEQ ID NO: 454912 - DNA, 60 bp, Artificial
  Synthetic oligonucleotide
tatggggcatgtccaaacaatatgatgggcacattctcagtgcggaccgtgggaacctcg

SEQ ID NO: 454913 - DNA, 54 bp, Artificial
  Synthetic oligonucleotide
tatggggcggaagccccgtgtttccacaggttgttagaaacccctgcaaagaca

SEQ ID NO: 454914 - DNA, 58 bp, Artificial
  Synthetic oligonucleotide
tatggggtattatatatactagaaccctcaataggactttggatctcgttcacacacg

SEQ ID NO: 454915 - DNA, 57 bp, Artificial
  Synthetic oligonucleotide
tatggggtcccagtgaacgagcccacattgttttgccggttcggctatcaccttcta

SEQ ID NO: 454916 - DNA, 54 bp, Artificial
  Synthetic oligonucleotide
tatgggtagacccccatgtgatgtcatttggctggctggcccagattctccccc

SEQ ID NO: 454917 - DNA, 55 bp, Artificial
  Synthetic oligonucleotide
tatgggtattgttggtggaagagtcgccactgaacaacttgttgcggtcactgag

SEQ ID NO: 454918 - DNA, 53 bp, Artificial
  Synthetic oligonucleotide
tatgggtcatcttaggcttttggatgctaatggggtgtaacgtggtggggaac

SEQ ID NO: 454919 - DNA, 60 bp, Artificial
  Synthetic oligonucleotide
tatgggtcgtgtgggcaggcataagcgtggaacagtgttaaagattggcgagacagagaa

SEQ ID NO: 454920 - DNA, 59 bp, Artificial
  Synthetic oligonucleotide
tatgggtgacacggtacctttgacgccaggagtccacctcattatcacacgcggtgact

SEQ ID NO: 454921 - DNA, 60 bp, Artificial
  Synthetic oligonucleotide
tatgggtgcatccaatgcttccaggcaaagtggtgacaaaagcgttcaattctagagaga

SEQ ID NO: 454922 - DNA, 56 bp, Artificial
  Synthetic oligonucleotide
tatgggtgcgagggaccatgtaaagttcaatcatttgaacaacggcatgatatcag

SEQ ID NO: 454923 - DNA, 56 bp, Artificial
  Synthetic oligonucleotide
tatgggtggtcctatagggttgacaatcaatccaagtggtattccattagcaacag

SEQ ID NO: 454924 - DNA, 60 bp, Artificial
  Synthetic oligonucleotide
tatgggtgtctggactttcaggccctgcagactaacaagtcagatgttcccttggacatt

SEQ ID NO: 454925 - DNA, 55 bp, Artificial
  Synthetic oligonucleotide
tatgggtgtgaagaagtgggtggagttacaaggaactaatgtgttcggggatgcg

SEQ ID NO: 454926 - DNA, 57 bp, Artificial
  Synthetic oligonucleotide
tatgggttcattataaaaggaaggtcccatttgagaaatgatactgacgtggtgaac

SEQ ID NO: 454927 - DNA, 60 bp, Artificial
  Synthetic oligonucleotide
tatgggttcgtagccaatttcagcatggaactgcccagctttggagtgtctgggatcaat

SEQ ID NO: 454928 - DNA, 60 bp, Artificial
  Synthetic oligonucleotide
tatgggttgccagtcacaacacaaagcgtctcgaccaacatactgtcccgttgcacagtg

SEQ ID NO: 454929 - DNA, 58 bp, Artificial
  Synthetic oligonucleotide
tatgggttggctgtagccagtggatacgactttgaaagagaaggatattccctggttg

SEQ ID NO: 454930 - DNA, 60 bp, Artificial
  Synthetic oligonucleotide
tatggtaaagcttgccccaactatcttgaaagtagtaagcgctatgttggctttgcaagc

SEQ ID NO: 454931 - DNA, 56 bp, Artificial
  Synthetic oligonucleotide
tatggtaaaggttattgatggtaagcaggaacttctaataaataaagagttcatat

SEQ ID NO: 454932 - DNA, 57 bp, Artificial
  Synthetic oligonucleotide
tatggtaacatatgggtcggtgacgccttatcgtattacgttgactacaaccgtagc

SEQ ID NO: 454933 - DNA, 58 bp, Artificial
  Synthetic oligonucleotide
tatggtaactgattctgtgactaagttcatcgaatttacagttgcactgactccagat

SEQ ID NO: 454934 - DNA, 52 bp, Artificial
  Synthetic oligonucleotide
tatggtaatatagttaccaatgatatgggcactctgtgttatagaatagtaa

SEQ ID NO: 454935 - DNA, 60 bp, Artificial
  Synthetic oligonucleotide
tatggtacaaggtgacaatcaagtaatagctgtgacgagagaagtaagatcagatgactc

SEQ ID NO: 454936 - DNA, 60 bp, Artificial
  Synthetic oligonucleotide
tatggtacatggtaacactctttcatatgcagttcgcacccaagacgggatgtcgggcgc

SEQ ID NO: 454937 - DNA, 58 bp, Artificial
  Synthetic oligonucleotide
tatggtatttcatttccgatccacggctcgcatgggctagttcccttgggcttctaaa

SEQ ID NO: 454938 - DNA, 58 bp, Artificial
  Synthetic oligonucleotide
tatggtcaacccggcgtaccgtggcggcaacccagctgtagctacggctactgaccgc

SEQ ID NO: 454939 - DNA, 52 bp, Artificial
  Synthetic oligonucleotide
tatggtcacaccggcactaatccgcctcgaagcattacccgtgcggaagcac

SEQ ID NO: 454940 - DNA, 55 bp, Artificial
  Synthetic oligonucleotide
tatggtccataacaccactgttccctcggttcttgagtgaattcaaatctgggac

SEQ ID NO: 454941 - DNA, 58 bp, Artificial
  Synthetic oligonucleotide
tatggtcgagaagttcccagagggaggaatccacacggagtagaacagagaaatcacc

SEQ ID NO: 454942 - DNA, 57 bp, Artificial
  Synthetic oligonucleotide
tatggtcgggacgttatcccagtgttgccgcgcgtaacattattgttaataccatcc

SEQ ID NO: 454943 - DNA, 59 bp, Artificial
  Synthetic oligonucleotide
tatggtcgttgtagtcgatcgtaaacctcatttgaatccaactggatgcctacactctt

SEQ ID NO: 454944 - DNA, 60 bp, Artificial
  Synthetic oligonucleotide
tatggtctagtgttaaggtctccactttggttctcactgcacttgggatgtatgcatcta

SEQ ID NO: 454945 - DNA, 60 bp, Artificial
  Synthetic oligonucleotide
tatggtctcaggttataagaaagtaatggctacaattgattcatttcaatccatcaatac

SEQ ID NO: 454946 - DNA, 50 bp, Artificial
  Synthetic oligonucleotide
tatggtcttatggcgagcgttgaaccttcctgagcctacacggtgtcaga

SEQ ID NO: 454947 - DNA, 60 bp, Artificial
  Synthetic oligonucleotide
tatggtctttgagaactcaatcatgaatagcccatgagcatcagcaatggtggccccagc

SEQ ID NO: 454948 - DNA, 60 bp, Artificial
  Synthetic oligonucleotide
tatggtgaagatggattctagcattggagtgacatatttcgtgtgggagaaagagaagct

SEQ ID NO: 454949 - DNA, 60 bp, Artificial
  Synthetic oligonucleotide
tatggtgaaggatggcattaatatggatgtcacggctgttggcaggggagcaactaaggt

SEQ ID NO: 454950 - DNA, 60 bp, Artificial
  Synthetic oligonucleotide
tatggtgacaatcacagattgttatcataaagcgaattggattggccatccggtgagagt

SEQ ID NO: 454951 - DNA, 60 bp, Artificial
  Synthetic oligonucleotide
tatggtgacaattgaaagattgttaccatatagctattggattggccatccagtgaccaa

SEQ ID NO: 454952 - DNA, 60 bp, Artificial
  Synthetic oligonucleotide
tatggtgacgtcacacgtttcctttctaataatgctatggtattatatacagatgtgtct

SEQ ID NO: 454953 - DNA, 58 bp, Artificial
  Synthetic oligonucleotide
tatggtgatctttttagttctgaaaatcgtgtggactctggctacgtttattgtataa

SEQ ID NO: 454954 - DNA, 60 bp, Artificial
  Synthetic oligonucleotide
tatggtgattccattcgcacagcttgatcatgctcccagtgcgtctactcacgtcccgat

SEQ ID NO: 454955 - DNA, 53 bp, Artificial
  Synthetic oligonucleotide
tatggtgatttgtgtggaggagagacagcaaagagtttcgaacagaatgcagc

SEQ ID NO: 454956 - DNA, 60 bp, Artificial
  Synthetic oligonucleotide
tatggtgccccgagttcgataaatgtttatttatctccagcgttgctatggccagagctt

SEQ ID NO: 454957 - DNA, 53 bp, Artificial
  Synthetic oligonucleotide
tatggtgctgtggaagttaaaatgggcccagctgtactgagtaaatcggacac

SEQ ID NO: 454958 - DNA, 55 bp, Artificial
  Synthetic oligonucleotide
tatggtggaaccctgcgtctagatgttcaccccgaccgtccggtctatgtggttc

SEQ ID NO: 454959 - DNA, 60 bp, Artificial
  Synthetic oligonucleotide
tatggtggactggggcaaagaagcagttgacagtttccatctaggcgatgatatggaccc

SEQ ID NO: 454960 - DNA, 60 bp, Artificial
  Synthetic oligonucleotide
tatggtggcttcagtatttcctgaccagagtagaagcgcaactgcacgtgtgggttcccc

SEQ ID NO: 454961 - DNA, 56 bp, Artificial
  Synthetic oligonucleotide
tatggtggtccgtcattcttccggaacatggtctggttgacaaagaaagggtcgaa

SEQ ID NO: 454962 - DNA, 57 bp, Artificial
  Synthetic oligonucleotide
tatggtgtagagaccagattccgataccacatttacttccctggccatccgatcaag

SEQ ID NO: 454963 - DNA, 58 bp, Artificial
  Synthetic oligonucleotide
tatggtgttaaacagtactctaattttacattcgaaacatgggatccattggatactc

SEQ ID NO: 454964 - DNA, 60 bp, Artificial
  Synthetic oligonucleotide
tatggtgttaagagagatgccacctccagtcgaaacttctgaagacacttgtgacagttg

SEQ ID NO: 454965 - DNA, 60 bp, Artificial
  Synthetic oligonucleotide
tatggtgttgtttcatcaacgaactgagtatagaattaaagcatatccccttagggatgc

SEQ ID NO: 454966 - DNA, 54 bp, Artificial
  Synthetic oligonucleotide
tatggttaacactcactttaacagcgttttattggaatgaggggcccaaaatac

SEQ ID NO: 454967 - DNA, 60 bp, Artificial
  Synthetic oligonucleotide
tatggttaccatcaccaaaatgagcagggatcaggatatgcagcagaccgaaagagcaca

SEQ ID NO: 454968 - DNA, 60 bp, Artificial
  Synthetic oligonucleotide
tatggttatcaccatcagaatggacagggatcaggatatgcagcggaccaaaagagcaca

SEQ ID NO: 454969 - DNA, 58 bp, Artificial
  Synthetic oligonucleotide
tatggttatccgtgacaatttctcccggatgggccatcttcgaggtgtagaagacctc

SEQ ID NO: 454970 - DNA, 57 bp, Artificial
  Synthetic oligonucleotide
tatggttccatagcctcattgacagtttatccacatggtctcttgaattgcaacatt

SEQ ID NO: 454971 - DNA, 54 bp, Artificial
  Synthetic oligonucleotide
tatggttcccagtttacggagggctcaaacccaattcacccagtgacgctgcac

SEQ ID NO: 454972 - DNA, 59 bp, Artificial
  Synthetic oligonucleotide
tatggttcccagtttatggagggctcgaccccaactcacctagcgacactgcacaagaa

SEQ ID NO: 454973 - DNA, 60 bp, Artificial
  Synthetic oligonucleotide
tatggttggagggaatcttgcgttgcatatctggagagctgtcactcgttttccttgtcc

SEQ ID NO: 454974 - DNA, 55 bp, Artificial
  Synthetic oligonucleotide
tatggttggtcgctccgctattccccatagcagacctggcagatgaggctagaag

SEQ ID NO: 454975 - DNA, 59 bp, Artificial
  Synthetic oligonucleotide
tatggttggtcgttcagctataccccctagtggacctggcagatgaggctagaagtacc

SEQ ID NO: 454976 - DNA, 58 bp, Artificial
  Synthetic oligonucleotide
tatggttgtcgccaacgctatggttggttatgagaacttacctatggacgatcctaat

SEQ ID NO: 454977 - DNA, 54 bp, Artificial
  Synthetic oligonucleotide
tatggtttagcttcggggcgtcatgcttcgtacttttggctgtcatcatgggac

SEQ ID NO: 454978 - DNA, 50 bp, Artificial
  Synthetic oligonucleotide
tatgtaaactgtgtttgcggttcttatctaaaattagtgaatatagacat

SEQ ID NO: 454979 - DNA, 58 bp, Artificial
  Synthetic oligonucleotide
tatgtaaagtaatagtcaatcctcaatggtggcgttttcttcccggttctgcgatatc

SEQ ID NO: 454980 - DNA, 60 bp, Artificial
  Synthetic oligonucleotide
tatgtaagaacatatatggtcctcatttacacattttattggagagtgtgaatgaaaact

SEQ ID NO: 454981 - DNA, 57 bp, Artificial
  Synthetic oligonucleotide
tatgtaagctacagagttgcacacatggtgtgccaggggacctacaggtctaccaca

SEQ ID NO: 454982 - DNA, 60 bp, Artificial
  Synthetic oligonucleotide
tatgtaaggcagcaatgggcttgagaattagctcatctttcagttttggtggattcacct

SEQ ID NO: 454983 - DNA, 56 bp, Artificial
  Synthetic oligonucleotide
tatgtaataggtggatacagagtaggcacgaccctggagaaataaaggcatatgaa

SEQ ID NO: 454984 - DNA, 53 bp, Artificial
  Synthetic oligonucleotide
tatgtaatataaactatacgatactcaagcttgagttattaacatgcgtttag

SEQ ID NO: 454985 - DNA, 55 bp, Artificial
  Synthetic oligonucleotide
tatgtaatatcgatgatagttcgtacagtgaaagcggatggtggtttaacggaac

SEQ ID NO: 454986 - DNA, 55 bp, Artificial
  Synthetic oligonucleotide
tatgtaatgctggaattctttgcaagagtagattatagggtaggagtaggagcac

SEQ ID NO: 454987 - DNA, 60 bp, Artificial
  Synthetic oligonucleotide
tatgtaattatgaggccctaatgatctagcccacatagtcttacctgttctagaatcacc

SEQ ID NO: 454988 - DNA, 54 bp, Artificial
  Synthetic oligonucleotide
tatgtacagagatgacataccctgctctcatgagatacatggttgggtatagaa

SEQ ID NO: 454989 - DNA, 55 bp, Artificial
  Synthetic oligonucleotide
tatgtacagatttactcgactccgatttacctatataccaactaccgggtccact

SEQ ID NO: 454990 - DNA, 53 bp, Artificial
  Synthetic oligonucleotide
tatgtacaggggggtacgtcatccgtacaggggggtacgtcacaaagaggcgt

SEQ ID NO: 454991 - DNA, 53 bp, Artificial
  Synthetic oligonucleotide
tatgtacattactcctatagaaccgataaccacgtttggttcgttgggaactt

SEQ ID NO: 454992 - DNA, 55 bp, Artificial
  Synthetic oligonucleotide
tatgtaccaaagcttattgtgctgggccgggatattagcaactttacccaccaac

SEQ ID NO: 454993 - DNA, 53 bp, Artificial
  Synthetic oligonucleotide
tatgtaccagatttcttacgagattatttcgctaggaaaggggtacatacgag

SEQ ID NO: 454994 - DNA, 58 bp, Artificial
  Synthetic oligonucleotide
tatgtacgaattaaggaatttcatgagattgaagggttattcacacgtagatcgtcac

SEQ ID NO: 454995 - DNA, 60 bp, Artificial
  Synthetic oligonucleotide
tatgtacgacaacgagcccactactgctaagatccgaatggatctgagggatagaatgca

SEQ ID NO: 454996 - DNA, 56 bp, Artificial
  Synthetic oligonucleotide
tatgtacgataatgagcctagcactgctactgttaagaacgacaacagagatcgct

SEQ ID NO: 454997 - DNA, 60 bp, Artificial
  Synthetic oligonucleotide
tatgtacgcatgatgatagaagtaaacttagcaatgtattgaagtatgtgaagagtaaat

SEQ ID NO: 454998 - DNA, 52 bp, Artificial
  Synthetic oligonucleotide
tatgtacggcaacgtaaaccagaccgtggatgtttacgtgaacggagaccat

SEQ ID NO: 454999 - DNA, 57 bp, Artificial
  Synthetic oligonucleotide
tatgtacgtacaaagtacgtggctactaggcaaaacaagaacatccttgttcacgcc

SEQ ID NO: 455000 - DNA, 60 bp, Artificial
  Synthetic oligonucleotide
tatgtacgtacgtgcctgctaccttgtgcgaccagatgacaggtatactggcgacagacg

SEQ ID NO: 455001 - DNA, 56 bp, Artificial
  Synthetic oligonucleotide
tatgtactcgatcctatactcgcagaaatggatataaatcgatttctatatcttcg

SEQ ID NO: 455002 - DNA, 59 bp, Artificial
  Synthetic oligonucleotide
tatgtagagcctacaatgaggggattggctttattttggaaccactatggaatgagtta

SEQ ID NO: 455003 - DNA, 57 bp, Artificial
  Synthetic oligonucleotide
tatgtagagtgtccctgacccctgaggtcgtgagccatctgcagacgcaccaccctt

SEQ ID NO: 455004 - DNA, 55 bp, Artificial
  Synthetic oligonucleotide
tatgtagatacggtcagtaacactacgacaacgtcgggaatacaaagtgcggtag

SEQ ID NO: 455005 - DNA, 60 bp, Artificial
  Synthetic oligonucleotide
tatgtagcacaaggatacaccgtcctcgtgttgaatccatcggtagcggccacactaggc

SEQ ID NO: 455006 - DNA, 60 bp, Artificial
  Synthetic oligonucleotide
tatgtagcccttgtacttatggcatagtcctaagagttgttagtgaatggaatggggtca

SEQ ID NO: 455007 - DNA, 52 bp, Artificial
  Synthetic oligonucleotide
tatgtagcctttaggctacacccagaggaatttgggcacaagtcaggcctac

SEQ ID NO: 455008 - DNA, 60 bp, Artificial
  Synthetic oligonucleotide
tatgtagctacgtcaagctgcttgaactctgtaagtaaggatgcgtcaacgtgttcgcta

SEQ ID NO: 455009 - DNA, 51 bp, Artificial
  Synthetic oligonucleotide
tatgtagctcgttctctatctctgactcgccctctgattgacccactccta

SEQ ID NO: 455010 - DNA, 50 bp, Artificial
  Synthetic oligonucleotide
tatgtaggcaactacagggtcgtaaacagacacttggccacacgcattga

SEQ ID NO: 455011 - DNA, 60 bp, Artificial
  Synthetic oligonucleotide
tatgtagggggggtggagcatcgattgtccgcagcatgcaacttcacgcgcggggaccgc

SEQ ID NO: 455012 - DNA, 60 bp, Artificial
  Synthetic oligonucleotide
tatgtagtcacgcaccttgtcagtgctcttggcgctctgtatgttgggatggtaccgatc

SEQ ID NO: 455013 - DNA, 51 bp, Artificial
  Synthetic oligonucleotide
tatgtataccatggattagccagacacattacagattcgtggtggcagatg

SEQ ID NO: 455014 - DNA, 60 bp, Artificial
  Synthetic oligonucleotide
tatgtatacgagagctaaagccatgcattgtaggagaagtgtataatcaaagtgatagga

SEQ ID NO: 455015 - DNA, 60 bp, Artificial
  Synthetic oligonucleotide
tatgtataggttaccatgcaaataactcaaccgacactgttgacacagtactcgagaaga

SEQ ID NO: 455016 - DNA, 60 bp, Artificial
  Synthetic oligonucleotide
tatgtatatcaccctagcatctctgctaaaaaaatcatgggccctaggccaacaggaagg

SEQ ID NO: 455017 - DNA, 57 bp, Artificial
  Synthetic oligonucleotide
tatgtatatcaggcccgaacaacaatgcatcagcagtaatctggtacaatagaaggc

SEQ ID NO: 455018 - DNA, 53 bp, Artificial
  Synthetic oligonucleotide
tatgtatatcgggaccaaacaacaatgcatctgcagtagtctggtacaacaga

SEQ ID NO: 455019 - DNA, 60 bp, Artificial
  Synthetic oligonucleotide
tatgtatcatgtgacccattagggtgtagaatgtatgcgttgcatcaaggaacgaccatt

SEQ ID NO: 455020 - DNA, 60 bp, Artificial
  Synthetic oligonucleotide
tatgtatgcagtaaattccattcggacacacccaggcctagtgatccctctacaatttca

SEQ ID NO: 455021 - DNA, 60 bp, Artificial
  Synthetic oligonucleotide
tatgtatgccctcgccgcaggacttgccgagattacgccgccctacgtggtcgatgcgtg

SEQ ID NO: 455022 - DNA, 60 bp, Artificial
  Synthetic oligonucleotide
tatgtatgcttgtttgttagtggtagtttacaataaaggtgaggctggtgacgtgattga

SEQ ID NO: 455023 - DNA, 55 bp, Artificial
  Synthetic oligonucleotide
tatgtatgtctctgacactgtcacatttgttaatgtggcgactggcgcccagggg

SEQ ID NO: 455024 - DNA, 56 bp, Artificial
  Synthetic oligonucleotide
tatgtattacatgattaaatacgtatttaaacagatgagttcgtacacacatcgta

SEQ ID NO: 455025 - DNA, 60 bp, Artificial
  Synthetic oligonucleotide
tatgtattagggaagatatggatggatgagaatatcaagactaagaatcacacgaatagt

SEQ ID NO: 455026 - DNA, 60 bp, Artificial
  Synthetic oligonucleotide
tatgtattataatcgaaaaatgagagttccaatccggaggaattcatggttcaatgctga

SEQ ID NO: 455027 - DNA, 60 bp, Artificial
  Synthetic oligonucleotide
tatgtattcttgaattgttgggcattgagattgcagactactgcattcgtcaagaggatg

SEQ ID NO: 455028 - DNA, 57 bp, Artificial
  Synthetic oligonucleotide
tatgtattgacgaaccattctgtaggaaggctaggtaactcggttgggagttatcga

SEQ ID NO: 455029 - DNA, 58 bp, Artificial
  Synthetic oligonucleotide
tatgtcaaagaatttcaggactcttgggctttgctgctccattcacacaatgtggtta

SEQ ID NO: 455030 - DNA, 55 bp, Artificial
  Synthetic oligonucleotide
tatgtcaaatccgtcaataaggtgacacaaagagatatctttgcgaaagtaaggc

SEQ ID NO: 455031 - DNA, 60 bp, Artificial
  Synthetic oligonucleotide
tatgtcaacaagaagggtgcttgaaagagagcaaattccaactcttatcaagacgttaca

SEQ ID NO: 455032 - DNA, 52 bp, Artificial
  Synthetic oligonucleotide
tatgtcaaccagaaacctatttggtcaaaacgacattggcgttagacttacg

SEQ ID NO: 455033 - DNA, 60 bp, Artificial
  Synthetic oligonucleotide
tatgtcaagtatgatggagacccatggactgacagtgacgcccttgctcctagtggagta

SEQ ID NO: 455034 - DNA, 60 bp, Artificial
  Synthetic oligonucleotide
tatgtcaagtcactcagactctacaagtaagggtgtgatttcatactcgctacgtagagt

SEQ ID NO: 455035 - DNA, 55 bp, Artificial
  Synthetic oligonucleotide
tatgtcaatgcagtccccatggactcgatgcggagtcacaacaactggagtctgg

SEQ ID NO: 455036 - DNA, 60 bp, Artificial
  Synthetic oligonucleotide
tatgtcacaacttctgagatagcggttggtgcgatgtcaggtgcggggaacacaaaattg

SEQ ID NO: 455037 - DNA, 53 bp, Artificial
  Synthetic oligonucleotide
tatgtcacatctagctcctttactgcctgatgcctctaaggaagtaaagagca

SEQ ID NO: 455038 - DNA, 50 bp, Artificial
  Synthetic oligonucleotide
tatgtcacattggggtaaagacattgtaaatcatttccatcttggagatg

SEQ ID NO: 455039 - DNA, 60 bp, Artificial
  Synthetic oligonucleotide
tatgtcaggacaagttcaagaggatggacacctctcttcatctgttacaattattgaagc

SEQ ID NO: 455040 - DNA, 59 bp, Artificial
  Synthetic oligonucleotide
tatgtcaggatgggaactgaaagcatgaattttgccaaaagtccggaaattgcggctag

SEQ ID NO: 455041 - DNA, 60 bp, Artificial
  Synthetic oligonucleotide
tatgtcagtggtgcagccagtataacaggtgtttcttagatgaagaacctcatttgctaa

SEQ ID NO: 455042 - DNA, 58 bp, Artificial
  Synthetic oligonucleotide
tatgtcataaattatagtgattttccgattgtatgaagttgtttaagattccgtattc

SEQ ID NO: 455043 - DNA, 60 bp, Artificial
  Synthetic oligonucleotide
tatgtcatcatttctctggaatctgagtccaggaaagtctttgccttagacctgagtatt

SEQ ID NO: 455044 - DNA, 60 bp, Artificial
  Synthetic oligonucleotide
tatgtcatcccaaacatcatcatgacaatcagggacttttaccagcacatccagatgagc

SEQ ID NO: 455045 - DNA, 51 bp, Artificial
  Synthetic oligonucleotide
tatgtcatctacaagttgttcgctggattccaaggtgcttactctggtatg

SEQ ID NO: 455046 - DNA, 59 bp, Artificial
  Synthetic oligonucleotide
tatgtccaagccggatgcttgggttaacaggcccatgtacaggaagcccaggatttatc

SEQ ID NO: 455047 - DNA, 55 bp, Artificial
  Synthetic oligonucleotide
tatgtccagggtattggtgatagtcagagagcgaacaacgttactgtgacgaagc

SEQ ID NO: 455048 - DNA, 55 bp, Artificial
  Synthetic oligonucleotide
tatgtcccaactgcacatctagtgacatcccagatgatggttcatcaactgagtt

SEQ ID NO: 455049 - DNA, 55 bp, Artificial
  Synthetic oligonucleotide
tatgtccctggtgacagagcggcccccctcggctaccccgacttctccggacaac

SEQ ID NO: 455050 - DNA, 57 bp, Artificial
  Synthetic oligonucleotide
tatgtcctacaaatttccagctgtgcccccagaaaacctagaaggctgcagccaaca

SEQ ID NO: 455051 - DNA, 56 bp, Artificial
  Synthetic oligonucleotide
tatgtcgaagcgtcccgccgatatagtaatttcaactcccgcctccaaagtacgcc

SEQ ID NO: 455052 - DNA, 60 bp, Artificial
  Synthetic oligonucleotide
tatgtcgaatctagcagaccacgagcaagtgagaacttactctgcctactgttcgaggag

SEQ ID NO: 455053 - DNA, 60 bp, Artificial
  Synthetic oligonucleotide
tatgtcgagcgttatcaggcgacttttccgatagggactgatctgagtgagggcacctct

SEQ ID NO: 455054 - DNA, 60 bp, Artificial
  Synthetic oligonucleotide
tatgtcgaggatactaaggttgatttatggtcatataatgcagagctgttagtcgcactg

SEQ ID NO: 455055 - DNA, 60 bp, Artificial
  Synthetic oligonucleotide
tatgtcgatcgtctgtaccatctcctccggcttgaaggtctccagggacgcgtctttgaa

SEQ ID NO: 455056 - DNA, 60 bp, Artificial
  Synthetic oligonucleotide
tatgtcgatctcttctatcttggcctcgttgtttgcgaataggaaattcgctatgatatt

SEQ ID NO: 455057 - DNA, 59 bp, Artificial
  Synthetic oligonucleotide
tatgtcggaagtctacagctttgcgttacccattgtgcatcctacaaaaggtataattg

SEQ ID NO: 455058 - DNA, 57 bp, Artificial
  Synthetic oligonucleotide
tatgtcggctcgcctgcccactattgattgagtgataacccgggccgctattaggcc

SEQ ID NO: 455059 - DNA, 55 bp, Artificial
  Synthetic oligonucleotide
tatgtcgtttcatcgggttacgcgtagagtcctctttaatgcgggtacgtaatcc

SEQ ID NO: 455060 - DNA, 54 bp, Artificial
  Synthetic oligonucleotide
tatgtctatgggtctgtgtccgtaacgtgcgtgtggggttccgtgtcttggttt

SEQ ID NO: 455061 - DNA, 60 bp, Artificial
  Synthetic oligonucleotide
tatgtctatggtgctgtttcagtgacatgtgtttggggatccgtgtcttggtttgcctcc

SEQ ID NO: 455062 - DNA, 55 bp, Artificial
  Synthetic oligonucleotide
tatgtctcaaggaaagctaagggctggttttatagacatcactttgaaagcgggc

SEQ ID NO: 455063 - DNA, 58 bp, Artificial
  Synthetic oligonucleotide
tatgtctcctccgaaatccaatagtttgtacggccacggagctggcgtcacgcgttcg

SEQ ID NO: 455064 - DNA, 55 bp, Artificial
  Synthetic oligonucleotide
tatgtctcttatcctgcgaagaccagaactggaacgaataaccgcgttcgttcct

SEQ ID NO: 455065 - DNA, 57 bp, Artificial
  Synthetic oligonucleotide
tatgtctctttgtagtaaccgtgatgttacttcgtttattagttacccagctctatc
